United States Patent Application Publication US 2004/0214272 A1 - sequence listing, part 51

SEQ ID NO: 255443 - protein, 58 aa, Zea mays
  Clone ID: MRT4577_164556C.1.pep
SVNSAQRTKYLSCLFNAYPFIKSDDGQVFRSDSTRFRTYALDRLIQFHYTKSDLREHR

SEQ ID NO: 255444 - protein, 141 aa, Zea mays
  unsure (1)..(141): unsure at all Xaa locations
  Clone ID: MRT4577_164557C.1.pep
MSDSEEHHFESKADAGASKTYPQQAGTVRKNGFIVIKNRPCKVVEVSTSKTGKRGHAKCHFVAIDIFNXKKLDEIVPSSHNCDIPYANRTEYQLIEISEDGFMRLLTSDGITKDDLILSTDDTLVDLTNEWHESAKVRVGA

SEQ ID NO: 255445 - protein, 69 aa, Zea mays; identical to SEQ ID NO: 224994
  Clone ID: MRT4577_164558C.1.pep

SEQ ID NO: 255446 - protein, 61 aa, Zea mays
  Clone ID: MRT4577_164559C.1.pep
NMKHICCLKARGRTTQLPVHEATPSVIAAELSSGMFVVSSSAFSEDPLGRVMEAGCISIHI

SEQ ID NO: 255447 - protein, 77 aa, Zea mays
  Clone ID: MRT4577_16455C.1.pep
LEIREVGEVKLSSDPHYSAPELHTTSTSFLNRLWMGGESSYSFPTRFNATAQLLKYLENPPGKSLLLSPLKKRVHDA

SEQ ID NO: 255448 - protein, 106 aa, Zea mays
  unsure (1)..(106): unsure at all Xaa locations
  Clone ID: MRT4577_164560C.1.pep
MEPPRGASRAPLALILLLLLALTAALAPGRAAATGVFEVRRKFPRHHGGGAGGGKHLADLREHDARRHGRSLAAAXDLPLGGNGLPTETGLYFTQIGIGTPAKSYY

SEQ ID NO: 255449 - protein, 147 aa, Zea mays
  Clone ID: MRT4577_164561C.1.pep
MGPPRGASRATLALLLLALSAALAPARAAATGVFEVRRKFPRHDGSGKHLAGLREHDARRHGRSLAAAVDLPLGGNGLPTETGLYFTQIGIGTPAKSYYVQVDTGSDILWVNCVSCDTCPRKSGLGIELTLYDPSGSSSGTGVTCGQ

SEQ ID NO: 255450 - protein, 211 aa, Zea mays
  Clone ID: MRT4577_164562C.1.pep
RHSYGTRPTAGYYLMLTRHLDMYTGLDISPMPADMLSQIPENPAVRPLRYPVITSIRVTTADRAPQLCALHDPPLNKLLTVYLSADDTSKLESRLNRYPDGKDIRLDIQSLKLTPTGQNNCSYARSWTSRYPLHHVYQEYGPKQDLPILRIAVSDEASPRHVAFKMTTLSSLTDCLVALPRLSTIVSLNLTIAFLHTYFPEYMELISIPTW

SEQ ID NO: 255451 - protein, 57 aa, Zea mays
  unsure (1)..(57): unsure at all Xaa locations
  Clone ID: MRT4577_164563C.1.pep
MADPPSVAAIASPQPDQLGGSASAPQNSNPNSLLSPQIPPSPTXSNXSAISSPHLDP

SEQ ID NO: 255452 - protein, 48 aa, Zea mays
  unsure (1)..(48): unsure at all Xaa locations
  Clone ID: MRT4577_164564C.1.pep
VMDIGMMTMTKGRTRDANAWSELITKQGVXEYKILKDFGARVDLSQYP

SEQ ID NO: 255453 - protein, 107 aa, Zea mays
  Clone ID: MRT4577_164565C.1.pep
IYYFYVMYTTELVFSIYFVKCYFCGLVVLFIFLKKKNPPKKKFFKILFIKIPLGIKTKKIFFLFFFADPEFHIPGLYFPPCTVFFRVSKIKNPARFFTTRELENPRG

SEQ ID NO: 255454 - protein, 267 aa, Zea mays
  Clone ID: MRT4577_164566C.1.pep
YSISQSFFSSLLSIINYIHLLLLVLYIYTLARFIKQKKRVENTAGPENHQAVALRVQSDLAVFYQCTFDGYQDTLYTHAQRQFFRDCRVTGTIDFIFGNSQVVLQNCLIQPRKPMANQANIITAQGRRDKRSVGGTVLHNCTIEPHPDFKEEAGGKIRTYLARPWKEYSRTIYIQNDIGGFIDPKGWLEWNGDFGLETLFYAEVDNRGDGADMSKRAKWGGIKTVTYEEAQKEFTVETFIQGQQFIPKFGVPFIPGLLPQEQKGRTH

SEQ ID NO: 255455 - protein, 422 aa, Zea mays
  Clone ID: MRT4577_164567C.1.pep
MSKGAIIGASTVLVVAVVAAVCVVSFKGNSGKGDGDENLSMSVKSVKAFCQPADYKETCEAELSKAAGNASSPSDLAKVIFKVTSDKIHKAISESATLEELKNDPRTSGALHDCKEMLGYAIDELKSSFDKLGGFEMTNFNKAVGRPQTNVAFIGDGAEKTIITGNKNFKMNLTTKDTATMQAIGNGFFMRDIRVENTAGPENHQAVALRVQSDLAVFYQCTFDGYQDTLYTHAQRQFFRDCRVTGTIDFIFGNSQVVLQNCLIQPRKPMANQANIITAQGRRDKRSVGGTVLHNCTIEPHPDFKEEAGGKIRTYLARPWKEYSRTIYIQNDIGGFIDPKGWLEWNGDFGLETLFYAEVDNRGDGADMSKRAKWGGIKTVTYEEAQKEFTVETFIQGQQFIPKFGVPFIPGLLPQEQKGRTH

SEQ ID NO: 255456 - protein, 52 aa, Zea mays
  Clone ID: MRT4577_164568C.1.pep
KPPMDGGIILPEVPRLPYFCSKTIVRPFICVWYEMSLTLLMMEQWIDGPVLP

SEQ ID NO: 255457 - protein, 62 aa, Zea mays
  Clone ID: MRT4577_164569C.1.pep
LTLASTMRQTQRKLAQRRLTHVITTSSGHYCRLPLPYCKEAYIAARRTLGEHKMHTPNLQGR

SEQ ID NO: 255458 - protein, 97 aa, Zea mays
  Clone ID: MRT4577_16456C.1.pep
RLALVAKVVILHIQLQVWEDELHTFQSHYVPLASANHQVIRLEVTMDQNHQKTIIKSIDLILYHLLDDPVISSSSISMMGFCALMRLCSATAAAAMV

SEQ ID NO: 255459 - protein, 112 aa, Zea mays
  Clone ID: MRT4577_164570C.1.pep
GSNCSKPTLHKRRCAMLNCTIQPSDSLAKSNYDDDPTNRLAIDCSLELHCFCHANNTTTFHIGLSGYPNISNFHGNTTGTKHDCWHAPIKKIKLWSLRIHIELKLLGYQVKH

SEQ ID NO: 255460 - protein, 70 aa, Zea mays
  Clone ID: MRT4577_164572C.1.pep
AGSKVPMPIQVLKRGIWSRTVLCISQADYSTQLLKERRALLASEMQNLDLGRSQAQRHTAPPKTETPTDK

SEQ ID NO: 255461 - protein, 109 aa, Zea mays
  unsure (1)..(109): unsure at all Xaa locations
  Clone ID: MRT4577_164573C.1.pep
PRPPPTFPPXVGGVPPPPPPPFLLPPLLVGAPPPPLFVSRWLGPPPPFFSWPGPPLSCFAPSPRPCPWGPSVPCGCFRXRRPALSDYLPACCCGCAACFFGFSLPPPPG

SEQ ID NO: 255462 - protein, 120 aa, Zea mays
  Clone ID: MRT4577_164574C.1.pep
SSAPAAGAASASSWACASCSTAGVSSGPAGAAASAYEVRFVRDGFLGPSRSRGLGLGGCLLLGHGKLLGISRSSSLGLGLGLGGGRLLGHDVRRRGLHHGRFLDRHDGRGLDLGSGHWWR

SEQ ID NO: 255463 - protein, 124 aa, Zea mays
  Clone ID: MRT4577_164575C.1.pep
ARLPSSSPRHPGPFSVHLPMATTMRGWGAASAPCSLCASRHTTVAGGHDVYRRCHRAASVSARASMKINVAGRTRRRSEHAQDSTSSTTISDRQWSSEEREVKADWSTYRREWELPPVPTRGEV

SEQ ID NO: 255464 - protein, 269 aa, Zea mays
  Clone ID: MRT4577_164576C.1.pep
MASTVTAANSSHGSALRTRTASPRPVAGWSCRRTLSTPAHHHHARSSPRARVVAVRAAGTQRATWLPGLDPPPYLDGTLPGDFGFDPLRLGEEPEALKWYVQAELVHCRFAMAGVAGILFTDLLRVSGIRDLPVWFEAGAAKFDFANTTALFFVQLFLMGFAETKRYMDFKNPGSQAEEGTFIGLEAALAGQQPGYPGGPLFNPLGLAKDIENAHDEKLKEIKNGRLAMVAMLGFMVQASVTHAGPIDNLLTHLSDPFNKNIIHTFSSS

SEQ ID NO: 255465 - protein, 71 aa, Zea mays
  Clone ID: MRT4577_164578C.1.pep
GPTVNPLGLAKDIENAHDPELKEIKNGRLAMVAMLGFMVQASVTHAGPIDNLLTHLSDPFNKNIIHTFSSS

SEQ ID NO: 255466 - protein, 697 aa, Zea mays
  Clone ID: MRT4577_164579C.1.pep
YPRPPLEFFFFFFFFFFFFAGKTTTTERILYYTGRNYKIGEVHEGTATMDWMEQEQERGITITSAATTAFWNKHRINIIDTPGHVDFTLEVERALRVLDGAICLFDSVAGVEPQSETVWRQADKYGVPRICFVNKMDRLGANFFRTRDMIVANLGAKPLVIQLPIGSEDNFQGVVDLVIMKAIVWTGEELGAKFEYKDIPADLQEMAQDYRVQMLETIIELDDEVMEKYLEGTEPDEETVKKLIRKGTISASFVPVLCGSAFKNKGVQPLLDAVVDYLPSPLDLPSMKGTDPEDPEIIFERQPSDDEPFSGLAFKIMTDPFVGSLTFVRIYSGKLIAGSYVLNANKDKKERIGRLLEMHANSKEDIPVAVTGDIVALAGLKDTITGETLCDPDKPVVLERMEFPDPVIKVAIEPKTKADADKMATGLIKLAQEDPSFHFSRDEETNQTVIEGMGELHLDIIVDRLKREFKVEANVGAPQVNYRESISKVAEIQYVHKKQSGGSGQFADIIVRFEPLEAGSGYEFKSEIKGGAVPKEYVPGVMKGLEESLPNGVLAGYPVVDFRAVLVDGSYHDVDSSVLAFQIAARGAFREGMRKAGPRLLEPIMKVEVITPEEHLGDVIGDLNSRRGQVNSFGDKPGGLKVVDSFVPLAEMFQYVSTLRGMTKGRASYTMQLAKFDVVPQHIQNQISVAKTEEAAA

SEQ ID NO: 255467 - protein, 57 aa, Zea mays
  Clone ID: MRT4577_16457C.1.pep
CDEVIGYLSEEEGEHGDVLTSGAFPQNVPSISNLFSFMNGLCFIVKSKPYPTCGFLK

SEQ ID NO: 255468 - protein, 474 aa, Zea mays
  unsure (1)..(474): unsure at all Xaa locations
  Clone ID: MRT4577_164580C.1.pep
RAREQFTAPSHRALVPPHPPIPSIPSWRWRVVRALLELDLGGVEGRQPGWAVTLPLRAMGSAVAFAKLDGERYPKAAAAVGVKGFPTVLLFVNGTEHAYHGLHTKDAIVTWVRKKTGVPIIRLQSKDSAEEFLKKDMTFVIGLFKNFXGADHEEFVKAATTDNEVQFVETSDTSVAKVLFPGITSEEKFVGLVKSEPEKFEKFDGKFEEKEILRFVELNKFPLITVFTELNSGKVYSSPIKLQVFTFAEAYDFEDLESMVEEIARAFKTKIMFIYVDTAEENLAKPFLTLYGLESEKKPTVTAFDTSNGAKYLMEADINANNLREFCLSLLDGTLPPYHKSEPLPQEKGLIEKVVGRTFDSSVLESHQNVFLEVHTPWCVDCEAISKNVEKLAKHFSGSDNLKFARIDASVNEHPKLKVNNYPTLFLYLAEDKNNPIKLSKKSSVKDMAKLIKEKLQIPDVETVAAPDNVKDEL

SEQ ID NO: 255469 - protein, 144 aa, Zea mays
  unsure (1)..(144): unsure at all Xaa locations
  Clone ID: MRT4577_164583C.1.pep
KVWKKAGSPWFSIKNKVPFFFGLGKLPPFFEPIFSKLRAIPVXFKQKGFCSYTNFVPPYVAEGPKKGFLAMPSWGLALAFGFIGSPPGGPLSIFKNLRGSGGGPPVIKMVFXIWDRGIFIGDFPRFPPFKSGGWFWGDFWGMGF

SEQ ID NO: 255470 - protein, 64 aa, Zea mays
  Clone ID: MRT4577_164584C.1.pep
SVFNSVSYQSSVRLLLALFIIKSKSVDPFGMCEPCTCLCKFFLFQKAVIGMRTHILKYRYNKRP

SEQ ID NO: 255471 - protein, 65 aa, Zea mays
  Clone ID: MRT4577_164585C.1.pep
SRESIAQVCMSGCMLANLYSEYESRMIYTETTVYEGRSYSRHGAIRSERSGEWSRLHFNSHIVCS

SEQ ID NO: 255472 - protein, 131 aa, Zea mays
  unsure (1)..(131): unsure at all Xaa locations
  Clone ID: MRT4577_164586C.1.pep
IAWPASRRRGSPXGGKAPXKQLXNKAARKSAPATXGVKKPXXFRPGXXGLREIRXFQGXKXXLIRXLPFXRLVRGXGXDFKTDLSFXXSAVSGLREAXXAXLXGXXGDPHXCAIHAXXXPMPLPLARRDPR

SEQ ID NO: 255473 - protein, 202 aa, Zea mays
  Clone ID: MRT4577_164587C.1.pep
RPRAGRVSGRNGSITQIPILTMPNDDITHPIPDLTGYITEGQVFIDRALDNRGIYPPINVLPSLSRLMKSAIGEGMTRKDHGDVSNQLYAKYAIGRDAAAMKAVVGEEALSAEDKLSLEFLEKFERQFISQGQYESRSIYESLDLAWSLLRIYPKELLNRIPAKVLNEFYQRAAKESKSKGKARADTEARGQQQTEENLIDA

SEQ ID NO: 255474 - protein, 80 aa, Zea mays
  Clone ID: MRT4577_164588C.1.pep
GGGNFITKFYKLQKFYFGHGQGGSYIDSKKETLNSYKFFMGGKYMLAQGTLLNKKIKGGFTYIRRAGPPALNTINRGPKL

SEQ ID NO: 255475 - protein, 83 aa, Zea mays
  Clone ID: MRT4577_164589C.1.pep
KKCKNIVACHLQLYRKFFKRLDLILKILQNLTTMLNSIKFVATQSFIPKDHIGNFKKGKKTFKISSFFLWNSKGGLNLNHEYM

SEQ ID NO: 255476 - protein, 67 aa, Zea mays
  Clone ID: MRT4577_16458C.1.pep
LADDPVTFAEVKVKEIKNGRLAMFSMFGFFVQAIVTGKGPLENLLDHLEDPVANKAWVYATKFAPGS

SEQ ID NO: 255477 - protein, 1091 aa, Zea mays
  Clone ID: MRT4577_164590C.1.pep
MAALAGEDKDVDAFLADCTASGDAAYGAAKAVLERLHAPATRPAARRLLGAVRRRFAASRAAGEDCFRTFHFRIHDVVLDPHVQGFQQMKKLTMMEIPSIFIPEDWSFTFYEGLNRHPDSIFRDKTVAELGCGNGWISIALAEKWCPSKVYGLDINPRAVKIAWINLYLNALDDDGLPIYDGEGKTLLDRVEFYESDLLSYCRDNKIELDRIVGCIPQILNPNPEAMSKIVTENSSEEFLYALSNYCALQGFVEDQFGLGLIARAVEEGISVIKPSGIMVFNMGGRPGQGVCERLFRRRGFRITKLWQTKIMQAADTDISALVEIEKNSRHRFEFFMDLVGDQPICARTAWAYMKSGGHISHALSVYSCQLRQPNQVKKIFEFLKDGFHEVSSSLDLSFDDDSVAEEKIPFLAYLASFLKENKSNPCEPPAGCLNFRKLVAGFMKSYHHIPLTPDNVVVFPSRSVAIENALQLFSPALAIVDEHLTRHLPKQWLTSLAIEGRADCNHADGTVTVIEAPRQSDLLIELIRKLQPQVVVTGMAQFEAITSAAFENLLNVTKDVGSRLFLDISEHLELSSLPSSNGVLKYLAGKTLPSHAAILCGLVKNQVYSDLEVAFAISEDAAVYKALSQTIELLEGHTSLISQHYYGCLFHELLAFQIADRHPQQERQPAEVIPQQMIGFSDPAVSTLKATEFFVPGSAESSIIHMDLDRSFLPVPSAVNASVFESFVRQNITDSETDVRSSIQQLVKDSYGLSAAGCAEIIYGNTSVALFNKLVLCCMQEQGTLLFPLGTNGHYVSAAKFVNASTVTIPTNPSSGFRIEPKVLADTLKNVSRPWVYVCGPTINPTGFLYSDSDIRELLSVCAEYGARVVIDTSFSGLEYETDGWRQWNLAGCLSSLKRSEPSFSVVLLGELSFALTAGGHDFGFVILGDSSLAETFHSFSSLSRPHTTLKYTFKKLLGLKNQKDQHFSDLIVEQKEELKNRANQLIQTLESCGWEAAIGCGGISMLAKPTAYMGKAFKAAGFDGELDASNIREAILRATGLCINSSSWTGIPGYCRFSFALERGEFERAMGCIARFKELVLGGAQMNGA

SEQ ID NO: 255478 - protein, 48 aa, Zea mays
  unsure (1)..(48): unsure at all Xaa locations
  Clone ID: MRT4577_164591C.1.pep
ISKTNKGSTKKITCIXLPHLSPYPIHIVLLTDAVLKKKKKKKKKKKKK

SEQ ID NO: 255479 - protein, 89 aa, Zea mays
  Clone ID: MRT4577_164592C.1.pep
LQQHADGDPHGGVNIAFAAAPSAAHEFLFMAGGGEHRMVAAGAVHPSSSHGHGQFAASMQGDGAGVASSHYHRGLGAATGFQLLHDLAG

SEQ ID NO: 255480 - protein, 57 aa, Zea mays
  Clone ID: MRT4577_164593C.1.pep
FVKITWTRKRSYFEQPLPLGCNRSALQCFVMLVLVCTAILNVKTSAKLNLSSHVLHG

SEQ ID NO: 255481 - protein, 125 aa, Zea mays
  Clone ID: MRT4577_164594C.1.pep
MDQSPPEFDYLFKLLMIGDSGVGKSSLLLRFTSDSFEDLSPTIGVDFKVKMVTIGGKKLKLAIWDTAGQERFRTLTSSYYRGAQGVIMVYDVTRRETFTNLSDVWAKEVDLYVTNQDCIKIAGGN

SEQ ID NO: 255482 - protein, 197 aa, Zea mays
  Clone ID: MRT4577_164595C.1.pep
MVCIRQATIDDLLAMQACNLMCLPENYQMKYYLYHMLSWPQLLFVAEDYGGRIVGYVLAKMEEDPSEPCHGHITSLAVLRSHRKLGLATKLMSAAQAAMDQVFGAEYVSLHVRRSNRAAFNLYTSTLGYQIHDIEAKYYADGEDAFDMRKPLRQPQPKKHHHHHHHGPGGCCSHDAPTATTGSSPQSFSSPDKKANT

SEQ ID NO: 255483 - protein, 125 aa, Zea mays
  Clone ID: MRT4577_164596C.1.pep
AMVSSPNSLASSASFRIAQKPVVWNNKSILVVFGNISVEIHIISAEVLEYNAEVVRVSCSTSFASNGHCSSSGGCVRRGRWSRACWFLGSDLFLARGSCMSVRSNIRLTPCSGGGGVHGRISFSD

SEQ ID NO: 255484 - protein, 246 aa, Zea mays
  unsure (1)..(246): unsure at all Xaa locations
  Clone ID: MRT4577_164597C.1.pep
TVQLNQRVSINSSAFINGRFIQAYFMLVQQTXNSIIILKLEITRPFLLXVMKKLXFYMVWCDNINGLLLSSSTLVLLNGVLADXLFVLIIDILSHMVYMAWFEGSVXPLAFCALSDQIFSYADDIIIFLGPSANDIGLTLHILNLFGDASGVHKSNVFPIXCTKADFTNTQEQLPCELQYLIXKYLGPPLSLKKLTVSXIIDKVADCLPGXKTDLLACAGRRIFIWSVLTLMIVYLARLGPSCHGT

SEQ ID NO: 255485 - protein, 60 aa, Zea mays
  unsure (1)..(60): unsure at all Xaa locations
  Clone ID: MRT4577_164598C.1.pep
YSCRAGACSTCACKLLEGSVVQXDHSFVDXLQAXAGFALTCVEYRTSDCVIQTHMQEDSN

SEQ ID NO: 255486 - protein, 54 aa, Zea mays
  Clone ID: MRT4577_164599C.1.pep
LFFRLSYWSRQGGSQKRGEERGALMETQSESKSYWLAYMDHQSDPRTRPRNRVL

SEQ ID NO: 255487 - protein, 86 aa, Zea mays
  Clone ID: MRT4577_16459C.1.pep
YIRQKDDVFMNNTAPGVLNATKGGALVSSCFYHVLSSAIGKPRSAGTSVGWFIICVALIPAPALFGGFFIHKSLSRAFALEPNSEL

SEQ ID NO: 255488 - protein, 93 aa, Zea mays
  Clone ID: MRT4577_1645C.1.pep
MVHVNFYRNYGKTFKKPRRPYEKERLDAELKLVGEYGLRCKRELWRVQYALSRIRNAARHLLTLDEKNPRRIFEGEALLRRMNRYGLLAEGGV

SEQ ID NO: 255489 - protein, 116 aa, Zea mays
  Clone ID: MRT4577_164600C.1.pep
KLLFPFFSLVIPPSQCFIVFGAKGPFLKGVFLSLLLAPAPPRFFSEPHPPMQCPPNFPLVRGGAPFLVWVCFASKGAFFFFPFKGGVFPFSLFWQGPFLYSGAPRFFFGGCFFWGP

SEQ ID NO: 255490 - protein, 78 aa, Zea mays
  Clone ID: MRT4577_164601C.1.pep
MTAGYIVGSLVGSFAIAYLCDTFISDKKAFGGSTPKTVSEKEWWQATDTKFQAWPRTAGPPVVMNPISRQNFIVKSTE

SEQ ID NO: 255491 - protein, 40 aa, Zea mays
  Clone ID: MRT4577_164602C.1.pep
TTMSCFSAWRANLPTCSLASRCVCIAVKESRTRSDRGATL

SEQ ID NO: 255492 - protein, 98 aa, Zea mays
  Clone ID: MRT4577_164603C.1.pep
NAAAAAAASSSATASRPIPVAILSHHPPSQIRFTSGSRLFARFNPSHRISGVRAFLAPPGPGAGVSPLRAGFPPKPLETAAQPLEEAGVAHSVIFQSV

SEQ ID NO: 255493 - protein, 161 aa, Zea mays
  unsure (1)..(161): unsure at all Xaa locations
  Clone ID: MRT4577_164604C.1.pep
MPALAKPAAAAPKPKPSAAKPKKDAAGPSHPAYFEVSARASPVESSASLXRSFRFAIGADWILISILXMIKEAIAALKDRTGSSSVAIGKYIEEKHGKSLPANFKXMLSVQLRSFASKGKLVKVKASYKLSDAAKKDAPKPKPKAKPAAPKXAAAKPAKDA

SEQ ID NO: 255494 - protein, 180 aa, Zea mays
  Clone ID: MRT4577_164605C.1.pep
MPALAKPAAAAPKPKPAAAKPKAAAAGAAHPTYFEMIKEAIAALKDRTGSSSVAIAKYIEEKHGKALPANFKKMLSVQLRASAAKGKLVKVKASYKLSDAAKKDAPKPKAAAKPSKDAAKPKKKAAEKPKKTAAAGTKRKAPEKKKLVTKAKKSPAAKAKAKPKTVRSPAAKKARKVAAA

SEQ ID NO: 255495 - protein, 62 aa, Zea mays
  unsure (1)..(62): unsure at all Xaa locations
  Clone ID: MRT4577_164606C.1.pep
SVVSVGAKTSFFFMVFSLYLCVPCRGQGGVWANPCXSQXYFSCTFVLFSLLAVFRRVYNCLR

SEQ ID NO: 255496 - protein, 69 aa, Zea mays
  Clone ID: MRT4577_164607C.1.pep
MSKTKVIRSAHIDTKVRAGRTIPRRIYMFTDPGSPGRKHVARASHEPKAEITTSEGKHIHEIPVSRNAS

SEQ ID NO: 255497 - protein, 67 aa, Zea mays
  Clone ID: MRT4577_164608C.1.pep
VVNSHNYRWSTVTIVERRGKPKKQSKLAGYLDKQMDVDQTRRKFAYAFQALHYILVVCVRCVCHSQY

SEQ ID NO: 255498 - protein, 214 aa, Zea mays
  unsure (1)..(214): unsure at all Xaa locations
  Clone ID: MRT4577_164609C.1.pep
MAAPVQTTATTPQVPAAAVVTSVFQPGKLAVEVITVDHDAQPTPPIPILIAAPKDAGTYPVAMLLHGFFLQNRYYEQLLKHVASFGFIMVAPQFHTSLISNSDNNDIAAAAKATDWLPEGLPSVLPTGVEADLSKLVLAGHSRGGHTAFSLALGYAKISSSLSFSALIGLDPVAGTGKNSQLPPAILTYAPSSFDIAMPVLVIXTGLGDEKENV

SEQ ID NO: 255499 - protein, 151 aa, Zea mays
  unsure (1)..(151): unsure at all Xaa locations
  Clone ID: MRT4577_16460C.1.pep
MGITNMKGVALLVALTAVFSSCCSAASSRYAFPAVEGPAPAPTLYAEAPLGGHPGSKHGEHHRRGRLAPVEPPSYHSSPPSHKHXPPWPSSPPPXHEGPSPAQHPPPPPPYHAPPPHFPSPPPHRAPPPHFASPPPAHHAPPPPAHYADSN

SEQ ID NO: 255500 - protein, 81 aa, Zea mays
  Clone ID: MRT4577_164610C.1.pep
NNHEPTDTILTNLGIHKTVQATNVQTCGDDRSKEVGPDRQLQNSRYIKLWWYLQAAIIPCSSTSTVLLFILYNTKRMDRNS

SEQ ID NO: 255501 - protein, 90 aa, Zea mays
  unsure (1)..(90): unsure at all Xaa locations
  Clone ID: MRT4577_164611C.1.pep
MGLPNQGXVDYPSFKLVIVGDGGTGKTTFVKRHLTGKXEKKYEPTIGVXEGHPXDFTTELGGRIRXFYCVGIPGAKESVGWALGWDTYTP

SEQ ID NO: 255502 - protein, 43 aa, Zea mays
  Clone ID: MRT4577_164612C.1.pep
PPKLLNTMFFFHLLITFPTPNIIFFKKYILMSDSSQVPYLPLE

SEQ ID NO: 255503 - protein, 248 aa, Zea mays
  unsure (1)..(248): unsure at all Xaa locations
  Clone ID: MRT4577_164613C.1.pep
PEVPTAEVVPEDEDGIRRIGIVYTRKNGKRSKVSPLLLPQEPQAPCDLAAAIPCSSSREFASRTGFLDAHFSALVDGVSTHSGVQTLVVLVDTSCSGSSHRLLGFLLPVLWWMRHSRQRGKFQNLATFILSAGVAVAFASHGVHFVKLQSASALLHRPLAHCGWCALHGSTKSEPLLSVDFSALPSYFWSLHYAVALDSMYLPPMIRHSWLLVGGSEEIYPHTPLYXDSGAQSXGFATTNMDSNEPCR

SEQ ID NO: 255504 - protein, 125 aa, Zea mays
  Clone ID: MRT4577_164614C.1.pep
MESSNPNQNPNPNPSTFFFSPSPSTDRNLPSQNKLPQEFLARYSPDFQYVEALLSTHSPDSQYIEKIFQQGSPHKQLSPPKGLDPQYDQPDKPYNNEYYSPEYDENAPFTTEFPRATDYLSFQSL

SEQ ID NO: 255505 - protein, 95 aa, Zea mays
  Clone ID: MRT4577_164615C.1.pep
CFRLHYFFPSQDHPFSFFSNILPPLSLPLTFPSYSPPYRTSLLNSRIDSYTPWLENGSPHLGPALLGVRIIHTSVRTLFLWLIVSNHITGKFFFF

SEQ ID NO: 255506 - protein, 63 aa, Zea mays
  Clone ID: MRT4577_164616C.1.pep
EERLYGGGDNGGTADLINECLKPTDDPYGGENKPTVGENGSTQIRRGDIDRSKSDMIPYAWLA

SEQ ID NO: 255507 - protein, 60 aa, Zea mays
  unsure (1)..(60): unsure at all Xaa locations
  Clone ID: MRT4577_164617C.1.pep
LIMFNRVSCTNAYSMAPGAKEAFPSNDSYYVXEVSPSLWSSKLKKDVLFTCPQFSCMHCI

SEQ ID NO: 255508 - protein, 352 aa, Zea mays
  unsure (1)..(352): unsure at all Xaa locations
  Clone ID: MRT4577_164618C.1.pep
MSSSTSGTREMSSPNSTATSIGQVQKVPGFAKLQGENFVYFMQTYSMXLGRTSRRYTADFDLSKYECGSQCDSRCHACIFYDFELRHFAIEVLVRNGCTIRGVSYIPGSVPGKKKKIKLNSQDLIEIAGIKFYFLLPSRSIFATLAARXYYVASTISILXHPNYPGNPSANDCGRSNGENGVKISNDMQGKLVKQKRSFSGELDISYSYGTKKNVDRVGTLDGCVNKLHIQIADKDTDNQQILLEEEKDVTTCLTTLISELSGPKEWVPMERLLSEIFKRFGKKWLRDRVSKYLPQKGMSGSSTKVDHRPWCSLWELLRKHPEHFVMTTLTRGEETLDYVGLVHLVSVENEP

SEQ ID NO: 255509 - protein, 63 aa, Zea mays
  Clone ID: MRT4577_164619C.1.pep
GYLEAGREIPSSQQLLSISSTVPPANAFPPLSYSAFFLPPLGSSTKTLGSSLPLSSGSSISSN

SEQ ID NO: 255510 - protein, 248 aa, Zea mays
  Clone ID: MRT4577_16461C.1.pep
MSASSKRFLPIVVVAAMVAAASGAVEFAYNGFGGAGLSLDGTATVTPAGLLQLTNDTNMSKGHAFHPDPVKFHRPMLSSFSTTFVFAIVSEFLDLSTSGFAFLVAPTTDLSTAMPQQYLGMFNGTDNGDARNHVFAVELDTVRNPEFADINNNHVGVDVNSLNSTVAAPAGYFDDGGGGAFHNLSLISREPMQVWVDYDAATTEVTVAMAPARQPRPRRPLISTRNINLSTVITDTAYVGFSSRPASC

SEQ ID NO: 255511 - protein, 129 aa, Zea mays
  Clone ID: MRT4577_164620C.1.pep
DAWANPDLGSSKFRKNFEARAFCFLPLPINTSIPVHVNAYFELSSNRRDIWIGNDMAGGGRVRSEWNLALLEDVVAPAYGHLLAAVAEELGPSDLFLSFWPSAASVEPWSSMVRKLYVSIAKLGIHVLY

SEQ ID NO: 255512 - protein, 28 aa, Zea mays
  Clone ID: MRT4577_164621C.1.pep
TLSGVMCVYYGNDDRHNHVSMLMFLMLC

SEQ ID NO: 255513 - protein, 106 aa, Zea mays
  Clone ID: MRT4577_164622C.1.pep
EFQAYDPRVRLERMHLPILRLFHLLYMASEQLSHRDKFQHYNGHIPEHDQSQIWLTDSCHSYCKGGLNIQPFQILLWHYLLLLLFRFRLLTSRFKQIWSARSFNIL

SEQ ID NO: 255514 - protein, 139 aa, Zea mays
  Clone ID: MRT4577_164623C.1.pep
GEKKTLPGFGFTTHPPTILMHIWGVQHTYMGEINRGNPKKRLADDNYYWGIGSYWSNPWGPQSAHHAWEPLMDRTHAVFYFHPPWSMVDHQGFLGRPIKHWWGRGRTASREAVGGPTSSPLLGLRMPPPPAGRGPLRSP

SEQ ID NO: 255515 - protein, 76 aa, Zea mays
  Clone ID: MRT4577_164624C.1.pep
ILVPTIYHNSFELGLEDTYMIIHVDLDSKFGGYILWEFLEIPDAVHTGDESFLTEFFSVASDEGVPASNLSLLTLR

SEQ ID NO: 255516 - protein, 57 aa, Zea mays
  Clone ID: MRT4577_164625C.1.pep
SNPINMERAPVVPSQRERKRGKKEKIAIPQNKAKRARPGDQNLGNLKTPPPSRVEIG

SEQ ID NO: 255517 - protein, 65 aa, Zea mays
  unsure (1)..(65): unsure at all Xaa locations
  Clone ID: MRT4577_164626C.1.pep
WASLRCFAIAIRSXAWISLLLALAVALSARAEEEPAAAAEGEAVLTLXDGDSFYIAAAYDPFMIM

SEQ ID NO: 255518 - protein, 101 aa, Zea mays
  unsure (1)..(101): unsure at all Xaa locations
  Clone ID: MRT4577_164627C.1.pep
SSRAQGGMRYTITGNKNFNRGAITNVGGAGDIYVETHYGRQGVKWTAMNNSXRQVWRTCDDLHTEXIPFRVRTSDHRGDTXWHDLPAVWKIRVTFQAYKNL

SEQ ID NO: 255519 - protein, 93 aa, Zea mays
  Clone ID: MRT4577_164628C.1.pep
RPGTRPARRRRTAPTTTLPAAFSPISTTPIIDGEGEPPPSWDPAPTPKVLHSGETGEVKVRRLLEGHAKNYQVTLLFIFPVLLGSKVLEKNCI

SEQ ID NO: 255520 - protein, 55 aa, Zea mays
  Clone ID: MRT4577_164629C.1.pep
ASKAIVLYKLCQSIICRRSYLFLSGNVGGINGRVCILPVNVRCFRKNSILASIVP

SEQ ID NO: 255521 - protein, 47 aa, Zea mays
  Clone ID: MRT4577_16462C.1.pep
TTIMIGINGFGRIGRLVARVELNSEDVELIAVKEPIIITAYMIYMSE

SEQ ID NO: 255522 - protein, 128 aa, Zea mays
  Clone ID: MRT4577_164630C.1.pep
RYFARGPGKIIDRRVGSHFVGQRHHLELSQSILPLLVMPRLIFNDFTVGALNMELNPEDRSNISLSVFAFRCSVPRRSRANRHTMWQHIFCQIIVLCNLGQRQPMGVSCMEVCTSSRKFHRVIVSPVS

SEQ ID NO: 255523 - protein, 132 aa, Zea mays
  Clone ID: MRT4577_164631C.1.pep
KILSPQLEPLPGAQRMLVAGLQHTSTQAEDALSQGMQKLQQSLSEILTAEADPFGAPDAYMLQMATAVEKLKELVIFVTQADHLRLMTLQQMHKILTTRQAARGLLALGDYFQRLRTLSSLWSARPREAAIS

SEQ ID NO: 255524 - protein, 75 aa, Zea mays
  Clone ID: MRT4577_164632C.1.pep
HGAKLPSIDLTTMATKIGSGLALIALWVSATEAFMNRHGSRVRSADPPGRGPLHPQAAVLQQAPALRSLPTSWPP

SEQ ID NO: 255525 - protein, 183 aa, Zea mays
  Clone ID: MRT4577_164633C.1.pep
FKLGKKKKKKMFKIKAAAANADVFYVMSGLWKTPAERFFLWIGGFRPSEVLKILSPQLEPLAEAQRMLVGGLQHTSAQAEDALSQGMEKLQQNLAETLTAEADPFGPPDPYMLQMATAVGILKELVNFVTQADHLRLTTLQQMHKILTPRQAARGLLALGDYFQRLRTLSSMWAARPREAAVS

SEQ ID NO: 255526 - protein, 70 aa, Zea mays
  unsure (1)..(70): unsure at all Xaa locations
  Clone ID: MRT4577_164634C.1.pep
CXPPRYVQFFNVFAXPNPTXPPHTSRSFPYTYNYYHHKNIFLLFLLKITIFPFFIPHHIILSLIFLTIHP

SEQ ID NO: 255527 - protein, 33 aa, Zea mays
  Clone ID: MRT4577_164635C.1.pep
LRLKTTYMGLQELSVTCLTIRGHNFFYTLQTLI

SEQ ID NO: 255528 - protein, 145 aa, Zea mays
  unsure (1)..(145): unsure at all Xaa locations
  Clone ID: MRT4577_164636C.1.pep
AKLNFADNAVFRQKEIFALRDTTQEDPMEVADAKADLNYIGLDGEIGCMVNGAGLAMATMDIIKLHGGTLANCLDIRGSASEGHVVQTLKILTSDDRVNAILVNIFGGIMKCYVIASGIDNAXQHVDLKVPEVVRLEGTYLYQGK

SEQ ID NO: 255529 - protein, 86 aa, Zea mays
  unsure (1)..(86): unsure at all Xaa locations
  Clone ID: MRT4577_164637C.1.pep
ERPWRIIIGKSRTTAPHRHRTGRSVDQLSGRLVRVGHLQDVRDPVAVNDGEEEVNDHLSHLLAVELAQGHGEGDGVCVGRLXVVHG

SEQ ID NO: 255530 - protein, 106 aa, Zea mays
  Clone ID: MRT4577_164638C.1.pep
PKTFHPSNIDSDHDESAAGGDFDFPITRTSDESPANRVTLLINMMWIGTHLPSRRTCMDILMMKTSLTIPEETSIMESTWVRCCHRSIPQMKSIHPDLHTPDRRRI

SEQ ID NO: 255531 - protein, 114 aa, Zea mays
  Clone ID: MRT4577_164639C.1.pep
MARRHVLRAPLSGGGRHGLGPRSRSHDFAEAADTIPRGEQTWRSAVAAHDPGSWPPGCRSRPAAPVGTWPLAGRTESAKGRIGSGGGPGATADIGDRWATSATGQERARREGPR

SEQ ID NO: 255532 - protein, 100 aa, Zea mays
  Clone ID: MRT4577_16463C.1.pep
NLKLSRVQIKTHTRIHNHDALTPDPVSPLRPATIAKISSQHTSNFPTQPPPSVLPNQDDLNPSILLPSSSSVFQPTTATISAQDFPVFTTDPLSQHGPPS

SEQ ID NO: 255533 - protein, 58 aa, Zea mays
  Clone ID: MRT4577_164640C.1.pep
SGWREEQSGSDTAHETLSEIFYPNSDEGQIPHAAMNQRSAYSNCRNIHQDAAGRESAT

SEQ ID NO: 255534 - protein, 122 aa, Zea mays
  Clone ID: MRT4577_164641C.1.pep
SRVRPRVRGDLRNCFLYCSLFPEDYPMSREALVRLWVAEGFVLSKEKNTPEEVAEGNLMELIHRNMLEVVDYDELGRVSTCKMHDIMRDLALCVAKEEKFGSANDYGELIQVDQKVRRLSLC

SEQ ID NO: 255535 - protein, 79 aa, Zea mays
  Clone ID: MRT4577_164642C.1.pep
LQWNQRNRPILQWGPKGGHFSASIRDLRTWPGVQDHRTPFYESLLAPHGTGPLLGALPASPGKAGATRLGRICQHFSSS

SEQ ID NO: 255536 - protein, 50 aa, Zea mays
  Clone ID: MRT4577_164643C.1.pep
GPTNTSATFLGLGVQYIMLGVGRDFDYITIHITMNHMIIYNLINSNISVI

SEQ ID NO: 255537 - protein, 127 aa, Zea mays
  unsure (1)..(127): unsure at all Xaa locations
  Clone ID: MRT4577_164644C.1.pep
LGVSHRGVNRDVLIKVQGQXYLAQGGPARDYFPYFLSPNGVXWRIEKXRRNLNHAPGDAFXLEMTKPSRYGPDSRPIPKTNQGPIHDSKTPRLXNLAWHNLXTNTRWGNPHYRTISYDRTGRSALNT

SEQ ID NO: 255538 - protein, 65 aa, Zea mays
  Clone ID: MRT4577_164645C.1.pep
MGGLTMDQAFVQAPEHRPKPIVTEATGIPFIDLSSLAASGGAVDALAVDVGSASRDWGFFVGVGH

SEQ ID NO: 255539 - protein, 47 aa, Zea mays
  Clone ID: MRT4577_164646C.1.pep
IITSQYICLLTRALLQPQSTWLWKRCLTLRQAQAYIHFRQLGFNGEA

SEQ ID NO: 255540 - protein, 93 aa, Zea mays
  Clone ID: MRT4577_164647C.1.pep
MASPYIEAHSHVSYSQDRYIFHAKRTDEITALCMYYNTAGILLPFEFLLYLHGKYVKTYGRDDLTALAYAMNDEYSSCLRHTMCYYSIDPSAY

SEQ ID NO: 255541 - protein, 147 aa, Zea mays
  Clone ID: MRT4577_164648C.1.pep
NLKWLFLLDQTTSLLNLVKANLEGNVFILVKFPKGLKVGFKPLKLVLFFRKAPENGGNLVHTVGHCFLRIQGLNPEQEGKPGPVCFANNGAKPCQRCQSPMGRGGGFNGGNPQPGPELGNTTFNPRNPLPETGKEKKLGIGEPLGSR

SEQ ID NO: 255542 - protein, 223 aa, Zea mays
  Clone ID: MRT4577_164649C.1.pep
MAAAAARRLLSRRASSSSLSALLRRGAVPEQSLVLRPAVVAAASRLGFQRGMARRPGGDGYVSTRSGAGGDRAPMATEMAPLFPGCDYEHWLIVMDKPGGEGASKQQMIDCYIQTLAKVLGSEEEAKKKIYNVSCERYFGFGCEIDEETSNKLEGLPGVLFVLPDSYVDAEYKDYGAELFVNGEIVQRTPERQRRVEPVPQRAADRPRYNDRTRYARRRENQR

SEQ ID NO: 255543 - protein, 67 aa, Zea mays
  unsure (1)..(67): unsure at all Xaa locations
  Clone ID: MRT4577_16464C.1.pep
FPSLPTLPPTLPTTLPFMPLPPLPPLASFPPLNPLPPLPKLPPNHFFHHPKWFPLPPXFLSSLLFIY

SEQ ID NO: 255544 - protein, 97 aa, Zea mays
  unsure (1)..(97): unsure at all Xaa locations
  Clone ID: MRT4577_164650C.1.pep
SLYATKKRGRLHVITLTGAXGRRLSRGLGSALRSRDTDARRASPGALVLAGEGKFFTNGYDLSWARAGPAPAPEHRLSTMRAAFRGLVADLLALPVP

SEQ ID NO: 255545 - protein, 107 aa, Zea mays
  Clone ID: MRT4577_164651C.1.pep
GAPPLWGPPGWFRGPPGFPPPPAPSRTSGGRSGDTWAPAPRTPPPGGRGAPPGVLFFPPPSVGPLTLGHPPGGGGGFSSPSLGGGDFAPIIPRRGGQAIFGPLACFF

SEQ ID NO: 255546 - protein, 188 aa, Zea mays
  Clone ID: MRT4577_164652C.1.pep
RLLSRRASSNSLSAFLRRGAAPGQSLLRPAVVAAASRLGFPRGMARRPGGDDYEHWLIVMDKPGGEGATKQQMIDCYIQTLAKVLGSEEEAKKKIYNVSCERYFGFGCEIDEETSNKLEGLPGVLFVLPDSYVDPEYKDYGAELLVNGEIVQRPPERQRRVEPVPQRAADRPRYNDRTRYARRRENQR

SEQ ID NO: 255547 - protein, 69 aa, Zea mays
  Clone ID: MRT4577_164653C.1.pep
VNHLASGRARYTQAACPRGLPDSKRPVGPQVLMLESGLVRAPADYCDVRSLRYGSRVEYVSRLTISYGV

SEQ ID NO: 255548 - protein, 217 aa, Zea mays
  Clone ID: MRT4577_164654C.1.pep
MAAAAAAARRLLSRRASSNSLSAFLRRGAAPEQSLLRPAVVAAASRLGFPRGMARRPGGDGYGAGRDRAPTEMAPLFPGCDYEHWLIVMDKPGGEGATKQQMIDCYIQTLAKVLGSEEEAKKKIYNVSCERYFGFGCEIDEETSNKLEGLPGVLFVLPDSYVDPEYKDYGAELLVNGEIVQRPPERQRRVEPVPQRAADRPRYNDRTRYARRRENQR

SEQ ID NO: 255549 - protein, 45 aa, Zea mays
  Clone ID: MRT4577_164655C.1.pep
SRVRDPGGHYKEPYLAIFGGLQIQSGSSYNITTVRPYSARGSMRM

SEQ ID NO: 255550 - protein, 56 aa, Zea mays
  Clone ID: MRT4577_164656C.1.pep
SASSTPHLFFIYTPPPNPTESSLPPLSLPLLHLSTPETHLTFPPLRSSPTTPVENS

SEQ ID NO: 255551 - protein, 62 aa, Zea mays
  Clone ID: MRT4577_164657C.1.pep
SKLNRNGFSFPQSPPTHATKQSRFQQFGLMYCHKLIICNIQGLSANVLACGWRRGWGRHGIF

SEQ ID NO: 255552 - protein, 121 aa, Zea mays
  Clone ID: MRT4577_164658C.1.pep
IAGATPGVRSISELCLDLSAASDSALHMPCPCAGLQGLYSAGARLTTMMGAGGLYLYAECLRQPQCSPLAASPYYAGCGQTSAMYQSLPQQCWQQQMKMMVAQTVAHDLQKMMPIERAAAD

SEQ ID NO: 255553 - protein, 105 aa, Zea mays
  Clone ID: MRT4577_164659C.1.pep
PRFCCHTGGRVGGGAFIRHPGPRLLPSRAARGTKTSPRSYREVLDKGTKPIGHAGLIHELHLPKSTGFSYQRPISGNRHAFTQPSSRNETGRRHASSPYVRSGVR

SEQ ID NO: 255554 - protein, 79 aa, Zea mays
  Clone ID: MRT4577_16465C.1.pep
ALVSLRGWSQKAIRFVGRLQARIVLCSILNVVSTYQGRCFGYVCPHTMFNGYKATYVYVTSVYWKRSFPRSPFCTRPRK

SEQ ID NO: 255555 - protein, 105 aa, Zea mays
  unsure (1)..(105): unsure at all Xaa locations
  Clone ID: MRT4577_164660C.1.pep
KEHPPVPRFHDAPAVPDDTDIQYTPPQPRATRSQAQPLKSSLRTNETRQIRKGQKKLKKSPKRVSQDVELDDNGFPIIDXAALDRXDPPHLAVDVESYGGPAASG

SEQ ID NO: 255556 - protein, 116 aa, Zea mays
  Clone ID: MRT4577_164661C.1.pep
GLGPGGCTGPILGWEKFNPPVLGAPPNPTFLLGSGHTMFLGQSPSSPGKNGIGGVPLFFGPPGDPGPPHFFPLGPSPPKDDYFFKTPLAPGVFSPLLLTPFFLLGLQVAHVPPLGL

SEQ ID NO: 255557 - protein, 99 aa, Zea mays
  unsure (1)..(99): unsure at all Xaa locations
  Clone ID: MRT4577_164662C.1.pep
MGGDHGGGHAGGDFRQKVWSMTGGPYCRPVHWRRNTAIAMFGVFLICIPIAMKSAELEXRAWPFFSGWSHVAKRQQRPHHPVRPIPSQLWCKNFGKKEY

SEQ ID NO: 255558 - protein, 74 aa, Zea mays
  Clone ID: MRT4577_164663C.1.pep
RRKRVGVPKRGSHELCGSQPGVENLGLVDALLISRGFGAELYRTARTVNDIFSVASLSPSGDIDNLSRPASRYP

SEQ ID NO: 255559 - protein, 77 aa, Zea mays
  Clone ID: MRT4577_164664C.1.pep
VSRRILVSPSSSPGGQLANSALRQTAWKWPPYLSLRTSIARVSSIDWCNRFCFLLAPLPTSCARRQKSVVGPAITAR

SEQ ID NO: 255560 - protein, 87 aa, Zea mays
  Clone ID: MRT4577_164665C.1.pep
QPSCGPLPFFSTYSQSHFFQFKPPLPFFLVGQKKGFFKPVLPRDLAPYVRCFKPPLLGLKRKLAPTKKKTQKNIIQKNQYTHHQNKG

SEQ ID NO: 255561 - protein, 56 aa, Zea mays
  Clone ID: MRT4577_164666C.1.pep
ITTILGHATYIDSCLTFKPQNGTGFLFLLIKPYIKNLQLDRAKTKTATHIKQSFSK

SEQ ID NO: 255562 - protein, 86 aa, Zea mays
  Clone ID: MRT4577_164667C.1.pep
FVMTTDQVAFTEPSSSMTLMKLKLERGWGSKEEDDGSCKQGAAMPAEEEEANKRYICFQKARSWNSIQTHVTSNMIWTFQRTRRWT

SEQ ID NO: 255563 - protein, 73 aa, Zea mays
  Clone ID: MRT4577_164668C.1.pep
TWHKHTTHQRRKKNINHAKCLCKQIAVRILNTSMLQILLETKTRGYGCSMFSVAKGKNSFSSDVAMALRTLGH

SEQ ID NO: 255564 - protein, 72 aa, Zea mays
  Clone ID: MRT4577_164669C.1.pep
PRVRPLVRATSTEFTHTLQGDLHNCDMMCFYRQSLFTHSSIILPSRYLDDFYNSAFSDRKFKLFFIGHAHLH

SEQ ID NO: 255565 - protein, 62 aa, Zea mays
  Clone ID: MRT4577_16466C.1.pep
YTLLIQLLIIVLTISGTNTWDRFEMRIHKRVIDLVSTPDVVKQITSITIEPGVEVEVTISDA

SEQ ID NO: 255566 - protein, 86 aa, Zea mays
  Clone ID: MRT4577_164670C.1.pep
SHRSPTLFFLKVSAAPLGGDRPHIRFSFQNDLPFLLKQTAIPPPFVGLLFLVRLFWGTLSFDKWVPPNKEKSGKRRFQIAPRLLID

SEQ ID NO: 255567 - protein, 54 aa, Zea mays
  Clone ID: MRT4577_164671C.1.pep
IAFSVRILMHLWQTYACCIYGTYSFRNYGLPSYVIGVSTSEPYQPSHELQISKV

SEQ ID NO: 255568 - protein, 66 aa, Zea mays
  Clone ID: MRT4577_164672C.1.pep
LHCENPLFNHIASTSIAQQHTFMPCVQHHHLFGHIGTNHSHTDTRATWTTYLQLSLLTHNFLTNAH

SEQ ID NO: 255569 - protein, 64 aa, Zea mays
  Clone ID: MRT4577_164673C.1.pep
CRARQLQSSSTSSRSLPSAWTRHEQSHRMQAVLQVHAVDVTITQACLIRPAKAPTVCSNHNCYR

SEQ ID NO: 255570 - protein, 97 aa, Zea mays
  unsure (1)..(97): unsure at all Xaa locations
  Clone ID: MRT4577_164674C.1.pep
QTVVSGSKDSFMHIVNLNSXRLMFXLTGXTVNIECLEIXTSYGWLIIRRMDQKLIIWELSYKFMEYICEHDEGVTSMIWVGSSRYVALRCIDGKVRI

SEQ ID NO: 255571 - protein, 143 aa, Zea mays
  Clone ID: MRT4577_164675C.1.pep
IIFPKRKKKKKKKKKKKKKKKKKKKKKKKKKKKKKKKKVWFSGLFKSPFSVPPPLSSSPSRSLPGPLKNREVVCPPFFGGFTFLGSKKRVFERGAFDPKWGFSKFPGFPKLRPKFGEIKKFKIFKLAPQIRFQEKKKVLCSRG

SEQ ID NO: 255572 - protein, 172 aa, Zea mays
  unsure (1)..(172): unsure at all Xaa locations
  Clone ID: MRT4577_164676C.1.pep
RPKKKKKKKKKRGKKKKKKKKKKKKKKKKKKKNEKKIKYXKRKIKKNKIEKNIGGGGFWGSRFSSRGGGGFFFFFWGPLFYFGGGFFQWPLGGTPGVPRFLGLAPIPLFARWGFCGWGPPCPLSSPLASLWGLWVPPFCWPLTPGGWGVSLWGAPSFSGALGPLFCAFFPFF

SEQ ID NO: 255573 - protein, 82 aa, Zea mays
  Clone ID: MRT4577_164677C.1.pep
GSSPWSQQRHEQGAAGTGTAAVHRHPLLVVLRLPLPVQRRRCRHRAPRRQRQGSPTRIERCQAARRLGARGSRWWRGSCAVS

SEQ ID NO: 255574 - protein, 88 aa, Zea mays
  Clone ID: MRT4577_164678C.1.pep
ASTAQVYVVSRRRLFLMVGILAFLVIHGLHVGVTGSQVPLCVYGCSSRAPLCSCLSAAVSLCLALASTVSRGTLSLVFLAPLGHARMG

SEQ ID NO: 255575 - protein, 117 aa, Zea mays
  unsure (1)..(117): unsure at all Xaa locations
  Clone ID: MRT4577_164679C.1.pep
LLLGXXXXLFCRRRXPRCRXRXPRXXXXWAGPGRXXLXRGAGAGSXXXXXPXPXVXPGXAGXXGXAXXXXPSWPGXXXXXRXSCPCGRVPXGRXAVXXGXWWWCCFGSFSLLGCLAV

SEQ ID NO: 255576 - protein, 81 aa, Zea mays
  Clone ID: MRT4577_16467C.1.pep
SARGQLRILHHLFPPRCQSSYGASLCSYIVYHRAHSNVIRSFRGSPMRSFKRTWDADSVVHEPDGHAGFRALVTEALRFLF

SEQ ID NO: 255577 - protein, 71 aa, Zea mays
  Clone ID: MRT4577_164680C.1.pep
KVHPLIVSHLSDHTGAPPLYLTFCRQIKEQTKLSMLLDQLSLDVCSATARSLQSGCNRSSAHFSCSCRRGQ

SEQ ID NO: 255578 - protein, 89 aa, Zea mays
  Clone ID: MRT4577_164681C.1.pep
YNKISSTVGFLNPPLIPPRKLSIKPYMGHLKKFCFKNLPNWGIFFPIFGQLEKKISLRLKKGKKKIKRREAKEQKNKKKNPKKKKKGRP

SEQ ID NO: 255579 - protein, 119 aa, Zea mays
  unsure (1)..(119): unsure at all Xaa locations
  Clone ID: MRT4577_164682C.1.pep
XARACRKKKKTVVNRPSSSRVLTRRHAPHLRSPHPRPGSSPRPRQQGACASSQRSPVPTPPTAAGGCSIAAPKLSTIAAVDALHVGCSSYNRLHKKRKKVVIGWSPSQLMISMALMMSL

SEQ ID NO: 255580 - protein, 194 aa, Zea mays
  unsure (1)..(194): unsure at all Xaa locations
  Clone ID: MRT4577_164683C.1.pep
RPGRDRRDGAPHWVLLHLAPLFHARDGTLLHFLAVQVPIAXRRRRARGDVPHDGASXLAACRDEASRVAEDFPCATHAGKVFVDMDKRGLEAEEPRVASDSEKEMAISTANSIVSALNSYSKLTGLVXTDSRLPDMPIIYASDAFTSLTGYSREEILGCNCKVLNGPGTSLEVLEEINQHICSEQACTVDLLSY

SEQ ID NO: 255581 - protein, 156 aa, Zea mays
  unsure (1)..(156): unsure at all Xaa locations
  Clone ID: MRT4577_164684C.1.pep
KSKAQCYRGKTGERTSEEDNGNEPCAGGDGADGHVRAAAVAGGSAAAPAPARAAGARGVLVVARHRAVPRXAAGSKRRRRREQDEPSFEAEEDGVWRKEIMMGERCQPLEFSGAIYYDAEGRRLEQPPTPRSPLRSPLPSITLAAIAGGGHVLARS

SEQ ID NO: 255582 - protein, 411 aa, Zea mays
  unsure (1)..(411): unsure at all Xaa locations
  Clone ID: MRT4577_164685C.1.pep
MATSGADDHGQGQGQGHGRFASSLTARYSDWVLETLDELPGSFLLTDPALPGHPIVYASRGLAALTGYAPRDVLGRNARLFQGAATDRATVAGVREAVRAHRPHQAAILNYRRDGAPHWVLLHLAPLFHARDGTLLHFLAVQVPIAXRRRRARGDVPHDGASXLAACRDEASRVAEDFPCATHAGKVFVDMDKRGLEAEEPRVASDSEKDMAISTANSIVSALNSYSKLTGLVVSRKRCDSIGIPALSSSLKLSLGRIKQSFVLTDSRLPDMPIIYASDAFTSLTGYSREEILGCNCKVLNGPGTSLEVLEEINQHICSEQACTVDLLSYRKDGSSFCDHLHVSPIRDTSGKVRLHLSQVAFHIWVHLDMGAKHDFSGLTPEKWLLGAVGAVRVAVRGLSASGSLLRPPSQ

SEQ ID NO: 255583 - protein, 207 aa, Zea mays
  unsure (1)..(207): unsure at all Xaa locations
  Clone ID: MRT4577_164686C.1.pep
GIYFRGQRIWNAVIRHLLSIGMANADQVLLAGCSSGGLAVILHCDQLRAFFPSGSTVVKCISDGGLYLDAVDVSGGRSLRSYFGDIVAMQGIAQNLPPACTARLDATSCFFPQNIIDGVKTPLFLLNAAYDFIQIVLSLAPDRADPSGAWRACKSNRTACSASQMSFLQXDFRDQMVASVKGFSGSRSNGVFLSSCFAHCQSEQLGT

SEQ ID NO: 255584 - protein, 167 aa, Zea mays
  unsure (1)..(167): unsure at all Xaa locations
  Clone ID: MRT4577_164687C.1.pep
YSSEALLYLAXTETQTEILSILLHEWAILAPLKEHSVAVDDYYTPLLFLKGSVVTPENLCESMLLCKKGMKIRLPIREGTCALCHHVEXEILIMLKDPSVQLEXIDLLSTRCCKAQSYEQHXAAGPLXYIPLILVKVLKFLETTDDCSEIHACEAGALASMEAMPLS

SEQ ID NO: 255585 - protein, 408 aa, Zea mays
  unsure (1)..(408): unsure at all Xaa locations
  Clone ID: MRT4577_164688C.1.pep
FTLLLHICTHTQGGAWCNSAKTCRLTRSSGRGSSDHMAKEIPFTGIMSSSRTVNPDFYIWNRVKVRYCDGGSFAGEAFDKDTGIYFRGQRIWNAVIRHLLSIGMANADQVLLAGCSSGGLAVILHCDQLRAFFPSGSTVVKCISDGGLYLDAXTPVRCALNLPSFRARSAWACNATELTTGSLPPXGRHCRIACSVDVSGGRSLRSYFQDIVAMQGIAQNLPPACTARLDATSXLLFHFTHSRCQLIGLVGDLLMKWXVGVQCFFPQNIIDGVKTPLFLLNAAYDFIQIVLSLAPDRADPSGAWRACKSNRTACSASQMSFLQXDFRDQMVASVKGFSGSRSNGVFLSSCFAHCQSEQLGTWNTKPGGSPTIQNKGISKSVGDWYFDRAEVKAVDCRYPCDNTCHHII

SEQ ID NO: 255586 - protein, 50 aa, Zea mays
  Clone ID: MRT4577_164689C.1.pep
LTLTHSYFFFYSYTIVHPADYLYFQICPYSLLSHIQIHSDQYSNHNLYMH

SEQ ID NO: 255587 - protein, 206 aa, Zea mays
  Clone ID: MRT4577_16468C.1.pep
MASRRRTLLKVIILGDSGVGKTSLMNQYVNKKFSNQYKATIGADFLTKEVQFEDRLFTLQIWDTAGQERFQSLGVAFYRGADCCVLVYDVNSMKSFDNLHNWREEFLIQASPSDPDNFPFVLLGNKVDVDGGNSRVVSEKKAKAWCASKGNIPYFETSAKDGTNVEDAFQCIVKNALKNEPEEELYVPDTVDVVGGNRAQRSSGCC

SEQ ID NO: 255588 - protein, 60 aa, Zea mays
  unsure (1)..(60): unsure at all Xaa locations
  Clone ID: MRT4577_164690C.1.pep
MVQLTDAEQAAVNSLCGNVNPDDDGGQDLGRLLVVYARTQRYFGSFGDLSXASAIMGTLR

SEQ ID NO: 255589 - protein, 102 aa, Zea mays
  unsure (1)..(102): unsure at all Xaa locations
  Clone ID: MRT4577_164691C.1.pep
GGNIYHQGGHLEPDARINIRRTILLNAIXGGATRSEXAREVNGTPFVTLQDRYSDWKAYLGEDADRDHAEYNPHEPNGRGLKGLPXPXSLMIVSGLDLTCER

SEQ ID NO: 255590 - protein, 71 aa, Zea mays
  Clone ID: MRT4577_164692C.1.pep
FMKIDQATLFELILAANHLNIKTLLDLTCQTVADMIKGKSPEEIRTPFNIKNVFPPEEEEEVPKENQWAFE

SEQ ID NO: 255591 - protein, 154 aa, Zea mays
  Clone ID: MRT4577_164693C.1.pep
MKLIKRLAERNWMEAALPMSGDGGAGEIDDVLISAPRPLSNSACFSLPPRRALAHHLPLREVWMLQLAAGLEAGWERQMEMANLVTGSGLAAAGLDLQNHLASATGDSGCPPMPPAEKRLAPCTLPARRMVKPGPGLPRRKRARPVEAAHVGGG

SEQ ID NO: 255592 - protein, 173 aa, Zea mays
  Clone ID: MRT4577_164694C.1.pep
MHFMQRYIVHLFPENVPPYRLGVFQVRAEFLSADGKVISTSSQPCMLKFKSVHMHFIETFLQSVSLLSGYSSESQVIRLKMRGITQGLEPTTAVRIILEQRAEFGRGAGIPEIYVASLKLEGELPLVRRLLWNWRWTFFVWSSTGLFVSELLFALVCCRPCIFPRSGHNVAAP

SEQ ID NO: 255593 - protein, 121 aa, Zea mays
  unsure (1)..(121): unsure at all Xaa locations
  Clone ID: MRT4577_164695C.1.pep
EVVQVCMNSSSCIQGTICSRAVFFRGGLXMCPRGFVSSXXWSCKKKVXPPPPRPGCLLCPCXGCVSSGCSPSPASWCACLLRARGRAXLLASPSCFLPRRGRPRRRGPLLDIEVCSSRGRC

SEQ ID NO: 255594 - protein, 371 aa, Zea mays
  Clone ID: MRT4577_164696C.1.pep
MGRLALAVPVMLLLLCTTCRLTLGITDGLLPNGNFERSPLPSQLRGTRVVGASAIPSWQTSGFVEYISSGQKQGDMVLVVPEGAYAVRLGNEASIRQRLRGAARGARYSLTFSAARTCAQAEQLNVSASGQSGLLAMQTMYSSNGWDSYAWAWVANADEVDIVIHNPGVTEDPACGPLIDSVAIKTLNPPRRTNKNLVKNGDFEEGPYIIPGTKWGVLIPSRVVEDHSPLPGWMVESLKAIKYIDGESFAVPRGRRAVELLAGRESAIAQVIRTVPGRQYVLSFTIGDASNACRGSLMVEAYAGRESTKVAYESAGKGGVKRAVLPFRAASARTRLVFFSSFYSTRSDDLSSLCGPVLDDVVVVSVRTKRG

SEQ ID NO: 255595 - protein, 177 aa, Zea mays
  Clone ID: MRT4577_164697C.1.pep
SFLARCVIGFLPRRARARECNAGLLPNGNFERSPLPSQLRGTRVVGASAIPSWQTSGFVEYISSGQKQGDMVLVVPEGAYAVRLGNEASIRQRLRGAARGARYSLTFSAARTCAQAEQLNVSASGQSGLLAMQTMYSSNGWDSYAWAWVANADEVDIVIHNPGVTEDPACGPLIDSV

SEQ ID NO: 255596 - protein, 78 aa, Zea mays
  unsure (1)..(78): unsure at all Xaa locations
  Clone ID: MRT4577_164698C.1.pep
MAASKLATLALGRLLAGNAVGSPAAVRAAMSXXSTVHNTHSPPLPRAHRGGPXPQPCCGGIRSLLQQANNTPDRRTIC

SEQ ID NO: 255597 - protein, 82 aa, Zea mays
  Clone ID: MRT4577_164699C.1.pep
LGHLKKQLVVGSLVKQAPRCSPSPLSFPKLQFFIFSLPPPELGGIKRRRQDLIHVSTHLKSGAGGEKHRHLKKPPRRARGAP

SEQ ID NO: 255598 - protein, 121 aa, Zea mays
  Clone ID: MRT4577_16469C.1.pep
PVKERVLIRCKGGSIFGKVIGGEYLGVISEMGIGILLERGISWVLLEFNKVGNWKILGMEIELGGAIDYVSFGIVKKVESGRKEGVGYFNNCAVAGFFFFFLFFFFFFFFFFFFFSDAWLP

SEQ ID NO: 255599 - protein, 194 aa, Zea mays
  unsure (1)..(194): unsure at all Xaa locations
  Clone ID: MRT4577_1646C.1.pep
MVHVNFYRNYGKTFKKPRRPYEKERLDAELKLVGEYGLRCKRELWRVQYALSRIRNAARHLLTLDEKNPRRIFEGEALLRRMNRYGLLAEGQNKLDYVLALTAENFLARRLQTLVFKAGMAKSIHHARVLIKQRHIRVGRQIVNVPSFMXRVESEKHIDFSLSSPFGGGPAGRVKRKNQKKASGGGDAGDEDEE

SEQ ID NO: 255600 - protein, 148 aa, Zea mays
  Clone ID: MRT4577_164700C.1.pep
DDHSPLPGWMVESLKAIKYIDSDSFAVPRGRRAVELLAGRESAIAQVIRTVPGRQYALSFTVGDASNACRGSLMVEAYAGRESTKVAYESAGKGGVKRAVLPFRAASARTRLVFFSSFYSTRSDDLSSLCGPVLDDVAVVSVRTTKRG

SEQ ID NO: 255601 - protein, 67 aa, Zea mays
  Clone ID: MRT4577_164701C.1.pep
MLEPYSVMSYKHSRRNYWVTKKATLFTQTTLAPFASKLMDQALFFFTESVNMKKIWLYLILDGMLEF

SEQ ID NO: 255602 - protein, 84 aa, Zea mays
  unsure (1)..(84): unsure at all Xaa locations
  Clone ID: MRT4577_164702C.1.pep
GAGGHFGLPLFNQVGWGNLFPFLRPQHFFPFNHLFSLNPALPQPLVGGAFFLVPFGGGPPSGAPPPGGGFLRXISIFLVGVSPP

SEQ ID NO: 255603 - protein, 155 aa, Zea mays
  Clone ID: MRT4577_164703C.1.pep
LGFLGFGSTVTAAVAPPSGKTRPAPRSFLVVPPPPNRGGPAPPKKKKGLGETIFGFIFKKDQLVETDPLLNKVGPAPAPPSRPKTTGGKKASGGDNNGNGGGFNLGGLGGLFPKKNNLTSQVWRCLWIVELKTGFGFLGGKGCKYIFVDVWGCAP

SEQ ID NO: 255604 - protein, 150 aa, Zea mays
  Clone ID: MRT4577_164704C.1.pep
THDVARHSVPTHINCPHRFPGNRSGLTALAYNAPLTPTGRRAVAALVPTITGMGDLVSGRVRGKVCGQVHSGTRLTDLPYFSACAQYVQMLDTGICTLILIPISSHRQHIHMDPCPQTIIILLSKWIQPIPDLARVLEKSLDFYRDPDLA

SEQ ID NO: 255605 - protein, 119 aa, Zea mays
  unsure (1)..(119): unsure at all Xaa locations
  Clone ID: MRT4577_164705C.1.pep
XDRKXERARXEAXGGKXXQGXGXRXXXXPXXXRTXGDRXXKPXXXPKPEXTXXPRAKEDDXXXXASEGXXEXXTNEEAXRXARRQNQXXHKNNXAXGATXXXXDEXEGTTTDPXAQAAA

SEQ ID NO: 255606 - protein, 130 aa, Zea mays
  unsure (1)..(130): unsure at all Xaa locations
  Clone ID: MRT4577_164706C.1.pep
MYDMCRVAWPATSRGGGAGVATPAPCSSSGSGRARVXGIRDAPVFAAPATGVGMGPTVXRVXSGVQRWKTEGYDKRXERCXPLKCGQSPRGMXVGCADSRVCAGVTLGLXRREAFTVRXVGSMGPPYDKI

SEQ ID NO: 255607 - protein, 99 aa, Zea mays
  unsure (1)..(99): unsure at all Xaa locations
  Clone ID: MRT4577_164707C.1.pep
LEAGMIVTDEPGYYEDGAFGIRIENVVLVVPVKTKYNFNNRGSLTFEPLTLVPIQTKLLDVDSLTDKECDWLNNYHLTCRDVIGKELQKQGRQXALEWL

SEQ ID NO: 255608 - protein, 172 aa, Zea mays
  Clone ID: MRT4577_164708C.1.pep
MLPGYQSSATTIQCRTIKSTNTPRASRFAYRGPSNAPLQSTTAAALARREHSTPLRTGLFATKRGMTAVFDPETGKRTPCTVLQVDRNEVIAHKTRPENGYWAVQIGAGSKDEKNVTRPMLGHFATAGLSPKRWVGEFKVKGKEGLSVRIGQGIGASWFEKGAFVDVRGVSR

SEQ ID NO: 255609 - protein, 101 aa, Zea mays
  Clone ID: MRT4577_164709C.1.pep
WTSCTDRYRLSRLSWWDKCGVEVSVEYQPKDSVQVAACFRCSGEISYGRESTVEGRASYVPCMLLAKGSSSSLLYLCYSKMPTHVCGFFFFFFFFTRAGFR

SEQ ID NO: 255610 - protein, 368 aa, Zea mays
  Clone ID: MRT4577_16470C.1.pep
MKRLQCFKQSSGGGNGGGPGKRLERRLSLGEYKKAVSWSKYLVAPPGARIRSGGEELWSADLSKLEIRGKFASGRHSRVYSGRYTGREVAIKMVSQPEEDAALAAELERQFASEVALLLRLHHPNIISFVAACKKPPVFCIITEFMAGGSLRKYLHQQEPHSVPLNLVLKLALDIARGMSYLHSQGILHRDLKSENILLGEDMSVKVADFGISCLESQCGSGKGFTGTYRWMAPEMIKEEHHTRKVDVYSFGIVMWEILTALVPFSDMTPEQAAVAVALKNARPPLPASCPVAISHLIMQCWATNPDKRPQFDDIVAILESYKEALDEDPSFFLSYIPPPPDHGHHHHHQSLLRCFPRSMRRSASLKV

SEQ ID NO: 255611 - protein, 88 aa, Zea mays
  Clone ID: MRT4577_164710C.1.pep
PPLPLWIQLHHIIHWNRNVNVSALSTLTGKEVPIDLELPVSIALIKDRGEHKESLPPAEHRVIYAANHLADDHTAQDYNIEECIWPPS

SEQ ID NO: 255612 - protein, 87 aa, Zea mays
  Clone ID: MRT4577_164711C.1.pep
EHASCLVPGTSLTWSEATGSSGCGRSPCAASPLPARRPPAARRRRRRGRRRRGRTRASAPRRRARTCPPATARSPTSSQGNRAASDA

SEQ ID NO: 255613 - protein, 199 aa, Zea mays
  unsure (1)..(199): unsure at all Xaa locations
  Clone ID: MRT4577_164712C.1.pep
FEEMYVIFEAMKGRNLEXVLSWVAKNHDXLLQNGFMXEFKFXXFEFVEIXQKGSRGEAKXEVFLYVRINLXFFAAVNKEEFXKLMVCFLWVGXXDKSXYFELMXSXXWEKLVEXXTHKFCSFLGKXRESQLSVEVSVGFXGLQILLKVXXXMVXKKKEWKVMKQFLVXIEMGQEFKYNSVFVCRVLREXSSEENXPMGM

SEQ ID NO: 255614 - protein, 84 aa, Zea mays
  Clone ID: MRT4577_164713C.1.pep
ACHLLYILSGALWWPLVFLGILDGGVRPKGTLYCIWQLGGCRIHSNTNVICLHPNENRSAANSKREHVDPDIDPGPARAAAPTI

SEQ ID NO: 255615 - protein, 166 aa, Zea mays
  Clone ID: MRT4577_164714C.1.pep
MSAPFIMEFFSTQLEEVYPYVDIVFCNDSEARMYAMMKEWSMDLTVEQIAGRLANNDRRNLDRPRIVIVTQDLNPVLMTRSKTPELKGPENWSSIEFPVQKLEKEEIVDTNGAGDSFAGGFLAQLALNEFNLDLDSLRRCCAAGNYCAREIIKQNGCTIPDKKANY

SEQ ID NO: 255616 - protein, 64 aa, Zea mays
  Clone ID: MRT4577_164715C.1.pep
VLTQKTNTKELAGNKGWMLNTFFTRNAPIKALLVTSFLLKHHYKIGRATRHSTRRPWMAIHRSR

SEQ ID NO: 255617 - protein, 62 aa, Zea mays
  Clone ID: MRT4577_164716C.1.pep
MSSSTIRKALGAVKDQTSIGLAKVTSNIAPELDVLIVKTTSHDDEPAEERHIREILHLTSGS

SEQ ID NO: 255618 - protein, 202 aa, Zea mays
  Clone ID: MRT4577_164717C.1.pep
SSYLKPCLLYLSIFPEDHLIMRDKLILKWISEGIVYSEDEETSLYELGDSYFNELVNRSMIQPIGIDWEEKVKGCRVHDMVLDLICSLVSKENFVTILNGTKRKISDSQSKVRRLSIQNSNVQGATISMAQVRSISVFTNDNVDQLYKVSSCQVLRVLDLEYCPAPDTWNFLHLRHLRLKGSKVKVLPMEIGKLWFLQVLDI

SEQ ID NO: 255619 - protein, 103 aa, Zea mays
  Clone ID: MRT4577_164718C.1.pep
LDDYRRMDEHDQYESIGLDDSLEDERNLDETMADRRVVEVEPNARDVRTGVADDKKYAFKTSFSYCMILEKLSYLYSRLMILIELPNEYLVCELKKKKKKGAA

SEQ ID NO: 255620 - protein, 113 aa, Zea mays
  unsure (1)..(113): unsure at all Xaa locations
  Clone ID: MRT4577_164719C.1.pep
FPPCRGKIAPLPHRLGTKRAPQHPKRNDPPCEQSKSPQKPHAKKHNPLEDLVSSANQLKGRKAFLLRKYLSQQQEKIGLFSAXSLXXSRVVAXXHFHRSPHDGXVSSPVDIVS

SEQ ID NO: 255621 - protein, 115 aa, Zea mays
  Clone ID: MRT4577_16471C.1.pep
VKRVLGSVFGPFPLNGLFGLIKLAFVEIFPPGPHKKLAGGGGGHPFFFFFFFLFLTWARWGFYPSIILCYWEGLILCLPSKVFKESPGAKKKKKKKKKKKKKKKKKKKKKEKKNS

SEQ ID NO: 255622 - protein, 144 aa, Zea mays
  Clone ID: MRT4577_164720C.1.pep
QEYHPFVFTVTCMHAVQYRQLNPSRSTQSQDQTTETNFETARASERQPHSRTTTWDATIRSPAGGRVRGGTGSRPAVSVGVGVGGHRRAEDGERVPHPRVQGQRVQEPYQRHNPRGGLDWIGALLCFSSLLLLLGSPKQVRQAS

SEQ ID NO: 255623 - protein, 47 aa, Zea mays
  Clone ID: MRT4577_164721C.1.pep
RKAIYYRLIKFRASWVGCLRCCLNFPEFMLMYVYYGWFPVEFSFHFP

SEQ ID NO: 255624 - protein, 164 aa, Zea mays
  Clone ID: MRT4577_164722C.1.pep
MSLVRLLDTLALDSWVRNPFTIFGTAVAADAWLASDTSAFANTHIESRDTAAAYVFSAALPPGVKKEEVTVELDEGNVLVIAGERSVCRQERSDDGCHHIERSRATFLGRFHLPEDAAVDGVRAALDAGRLTVTVPKVGAAAIVPEKPAADATPAPVPVEAGPC

SEQ ID NO: 255625 - protein, 166 aa, Zea mays
  Clone ID: MRT4577_164723C.1.pep
MSLVRLLDTLALDSWVRNPFTIFGTAVAADAWLASDTSAFANTHIESRDTAAAYVFSAALPPGVKKEEVTVELDEGNVLVIAGERSVCRQERSDGCHHIERSRATFLARFHLPEDAAVDGVRAALDAGRLTVTVPKVGAAAAAIVPEKPAADAPALAPVPVEAGPC

SEQ ID NO: 255626 - protein, 41 aa, Zea mays
  Clone ID: MRT4577_164724C.1.pep
RSRLMRRSICSSSISRGRGHVKFGVLFNTTGVKYLEAILAP

SEQ ID NO: 255627 - protein, 117 aa, Zea mays
  Clone ID: MRT4577_164725C.1.pep
KISTLREGQWGANGAKNPGPTGPSGAAKPWYGFFGENNFSHTRNFSQGLRALRGRTGGANKAQPKTTGLFNLAKAQGHVAPPGKKGSGALADRLTKAQTILKNGGLIKNLYMGRSLG

SEQ ID NO: 255628 - protein, 65 aa, Zea mays
  unsure (1)..(65): unsure at all Xaa locations
  Clone ID: MRT4577_164726C.1.pep
LSKKKKKKKKSKNLKKKKKKKKKXKKKKKKKKKKKKKKWPPPPLFPNRYLHSNKFSLYLFLLNLA

SEQ ID NO: 255629 - protein, 70 aa, Zea mays
  Clone ID: MRT4577_164727C.1.pep
FASIPIFAPSGPALQSPFLAFSYSCVRVVDGVPSPPPAAVMEAPICSPEPPKREIVRVTKTTIKEKASAF

SEQ ID NO: 255630 - protein, 80 aa, Zea mays
  Clone ID: MRT4577_164728C.1.pep
QATQPTITPAMDHNIGSVPRPGCQIANGNVGGDWQHGFCTVLKEYRSILKYCSIISRMVFGELAGLSVFAPGECLSLWEF

SEQ ID NO: 255631 - protein, 56 aa, Zea mays
  unsure (1)..(56): unsure at all Xaa locations
  Clone ID: MRT4577_164729C.1.pep
TGSDGHTLXRRYPRXMLGRXRTLXQGYSGIRFEILQAITKLLIIDVSPCLPLRGTI

SEQ ID NO: 255632 - protein, 120 aa, Zea mays
  Clone ID: MRT4577_16472C.1.pep
RYESLSDPCKVDSGKVLRIDIIPDKENKTITIRDTGIGMTKADLINNLGTIARSGTKQFMEALTAGADISMIGQFGVGFYSAYLVADKVTVISKHNDDEQYIWESSAGGTFTLTQDTEGE

SEQ ID NO: 255633 - protein, 47 aa, Zea mays
  Clone ID: MRT4577_164730C.1.pep
MYLQSKATKLHFSLLTVCVISNKKTCGTDQFLSTLLFSSIAESSPPS

SEQ ID NO: 255634 - protein, 136 aa, Zea mays
  Clone ID: MRT4577_164731C.1.pep
PAVRVRSCFFGRWGPANGIFAWSVLQGWTAWGPSFWAASSRAGGCSLFHWGRAVSPWGLGRWPPPPACWFFPLCGGPGGFLYFYGFGLFFGFTVSSLSPWAPQGLWFWQGVSLLRGRLRGPRFGPGPGYPREGAAR

SEQ ID NO: 255635 - protein, 66 aa, Zea mays
  Clone ID: MRT4577_164732C.1.pep
PTRPELLKHAHLALAVQAGASPRKRTEPVRDGADTMLTTTCSTGRCAAAATACKNTRRRHYLGAGE

SEQ ID NO: 255636 - protein, 62 aa, Zea mays
  Clone ID: MRT4577_164733C.1.pep
AKLNNLSGSKTLGGLKFFLQIVPFRGMTTYIPSNPKLPSPSKPAGTPKTNFYERQCPTHTLD

SEQ ID NO: 255637 - protein, 166 aa, Zea mays
  unsure (1)..(166): unsure at all Xaa locations
  Clone ID: MRT4577_164734C.1.pep
YQSADQQQKGGQATSTSAAAAACHLGTARRRAPSAAAVAATASPGEQACPSVAATTKCRATXAAGESVASXSAGTARHGTATSAGAAAASAWVVVAASSSSPTSSQGADHTPGRTHTVASAEAPRRVADSPCCKGSAGTSTASRHAASPVAEPSEGVGTGHAAPLP

SEQ ID NO: 255638 - protein, 58 aa, Zea mays
  Clone ID: MRT4577_164735C.1.pep
DLEVMRGSMACTCRMNSSQYRGVRVVDATSSTSSSAGAPAHEPADPSETVPRRRGAGV

SEQ ID NO: 255639 - protein, 36 aa, Zea mays
  Clone ID: MRT4577_164736C.1.pep
HLLSSCDICEFHLLNLIYIYLIDEIHRYHNWTTDVK

SEQ ID NO: 255640 - protein, 219 aa, Zea mays
  unsure (1)..(219): unsure at all Xaa locations
  Clone ID: MRT4577_164737C.1.pep
MPERNTGGEGAAGARRRRSSSILQVYHEPPETLEQISDQASLPNLNANWTNAKGAWTIHLVLILSAKIIFDAIPGVSQETSWTLTNMSYMFGSYIMFHXMVRGVPFDFNSGAFDNLNMWEQIDNGAQYTPTKKFLLSVPIALFLVSTHYTHYDLTYFTINLLAVLGVVIPKLPFSHRMAFRSILRKFRRNKLRRRSRDGLTTALTRSADIRVRIRQSSA

SEQ ID NO: 255641 - protein, 34 aa, Zea mays
  Clone ID: MRT4577_164738C.1.pep
KLKGGLCFMTSINYSANQSTNRTAKSLNNLSIFN

SEQ ID NO: 255642 - protein, 82 aa, Zea mays
  Clone ID: MRT4577_164739C.1.pep
RDPQRGAPAGPARWRAHMHRCQPPANEEGARRGGSPGAAPPPEAEEGRGSARSRRADMGTGEGDHGSRASGGAQSQTLSKEG

SEQ ID NO: 255643 - protein, 211 aa, Zea mays
  Clone ID: MRT4577_16473C.1.pep
LHENPVHTPLRHLARRLVQVGVNDVFAVPGDFNLTLLDHLIAEPGLRLVGCCNELNAGYAADGYARARGVGACAVTFTVGGLSVLNAIAGAYSENLPVICIAGGPNSNDYGTNRILHHTIGLPDFSQELRCFQTVTCHQAVVNNLDDAHEQIDTAIATALRESKPVYLSISCNLPGLPHPTFSRDPVPFFLTPRTSNKMGLEAAVEGTVDS

SEQ ID NO: 255644 - protein, 31 aa, Zea mays
  Clone ID: MRT4577_164740C.1.pep
GQETGAPILTDDVSLQVFMDHLKKLAVSSAS

SEQ ID NO: 255645 - protein, 66 aa, Zea mays
  Clone ID: MRT4577_164741C.1.pep
FSLLYSYLRELLSADKEDLLQVPSDNTLVISPDSLPLGRNNAANEKACFDNYKYDLLQLSDLTYAA

SEQ ID NO: 255646 - protein, 35 aa, Zea mays
  Clone ID: MRT4577_164742C.1.pep
WRSILLCGSMCRRQIACLLDDPVYYALHQYKYLFR

SEQ ID NO: 255647 - protein, 217 aa, Zea mays
  Clone ID: MRT4577_164743C.1.pep
MDRTPAFKVPSQTELRFRPCGYEQPPHRGACGATSSGRLAGDLCSSSHGPRTDAATGRLSFASPLKGCEPAIKAKEPEAGPMAGGRLLRRAGGWFPPPEAGRGGGQPTRAGGRAPARLALRPSKDGTGKGDTLKRILLREGNRLQASLLIRGSKAGPSEGFNSRLRARGIHTHYWSEVRRPAPRKGSTAASGHSGSAPTTDQGFVGWPSKGSQPPQT

SEQ ID NO: 255648 - protein, 249 aa, Zea mays
  unsure (1)..(249): unsure at all Xaa locations
  Clone ID: MRT4577_164744C.1.pep
GSRGRPGPGHLLPWXMDSLLWFVELLSLLCFFVFYYRHLQSKKISKAEPTEWPVLGHLFGMVANLSHFHDWATGILAGTRYNFEARAGITGVRFFVTCDPANVRHIFTSNFANYPKGDEFAEIFDVFGDGIFNADGDSWRRQRAKSQLIMAGPRFRAFSARYSRDKVERSLLPFLAHAAEAGTXPCDLHDVFLRLTFDMTCNLVFGVDPGCLQIGLPVVPFARAMDDVLETLFLRHIISPACWKLMYPV

SEQ ID NO: 255649 - protein, 380 aa, Zea mays
  Clone ID: MRT4577_164745C.1.pep
VTRVRISDSADRTSLHVRKLSCRSDSSGFLDYAGDRTPWTGKSARKRQGRSSPPPPTPPGYGYLTHHLPRKATLARTDNSVTDGKVQILETRGKEAQLYNTARVCLGLSDRRKHTLQDNPILQARILTAEGSSSTLGVDYTFGEVRPSLGRRRDPRISTLKDDFIIMPGPSPPGSPPRIRLEQAARLVTPRPRPDVPRRHQPGPRPRQINSGVGPNSHNEQKHWHSRCHYKRNSGSTSVGTNNPTPGSLRGDKFRATRRRPLQQQPWSQDGGGHRKALVRVPAQGMRTSHQSQRAGRSKAHRQVLAPALATKARKRAECCILAGQQQFAIPGMAGGRLLRRAGGWSPPLEAGRRGGQPTRAGGRAPARLARRPSKDDEHP

SEQ ID NO: 255650 - protein, 54 aa, Zea mays
  Clone ID: MRT4577_164746C.1.pep
APKYPTNCSRQFTYHNISFALQYICTISKDKLPASQSPIIIYHLPCIIYMDGIF

SEQ ID NO: 255651 - protein, 77 aa, Zea mays
  Clone ID: MRT4577_164747C.1.pep
TDPRITRSLYVRSPSYATAPPAPSPSPSANKLRQGRRFLLFVLLLHATVDAPRSYRRDVRVAARALRVVLWMALAPE

SEQ ID NO: 255652 - protein, 61 aa, Zea mays
  Clone ID: MRT4577_164748C.1.pep
LCPPIFLGRCPGVGLSTEWSSIPSKGVQPRVRPFRARAEDARWLEPLHYPFQSTSSTCSSL

SEQ ID NO: 255653 - protein, 74 aa, Zea mays
  Clone ID: MRT4577_164749C.1.pep
MGGAGGAGKTGKRPGYATKGGKKKGKKKKKKKKKKKKKKKKKKKKKKKKKKKKKKKKKNRKKRRKKRKKKKKKA

SEQ ID NO: 255654 - protein, 153 aa, Zea mays
  unsure (1)..(153): unsure at all Xaa locations
  Clone ID: MRT4577_16474C.1.pep
MGGCVRTHMSVAYYLRDHVNFRTGLPAPTNYRVRVRLIIHYPSRYFTPHYXFVERFTIVDVTSHIISASISSDMVFASAYSYELTQYGLEGGMTNYAGDCCTDLLLARPVLKTGGSYKECEGIVDATGDDVCGAPCDERRPCPALLDGGLSRT

SEQ ID NO: 255655 - protein, 127 aa, Zea mays
  Clone ID: MRT4577_164750C.1.pep
RHVIVTPFYLPCRLGSARALTDSRPLRCRLSLGLSPHDRPGKTNEGAGCGWASFRLPPPRDVAATLLSLSLCLSLSLLHTWSWRGGQERGDLTLSPGKSASGARRQKSLGRKRNQRRRRDPTTTLLA

SEQ ID NO: 255656 - protein, 81 aa, Zea mays
  Clone ID: MRT4577_164751C.1.pep
ASGTAVDDDRTSRTILDGPVGLFMSGATAFDCMTSMLYDASNDLIPRKQDESYGHLVDLSLCLSISHYVAMGESLRDPLDY

SEQ ID NO: 255657 - protein, 54 aa, Zea mays
  Clone ID: MRT4577_164752C.1.pep
PLGGVYRKRCPDLGHLLGLRGDAQVAITCIMGSSLYVYVRLIVLYGLIHVASIP

SEQ ID NO: 255658 - protein, 214 aa, Zea mays
  unsure (1)..(214): unsure at all Xaa locations
  Clone ID: MRT4577_164753C.1.pep
SRPAGDAITDGXSVTIYYFATEGKDCSFSSVYPELQTPTKIPFEKGLAQRFIQPSGSGVDLGFFSLDELSSSSGEVFPLVVYAEAYPSPEEGGPSVNATRAQITLAVLEKHNNDLQVKVMKQILWIDGVRYELQEIFGLVNSTEADVADADADDTGKECVICLSEPRDTAVMPCRHLCLCSECAKTLRFQSNKCPICRQPVEKLMEIKVRSPGP

SEQ ID NO: 255659 - protein, 51 aa, Zea mays
  Clone ID: MRT4577_164754C.1.pep
NHASECPCAACSSCSPCPYAVVVGVPHSTHCVLSYSRWLASYFCPLAPMIE

SEQ ID NO: 255660 - protein, 120 aa, Zea mays
  unsure (1)..(120): unsure at all Xaa locations
  Clone ID: MRT4577_164755C.1.pep
MATKIFWLLMLLALTTCVANATIISQGSQAQYSFPFNQIPSIXNSAAXLXQHQQLLPFRLLAAVSPGDLLTQQQLLPLXLDAMPNAGTLLQLQQLLPVNQLALTNPTVVYQQPIIGGALY

SEQ ID NO: 255661 - protein, 143 aa, Zea mays
  unsure (1)..(143): unsure at all Xaa locations
  Clone ID: MRT4577_164756C.1.pep
ATSQHHYGTFLPPSGASGKFPQPAVKFPQPVVPPGMQHYPQPPPASHAGYPLPQEHYSAAPPCYAQGYQIAQSYIPVHEGRPVIIRPLPCXVLSMMCSLFIIEFFFAAIPWYLGASVLICVRVRDYMYKPRYVACTIAASLAA

SEQ ID NO: 255662 - protein, 130 aa, Zea mays
  Clone ID: MRT4577_164757C.1.pep
TTTVAMIECSRTSSLGIDVAVVRAPTAVRNPVAGISQSQAQRRQTNKYDGGGVIIPGRRTSWRTCCGRVVSLAPQFFRRRTYAIRRWPGTVSVWDNNVSQDDRSLVKDKDRNAGDVLALVTRSRAPASAK

SEQ ID NO: 255663 - protein, 73 aa, Zea mays
  Clone ID: MRT4577_164758C.1.pep
MDITHDDFVVLCLMALAGAGGGGHAAAGTARTTTTLATQVRELRFRCSRCGKALPADQAPDAPKGDHRKCVNN

SEQ ID NO: 255664 - protein, 123 aa, Zea mays
  Clone ID: MRT4577_164759C.1.pep
EAGRADVAPAPEADVERVYVSGGAVRAAGNLFTAAAANPVAEFNVFGDPFAAYLVLHSGVPITMIPLDATNTIPVTEAFYSEFQRRQRTYEAQYCLLSLDGPLARQRTRSDSHDNSFSLLPPP

SEQ ID NO: 255665 - protein, 119 aa, Zea mays
  unsure (1)..(119): unsure at all Xaa locations
  Clone ID: MRT4577_16475C.1.pep
MKELIDGLALMALPGSARSSTSRGWRCQTQPFDLPPQGYMPSPLYLPPEQHPERRQYPTQAPQLTPCHQLRSXCVSSVGRPFLRQCVEGLRHHCNPAATLYRSTQCQALHQQCCHQITH

SEQ ID NO: 255666 - protein, 70 aa, Zea mays
  unsure (1)..(70): unsure at all Xaa locations
  Clone ID: MRT4577_164760C.1.pep
IRSCQLRXCTPIIHAWXPASSPSPILRXFISNVSRFNDSRRRRSYVPLVPDLIYVFFFCITCAFSVCLSV

SEQ ID NO: 255667 - protein, 408 aa, Zea mays
  Clone ID: MRT4577_164761C.1.pep
MAKTSLPPGFRFHPTDVELTVYYLKRKLLGKHLRCNAITEIDLYKFAPWDLPERASLESNDLVWYFFCPRDRKYSSGLRTNRSTGVGYWKATGKDRPVVYNSRTVGMKRTLVFHLGKPPRGDRTDWVMYEYRLEDEEIAASGVKLDACVLCKIFQKSGPGPKIGAQYGAPFNEEDWNDASNVECSPCVPSVAPCAPESSRGGLNSAGQRLAVSYDVKVSLGSSAEGINRPAVNGVHPVRPSPDAPNDCIHIQLLAEVMRCSSTSMHVLRTAGDDGLLADSTADYSSDNRISLDAIETIFCEVDELGPQAMVNNTNHCDSCGEYLIHPTMVARGAEQYLELNDLSFSLTDGPDSCGVLFSNGVSVEQLPDLELRFEQFSPDHISNTAIASTSTTVGSSASVPLLEDHRT

SEQ ID NO: 255668 - protein, 64 aa, Zea mays
  Clone ID: MRT4577_164762C.1.pep
LKKLSQSSDLNPSPVSVESQRRDNFTQNKRRKKKCVLSNLCILFHFCCVIFFPLSSKSLIGIEI

SEQ ID NO: 255669 - protein, 58 aa, Zea mays
  Clone ID: MRT4577_164763C.1.pep
MAKTSLPPGFRFHPTDVELTVYYLKRKLLGKHLRCNAITEIDLYKFAPWDLPGWRTRK

SEQ ID NO: 255670 - protein, 233 aa, Zea mays
  Clone ID: MRT4577_164764C.1.pep
MALVPNPSVPGIRICRPKIISDYPLPDEESNSRSYLLKKIGSFYRKARRRLDSRRRRVQAHGLCVGLLDPVSNIVINSITDSCKGERKREGEVVPQEDLRRRSLDGLVVFLTRMFPNLAEGLAVRYLRVAKADVLIAACIIVSDHGIKGFGNSEAEPALINMALKCAGLAARHPDPKRLVYAWQKICNCMEDALGLLEMIQEPSRISQVIRQLAFMVTEGPPGRGLAERRAGM

SEQ ID NO: 255671 - protein, 108 aa, Zea mays
  unsure (1)..(108): unsure at all Xaa locations
  Clone ID: MRT4577_164765C.1.pep
MFGFGHHGHHGQNPSVHGRVHQPTXYKIFCKADEGYCLTVRDGNVVLAPXHPVDEHQHCYKDMHFNTHVKDEEGNPAFALVIKATGLDINHYLGLDHPGNVVPINPEY

SEQ ID NO: 255672 - protein, 152 aa, Zea mays
  Clone ID: MRT4577_164766C.1.pep
MDELDERELVFAWEDKDTIIDQLNRVDLSDREDHESSQDLGGSLTRSPDAAIGILMRILKNAPGLRERLLTGPSAPVPQEPSSLQRVMTEEHGSGASSSAGVPSSLLRSRTAADTLEELNKYKEIRESILNRDKGHSCSTKLLEEKPADGDR

SEQ ID NO: 255673 - protein, 667 aa, Zea mays
  unsure (1)..(667): unsure at all Xaa locations
  Clone ID: MRT4577_164767C.1.pep
NPYYPNLHPGNAFPTSIGTGGYAVSGSILPPFVAGFAPQGPLATPLDSPMTPSFSGRPSGFSPAGNLTGGTEFMQSYKVYGQPGAGMQPSIPDSNFIHFFQHPSLFQYTGGNQYNTMGPRFTVVNPTESFDPQKMIHQAASAYPSDQRLPLPITGFPNSPTSRRGGTVPNYQGISSYIGVPMTYPTSPVFQGQTLPGVLPPVRRNDSVGFLPPSRNITGSPGIQGQRARQKFDESKTCSFLEELKSNRARMVELSDITGRVVEYSADQHGSRFIQQKLENCTAEEKASVFAEILPHASALMTDVFGNYVIQKFFEHGTHEQRRDLATKLVGHVLPLSLQMYGCRVIQXHASAQKTGVPLNGLTKLSSKIVYVWLTLSPIPLAVLPRSLAAAPPFYTPPPSTTRRSSVRLWCPAVRLWTPDLDIRICASRPVCGGSEEGAEGSGRVGVRAAGAGVRRRREVPWDVAAAEDRERGGRGGDGPAAXLSAPIXALEVMELDQKIDLVHELDGHIMRCVRDQNGNHVIQKCIECVPTEHIGFVVSAFQGQVTSLSMHPYGCRVIQRILEHCGGNSQGQCIIDEILQWVCILAQDQYGNYVTQHVLERGKAHERSQIITKLAGQVVTMSQNKYASNVIEKCFQHGDIAERDLLIRRIVEQTEGNNNLLVCLVV

SEQ ID NO: 255674 - protein, 51 aa, Zea mays
  Clone ID: MRT4577_164768C.1.pep
KVLRSKNPGLGPPRIRRNRLLPQCLSPLEFVSAKNFLVGLGNPDTYPKYAR

SEQ ID NO: 255675 - protein, 94 aa, Zea mays
  unsure (1)..(94): unsure at all Xaa locations
  Clone ID: MRT4577_164769C.1.pep
ARXXRAPEXRGGXTEDTTXXDXXXXXXXPXEXXXXQPGXPGDXXXXQXGEXXKGXXTPTRXEXKRXXPNXTEXKXPQXKXHPXHKXXHKRXPXE

SEQ ID NO: 255676 - protein, 70 aa, Zea mays
  Clone ID: MRT4577_16476C.1.pep
HASAHASVKKKKKKKKKKERKKKKKGKKKKKKKKKKKKKKKKGGAVKKEQRLTNPRMQKKKFGIGSPKLN

SEQ ID NO: 255677 - protein, 355 aa, Zea mays
  Clone ID: MRT4577_164770C.1.pep
GFDESKTCSFLEELKSNRARRVELSDITGRIVEYSADQHGSRFIQQKLENCTAEEKAYVFAEVLPHASSLMTDVFGNYVIQKFFEHGTREQRRDLATKLVGHVLPLSLQMYGCRVIQKALEVMELDQKIDLVHELDGHIMRCVRDQNGNHVIQKCIECVPTEHIGFVVSAFQGQVASLSMHPYGCRVIQRILEHCGGTSQGQCIIDEILQWVCVLAQDQYGNYVTQHVLERGNAHERSQIIIKLAGQVVTMSQNKFASNVIEKCFQHGDMAERDLLIRHIVEHTEGNDNLLAMMKDQYANYVVQKILETCNENQRELLVSRVKGHMQALRKYTYGKHIVSRVEQLCGDGTAESGS

SEQ ID NO: 255678 - protein, 59 aa, Zea mays
  Clone ID: MRT4577_164771C.1.pep
GDKGHGALISHSTAKDTKPLGAHPGGGGHRSWGPNYGNWTGKIKPNTTGKRQHPQLMEF

SEQ ID NO: 255679 - protein, 240 aa, Zea mays
  Clone ID: MRT4577_164772C.1.pep
ESKALEVMELDQKIDLVHELDGHIMRCVRDQNGNHVIQKCIECVPTEHIGFVVSAFQGQVTSLSMHPYGCRVIQRVLEHCGGTSQSQCIVDEILQSACVLAQDQYGNYVTQHVLERGNAHERSQIITKLAGQVVTMSQNKFASNVIEKCFQHGDIAERDLLIRRIVEQTEGNNNLLAMMKDQYANYVVQKILETCNEDQRELLLSRVKDHMQALRKYTYGKHIVSRVEQLCGDGTAESGS

SEQ ID NO: 255680 - protein, 603 aa, Zea mays
  unsure (1)..(603): unsure at all Xaa locations
  Clone ID: MRT4577_164773C.1.pep
SQNTLSGDLKMPANASSXLQGVDLSNNAFSGVIPSEISKLQNLQSLNMSWNSMYGSIPASILAREWPGVLDFTANRLNGCIPASKGGESLKELRLGKNFLTGNIPAQIGNCSALASLDLSHNSLTGVIPETLSNLTNLEIVDLSQNKLTGVLPKQLSNLPHLLQFNVSHNQLSGDLPPGSFFDTIPLSCVSDNPGLCGAKLNSSCPGVLPKPIVLNPNTSSDPISPTELVPDGGRHHKKTILSISALVAIGAAVLIAVGVITITVLNLRVRAPGSHSGAVLELSDGYLSQSPTTDMNAGKLVMFGGGNPEFSASTHALLNKDCELGRGGFGTVYKTTLRDGQPVAIKKLTVSSLVKSQVEFEREVKMLGKLRHRNLVALKGYYWTPSLQLLIYEFVSGGNLHKQLHESSTTNCLPWKERFDIVLGIARSLAHLHRHDIIHYNLKSSNILLDGSGEAKVGDYGLAKLLPMLDRYVLSSKVQSALGYMAPEFACRTVKITEKCDVYGFGVLILEILTGRTPVEYMEDDVVVLCDVVRAALDEGKVEECVDERLCGKFPLEEAVPIMKLGLVCTSQVPSNRPDMGEVVNILELIRCPQDSPETELG

SEQ ID NO: 255681 - protein, 67 aa, Zea mays
  Clone ID: MRT4577_164774C.1.pep
CEDALRKIKALIGPDQKEYHRELERNYCRLREALQPLLTQRLPQLMAPTPPGLRNSLNRATFRKADL

SEQ ID NO: 255682 - protein, 110 aa, Zea mays
  Clone ID: MRT4577_164775C.1.pep
LRVRLDLDPDLDLYLTSQGPFRMSNIFHYVHVYNAKPHHQYHTQLKRQRFKHTGAYGPYISHLYYNWPTCTCHQLSQTWHHLSPSFKDTTFISPHAFTNTLRTCSLALPT

SEQ ID NO: 255683 - protein, 275 aa, Zea mays
  Clone ID: MRT4577_164776C.1.pep
FFFFFTMSRIDDAVERILRVKFISGVFEHPFSDQSLLDIVGCKEHRLLAREAVRKSLVLLKNGKDQNKPFLPLAKDAKRILVAGTHADDIGYQCGGWTIAWHGDSGKITLGTSILEAIQELVGVQTEVVYEKCPTEAMIETGGFSYAVVVVGEVPYAEWTGDRTDLSIPFNGSDLIIRVASKIPTLVIVISGRPLIIESQVLEKIEALVAAWLPGSEGMGITDCLFGDHDFVGTLPVTWCKSVDQLPIDAGDSNYDPLFPVGYGLKMFRSDNDST

SEQ ID NO: 255684 - protein, 154 aa, Zea mays
  Clone ID: MRT4577_164777C.1.pep
RVCAGTWNVGGICPPNDLDIEEWLDIDDEPADIYVLGFQEIIPLEVGYMIGTEDTRPVAVWEHIIHETLNKKCPDKSKSKRHSDSPPPARFNPLDYVLAVENELHNESNSDSDGELHRLHNAESSDSARRRLRLDLACGVHNYNGDRKSCSMYG

SEQ ID NO: 255685 - protein, 45 aa, Zea mays
  unsure (1)..(45): unsure at all Xaa locations
  Clone ID: MRT4577_164778C.1.pep
TKSCSKFGYTCFYXPSEVXFFCSDIXXXXXNSIXTPIFFLIRFEL

SEQ ID NO: 255686 - protein, 264 aa, Zea mays
  Clone ID: MRT4577_164779C.1.pep
MANREESQMQQAAHVPCRLRRQKSEILRAQYVDVRELRVCAGTWNVGGICPPDDLDIEEWLDIDDEPADIYVLGFQEIIPLEVGYMIGTEDTRPVAVWEHIIHETLNKKCPDKSKSKRHSDSPPPARFNPLDYVLAVENELHNESNSDSDGELHRLHNAESSDSARRRLRPLDLACGVHNYNGDKRKRLQYVRVISKQMVGVFLSVWVQRSLQKHIQNLRVSTVGVGTRGFIGNKGSVSVSMTMHETHFCFVCCHLASGEINGD

SEQ ID NO: 255687 - protein, 65 aa, Zea mays
  Clone ID: MRT4577_16477C.1.pep
VQLIFSGLIMKLRVFIVAVLIVINLGTCMAKVGSYGTTVSASPRQIRVLTAATDGRNGPPSNDHQ

SEQ ID NO: 255688 - protein, 147 aa, Zea mays
  unsure (1)..(147): unsure at all Xaa locations
  Clone ID: MRT4577_164780C.1.pep
VFYRYPALGKDDNVHAVYKYWTSKRSKRAAPLLRVFRVHXIRRGHLSQKSAMKRKRSFKRQKSQAGRGKPEALLQYNAEEDAALHRVAQAERAAKQAVERAIRLRNRAQSLMTNAELAAYKSVMALRIAEAARISDSSRDIVCTILD

SEQ ID NO: 255689 - protein, 83 aa, Zea mays
  Clone ID: MRT4577_164781C.1.pep
IISNGIIGGRVIYGYSRHNRINQHACKHTYISTKTDTKHAKRDSKLNNSVYLSFTHTPHNTYVWHPAQPRLLLFNHHHKLDRL

SEQ ID NO: 255690 - protein, 325 aa, Zea mays
  Clone ID: MRT4577_164783C.1.pep
QLYTTYWYLRGVKIQGITRYLLKPSDMRSYVINRHTQAYMWTVDDAWKLEFTDRWDWLLFKELHVVGRERNSQGKAIPIPGVHEVSGEMEGIVTDPFLRPVPDYIRMVDDEVGRAISRDSIYDMDSEDEQWLIQLNHADSDSNSSQRNHISYEDFERIISIFEKDAYNNAQGKNDLSEFFYRYPALRKDDNVHAVYKYWTSKRSKRAAPLLRVFQGAPIRRGHLSQKSAMKRKRSFKRQKSRAGRGKHEALLQYNAEDEAALQRVAQADRAAKRALETAIQLRNRAQSLMTNAELAAYKSIMALRIAEAARISDSSRDIVCTILD

SEQ ID NO: 255691 - protein, 209 aa, Zea mays
  unsure (1)..(209): unsure at all Xaa locations
  Clone ID: MRT4577_164784C.1.pep
RVPSFVRSFLPPSLPVAGPWKGGRGGCAAAPPRGGGAEREAKRRRVXXVXAGPPAGAAAAAXAPGAPQPXAPRRAASLXGLPPRLPGPRXRAXSRXGPAAPPHARXXXRPXVVGPXPXPXLLXXXTPHVAXPPAPXAPXGIXLPXFLAGPPLPAAXRGXXAPPPPWGGGVPPAAPGGXCPSRRSPGXSLLTPXLLPXXXPPALRPPMAP

SEQ ID NO: 255692 - protein, 145 aa, Zea mays
  Clone ID: MRT4577_164785C.1.pep
KQFFTAPNSPAGRGAPILPARPSAPAPPCAPPPLLPVASTGAPRAGARRRARAEKVVQPERHSTRLAQKASSNFVNMTDKAVQRKEIQNSLQPCSAAVKKEVQKKGLLNKTKAPISVAALRKLVRAAGLGCSAADAVGVVPPAVE

SEQ ID NO: 255693 - protein, 73 aa, Zea mays
  Clone ID: MRT4577_164786C.1.pep
RTAALLIKSGFIDLDNVYSHLLPNDDEAFEHFDSFISRRIDEVGISYKSVTGQESSMKGSGKKVDGWKTLEVS

SEQ ID NO: 255694 - protein, 35 aa, Zea mays
  Clone ID: MRT4577_164787C.1.pep
SRPRSWRLTPTSTPTTGTRQAIYTIPPKLKSEYSR

SEQ ID NO: 255695 - protein, 99 aa, Zea mays
  Clone ID: MRT4577_164788C.1.pep
FLLVSTQSWQPTMRVLMCVRVWFLGIASAIEVSKGSLGSLGCVSVPYSHAVLAFDHPQCLCCQVRSGLNTVTLSPYKSPLPVEAACVQQAYIEFVMVLG

SEQ ID NO: 255696 - protein, 122 aa, Zea mays
  unsure (1)..(122): unsure at all Xaa locations
  Clone ID: MRT4577_164789C.1.pep
DGTMNNPNLASFQHVIRPPSERRDHMSHESSNAPVNNHQSTSEVNKGYFQQGIKQIHSDARQGQAHLVNGTWPHQKTELLRSNLQSTGVQXTPPGGHGFGMSQQNATDHKNDCSENFPERHV

SEQ ID NO: 255697 - protein, 73 aa, Zea mays
  Clone ID: MRT4577_16478C.1.pep
HTCIRYRYVCQKKKIAAIDIRIYIDLVDRLVVVFMFYFLWILFFYMVIFFIFFLFVIFFFFFFNFFFIFYFFF

SEQ ID NO: 255698 - protein, 40 aa, Zea mays
  Clone ID: MRT4577_164790C.1.pep
KLSSSRDLAQPVNGRIPLTANPEKVNLLCDRLTLSLVFLS

SEQ ID NO: 255699 - protein, 83 aa, Zea mays
  Clone ID: MRT4577_164791C.1.pep
DGIERIFSTINVHIDEQGEHYGLAPVAESVDKPNKLPAVCWRRWNLERECTVRSRKKTTNAFCSRRRSRGYNCGYFCQSAWPN

SEQ ID NO: 255700 - protein, 73 aa, Zea mays
  Clone ID: MRT4577_164792C.1.pep
LSRYYLDMLRGLSLTCLRAGDAPSPQPLLRAQQQMHADRPAHHAQGRRAPGDHPPGSLQAACSWRARAMDVER

SEQ ID NO: 255701 - protein, 70 aa, Zea mays
  Clone ID: MRT4577_164793C.1.pep
LYTYLGLMHKHSTHTHCVQPVLLTTEFSSTLVMTCFIEHTLHQQYCATQHSHQHSHDFCITDTTHISSSG

SEQ ID NO: 255702 - protein, 130 aa, Zea mays
  unsure (1)..(130): unsure at all Xaa locations
  Clone ID: MRT4577_164794C.1.pep
KNKMLSLKCVDCGMAXNVDMRXDKLTGLRXENPTEYKKGGIVWLNAIRRGDKERLNVGEAGAXDHTKLRTDAYENGASCKESTGXKVQSRWLLLCGSDDDXHSSYATHSPNSEHSTTYEEEDDYHVHCET

SEQ ID NO: 255703 - protein, 129 aa, Zea mays
  Clone ID: MRT4577_164795C.1.pep
EIVFGKGQSLKKNGFFGAGDTICFRGQPQKKKDFLPKKKFEKEFWGDEPPKQGSKLNLKGSFSLKNDYFWRKKLRFGLKLIWWKAPKQSLLWGKKRVYWGEKNDFCSKFFQFLPKLEKRAPPPTWGANF

SEQ ID NO: 255704 - protein, 157 aa, Zea mays
  Clone ID: MRT4577_164796C.1.pep
MAKLYVQAFPPADLNKNTEWFMYPGVWTTYIIIVFFSWLLVLSVFGCTPGTAWTVVNLFHFAITYHFFHWKKGTPFADDQGMYNTLTWWEQMDNGKQLTRNRKFLIVVPVVLYLIALHTTDYQQPMLFLNTLAVSVLVVAKLPNMHKVRIFGINAES

SEQ ID NO: 255705 - protein, 137 aa, Zea mays
  Clone ID: MRT4577_164797C.1.pep
GGWAPKNMAAFCPRGQGPPLKLGFFKKAPSKVFVGRAPKKPKVSPKVFFFFGPKSDEDFCPFPKGGGCFFFWGLWFGGFLPPPRIVLPFWGPLFKEIWPVVAGFWKLFFNPLPLWGGKTLPFGAPLCFVGGPIVVGF

SEQ ID NO: 255706 - protein, 189 aa, Zea mays
  unsure (1)..(189): unsure at all Xaa locations
  Clone ID: MRT4577_164798C.1.pep
MAKLYVQAFPPADLNKNTEWFMYPGVWTTYILIVFFSWLLVLSVFGCTPGTAWTVVNLFHFAITYHFFHWKKGTPFADDQGMYNALTWWEQMDNGKQLTRNRKFLIVVPVVLXYLMRPPLEGLFGDRNGERRRRRLEPGIALVLYLIALHTTDYQQPXVFLNTLAVGVLVVAKLPNMHKVRIFGINAEN

SEQ ID NO: 255707 - protein, 149 aa, Zea mays
  Clone ID: MRT4577_164799C.1.pep
PHVHENHDPDEIDKAYETCRTACLNDLTYEECFHGRYDILDAILHAAVQCPVLSIEAIIDACALYYAPYTGAHAAVVIPDGLPDRDIKYMLKLGMRLVMAALDEGHDDREMDRDVGIDGVLLIRINNTYLETFAVAITLTEGLLERDLG

SEQ ID NO: 255708 - protein, 46 aa, Zea mays
  Clone ID: MRT4577_16479C.1.pep
LTWDPSWKHHSPRRPELSDNDIHATVRHPPLGKAADLTQWTIVLAR

SEQ ID NO: 255709 - protein, 101 aa, Zea mays
  Clone ID: MRT4577_1647C.1.pep
WFPSICWLSGFRVFWTRIPLSCAVPLLLSKSRFWCLSQLHVEFLLDLPRYCVGRTFLCLSDMASGIVWASPQDTPLVGVSQLQYASTRFERHVSSLFQGIH

SEQ ID NO: 255710 - protein, 102 aa, Zea mays
  Clone ID: MRT4577_164800C.1.pep
RDVVAAALVASHPRALPRLPRQGVRPLAAPVGAFRCFWVVPGRPAEPAVGGSCASSVASCAGLGGVALWPVLRGGVLPGVNGCLLLVVWRYAALSLCPRVAA

SEQ ID NO: 255711 - protein, 62 aa, Zea mays
  Clone ID: MRT4577_164801C.1.pep
SPLNFKNVKYCIPKTSVFINYTNCKQSWSSYYLMGIDCHDPYLSSYDLTQALHVHNKKIKYR

SEQ ID NO: 255712 - protein, 156 aa, Zea mays
  unsure (1)..(156): unsure at all Xaa locations
  Clone ID: MRT4577_164802C.1.pep
MSTAGGEPSVFNPIPFQPSFDTNSLTSLYADLPFPLGCLDSEEEDGLGIGLDFSGLRDPEFVLQFLFVCNELLSDNLDDYITDEEGYDPTQECFHADHEEHDGGNQLGMLQENDVPPHTQGRQERRVGSKPXGSHMAHLQQLRKLHAKLGEQQQWL

SEQ ID NO: 255713 - protein, 56 aa, Zea mays
  Clone ID: MRT4577_164803C.1.pep
QVTHKGYSVQHSSSATITQVQLYTQIWLAQFSATLRGNLVLTLYIPTDITTTTKIL

SEQ ID NO: 255714 - protein, 66 aa, Zea mays
  Clone ID: MRT4577_164804C.1.pep
THELHDKSHINYMTEESSIVIIRHISSPVTNKRQYLIHRHNQSLKYKNAIHMEADDHPSPSGCSDE

SEQ ID NO: 255715 - protein, 57 aa, Zea mays
  Clone ID: MRT4577_164805C.1.pep
VLNYSSISCALHLHLFSARSFQIFISQTQSNLNNIYTRKHYSLTFTQLLTHNFYTLT

SEQ ID NO: 255716 - protein, 95 aa, Zea mays
  unsure (1)..(95): unsure at all Xaa locations
  Clone ID: MRT4577_164806C.1.pep
MDTQPSGTLALELASSPSKIFRAASVHPAGQFGGDMAAVGHLFHDEKRAMRGSKFALLPSTSPFFRTPXPRMAHPGRALTTNNAACLAKFLERKL

SEQ ID NO: 255717 - protein, 66 aa, Zea mays
  Clone ID: MRT4577_164807C.1.pep
MMIPARHMPPTMIVRNGGAAYGSSSALSLGQPNLMDNQQLQFQQALQQQHLLLDQIPATTAESCDN

SEQ ID NO: 255718 - protein, 436 aa, Zea mays
  Clone ID: MRT4577_164808C.1.pep
MTKQVVVVDTALVAPSEETPRQPLWLSNLDLAVPRTHTPLVYYYPAPGTGSFAPDRLRAALGAALVPFYPLAGRLGVGPDGRLQIECNSKGALFVVANADLTGADVFDDYEPSSEIRNTFVPLGESGEANNSPISMFQVTFLKCGGVVLGTAIHHAAMDGVGAFQFMQTWSGVARGLDVAEACGPQPFHDRTLLHARRPPCPTSDHFVYSPAFLSGRPRPYVTRIYSVSPKLLADVKSRCAPGVSTYCAVTAHLWRCVCVARGLAPGADTRLGLPANVRHRLRPPLPRTFFGNAVVRDHVTAPVSTVLGAPLGSVAETIKKAVDRVDDAFARSVLDYLELQNAGGKQLSGQAQAQAPREQLVPATDLWAVSWLGMAMYDADFGSGAPRFVAPAQMFGIGTAYMTPRGPDRDDGIAVLISLEPEYLSCFEKVFFYNE

SEQ ID NO: 255719 - protein, 43 aa, Zea mays
  Clone ID: MRT4577_164809C.1.pep
DIMFLFGTSSRINSLNCFETRLAFLGFSFMTREKLKTNDKPTP

SEQ ID NO: 255720 - protein, 58 aa, Zea mays
  Clone ID: MRT4577_16480C.1.pep
MGVYTFVCRNNGGEWTAKQHSGGGAAASGGAAAEAPKEEKKEEEKEESDDDMGFSLFD

SEQ ID NO: 255721 - protein, 96 aa, Zea mays
  Clone ID: MRT4577_164810C.1.pep
EIDCLDPTPRCLSEPCFFVGLHLALTVKGAFLVGDLDLVLCAGRSSICRPDSIAWAAIDQALVLLLTLASVCVRACARDRVDGSNAWPDAWADAWT

SEQ ID NO: 255722 - protein, 506 aa, Zea mays
  Clone ID: MRT4577_164811C.1.pep
MVAEAAPFSSSAIWSCHRDEITFDRLHKFWSALSPHARHELLRLDKQTLIEHARKNLYCSRCNGLLLESFTQIVMYGKSLLHEGSCEPRIQEVEAEVQEPSVHPWGGLSTTKDGILTLLDCFINAKSLHVIQNVFDNARAREREREMLYPDACGGGGRGWISPVIPNYGRGHGTRDTCALHTAHLSCDTLVDFWSALGEETRSSLLRMKEEDFIERLMHRFDSKRFCRDCRRNVIREFKELKELKRMRREPRCTSWFCVADTTFKCEVFEDAILVDWHQSLLEQDGIYHHFEWAIGTDEGKSDILNFENVGMIGQVHRKGLDLDHFEDYFVTLRACRLDGRRTEFCVKAHALKGQSCVHRRLIVGDGFVTITKGESIRSFFEHAEEAEEEDEDDVVDRDSNDPDGDIAHPQKHAKSPELAREFLLDAAAVIFKEQIEKAFREGTARQNAHSVFVSLALKLLEERVHVACKEIITLEKQTKLLEEEEKEKREEEERRERRRTKEKLI

SEQ ID NO: 255723 - protein, 223 aa, Zea mays
  Clone ID: MRT4577_164812C.1.pep
MSFLFGKRKTPAELLRENKRMLDRSIREIERERQGLQAQEKKLITEIKKTAKEGQMGAVKVMAKDLIRTRHQITKFYQLKSQLQGVSLRVQTLKSTQAMGDAMKGVTKAMAQMNRQLNLPGLQRIMQEFERQNERMEMVSEVMGDAIDDALEGDEEEEETEELVNQVLDEIGIDINQELVGAPSAAVAQPASAGRVAQAESAGNADTGIDADLQARLDNLRRM

SEQ ID NO: 255724 - protein, 120 aa, Zea mays
  unsure (1)..(120): unsure at all Xaa locations
  Clone ID: MRT4577_164813C.1.pep
XCXXXXXXCEXXXXXXXGXSIXXXLXXXXXXXHXXXXLXXXXXXXXXXCXXXXAXXXHXXXXVXXXXXXXXLXXRSXXTXXXXAXXXXXXXXXXWXXXXXVXXXCXXQXXDXXAXXXXNR

SEQ ID NO: 255725 - protein, 76 aa, Zea mays
  Clone ID: MRT4577_164814C.1.pep
LKRGSQLYPNLSRRSIFWTSRKKIRLFFRSPGFFLKFQHFAFFFSIQIKKVLTCPLFCHFKHNLFFFIIFPPNLFF

SEQ ID NO: 255726 - protein, 223 aa, Zea mays
  Clone ID: MRT4577_164815C.1.pep
MSFLFGKRKTPAELLRENKRMLDRSIREIERERQGLQAQEKKLITEIKKTAKEGQMGAVKVMAKDLIRTRHQITKFYQLKSQLQGVSLRVQTLKSTQAMGDAMKGVTKAMSQMNRQLNLPGLQRIMQEFERQNERMEMVSEVMGDAIDDALEGDEEEEETEELVNQVLDEIGIDINQELVGAPSATVAQPASVGRVAQAESAGNADSGIDADLQARLDNLRRM

SEQ ID NO: 255727 - protein, 67 aa, Zea mays
  Clone ID: MRT4577_164816C.1.pep
CRRTFIICTGLQLTNMARPWSLLHNIPYTVSQNCRLLGTNWRRRRQRLLLVLTAEQSSSRNRNRRAN

SEQ ID NO: 255728 - protein, 67 aa, Zea mays
  Clone ID: MRT4577_164817C.1.pep
SLIKAVIHKSILLCSKRWVCNLTLDYERVLCRNALLVCLSTRCGWICLRYSSITLFSALRWDPRSGV

SEQ ID NO: 255729 - protein, 66 aa, Zea mays
  Clone ID: MRT4577_164818C.1.pep
ALSSNIDPLLLMRRHLILHNHYHRNPYNDNHIEASWCTHLQTKPVTSNLMPSQTVFLIQWTWQTPL

SEQ ID NO: 255730 - protein, 210 aa, Zea mays
  Clone ID: MRT4577_164819C.1.pep
MRWLDAQTPASVVLVCFGSEYFMSEQQLARMARGLELSGERFVWVVRFPRETEEGDEAARALPRGFAPAPGRGLVVEGWAPQRRILAHPACGAFLSHCGWSSVLESLAAGVPIVALPLHIDQPLDANLATELGAAVRVQQERFGEFRAEDVARAVRRAMRGEESHALRRRAAELREVVARNDADDAQVAALVQRMARLCGKGQQRVAVPN

SEQ ID NO: 255731 - protein, 120 aa, Zea mays
  Clone ID: MRT4577_16481C.1.pep
MGVYTFVCRNNGGEWTAKQHSGEIEASAATPYELQRRLVAAASAADSAYGVQSSFSMVTPSSAVFQVIVGAVGGGAMMVSGGGGGGAAASGGAAAEAPKEEKKEEEKEESDDDMGFSLFD

SEQ ID NO: 255732 - protein, 102 aa, Zea mays
  Clone ID: MRT4577_164820C.1.pep
AVLPARGCEAGCLLDTSPVGAVLAARCVYRWPPVPLASIPAVRPSWLDQPSKRYRWNPSFLAPWRAFVPRCSSPRLSSVRSLWLLVLAAGPCGREERQGRLR

SEQ ID NO: 255733 - protein, 92 aa, Zea mays
  Clone ID: MRT4577_164821C.1.pep
VEPGLAQWLGREMLLLLDEFVLPNQVVVLVAHIDVVFVVQHIRLGVRSVLVGVRIGCALPSWETLWSEPANEQRLVSYESSVQVEWDGPAGP

SEQ ID NO: 255734 - protein, 71 aa, Zea mays
  Clone ID: MRT4577_164822C.1.pep
EVTNYVLTLDNYEGGFPKIASRIWFFSNPSQVLRVIYLFFPPALFVKILPKFLISLPKFLPRPVFFTRGKI

SEQ ID NO: 255735 - protein, 121 aa, Zea mays
  Clone ID: MRT4577_164823C.1.pep
TNIKALDLFITGNKGYNFLVKKKKEYPQNVTSLPLHHYFRIGRPATYMGFYCHPIFNALNNLFPTAVCKNKPAFLSMPSYIMTSKNIISFPRPCESLTPTLFLGGKCNGQAFWLWLIGNKQ

SEQ ID NO: 255736 - protein, 78 aa, Zea mays
  unsure (1)..(78): unsure at all Xaa locations
  Clone ID: MRT4577_164824C.1.pep
VSRISIHIDQVGIQVTNACWELYCLDHVIXADGYMPFDKTIGVNDDLFHSFYRETVAAKTVPRADCADLDXSFNDEVR

SEQ ID NO: 255737 - protein, 464 aa, Zea mays
  unsure (1)..(464): unsure at all Xaa locations
  Clone ID: MRT4577_164825C.1.pep
MARKHQHVAIFTTACLPWMTGTAVNPLFRAAYLAKAGDWEVTLVVPWLSKGDQELVYPNKMRFSLPAEQENYVRRWLEERTGLLPKFDIKFYPGKFSTEKRSILPVGDISQTISDDKADIAVLEEPEHLTWYHHGRRWKSKFQKVIGVVHTNYLEYVKREKNGYISAFILKHINSWVTDIYCHKVIRLSAATQDVPRSVICNVHGVNPKFIEIGKLKHQQLCQREQAFFKGAYYIGKMVWSKGYTELLQLLHKHQMELSGLKMELYGSGEDADEVKASAERLSLDIRVYPGRDHGDSIFHDYKVFINPSTTDVVCTTTAEALAMGKIVICANHPSNXFFKRFPNCHMYNTDEEFVRLTMKALAEEPIPLSDDLRHELSWEAATERFIRVADXLHQLCLWDNHHPPHSISCASPXELQKNMEEASAFFHNTISGFEAVRCVFGAIPNTLQPDEQQCKELGWNLQG

SEQ ID NO: 255738 - protein, 71 aa, Zea mays
  Clone ID: MRT4577_164826C.1.pep
INGHKIRKRKGVHLIPHPQRVSRLSKIVRRGFSSSMSSVFLPAHPWQCHHSSKCASPIYCTDAPQGRCQQL

SEQ ID NO: 255739 - protein, 59 aa, Zea mays
  Clone ID: MRT4577_164827C.1.pep
EHSLLPLLDHVTRYEISLQGNQSAWFCKICWERYDTAYCFLVPIYMWIKNHIVPKSMPI

SEQ ID NO: 255740 - protein, 252 aa, Zea mays
  Clone ID: MRT4577_164828C.1.pep
MAMRHRARSSPTSPLTPSSSARTNKILGFSVSLILINLASIMERADENLLPAVYKEVSAAFNAGPADLGYLTFVMNFLKSIASPLAGILALHYDRPIVLAIGTVFWALSTGAVGVSQRFGQVAFWRAVNGLGLAIVIPALQSFIADSYKDGTRGAGFGLLSLIGAVGGIGGSILATIMAGKDYWGFPGWRVAFMMVALVSLIIGILVYLYATDPRRIPGNRLLDEDEYERCAILFISPSWRGSLINTTMVAK

SEQ ID NO: 255741 - protein, 54 aa, Zea mays
  unsure (1)..(54): unsure at all Xaa locations
  Clone ID: MRT4577_164829C.1.pep
FHYKETXVPAPQSGLGDDDLDLSRTHRNILHAPHPVVPVLDLGLEIPGTNLLFR

SEQ ID NO: 255742 - protein, 119 aa, Zea mays
  Clone ID: MRT4577_16482C.1.pep
MGVYTFVCRNNGGEWTAKQHSGEIEASAATPYELQRRLVAAASAADSAYGVQSSFSMVTPSSAVFQVIVGAVGGGAMMVSGGGGGAAASGGAAAEAPKEEKKEEEKEESDDDMGFSLFD

SEQ ID NO: 255743 - protein, 104 aa, Zea mays
  Clone ID: MRT4577_164830C.1.pep
HVSTTRIGVRRSPMNICAAPNVGNHNVHSLSCEFLPRSRWLHQASRHLNRTLRDVSRGEHGGGVLPKRQIGQLACASAHTSSDKRDTFPSLSSVLSGSIAGGAR

SEQ ID NO: 255744 - protein, 102 aa, Zea mays
  Clone ID: MRT4577_164832C.1.pep
RVDDSGARVVLNSMIVQARACMEVPPRDELCPDLSQPHGLQLATWLLTLPRSSSSCRSSTLESQQVAICNAQSYADDLWEAEPQSPVSVSSRKLAPEREEIK

SEQ ID NO: 255745 - protein, 225 aa, Zea mays
  Clone ID: MRT4577_164833C.1.pep
MEKYTKALASLLTMLVLAPLLAMATDPDPLQDFCVADLNGKPSVNGYPCQPPSSAGDQFLFSTKIATGGDPLANPNGSNVTELDVSEWPGVNTLGVSMNRVDFAPGGTNPPHVHPRATEVGLVTRGELLVGIVGSLDSGNRYYSKVVRAGETFVIPRGLVHFQFNVGKEDATMVVSFNSQKPGIIFVPLTLFGSSPPIPTPVLSKALRVDASVVDLIKSKFAGGY

SEQ ID NO: 255746 - protein, 86 aa, Zea mays
  Clone ID: MRT4577_164834C.1.pep
MATVPVNPKPFLNNLTGKPVIVKLKWGMEYKGYLASVDSYMNLQLANTEEYIDGQFSGNLGEILIRCNNVMYLRGVPEDAEIEDAE

SEQ ID NO: 255747 - protein, 80 aa, Zea mays
  Clone ID: MRT4577_164835C.1.pep
RFNKRVHQGRAQETRTTPPKEKETKEATRSNPEKLEHLNSKGAKHTFSQKEGKRKARCPQIMLVWKVPQKSIGPKITHHS

SEQ ID NO: 255748 - protein, 58 aa, Zea mays
  Clone ID: MRT4577_164836C.1.pep
TGGEFFAPPSTPRSGIAQRPTKRQRSRRKRKPTLRGEGKEHMQLTTHGRLAHTGESPR

SEQ ID NO: 255749 - protein, 106 aa, Zea mays
  unsure (1)..(106): unsure at all Xaa locations
  Clone ID: MRT4577_164837C.1.pep
PPGFSETAGKGTILPQWSQAAIAPLLPPYLSPAGASGXGNTGDHPGRIQKGTTGGSEPLSHQSLQRWCAVLQRSPWGNYLDKNIGERLLHKLGLGKVGDYTQQQES

SEQ ID NO: 255750 - protein, 146 aa, Zea mays
  unsure (1)..(146): unsure at all Xaa locations
  Clone ID: MRT4577_164838C.1.pep
LGTSRPAGKKISKKKKKKKKKKKKPGGFGHRPPGSKKXLLAWGSAHFLTSKGGXLQKIIKPNYKTRXFLVDTMXKVAAIASMCVQPEVTQRPFMGEVVQALKLVCREFEETSYVRLKSFREDDLATSVPGERVGISECNITLPQPG

SEQ ID NO: 255751 - protein, 86 aa, Zea mays
  unsure (1)..(86): unsure at all Xaa locations
  Clone ID: MRT4577_164839C.1.pep
MERWGSDXCSTRKSNAVTIYGPFDADTVCNKLCCKAGRVIKAMDVKGKEKDGGKVGKEGXGDKPKDADKPAVVENDAGKAWKEGCA

SEQ ID NO: 255752 - protein, 161 aa, Zea mays
  unsure (1)..(161): unsure at all Xaa locations
  Clone ID: MRT4577_16483C.1.pep
PGGNGCPIYAGNLPGDIRKRECXDLLYKHGRVVEIDLEMPPRPAGFALAELEDAXHAEDAIYGRDGYNFYGHKLRVELPHGGHXRTSSVDRSSTCRSAGQRGASKRSDYRDMGTELPSSAXWRDLKDHMQPAGDVRSTDVYREARPTMGIADSTXYEHVKH

SEQ ID NO: 255753 - protein, 119 aa, Zea mays
  unsure (1)..(119): unsure at all Xaa locations
  Clone ID: MRT4577_164840C.1.pep
PRGPESTETXXKAXAERXSSXGXKGTSXDTQEGEGXTTXTGRXXGPKPGXQGXQAQGGGDTTXGSKXTGPHDKXASKEQGAPEEENRXAGERGKATAGARGGANNKATDRQDPQTGPNA

SEQ ID NO: 255754 - protein, 109 aa, Zea mays
  unsure (1)..(109): unsure at all Xaa locations
  Clone ID: MRT4577_164841C.1.pep
CGASSGVTAGWRPGGLSCSGWFWVGGRPGFPRSGALCRRRSRERACCGXLWRRCGSRAPPRGRRCRCRLVSVSCCPGAPLVVGRPRPWLFAXFCPCGCGFALLGERAWV

SEQ ID NO: 255755 - protein, 65 aa, Zea mays
  Clone ID: MRT4577_164842C.1.pep
STLGDNPRSTSFMAGVGTSFPRKVHHRCGLIVEVMTDPSVASRQEEYSAWNPMTGADPKDMKGAI

SEQ ID NO: 255756 - protein, 104 aa, Zea mays
  Clone ID: MRT4577_164843C.1.pep
LHGILFPNHSVEKQFLGNLNTVSTGSNTSNTKLDVIDGDFLGLLLEHKLIELTSGVRSPYTKTTKGVQAHHTSSAWEDMASACETCIIASTDYDRESVHTLNDG

SEQ ID NO: 255757 - protein, 442 aa, Zea mays
  unsure (1)..(442): unsure at all Xaa locations
  Clone ID: MRT4577_164844C.1.pep
MLSCLSMTLKAGHASGETVLDRIDPAVARPRGRRRRRREAPEGPAMTSSVRQWWRRAAAALKDRRSLLLARLRPRRAGSSSWHHRELEAAVIRATSHEDRWMDYRSAARVFAWARSSPTFIRPVMWALARRARRTRCWVVALKSLMIAHGILLRSGRAPRAGRVPFELADFRDRSSSAAARSLAFSAFVRAYFRFLDYRSLFAAQEXRRRXDAERCSDPQTACLDRIAKKQFMLELLLQIRPYGDGMEVPLVLEAMDCVLIEIFQVYGEICTGIARFLISGVQGGPAMLTTRKEVMAAGVKVLWRAAEQSAQLSSYFDLCRELGVANARKLPTSLVRLKDDDVRDLERILMSESDIQNESGEEAEAEAEAEAEAAADVKDAGSTSTNTAVVMATTEWVTFDEERPSAGVVAYHGGGHVSNHWNPFVAAPLDGREGGNLIELF

SEQ ID NO: 255758 - protein, 96 aa, Zea mays
  Clone ID: MRT4577_164845C.1.pep
MASSDGQTEAAAPSVPKNPAMASCRKKKTDDATFLEDLKDHIDEFIHASMDEHKTCFKKTIQKMFGMSKAVAERSAAEAKEAGVESALPLQTSVSQ

SEQ ID NO: 255759 - protein, 58 aa, Zea mays
  Clone ID: MRT4577_164846C.1.pep
IFLSRRDVIFFFLLHHLWAHSSMPTPQKRIRETREPDIHLRERNRNKPPEPNLAGTQD

SEQ ID NO: 255760 - protein, 96 aa, Zea mays
  Clone ID: MRT4577_164847C.1.pep
MASTNGQTEAPAPSVPKNPAMASCRKKKTDDVTFLEDLKDHMDEFIHASMDEHKTCFKKTIQKMFGMSKAVAERSAVEANKAEVESALPLQTSVSQ

SEQ ID NO: 255761 - protein, 164 aa, Zea mays
  unsure (1)..(164): unsure at all Xaa locations
  Clone ID: MRT4577_164848C.1.pep
LGPLNSVDGTYGGQIDSSSSETIIAELSTLMRDMGLHMTALASKLRCTKTVDRKSMQNVIIAARDKEVPEALVVIRSALXQGQALQALYRVFASLDQSVNTSXKMLXEALISAAKPSHSGSLAKQALPSIAKXDAVLCLADGDQKCASTIEMLKGIIEDDSTTN

SEQ ID NO: 255762 - protein, 96 aa, Zea mays
  Clone ID: MRT4577_164849C.1.pep
MASSNGQTEAPAPSVPKNPAMASCRKKKTDDATFLEDLKDHMDEFIHASMDEHKSCFKKTIQKMFGMSKAVAERSAAEANKAEVESALPLQTSVSQ

SEQ ID NO: 255763 - protein, 121 aa, Zea mays
  Clone ID: MRT4577_16484C.1.pep
MGVYTFVCRNNGGEWTAKQHSGEIEASAATPYELQRRLVAAASAADSAYGVQSSFSMVTPSSAVFQVIVGAVGGGAMMVSGGGGGGGAAASGGAAAEAPKEEKKEEEKEESDDDMGFSLFD

SEQ ID NO: 255764 - protein, 44 aa, Zea mays
  Clone ID: MRT4577_164850C.1.pep
TPTRNTNKISLVRIFQPLNIHGKVLNKQTCLTLTLSLYFNYKEL

SEQ ID NO: 255765 - protein, 54 aa, Zea mays
  Clone ID: MRT4577_164851C.1.pep
QTPPLLQYFGPLLTRGKLNAFQSLELSRLVVNKNKNNLLKNWFAEDKLEGSSAE

SEQ ID NO: 255766 - protein, 77 aa, Zea mays
  Clone ID: MRT4577_164852C.1.pep
VLDQLEARIDFKFLVLLSGSGTFLVFHDVALAKDLTEANNDDYVQNIKLLRMTELMVHMWFTGYNVRFVYIPTYISR

SEQ ID NO: 255767 - protein, 82 aa, Zea mays
  Clone ID: MRT4577_164853C.1.pep
MPAPSAAEPSGGIVAPVAVVASHFCPPYVVQLAVKEKKVSLREGDFTITDTNGAVVVTVKGALISIHKRRRLLDGGRNPLLL

SEQ ID NO: 255768 - protein, 37 aa, Zea mays
  Clone ID: MRT4577_164854C.1.pep
LLNIGESGKDKQTQTGLHIPLLILHSNDHMHHQNPPR

SEQ ID NO: 255769 - protein, 109 aa, Zea mays
  unsure (1)..(109): unsure at all Xaa locations
  Clone ID: MRT4577_164855C.1.pep
LGVVICWEGDWCGPFWFFGGLCQWAFWLGDFFGGRQGFSCSVVGKLGAVGCVLGALLFGVCRGLPGFGGVGPLGRPPPFFFFFLPFFFFVCLFKFNWIFFSXAWXXAWV

SEQ ID NO: 255770 - protein, 82 aa, Zea mays
  Clone ID: MRT4577_164856C.1.pep
YYPSLTYYLHADVINCCYRVHLKFNFTAPYVFTNIIDMVKLLVVTPILICLSSTSPSFRQAVCNILKRPCTRTALPNNLLIL

SEQ ID NO: 255771 - protein, 81 aa, Zea mays
  unsure (1)..(81): unsure at all Xaa locations
  Clone ID: MRT4577_164857C.1.pep
MHSTLKGIRGSYTPCFLDLYDAATVAGGVPGSYGAYRATEEQLFTPWTVFVIIAYNXLLTDPRYNKRLALTDRELVTHYLR

SEQ ID NO: 255772 - protein, 78 aa, Zea mays
  Clone ID: MRT4577_164858C.1.pep
RPALFACCGSCPRLWVPFVALVSFRCVSPLLFGFFVFGVGSPLWLWRCGRGPQTPPPGRVFFLVLSPGGLERPLSGSP

SEQ ID NO: 255773 - protein, 92 aa, Zea mays
  unsure (1)..(92): unsure at all Xaa locations
  Clone ID: MRT4577_164859C.1.pep
SSVPVMCLHEDLPCRPLRRRHQRGAVLILTEMLVVGPDVRTGPRCCLTGQKLTPHAWSRTVMHLHIVTRTDVGRDAMGRDDVGPSPGIPXPV

SEQ ID NO: 255774 - protein, 90 aa, Zea mays
  unsure (1)..(90): unsure at all Xaa locations
  Clone ID: MRT4577_16485C.1.pep
YPXRAGRDGKLATRDAKSQSRVWGLGCGGGADDEARRDDSGAQEGGCGRDLDNIWKLPLTPSARMHKSTCACFSVPLAAASPSAVRIGPP

SEQ ID NO: 255775 - protein, 87 aa, Zea mays
  Clone ID: MRT4577_164860C.1.pep
AYSLAVQNVRHMQERLARKNNQKKGSVMTHTIQFWMYVARPKATCFEVMRVKKIIYSSGVHLAARPPPPTEYSCCLAHHPSSPQVSS

SEQ ID NO: 255776 - protein, 188 aa, Zea mays
  unsure (1)..(188): unsure at all Xaa locations
  Clone ID: MRT4577_164861C.1.pep
HSECQTDSVCHVFDHLYEEYGDVLEGMLDGVLFFALVDTRNKSCIAIGDALGFRPWCMGWALGGSLWMTAXMNDWKHYRELSITFXSXHMYCSMTRGLRRSCNPPXFHRLLIKPXYIALLLQKMVDKTVITKLTTDVPLCVLLYCGLDSSVAASDCLQTLDETQGDRQWRTKWLTLCVGSEGTADLKA

SEQ ID NO: 255777 - protein, 389 aa, Zea mays
  Clone ID: MRT4577_164862C.1.pep
MAAAAAAAGGEGDVGGGNSAGALLRIFVGGLAESVGAADLEALFASAGRVAGVEFVRTNGRSFAYVDFHCPNDKALARLFSTYNGCKWKGGKLRLEKAKEHYLTRLKREWEQDAAAAASKEAALKDNAENQKPKLDKAALEGLKINIYFPKLRKVKALPLKGTGKHKYSFRHIEVPSYPIHFCDCEEHCGPPEEANNEYASVLNAAAYEKERNIMNSVMNKLFEKENEHFDSGAMEKCDDRTDTIEPSNTVNGMQIEETEDAPEDLDDLQMEETEESSDEDLDDDLVINIAPRKSNKPAVRENIKLEVNKDSQLQKRPRIEETSLPKKRQKSEASSEPIKRNGEQHVSVTPDTRTAGKTFPAKSEANQNEQKSLDLKAKRTYEFSSALP

SEQ ID NO: 255778 - protein, 44 aa, Zea mays
  Clone ID: MRT4577_164863C.1.pep
MTDWVHAFILNWNVLSHLKRAGYQVTMTHQHTSICPSTCTCVTD

SEQ ID NO: 255779 - protein, 86 aa, Zea mays
  unsure (1)..(86): unsure at all Xaa locations
  Clone ID: MRT4577_164864C.1.pep
VRRVMPWIINAYNSTNSPSXFGVGLTPSTIYNTXNSLPGLPHLLIANRRNSSGVHLDRVGQLQLHHWRMVQAILGRQIGPLLCPTT

SEQ ID NO: 255780 - protein, 68 aa, Zea mays
  Clone ID: MRT4577_164865C.1.pep
KGKKTWPRKAPPFFNRALWGKGLPPRGFFFQKNWGFKKQEVDPRAKLFCPGPKRNQAPPLGDMGPQFF

SEQ ID NO: 255781 - protein, 102 aa, Zea mays
  Clone ID: MRT4577_164866C.1.pep
RLEVYKSPASDTYIVVGEAKIEDLSQQAQLAAAEKFKVQGEAVSNIQENTQTPTVQEESEEEEVDETGVEVKDIELVMSQANVSRAKAVRALKNNSNDIVNA

SEQ ID NO: 255782 - protein, 37 aa, Zea mays
  Clone ID: MRT4577_164867C.1.pep
WDVSLKKCSTQSFNYFKRVGYFQLLSILSFLFNHQKS

SEQ ID NO: 255783 - protein, 52 aa, Zea mays
  Clone ID: MRT4577_164868C.1.pep
YTMKPTNYFNQLLTQNFALTIYCINQHGPSSQYIQYHNCNSNTQHIQLYRPL

SEQ ID NO: 255784 - protein, 188 aa, Zea mays
  unsure (1)..(188): unsure at all Xaa locations
  Clone ID: MRT4577_164869C.1.pep
MTTTRDRGAGGGSASRVGDGDVDLGEGWDWGAIPRLLSSACLFLCSGGCFGCCDKTVKQLGELSRNLITQDQITIGEPFWSTTTIEVEPAXQWCYFSQXSNLASGTGSSHNLPGLGNNGLVLWEHTRQEWTETRSLRLKVKQVREPVLSWNAAYESLLGSNKPFPQPIPLHEMVDFLVDIWEQEGLYD

SEQ ID NO: 255785 - protein, 120 aa, Zea mays; identical to SEQ ID NO: 255731
  Clone ID: MRT4577_16486C.1.pep

SEQ ID NO: 255786 - protein, 78 aa, Zea mays
  Clone ID: MRT4577_164870C.1.pep
SSCPYAAMLLINSNPYSTFLSACFPPQFIQTIHMKSKRIDQRYPIAPLPIMSVVSSGSTSLYRAINVNVQDETVTGHQ

SEQ ID NO: 255787 - protein, 164 aa, Zea mays
  Clone ID: MRT4577_164871C.1.pep
LRGFWLLFWTPPQGRAPIPGIFWACWEQSLGPPRVWAAGPVPPQSNWAPKGKGPKAVPSSPGCDRPRPPRVWEGNVASSNFSIVKGFIYGGFPGGRLLPFPGEIQNNCLMFFLNGFYWAGENFSLFVPQNSVSSRNKGWGWVLKVPPPGPQWGYKEKAKFFLFG

SEQ ID NO: 255788 - protein, 131 aa, Zea mays
  Clone ID: MRT4577_164872C.1.pep
SHVRGRGARLATGDTRRASGGAGIPDAAPHQGRAQRQARLHHARMQRNVARHGHGRCAVRREIIHAGEYPCPARGGARRHPWRIGPRRPKSARRRPALHLRLDPCYSGSRAPRHRGINHLMFTLQDLFRQD

SEQ ID NO: 255789 - protein, 145 aa, Zea mays
  unsure (1)..(145): unsure at all Xaa locations
  Clone ID: MRT4577_164873C.1.pep
MASRFFPFPPVGGLXFVFFFLHQXPPFCRFCLASPPHFFPFHHRGPLTFPFFLPRRLFFSFAPGCGVGPFPFFFHPRWLRFSGPVGPTRGPLFQRALFFPFPPLGFPNPAGFFPPPPLGGAPFLFFFGFWVQKKVFLLGVGASPK

SEQ ID NO: 255790 - protein, 52 aa, Zea mays
  unsure (1)..(52): unsure at all Xaa locations
  Clone ID: MRT4577_164874C.1.pep
PWLKFWKRALKKRAWRNLSRLGGKGSGKRXLGGPAWFIKSGPPSGSGFWGTF

SEQ ID NO: 255791 - protein, 53 aa, Zea mays
  unsure (1)..(53): unsure at all Xaa locations
  Clone ID: MRT4577_164875C.1.pep
KLTISYNTICSSVKKTSYELLTGNKPNVSYFRVFGRKXYILVKRGRRLKFAPK

SEQ ID NO: 255792 - protein, 38 aa, Zea mays
  Clone ID: MRT4577_164876C.1.pep
AYLEVTNKQGLHKPDRSFLTGSSLSYIGPTLDLYYRQY

SEQ ID NO: 255793 - protein, 100 aa, Zea mays
  unsure (1)..(100): unsure at all Xaa locations
  Clone ID: MRT4577_164877C.1.pep
MHVMTDREAYERLMTTAWVFLHEEPTQDAXLXNCTDAIKTCVLLLEDSWAKVXPSXHECGYTWIEANYAHGRLGGATSIDYGIIELCSATPKLTCGSDEM

SEQ ID NO: 255794 - protein, 260 aa, Zea mays
  Clone ID: MRT4577_164878C.1.pep
MTRDETSVAMPTSFMTGSVVGKRFYRDATVRRADDGNGWTVMLDYRTLKSPAKRVLKLPSRALAMAIAAEWEYQESDGIRPFTMPLMKLACTALERVPLTRRKVIDNLMKKFHQDLVFCRSPADSELTIGVHQKQKEKIDPILEWVDTEFGFKPVVYTSFFGGKQDEGLAKAVETVLKKATDCELASIDAMAAAAHSLVIPLAIFRERLGIEEAIELIRLEEDHQVDRWGLVEGGHDVDIADLKVQMSSAVVFLGLSRGL

SEQ ID NO: 255795 - protein, 60 aa, Zea mays
  Clone ID: MRT4577_164879C.1.pep
PCPVQNFCGHLFYQLKQIQVPVMDIDQLILEVGKLITSFIVSDRCIKIMIILFIWPNELS

SEQ ID NO: 255796 - protein, 93 aa, Zea mays
  Clone ID: MRT4577_16487C.1.pep
TREGGPKIKNGGGGGTGLNCTCKKKKPQMGVGGAQAKAKTRGEIPKNVGSRGTGRHRGGGIFEARGTCNKKKKLVKAKTKGGRVFLTCQKGHG

SEQ ID NO: 255797 - protein, 133 aa, Zea mays
  Clone ID: MRT4577_164880C.1.pep
DYFCAPDSVLVPLFIKCAYSIIYGMSCMRYCAQRWAHTDEQAVHLCHEMSFVREAYKAVSGLCRLRTVMQDNAPRILFDFCLKKSIRASDFNVVFSPVIRQRYSILYIMSDLKCAFSKSGPLVSAPSFAVREA

SEQ ID NO: 255798 - protein, 155 aa, Zea mays
  Clone ID: MRT4577_164881C.1.pep
MLLLRIAQLLFKPFHYLPVVQKNIVRLTGKVREGKNDSVYQSASPVMDSNSSNHKNVPRSDVKNSGIVSHSRAWKPKTNSHPQNSSDGNIAVEGKVDSHGGRLEMNMPKGSDTITHQDTSSKPMKRSDGTDEASHSIQENLTQEDGNQKIETGQE

SEQ ID NO: 255799 - protein, 73 aa, Zea mays
  unsure (1)..(73): unsure at all Xaa locations
  Clone ID: MRT4577_164882C.1.pep
MVANGYAPVKGSAAAPSSLSKRSSTSGAPXXSGARSMLQFYTHQPPGRKMSPNTVLFMSIGFGTPSVHDVHMY

SEQ ID NO: 255800 - protein, 71 aa, Zea mays
  Clone ID: MRT4577_164883C.1.pep
NWSYGWFTGRCKVPKVLFVISGTKPRVLYIHTILRAAVYPSNVPCSFQPFTVGVQTKISLKPPKKRKAARR

SEQ ID NO: 255801 - protein, 58 aa, Zea mays
  Clone ID: MRT4577_164884C.1.pep
EIPEFTQMVRKVINCTKEFVFQIYVKTKQKLQYSSMQHSQREGGLHRAPLGSRQVPRW

SEQ ID NO: 255802 - protein, 40 aa, Zea mays
  Clone ID: MRT4577_164885C.1.pep
SSLLGKFILNFSESKELLDECLLGSTNIFAGAYKSMPHSA

SEQ ID NO: 255803 - protein, 97 aa, Zea mays
  Clone ID: MRT4577_164886C.1.pep
VHGLVHLASALVEHHAVPLLGCDREHLQLAVAPHAVWHAAHRDAPAGALAVPLQLVSVPRDQLGHDGDTRSATSSFVLVALAPGWGRSCSLSSQVGR

SEQ ID NO: 255804 - protein, 46 aa, Zea mays
  Clone ID: MRT4577_164887C.1.pep
SGNKWFITKGLQGTTFTSYSNITIYHRRDYKRTCFKRLQFGWIKHL

SEQ ID NO: 255805 - protein, 93 aa, Zea mays
  unsure (1)..(93): unsure at all Xaa locations
  Clone ID: MRT4577_164888C.1.pep
RTGNDNAAPPNGVPVVRKCPAETCIKLFRCFVLSDLTFSYLPVRLDDATLPASACSFYIKPLVNAAAVKMVELRELPCXHHFHCSCIAHVAFM

SEQ ID NO: 255806 - protein, 424 aa, Zea mays
  unsure (1)..(424): unsure at all Xaa locations
  Clone ID: MRT4577_164889C.1.pep
MEGQPLPLLLGLRPAPPPSPHPQPPYPPPTPRTPSRVEPARRSAFEASIGQSDAHGPDRSGWERLTVSSLPFLFPNRARVLALPPPLGAAAVVEATQEDWRRTRSGTWEAALQKWKTKTYALSVPLRKGALRGSFPPSWIKDFVEVQGKKLKFSAELRANLDGIFSEMSRCMDKGQVQPKSAMAADVVSLGDSWLGYAICKELLEPVKNAEEQDWFRRLSDRWKVRKKVCDLAXALDWEDLWRPELAGRISMVXTREVIGAVLKHLGSSYNTVDMEIEVNGGRAAVLNSFTQLQKQXLGDVWVAVGWSSDVVXPAAKRMSNVAVVVPKSGSSLWADLWSARSLPFCQDVIPGASPHSXYLESPVPPEAPRDSNKRRTKLDTNLVRGVPPPEILERCEFLEPLSVVRVVEAEKWASKMTSQLSCF

SEQ ID NO: 255807 - protein, 259 aa, Zea mays
  unsure (1)..(259): unsure at all Xaa locations
  Clone ID: MRT4577_16488C.1.pep
SHNTALPGQEQRSNKLTDINDFDASVQKPMMWSPPPPPNIGKNNPLTFQQRPSVHNSFQLGRRETDFKDASSGAQPFGDSLGFFMQTTFDEAPNRLSSFKNQFQDHSYARQYADPYLFMHQQPSLTVESSRKMHTENNEMHFWNGPSTAYSNSRDQAQDFRFTEHPSNWLSPQFSRAEQPRVIRPHASIAPIELEKXTEGSDFKILXVKVDTASAGXYHLNXPMAGTHEXVLQTXPSVSLDHLQTDWSPEGSLSIAGTT

SEQ ID NO: 255808 - protein, 44 aa, Zea mays
  Clone ID: MRT4577_164890C.1.pep
SSRICVFIELGSIDWDQDVIVLLLLYFLLHLVRKLLFLARGLVR

SEQ ID NO: 255809 - protein, 78 aa, Zea mays
  Clone ID: MRT4577_164891C.1.pep
FLRGYLRFPHLCPFSRFLPSVAAPPGGGRYEGMHFDPLRRGGYRGGKLVMASWTVLDHVIQADGNMPGDHTIGGGDDA

SEQ ID NO: 255810 - protein, 138 aa, Zea mays
  unsure (1)..(138): unsure at all Xaa locations
  Clone ID: MRT4577_164892C.1.pep
DFVEVQGKKLKFSAELRANLDGIFSEMSRCMDKGQVQPKSAMAADVVSLGDSWLGYAICKELLEPVKNAEEQDWFRRLSDRWKDWEDLWRPELAGRISMVXTREVIGAVLKHLGSSYNTVDMEIEVNGGRAAVLNSFT

SEQ ID NO: 255811 - protein, 105 aa, Zea mays
  Clone ID: MRT4577_164893C.1.pep
KNKRVIIHMITPLQTSQVTSIHHHCSLISNGDHDHGSVRFKHHSSLLPIRNDFTPHACADTLQDLILKRFPKCKGRKKEIKKKYVCLLTLLKKREPNWGREVFFS

SEQ ID NO: 255812 - protein, 239 aa, Zea mays
  unsure (1)..(239): unsure at all Xaa locations
  Clone ID: MRT4577_164894C.1.pep
GCLQPDAWADAWVGAVLKHLGSSYNTVDMEIEVNGGRAAVLNSFTQLQKQVQLFHGMNYLKSFSLGDVWVAVGWSSDVVXPAAKRMSNVAVVVPKSGSSLWADLWAIPCATRFQTDQIGSRARGPSPLVHQWFDFCLQSARSLPFRQDVIPGASPLHLESPVPEVPQDKNKRKPKLDTNLVRGVPPPEILERCEFLEPLSGKALEDYQWLMSRVQRPRLGLFGNMLQKMSAVLDFKRRS

SEQ ID NO: 255813 - protein, 535 aa, Zea mays
  unsure (1)..(535): unsure at all Xaa locations
  Clone ID: MRT4577_164895C.1.pep
MEGQPLHLLIAQFHHPCLRGLIPNYPTHYLPTSRLRLRVQRRKPKQLAAVPSRRPSGSQADAPGLVPVPVPVPNTVAALVLQLTVCSLLFLFPNRARALALPPPPGAAAVVEATQEEEEDQEWEAALQKWKTKTYALSVPLRVVALRGSFPPSWIKDFVEAQGKRLKFSPELRANLDGIFSEMSQCMDQGSSSAXSAMAADVASVPDYXLNNNTKLDTLVPMGVAEPEILLXIASFWNPCQVSAWRTTSGXDVSGAEIWGGPYRWGTMVIAYKKDKFKRHNLKPIQDWEDLWRPELAGRISMVDSPREVIGAVLKHLGSSYNTVDMEMDVNGGRAAVLNSFTQLQKQVQLFDSMNYLKSFSVGDVWVAVGWSSDVIPAAKRMSNVAVVVPKSGSSLWADLWAIPCATRFQTDQIGSRARGPSPLVHQWFDFCLQSARSLPFRQDVIPGASPLHLESPVPEVPQDENKRKPKLDTNLVRGVPPPEILERCEFLEPLSGKALEDYQWLMSRVQRPRLGLFGNMLQKMSAVLDFKRRS

SEQ ID NO: 255814 - protein, 455 aa, Zea mays
  Clone ID: MRT4577_164896C.1.pep
LVLQLTVCSHLFLFPNRARALALPPPPGTAAVVEATQEEEEDQEWEAALQKWKTKTYALSVPLRVVALRGSFPPSWIKDFVEAQGKRLKFSPELRANLDGIFSEMSQCMDKGQVQPKSAMAADVVSLGDSWLGYAIRKGLLEPIKNAEEQDWFHSLSDRWKVHLCRNQNGEADPNGTIWGVPYRWGTMVIAYKKDKFKRHNLKPIQDWEDLWRPELAGRISMVDSPREVIGAVLKHLGSSYNTVDMEMDVNGGRAAVLNSFTQLQKQVQLFDSMNYLKSFSVGDVWVAVGWSSDVIPAAKRMSNVAVVVPKSGSSLWADLWAIPCATRFQTDQIGSRARGPSPLVHQWFDFCLQSARSLPFRQDVIPGASPLHLESPVPEVPRDRNKRRPKLDTNLVSGVPPPEILERCEFLEPLSGKALEDYQWLMSRVQRPRLGLFGNMLQKMSAVLDFKRRS

SEQ ID NO: 255815 - protein, 48 aa, Zea mays
  Clone ID: MRT4577_164897C.1.pep
GKSSVRNRRRRDVLQRQRCEKQQTTREYARAIRITACSQRLDYNRILP

SEQ ID NO: 255816 - protein, 65 aa, Zea mays
  Clone ID: MRT4577_164898C.1.pep
SDSKCHQAQPAEILHHEIIRTKKKIQTPPTPNHSQVQLDRHPPVFVNLIGRIGKLYMDLYRVTPT

SEQ ID NO: 255817 - protein, 76 aa, Zea mays
  Clone ID: MRT4577_164899C.1.pep
CPCFAVVVVVVAVAAASSSRKMSTGDVDHRAAGAMSRELGTTAGGAGLISVVSSCQLLVVTAQWLPNRMNPGRLRG

SEQ ID NO: 255818 - protein, 62 aa, Zea mays
  Clone ID: MRT4577_16489C.1.pep
GNFFKAREVLPALKKDYEQVGFKFNKGEEGNNGHQYKKYPDGVIVRLVCCYCPRCGFQPLML

SEQ ID NO: 255819 - protein, 144 aa, Zea mays
  Clone ID: MRT4577_1648C.1.pep
KYKKHTSLIPTPYHPTPSYLAAVSRPGSPHPDRRDAPLWSSWRPHRRTQPLSPIPPPSSLFTGGTPSAGVLPRQLVTLGIRRMSTCTFIKDHDLCCPSCQEGMIRLCSEERQIFARNPRESASSGDSCHLLNPTLDHPALYAPP

SEQ ID NO: 255820 - protein, 80 aa, Zea mays
  Clone ID: MRT4577_164900C.1.pep
AGITGTITKSAKLEGIPGIIIKHAKSADITGIIIKQGTCIEAPQGMQGSQSRKARRTERPRFNNGTVNIKQSNHLPEGND

SEQ ID NO: 255821 - protein, 77 aa, Zea mays
  Clone ID: MRT4577_164901C.1.pep
CTKLGTLLRCSSINRRTSGGHNALALKSEPTTVTCMYLCNVQNLVHYGESCAKGKVRVLARKVSPPTAQCTGLLQDS

SEQ ID NO: 255822 - protein, 130 aa, Zea mays
  Clone ID: MRT4577_164902C.1.pep
RRPAYLELTQHRQRADYFRADYDAEAGILEGGLHKSAPCPVMPKSKVGKANMEKKGAGGKAIFLNDKLPGATIFLIPNRWEPPLNFVELGCLDHRISLELGVPGSSTVVELAVQLVGLAVECRKQIPIPA

SEQ ID NO: 255823 - protein, 93 aa, Zea mays
  unsure (1)..(93): unsure at all Xaa locations
  Clone ID: MRT4577_164903C.1.pep
MTTLRNLKIKTSTCKRIVKELRSYEKEVEKEAAKTADMKEKGADPYDLXLETALADLKATLAELKESNEQGAEIGEAESTIAEVEAVVKPAED

SEQ ID NO: 255824 - protein, 103 aa, Zea mays
  Clone ID: MRT4577_164904C.1.pep
AAIKFEVTSVAFKVAYPMLFPLPFFGVGVRLGHALHVLGVYVSYCSPAFLFFLQVRTDFGSFDFRANCSGCFTLVVSKRPVLQGGNMLSTVYFFGCVGVGPPF

SEQ ID NO: 255825 - protein, 117 aa, Zea mays
  Clone ID: MRT4577_164905C.1.pep
MAAVGAHPVLYHHPAPAGDASSMSSYFSHGGSSTTSSSASSFTAALAPTTTALAEHFDISEFLFDDAAGAGVAGAPGVFADGAARPVVLPVPDAAGGGAIIGAAAGGAAAASEVPER

SEQ ID NO: 255826 - protein, 89 aa, Zea mays
  Clone ID: MRT4577_164906C.1.pep
NGRVSPFSEVSPSLLNKGVMHSKRDLGPLSVLGMGKPPFYYFWAFTMDYFFKGPKNSWPSPIPWGAPTMGFGALIFLDRAGGFLPKKPR

SEQ ID NO: 255827 - protein, 112 aa, Zea mays
  Clone ID: MRT4577_164907C.1.pep
MTTLRNLKIKTSTCKRIVKELRSYEKEVEKEAAKTADMKEKGADPYDLKQQENVLAESRMMVPDCHKRLETALADLKATLAELKESNEQGAEIGEAESTIAEVEAVVKPAED

SEQ ID NO: 255828 - protein, 112 aa, Zea mays; identical to SEQ ID NO: 255827
  Clone ID: MRT4577_164908C.1.pep

SEQ ID NO: 255829 - protein, 141 aa, Zea mays
  unsure (1)..(141): unsure at all Xaa locations
  Clone ID: MRT4577_164909C.1.pep
LGGTSGKTAATKGLAGSSIPGRKTPVARATVRTMPRTRATDILVEPEDTSANLELDXAEKPSLQRDLYSYNTRXPYXAIQMNXLLTKMGSEAPKEGRGLKLLLVRGGXILXAYAIEREEPNLHPTKKGPYEPLHSYPRGKR

SEQ ID NO: 255830 - protein, 119 aa, Zea mays
  unsure (1)..(119): unsure at all Xaa locations
  Clone ID: MRT4577_16490C.1.pep
RGGANRKQPSXRTGRPPRPXRRPKRPPRRPSDPKLPPWVPPARXREPRPXGGVAXXRRPPRRPPPPRPXPPPRRXXPPPPAPPPPHPQAPPSXPPXRNRTXPXXAPRPPTXXPRGGPPG

SEQ ID NO: 255831 - protein, 69 aa, Zea mays
  Clone ID: MRT4577_164910C.1.pep
CCSWKYNMQPICPSRNLSMQQYLNELVYQSASISLVQSLTHTMTAQHVQELVLAVINQLALSNLIFLLS

SEQ ID NO: 255832 - protein, 112 aa, Zea mays
  unsure (1)..(112): unsure at all Xaa locations
  Clone ID: MRT4577_164911C.1.pep
EKRKSCLYEYQLSIFKNNHCATNQCRHRLGSAPPGRVPCPSRMSALELSIRKYAKHHDKSVVRPELGLSFDSLGEAYDFYNLYSXEIGFGIRYGKSRLNAQRTKSMQFVVAR

SEQ ID NO: 255833 - protein, 64 aa, Zea mays
  Clone ID: MRT4577_164912C.1.pep
AKMETEDPLLDLDLTSYQLHDLTEAEIRLSLLDDDLTGNRLSQADLHIAQFTYLRRLSLRLEPS

SEQ ID NO: 255834 - protein, 55 aa, Zea mays
  Clone ID: MRT4577_164913C.1.pep
LHCVPLSAGRHTKFHGRLETRFVWSRSRFPPSSADLNDTVRVEARIRHEWCQIQR

SEQ ID NO: 255835 - protein, 230 aa, Zea mays
  unsure (1)..(230): unsure at all Xaa locations
  Clone ID: MRT4577_164914C.1.pep
GADAARRAQWEVSVLSRLAHPHLPSLLGCAETPDLLGWALPYCPGGDLNELRHAQPDRVFSTAAIRFYVAEVVSALAELHAAGIAYRDLKPENVLLRANGHVMLTDFDLSRQLXAQVPLRIHVHXSSSCSATSSPPPQTQKTHMKNIFKRSESAVTAPTSGQEEPRNLPWYLSKSIDGGSDQVKKAKSARVTPVDRGKELPSFCHAAAAAAGERSFSFVGTEEYVAPGVV

SEQ ID NO: 255836 - protein, 88 aa, Zea mays
  Clone ID: MRT4577_164915C.1.pep
SCEKRVAHKTMELTFIERDCTIYRTPQKTWNTPANKTGLNQVVKRHGGARKGEKKQHWGLGKTQEGQRSFKGEGECVKGDSIRGKNHR

SEQ ID NO: 255837 - protein, 461 aa, Zea mays
  Clone ID: MRT4577_164916C.1.pep
MEPRRISASPRPCSGRRVVARKRPRQEAVVSSVRKLQRREISSRRDRTFTMSAAQERFRNIQLQEEFDTHDPKENASLLPYLRKRSKIIEIVAARDIVFALSQSGVCAAFSRETNRRICFLNGSPDEVIRSLFYNKNNDSLITVSVYGSENFSALRCRTTRIEYVRRGQPDAGFPLFESESLKWPGFVEFDDVNGRVLTYSAQDSTYKVFDLKNYTLLYLVSDKNVQEIKISPGIMLLIYARTSSSVPLKILSIDDGTVLKSFSHLLHRNKKVDFIEQFNEKLLVKQEGENLQILDVRNFQLTEVSRTEFMTPSAFIFLHELQLFLTFRNRAVSVWNFRGELVTSFEDHLLWHPDCNTNNIYITSDQDLIISYCKADSTDSTSEENAGSINISSILTGKCLAKINPGNSCKQKDPCKQKKAWRFQNTVSEALEDITALYYDEDRDEIYTGNRHGLVHVWSN

SEQ ID NO: 255838 - protein, 228 aa, Zea mays
  Clone ID: MRT4577_164917C.1.pep
PTRPPTRPPTRPPTRPVPLKILSIEDGTVLKSFSHLLHRNKKVDFIEQFNEKLLVKQEGENLQILDVRNFQLTEVSRTEFMTPSAFIFLHELQLFLTFRNRAVSVWNFRGELVTSFEDHLLWHPDCNTNNIYITSDQDLIISYCKADSTDSTSEENAGSINISSILSGKCLAKINTGNSNACKERKKVWKFRNTVSEALEDITALYYDEDRDEIYTGNRHGLVHVWSS

SEQ ID NO: 255839 - protein, 250 aa, Zea mays
  unsure (1)..(250): unsure at all Xaa locations
  Clone ID: MRT4577_164918C.1.pep
MASCDDDFVLLGDDAHQPATPPPPAPTAQQPAPPPPPPPQASHPFSFTDAVAGAAAGAGSFAQAQEESNHHAERGKPAHHAKRGRERAEEFSSDGGEYCSYINSSGSGGGGKKGRGGGGSSSVSDYRKDREEWTDGAISSLLDAYTDRFEQLNRGNLRGRDWEDVAGAVTDGQGKTTGAKSVEQCKNKIDXLKKRYKXECQRLSSXAGGAISHWPWXKKMEQIVGNSASPASKLLTAEDEKPRQQQQHSS

SEQ ID NO: 255840 - protein, 267 aa, Zea mays
  unsure (1)..(267): unsure at all Xaa locations
  Clone ID: MRT4577_164919C.1.pep
MEPRRISASPRPCSGRRVVARKRPRQEAVVSSVRKLQRREISSRRDRAFTMSAAQERFRNIQLQEEFDTHDPKENASLLPYLRKRSKIIEIVAARDIVFALSQSGVCAAFSRETNRRICFLNGSPDEVIRSLFYNKNNDSLITVSVYGSENFSALRCRTTRIEYXCHCNCFFYHVIFLKFSPTIQXVRRGQPDAGFPLFESESLKWPGFVEFDDVNGRGLTYSAQDSTYKVFDLKNYTLLYSVSDKNVQEIKISPGIMLLIYTRTNS

SEQ ID NO: 255841 - protein, 105 aa, Zea mays
  Clone ID: MRT4577_16491C.1.pep
FVQSKVPRSEHPVIHPPILIPSPVHVRGRGGEGAEEEEQEAEEVDERCELPGPFLPRRSRDRPLLGLVLAVVVVTHEGGFLRQELGHGRDVQFLLHSVRSGSRGR

SEQ ID NO: 255842 - protein, 58 aa, Zea mays
  unsure (1)..(58): unsure at all Xaa locations
  Clone ID: MRT4577_164920C.1.pep
KNVGGGGYYXCYGFYFFMVWIEICCYYSGQGGDTVNLDCEWWWWIIGKCYRMGDGVYV

SEQ ID NO: 255843 - protein, 74 aa, Zea mays
  Clone ID: MRT4577_164921C.1.pep
IPLPDLRRLRSVSDLGVNDHGEILHCDDLNSQGADRQERCNASQREHLALRARPGSPPSCKLRYCTCLTLRCPH

SEQ ID NO: 255844 - protein, 61 aa, Zea mays
  Clone ID: MRT4577_164922C.1.pep
HNLESSTTHTVNDHSREPVQEHRTENKLDEQSMNQNVTSAVISLTHRRTHLFSRNPRLPSH

SEQ ID NO: 255845 - protein, 128 aa, Zea mays
  unsure (1)..(128): unsure at all Xaa locations
  Clone ID: MRT4577_164923C.1.pep
MDNLITLVHXLLMPCTALEHHREDSALPTLGYSLAAIPAHGGXRSGKSSEMHRXVLEDDLPRAXGIASHHWLMLHLHRHDXAMGDMDRLVHLXPTKMLTDSAAETKEITDETGPQTGRSKSISTVPIH

SEQ ID NO: 255846 - protein, 93 aa, Zea mays
  Clone ID: MRT4577_164924C.1.pep
DLAHVNFNDYLGECINKRGKWSRWHGGWCECPPRSEVGCRFVHQQKVTRVMSAVGGSSLEALAGCLQVRGLSWHPKTQRSDRTCQSQGWLGHT

SEQ ID NO: 255847 - protein, 76 aa, Zea mays
  Clone ID: MRT4577_164925C.1.pep
MAREEQALLSTEIVNRGVEPSGPDAGSPAYLGARARVACRTSCSGRTSYSWLLHCHIPNLPRMRTWPHIPVLTLNT

SEQ ID NO: 255848 - protein, 60 aa, Zea mays
  Clone ID: MRT4577_164926C.1.pep
FPVRPLYSRASQLNLGLGRKELRFSYARPRKIARRPMDLAFFFFFFFFFFFFFFFFRTRG

SEQ ID NO: 255849 - protein, 37 aa, Zea mays
  Clone ID: MRT4577_164927C.1.pep
ELSGMVDTLTKSTTRILHEHYMLDMEDTMRIGGWSTA

SEQ ID NO: 255850 - protein, 170 aa, Zea mays
  Clone ID: MRT4577_164928C.1.pep
MDQVLNKVGSYWFSKRASKEIDSIGDDISSISSSIGGSAKWMVNKIKGKMQKALPDLLKEYDMPAGLFPRDTTNYEFNEETKKLTVYIPSACDVGYKDSSVLRFFTCVTGYLEKGKFSDIEGMKTKVLVWTKVTAIKTEGPKVHFTAGVKKTRSRDAYEVVRDGITIDKF

SEQ ID NO: 255851 - protein, 70 aa, Zea mays
  Clone ID: MRT4577_164929C.1.pep
SSCRDGRNQPMRHAGRSLARRFSRRIASVSSQRPGSSSTCDPRYLASAQRVRRWPPTVSVADECADLERN

SEQ ID NO: 255852 - protein, 207 aa, Zea mays
  unsure (1)..(207): unsure at all Xaa locations
  Clone ID: MRT4577_16492C.1.pep
IRHEETSERTAIPLQSNLIAATAFMEPSKEWMYIDKDGTQVGPLEKDAIRRLWSKKSIDWTIKCWASGMSDWKRLRDIRELRWALSVRVPVLTPTQIGDTALSILHSMASARSDLDDAGEIVTPTPRVKHILSSPRCLPHVAQAMLTXEPSIVEAAASLLKAIVTRNPKAMIRLYSTGAFYFALAYPGSNLLSIAQXXFSATHTHQA

SEQ ID NO: 255853 - protein, 111 aa, Zea mays
  unsure (1)..(111): unsure at all Xaa locations
  Clone ID: MRT4577_164930C.1.pep
MARPARIEGDKLSVEQLTGLKEQTDLEVNLLHDSLTMIRTVATRLENASGALHDLSLRPQWKKMLVPLTASLYVTTSLHDADTVHIYVGTAYYIXKTMAQXKGYCERKFIY

SEQ ID NO: 255854 - protein, 68 aa, Zea mays
  unsure (1)..(68): unsure at all Xaa locations
  Clone ID: MRT4577_164931C.1.pep
SQRTPEAMTKQERQPGPRTPETNQARHATGHGEAXSTSWTETSTPTAGTKEGIQHRHKRDETRRGREP

SEQ ID NO: 255855 - protein, 51 aa, Zea mays
  Clone ID: MRT4577_164932C.1.pep
NVPVLRAALEKSSARARQVVKAGAHSEVSGARVWDGERYSQRGFSYDPTRP

SEQ ID NO: 255856 - protein, 92 aa, Zea mays
  Clone ID: MRT4577_164933C.1.pep
MEAGAGTALYPAHRCKTIYLVRHAQGVHNVEGEKDFAAYKSQALLDAQLTPLGWSQVDTLRDHVTKCGLAKKIELVIVSPLLRTMQTAVGVF

SEQ ID NO: 255857 - protein, 62 aa, Zea mays
  Clone ID: MRT4577_164934C.1.pep
MTGTEQQKEGEKQFSIQPIKDEAKDKVSAFNAHPGPAVPKDMPQEEGTKEERKAKMEALNKK

SEQ ID NO: 255858 - protein, 90 aa, Zea mays
  Clone ID: MRT4577_164935C.1.pep
PPSEAPRLKNSFRGAPPGSLGAPPPFFFGVTQPLFFKNPAAFFFFWAPPQLKAKGSQGFKAPKQGRPPVFLSGPKKRGRLPPNWPKTGGP

SEQ ID NO: 255859 - protein, 29 aa, Zea mays
  Clone ID: MRT4577_164936C.1.pep
MGIGDYSIGSDELSGTARIEKEGITKMLV

SEQ ID NO: 255860 - protein, 51 aa, Zea mays
  Clone ID: MRT4577_164937C.1.pep
LTLTVSGSQTVYQPGHLCYQLHQRTGQRAMRGGFSSARIFTDSLTDSVRLA

SEQ ID NO: 255861 - protein, 74 aa, Zea mays
  Clone ID: MRT4577_164938C.1.pep
TVHHCREHPGGRWWHLKRPLGLLHLVSKSISLRVLAARRSLCLYVSLATLFPVHARNQLLAHKISLALTPDCVN

SEQ ID NO: 255862 - protein, 63 aa, Zea mays
  Clone ID: MRT4577_164939C.1.pep
VGVVAPTSPCFEVYSSFTPQTQMVPSVKPANSMVPSANHAMDKHSGADFFFFSDLGAVSSAIV

SEQ ID NO: 255863 - protein, 94 aa, Zea mays
  Clone ID: MRT4577_16493C.1.pep
MEGKPAPKSLLARPLHGRQAGAQIAARPPSTWKMESVLLKIRLHSDGCADRIRRRIGKIEESIDTRKAIRLGVVSPYKGQVRPSRRSLASRCTR

SEQ ID NO: 255864 - protein, 65 aa, Zea mays
  Clone ID: MRT4577_164940C.1.pep
LDPNYGEVWSSNTTEKALPGLQQVPILWSQKAQVTWNQELCALAMSLSNCVTLSKSLPISRPQHP

SEQ ID NO: 255865 - protein, 49 aa, Zea mays
  Clone ID: MRT4577_164941C.1.pep
KRDIYALGKKGVRKPCWMLINHPLIYDITRLYQSSKPPMLFQKPPRMQG

SEQ ID NO: 255866 - protein, 84 aa, Zea mays
  unsure (1)..(84): unsure at all Xaa locations
  Clone ID: MRT4577_164942C.1.pep
IITRFNGCWKGARGASGVCISHGGGQXGCNKGAESRTTFCKAHGGGRRCQELGCTKSVAGKTEFCIAHGGGRWCXQGCSSAARG

SEQ ID NO: 255867 - protein, 223 aa, Zea mays
  unsure (1)..(223): unsure at all Xaa locations
  Clone ID: MRT4577_164943C.1.pep
MDLVNGALNWAAMPAMVAALLLFYPPYYLFKLCYSFLSYLFPDDLKRKVVLITGASSGIGEQLAYQYAAKGACLALVARKEWSLRQVADRAFDLGAPDAIILPGDVADPDDCNRFVQATVDHYGRLDHLVCNAGIASVGAFQEIPDVTNYSSQLDVNFWGAVQSTSAALPHLTRTRGRIVVTASATGWNPVPRMIFYNAANAALINFFETLRSELXXGVGITI

SEQ ID NO: 255868 - protein, 106 aa, Zea mays
  Clone ID: MRT4577_164944C.1.pep
PPRFLWLGMFTPPFWSPMSARDPPRPFCWRVFRHLAFRLLRDRGGSPRASLSEWPCPRFLSLSLCLVCRPVSPCIGACLFLFLVFAWAPGVFKRDAALVGAKIFIF

SEQ ID NO: 255869 - protein, 104 aa, Zea mays
  Clone ID: MRT4577_164945C.1.pep
QFIGAWFSRSVHPSFLHHISAMCTLRFQPVRVSIMFKMDPRCSRTGKWRCGLSPRPPGHGRVSPSRSRLARRRFAHRSERWPPKAPRPRVRARPIPSFVAARVM

SEQ ID NO: 255870 - protein, 118 aa, Zea mays
  Clone ID: MRT4577_164946C.1.pep
TSTAHTRGITRLRAFAPQGKECTILSGHAYHAQSARTQTPSSSHPVNTRNCHRTREHTRHDSLTPASSFVGPPMFETSTSGVDRRTVHDIPHLNVKAVIHGRGNNTVHVLVTPDYDAT

SEQ ID NO: 255871 - protein, 74 aa, Zea mays
  unsure (1)..(74): unsure at all Xaa locations
  Clone ID: MRT4577_164947C.1.pep
GCSSPRXXKDPTXXXAPGXXRXRRXRXXXXXXXRTXXXRQXMRSGVNKRQRXXXXGALXVXPXTXAXXXRAXXP

SEQ ID NO: 255872 - protein, 69 aa, Zea mays
  Clone ID: MRT4577_164948C.1.pep
SFPRYPLCNKRTMMYSPGNCSAGNNAPLYVIYGRIIGNSRCSVNPKKKKKKKERRLLWMIPAVGGLATS

SEQ ID NO: 255873 - protein, 119 aa, Zea mays
  Clone ID: MRT4577_164949C.1.pep
PVGWAPLSAATVFPFNPWAALTPAVFLRRRFFLPFSPLAAASRVSFLAHPRLWPFSPRVGATPAPLFQLPRLLPFVPLALATPAASSPPPFFGGALLLVCLLAPPPIKFFGFCFWPTKN

SEQ ID NO: 255874 - protein, 94 aa, Zea mays
  Clone ID: MRT4577_16494C.1.pep
VLCHCPTEAEPVSRTVRESCPHLCHLFLPIGQGPQGRLFPRSLTSGGAMEESAGAQAGRQHLIRQSAAHWLARTLPETPLGGHAHRMRCSCPGR

SEQ ID NO: 255875 - protein, 38 aa, Zea mays
  Clone ID: MRT4577_164950C.1.pep
ERLRSYLGAQFLVMLFRNESRGRLKVLRCISLLYNILY

SEQ ID NO: 255876 - protein, 106 aa, Zea mays
  unsure (1)..(106): unsure at all Xaa locations
  Clone ID: MRT4577_164951C.1.pep
MSYXRPAAARPVGVPPPQGYPGKEEYPPAGYPPAGYPPPGQGQGYPPQGYPPQQGYPPQQGGYPPQQGGYPPQQGYPQQGYPPQYAQQPPRQQQSNGPSFMEGCLA

SEQ ID NO: 255877 - protein, 153 aa, Zea mays
  Clone ID: MRT4577_164952C.1.pep
PWRGGGGAPPSGGGWGSWRPAARLPLVGKLAPAVRGRLFFYRPRIPCGVWVHFSKRSVSPHYPPHYLERLCQTICSSLICSLLCLASRIAASTCPLCLWLCGLLAYSLTSETFFPVGGIQQVAHSPCVLRPACLDRLVSFVPPRSGPPLEGRD

SEQ ID NO: 255878 - protein, 265 aa, Zea mays
  Clone ID: MRT4577_164953C.1.pep
MGQASQADPSVGAAIVPGENAGAAVVPSPPDLLPAPASTPARAVADSPAEPPVASDVGMVDVPPLMVVPDLPVLSHEERATAVAGVGDRRPTTLAEGGPELADMSTAKSLFIRQSVKALDQAAEHKEADRVAMSEAISDFCRAFDLDNVPSSSSPQSHLRALGGHVRSRLYGALHHGVRRAFAVLASHYDVDLERVSEGYCLPDEDEAALAEVQRLDVAATGPSAVLASSFEVEILPLVSPSEAGPGFAEGGDDAEGAAAPSADV

SEQ ID NO: 255879 - protein, 44 aa, Zea mays
  Clone ID: MRT4577_164954C.1.pep
AFDREGKLRAICGGGRYDRLLSTFGSEDIPACGFGFGDAVIVEV

SEQ ID NO: 255880 - protein, 62 aa, Zea mays
  unsure (1)..(62): unsure at all Xaa locations
  Clone ID: MRT4577_164955C.1.pep
RPRXEKKKKKKKSKKKKKKKKKKKKKKKKKKKKGRVLLSRAAIFRGSQAYFSGAWLLLKLFL

SEQ ID NO: 255881 - protein, 43 aa, Zea mays
  Clone ID: MRT4577_164956C.1.pep
HQSSFILAFFSPNQTSNSEGSNFKNDDAAALGFCSYHINIKFV

SEQ ID NO: 255882 - protein, 104 aa, Zea mays
  Clone ID: MRT4577_164957C.1.pep
VLKGEKEKKRPMSRPPGKISLLGVGANKKIVAKQKKPPLCRNCPEALCFFPIHYLGLDTSPFQNKKLLSAPHKSPEISLFPPLLGQPFRLTIPLGQGPIYKFFF

SEQ ID NO: 255883 - protein, 220 aa, Zea mays
  unsure (1)..(220): unsure at all Xaa locations
  Clone ID: MRT4577_164958C.1.pep
MLKRLLTKTKSKKKKEAASSAIPTLDRLHETLEMLEKKERFLQKKCSAEIEKAKDYTKAKNKNAAIQCLKKKKLYETQIEQLSNFQLRVHDQIIMLESAKATTDTVDALRSGSSAVKAMQQXCKLAKVPSAPSEAEPRAHGVARSHVATXVLLDYLLIKMAPTYKGNPCXNVDDIEKAIEEANEQTESMREMQQALATPIGASADFDEVPVPLISPPLLL

SEQ ID NO: 255884 - protein, 223 aa, Zea mays
  Clone ID: MRT4577_164959C.1.pep
MLKRLLTKTKSKKKKEAASSAIPTLDRLHETLEMLEKKERFLQKKCSAEIEKAKDYTKAKNKNAAIQCLKKKKLYETQIEQLSNFQLRVHDQIIMLESAKATTDTVDALRSGSSAVKAMQQSVNVDDIEKAIEEANEQTESMREMQQALATPIGASADFDEDELEAELEELEEEEEEEGEIEDELPEPPARRSVEPSAKAAAASSRQGSDVSELTRLQAEMAL

SEQ ID NO: 255885 - protein, 141 aa, Zea mays
  Clone ID: MRT4577_16495C.1.pep
SQHACMLSTLERTMLTQVFIISQKMIDILLQRYIKADSPSRFSKTSYMKSFFMHMAINSNLMYECLRISANNRSIVIILLIHVALIIPVINLNSVICNWFIDRCFVQCITYNRTLVHCIIQRIYTIKHHTVRWPHRCKNRT

SEQ ID NO: 255886 - protein, 160 aa, Zea mays
  Clone ID: MRT4577_164960C.1.pep
GPRAPFPRGPPRRPNFPGTTWAPGVHPNWEKGGFFPPRQVPRGGPPPGGGLPFRVPVSPVVLFRGGGPNVFNFFRSVPLPELIFLFSFGELDFYNFATPLPFGVFSFVRSPGGVFFFFFFPKGFPFFSVPLPNCPFCRFPPGLFFFLPLFPPPPLTSGVF

SEQ ID NO: 255887 - protein, 72 aa, Zea mays
  Clone ID: MRT4577_164961C.1.pep
MRYAKIRHVSTSLSFSSEHERGSPMLSPALLLPKQGHRSSRISQIGRHPRADKRPPSTIGLHSSPCRCPFSS

SEQ ID NO: 255888 - protein, 50 aa, Zea mays
  Clone ID: MRT4577_164962C.1.pep
TLGGAEVKVTLFAFFSRGYPFDDDLLLCFNLIVGWFDTLTCMNLVIFYKR

SEQ ID NO: 255889 - protein, 105 aa, Zea mays
  Clone ID: MRT4577_164963C.1.pep
PRAGGRESIGSPRREKNGSLSRTAVAAVRSAARSAPLTGRVPGAPLPSLASSSAARSARILRRSAAASSSGLETLMPLHSAVAAARLKSCIAVDFSCWSSLSQGY

SEQ ID NO: 255890 - protein, 73 aa, Zea mays
  Clone ID: MRT4577_164964C.1.pep
VVIRTQNPQTQTQLSYKREGTIKTSWADCDVHGVSLNRTTVWHCQNPMADWHTCWSTTTSKVPKLHIPSKSQT

SEQ ID NO: 255891 - protein, 89 aa, Zea mays
  unsure (1)..(89): unsure at all Xaa locations
  Clone ID: MRT4577_164965C.1.pep
LAVVGVSSVSRLLGRSRRQLGRPMSSGAHGEEGSARMWKTLSFFVALPGVAVXSILNEYLKSHHGERERPEFIAYPHLRIRIKSFPEEM

SEQ ID NO: 255892 - protein, 102 aa, Zea mays
  Clone ID: MRT4577_164966C.1.pep
ETCLPALLPWTRTDSETGMYFFLEFSPGWNSCWLCLVRLFADYGDQKQLSSTKRLDFRWDSPRSASFKSRNITSTEKRAGGHVWQKSLDSWLARTPRPSACP

SEQ ID NO: 255893 - protein, 356 aa, Zea mays
  unsure (1)..(356): unsure at all Xaa locations
  Clone ID: MRT4577_164967C.1.pep
MARLVDLQRKIDELAQDEQERRHQHRELRQEGLFNEDGWYDEFHHDAFTFDDASPLAAELQAIPWPQSYKPPQLPMYDGHSDPKQFLMSYEATISSYGGNAAVMAKSFVMAIRNVAQTWYSSLRPGTITSWQKLKDMLVTSFQGFQTKPVTAQALFQCTQDHEEYLQAYVRRFLRLRAQAPTVPNEIVIEAMIKGLRPGPMAQYFARKPPQTLEKLLQKMDEYIRADNDFHQRREEAYRFSEMTRGFGGRVHPWHARSIHNSTQSDDKGSQSQRSQYTSQSSGQQQSSFRPPAPRGRGARGFGGRFGDHPRKIYCLFCGEDKGHTTRMCHXHTASWHSPYIPEYVNNHPAASVASA

SEQ ID NO: 255894 - protein, 72 aa, Zea mays
  Clone ID: MRT4577_164968C.1.pep
MVMHFVFSARESKGTTLSIIVHSEVPMYVPEMSIESVTVKIRMARWYVQVYAIWAGFKSVNTVGQYPVDVRA

SEQ ID NO: 255895 - protein, 102 aa, Zea mays
  Clone ID: MRT4577_164969C.1.pep
MEGKEEDVRLGANKFSERQPIGTAAQGTDDKDYKEPPPAPLFEPGELKSWSFYRAGIAEFVATFLFLYISILTVMGVLERRSIGVATRTRSVPLDLAPQRLC

SEQ ID NO: 255896 - protein, 62 aa, Zea mays
  Clone ID: MRT4577_16496C.1.pep
GPSIMNQKGAKQQGSPARRVFLTSSKGAGKKNFEKNNAFTIPIYVKPPRLIINSPNSHFTIF

SEQ ID NO: 255897 - protein, 66 aa, Zea mays
  Clone ID: MRT4577_164970C.1.pep
RSGDYCMEGIDKKLKRHVFTVTNVSSQFVLEFITPAMHGGADKVAAMVVIYTAVWEVTLSLPTRPA

SEQ ID NO: 255898 - protein, 80 aa, Zea mays
  unsure (1)..(80): unsure at all Xaa locations
  Clone ID: MRT4577_164971C.1.pep
RSESIFLYIPPGEYLSRKSGQKPIKGSPYPRGYYKCSPVXGCPARKHVELPLXDDPAMLVVTYEGEHRHNAGRARARAQP

SEQ ID NO: 255899 - protein, 94 aa, Zea mays
  Clone ID: MRT4577_164972C.1.pep
PARRQSDSHRLPCTTGFALHHHRLSRRREDGDHGHGQISTGSRTPAPMSCSYWFSVYADTVLFPTGKRRWAGTDKGGSWPNKRIRKDTRRPLIV

SEQ ID NO: 255900 - protein, 120 aa, Zea mays
  Clone ID: MRT4577_164973C.1.pep
SPAGGGLTGIQQVPTKRPPFAGAFSSVGSRGPRCGCPWGFRFQSPGGGGFKPFVCGLGLCAAVSSPKFTRPGKNYCRHVGKPGTPRLLPSPPLGHFINNPGDGSWTRIAGPCPEKTSLMG

SEQ ID NO: 255901 - protein, 141 aa, Zea mays
  unsure (1)..(141): unsure at all Xaa locations
  Clone ID: MRT4577_164974C.1.pep
VRAGKMDRLEERKEEAGDRNTQEPPCVTPSTSHRAHLKKNQAVRNRTTRAAPSRPRTSSSQLRPHPCVALLPPPLPQSLLLLAYASLPSAGAAPSPPTVPATQREAESASDAPSSPPPAAQQHPRRHRHRHWKHRXPSPHP

SEQ ID NO: 255902 - protein, 75 aa, Zea mays
  Clone ID: MRT4577_164975C.1.pep
NKAYTEAMDTLISPRHSCPQAQKAGDQKGIVYAPCPVVNQVSLPHQFFNDRGDPGSPRQPQFFLFGPRTMFRSFF

SEQ ID NO: 255903 - protein, 77 aa, Zea mays
  unsure (1)..(77): unsure at all Xaa locations
  Clone ID: MRT4577_164976C.1.pep
MARTKHTARKSTGGKAPMKQLSTKAARKSAPATVVLKNPDRFRPRTVALLXIRKYHNSTELLIRKLSFQRLVREIAQ

SEQ ID NO: 255904 - protein, 153 aa, Zea mays
  Clone ID: MRT4577_164977C.1.pep
ILNNFLPRTEETALNRPAQRCEHGADPVPNNTRELTLPLGIHRATHSTRGEQQSFFFGRRGHLGSSWNRLLRTRAHSEAAVRLMPRPAARARGGSSEEGSTTLGLTGNHRRRPSISVLQASGLLLKLFARPPTNRGRELPQPDSLGRGGARQH

SEQ ID NO: 255905 - protein, 254 aa, Zea mays
  unsure (1)..(254): unsure at all Xaa locations
  Clone ID: MRT4577_164978C.1.pep
FAFPFLQLTPHEPGVVKRAVNHFLLKSEGDIMVTDVCCVAPDFHARYKSLERTXYHYRLLAGPESTSVFEKNSVWHISEDLDIQSMKKACSILVGHHDFSSFRAAGCQANSPVRTLDELSVTEVFPFMFFPSSVERSELELSNVSLVYSRKPDMESSGKGSDGSCTSSVKSDFENGKDFGKRSRHRCFVVTARARSFLYHQVRLMVGLLKSVGTGDLTTADVERILDAKTVTAAPSMAPSCGLYLANVKYDLNT

SEQ ID NO: 255906 - protein, 54 aa, Zea mays
  Clone ID: MRT4577_164979C.1.pep
AGRAWERLQLTNHHWLAIEHNPDEDAASSSNTRFYNNHFHIDCELYNTCVLRLA

SEQ ID NO: 255907 - protein, 105 aa, Zea mays
  Clone ID: MRT4577_16497C.1.pep
MELWMWNISEWQRSYQWTIFPNTLLLDFVANAQIRRISLRSSRFFDMNIFSSKNVVMYNVTIKAPGKSPNTASINISDSINVTISGTIITLGHDCFSIGPGNKTI

SEQ ID NO: 255908 - protein, 386 aa, Zea mays
  Clone ID: MRT4577_164980C.1.pep
MTDRNPAAASSKRHCDLSLDDPTPSAKLQRCSEPSEPTPAGKPNGGAATGEESEMMAGARNPRAQRYLVAVEYIGTRFSGSQKQPNQRTVTGVLEEAFHRFIGQPVSIIFSSRTDAGVHALSNVCHVDVERISKRKPGEVLTPHEPGVVKRAVNHFLLKSEGDIMVTDVCCVAPDFHARYKSLERTYHYRLLAGPESTSVFEKNSVRHISEDLDIQSMKKACSILVGHHDFSSFRAAGCQANSPVRTLDELSVTEVFPFMFFPSSVERSELELSNVSLVYSRKPDMESSGKGSDGSCTSSVKSDFENGKDFGKRSRHRCFVVTARARSFLYHQVRLMVGLLKSVGTGDLTTADVERILDAKTVTAAPSMAPSCGLYLANVKYDLNT

SEQ ID NO: 255909 - protein, 105 aa, Zea mays
  unsure (1)..(105): unsure at all Xaa locations
  Clone ID: MRT4577_164981C.1.pep
MCGGGILSDIIPSPTSGRDTGAHLWAEKKKSRRAAVGRTTAPLQEDQEEDFXAYFDELEVEPPESQLESEDDLKPKPFVAPTTALAIGRPNPGAASVDGPAANSA

SEQ ID NO: 255910 - protein, 50 aa, Zea mays
  Clone ID: MRT4577_164982C.1.pep
TPGVAKLMTPFSYAHLGDVRYTISLPKIYLPNCGSTMLRTGFLKTHRTRG

SEQ ID NO: 255911 - protein, 76 aa, Zea mays
  Clone ID: MRT4577_164983C.1.pep
PLKHGKWTRCWSQNLRCGTRTFVCSMQPNYLLTLLMPSCQHIFCSDNIAYAGFAQAGKLPFWKYIWSSVLRRWLHA

SEQ ID NO: 255912 - protein, 127 aa, Zea mays
  unsure (1)..(127): unsure at all Xaa locations
  Clone ID: MRT4577_164984C.1.pep
MAANYHHYQMAVHAAAAAAAWRREPDSPQLSFVSGCSSLFSISTLQDDDDDRAAAVVIAAGHALPSTPVSLAGFVADEVDMEVQQASGDDRRSIRMMRNRESALRSRARKRVSIVNXTQKHVRRSVL

SEQ ID NO: 255913 - protein, 55 aa, Zea mays
  Clone ID: MRT4577_164985C.1.pep
WCVCITHTSWLPQVHEGLDQSMQFLVIIHTLCTRLCTCVALFNSLPISNIYISLP

SEQ ID NO: 255914 - protein, 76 aa, Zea mays
  Clone ID: MRT4577_164986C.1.pep
SAWWCRFPQWVSFSFFGGMSLKYFPSFGSMLRNKLCFWSRYTRPSFSYLMTASGHRFFCGFSPRPPCCTHTTLPHV

SEQ ID NO: 255915 - protein, 67 aa, Zea mays
  Clone ID: MRT4577_164987C.1.pep
ISITYSMELFIPLVVHISVFHCLDQSIFFGTRLMSMTISVRDALLEVHPGSSPSNRVHPTKALLLVS

SEQ ID NO: 255916 - protein, 62 aa, Zea mays
  Clone ID: MRT4577_164988C.1.pep
SSGSASAISSSLASDASMTTSSEAAIALASSSSSSSTAILPKTEESKGIVIIALLVTNYDRN

SEQ ID NO: 255917 - protein, 143 aa, Zea mays
  unsure (1)..(143): unsure at all Xaa locations
  Clone ID: MRT4577_164989C.1.pep
MHIVFSVDDLTESFWPVPAPAPSPGSSSTPSPTQNVADGMTRSQSEWAFHRLINELSGSDSSPTTNTIERSPPPVQSLSRLEETVDETEDVVEIQKPQNHRRLPVDDQGKNRNRAPSSDPVDSSAPVVXDPNQYHAILKSKLE

SEQ ID NO: 255918 - protein, 89 aa, Zea mays
  Clone ID: MRT4577_16498C.1.pep
MKRLLILQRCEPIVRFSCCSVRYGDCRRNHTASTGGHAVDGCREFIAEGEEGTSGALKCAACGCHRSFHRRVQVYEVAWGYGSDTSSTE

SEQ ID NO: 255919 - protein, 72 aa, Zea mays
  Clone ID: MRT4577_164990C.1.pep
PQKDQYLDNAAVALTSSSPQSRKRRSNLSFTTRSARAGNQNGVQMLSPSEIPQRDWFPSDFTFGDATAAYQN

SEQ ID NO: 255920 - protein, 1353 aa, Zea mays
  unsure (1)..(1353): unsure at all Xaa locations
  Clone ID: MRT4577_164991C.1.pep
TESTKMIMRYLAYMGGKAASEGRTVEKQVLQSNPVLEAFGNAKTVRNNNSSRFGKLGLHGYQQKGKITREPCXSFYRISASEVLEHFMLLDILSDHLLICCIFFGSFLPHVPFFSYLILLXASFCKNSYRYLLGLXDVDSALTVRKGLISSEEQEAIFRVVAAILHLGNVEFAEGDDGDSSKPKDDCSLSHLRTAAELLMCDEKALKDSLCQRIIVTRDENIVKTLDPEAAKGSRDALAKTVYSRLFDWLVNKINNSIGQDPNSKCLIGVLDIYGFESFKTNSFEQFCINLTNEKLQQHFNQHVFKMEQEEYTKEEINWSYIEFIDNQDVLDLIEKKPGGIIALLDEACMLPRSTHETFAQKLYQTYSVHKRFAKPKLSRSDFTICHYAGDVTYQTELFLDKNKDYVVAEHQALLSASKCAFVSGLFPFLSEDSSKSSKFSSIGSRFKQQFQSLLETLSATEPHYIRCVKPNNLLKPAIFENQNVLQQLRCGGVMEAIRISCAGYPTRRTFYEFIDRFGILAPDVLSGSSDEVSAVRRLLDKIDLQGYQIGKTKVFLRAGQMAELDARRNEVLGRSASMIQRKVRSFLAQKNFIALRRSALQIQTVCRGELARRVYHNLQREAASLKIQTLYRMYTARKVYNELSASAVTIQSGLRGMCARKELHFRRQTRAAIIIQSRCRQFLARLHYSRTKKAAITTQCAWRGKAARKELRKLKMAARETGALQAAKNKLEKQVEELTWRLQLEKRMAADLEETKSQENAKLQAALQEVHLDICETKEILVQEREAAKKAREIAPVIKEVPVIDTELMNKLRDENDKLKTMVSSLEKKIDDTEKKYQETSKISEDRLKQAMDAETKIVDLNMAMLRLQEKISTMESEEKVQRQALLSTPVKSMSEHLSIPIAPKAHXHLENGFHEVEGLKEPQSAPPAIKEYGNGDPKMKKSIVDRQLENVDALIECVGTNLGYCAGKPVAAITIYKCLLHWKSFEADKTSVFDRLIQLIGSAIENEDDNDNLAYWLSNTSSLLFLLQRSLKAAGAPGSVSRKKPPQPTSLFGRMAQGLRSASFANMHVEATDVVRQVEAKYPALLFKQQLTAYVEKIYGIVRDNIKKELSSLISLCIQAPRTMKASMLRVSGRLSSQSQSQSNHWQKIIESLDKLLKILQDNHVPPVLAQKIFTQIFSYINVQLFNSLLLRRECCSFSNGEYVKAGLAELELWCAKATTEYAASSWDELKHIRQAVGFLVIFQKFRISYDEIVNDLCPILSVQQLYRICTQYWDDKYNTQSVSSDVLSNMRVLMTEDSNSDESGSFLLDDNSSIPFSVDDILSDHLLICCIFFGSFLPHVPFFSYLILLS

SEQ ID NO: 255921 - protein, 162 aa, Zea mays
  unsure (1)..(162): unsure at all Xaa locations
  Clone ID: MRT4577_164992C.1.pep
SGLTEGQRRLRHSDCSATRQSESDRQSGLARGAIGNSAPPDPRARTRAKTRKTANSAPPDPRARTRAKTRKTANSAPPDPRARTRAKTRKTANSAPPDPRARTRAKTRKTANSAPPDPRARTRAKTWKTANSAPPDPRARTRAKTRKTXELRSARPQGSDSG

SEQ ID NO: 255922 - protein, 139 aa, Zea mays
  unsure (1)..(139): unsure at all Xaa locations
  Clone ID: MRT4577_164993C.1.pep
PRVRILSVQQLYRICTQYWDDKYNTQSVSSDVLSNMRVLMTEDSNSDESGSFLLDDNSSIPFSVDDIXTQCRRRTSRISNRLMSYSRTLPSSFYRISASEVLEHFMLLDILSDHLLICCIFFGSFLPHVPFFSYLILFS

SEQ ID NO: 255923 - protein, 273 aa, Zea mays
  Clone ID: MRT4577_164994C.1.pep
MAPPVDVAGLRPRLGDVEAPPKPRLSLSSVAEAESEPLGRARRRSSAEARAESEPWGRAKRSSSSSGAEPESEPWVGRSGVRRLPGLSPSPSPGSGGAEFAVFRDLARVRAPVGVEQAALSFCQAGQWSDEVTAVTSALPGGARQDKGVRPPLVLADVLLLPLGDVEAPPKPRSSLSSVAEAESEPLGQARRRSSAEARAESEPWGRAKRSSSSSGAEPESEPWVGRSGVRRLPGLSPSPSPGSGGAKFAVFRDLARVRALGRAERSSPSSGT

SEQ ID NO: 255924 - protein, 90 aa, Zea mays
  Clone ID: MRT4577_164995C.1.pep
PCHNPPRQRPTRGLKKRPRTIPRAENDRQTPTEPQKQGETEPAGNPKAQHRVKEKPGARHRRAVRDTDNNTTKATRAEDDLRDKSHRSNE

SEQ ID NO: 255925 - protein, 72 aa, Zea mays
  Clone ID: MRT4577_164996C.1.pep
PTVSSNPVKKVGSLSRHSRPSPINGKIVCHSPRSQSPIPLSGKVGAKGLQAILSSRKAKDGPLKGEWRQLGG

SEQ ID NO: 255926 - protein, 205 aa, Zea mays
  Clone ID: MRT4577_164997C.1.pep
PTRPRTRGQLEKRMRADLEETKSQENAKLQAALQEVQQQYKETKEILVQEREAAKKAAEIAPVIKEVPVIDTELMNKLRDENDKLKTMVSSLEKKIDDTEKKYQETSKISEDRLKQAMDAETKIVDLNMAMLRLQEKISTMESEEKVQRQALLSTPVKSMSEHLSIPIAPKAHHLENGFHEVEGLKEPQSAPPAIKEYGNGDPKM

SEQ ID NO: 255927 - protein, 177 aa, Zea mays
  unsure (1)..(177): unsure at all Xaa locations
  Clone ID: MRT4577_164998C.1.pep
SRSDRSHFAAPLTGLTRRQRRLRRSDCCATRQSEADXQPSPASGAIGNSASPDPRAWTQARPRKTTNSASPDPRARTRAQPRKTTNSASPDPRTRTRARPRKTMNSASPDPRARTRARPRKTTNSASPDPRARTRARPRKTTNSASPDPXARTRPRPWRSIHLAQPRTRTDHVARRA

SEQ ID NO: 255928 - protein, 100 aa, Zea mays
  unsure (1)..(100): unsure at all Xaa locations
  Clone ID: MRT4577_164999C.1.pep
MAFGELGWTYAGLILSDDGIAITGEKIATIVKAANIKLESYWPALFAXLLEKRSVEDLILFVGSGGGAASGAAFAPAGGAAAAAAPAAKEKKVEPKEESD

SEQ ID NO: 255929 - protein, 88 aa, Zea mays
  unsure (1)..(88): unsure at all Xaa locations
  Clone ID: MRT4577_16499C.1.pep
MSVASLARTRVLTNETDHMARTQSGGAXKVAAAPXLLLAHGTTTKEDDITYRHASNATRPCLSYARGTGSGPSALLCSGDKNLKSARS

SEQ ID NO: 255930 - protein, 108 aa, Zea mays
  Clone ID: MRT4577_1649C.1.pep
MAPKKDKAPPPSSKPAKSGGGKQKKKKWSKGKLKEKVNNAVLFDQATYDKLLSEVPKYKQITPSILSERLRINGSLARRAIKDLMARGLIRLVSVHSSQQIYTRATNT

SEQ ID NO: 255931 - protein, 520 aa, Zea mays
  Clone ID: MRT4577_164C.1.pep
MLTSLSLEESCENDICEGTAVTAQKHYLDSNTTDVDKSSESSNGVSSTELSDTDSSSGCRENQLDFVSKEQQQNSSCEEQSNFKREIVTCSDASEVSDHFVPEDTSFDQSGVKHHELHSAPSIPDESGARNCDDSPKENVDDEELDLFIIDTILPLMRSRLCEDCESSPSSQGSPSEGRNFDTQESDSEEPSSIGDGDLVKHNNILQWAQAKKYGSLQVVCQYYQLQCPARGSTLAFHPLEHLHSLSFHRPGETVLHIAGSTIELRSRDTSLEVAEMRNALFAEEESTALSTWAVASICGCLRLEHVMTLFAAALLEKQIVIVCSNLGMLSASVLSILPLIRPYQWQSLLMTVLPNDMMDFLDAPVPYIVGVQNKTSDVLNRLTNAVVIDANRNQIKSSSVPQLPQHRELLSALRPYHSILVGESYLARKRPVYECTDAQVEGAKGFLAVLRDYLDTLCSNLRSHTITNVQSNNDKVSLLLKESFIGSFPSRDRPFMKLFVDTQLFSVHTDLVLSFYQKD

SEQ ID NO: 255932 - protein, 48 aa, Zea mays
  Clone ID: MRT4577_165000C.1.pep
EQKMACEAEPQCQSNLVIRSLIWRFGPEKIFFCGFFLAGLLRKLRRLP

SEQ ID NO: 255933 - protein, 121 aa, Zea mays
  unsure (1)..(121): unsure at all Xaa locations
  Clone ID: MRT4577_165001C.1.pep
THARKTTNSASPDPRARTRAQPRKTTNSASPDPRARTRARPRKTTNSASPDPRARTWAQLRKTTNSASPDPRARTRARPRKTTNSASPDPRARTXALALADGXSASPDPGARTRPRPRKTD

SEQ ID NO: 255934 - protein, 105 aa, Zea mays
  unsure (1)..(105): unsure at all Xaa locations
  Clone ID: MRT4577_165002C.1.pep
MAFGELGCTYAGLILSDDGIAITGEKIATIVKAGNIKLEFYWPALFAXLLEKRNVEDLILFGGSCGGASPGAGFGPTGGAATAAAPAAEEKKEEPKEESDDHIGF

SEQ ID NO: 255935 - protein, 54 aa, Zea mays
  Clone ID: MRT4577_165003C.1.pep
AIRSSHGPKPSCPGCVCPHSSLLFSCINLTDMAIGLIDMEQRRSRLGLEPNSEL

SEQ ID NO: 255936 - protein, 107 aa, Zea mays
  unsure (1)..(107): unsure at all Xaa locations
  Clone ID: MRT4577_165004C.1.pep
MAPPVDVVGSRPRLGDVEAPPMSRSSLSSVAEVEAEPWGRAKRSSSSSGAEPESEPWGRAKRSSSSSGAEPESEPWXVGRIGVRRLPGLSPSPSPGSGGAEFAVFRG

SEQ ID NO: 255937 - protein, 136 aa, Zea mays
  unsure (1)..(136): unsure at all Xaa locations
  Clone ID: MRT4577_165005C.1.pep
SGLAKGTTANSAPPDPRARTRAKTRKAANSAPPDPRARTRAKTRKTMNSAPPDPRARTRAKTRKTANSAPPDPRARTRAKTRKTANSAPPDPRARTRAKTQKTANSAPPDPRARTRAKTRKTXELRSARPQGSDSG

SEQ ID NO: 255938 - protein, 70 aa, Zea mays
  Clone ID: MRT4577_165006C.1.pep
QHEVSTGSQSSIHYVIYIKVLKLSALAVVSTSPTDSHIWLAHHKLLRRQVCAFSPDMTVDAERSGKARKS

SEQ ID NO: 255939 - protein, 153 aa, Zea mays
  Clone ID: MRT4577_165007C.1.pep
RSTLEVEKCEKLTGELSTCHDVINNLRNENASLIAKVDSNACNVSIPNLKDDNVDLLAKIEELNVTLASLRIENEKLIAKAKKLDVCNASIFDLRSKNDILHAKVVELKSCKPSTSTVEHTTICTRCRDVNIDAIHDHMALIKQQNDHIAKLD

SEQ ID NO: 255940 - protein, 59 aa, Zea mays
  Clone ID: MRT4577_165008C.1.pep
GAENKNTLDDDSTCYSIATCKHQAQLNFQGDSPAFLCRRGQTQLQINFNWENCIHTLAV

SEQ ID NO: 255941 - protein, 226 aa, Zea mays
  unsure (1)..(226): unsure at all Xaa locations
  Clone ID: MRT4577_165009C.1.pep
MQAACNHASLTEGQRRLRHSDCGATRQSESDRQPGLAKSATVNSAPPDPRARTRAKTRKTVNSAPPDPRARTRAKTQKTVNSAPPDPRARTRAKTRKTANSAPPDPRARTRAKTLKTANSAPPDPRARTRAKTRKTANSAPPDPRARTRAKTRKTXELRSARPXGSDSGSAPEDDELRLARPLGSDSAPASAERLPPRPTQGLGFGLGNRGQTQPRLRRSPHVTPP

SEQ ID NO: 255942 - protein, 190 aa, Zea mays
  unsure (1)..(190): unsure at all Xaa locations
  Clone ID: MRT4577_16500C.1.pep
LGTSRPAGAHHEFSLSHLLLLKNYCIWKKKQAYVTQDDNLIGTLTVRETISYSARLRLPDSMPREEKQALVEGTIAEMGLQDCADTVVGNWHLRGISGGEKRRVSIALEILMRPRLLFLDEPTSGLDSASAFFVTQTLRGLARDGGRTVVASVHQXSSDVFLLFDCLYLLSGGRTVYFGKASEACEVTTT

SEQ ID NO: 255943 - protein, 99 aa, Zea mays
  Clone ID: MRT4577_165010C.1.pep
IISVSPQEEHPQNKSTAREASPTRGATKKRGEDRGERKREAPTQKERRGQTQGGAPSTEEKARPTRKHAPAQNRPGRTAPTKKTPPQGGPPTKAADRPG

SEQ ID NO: 255944 - protein, 271 aa, Zea mays
  unsure (1)..(271): unsure at all Xaa locations
  Clone ID: MRT4577_165011C.1.pep
MTREARGLLSQKPAPAKPLTASTYQPENLGPDRAPGLRPVRMRERPDQPKHYASLTEGQRRLCHSDCGATRQSESDRQSGLAKGATVNSAPPDPRARTRAKTRKTANSAPPDPRARTRAKTRKTANSAPPDPRARTRAKTRKTANSAPPDPRARTRAQTRKTANSALPDPRARTRAKTRKTXNSASPDPRARTPPWPRPNDLRLARPHGSDSASATEDRLNLGFRGAPTSPCLGHRPATSTGSAIIILPRIDSGHGEQDRRPIRPAPPDGQ

SEQ ID NO: 255945 - protein, 48 aa, Zea mays
  Clone ID: MRT4577_165012C.1.pep
PIPLSMSEDTVIIVVNVPQNSVHEQVRWSNAYVMCCPSSLSHLKWRHQ

SEQ ID NO: 255946 - protein, 213 aa, Zea mays
  unsure (1)..(213): unsure at all Xaa locations
  Clone ID: MRT4577_165013C.1.pep
SRRDRRHSTAPLTSLTEGQRRLRHSDCGATRQSESNRQSGLAKGATANSAPPDPRARTRAKTRKTANSAPPDPRARTRAKTRKTANSAPPDPRARTWAKTRKTANSAPPDPRARTRAKTRKAANSAPPYPRARTRAKTRKTVNSAPPDPRARTRAKTRKTTKLRLARPXQGSDSALASAKRPPPRPTPGLGLGLGNRRQTQPRLRRSPHVTLP

SEQ ID NO: 255947 - protein, 68 aa, Zea mays
  unsure (1)..(68): unsure at all Xaa locations
  Clone ID: MRT4577_165014C.1.pep
VRLVTGINLAYLNSIGTDAYVTLLLGMXKIKTIVKKRSVNTIWHDELTLTVIDPRLALKLEVFYNDTF

SEQ ID NO: 255948 - protein, 100 aa, Zea mays
  Clone ID: MRT4577_165015C.1.pep
MLPRYCQALLFYCDFATVFPLPFIYQCELKIIEYRYRTLRQRSVPYKATECADVHIWDPVLCYKVSEQSGLYFAEVHAIERGTHNSGEECDCKNPVLYVH

SEQ ID NO: 255949 - protein, 88 aa, Zea mays
  Clone ID: MRT4577_165016C.1.pep
FGSRTETILFQSGPKVLTLPPWQQAAGDAIARYPNVCTGLRACANDAPWVQDPAGKQPTPEGVGCNPASPVPVADHSGAACARAGHHY

SEQ ID NO: 255950 - protein, 236 aa, Zea mays
  unsure (1)..(236): unsure at all Xaa locations
  Clone ID: MRT4577_165017C.1.pep
AGXSGXGWLTAMAPLFAESLRARNNRGERGLHEAVRRGNTEAVESLIWMDENVDGGRTSRTPSLVQRVDYQGVSPLYLATTLRRGDIVGILTHPSQNHYSPSFSGPGGKTAMHAAVLAKGDAKVLTKKLLEWTTSKNYPGGARDLICMGDKSGSTPLHLLASEGGASVAELLLSPDARELSWARRLLSKICPCTSPAGNAASADDDDDDTREGGSCTAAALKKTPMAGFPYMSLRR

SEQ ID NO: 255951 - protein, 117 aa, Zea mays
  Clone ID: MRT4577_165018C.1.pep
GRKFFFFFFAKSLRARNNRGETCLHEAVRRGNREAVESLIWMDENVDGGRTSRTPSLVQRVDYQGVSPLYLATTLRRGDIVGILTHPSQNHYSPSFSGPGGKTAMHAAVLAKGGTCG

SEQ ID NO: 255952 - protein, 58 aa, Zea mays
  Clone ID: MRT4577_165019C.1.pep
SLRSGGARSSLCWGCHYGILGPLASVFMSASVFFWSLASCSCWLARFDLDLYPLHSAF

SEQ ID NO: 255953 - protein, 95 aa, Zea mays
  unsure (1)..(95): unsure at all Xaa locations
  Clone ID: MRT4577_16501C.1.pep
NLAPPYNKAAKELSQXEPAIRVAKEDAEDETNSLSPEXEIQGXPTLQILDPGNTNNEYKAPRETDRILDYLQRQGAHAYEEIXSPECVAAHFDDK

SEQ ID NO: 255954 - protein, 116 aa, Zea mays
  Clone ID: MRT4577_165020C.1.pep
SDAKRFGISKPNMLADLFVEGEGASVKERYPFLVKKTLRGMFQDSPFIYFLCGLENEACAVASMKLFGYPIYSCGTVNHLTNEVAACSDSKKRLPDGLNKHKSKEDGFIHMNIAYL

SEQ ID NO: 255955 - protein, 100 aa, Zea mays
  Clone ID: MRT4577_165021C.1.pep
VGASVVGVLGCWLVSSSRCKNGSNAFGSCGGDQKGPSWRPVSVSAEFPDMPTPALQPLQLNLRMRFVSLERIGHIKASLALYIHKEVGKTEIDTCCASAS

SEQ ID NO: 255956 - protein, 73 aa, Zea mays
  Clone ID: MRT4577_165022C.1.pep
TVKQMHASRLVLVLNRRGINCNLCGNLYCSKYQEGHILTCLQEHRLLHAQTDVPVEERSLRGHQVLLAVDGGE

SEQ ID NO: 255957 - protein, 34 aa, Zea mays
  Clone ID: MRT4577_165023C.1.pep
YESCRGRVGPHAGDGLEHRSGSTSSMEAELRRVG

SEQ ID NO: 255958 - protein, 142 aa, Zea mays
  unsure (1)..(142): unsure at all Xaa locations
  Clone ID: MRT4577_165024C.1.pep
CSQAHIACLLPPXLPSMIAXLCENPAFQTYKLQQAISLSNIPLSPLVHQQSSAISLVQSLVQTIHGTIAXQLMLPVINQVSMANLSPYSQQQQFFPFNQLSTLNPAAYLXQQLLPFSQLATAYSQTQQXFISFNQLEHTEHR

SEQ ID NO: 255959 - protein, 535 aa, Zea mays
  unsure (1)..(535): unsure at all Xaa locations
  Clone ID: MRT4577_165025C.1.pep
MNEIQFAEQEGRKFTGVYGPQGDDEKVSFLQELRDIRAIYSGPWLVAGDFNLIYQAADKNNANLDTAMMASFRRFLNDMEVKEIPLLGRKYTWSNERQSRRPXTLVRLDRAFCCVDWDGLFPESILQSMTAGVSDHYPLILGLKVKTAGKRRFHFESFWTKIPGFLDAVKQNXEAPVSSNCAVERLFLKLQRLSKGLQKWGQRKVGNIKVQMEMAKEILHRLEIERDSRDLSEQEWLRRKLKLHCLGLASLERTIARLRSCILYLQDGDANTAFFHQQARFRKKNFIPKLNVGDQIAVSQEDKQAVVLDFYENLLGKAEEPIYTVDLAELGIQQIELSQLDAPFMEAELWATIKDMPMDKAPGPDGFTDHFYKSCXSIIKGDILMALDAIYLRSCLQIXLLNSAFITLLPKKQDASQVTDFRHISLVHSFAKLVTKIMANRLAPVLPILISPNQTAFVKGQRIHDNFMFVQQTVKALHKNKKKEAHILLKLDISKAFDSVSWSFLLEILRHIGFGQRWINLLCLLLSTSSTPQKT

SEQ ID NO: 255960 - protein, 76 aa, Zea mays
  unsure (1)..(76): unsure at all Xaa locations
  Clone ID: MRT4577_165026C.1.pep
RPVSCCCQMAEDXSCSLSDLSVADLQSLHASFEEDVVNVWSYETSIENRNTPGGTAKSSVLDQIQRLKTWLTSKQA

SEQ ID NO: 255961 - protein, 95 aa, Zea mays
  Clone ID: MRT4577_165027C.1.pep
LRSCFYRFIHCTFHWLFFSFSEEKQKAKTGAYFLGHNPTPLQRRYPSRSHRVGNRAESLRDTTLMYFPGPRGLDDTHEFYHTFKPFVQSKQKTHT

SEQ ID NO: 255962 - protein, 40 aa, Zea mays
  Clone ID: MRT4577_165028C.1.pep
GMGVRNSLFVFAASNMLGLVLRFLVPESKGKSLHLMSGEV

SEQ ID NO: 255963 - protein, 259 aa, Zea mays
  Clone ID: MRT4577_165029C.1.pep
GFGRTARSLLPLLLLASPAATRLASAACAGEKFPAGRAYASCEDLPKLGASLHWTYDASKSSLSVAFVAAPAAAGGWVAWGLNPTGEGMAGAQALVALAGAGAAAPAVRTYNITGYVPLGKASTPLDFPATDLAADAAGGKIRVYGKLQLRKGMKAVNQVWQVGASSTGGAPDKHAFQADNLGAKSKLVLAGKAPAAAEAPSPALAPEAGGPSAGGDSGAGASSSTAPSKSPNAAVPAAGVSAPALLALALVGFLAAVW

SEQ ID NO: 255964 - protein, 227 aa, Zea mays
  unsure (1)..(227): unsure at all Xaa locations
  Clone ID: MRT4577_16502C.1.pep
AGRVRNHFCFAPFLFAFLLFHSPLPLRRCLPLPLPTSPFFPFLFSFSHFPPWIPMVTTTVKSRPPHASFAMSGGRRRSSPVAPSCSSVPGCSLVALCCLILVLLSFSMSSSAVAAEDCVEDSDGADGDGCCLSFRDVCADRSSFCFSSSVAQMLLASEDAAEAPDLELPRGWEPSSLPLSFPMSGGGGMVTCSSVDSSLTRARDGLXRGDDARARYDVASCKAPLVP

SEQ ID NO: 255965 - protein, 76 aa, Zea mays
  unsure (1)..(76): unsure at all Xaa locations
  Clone ID: MRT4577_165030C.1.pep
DEDTSALGSWKTGFLSLGSQGKTSPVTCVLIFAVVLFSLVVVFFCFLFSXRDGSQSIYCLFLGSTWRYEGTIIEYI

SEQ ID NO: 255966 - protein, 96 aa, Zea mays
  Clone ID: MRT4577_165031C.1.pep
QFFFRGPKRPPEGNGKAQENYKNLGPPPKFQKRKQRNGLLKKGKKQKWPAILEKKKKFRGGGPPHSGKNNPPAARGRQCSAGKAGLSGKPPWVKKP

SEQ ID NO: 255967 - protein, 206 aa, Zea mays
  unsure (1)..(206): unsure at all Xaa locations
  Clone ID: MRT4577_165032C.1.pep
MGNSASPDPRARTQAKTRKTANSAPPDPRARTRAKTRETANSAPPDPMARTRAKTRKMANSTPPDPRARTRAKTRKTANSAPPDPRARTRAKTRKTTNSAPPDPRARTRAQPQKTTXLRLARPQGSDSALASAERSPPRPTRWFGLGLGNRRQTRPRLRRSPYVARPRAQAHHVNRESHHHPTPSRLGSRRTRPASHLASSARWAM

SEQ ID NO: 255968 - protein, 120 aa, Zea mays
  unsure (1)..(120): unsure at all Xaa locations
  Clone ID: MRT4577_165033C.1.pep
VLADVLVLPLGDMEAPPKSRSSLSSMAEAEPEPLGRARRRSXAEARAESEPWGRAKRSSSSSGAEPEFEPWVGRSGVCRLPGLSPSPSPGSGGAEFAVFRELARVRALGWAERSSPSSGT

SEQ ID NO: 255969 - protein, 180 aa, Zea mays
  unsure (1)..(180): unsure at all Xaa locations
  Clone ID: MRT4577_165034C.1.pep
RALLSRQSRSDRSHFAAPLTGLTRRQRRLRRSDCCATRQSEADXQASPASGAIGNSASPDPRARTRPRLRKTTNSTSPDSRARTRPRLRKTTNSASPDPRARTRARPRKTTNSASPDPRARTRARPRKTTNSASPDPRARTQPWPRTTVSASPDPXARTRPRPRKTNSTSTSEEPPPRPT

SEQ ID NO: 255970 - protein, 105 aa, Zea mays
  unsure (1)..(105): unsure at all Xaa locations
  Clone ID: MRT4577_165035C.1.pep
MASLAALSVKPEAIKGLAGSSISGRKLADHRPPARSIHRPHAADVAAKYGDKSDYFDLDDLXSHTGQRDLYXSDAPWSYNPLQSKFFHTTAAADTKRGLLHKMMI

SEQ ID NO: 255971 - protein, 182 aa, Zea mays
  unsure (1)..(182): unsure at all Xaa locations
  Clone ID: MRT4577_165036C.1.pep
PRKTTNSASPDPRARTRAQPRKTTNSASPDPRARTRAQPRKTTNSASPDXRAPTRAQPRKTTNSASPDPRARTRAQPRKTTNFASPNPRARTRAQPQKTTNSASPDPRARTRAQPRKTTXLRFARPQGSDSALASADGLRLARPRGSDSTSALEDRLDLNLGGASTSPNPGRRPIWLASVNK

SEQ ID NO: 255972 - protein, 189 aa, Zea mays
  unsure (1)..(189): unsure at all Xaa locations
  Clone ID: MRT4577_165037C.1.pep
MQPRKAGPLAKKCDESLQASANTPFEAQGLLSGTIIRGTLKTPNSQLSESDRQSGLAKGATANSAPPDPRARTRAKTRKTANSAPPDPRARTRAKTRKTANSAPPDPRARTRAKTRKTANSAPPDPRARTQAKTRKTXNSASPDPRARTPPYPRXRTTSASPDPMARARPRQQRTVSTSASEEPPRHPA

SEQ ID NO: 255973 - protein, 562 aa, Zea mays
  unsure (1)..(562): unsure at all Xaa locations
  Clone ID: MRT4577_165038C.1.pep
YYELFFQVFSKFAKPLKGSLGNEVEVKWSQNCQEALXSVDRXLKTATVLVLPDVHKPFSLKVHEQNYPIHDLELAAVVHTLKTWRHYLYGQKCDVYTDHKSLKYIFTQSELNMRQRRWLELIKDYELEIHYHPGKVNVVADALSRKSQVNLMVTRPMPYELAKEFDRLSLGFLNNSRGVTIELEPTLEREIKEAQKNDEKISEIRRLILEGKGKDFREDAEGVIWFKDHLCVPNVQSIRELILKEAHETAYSIHPGSEKMYQDLKKKFWWYRMKREIAEHVAMCDSCRWIKTEHQRPAGLLQPLQIPEWKWDEIGMDFIVGLCRRFDPGGSLDRRVNCRRVSQPRWVGARRSTKGGKKEPGKRGNLRPSCCPATRSGALAPWVGRGGGSSEVEVESVFRGRGRVRAPGRARQRPSSEAKAESEPRGRTRRSSSSSGAEAESKPWGRARRSSSSSGAEAESEPWGPARRSSLSSGAEAESEPWGRARRSSSSEAETGAEPWGQARRSFLWRPRPDLAAVSLTLSSGTAVGATQAALSSCQAGQWSGEVTAVTSALSTEGCASG

SEQ ID NO: 255974 - protein, 105 aa, Zea mays
  unsure (1)..(105): unsure at all Xaa locations
  Clone ID: MRT4577_165039C.1.pep
VEAPPRSRSSLSSEAEVESEPLGRARRRPSAEARAESEPWGRAKQSSSSSGAEPESEPWVGEXSRLLGLSSSPSPGSASQSSRLPGLSPSPSPGSGGAEFAVFRG

SEQ ID NO: 255975 - protein, 109 aa, Zea mays
  Clone ID: MRT4577_16503C.1.pep
VGYQSCGLEVDARGGSGPAWVRYTPPGGRVSSVAPAPVSTIPVPSPTAYSQRRSKCRQSGLENDRLSSGAGSRIYSGGEGGNRRRSRSPNPLVMVRATVSMWFLGSESV

SEQ ID NO: 255976 - protein, 130 aa, Zea mays
  Clone ID: MRT4577_165040C.1.pep
GAAGHAVPGGQATYLGAPVPWGTLPTILVIEFVAIAFAEHQRTMEKDPEKKKYPGGAFDPLGFSKDPAKFEEYKLKEIKNGRLAMLAFVGFCVQQSAYPGTGPLENLASHLADPWHNNIGDIIIPRSISP

SEQ ID NO: 255977 - protein, 178 aa, Zea mays
  Clone ID: MRT4577_165041C.1.pep
MAPLVDVVGPRPRLGDVEAPPRSRSSLSSEAEVESEPLGRARRRPSAEARAESEPWGRAKQSSSSSGAEPESKPWVGRSGVRRLQGLSPSPSPGSGGAEFAVFRGLARVRALGRRSGVRRLPGLSPSPSPGSGGAEFAVFRGLARVRALGRAERSSPSSGAEPKSEPWVGRSGASYGA

SEQ ID NO: 255978 - protein, 71 aa, Zea mays
  unsure (1)..(71): unsure at all Xaa locations
  Clone ID: MRT4577_165042C.1.pep
WLGFSKDPAKFEEYKLKEIKNGRLAMLAFXGFCVQQSAYPGTGPLENLASHLADPWHNNIGDIIIPRSISP

SEQ ID NO: 255979 - protein, 252 aa, Zea mays
  unsure (1)..(252): unsure at all Xaa locations
  Clone ID: MRT4577_165043C.1.pep
EAGLTRGQRRLRRSGCCATRQSEADXQPSPALGAMGNSAXPDSRARTRAQSRKTTNSASPDPRARTRAQPRKTTNSAPPDPRARTRAQPRKTTNSSSPDPRARTRAQPRKTTNSAPPDPRARTRAQPRKTTNSASPDPRAQTRAXTRQDDELRFARPQGSDSGSAPEDDELRFARPQGSDSGSAPEDDELRFARPQGSGSALASADGLRLARPRGSDSTSASKDRLDHDLGGASTSPNPGLWGPYDTVALLP

SEQ ID NO: 255980 - protein, 62 aa, Zea mays
  Clone ID: MRT4577_165044C.1.pep
PARICGSSNGDGVVERAEELQRRGRAQSAYPGTGPLENLASHLADPWHNNIGDIIIPRSISP

SEQ ID NO: 255981 - protein, 124 aa, Zea mays
  Clone ID: MRT4577_165045C.1.pep
MAPLVDVAGLRPRLGDVEAPPKPRSSLSSVAEVESEPLVRARRRPSAEARAESEPWGRADRSSSSSGAEPKSEPWVGWSGVHRLPGLSPSPSPGSGGAEFVVFRGLARVRALGRAERSSSSSGA

SEQ ID NO: 255982 - protein, 43 aa, Zea mays
  Clone ID: MRT4577_165046C.1.pep
FKFHQQIPKGGEFERPGVIPARAVRVWPKAVPSVTARFFTTSS

SEQ ID NO: 255983 - protein, 212 aa, Zea mays
  Clone ID: MRT4577_165047C.1.pep
PARISGSSNGDGVVERAEELQRPAHLDGSSPGDFGFDPLGLATVPENSERLKESEVYHCRWAMLAVPGILEPEALDLGNWVKAQEWADVPGGQATYLGAPVPWGTLPTILVIEFVAIAFAEHQRTMEKDPEKKKYPGGAFDPLGFSKDPAKFEEYKLKEIKNGRLAMLAFGGFCVQQSVYPGTGPLENLSSHLADPWRNNIGDIIIPRSIST

SEQ ID NO: 255984 - protein, 212 aa, Zea mays
  unsure (1)..(212): unsure at all Xaa locations
  Clone ID: MRT4577_165048C.1.pep
MVMASSSGLRSCSAVGVPSLLAPSSRSGRLAPFCANATTSGRVTMSAEWMPGQPRPAHLDGSSPGXKQKQASXTDRVTTACSALPVSLTSVDIXDFGFDPLGLATVPENFERFKESEVYHCRWAMLAVPGILVPEALGLGNWVKAQEWAAVPGGQATYLGAPVPWGTLPTILVIEFVAIAFAEHQRTMEKDPEKKKYPGGAFEPLGFSKDPA

SEQ ID NO: 255985 - protein, 249 aa, Zea mays
  Clone ID: MRT4577_165049C.1.pep
MAMASSSSGLRSCSALGVPSLLAPSTSSSSRSGRLPFCAHATTSGRVTMSAEWMPGQPRPAHLDGSSPGDFGFDPLGLATVPENFERFKESEVYHCRWAMLAVPGVLVPEALGLGNWVKAQEWAAVPGGQATYLGAPVPWGTLPTILAVEFVAIAFAEHQRTMEKDPEKKKYPGGAFDPLGFSRDPAKLEEYKLKEIKNGRLAMLAFVGFCVQQSAYPGTGPLENLAAHLADPWHNNIGDIIIPRSISP

SEQ ID NO: 255986 - protein, 68 aa, Zea mays
  Clone ID: MRT4577_16504C.1.pep
LKAQSSPTQNHQHYHRVKTIHSQIHIWANKFDAPLLGVPRKKPPIIIRKGKKSPTPGAQPGKSPTRTL

SEQ ID NO: 255987 - protein, 74 aa, Zea mays
  Clone ID: MRT4577_165050C.1.pep
RNPIVLWPANVCAYRGVLRGDGCVNYARRHRVSEASASPSQSRSLAIGLSPMWRDCDCGMGHCTQDMIRAFYTH

SEQ ID NO: 255988 - protein, 60 aa, Zea mays
  Clone ID: MRT4577_165051C.1.pep
EKGLSPRLENLRCIRLCSRSVSLRTYWVTRGRIIESICPPKQIVLPLAQNVRRVRTSGAR

SEQ ID NO: 255989 - protein, 245 aa, Zea mays
  Clone ID: MRT4577_165052C.1.pep
MVMASSSGLRSCSAVGVPSLLAPSSRSGRLAPFCANATTSGRVTMSAEWMPGQPRPAHLDGSSPGDFGFDPLGLATVPENFERFKESEVYHCRWAMLAVPGILVPEALGLGNWVKAQEWAAVPGGQATYLGAPVPWGTLPTILVIEFVAIAFAEHQRTMEKDPEKKKYPGGAFDPLGFSKDPAKFEEYKLKEIKNGRLAMLAFVGFCVQQSAYPGTGPLENLASHLADPWHNNIGDIIIPRSISP

SEQ ID NO: 255990 - protein, 62 aa, Zea mays
  Clone ID: MRT4577_165053C.1.pep
LFLKESQLIAVRIRVDFSPQSGRENCSFVSQSLHEIEQYSVWNLPVLFRCPQLLVALCLGDF

SEQ ID NO: 255991 - protein, 53 aa, Zea mays
  Clone ID: MRT4577_165054C.1.pep
KTLDIVNPSREKSICATYIMPQNAAGRDQLMILFTLQGLAKTGLFYKFGVPKA

SEQ ID NO: 255992 - protein, 105 aa, Zea mays
  unsure (1)..(105): unsure at all Xaa locations
  Clone ID: MRT4577_165055C.1.pep
MLVGCGWGAVAVVGRIGMGVGGVGGIGGVGGSGALRRGDGGARGVDGPLLXAGFVAYMLWSAPVLGRWSRPEVWVGDSETLLFGEKEGGVSGCGGPGEIPWGSVG

SEQ ID NO: 255993 - protein, 266 aa, Zea mays
  Clone ID: MRT4577_165056C.1.pep
IGYLEAGRDRINDDFRGPPAKQVITVFWFSFSTLFFAHREDTRSTLGRVVVIIWLFVVLIIQSSYTASLTSILTVQQLTSPIKGIDSLIASDEPIGFQVGSFAESYLVHELGVSPSRLKALGTPDEYKNALELGPRKGGVVAIVDERPYVEVFLVQHDKFAIVGAEFTKSGWGFAFPRDSSLAVDLSTAILALSENGDLQRIHDKWLSNGPSPQSTTDLEPERLRVQSFSALFLLCGAACLAALAIHGCILARQYSLHVASQPPGR

SEQ ID NO: 255994 - protein, 345 aa, Zea mays
  Clone ID: MRT4577_165057C.1.pep
MGRAPCCEKVGLKKGRWTKEEDEVLARYIKEHGEGSWRSLPKNAGLLRCGKSCRLRWINYLRAGLKRGNISEEEEDMIIKLHATLGNRWSLIAGHLPGRTDNEIKNYWNSHLSRRAADFRDGVVVDIDLSKLPGGGKRRGGRASRGAVVAAAKEKKAKEKDDRGNSKVAEAEQQLRDTEDDDGGSVSTPRPQSDDCGTAQSEEEQAQASASDLTSDGHGPEEEEEEDPLALSEEMVSALLAPESPKLEVGPDGSCMDSYSGPPSGESGCGSSGPSGDVAQDLDLDDDKAIMDWDLMGLDISTAGDMWDQLVWDYDETLVTEPEGGEEGHQQQDDVMSDLFFLDNL

SEQ ID NO: 255995 - protein, 66 aa, Zea mays
  Clone ID: MRT4577_165058C.1.pep
SGHPYQEGREWLVSTQHPDKMVIILQKVPRICYMAKAKNSPIEYIPFSVSIELQPELTLALLFIRN

SEQ ID NO: 255996 - protein, 915 aa, Zea mays
  Clone ID: MRT4577_165059C.1.pep
MKSMLQVWGIFCCVCSCALGQNTSARPSVVNVGALFTFHSTIGRAAKVAIAAAVNDINRDPSVLQGTKLVVQMQDTNYSGFISIVQALQFMEKDTIAIIGPQSSVVAHVISHVANELQVPLMSFAATDPTLTPLQYPFFVRTVHSDQFQMASVAAIVDYYGWKMVTAVYIDDDYGRNGVSSLDDELAKRRLKILYKAAIRPGARKSEMAAVLVKAAMMESRVFVLHARDDSGIDVFSLAYNLSMTSGGYVWIATDWLTACLDSAPRLGTGLLNTMQGVLTLRQHTENTSRKKALVSRWSEVAKEEEEEDGGSLPNTYGLYAYDTVWMLAHGLDAFFNSGGNISFSPDPRLRAVVGGALNLDALSVFDEGTLLLERIRNVSFMGATGPVKLDSDGNLIQPAYDIVNVVGSGLRTIGYWSNYSGLSVVSPETLYKKPFNVSANQELHAAIWPGETVTRPRGWVFPNNGNELRIGVPDRYPVTYRFVPFGNGRENPSYTELIGRILTNEFDAVVGDVAIVTNRTKVVDFTQPYVASGLVILTAVKTQSSDAWAFLQPFTIRMWSVTGVFFLVVGAVIWLLEHRINDDFRGPPAKQVITVFWFSFSTLFFAHRQNLANVLRRSWTILHREDTRSTLGRVVVIIWLFVVLIIQSSYTASLTSILTVQQLTSPIKGIDSLIASDEPIGFQVGSFAESYLVHELGVSPSRLKALGTPDEYKNALELGPRKGGVVAIVDERPYVEVFLVQHDKFAIVGAEFTKSGWGFAFPRDSPLAVDLSTAILALSENGDLQRIHDKWLSNGPSPQSTTDLEPERLRVQSFSALFLLCGAACLAALAIHGCILARQYSLHVASQPPDAVATGADGAIRRSSRSSIRSFLSFADRREAQCPRGSCKDPAAALGGSSSSGVSSFTSSNASVSR

SEQ ID NO: 255997 - protein, 89 aa, Zea mays
  Clone ID: MRT4577_16505C.1.pep
LRISKPTEFPAIPLPSPPRLQGGKVGPNRCSACRKRVGLTGFNCRCGNLYCALHRYSDKHDCKFDYRTAARDAIAKANPVVKADKLDKI

SEQ ID NO: 255998 - protein, 73 aa, Zea mays
  Clone ID: MRT4577_165060C.1.pep
FQVVMNGFSLGLGGPPVFKERLRVPGCVFPPPGVFFSLVLREIDGGFWWGPNPGEPHRNRTLKRNIKKTGAAA

SEQ ID NO: 255999 - protein, 47 aa, Zea mays
  Clone ID: MRT4577_165061C.1.pep
RSVYEMFAFRFRMNALVYQDQDIVHQNTTTRPSSCGCLTVYRDLYSM

SEQ ID NO: 256000 - protein, 89 aa, Zea mays
  Clone ID: MRT4577_165062C.1.pep
ASHLFLPTCWRTQFFGDKKRTFTFLHMGNGPRNNPPHCLILGPNFFKGARPPPFFFFAKFIFLKGFKKNPPFFGAKVCPKNFFWGFWRQ

SEQ ID NO: 256001 - protein, 69 aa, Zea mays
  Clone ID: MRT4577_165063C.1.pep
LLNPTCICTFLQSGFFTLWSRIRSGVSDLISCGHTSRRNMVACQLRNKDEHMVRQCGLIICPCAPAKGP

SEQ ID NO: 256002 - protein, 53 aa, Zea mays
  Clone ID: MRT4577_165064C.1.pep
GHDLMFPIIPFKCHALTSIEQIFKFILVTLYSHLLILYYVLISFITLIINSLS

SEQ ID NO: 256003 - protein, 129 aa, Zea mays
  Clone ID: MRT4577_165065C.1.pep
MRVSVLADCLNNIHNAEKRGKRQVLIRPSSKVIVRFLTVMQKHGYVEEFEEIDDHRSGKIVVQLNGRINKTGVISPRFNIQLSQIENWVNLLLPARSFGYIILTTSAGIMDHEEARRKHVAGKILGFVY

SEQ ID NO: 256004 - protein, 51 aa, Zea mays
  Clone ID: MRT4577_165066C.1.pep
KKKKKKKKKKKKKKKKKKRGKKKNYKKKKKQKKKKKKKKKNQGGAFLKVQI

SEQ ID NO: 256005 - protein, 89 aa, Zea mays
  Clone ID: MRT4577_165067C.1.pep
KLLYTRIISYSNLSEKESFREEIKNNKNIAHSRRMASYSYSCGKHDNVRHNYLAGVVLKEQGYFSTWLKIEAVMKILKYNSILYVSLIQ

SEQ ID NO: 256006 - protein, 125 aa, Zea mays
  Clone ID: MRT4577_165068C.1.pep
MGTNYRAVNNFLPPPAISLVLLVCIASRSSLGAAETDVEQKRSSVPLMFVFGDSLVDVGNPRAASPYGIDFPSGTPGAVSGRFTNGYNLADLVARRLGFKMSPPAYLSLTPVSKFDLFTCRIGAN

SEQ ID NO: 256007 - protein, 418 aa, Zea mays
  Clone ID: MRT4577_165069C.1.pep
PGFEPRVRPDAAESRILLTLYDFGAVGDGVADDTKALAGAWTAACTAADNVILNVPAGGTFRIWPLTLAGPCRSEIKLLISGDILAPESPQDWGQGQSDQWLHFHKVRDLTVTGGGIIDGRGQQWWAQSLARTQPAPKANHFEEPTRPSVKGITLQNSQSYHLTFTRSSDVEANYLRVTSPEHSVDTKGIHLVDSYNVHVMDNLISTGDDCVSIVGNCTDVRLRAISCGPGHGISIGTLGVNSSVDYVEKIKVDTLFISNAENGVRVRTTEDGGGGGGFARKVKFESIVMRNVTNPIIVDQGISSDDPPPSSPEAVALAATATAAVQVEKINYIDITGTSASERAVTFSCSDARPCRRLSLVNVNLTQVDGSEASSYCRQAFGRSVGTVVPESCLSKEDFVHHVPPQRSEEDGEDSES

SEQ ID NO: 256008 - protein, 140 aa, Zea mays
  Clone ID: MRT4577_16506C.1.pep
MLPFKNLVPNSARGSSPPRGSSERNRKEGRLIRVKEAMEHKEAGCQAPEGPILCINNCGFFGSAATMNMCSKGGKVGPNRCSACRKRVGLTGFNCRCGNLYCALHRYSDKHDCKFDYRTAARDAIAKANPVVKADKLDKI

SEQ ID NO: 256009 - protein, 91 aa, Zea mays
  Clone ID: MRT4577_165070C.1.pep
DILQHLRLINPPSKAMGTNYRAVISLVLLVCIASRSSLGAAETDVEQKRSSVPLMFVFGDSLVDVGNNNFLPPSAPRAASPYGIDFPSGTP

SEQ ID NO: 256010 - protein, 44 aa, Zea mays
  Clone ID: MRT4577_165071C.1.pep
TKTAGVTELQSGGTYFLINMPWPSYPNMTLFKACSRVNKKAYVF

SEQ ID NO: 256011 - protein, 109 aa, Zea mays
  Clone ID: MRT4577_165072C.1.pep
MGVTKAEDPLDADVWLRAVESKFPLLTRACPDDTKTRFAAQQLRGPVRTWWDHFRTMLPVGHEVTWEEFKTAFREHHIPAGILDRNLNEFLALTQGTRTVLQYAQAFND

SEQ ID NO: 256012 - protein, 102 aa, Zea mays
  Clone ID: MRT4577_165074C.1.pep
MGTNDRAVISLVLLVCIASRSSLGAAETDVEQKRSSVPLMFVFGDSLVDVGNNNFLPPPAPRAASPYGIDFPAGTPGAVSGRFTNGYNLADLVGIYIYIFTT

SEQ ID NO: 256013 - protein, 45 aa, Zea mays
  Clone ID: MRT4577_165075C.1.pep
ERTCEIWPLEPVNPGEILTPFVRSLKGQRAQSRPHFLEPMVVSWR

SEQ ID NO: 256014 - protein, 49 aa, Zea mays
  Clone ID: MRT4577_165076C.1.pep
RGEEEGDGLGERGGSRVRWVKEGPRERETTKWASGIGSWVGKWQNRTRG

SEQ ID NO: 256015 - protein, 119 aa, Zea mays
  Clone ID: MRT4577_165078C.1.pep
MKFFSTLSTLAVALMMTGEAVAGTYKSFSMGANRADGVCKWEADRKKDFQAIKSWNKGFNAVRLYSASDCNTLVKAVPAAKATGMKILVGIWSTDDAHFGRDNAALLQAIQQHGTGWIA

SEQ ID NO: 256016 - protein, 58 aa, Zea mays
  Clone ID: MRT4577_165079C.1.pep
PVQLLLSVYPSPLLPWDVVRQPSPLGESSGVCSRGWSASSVTRSPRSIASTRTTSRRS

SEQ ID NO: 256017 - protein, 146 aa, Zea mays
  Clone ID: MRT4577_16507C.1.pep
MCTSGRAGRVHFEAHRIACDSSPLASSSAPRGSAERNRKEGRLIRVKEAMEDKEGGGQAPEGPILCMNNCGFCGSAATMNMCSKCHKEMITKQDQVKLGASSIDSIVNGSDAGMEAGDAGTNTGGGAAQVELETRNVQEAADVAGA

SEQ ID NO: 256018 - protein, 209 aa, Zea mays
  unsure (1)..(209): unsure at all Xaa locations
  Clone ID: MRT4577_165080C.1.pep
MSGSAGSPPYAAELAAAKKAVALAARLCQTVQQEILQSDIQSKADKSPVTVADYGSQVLVSLVLNMEVTSGSFSMVAEEDSEDLRKDSAEEILEHITDLVNETLAEDGSYNITLSKEGILSAIDTGKSEGGPSGRHWVLDPIDGTKGFLRGGQYAIALALLDEGKVVLXVLGCPNLPLTSISNLNGSSSGDQXGXLFSATIGLXGAEVE

SEQ ID NO: 256019 - protein, 1036 aa, Zea mays
  unsure (1)..(1036): unsure at all Xaa locations
  Clone ID: MRT4577_165081C.1.pep
MAPPVDVAGLCPRLGDVEAPSKPGSSLSSVAEVESEPLGRARQRPSAEARAESEPWGQAERSSSSSGVEPKSEPWVGRSGVRRLLELSPSPSPGSGGAEFAVFWDLARVRALEKPSSTPKLIKTTFAKPITPMRDGVIDEPMRDPPQKQVWLPKPNHLRNTLDTFPGISSDPLPRAPQPSEKKILFHKQNPPKREVRYHCEYCERDGHLASFCFKRKRDERRVSKSSRKDMNRPSHGVHAQLVQRRPRRPRGVLPLAARSQADGGLENTWLMDSGCSRHMTENSKWFSSLDPVIGKEYITFGDKSRGKVVSRGTIRVNESFILKDVALVSNLHFNLLSVSQLLEDDYEDDAFTHARDLILRLQNEFPKNAMRSIHGDNGIEFKNTQFATFCASLGLEHQFSSLYLPQQNGIVERKNQTLVDMARTMLDEHRTPRHFWVEAINTACHVSNHIFLWAFLNKTSYELRFGRPPKGNLDKFESRSSDGVFLGYALHSRAYRVLNLETNRIMETCEVTFDETAPCPSPIFEPAGPDQMGQTIFMEEEHDDADWVALXQLHRPPQLSLLPLLRLIDSXTPSTTWGPLEPAPADTGGVEAVVEGEATSSREAPQHIQRCHPPQQMIGELHERVTRSRSQHISHFAHSTFVATFEPRDVGHALSDPNWVNAMHEELENFERNRVWVFVPPPSNCHLIGTKWVFKNKQSEDGLVVRNKARLVAQGYCQKEGIDYEETFAPVARLEAIRILLAFAASKGFKLFQMDVKSAFLNGYIEEEVYVKQPPGFEISKFPNHVFKLQKALYGLKQAPRAWYERLKSFLLSKGFKMGSVDKILFLLKHNNDTLLVQIYVDDIIFGGSSNALVSRFSDLMSRELEMSMMGELNFFLGLQIKQTQDGTFVHQGKYTKDILKKFDMGEGKPLSTPMSTSTTLDTDEDGEPVDQKEYKSMIGSLLYLTATRPDIHFAICLCAHFQASPRTSHRMAMKRIMRYLRFTPEFGLWYSSSSVPSLCGYSDADFAGCLLERKSTSGTCQFLGTSLVSWSSRK

SEQ ID NO: 256020 - protein, 460 aa, Zea mays
  Clone ID: MRT4577_165082C.1.pep
MQMACNRTKRAHRFDSNASSMEAQAHTSCNRRAGCNVLETAPPLAPLPCLLDCGTSTATRGNPAHDPTVPTRHIGHGVRLTTAKSGLERHRKLRIARPQGSDSGSAPEYDELCIARPQGSDSGLAPEDDELRLARPQGSDSGSAPEDDELRLTRSQGSDSGSAPEDDELRLAQSQGSDSGSAPEDDELRLARPQGSDSGSAPEDDELRLARPRGSDSTSSQEAPSLPYPKLTQATGNKTGVPSGSPRKSIGNNGLPSIGSPRGIFALDFFMLTQRLISLQEDLHWLEEPFTKQEIDSIVAALPTDKSPGPDGFNTNFLKKCWPIISQDFYDLCEQFYQGDVCLRSINGSFIVLIPKKENAQLVGDFRPISLLNNSMKIITKLLANRLQTVMTSLVHKNQYGFIKGRSIQDCLAWAYEYIHLCHVSKKEIIVLKLDFEKAFDTVEHDLILQVLSFRGFGPK

SEQ ID NO: 256021 - protein, 467 aa, Zea mays
  unsure (1)..(467): unsure at all Xaa locations
  Clone ID: MRT4577_165083C.1.pep
MGMRSRHPKALGFRWYPAATHRSLTLVLWSLAALVVVVNFHLLIIHKEEGENXVHTRSXSIMRELEVVEEEKFRLAPPRSRRNPRAVRRKGEKKSPTIVDEFLDESSAVHDMFFPELNTAVDPINGGNDSMYFYYPGRIWLDTDGKPIQAHGGGVLYDKRTNTYFFYGENKDGKTYRAHRKGADRVDIIGVSCYSSKDLWTWKNEGLVLRGEEKNVTHDLHKSNVLERPKVIYNDRTGKYVMWMHVDDANYTKASVGVAISDSPTGPFTYLYSKRPHDCESRDMTIFKDDDGKAYLIYSSEDNSELHIGPLTDDYLDVTDVMRRLLIAQHREAPALFKHEGTYYMVTSGCTGWAPNTALAHAATSVMGPWETLGNPCVGGNEVFRSTTFFSQSTFVLPVPGLPGSFIFMADRWNPSDLRDSRYVWLPLTIGGVPDEAADYSFMFPLWSRVSIYWHRRWRLPEEWRDY

SEQ ID NO: 256022 - protein, 57 aa, Zea mays
  Clone ID: MRT4577_165084C.1.pep
ARARNKSRGEPGLLSGGGPFFFVWLGTRDHNSSSEARHTATKQLVADLNTREAECEA

SEQ ID NO: 256023 - protein, 134 aa, Zea mays
  unsure (1)..(134): unsure at all Xaa locations
  Clone ID: MRT4577_165085C.1.pep
MAPPVDVAGLRPRLGDVEAPPRSRSSLSSVAGVESEPPGRARRRPSAEVRAESEPWGRAKRSSSSSGAEPKSEPWVGRSGVRRLXGLSPSPSPGSGGAEFAVFRGLARVRALGRAERSSPSWVGWSGVRRLPGL

SEQ ID NO: 256024 - protein, 140 aa, Zea mays
  unsure (1)..(140): unsure at all Xaa locations
  Clone ID: MRT4577_165086C.1.pep
SPDPRAGPPSRPRTMDSASPDPRTRTQPRLRKTTNSTSPDPRARTQPRLRKTTNSASPDPRARTRPQLRKTINSASPEPRAQTQPWPQTMNSASLDPRXRTRPRPRKTDSTSTSEEPPPRPTQGSDRPRHRGGHHYPTPS

SEQ ID NO: 256025 - protein, 116 aa, Zea mays
  Clone ID: MRT4577_165087C.1.pep
KKGKRKRGKILTLYGIKKKKVKAKKGFFTCPPKRGKKHPLVEKKGDKFVFFGQPKPFVAPRQGDWVFWGEKNKKTPGEKGLNRTLGSFLPNFPPFLKFSPPRAPLLENYPPQKRYS

SEQ ID NO: 256026 - protein, 232 aa, Zea mays
  Clone ID: MRT4577_165088C.1.pep
MSSWQPERFWHPVRVVSWPSEERWSLAEVQLSELSSPCRHPLAFVRGLRAAVVTECAGRHHCLSGGASQMGRRSCSPWPESAWGRVMMVPPVDVAGLRPRLGDVEAPPKSRSSLSSVAEVEPEPLGRARRRPSAEARAESEPWGRAKRSSSSSGAEPKSEPWVGQSGVRRLPGLSPSPSPGSGGAEFAVFRGLARVRALGRAERSSPSSGAEPESEPWVGRSRASYGACGQA

SEQ ID NO: 256027 - protein, 81 aa, Zea mays
  Clone ID: MRT4577_165089C.1.pep
PPGSTSTTAITSATPKPRFVWSFNTPTPGFGFGTTFAPCSRKSLQTGAVTVRQGNPVFRPALIWRCSFHGVFFWLHSPFRP

SEQ ID NO: 256028 - protein, 132 aa, Zea mays
  unsure (1)..(132): unsure at all Xaa locations
  Clone ID: MRT4577_16508C.1.pep
MDRGRRRQWGVVCSALLLSALLAVAFAQSPSPARAPKXAPSLPAALRAAPRPSSPAVPAPKAPAASPAPKQTPSPSASPVPKPPTPRAXAQAPKPSSPAAPSASLVPKPXAPRAPAQAPKXXSPPSASPPPP

SEQ ID NO: 256029 - protein, 99 aa, Zea mays
  Clone ID: MRT4577_165090C.1.pep
RFIILAAAMVISTGHGCSDPSSSGMGGLGFLPGGTALAAASPGGHGLPRRRGSSRPGPCLAPRRPTACGPGGLGAAPAARGAAGTDPRCWAREHVPPRA

SEQ ID NO: 256030 - protein, 174 aa, Zea mays
  unsure (1)..(174): unsure at all Xaa locations
  Clone ID: MRT4577_165091C.1.pep
SRSDHRHSTAPLTSLTEGQRRLRHSDCSTTRQSESDRQSGLDKGATANSAPPDPRARTRAKTRKTANSAPPDPRARTQAETRKTANSAPPDPRARTRAETRKTTNSAPPDPRARTRAKTRKTANSAPPDPRARTRAKTRKTANSAPPDPRARTRAKTRKTXELRSARPQGSDSG

SEQ ID NO: 256031 - protein, 146 aa, Zea mays
  unsure (1)..(146): unsure at all Xaa locations
  Clone ID: MRT4577_165092C.1.pep
VEAPPRSRSSLSSEAEVESEPLGRARRRPSVEARAESEPXGRAKRSSSSSGAQPESEPWXVGRSGVRCLPGLSPSPSPGSGGAEFAVFRGRARVRALGRAERSSPSSGAEPESEPWVGRSGVHRLPGLSPSPIPRSGGAEFAVFRG

SEQ ID NO: 256032 - protein, 64 aa, Zea mays
  unsure (1)..(64): unsure at all Xaa locations
  Clone ID: MRT4577_165093C.1.pep
RELLGAKAPPPAPAGSQGKPKKGGSSDAPPGWAGSXDPAPTGPPGPRAVGWSFPGLPPVLXCLL

SEQ ID NO: 256033 - protein, 168 aa, Zea mays
  unsure (1)..(168): unsure at all Xaa locations
  Clone ID: MRT4577_165094C.1.pep
WRSTRSPDNGGWRRRQRRLRHSDCCATRQSEADXQPSPASGAIGSSASPDPRARTRPRPRKTTNSASPDPRARTRPRPRKTTNSASPDPRARTRPRPQKTTNSASPDPRARTRPWPQPTVSASPDPRAWTRPRPRKTDSTSTSEEPPPRPTRGSDRPRHRRSHHYPTP

SEQ ID NO: 256034 - protein, 124 aa, Zea mays
  Clone ID: MRT4577_165095C.1.pep
MAPPVDVASLRPRLGDVEAPPKPRSSLSSVAEAESEPLGRVRRRSSAEARAESEPCGRAKRSSSSSGAEPESEPLVGRSGVHRLPGLSPSPSPGSGGAEFAVFRDLARVRALGRAERSSPSSGT

SEQ ID NO: 256035 - protein, 378 aa, Zea mays
  unsure (1)..(378): unsure at all Xaa locations
  Clone ID: MRT4577_165096C.1.pep
MTSASPDPGGSGSASATEDRFDPSFGGTPTSPGLGRGPATSTGSAIITLPRANSGHREQDRLRPARSHPSLRQPRPHPDASLTTSASHIPTEAPPRPRAPTRPSRRTPRLPSPTHSQTLLPTHSHSLRMGNCSPSPRRRRPTEPGSPPLGSTVSGPSXDGXNSISVSPYPLARSPSVSTAAVDAEDGGVVRVYGSDGCPVAWRLRVSLLYKAAAPLHFTPSEAAPLGRPVLRLSSADPEVCGTPDELLRQVDARFEGKPRVAPPERPRTGSPSAAAAAAAEVAELVRLQHRSAERHLEGVAAKVVEMVKKGKKSGKGRSVVEGAEVRSLGKWYGDAMEVMLEHARMEETLIFPDIQRASFPGRLGFDLIYLCRIALCS

SEQ ID NO: 256036 - protein, 62 aa, Zea mays
  unsure (1)..(62): unsure at all Xaa locations
  Clone ID: MRT4577_165097C.1.pep
THAFDIKKHXKWDTVSTIEQQWRTKYFPSLCFLVFMEGVITRPFFLNTHMFLLLFFIPYTFH

SEQ ID NO: 256037 - protein, 72 aa, Zea mays
  unsure (1)..(72): unsure at all Xaa locations
  Clone ID: MRT4577_165098C.1.pep
DHPDKEGAIYTLHVIIMNHPGQIGNGYAPVLDCHTLHIAVKLAELVTKIDRLSFXELEKEPKIXKNCDAGMV

SEQ ID NO: 256038 - protein, 229 aa, Zea mays
  Clone ID: MRT4577_165099C.1.pep
MPPGRMDGARTHRDLGEVPITEYEKERALNVMRNNKMLSSLGITGLTSLILSSSTRKNSITREDFDPLYEPDHSEDNDHHVADQAMQDEPFYIERRNTNMSTGFGGTKGSRRVVAPNVEDQVGRVTRQKTKELSLVEKDIHGSTANTDEHTLISANFPAHHDDEIQMCDEGQIDVNNNNNNNNKAFLSQARWGRLEMKPRMKTSELNPRTEKGKQRQGEPKTRTEHIKR

SEQ ID NO: 256039 - protein, 335 aa, Zea mays
  Clone ID: MRT4577_16509C.1.pep
MEKAAHVAAGATQEQESSPNRLDDAARHHGSAEAIPERLAVVTGGNKGVGLEVCRQLALKGVTVILTARDEKRGKDAAETLRRECQLPNIIFHQLDVRDDDSATTLARYVERRYGKLDILVNNAAISGIVADEEGLKALNIDAETWTSGRAANLLKEVFQNTNDEAFNCLNTNYYGCKRVTEALLPLLKLSTSGGARIVNASSLASELKRLPNEKLRNDLSNIDIWDEDRIEAVLNTFLEDLRSGRLEEAGWPVMLPAYSVSKMVINLYTRIMARRYPEMRINCVRPGFVKTDINWNLGVLTPEQGARGPVMLALLPDDGPTGCYFDQTEMVNVW

SEQ ID NO: 256040 - protein, 79 aa, Zea mays
  Clone ID: MRT4577_1650C.1.pep
QVCLIIITFFFLVCLPTRGSNQIHLLLGDTGRGFKNLPQGWFFWLTVLGETQKNCPPFLVEIGGPCKHRLRSLSFQTRT

SEQ ID NO: 256041 - protein, 49 aa, Zea mays
  Clone ID: MRT4577_165100C.1.pep
APVLGTPIGAPLKDPSGRSLKILFKFMALESLVFAPFFPTQGGLLFKAL

SEQ ID NO: 256042 - protein, 50 aa, Zea mays
  Clone ID: MRT4577_165101C.1.pep
LMGKLLLACLKNSRDQPLPSMPSIPNEPSFLRASTKTPPTPSPSAPRLTA

SEQ ID NO: 256043 - protein, 63 aa, Zea mays
  Clone ID: MRT4577_165102C.1.pep
VIQVKVHYFSQTVSKRSSTNTRNKSVGRLFTSFRCPIHPPRFVNSSLFPNFALTLPPKKKNRT

SEQ ID NO: 256044 - protein, 108 aa, Zea mays
  unsure (1)..(108): unsure at all Xaa locations
  Clone ID: MRT4577_165103C.1.pep
YKHFRANPRTTNNYAIWXLRYQRRSGXTHIATERRDTSLNXGRGHQMNSEMRCWHRXRHAWIQIFRPRGAPKLCKRDNTKQXHNSEIKLRLLYRTVRPTTRNLNTTFK

SEQ ID NO: 256045 - protein, 57 aa, Zea mays
  unsure (1)..(57): unsure at all Xaa locations
  Clone ID: MRT4577_165104C.1.pep
IGGXVKRARLFFFWQEELFSKLFTGSPTYKIRGKQNQKGCTETTYYVGSGTPLALKS

SEQ ID NO: 256046 - protein, 68 aa, Zea mays
  Clone ID: MRT4577_165105C.1.pep
SMHNRVIADDSRRVVTLLIHRDEPVPGAWPHHADAAVRQARQSLSLLVILVHSEINYRLHLLVLGLNE

SEQ ID NO: 256047 - protein, 48 aa, Zea mays
  Clone ID: MRT4577_165106C.1.pep
FSGPLIGLMPMNHLNIVLSPSCVIRTSSSCSAGVVTGPELLAVYVALR

SEQ ID NO: 256048 - protein, 158 aa, Zea mays
  unsure (1)..(158): unsure at all Xaa locations
  Clone ID: MRT4577_165107C.1.pep
APGQHTTAWCCTAVSSRGDRETADGWMGEXVEVWRTADGGWRMGGPRMGGWADRGWADGRTADGRAVEWRSGGRAVEGWRSADGRMAASASGMPRHRVWCLVRPTGXGDRERAGESETRXAGIGVRLAASELRRGRVAACECVMLXRTCCWPPGTEAE

SEQ ID NO: 256049 - protein, 69 aa, Zea mays
  Clone ID: MRT4577_165109C.1.pep
VFSFFLKTAPIIIRCFKKNTNKTLISRGPPPKGRTRMGYKYSTQQKKKPAPLLSLSKKKKIARNTNTRK

SEQ ID NO: 256050 - protein, 198 aa, Zea mays
  unsure (1)..(198): unsure at all Xaa locations
  Clone ID: MRT4577_16510C.1.pep
AIVLRGIAQRRRLIRVGKPVTKEAGCHAPEGPILCINNCGFFGRALTMNMCSKCHKEMITKQDQAKLAASSIDSIVNGSXTPSWSRMVLAAXTVVAVAQVELQTMNVHQPADVAGPSXGGVGDLPRSEGXANRCXACRNRTGLTEFNCRCANLYCALHRYSDKHDCXFDYRTAARYAIAKANPVVKADQLDKIYGGFP

SEQ ID NO: 256051 - protein, 105 aa, Zea mays
  Clone ID: MRT4577_165110C.1.pep
MAPPVDVAGLHPRLGDVEAPPKPRSSLSSVAEVESEPLVRARRRPSAEARVESEPWGRAERSSPPSGAEPESEPWVGRSGVRRLLGLSPSPSPWSGGAEFAVFWG

SEQ ID NO: 256052 - protein, 34 aa, Zea mays
  Clone ID: MRT4577_165111C.1.pep
MKFNIANPSTGGQKKLKIDDDQKLRAFFDRRKSQ

SEQ ID NO: 256053 - protein, 188 aa, Zea mays
  unsure (1)..(188): unsure at all Xaa locations
  Clone ID: MRT4577_165112C.1.pep
LLSGTIIRGTLKAPKSRTRAQPRKTTNSAPPDPRARTRAQPRKTANSALPDPRAQTRAQPRKTANSAPPDPRARTRAQSQKTTNSAPPDPKARTRAQPRKTANSAPPDPRARTRAQPXKTTNSAPPDPRARTRAQPRKTTXLRSARPQGSDSGSAPKNDELRFARPQGLDSALASADGLRLARPGART

SEQ ID NO: 256054 - protein, 51 aa, Zea mays
  Clone ID: MRT4577_165113C.1.pep
MPFTPGPYSGVSTLALVARASVFGFGVVYGSIKLSILKATKPKKEEAHAHH

SEQ ID NO: 256055 - protein, 94 aa, Zea mays
  Clone ID: MRT4577_165114C.1.pep
GPSSPARTSARNAVRCHQYVTVAPTPEPSPAYVPAYVPVPPTPWPSPPYVPPTPRPPTPPYLPTTPPYVPPTPRPSPQPHVPPYVPPPRRPSPP

SEQ ID NO: 256056 - protein, 157 aa, Zea mays
  unsure (1)..(157): unsure at all Xaa locations
  Clone ID: MRT4577_165115C.1.pep
IATPTNRVAGAFNAKGESDRQSGLAKGATANSAPPDPRARTRAKTRKTANSAPPDPRARTRAKTRKTANSAPPDPRARSRAKTRKTANSAPPDPRARTRAKTRKTANSAPPDPRARTRAKTRKTANSAPPDPRARTRAKARKTXELRSARPQGSDSG

SEQ ID NO: 256057 - protein, 80 aa, Zea mays
  Clone ID: MRT4577_165116C.1.pep
MQQRRRKPSAGRTPNPRPTQIYLPRAAVAMPFTPGPYSGVSTLALVARASVFGFGVVYGSIKLSILKATKPKKEEAHAHH

SEQ ID NO: 256058 - protein, 80 aa, Zea mays
  Clone ID: MRT4577_165117C.1.pep
FSPPPLSSLGTRFLPPVLHGLPIYFLVPFIACAAFFFGPPLYCLRCNSLCSCLWLNLFYVRVFYLPLSCLFVCGKKYVAF

SEQ ID NO: 256059 - protein, 276 aa, Zea mays
  unsure (1)..(276): unsure at all Xaa locations
  Clone ID: MRT4577_165118C.1.pep
EATLTKSPHRPTESQEHLTQRWPDTFILTRAPRQSRSDRRHSAAPLTGLTEGQRRLRHSDCGATRQSESDRQSGLARGAIGNSAPPDPRARTRAKTRKTANSAPPDPRARTRAKTQKTANSAPPDPRARTRAKTRKTANSTPPDPRARTRAKTRKTANSAPPDPRARTRAKTRKTANSAPPDPRARARARPRKTTNSASPXPQGSDSALASAERLPPRPTQGLGLGLGNGRQIRPQLRRSPTSPGLGRRPATSAGSAITTLPRADSGHREQDQCPI

SEQ ID NO: 256060 - protein, 51 aa, Zea mays; identical to SEQ ID NO: 256054
  Clone ID: MRT4577_165119C.1.pep

SEQ ID NO: 256061 - protein, 129 aa, Zea mays
  unsure (1)..(129): unsure at all Xaa locations
  Clone ID: MRT4577_16511C.1.pep
FLPTPAPTRPSRAFAKEKGVIISTQDPTSLDGGAPKGPNFKAMEGRKLTLNDATXPARRNDITEMNRVSLHQVXYLVLAETARMLHMGYEPQXLQDCLNXIASERPTPNASATWPTEGSRDLPSEKLAN

SEQ ID NO: 256062 - protein, 64 aa, Zea mays
  Clone ID: MRT4577_165120C.1.pep
LVVVTRTFFPWLLEPVYTAFLSPLLLGSHEPSMRVVHYMAPLLVSLVPPPPYPCLLPLRARDKQ

SEQ ID NO: 256063 - protein, 50 aa, Zea mays
  Clone ID: MRT4577_165121C.1.pep
GSRAVCCRVEPALVIRPSHARTRVDDDPNLFYVFYKALLIRFMCCIVCLL

SEQ ID NO: 256064 - protein, 195 aa, Zea mays
  unsure (1)..(195): unsure at all Xaa locations
  Clone ID: MRT4577_165122C.1.pep
IATPTDRVAGAFNAKSESDRQSGLAKGATANSAPPDPRARTRAKTRKTANSAPPDPRARTRAKTRKTANSAPPDPRARTRAKTRKTANSAPPDPRARTRAKTRKTXNSASPDPRARTPPWPRXQTTSASPDPVARTRPRQQKTDSTGFGGAPTSPRLGHRPATSTGSVIIVLPRIDSGHGEQDRRPIRPAPPDGQ

SEQ ID NO: 256065 - protein, 51 aa, Zea mays
  Clone ID: MRT4577_165123C.1.pep
YFLYPMDRSRGSKTQCVSNVWPLLTCVLFLTVFYPVEDWNFPHVNKDPPGA

SEQ ID NO: 256066 - protein, 255 aa, Zea mays
  Clone ID: MRT4577_165124C.1.pep
HSATPPIVHLDPLLTTIKGRTRAFSEKVGRAGPRTGQALSWGRSLPSPAWTLVTPLLQAHLTWARDEHEGRGTYTSLTLDSGHLASPPFALAHALDPSGLGHAAHSLVGLGTPLSRNADSFGTPSNFRRETLTFEVVGFRGTYHTVLGRPCYTKFMAVPNYTYLKLKMRGPNGVITVGPTYKHAFECDVECVEYAEALAESEALIADLESLSKEVPDVKRHAGNFEPVETAKAVPLDPSGDVSKQIRIGSGLDPK

SEQ ID NO: 256067 - protein, 188 aa, Zea mays
  Clone ID: MRT4577_165125C.1.pep
MEPGGGTAVGAVESLLTSSCFCKGLRATVVTEYAGRHHCLSGGASQMGHRSCFLRPESARGRAMMAPPVDVAGLRPRLGDVEAPPKPRSSLSSVAEVESEPLGRARRRPSAEARAESEPWGRAKRSSLSSGAEPESEPWVGWSGVRHLLGLSPSPSPGSGGAEFVVFRDLARVRALGRAERSSPSSGT

SEQ ID NO: 256068 - protein, 63 aa, Zea mays
  Clone ID: MRT4577_165126C.1.pep
RHTRAIPQPTCAVSITPSSDMTIQTILNTDYSWRLAPNHAQDSSKDVLADKRATCTKETDEAE

SEQ ID NO: 256069 - protein, 221 aa, Zea mays
  unsure (1)..(221): unsure at all Xaa locations
  Clone ID: MRT4577_165127C.1.pep
MQPRKAGPLAKKCDKSLQASANTPFEARGLLSGTIIRGTLKTPNSQLSRGDRRHSTAPLASLTGGQRRLRHSDCSATRQSESDRQSGLAKGATANSAPPDPRARTRAKTRKTANSAPPDPRARTRAKTRKTANSAPPDPRARTRAKTRKTANSALPDPRARTRAKTRKTANSAPPDPRARTRAKTRKTANSAPPDPRARTRAKTRKTXELRSARPQGSDSG

SEQ ID NO: 256070 - protein, 161 aa, Zea mays
  Clone ID: MRT4577_165128C.1.pep
MAPPVDVVGLRPRLGNVEAPPRSRSSLSSVAMVESEPLGRARRRSSAEARAESEPWGRAKRSSSSSGAEPKYEPWVGRSGVRRLLGLSPSPSPGSGGAEFVVFRGLAQVRALGRAERSSSSFGAEPKSEPWVGRSGVRRLPGLSPNPSPGSGGAEFAVFRG

SEQ ID NO: 256071 - protein, 114 aa, Zea mays
  Clone ID: MRT4577_165129C.1.pep
LPIALAAEPSGLGGLSTVRRRVADAGWAQAEREQRRPCTEPIGIPGIAGAGRVAQRETNRVGNDGDGEAVPPHVLLARRRAASSVCSGQGRTLKGRDLRRVRDSVLRMTGFIES

SEQ ID NO: 256072 - protein, 71 aa, Zea mays
  Clone ID: MRT4577_16512C.1.pep
WLVAAVGGSYGVLYGVVTSSFLSPVCELRCDGSSDSGGVLEYMCYVSRPMWPMYNISTRGRINIEYTTANS

SEQ ID NO: 256073 - protein, 107 aa, Zea mays
  unsure (1)..(107): unsure at all Xaa locations
  Clone ID: MRT4577_165130C.1.pep
MVPPIDVVGPRPRLGDVEAPPRSRSSLSSVAEVESEPLGRARRRPSAEARAESEPWGRAKRSSPSSGAEPESEPWXVGRSGVRRLPGLSPSPSPGXSGGAEFVVFRG

SEQ ID NO: 256074 - protein, 71 aa, Zea mays
  Clone ID: MRT4577_165131C.1.pep
HAFAGTLTNTSLGFLSPCGPTKMWPDVAVDRGLFEGSRRLSRCGDTNLTDWLCDEANDSVVHVQDDYCCGL

SEQ ID NO: 256075 - protein, 81 aa, Zea mays
  Clone ID: MRT4577_165132C.1.pep
YIVLSLLRSTYLAVVVTTHLPSLLQPGFGYLQISLGQAGVINLQVLFFCVCVNQRACHVLLVPLFSFHYYKCAMFYINYCG

SEQ ID NO: 256076 - protein, 61 aa, Zea mays
  Clone ID: MRT4577_165133C.1.pep
YLAHPKKNALPRSVSPGLLVGTITILGWLVDSRRHHMELLERLSDLGCSNPKNHIARYSIT

SEQ ID NO: 256077 - protein, 291 aa, Zea mays
  unsure (1)..(291): unsure at all Xaa locations
  Clone ID: MRT4577_165134C.1.pep
MPSVEVEVQVGGAGGWRPKQQHHHPLEIRQVWADNVDREFKLIRAAIERFPYVSMDTEFPGVIHHPPPAVHHSXSPRXRYALLKSNVDALHLIQVGLALAPSPGSPPALAFQINLRGFDPRVHRHAPDSVRLLAASGLDLAAHRARGVPARAFAALLASSGLICNPAVAWVTFSSAYDFAYLVKLLMGRKLPRALPDFLRYVRVYFGAAVYDVKHMARVACASHGEVALLGGLERVAAALRVRRAAGQGHQAASDSVLTWDTFREMARIYFPKEGSLEPCAGVLYGLELPN

SEQ ID NO: 256078 - protein, 186 aa, Zea mays
  unsure (1)..(186): unsure at all Xaa locations
  Clone ID: MRT4577_165135C.1.pep
MQILDYWRPKVDASLATIYSSTEWGRIEASRRESSTPIGGRIGSFSSFGAPGIVDTPPPFDASGGSVLGRPLGPRFRADGPRFGHCSDTFLRDSGIGHXHPNSLXPVTGTWDAPSSPSFAFVPPGELGSHGLLIHHLGGLPKLSFPSFDGTSPKLWQKRCEDYFDMYSIDEVVWVEVVKKKKKNLR

SEQ ID NO: 256079 - protein, 126 aa, Zea mays
  Clone ID: MRT4577_165136C.1.pep
GAARSGERRNPPRGRGAQKKEPQEKIPPPQKKGEGEHPPERKEKLGGWMGPPQKGGRLKKDKKTVRPPPRFWGQGPPFQGGGPCPCPRGRPWFHPPPGPFGGRGGWKGPPTPLFWAQTPPPGGGGG

SEQ ID NO: 256080 - protein, 69 aa, Zea mays
  unsure (1)..(69): unsure at all Xaa locations
  Clone ID: MRT4577_165137C.1.pep
PNQXXXXXGXXQAXREPXXTXXAQXGXXEPKEGDPXXXTAKASXAPPPXXXAQTEXERGNXPXXKRXRA

SEQ ID NO: 256081 - protein, 170 aa, Zea mays
  unsure (1)..(170): unsure at all Xaa locations
  Clone ID: MRT4577_165138C.1.pep
FGTRKEHGIKPGIPEHDLDEKTLFHLNPFGRFGIGGPYGDAGXLTGRKNIIDTYRGWGAHGGGAFFGKDPTKGDRNGTYGAREAGKNIVARGLGCRAIVQVAXPIGVPEPLFGVVDTYRTGANPDKENLKNGKENFDFKPGMNIINLDLKKGGNGRFLKKGGYGQFGKDQ

SEQ ID NO: 256082 - protein, 85 aa, Zea mays
  Clone ID: MRT4577_165139C.1.pep
NVGVYTTSCDPEYVNTSDVKGKIVFCIPPDSLYPSATVTAVAQLVLANGGKGFIFPGYNRANIVRWEPVPSKMNPFILIDLGVAP

SEQ ID NO: 256083 - protein, 321 aa, Zea mays
  Clone ID: MRT4577_16513C.1.pep
MNRCFSWCWKPPWLHPGQSKFRDFLWWSFWYFQFVRSKYYGCRASQLLTPWTPPMTLCLVGDDLVVMLVIPSMLLLSRCYFSGVECVLAAADPLFSTFHAERELFWKPPWQHLVPNTRSEIQLLMEFVYLNTGVCRSLHMITKFSKQYFVGLFLLITREKFMSGRIMLALLPLLKLFTSGGARIVNASSLASELKRMPNEKLRNDLSNIDIWDEDRIEAVLDTFLEDLRSGRLEEAGWPVMLPAYSVSKMVINLYTRIMARRYPEMRINCVRPGFVKTDINWNLGVLTPEQGARGPVMLALLPDDGPTGCYFDQTEMVNVW

SEQ ID NO: 256084 - protein, 150 aa, Zea mays
  unsure (1)..(150): unsure at all Xaa locations
  Clone ID: MRT4577_165140C.1.pep
ARKLLYKAYNXLHTLASQLGGAAAGPAVAVLTHQTDWKSALCEALMAIQFNHLRRGTKTRCPFALHLRLNPRCDXLFPTALCNXNANQHDEAGVCGWPMSIDDLQVYIEAENLTLDNDPCQXFHRXEIITNVEYKHSPNLIIIDTLDLML

SEQ ID NO: 256085 - protein, 76 aa, Zea mays
  Clone ID: MRT4577_165141C.1.pep
TKWCHNIKIMRTKLSCLPVTGDEEALTLPFSTLLWQHLVMNNGFVQNKASATSDKAAFMGGAATNNDHTRKCCQLF

SEQ ID NO: 256086 - protein, 56 aa, Zea mays
  Clone ID: MRT4577_165142C.1.pep
HEQMAHAVWFGTLLLTLNGYNKVHRDGRLIRLTGRCISDWRRRSIRPYFWFTNLNL

SEQ ID NO: 256087 - protein, 51 aa, Zea mays
  Clone ID: MRT4577_165143C.1.pep
IIGNSKIHIYLSLDNGSFFSAMPFFHSYGLSGALLYRTRHVLRLGFYVYIT

SEQ ID NO: 256088 - protein, 61 aa, Zea mays
  Clone ID: MRT4577_165144C.1.pep
GMDATDDDSQLWRAPIVDALISNSCRHRSATIGTTRRRAELRSYNPESLRTDSATVPRPDR

SEQ ID NO: 256089 - protein, 92 aa, Zea mays
  Clone ID: MRT4577_165145C.1.pep
RTSRVTPPHKPTKTVPPSAATQLVTKVTHTLFSRPTSTQRRPRPRQHKDLPETFEESDSRVGLSHGQFYTLLPNQPLSIGLEPTASGTYPEL

SEQ ID NO: 256090 - protein, 371 aa, Zea mays
  Clone ID: MRT4577_165146C.1.pep
MISSQWSISQNIEMFGRGGPAPGVGFGWGTCGGGFWSLKCLLAQLDSQLVVELIKCFSSVQGSPIILDEGVKLDNVTNTVVTASNWISSTLGLSLIAGPGQIYMLEKVFDMIFEPSILKYLKSSIHKFTSNMELLKPFEWDLNEDEYMLFSSVLKSHFRSRWLAIKKKHSDKYAGDNSSTKISKTPEILETIQEETELSEAVNQPCNTLMVEWAHQRLPLPIHWILSAVCCIDDPKGTLSTSANYILDVSRAGLIFLLGLEAISATPCLHAPLIWKIHALSVSIRSSMHLLQEDRSRDIFCALQELYGLHLNRLCQKFCKPNSIEEVKGVVVGTSEEAMEISSLEILRFQEKIHGSYTTFVESLVDQFAAV

SEQ ID NO: 256091 - protein, 308 aa, Zea mays
  Clone ID: MRT4577_165147C.1.pep
MEGQRRLRHSDCGATRQSESDRQSGLAKGATVNSAPPDPRARTRAKTRKTANSAPPDPRARTRAKTRKTVNSAPPDPRARTRAKTRRTANSAPPDPRARTRAKTRKTANSAPPDPRARTRAKTRKTANSAPPNPRARTRAKTRKTTKLRLARPQGSDYALASAERPPPRPTQWFGLGLGNRRQTQPRLRRSPHVTLPRAQARHVNRKRHHRPTPNQLGSRRTRPASHPASSAGWAMMALHKLCDDGGPQLSYGSRATSARTRLLQQLSLRQAPSHLRQPRHHASKVPRPLRLPHWHVPRALALSPLDT

SEQ ID NO: 256092 - protein, 62 aa, Zea mays
  Clone ID: MRT4577_165148C.1.pep
NLMLLLACVLGSRKGNTWISSPRAGICKLTIFLKPEHNCIDEVTTYTSMGAKDNVYPIFSLV

SEQ ID NO: 256093 - protein, 312 aa, Zea mays
  Clone ID: MRT4577_165149C.1.pep
MGPRHLERFKCIFHFTQLTLKYLIHCFECPMRLIVQLPPHYSVHFSGESQSMKWTMRLRVVLCLAEALEYCTNRGRALYHDLNAYRALFDDDCNPRLSCFGLMKNSRDGKSYSTNLAFTPPEYMRTGRITPESVIHSFGTLLIDVLSGKHIPPSHALDLIRDRNFNMLLDSCLEGQFSNEEGAEMVRLASRCLHYEPRERPNVRSLVQVLTPLQRDVETPSYVLMGVPRGGASSIQPLHLSPLAEACSRKDLTAIHEILEKTGYKDDEGTANELSFQMWTNQMQDTLNSKKKGDNAFRQKDFTTAIDCYSQV

SEQ ID NO: 256094 - protein, 171 aa, Zea mays
  unsure (1)..(171): unsure at all Xaa locations
  Clone ID: MRT4577_16514C.1.pep
MEHKETGCQAPEGPILCINNCGFFGSAATMNMCSKCHKEMIMKQEQAKLAASSIDSIVNGNDAVMEPVVAGNTVVAAAPIELQTMNVQPADVAGPSXGGGGDLQREGXPNRCSTCRKRVGLTGFNCRCGNLYCALHRYSDKHDCKFDYRTAARDAIAKANPVVKADKLDKI

SEQ ID NO: 256095 - protein, 45 aa, Zea mays
  Clone ID: MRT4577_165150C.1.pep
KHTHFGWRSFLGTIFGILIPLLLICIRNCRDYVDQCTISLRVTFN

SEQ ID NO: 256096 - protein, 162 aa, Zea mays
  unsure (1)..(162): unsure at all Xaa locations
  Clone ID: MRT4577_165151C.1.pep
GAFPPSSLRKGDAGAGQRRLRRSDCCATRQSEADXQPSSASGAIGSSASPNPRARTRPRPRKTTNSASPDPRARTRPRPRKTTNSTSPDPRARTRPWPRKMTNSASPEPRARTRPWPPPTVSASADPGARTRPRPRRSLRLARPRARTDHVTGGAIITLPLA

SEQ ID NO: 256097 - protein, 268 aa, Zea mays
  unsure (1)..(268): unsure at all Xaa locations
  Clone ID: MRT4577_165152C.1.pep
MVEIMTMQHRTAADTQLIRGLALDHGARHPDMAKRVENAYILTLNVSLEYEKSEINSGFYYSSAEQREKLVESERRFVDEKLRKIVELKKEVCGNDPSKGFVIINQKGIDPLSLDVLVKNGIFALRRAKRRNMERLQLVCGGTAQNSVDDLTPDVLGWAGSVYEHQLGEEKYTFIEDVKEPKSVTLLIKGPNSHTIAQIKDAVRDGLRSVYNMIVDGSVVPGGGAFQVACAAHLESEQFKKTVKGKAKXGVSAFADALSIIPQTLAAN

SEQ ID NO: 256098 - protein, 164 aa, Zea mays
  unsure (1)..(164): unsure at all Xaa locations
  Clone ID: MRT4577_165153C.1.pep
HSTAPLASLTEGQCRLRHSDCSATRQSESDRQSGLAKGATTNSAPPDPRARTRAKTRKTANSAPPDPRARTRAKTRKTANSAPPDPRARTRAKTRKTANSAPPDPRARTRAKTRKTANSAPPDPRARTPPWPRXRTTSASPDPLARARPRQQKTDSTSASEEPP

SEQ ID NO: 256099 - protein, 1119 aa, Zea mays
  unsure (1)..(1119): unsure at all Xaa locations
  Clone ID: MRT4577_165154C.1.pep
MAHSPLLLAERRRRGVCKKSSLSLIVLSPCAEARGLLSQKPAPAKPLTASTYQPESLGPDRAPGLQPVRMRERPDQPKHYASLTEGQRRPRHSDCGATRQSESDRQSGLAEGATANSAPPDPRARTRAKTRKTANSAPPDPRARTRAKTRKTANSAPPDPRARTRAKTRKTANSAPPDPRARTRAKTRKTANSAPPDPRARTRAKTRKTANSAPPDPRARTRAKTRKTTKLRLARPQGSDSALASAERPPPRSTPWLGLGLGNRGQTQPQLRRSPHVTLPRAQARHVNRKRHHRPTPNRLGDVIEHSLNVDPSFRPRKQRLRKMSDDKAEGARNEVKRLLSAGVIRXDLNKACPKDEFXLPRIDSLVDAAASSELMSLLDCYLGYHQIWMKKEDEPKTSFITPSGTYCYLRMPEGLKNAGGSFNRMTTKEKLEGQIKKQAPIYFVSEVLSLSKKNYTELEKVLYAVLMASRKLRHYFQAFHIIIPSSQPLKDIMRNREATGRIGKWAAELNEFSIDYVHRYSIQSQALADFIADWTPGAQEEANKDAEAWTVFCDGSWGTFGAGAAAILVAPSKVRTCYAVKLDFSCTNNIAEYEALLLGLRKLKAMGIRRAVLKTDSQVISSHVDKSCRARDPKLEKYLDTVRRLEASFEGFSVKNIPRGENVHADLLSKSAAQGLPLPLEVFFETIRAPLVELLERAVLNISPVHSEDWRTEIISFLQGNCLLDDEAYNKRMEARAQPYVIIEGELYKHGVCSPLLKCLSRAEGIELMKEIHAGLCGSHIGSRPLLGKVFRQGFYWPKAASDAADLVQKCENCQKCARDQKQPSSLTQLIQPTWPLQRWGLDLLGPLPPAQGNLKYVVVAVEYFSKWIEAKPLATITSVTVQKFFWQNIVCRFGVPKAITVDNDTQFDAETFKEFCGQIGTKIHFASVRHPXSNGLVERANGIIMTGIMKLIFNQPRGKWPDQLIKVVWSHNTTTSRSTGFTPFKLLFGDEAITPEEAKTGSIRVVASAESGSEAAYSVEKDALEGIRLQAVENINKYQAETIKWRDRKVRLKNIEPGHLVLRRVANPDTVGKLQLKWEGPFLVVSSSRPGSYRLKDMDDNDIPRSWNADELRRYYV

SEQ ID NO: 256100 - protein, 124 aa, Zea mays
  Clone ID: MRT4577_165155C.1.pep
MAPPVDVAGLRPRLGDVEAPPRSRSSLSSVAEVESEPLGRARRRPSAEARAESEPWGRTEPCSSSSGAEPKSEPWVGRSGVRRLPGLSLSPSPGSGGAEFAVFRGLARVRALGRAERSSSSSRA

SEQ ID NO: 256101 - protein, 278 aa, Zea mays
  unsure (1)..(278): unsure at all Xaa locations
  Clone ID: MRT4577_165156C.1.pep
MQPRKAGPLAKKCDKSLQASANTPFEARGLLSGTIIRGTLKAPNSQLSRGDRRHSTAPLASLTEGQRRLRHSDCSATRQSESDRQSGLAKGATANSAPPDPRARTRAKTQKTANSAPPDPRARTWAKTRKTANSAPPDPRARTRAKTRKTANSAPPDPRARTRAKTRKTANSAPPDPRARTRAKTRKTXNSASPDPRARTPPWPRPNDFRLARPLGSGSATATEGRLNLGFGGNPTSPCLGHRPPRQQEAPSSSYPESTRVTENKTGVSSGQLRQRGN

SEQ ID NO: 256102 - protein, 177 aa, Zea mays
  unsure (1)..(177): unsure at all Xaa locations
  Clone ID: MRT4577_165157C.1.pep
MPEIFMCYIFTIGERRRVSQGQRRLRHSDCGATRQSESDRQPGLAKSATVNSAPPDPRARTRAKTRKTVNSAPPDPRARTRAKTRKTVNSAPPDPRARTRAKTRKTANSAPPDPRARTRAKTLKTANSAPPDPRARTRAKTRKTANSAPPDPRARTRAKTRKTXELRSARPQGSDSG

SEQ ID NO: 256103 - protein, 192 aa, Zea mays
  unsure (1)..(192): unsure at all Xaa locations
  Clone ID: MRT4577_165158C.1.pep
RTPSSRQSRSDRSHFAAPLTGLTRGQRRLRRSDCCATRQSEADXQPGPASGAIGNSASPDPRARTRAQPQKTTNSAPPDPRARTRAQPRKTTNSAPPDPRARTRAQPWKTTNSAPPDPRAQTRAQPRKTTNSASPDPRARTQPWPQPAVSASPDPGAQTRPRPRKTDSTSTSEEPPHRPTQGTDRPRQQEAP

SEQ ID NO: 256104 - protein, 28 aa, Zea mays
  Clone ID: MRT4577_165159C.1.pep
RGLLVGYTAEAHSGTHRLTVFASQTSYH

SEQ ID NO: 256105 - protein, 150 aa, Zea mays
  unsure (1)..(150): unsure at all Xaa locations
  Clone ID: MRT4577_16515C.1.pep
GPMLCINNXGFFVSAATMNMCSKCHKEMITKQDQGKLAASSIDSIVNGSDAVMEPVVAGSNTVSSXDQVELQTMNVQQPADVDGPXGGGDXSKGGKVGSNRCSACXREVVLTGFNCPRENLDCXVHCYSDKHDCKFYYRTADRDLLANIN

SEQ ID NO: 256106 - protein, 159 aa, Zea mays
  unsure (1)..(159): unsure at all Xaa locations
  Clone ID: MRT4577_165160C.1.pep
MEGQRRLRHSDCSATRQSESDRQSGLAKGAIGSSAPPDPRARTRAKTRKTANSALPDPRARTRAKTRKTANSAPPDPRARTRAKTRKTANTAPPDPRARTRAKTRKTANSALPDPRARIRAKTRKTANTAPPDPRARTRAKTRKTXELRSARPQGSDSG

SEQ ID NO: 256107 - protein, 45 aa, Zea mays
  Clone ID: MRT4577_165161C.1.pep
IAAVLNIRSHNLDPRTRKNVTLYILKTPHQNCRGRKKPNVWVNAW

SEQ ID NO: 256108 - protein, 195 aa, Zea mays
  unsure (1)..(195): unsure at all Xaa locations
  Clone ID: MRT4577_165162C.1.pep
MVGYSDSGKXAGRLGGAWQLYRAQEEMAQVAKRYGVKLTLFHGRGGTVGRGGGPTHLAILSQARGTINGSIRVTVQGEVIEFCFGEEHLCFQTLQRFTGATLEYGITTLRAIPWIFSWTQTRFHLPVWLGVGAAFKFAIDKDVRNFQVLKEMYNEWPFFRVTLDLLEMVFAKGDPGIAGLYDELLVAGELSPFGS

SEQ ID NO: 256109 - protein, 206 aa, Zea mays
  Clone ID: MRT4577_165163C.1.pep
TEYGRMNFGSRPAKRRPGGGITTLRAIPWIFSWTQTRFHLPVWLGVGAAFKFAIDKDVRNFQVLKEMYNEWPFFRVTLDLLEMVFAKGDPGIAGLYDELLVAEELKPFGKQLRDKYVETQQLLLQIAGHKDILEGDPFLKQGLVLRNPYITTLNVFQAYTLSKEFADENKPAGLVKLNPASEYPPGLEDTLILTMKGIAAGMQNTG

SEQ ID NO: 256110 - protein, 115 aa, Zea mays
  Clone ID: MRT4577_165164C.1.pep
ASSSQHQYFDKLKKILRANRADVATNFAAFSRMPARRKACNCRRINTASVQTARLLALSSQRKIQQRSPRTIEEKRNSTGTGMEKQSKSQRTVNRGRRPKTRRRNAYPGRPAGPN

SEQ ID NO: 256111 - protein, 198 aa, Zea mays
  unsure (1)..(198): unsure at all Xaa locations
  Clone ID: MRT4577_165165C.1.pep
LISQPIGWTCLKKKKKKKKKKKKKKKKKKKKKKKKKKKKKKKKKKKKKKKKKKKKKKKKKKRPPGGGGAKKKGAPPRGGKKKKFXKPAPPRGGRAPNPPPKKGKKKGPGGGRLKKRGGEKKGGTKKKKVGKKTPSLRGGKKKKRRPERPSQKKGPPDGGRKKKSVKIFLKTPQNFFKKTPFFFKKGGMEQKPSGGGGG

SEQ ID NO: 256112 - protein, 163 aa, Zea mays
  Clone ID: MRT4577_165166C.1.pep
NFQKLKEMYNEWPFFRVTLDLLEMVFAKGDPGIAGLYDELLVSEELKPFGKQLRDKYVETQQLLLQIAGHKDILEGDPYLKQGLRLRNPYITTLNVFQAYTLKRIRDPSFKVTPQPPLSKEFADENKPAGLVKLNPASEYPPGLEDTLILTMKGIAAGMQNTG

SEQ ID NO: 256113 - protein, 99 aa, Zea mays
  Clone ID: MRT4577_165167C.1.pep
HHPLPEGSRARHLLVQMRKTTAVTAAPLVMHQITLGTTVDNGGPRTRLTLGEPNSSTQTHFCFTRSLKLGNSSRARYMQLLADEGRAGAAIFACADMFQ

SEQ ID NO: 256114 - protein, 972 aa, Zea mays
  unsure (1)..(972): unsure at all Xaa locations
  Clone ID: MRT4577_165168C.1.pep
MASTKAPGPGEKHHSIDAQLRQLVPGKVSEDDKLIEYDALLVDRFLNILQDLHGPSLREFVQECYEVSADYEGKGDTTKLGELGAKLTGLAPADAILVASSILHMLNLANLAEEVQIAHRRRNSKLKKGGFADEGSATTESDIEETLKRLVSEVGKSPEEVFEALKNQTVDLVFTAHPTQSARRSLLQKNARIRNCLTQLNAKDITDDDKQELDEALQREIQAAFRTDEIRRAQPTPQDEMRYGMSYIHETVWKGVPKFLRRVDTALKNIGINERLPYNVSLIRFSSWMGGDRDGNPRVTPEVTRDVCLLARMMAANLYIDQIEELMFELSMWRCNDELRVRAEELHSSSGSKVTKYYIEFWKQIPPNEPYRVILGHVRDKLYNTRERARHLLASGVSEISAESSFTSIEEFLEPLELCYKSLCDCGDKAIADGSLLDLLRQVFTFGLSLVKLDIRQESERHTDVIDAITTHLGIGSYREWPEDKRQEWLLSELRGKRPLLPPDLPQTDEIADVIGAFHVLAELPPDSFGPYIISMATAPSDVLAVELLQRECGVRXQPLPVVPLFERLADLQSAPXASVERLFSVDWYMDRIKGKQQVMVGYSDSGKDAGRLSAAWQLYRAQEEMAQVAKRYGVKLTLFHGRGGTVGRGGGPTHLAILSQPPDTINGSIRVTVQGEVIEFCFGEEHLCFQTLQRFTAATLEHGMHPPVSPKPEWRKLMDEMAVVATEEYRSVVVKEPRFVEYFRSATPETEYGRMNIGSRPAKRRPGGGITTLRAIPWIFSWTQTRFHLPVWLGVGAAFKFAIDKDVRNFQVLKEMYNEWPFFRVTLDLLEMVFAKGDPGIAGLYDELLVAEELKPFGKQLRDKYVETQQLLLQIAGHKDILEGDPFLKQGLVLRNPYITTLNVFQAYTLKRIRDPNFKVTPQPPLSKEFADENKPAGLVKLNPASEYPPGLEDTLILTMKGIAAGMQNTG

SEQ ID NO: 256115 - protein, 63 aa, Zea mays
  Clone ID: MRT4577_165169C.1.pep
TYNILFFCLASNQIQSLKLHTFLTNITFKFSSSIAYMFSCQHYITLLQRQQISVSCSSQDDHL

SEQ ID NO: 256116 - protein, 205 aa, Zea mays
  unsure (1)..(205): unsure at all Xaa locations
  Clone ID: MRT4577_16516C.1.pep
ESSPLRSSYAATRRPDRNRREWPNSTDGSQPSEHKEGGCQGPEGPILCINNCGFFGSAATMNMCSKCHKEMITKQDQAKLAASSIDSIENGSDAVMEPADAGSNTVVAVAQVELQTMNVQQPADVAGPSEGGWRRSPKGXVGPNRCSACRKRVGLTGFNCRCGNLYCALHRYSDKHDCKFDYRTAARDAIAKANPVVKADKLDKI

SEQ ID NO: 256117 - protein, 63 aa, Zea mays
  Clone ID: MRT4577_165170C.1.pep
LPNKSRIKSAYIGPGSGILHVHITLAFETVRSRTPVAFGGYQPLMQALLIHQRRSTVASPVLF

SEQ ID NO: 256118 - protein, 90 aa, Zea mays
  Clone ID: MRT4577_165171C.1.pep
MAGPTVAAHIKDNSVPSMAAQIFWFPMLPGPSARVGSATIFPQCSQTPIVFLFSPYLSPAGCSMCVNPIVLPLKLQQAIAASNIPLSPLL

SEQ ID NO: 256119 - protein, 64 aa, Zea mays
  Clone ID: MRT4577_165172C.1.pep
PKFLTYIGIIIFQPTYYLFSITLSIIFYYCILFPLYLIHFNTPTHPSQQPFNNKYTTLYFPAVP

SEQ ID NO: 256120 - protein, 126 aa, Zea mays
  unsure (1)..(126): unsure at all Xaa locations
  Clone ID: MRT4577_165173C.1.pep
PTRTRTRGRTRGSIGQVGAGGCKHXFFTYYGDDIGRKKKTLAEKKDNAEGQEVEATFDETKKSIHVMRKLEKRKVGRTLDPHIEEXFGSGRLVXCIFSRPGQCGRTDWYILEGKEVEFXMKKLQRK

SEQ ID NO: 256121 - protein, 65 aa, Zea mays
  Clone ID: MRT4577_165174C.1.pep
KCVLKKYELDDLNIIVRDLVYLFHHNLLGNNCLDLETDVKYLDLIINFLVLNMDLRGLIQVDVSG

SEQ ID NO: 256122 - protein, 151 aa, Zea mays
  Clone ID: MRT4577_165175C.1.pep
GRVGGRVGGTFICRTAHVSQEILALPTPTDYLNKVLPHDDVKVPIGPAGLFRLPIDSFPRDEMATRDGYGSWFSLTSVSPPYVSPSYHADHIMPALSLSQYGSGLSLNPYYDPHNSMLLSMPTAGGRSVPVSDFRIGDGSFLREVPRPGNY

SEQ ID NO: 256123 - protein, 49 aa, Zea mays
  Clone ID: MRT4577_165176C.1.pep
LRMIYIACAFFYNFFFGPFGLYIFISRYGSNTNIKNGSFFFKKKKEYTK

SEQ ID NO: 256124 - protein, 40 aa, Zea mays
  Clone ID: MRT4577_165177C.1.pep
MQHKYLLIWAALFKRSQLVVPFACTPLCFPWGASSLLQLA

SEQ ID NO: 256125 - protein, 78 aa, Zea mays
  Clone ID: MRT4577_165178C.1.pep
MLALLLLWHFAADKHLNYSVFNQVFELQVNNGIPIESWYSNPLDEALPQLIPFLETLAVADDVRPIIAKKFGNIIDNR

SEQ ID NO: 256126 - protein, 324 aa, Zea mays
  Clone ID: MRT4577_165179C.1.pep
ATAPPQGSARTTGPRCSGARAYSPLRTTVALALWLGAIHFNAFLVLASLFLFPRRVAALVLATQLFFMFLPLSDKSRLGRKIARFISKYVIGYFPVTLHVEDYGAFDPNRAYVFGYEPHSVLPIAVGILGDLVGFMPLPKMKILASSAVFYTPFLRQIWTWLGLAPASRKSFYSYLGAGYSCIIVPGGVQEILHMDHDSEVAFLKPRKGFVKIAIEMGCPVVPVFAFGQSYVYKWWRPGGKLIVKIARAIKFSPIIFWGKLGTPIPFATPMHVIVGRPIEVVKNPQPTIDEINQVHGQFVVAMQDLFEKYKSRTGYPDLQLRVL

SEQ ID NO: 256127 - protein, 211 aa, Zea mays
  Clone ID: MRT4577_16517C.1.pep
MIVFLLLVATFGKLVTHYVDYYSGIDQLFRIILVKEAMEHKEAGCQAPEGPILCINNCGFFGSAATMNMCSKCHKEMITKQDQAKLAASSIDSIVNGSDAVMEPVVAGSNTVVAVAQVELQTMNVQQPADVAGPSEGVAAISKGGKVGPNRCSACRKRVGLTGFNCRCGNLYCALHRYSDKHDCKFDYRTAARDAIAKANPVVKADKLDKI

SEQ ID NO: 256128 - protein, 59 aa, Zea mays
  Clone ID: MRT4577_165180C.1.pep
LKPTSKPKINSMVGNRVIKTRRQAYIYVPTGLMIQLKRHTLELGIQLVLIIHNRFMEIT

SEQ ID NO: 256129 - protein, 63 aa, Zea mays
  Clone ID: MRT4577_165181C.1.pep
PPPRPLPMLRRLGRPGACTAPGQGRCYVSAPTSSLVKGCSGVPDWKPRLIPNRITSLIYKDFE

SEQ ID NO: 256130 - protein, 65 aa, Zea mays
  Clone ID: MRT4577_165182C.1.pep
MAMPRAESLRLLGLLKQPESDAGAPFELDERDVVCPACGGQQDGCAAPPTPRCHAHAVPLYILGL

SEQ ID NO: 256131 - protein, 71 aa, Zea mays
  Clone ID: MRT4577_165183C.1.pep
AYYIYRKIDNMYACDVCGGEARAASLVLPAAAGREMCPGEEAGEVVSMATTEGRESLAAGEEGDEEGLFET

SEQ ID NO: 256132 - protein, 189 aa, Zea mays
  Clone ID: MRT4577_165184C.1.pep
MMLGKRSGRPSPASRQHMRRTTSMTEFAAPHVLVDVAEEEEDEELQLLPAHAEAAGEAAEQEDPYGWAIGGAAAAGRADWLAAYRARAAPALAGLRRNSADFSAAETAAFLRACGLCNRRLGPGRDTFMYRGDTAFCSLECRQQHITIEEWKEKCALATPPTAPASDPVVPLPPSGAGSDKPGTLAAAS

SEQ ID NO: 256133 - protein, 91 aa, Zea mays
  unsure (1)..(91): unsure at all Xaa locations
  Clone ID: MRT4577_165185C.1.pep
ITFTIVTLAWHLVPVATAKAAEHWAFSLLTMYLLRAAGILLPLYLVMRMIGVVQSGQRQYRLQLLEEQRRNASXMNYMRVQEEDQLVINIH

SEQ ID NO: 256134 - protein, 71 aa, Zea mays
  unsure (1)..(71): unsure at all Xaa locations
  Clone ID: MRT4577_165186C.1.pep
NXFXQXHNIFIGKVFFKKKAPHKKKPNINLLILQHHQTNSFPTSQTLPIHDKQLSTTTNHNPTSLNPLHLL

SEQ ID NO: 256135 - protein, 63 aa, Zea mays
  Clone ID: MRT4577_165187C.1.pep
GRKRLAYQIRADIHTVIMNLEMIRCKHIGIPYYYAPYLKYYGSLITYLLFLNIKAHLLLPPLL

SEQ ID NO: 256136 - protein, 1145 aa, Zea mays
  Clone ID: MRT4577_165188C.1.pep
MAPLARPDCLSDSLCRVALQSEWRRRRCPSVRPEASNDTTTSMEEDDLLGEDLVDYEASPERPVHESLITDNSALKAGWSGLSQNSSDFKTEHLPQRKDSITDDPVPETGKSAITQRSSDSSVGDMIEEFRDLDKLGQGFTLADPLEEIDIGDGKTPRPTFVNKTLETDSRNEMIGLLKEYSDCFAWNYTEMPGLSREIIEHRLPIKSGFRPFKQKARTFRPDLLPRIKDEIHRLLEANFIRPCRYAEWVSNIVPVEKKESGNRIISFLDGNAGYNQIFMAEEDTSKTAFICPGFIGLFEWVVMTFGLKNAGATYQRAMNLIFHELLGNTVEVYIDDIVVKSAEFSPHIADLRKAFDKMRRYGLKMNPRKCAFGVSAAGKIDAFTPILRLKNDAEFTWGAEQRQAFDLIKKYLSSAPVLKAPQVGAPFRLYIAAEDKVIGAVLTQETEGREHVVTYLSRRLVDAETRCYLLSSHCTVSGQADVIKYMLHSPIMSGRIGKWAYALIEYDLAYEPLKSMKGQVVADFIVEHRVNDIHELDISYLTITPWTLYFDGSVCNEGQGIGIVLVSPGNVSFDFSSRLKTYCTNNQAEYEALLFGLELLNGMGVRHVMVFGDSQLVVQQVLEEYQCFDGTLNSYLEKCWSIIHSFDEFSIRHISRVENHRANDLAQDASGYRIKRGKFHKAENLITSAKPNSQVVDRPRDDAGPSGVTRDVLFINSADNEADASDWRTPILNYLRNPNIRTDKNIRRTTFKYVLMSDELYRRTVNDILLKCLGPDDAILAMAEVHEGICGTHQSAPKMKWLLRRSGFDWPSMIADCFKYYKGCQVCQKFGDLQLVPAAELHPIIKPWPFRGWGLDFIGEIHPSSSKGHRFVLVATDYFTKCTEAVALKNMTHKEVIEFITEHIIHRFGIPQTLTTDQGTSFMSKEVREFAELYRIKLLNSSPYYAQANGQAESSNRTLINLIKKKISDNPKHWHKILSEALWAHRISKHRATKVSPFELVYGQEAVLPVKISLNAIRFARQNDLTATDYYDSMMDNIDEVTDKRMIALGAIEKDKIMVARAYNKKVKAKSFQVGDLVWKTILPLRNKDRKFGKWSPSWEGPYKVKQVMSGNAYLLQTLQGKDLPKALNGRFLKQYHPSMWQDA

SEQ ID NO: 256137 - protein, 135 aa, Zea mays
  unsure (1)..(135): unsure at all Xaa locations
  Clone ID: MRT4577_165189C.1.pep
GEAEAPPRSRSNLSSEVEVESEPLGRARRRPSAEAEAESEPWGRARRSSSSSGAEPESEPWVGRXGVRRLPGPSPSPRPGSGEAEFPMAPEAGLGCCQPHFVEWHSSRSGAGGAVLLSGRSVERRSDCGHFGSVD

SEQ ID NO: 256138 - protein, 327 aa, Zea mays
  Clone ID: MRT4577_16518C.1.pep
GKCGKMDCMLKTLPDPAHRPTQCWNTLISGYARYGYFKEAEDTFKHMVSVGQKPDYVTFVALLSACSHAGLIDKGMDYYNSMAPTFGVSPGIKHCVCIVDLLGRLGKFAEAEKFIDEMPVLPNDLIWRSLLSSSRTHKNLDIGRKAAKNLLELDPFDDSAYVLLSNLYATNARWVDVDKLRSHMKTIKLNKRPACSWLKLKNEVSTFGIGDRSHMHAEKIYVKLDEILLKLREVGYVADTSSALHDTDEEQKEHNLWNHSEKLALAYGLLVVPEGSTIRIFKNLRVCADCHLVFKLVSMVFHREIVLRDPYRFHQFKHGSCSCSDFW

SEQ ID NO: 256139 - protein, 114 aa, Zea mays
  unsure (1)..(114): unsure at all Xaa locations
  Clone ID: MRT4577_165190C.1.pep
MTQAATTSSTPHAXTSPPPXDNTDYGGLEDEDRIDTNRYGEDDPLLKGXMKRGDWYTTXDPEINXAYWTVSETKKSSVIRRAGASMGLXIKWDWMPXIDXGRPSYTGVNADKSR

SEQ ID NO: 256140 - protein, 218 aa, Zea mays
  unsure (1)..(218): unsure at all Xaa locations
  Clone ID: MRT4577_165191C.1.pep
SEVRRLAPRRVRQLPQIAWALHPLLVRGSKVGPPKGSTAASGYSGSAPITDQGFEGWPPKEGQRRLRHSDCSATRQSESDRQLGLAKGATANSAPPDPRARTRAKTRKTANSAPPDPRARTRAKTRKTANSAPPDPRARTRAKTRKTANSAPPDPRARTRAKTRKTANSAPPDPRARTRAKTRKTANSAPPDPRARTRAKTRKTXELRSARPQGSDSG

SEQ ID NO: 256141 - protein, 635 aa, Zea mays
  unsure (1)..(635): unsure at all Xaa locations
  Clone ID: MRT4577_165192C.1.pep
MVPIRPLQLYADGGYQLRIRSLEGTPNYGPRQILYDIVARSLLAAKEASHKISRGISIRRLREIEKQLSDRILEMCLQHSRARLSPDEQLAAEKSFALYCKPVELYNIIQRRAIKNHSPIYRFSRACLLTNFSEFGNKDKTEATFIIPDVKNLSTSRACNLNIIFISRGQVGQIIGEDSCSGNDVEGSSLQKLEGKCSWGKMPTNLLAPSLEKCVTLSTGNAVDLTSTVTMNPSFLEPKFLEQDSCLTFCSHKVDATGSYQLQVCISAEEAGARELLLSPYYCNYSYNNVPPSLLPEIIRLRAGNVLFNYKYYNNTMQKTEVTEDFSCPFCLVPCGSFKISEECQAVNVSLKADAWKTEFVAEGVDPRHQTFSYCSRFKKRRRXKPQLRNSGMXPHIMESGSHEDAQAGSEDDYVQRENGLSVANTSVDPSQPVHGSNLSPPTVLQFGKSRKLSAERSDPRNRQLLQKRQFFHSHRAQPMPLEQVLSDHDSEDEVDDDIADFEDRRMLDDFVDVTKDEKLIMHMWNSFVRKQRVLADGHIPWACEAFSRCHGQQLVQNPALLWGWRFFMIKLWNHSLLDARAMNACNTILQGYQDGSADPKCSPLFWPSSVSSPVVRAERLPEPDLEPCHGKRKK

SEQ ID NO: 256142 - protein, 131 aa, Zea mays
  Clone ID: MRT4577_165193C.1.pep
HASDLLIETRKQEADESLEEETGRMTSVVRRWLGRGAANADCMRLSAGGELAASVIGELATPAGVDGGAPVTAQQGSPCGSAARDHQRLGREAAGMWRRLRDGRFVASLVIANRFAQPRPHIYVLYVGVLC

SEQ ID NO: 256143 - protein, 275 aa, Zea mays
  unsure (1)..(275): unsure at all Xaa locations
  Clone ID: MRT4577_165194C.1.pep
MAGPCAGKQRRPQGPEAGMRWRYSQGGRASGALDVGTLKTPNSQLVTPISIKLQRPDGLTEGQRRLRHSDCGATRQSESDRQSGLAKGATANSAPPDPRARTRAKTRKTANSAPPDPRARTQAKTRKTANSAPPDPRARTRAKTRKTANSAPPDPRARTRAKTRKTANSAPPDPRARTRAKTRKTXNSASPDPRARTPPWPRPNDLRLARPHGSDSASATEDRLNLGFGGAPTSPRLGHRPDTSTGSVIIVLPRIDSGHGEQDRRPIRPAPPDGQ

SEQ ID NO: 256144 - protein, 85 aa, Zea mays
  Clone ID: MRT4577_165195C.1.pep
NRAWEGAHFSLNTKLGKSMPRKVKTHVGPIFKKLGGTIFNTPTPGRGALKKKNGTLTQKGRTGTKKNVKVRKGVKYPPPLHRTRK

SEQ ID NO: 256145 - protein, 126 aa, Zea mays
  Clone ID: MRT4577_165196C.1.pep
MSHVMLVMMRKTRLGDVEAPPRSRSSLSSVAEVESEPLGRARRRPSAEARAESEPWGRAKRSSSSSGAKPESEPWVGRSGVRRLQGLSPSPSPGSGGAEFAVFKGLARVRSLGRAERSSPSSGAEP

SEQ ID NO: 256146 - protein, 151 aa, Zea mays
  Clone ID: MRT4577_165197C.1.pep
SLLLFFRGAKKSNAISSKDPAAYKLKLSKSRLTTTQCIFVLAKKHRGVRTRIRLAQTALTRTGRSRSNLIQVLAERAALDGKKGGKHEGLHLPEARGGYLRTGRTCPRWEPQSCDLITAVCGHSASLGTEGPRENTGTRLTSTSWHCTMHR

SEQ ID NO: 256147 - protein, 129 aa, Zea mays
  unsure (1)..(129): unsure at all Xaa locations
  Clone ID: MRT4577_165198C.1.pep
GSWWTRPRLXVEDQEACQPGMPQNCNGRKANNXRMTKXKPPEAVKVTTWXLARLNAEAISXATVEAKKRSKXVLQPITRRRKLIKPAMRTHKSMVFLLVPEQASDPKPWTFASGTDGNLSDMMMATPRA

SEQ ID NO: 256148 - protein, 181 aa, Zea mays
  unsure (1)..(181): unsure at all Xaa locations
  Clone ID: MRT4577_165199C.1.pep
MAVAGGRAQQSRRRPGSRLILGQREGLLPRREDGAFNAKGESDRQSGLAKGATANSAPPDPRARTRAKTRKTANSAPPDPRAWTRAKTRKTANSAPPDPRARSRAKTRKTANSAPPDPRARTRAKTRKTANSAPPDPRARTRAKTRKTANSAPPDPRARTRAKTRKTXELRSARPQDSDSG

SEQ ID NO: 256149 - protein, 190 aa, Zea mays
  unsure (1)..(190): unsure at all Xaa locations
  Clone ID: MRT4577_16519C.1.pep
MEHKEAGCQAPEGPILCINNCGFFGSAATMNMCSKCHKEMITKQDQAKLAASSIDSIVNGSDAVMEPVVAGSNTVVAVAQVELQTMNVQXPVDVAGPSEGVAAISKGGKVGPNRCSACRKRVGLTGFTCRCGELXWAVHRYSDKDDWKVDYRTGGRDAIGKGNPVVKGDKLHKNYGGGPHGWWQEDCKPR

SEQ ID NO: 256150 - protein, 67 aa, Zea mays
  Clone ID: MRT4577_1651C.1.pep
LFFQQFGGASASLFQLRQLLPFVQLASPTQQLASTYTSLVGPSFVWLFSGNSIIKFFVCCMWPPCHN

SEQ ID NO: 256151 - protein, 185 aa, Zea mays
  Clone ID: MRT4577_165200C.1.pep
MWPELAAREWHAGAAADWELGRGAVDTGAVADAGAERRSAGEQWRTEAGHRSRTPESGRGAVEKWSGTPDGSSGRRTQERRASSSRRRSDGERLALGLPGRRSEWRLWTQVSGSLGGLGRQLFPIGLTAGGKEEVVGTYIRADELAMVIISAEEVNALVVDAVPGDNGAIDLDGEVEIRGCNLDR

SEQ ID NO: 256152 - protein, 221 aa, Zea mays
  unsure (1)..(221): unsure at all Xaa locations
  Clone ID: MRT4577_165201C.1.pep
MQPRKAGPLAKKCDKSLQASANTPFEARGLLSGTIIRGTLKTPNSQLSRGDRRHSTAPLASLTEGQRRLRHSDCSATRQSKSDRQSGLAKGATANSAPPDPRARTRAKTRKTANSAPPDPRARTRAKTRKTANSAPPDPRARTRAKTRKTANSAPPDPRARTRAKTRKTANSAPPDPRARTRAKTRKTANSAPPDPRARTRAKTRKTXELRSALPXGSDSG

SEQ ID NO: 256153 - protein, 162 aa, Zea mays
  unsure (1)..(162): unsure at all Xaa locations
  Clone ID: MRT4577_165202C.1.pep
SSLTEGQRRLRHSDCGATRQSESDRQPGLAKGATVNSAPPDPRARTRAKTRKTANSAPPDPRARTRAKTRKTANSAPPDPRARTRAKTRKTANSAPPDPRARTRAKTRKTANSAPPDPRARTRAKTRKTVNSAPPDPRARTRAKTRKTXELRSARPQGLDSG

SEQ ID NO: 256154 - protein, 394 aa, Zea mays
  Clone ID: MRT4577_165203C.1.pep
MTGEKKMFTSYVKNKDSQDSIIFGDGNQGKDKSETQGTLKRFLRRAQNEFELKVKKIRSDNGSEFKNLQVEEFLEEEGIKHEFSAPYTPQQNGVVERKNRTLIDMARTMLGEFKTPECFWSEAVNTACHAINRVYLHRLLRKTSYELLTEGQRRLRHSDCGATRQSESDRQSGLARGAIANSAPPDPRARTRAKTRKTANSAPPDPRARTRAKTRKTANSAPPDPRARTRAKTRKTANSAPPDPRARTRAKTRKTANSAPPDPGARTRAKTRKTVNSAPPDPRARTRAKTRKTANSAPPDPRARTRARPRKTTNSASPDPRARTPPWPLPNDFRLARPRGSDSASATEDRYDPSFGGAPTSPGLGRGPATSTGSAITTPPRTDSGRREQDRCPI

SEQ ID NO: 256155 - protein, 68 aa, Zea mays
  Clone ID: MRT4577_165204C.1.pep
THSTTVAQRRNNLNDRETYRLSNNIAVQPHRDDAAQWTTSLTDSLVMSQPPALHNPRSNRSPRTPTQH

SEQ ID NO: 256156 - protein, 37 aa, Zea mays
  Clone ID: MRT4577_165205C.1.pep
KKKKKKKKKKKKKKKKKKKKKKKKKIKNKKKIKKFIF

SEQ ID NO: 256157 - protein, 117 aa, Zea mays
  unsure (1)..(117): unsure at all Xaa locations
  Clone ID: MRT4577_165206C.1.pep
SRERSALAVTCPSAPRRRRRRCRRRSRRSXAKKFLGIDVKTLXKIVPLGLMFFCILFNYTILRDTXDVLXVVTAKGSSAEIIPFLXTXVNLPMAIGFMLLYPSFXNVLSREALXYTV

SEQ ID NO: 256158 - protein, 67 aa, Zea mays
  Clone ID: MRT4577_165207C.1.pep
GSRSRSRSWCGPCGSRLSYHASMDLSHPVDTVSSPWRWVRARTPWAGAHSLRAHRSARMPRLNTTHY

SEQ ID NO: 256159 - protein, 78 aa, Zea mays
  Clone ID: MRT4577_165208C.1.pep
RGGGQQIIYDGSIMDDQRLTMPQPQNFYFPHGITGFPLPKKNLQFSHLQKNLVLFCLQDRAFCPYPLFFKPKKISSNR

SEQ ID NO: 256160 - protein, 115 aa, Zea mays
  Clone ID: MRT4577_165209C.1.pep
DGRTPRDAHQWAGAVPRGSQGRLSQGPADSEEQGDVGAGTHGQQRQEWKRWFFQEDSRAPHKTRSVPRKDRPGCPPKASWGLMSSGNQSTACQPSNGDPPCPRTKLQFSVQPPDT

SEQ ID NO: 256161 - protein, 59 aa, Zea mays
  unsure (1)..(59): unsure at all Xaa locations
  Clone ID: MRT4577_16520C.1.pep
MASEVVRPSDAELLQAQADIWRFSLSYLTPLSLKCAVLLXSPCGIYRHGVAASVAELIT

SEQ ID NO: 256162 - protein, 53 aa, Zea mays
  Clone ID: MRT4577_165210C.1.pep
TFYVFLLKRSDVLNSNYVLSFKRRLSDVLITMTLRTVNFTGFSVTQTISLLHG

SEQ ID NO: 256163 - protein, 169 aa, Zea mays
  Clone ID: MRT4577_165211C.1.pep
MAAAAVAVSTSVCTSSRPSTGCPNVRPQARPLLGRPSPRRRLQTALAATGKTPGEAEEQVPAWAKPGADEPPPWEREGGAARGQEARQVPFYAYLLASTITAIAAIGSIFEYTNQRPVFGIVGPDSVLYAPLLGFFVFTGIPTSAFLWFKAVQTANREAEEQDRRDGFL

SEQ ID NO: 256164 - protein, 164 aa, Zea mays
  unsure (1)..(164): unsure at all Xaa locations
  Clone ID: MRT4577_165212C.1.pep
SRGTHAFRGSPLPSNPCILLEQLPMPLAAVKYSRGTFIFPGAQPAPXRSFSEEVAALNRYFGGLNSGGDADVIADPARPRQKWHVLYATEPPEQPXVNLVDALTGLDKKNASAFFKTYACGITRCAKXMTKLSFIXSDGYPCWRTPIXDCEPYGYCLNAIHGLC

SEQ ID NO: 256165 - protein, 68 aa, Zea mays
  unsure (1)..(68): unsure at all Xaa locations
  Clone ID: MRT4577_165213C.1.pep
PRVRPRVRPRVRPRVRAKVXQDKEGIPPDQQRLIFAVKQLEDGRTLAVYNIQKEATLYLVLRLCGGII

SEQ ID NO: 256166 - protein, 259 aa, Zea mays
  Clone ID: MRT4577_165214C.1.pep
MVLIDASTRWSHVCFLSTRNHAFAKIMTQVIRLKAHYPEHKIQKIRLDNAAEFSSRAFNDYCMAQGIHIEHSVPYVHTQNGLAESLIKRIKLIARPLLHECNLPTSCWGHAVLHAADLIQLRPTAYHTTSPLHLVRGNPPNISHLRKFGCAVYTPVSPPQRTAMGPHRKLGIYVGYQSPSIIKYLEPLTGDLYTARFADCIFNEDHFPTLGGEFKYPNECQEINWDDKSILSSDPRTQESELQVQKIIELQHFASNLPP

SEQ ID NO: 256167 - protein, 250 aa, Zea mays
  unsure (1)..(250): unsure at all Xaa locations
  Clone ID: MRT4577_165215C.1.pep
MGCFPVFWRKKNSRSQIVQHDQDIPITGNVKIYSSKELRKATRNFCPGNMLGEGSFGRVYLGKLNKGEKVAIKVLSSESRQGTKEFLNELSVISNITHHNLVKLHGCCVDGGQKMLVYNYVENNSLAQTLFGNSRSGIRFGWRTRVDICIGVADGLTYLHEQVRPRIVHRDIKASNILLDRNLRPQIADFGLAKFFPGNMTHISTRVAXTLGYLAPEYAIRGQLTRKXDVYSFGVLLLEIVSADATLIPD

SEQ ID NO: 256168 - protein, 62 aa, Zea mays
  Clone ID: MRT4577_165216C.1.pep
RLYFLLSLLLRLRLNHPRRGRHVRLGGAPLTNRSRRWGVQDLPGVGWHRAERTGRSEIKNLP

SEQ ID NO: 256169 - protein, 75 aa, Zea mays
  Clone ID: MRT4577_165217C.1.pep
IINKMGPQIFLHTYMLIGVDAADHLKLDTYLFRLTGMWQHQKFTCLQTTNFYNNSLDWVVYRITKRQPRNWDDIK

SEQ ID NO: 256170 - protein, 221 aa, Zea mays
  unsure (1)..(221): unsure at all Xaa locations
  Clone ID: MRT4577_165218C.1.pep
MQPRKAGPLAKKCDKSLQASANTPFEARGLLSGTIIRGTLKTPNSQLSRGDRRHSTAPLASLTEGQRRLRHSDCSATRQSKSDGQSGLAKGATANSAPPDPRARTRAKTRKTANSAPPDPRARTRAKTRKTANSAPPDPRARTRAKTRKTANSAPPDPRARTRAKTRKTANSAPPDPRARTRAKTRKTANSAPPDPRARTRAKTRKTXELRSARPQGSDSG

SEQ ID NO: 256171 - protein, 215 aa, Zea mays
  unsure (1)..(215): unsure at all Xaa locations
  Clone ID: MRT4577_165219C.1.pep
RTLLSRQGRSDSSHFAAPLTDLTGKQRRLPCSDCCATRQSEADXQLSPASGAIGSSASPDPRARTQPRPRKTDSASPDPRARTQPRPXEEDSASPDPRARPPSRLRKTTNSASPDPRARTQPRLQKTTNSASPDPKARTXPRLRKTTNSALPDPRARTQPRLWKTTXLRLARPQGSDSTSTLEDRLDLDLGGASASPDLGLGSTTSQEGPSLPYP

SEQ ID NO: 256172 - protein, 218 aa, Zea mays
  Clone ID: MRT4577_16521C.1.pep
MEVGRTPRRRASPAAAVPSLLLFALLFVCRAAAALGGPAPALYKHASFFDRDGDGVVSFAETYGAFRALGFGLGLSSVSAAFINGALGSKCRPQNATSSKLDIYIEDIRRGKHGSDSGSYDAQGRFVPEKFEEIFARHARTVPDALTSDEIDQLLQANREPGDYSGWAGAEAEWKILYSLGKDGDGLLRKDVARSVYDGTLFHMLAPNWKSPDEEEER

SEQ ID NO: 256173 - protein, 1073 aa, Zea mays
  Clone ID: MRT4577_165220C.1.pep
MVPPVDVVGPCPRLGDVEAPPRSRSSLSSEAEVESEPLGRARRRPSAEARAESEPWGQAKRSSSSSGAEPESEPWGRAERSSSSSGAEPESEPLVGWSGVRRLPGLSPSPSPGLTLSSGTAVGAAQAALSFCQAGSIDVGDFYVKFHLRNKDDGFSWVLVAVYGAAQDELKESFLAELVQTCAKENLPLIVGVIDSLDLRELGLSNRKFTWANSRSVPTFETLDRILVTTEWESKYPLTTVQALTREISDHTPLLMNTGSGTHSNNQPPFKFELDWFLREGFSDMVTQVWKNENRGPLWCIRTHHFSMVESVRDDIPQVTDLENEILTSPFMMDEVKKAIFQMEHNKAPGPDGFPAEFYQVFWDVIKDDLLCLFLEFHKGNLPLYCLNFGIITLLPKQKEAKQIQQFRPICLLNVSFKIFTKVMTNRVALVAQKVIKPSQTAFMSGRNIMEGVIILHETIHELHRKKLDGVVLKIDLEKAYDKVNWSFLQQALRMKGFSPQWCNWISQIVKGGSVGIKVNDDIGHYFQTKKGLRQGDPLSPILFNIVADMLAILIERAKNNVDLVGLVPHLVDGGLSILQYADDTILFMEHDLDKAKNLKLVLSTFEQLSGLKINFHKSELYCYGEAKDFEHEYANLFGCNTGCVPFKYLGIPMHHRKLSNNDWKIIEEKFQKKLSSWKGKLLSVGGRLVLINSVLTSLAMYMLSFFEIPKGILNLETQNKCLLSKWLFKLINEEGIWQNLLRRKYLSHKNLAQAQRQPGDSHFWSGLMKVKDQFLHYRRFKVHNGKETRFWEDNWVGDRRLKIAYPNLYQIVRKKSATVAEVLSTTPLNVTFRRALTGVNLESWYKLVACVLNTSLTGDRDIFIWNLHKSGVFSTRSFYRVLICDGIVPLKSPIWKIKIPLKIKIFLWYIKNGVTLTKDNLAKRNWKGNLKCCLCSSLETIEHLFIQCHFARFIWNTIHITFGIKPPSSIYDLFGSWLAGFRPAFRNQICVGLSAICWAIWLNRNDMVFNCAKANTFMQVIFRATYWARSWSLLLRDEDARTDLNRACRLLESVVMEVFAKFGWKFSNRIAA

SEQ ID NO: 256174 - protein, 191 aa, Zea mays
  Clone ID: MRT4577_165221C.1.pep
MGHRSCSLRPESARGRVMMALPVDVAGLRPRLGDVEAPPKPRSSLSSMAEAESEPLGRARRRSSAEARAESEPWGRAERSSSSSGAEPESEPWVGRSGVRRLPGLSPSPSPGSGGAEFAVFRDLARVRALGRAERSFLWCLWQGLTACQSHSVEWHCSRSGAGGAVLLSDRSVERRSDGGHFGSAGGRASG

SEQ ID NO: 256175 - protein, 67 aa, Zea mays
  Clone ID: MRT4577_165222C.1.pep
GFYFRRPPRLFAKGVHPFLSRTKNPWVLNHVLHYFFPPPRPVIKYGTRGPPFLEVFGACAPPVQCEM

SEQ ID NO: 256176 - protein, 156 aa, Zea mays
  unsure (1)..(156): unsure at all Xaa locations
  Clone ID: MRT4577_165223C.1.pep
SSLIEGQRRLRHSDCGATRRSESDRQSGLAKGATANSAPPDPRARTRAKTRKTANSAPPDPRARTRAKTRKTANSAPPDPRARTRAKTRKTANSAPPDPRARTRAKTRKTXNSASPDPRARTPPWPRXRTTSASPDPRARTRAKTRKTTKLRLARP

SEQ ID NO: 256177 - protein, 69 aa, Zea mays
  Clone ID: MRT4577_165224C.1.pep
TLHRGILTHGVRPPCRWEEQEDQASHRLYYDRCLISSSLVKALTVFLVNEDQRATFNACLSQRGVFNEQ

SEQ ID NO: 256178 - protein, 123 aa, Zea mays
  unsure (1)..(123): unsure at all Xaa locations
  Clone ID: MRT4577_165225C.1.pep
MGRRSCSLRPESAQGRVMMAPPVDVAGLRPRLGEVEVPPKLRSSLSSVAEAKSEPXGRARWRSSSEARTESEPWGRAERSSPSSGTXPESEPWVGRSGVRRLPGLSPSPSPGSGGAEFAVFRG

SEQ ID NO: 256179 - protein, 107 aa, Zea mays
  unsure (1)..(107): unsure at all Xaa locations
  Clone ID: MRT4577_165226C.1.pep
TNTQSKMLELNVECKARLRRLLQFFCRGIEESALFPSPRWSTPHKGIAPPWSSQEPSAHFEMILCHSGVVHPSRSLTNLSRVTNKISKVITELPTPSSHXGDANHQE

SEQ ID NO: 256180 - protein, 148 aa, Zea mays
  Clone ID: MRT4577_165227C.1.pep
GGRQEGLRERTRSMAEEQIEEASMAIAGRGASWRSRSKRRPWPRRRPRRSSSSSTSPSRSRATAGSRMGKLGHCPISNFTIYTGSEEGVRKEGAQKSGQKYLSESDLQNADGHPEIDLAFVLLLPRRSLIKMAEWNPEKDLLAMVTDD

SEQ ID NO: 256181 - protein, 715 aa, Zea mays
  Clone ID: MRT4577_165228C.1.pep
MTSHGSSDEGNAQSHTDGLAREGFPRILWEVLQGAGYMTPSQYAVQQFEKHRVPRCRVRMTLEPHPLQPGWRSLDSESFGYRAEDTMEAIAVHGLTTFCGFHPLELSTHPIGLFPAEKEDDPMRKDRVEHAKDIWAIYPGQTAHLTVQCMNALYRLQVMRGEAMSHLMALLEATKITLDNREELVVDLSTEMVEKDLQVEQMSNEIQELEELVGTRENTIEVLEDQLINTQQQLAEANQHLDMHHQEIQDMEANEDVDIEGGEESEPASSLDTAGSGRPPSPESSMAGRARRGQNERIPPPPPPPPTMQELMAQQNEILRQLAQRQPPPHHYGGGDHHRRPPAAATYQEFLSTQPPLFTRAEDPLDADVWLRVVESKFPLLHGVCSEVTKVKFATQQLRGPAWTWWDHFLAMQPDDREVEWREFKSAFRGHHIPAGIMDRKLNEFLALSQGNRTVLQYAQAFNDLCQYDGYHADTDEKKRDRFRRGLSTKLRDRLNTVRANSYNELVNMAISQEDCITAHQAEKKRKTPVAGPLAQPHRFRIVSDTQNRGPQQQQGCWVIQPQQQQQQAPNRTQFPVQRNIQPQQQQYRQANDNRAEPESEPWGRAKRSSSSFGAEPESEPWGRAKRSSSSSGAEPESEPWVRRSGVHRLRGLSLSPSPGSGEAELPMALEAGLGCCQPHFAEWHSSRSGAGGAVLLSGRSEERRSECGHFGSVD

SEQ ID NO: 256182 - protein, 557 aa, Zea mays
  unsure (1)..(557): unsure at all Xaa locations
  Clone ID: MRT4577_165229C.1.pep
RTPSSRQSRSDCCHFAAPLTGLTRGQRRLRRFDCRATRQSEADXQPSPASGAIGNSASPDPRARTRAQPRKMTNSASPEPRARTRAQPRKTTNSASADPTARTRGQPRKTTNSASPDPRAQTRAQPRKTTNSGSPDPRARTRAQPRKTTNSASPDPRARTRAQPRKTTXLRLARPQGSDSGLAPEDDELRLARSQGSDSGSAPEDDELRLTRSQGSDSGSALEDDELRLARPQGSDSGSAPEDDELRLARPRGSDSGSAPEDDELRLARPRAQTRAQPWKMTNSASPDPGLELGLSPGRRQTPPRPTQGSDSGSAPEDDELRLARPRARTRAQPRKTTNSASPDPGLGLDLDLDLGRQTQPRPRRSLRLALPRARTDHIIGGAIITLPLANSGYGEQDRRPIWLAPDVCTKQKAQLKTLKNKLISSQNYYKGLLEKNETFANLNSELSTKIELLESSAPSTATDDGLIKKNEKLKAKLASSQEAIENLLGKMEILSIHNNELTTKIENIGSTPEVSVDVSGPTAHLGLPPKVRAALRCVTPYVLAAMLYAMGYKGVL

SEQ ID NO: 256183 - protein, 219 aa, Zea mays
  Clone ID: MRT4577_16522C.1.pep
MEVGRTPRRRASPAAAVPSLLLFAVLFVGRAAAALGGPAPALYKHASFFDRDGDGVVSFAETYGAFRALGFGLGLSSASAAFINGALGSKCRPQNATSSKLDIYIEDIRRGKHGSDSGSYDAQGRFVPEKFEEIFARHARTVPDALTSDEIDQLLQANREPGDYSGWAGAEAEWKILYSLGKDGDGLLRKDVARSVYDGTLFHRLAPRWKSPDSDMERS

SEQ ID NO: 256184 - protein, 936 aa, Zea mays
  Clone ID: MRT4577_165230C.1.pep
MSGDHAKKEMVTGEKPTTSHGKASSEESRNKGKGKEKKPSSHKSHRSGDKKKKMRKVVYYETDTSSPSTSGSDAPSITSKRHERKKFSKIPLRYPRTPRHTPLLSVPLGKPPTFDGEDYARWSDLMRFHLTSLHKSIWDVVEFGVQVPSVGDEDYDEDEVAQIEHFNSQATTILLASLSREEYNKVQGLKSAKEVWDVLKTAHEGDELTKITKRETIEGELGRFRLRQGEEPQDMYNRLKTLVNQVRNLGSKKWDDHEMVKVILRSLVFLNPTQVQLIHGNPRYTLMTPEEVIGNFVSFEFMIKGSRKINELDGPSTSEAQPVAFKATEEKEESTSSRTPIDASKLDNEEMALQRRGKDYKPRSKKVCYKCGKPGHFIAKCPISSDSDRGNDKKGRRKEKNKYYKKKGGDAHVCREWDSDESSSDSSSDEDATNIAINKGLLFPNVGHKCLMAKDDKKKKVKSKSSTKYETSSDDNASDEEDNLCTLFANLNMQQKEKLNELISVIHEKDDLLDTQEDFLIKENKKHVKVKNAYALEVEKCEKLSSELSICNETIDNLRNENASLNAKVDSNVCNVLIPNLKDDNVDLLAKIEELNVTLASLRIENEKLIAKAKELDICNASISDLRSKNDILHAKVVELKTCKPSTSTVEHTTICTRCRDVNIDAIHDHMALIKQQNDHIAKLDAKIAEHDLENEKFKFARTMLYRGRRPGIKDGIGFQQGDNSRSDRRHSTAPLASLTEGQRRLRHSDCSATRQSESDRQSGLAKGTTANSAPPDPRARTRAKTRKTANSAPPDPRARTRAKTRKTANSAPPDPRARTRAKTRKTANSAPPDPRARTRAKTRKTANSAPPDPRARTRAKTRKTANSAPPDPRARTRAKTRKTANSAPPDPRARTRAKTRKTANSAPPDPRARTRAKTRKTTKLRSARPQGSDSG

SEQ ID NO: 256185 - protein, 153 aa, Zea mays
  Clone ID: MRT4577_165231C.1.pep
RSSGEESSRVECMGVHPGQQGNGRPAALGESSVEELASIAGRAKILRVLGVMALIPGERDAHRTLWLFAGHIGASLCEAGRSCLMCATSFFWVWYSSAYGEVRAEIVGALSSAFFCPRALSPSRALLIAPASCASAARDSRAPLPDRVNKKHL

SEQ ID NO: 256186 - protein, 59 aa, Zea mays
  Clone ID: MRT4577_165232C.1.pep
EHDEIDFEFLGNRTGQPYILQTNVFTGGKGDREQRIYLWFDPTKEYHSYFGLWNLYMNP

SEQ ID NO: 256187 - protein, 73 aa, Zea mays
  Clone ID: MRT4577_165233C.1.pep
HQRLMGMYKLFPCVVDPRYVQSAGKLNNQCDKCAHSVSIISTSDHDPHALAIGSMVFSVYDNEVCFVSFRGPS

SEQ ID NO: 256188 - protein, 783 aa, Zea mays
  unsure (1)..(783): unsure at all Xaa locations
  Clone ID: MRT4577_165234C.1.pep
MFAIRSTKCPVAFVGVAGTLVVLITAVHVFMVPILPASFYYFGSRSSISHPKNVLPAVEVVDSRLKGCFPSDSYVFFVFRGAPWKAEIGRWLAGCHANSSSVDVTEAMGAKRCEKDCSARGVCNYNLGECRCFHGYSGKGCEEVLNLECNLPSSPEWPVGQWIVSICAAHCDKTRAMCFCGPGTKYPDRPVAEACGFKTILPAKPDGPKLTDWKTPDLENILTTNSSKLGWCNVVPEDAYSSKVKFKEECDCKYDGLWGQFCETRVECSCINQCSGHGHCRGGFCKCDSGYFGIDCSIPSAYSLAYDWPSWLQTPVNLPDLKTLNSTTIGVKAVVQKRRPLIYVYDLPAEFDSHLLEGRHYRFQCVNRIYDDKNRTIWTQQLYGAQIALHESILASPHRTLNGDEADYFYVPVLDSCLITRSDDAPHLLLPRDLRRRSYHALEYYRMAHGHIAQQYPYWNRTSGRDHIWFFSWDEGACYAPKEIWKSMMLVHWGNTNTKHKNSTTAYWADNWDDIPLDKRGNHPCFDPRKDLVLPAWKEPNPGAIWLKLWARPRNNRTTLFYFNGNLGSAYEGGRPEDMYSMGIRQKLAAEFGSTPNKQGRLGRQHAXDVTVTYLRTEKYYEELASSVFCGVLPGDGWSGRMEDSMLQGCIPVIIQDGIFLPYENVLNYNSFAVRIQEDDIPGLISTLRGINDTQVEFMLGNVRQMWQRFFYRDSILLEAQRQKRLFSEEAPWSVEVSKLPDDDDVFATFIQVLHYKLYNDPWRQDFLQTKDTRLPNICSRTS

SEQ ID NO: 256189 - protein, 91 aa, Zea mays
  Clone ID: MRT4577_165235C.1.pep
PNPAQPMFKGKTRTKPYGYYFMDQNSLLFFGRNGQRSGTPQFSKCLQWPYKEPKNQKFVGNWGGKKKSPLPGGEKKKTGGFESFLTNKLNT

SEQ ID NO: 256190 - protein, 264 aa, Zea mays
  unsure (1)..(264): unsure at all Xaa locations
  Clone ID: MRT4577_165236C.1.pep
LYEIRHKWVPAXLPGFFFAELSLTHRAETASKFYRNNFSSRVSLNTFISRFDQYIDGLYASEAQKDITSFSPEQFLKTDMVLEKQARSIYTRAAFETFQLELVEAMQHYAVKVQDGSYMKYYVERNGDPPTRHTVFYNVAEKKAWCECCRFAFSAILCRHVLSVFLLAGVIMLPEPCITKRWTKKAKSGPELIGLNVGNGSSSPDSVASRYNDLVRDAIKCAEKGTVSAGAFRVAKEVLRKAFMDIRGHGEKLCKDALRSASSR

SEQ ID NO: 256191 - protein, 60 aa, Zea mays
  Clone ID: MRT4577_165237C.1.pep
WYLAVPFFVLASQDHKASVIYRYTTESTDCNQYVLLHPLEIFLSCLCCNQVFACLRGCCP

SEQ ID NO: 256192 - protein, 83 aa, Zea mays
  Clone ID: MRT4577_165238C.1.pep
HIYTSHITMSGPGVGFEYPAQSVSWLKRDLLLFANSIGATADELHFLYELHPNFAAFPTYPLILPFKGDTQEVIDFYAANKKT

SEQ ID NO: 256193 - protein, 379 aa, Zea mays
  Clone ID: MRT4577_165239C.1.pep
MGCTCVAFFLLLLEERDLVGVGALQSPLGFKDFHHAAGCSPPSAVTQDDDRRPRGGEERAGPWPPPYPQLQGRSSSVLGRRVRRIGAYLRVGIGPLLPLVIGGEGRPPSVVLAVAACLAPRPERLWRCFWCHLLTLGRSAAARPPLGCRSHRARASHVQVLLALSAAPGGRTTRRGFLLSRPEATAWAETLAEGLAVVVGSTQSAKAEASQQRAWAGGFKTALGEAVKNCKALAEAAKQKEAERVAMSEAISALCQAFGLDDVPSGSSPHSHLRALGGHVRNRLHGVLHHDVRRAFAVLASHYDVDLERVSEGYCLPDEEEAALAEVQRLDTVVEGPSAALASSFEVEILPPMSPSEAGPDSAEGGNDAEGAATPPADV

SEQ ID NO: 256194 - protein, 233 aa, Zea mays
  Clone ID: MRT4577_16523C.1.pep
MEVGRAPRRRVSPAAAAAAVPSLLLFAVLFAGRAAAFGHLQAGAGATALYKHASFFDRDGDGVVSFSETYGAFRALGFGFGLSSVSAALINGALGSKCRPQNATSSKLDIYIEDIQKGKHGSDSGSYDAEGRFVPDKFEEIFAKHAKTVPDALTSDEIDQLLQANREPGDYSGWAGAEAEWKTLYSLGKDKDGLLRKDVARSVYDGTLFHMLAPNWKSPDEEEEQELSVIRES

SEQ ID NO: 256195 - protein, 46 aa, Zea mays
  Clone ID: MRT4577_165240C.1.pep
RLTVGPVRVFSQHLPLEARAAEWRISQARQQLDSDPVCARVRAISL

SEQ ID NO: 256196 - protein, 42 aa, Zea mays
  Clone ID: MRT4577_165241C.1.pep
DSLASQDDYQCGGLHNQPHTVSSLCLTLQHLTTGLSRDYSAN

SEQ ID NO: 256197 - protein, 41 aa, Zea mays
  Clone ID: MRT4577_165242C.1.pep
LRVRANIVAFLQHQQLLPFSQHGLTNPTTLLQPPTIGGAIF

SEQ ID NO: 256198 - protein, 72 aa, Zea mays
  Clone ID: MRT4577_165243C.1.pep
MARACVFLVVLLLAAVAVAPFAGAARVDVVEGRSMASADAPEAAADAPAPGPDSASSPDSSSEAPSSSSSSD

SEQ ID NO: 256199 - protein, 72 aa, Zea mays; identical to SEQ ID NO: 256198
  Clone ID: MRT4577_165244C.1.pep

SEQ ID NO: 256200 - protein, 121 aa, Zea mays
  unsure (1)..(121): unsure at all Xaa locations
  Clone ID: MRT4577_165245C.1.pep
GPGSIPSRPRTRGLLSYSPLAVVTAPPCLQPQGLLPSGPPLTQGGVANPAGHLQQXLTWNQLAGSNCDAYLQQRQLTLNPXAAANPSWATLLPQLQQALAHNQGCLINPALQDPIAGGEIS

SEQ ID NO: 256201 - protein, 83 aa, Zea mays
  Clone ID: MRT4577_165246C.1.pep
MATAEVQTPTVVATEEAPVADTPVLVRVVLLDVRPLPGCGSPGSLAMTGWGLLPLSPLPPRMPDPRGEARYGTEGHASVPTLR

SEQ ID NO: 256202 - protein, 102 aa, Zea mays
  Clone ID: MRT4577_165247C.1.pep
AWKSLPDGHEFSKKFPGFVINSINGTVERFAASNVFFITQRKNANMDVLYLSPKKPRGIPFLKKGTTVVGVSGVKWAVQTPKKEMGPFFFETKEALPQGRPT

SEQ ID NO: 256203 - protein, 87 aa, Zea mays
  unsure (1)..(87): unsure at all Xaa locations
  Clone ID: MRT4577_165248C.1.pep
RVGSTLASDADYEFLGQAMGHGAWSNTQTLTLLLIGLPTVLVLVAXIANSTYRVSVVGKPPVTTSSTGTLAILGHLHHICPXTHIFQ

SEQ ID NO: 256204 - protein, 72 aa, Zea mays
  Clone ID: MRT4577_165249C.1.pep
NKLRRPQGCIIVNFSLPYYSNDLKSRRHQFKGQLLCNIEKTGISWNGPIYPLTEISYGMPPTPPHAERDGYC

SEQ ID NO: 256205 - protein, 233 aa, Zea mays
  Clone ID: MRT4577_16524C.1.pep
MEVGRAPRRRLCPAAAAVPSLLLFAVLFAGRAAAAFGHLQGAGAGATALYKHASFFDRDGDGVVSFSETYGAFRALGFGFGLSSVSAALINGALGSKCRPQNATSSKLDIYIEDIQKGKHGSDSGSYDAEGRFVPDKFEEIFAKHAKTVPDALTSDEIDQLLQANREPGDYSGWAGAEAEWKTLYSLGKDKDGLLRKDVARSVYDGTLFHMLAPNWKSPDEEEEQELSVIRES

SEQ ID NO: 256206 - protein, 38 aa, Zea mays
  Clone ID: MRT4577_165250C.1.pep
SDSYRLILSDLASFIVATWVCYICVHANRNLRNNYFWT

SEQ ID NO: 256207 - protein, 257 aa, Zea mays
  Clone ID: MRT4577_165251C.1.pep
MAASGYSGSAPITDQGFEGWPPKEGQRRLRHSDCSATRQSESDRQSGLAKGATANSAPPDPRARTRAKTRKTANSAPPDPRARTRAKTRKTANSAPPDPRARTRAKTRKTANSAPPDPRARTRAKTRKTANSAPPDPRARTRAKTRKTANSAPPDPRARTRASTRKTTKLRFARPQGSDSALASAERLPPRPTPWLGLGHGNRRQTQPRLRRNPHVALPRAQTATSTGGAIIILPRIDSGHGEQDRRLIRPAPPEGQ

SEQ ID NO: 256208 - protein, 274 aa, Zea mays
  unsure (1)..(274): unsure at all Xaa locations
  Clone ID: MRT4577_165252C.1.pep
MEKLSIAATMFCALVLAALAAAAGGEAAVVEHTFVVHEMNQTHLCNTTKIYVVNGQLPGPTIDITDGDTVVVHVINRLPHGLTIHWHGVRQMRSCWSDGAGFVTECPIPPGGDHVYHFNVTGQVGTLWWHAHVTCLRATVAGAFIIRPKGGMYPFPTPAKDVPIIIGEWWQLDLVELDRRMHDGNFDDNPLSATINGKLGDLSNCSGKPEESFVLDVVRGKTYLLRIVNTALFSEYYFKVAGHTFTVVGADGYYLTPYKTDMVTXAPGEAIDVL

SEQ ID NO: 256209 - protein, 218 aa, Zea mays
  unsure (1)..(218): unsure at all Xaa locations
  Clone ID: MRT4577_165253C.1.pep
SEVRRLAPRRVRQPPQIAWALHPLLVRGSKAGPPKGSTAASGYSGSAPITDQGFEGWPPKEGQRRLRHSDCSATRQSESDRQLGLAKGATANSAPPDPRARTRAKTRKTANSAPPDPRARTRAKTRKTANSAPLDPRARTRAKTRKTANSAPPDPRARTRAKTRKTANSAPPDPRARTRAKTRKTANSAPPDPRARTRAKTRKTXELRSARPQGSDSG

SEQ ID NO: 256210 - protein, 221 aa, Zea mays
  unsure (1)..(221): unsure at all Xaa locations
  Clone ID: MRT4577_165254C.1.pep
MQPRKAGPLAKKCDKSLQASANTPFEARGLLSGTIIRGTLKTPNSQLSRGDRRHSTAPLASLTEGQRRLRHSDCSATRQSESDRQLGLAKGATANSAPPDPRARTRAKTRKTANSAPPDPRARTRAKTRKTANSAPPDPRARTRAKTRKTANSAPPDPRARTRAKTRKTANSAPPDPRARTRAKTRKTANSAPPDPRARTRAKTRKTXELRSARPQGSDSG

SEQ ID NO: 256211 - protein, 72 aa, Zea mays
  Clone ID: MRT4577_165255C.1.pep
APPLSSLGLSCRAPLAVVLSSFNPRARWCRLSSAIFPRAPFSCCAQPQLPPFFVLICVGLCHPLRLVYANYS

SEQ ID NO: 256212 - protein, 639 aa, Zea mays
  Clone ID: MRT4577_165256C.1.pep
MPMWQPERSGHPAGVMSWLSEAGRRGVSSEAEVESCLQLPWPSPSQGVGRGGSRPAEARAESEPWGRARRSFVVFRVLARVRALGSGGAEFAVFRVLARVRALGSGGAEFTVFRVLARVRALGSGGAEFAVFRVLARVRALGSGGAEFAVFRVLARVRALGSGGAEFAVFRVLARVRALGSGGAEFAVAPLARPNCLSDSLCRVALQSEWRRRRCPSVRLASGALYADGGYQLRIRRLEGTPNYGPRQQHYSELPDIKRAIANTHPINNFLGQALVEFFGTLSREWALECMKDLLLVNLRGNLQIVVQATKEYSEQLGVDACIKLFEQFKSYEDLYFFLGSYLSSSEDPDIHFKYIEAAARTGQIKEVERVTRESNFYDAEKIMNFLMEAKLPNARPLINVCDRFGFVPDLTHYLYTNNMLRYIEGYVQKVNPGNAPLVVGQLLDDECPKDFIKGLILFVRSLLPVEPLVDECEKRRGQCDDELINVTNKNSLFKLQARYVVERMDGDLWDKVLQPENEYRRQLIDQVVSTALPESKSPEQVSAAVKAFMTADLPHELIELLEKIILQNSAFSGNFNLQNLLILTAKAQLREGLVSEAIESFIRVDDAAHFLDVIRAAEEANVYNDLVKYLDQLTCYDC

SEQ ID NO: 256213 - protein, 269 aa, Zea mays
  unsure (1)..(269): unsure at all Xaa locations
  Clone ID: MRT4577_165257C.1.pep
MQPRKAGPLAKKCDESLQASANTPFEARGLLSGTIIRGTLKTPNSQLSKSDRQSGLAKGATANSAPPDPRARTRAKTRKTANSAPPDPRARTRAKTRKTANSAPPDPRARTRAKTRKTANSAPPDPRARTRAKTWKTANSAPPDPRARTRAKTRKTXNSASPDPRARTPPWPRPDDYRLARPDGPGSASATEDRLNLGFGGAPTSPDLGHRPATSTRSTIIILPRADSVSGLRVLIIDNSGFNMQMFPRLRTYPWRTAGLILKTPGALY

SEQ ID NO: 256214 - protein, 231 aa, Zea mays
  unsure (1)..(231): unsure at all Xaa locations
  Clone ID: MRT4577_165258C.1.pep
SRSDRRHSTALLTSLTEGQRRLRRSDCSATRQSESDRQSGLAKGAIANSAPHDPRARTRAKTRKTANSAPPDPRARTRAKTRKTANSAPPDPRARTRAKTRKTANSAPPDPRARTRAKTRKTANSAPPDPRARTRAKTRKTXNSASPDPRARTPPWPRPNDLRLARPGGSGSASATEDRLDLGFGGAPTSPCLGHRPATSTGSAIIILPRADSGHGEQDRRPIRPAPPDGQ

SEQ ID NO: 256215 - protein, 99 aa, Zea mays
  unsure (1)..(99): unsure at all Xaa locations
  Clone ID: MRT4577_165259C.1.pep
QENRGGKGPVGVRRGPKLRSLNSPHPRSLGQSSFCFLLFIDVFLXLVFDPRNGGLPVLIPFGSLFSSFLMKRCACFLRVREKKSLLYIFFSRTCTRVVY

SEQ ID NO: 256216 - protein, 83 aa, Zea mays
  Clone ID: MRT4577_16525C.1.pep
ILIKGNVVESLSSHLNKLKGNIRMIDSHLDGTKQAFISNIQDKLNEGINLASLEKEVETAEKCCQAMKDEVAAMRMRYLDRGI

SEQ ID NO: 256217 - protein, 105 aa, Zea mays
  Clone ID: MRT4577_165260C.1.pep
MAPPVDVVGPCPRLGDVEAPPRSRSSLSFEAEVESEPLGRARRRPSAEARAEFEPWGRAKQSSSSSGAEPESEPWVGRSGVRRLPGLSPSPSPGSGGAEFAVFWG

SEQ ID NO: 256218 - protein, 123 aa, Zea mays
  unsure (1)..(123): unsure at all Xaa locations
  Clone ID: MRT4577_165261C.1.pep
MGHRSCSLRPESARGRVMMALPVDVAGLRPRLGDVEAPPKPRSSLSSMAEAESEPLGRARRRSXAEARAESEPWGRAKRSSSSSGAEPESEPWVGRSGVRRLLGLSPSPSPGSGGAEFVVFRG

SEQ ID NO: 256219 - protein, 188 aa, Zea mays
  Clone ID: MRT4577_165262C.1.pep
MEPGGGTAIRAVESLLTSSCFRKGAESRRRHRVWGRHHCLSGGASQMGRRSCFLRPELARGRAMMAPPVDVAGLRPRLGDVEAPPKPRSSLSSVAEVESEPLGRARRRPSAEARAESEPWGRAKRSSSSSGAEPESEPWVGRSGVRRLPGLSPSPSPGSGGAEFAVFRDLARVRALGRAERSSPSSGT

SEQ ID NO: 256220 - protein, 205 aa, Zea mays
  unsure (1)..(205): unsure at all Xaa locations
  Clone ID: MRT4577_165263C.1.pep
VEVLHFNPRFGSPFQISVGVCPRQGGAMTEVEAPFITEVEQEEGRGLRGSAFAGGARSGLGNGVRCTRQYHRRSDALAYGDRYQKAAALVDLAXDGVRIPEDVLNDTRFERAMRFYFVYLRLDWLWSLNLFALILLNFLEKPLWCQKYAPHTCDQRDLYFLGQLPYLSKTESLIYEXASLTCVVLVLQCPGKNLMTQTLKRYYGQ

SEQ ID NO: 256221 - protein, 122 aa, Zea mays
  Clone ID: MRT4577_165264C.1.pep
FFKPQGPPAGGGPFPPFVSPVCSRAPPFSGSFVKKCSSPGHWLSPPFFCGFLFPGSRGCFWFRSDVGPPLGPRGSLLFPASFSCTVSMCFFLVGLGFLAHLLFICELIYPCTSFLKIYFFFF

SEQ ID NO: 256222 - protein, 640 aa, Zea mays
  Clone ID: MRT4577_165265C.1.pep
MTQEKTVVLYPSLGVGHLNPMAQLAKAILRHGSVAVTIAVVDPPEKHAVLAAALARLAAVSPSITVHLLPIPPCATSKQHSHPIMPILDALRAANPALRAFLAARVPAVAALVVDMFCTDALDVAAELAIPAHFFYPSAAGDLAVYLQVPDLCRAAPSPLRDMGKAALNFAGVPAVRALDMPDTMHDWESDVGSVRLRQLARMPEAAGILVNSFEWLESRALEALRGGHCLPGRSTPKIYCVGPLVDGGGSGTEGNGERHACLAWMDGQPKQSVVFLCFGSLGAFSAAQLKETARGLERSGHRFLWAVRSPSEDQDSGEPDLEALLPDGFLERTRGRGLVLKNWAPQTQVLRHEAVGAFVTHCGWNSVLEAAMSGVPMICWPLYAEQRLNKVHVVEEMKVGVVMEGYDEELVTADEVEAKVRLVMESEEGKKLRERTATAKEMAADAIKQGGSSYVELGAIGNSASPEGLGLGLSPGRRRTPHRPPQGSDSGSAPEDDELRFARPKGSDSGSAPEDDKLRIARPQGSDSGSAPEDDELRLARPQGSDSGSAPEDDELRLARPQGSDSALASADGLRLARPRGSDSTSASEDRLDLDLGGASTSPNPGLGPTTSQEAPSLPYPKLTQATGNKTGVPSGSPR

SEQ ID NO: 256223 - protein, 33 aa, Zea mays
  unsure (1)..(33): unsure at all Xaa locations
  Clone ID: MRT4577_165266C.1.pep
AVAAGXDSQVVKNAKPFVEWLQSAESDKEGDDE

SEQ ID NO: 256224 - protein, 75 aa, Zea mays
  unsure (1)..(75): unsure at all Xaa locations
  Clone ID: MRT4577_165267C.1.pep
CMIKIRATSVMCLYLGIMDREVNKEVWVESSGEDIKINFDVGFNSELFRLGXGVVVRHEMEQVTVWKVVIHENKN

SEQ ID NO: 256225 - protein, 142 aa, Zea mays
  Clone ID: MRT4577_165268C.1.pep
MGKDKKGQGSSCRSGDKRKRELSPSSKGFGDSEYSEEEFSSESEGSPGIAAEVWTYIRSVERAGLEGSDESEVSSDEENSFGSSEERSGGDGDDEGDGSGGGGGDDDGKGDGGDGGDGSDSGGDDGKDGSISSTASGKAPLA

SEQ ID NO: 256226 - protein, 451 aa, Zea mays
  Clone ID: MRT4577_165269C.1.pep
MALQNIGASNRDDAFYRYKMPRMITKIEGRGNGIKTNVVNMVDIAKALARPASYTTKYFGCELGAQSKFDEKTGISLVNGAHDTAKLAGLLEVFIKKYVQCYGCGNPETEILISKTQMISLKCAACGFVSDVDMRDKLTTFILKNPPEQKKGGKDKKAMRRAEKERLKEGEAADEEQKKLKKDAKKKGSKDSTAKGLKKKATTATGSDEDHSSSPTRSHDGDKAAADDDDDDVQWQTDTSIEAAKQRMQEQLSAATAEMVMLSTEETEKKMKQATHKDGSTNGSAKEIPNDKPAVTKPSPYEELIGDIKASLGSAPTPSQLKAVLASSTLPPQDVMNAPLEALFGGVGKGFTKEVVKNKKYLAVAVPDEGAQTLLVQAIEAFGGKCNPEALKEVPVVLKALYDGDILDEETIVDWYNDAVAAGKDSQVVKNAKPFVEWLQSAESDEEGDDE

SEQ ID NO: 256227 - protein, 226 aa, Zea mays
  Clone ID: MRT4577_16526C.1.pep
MEVGRTPRRRASPAAAAAAAAAAVPSLLLFAVLFVGRAAAALGGPGPALYKHASFFDRDGDGVVSFAETYGAFRALGFGLGLSSASAAFINGALGSKCRPQNATSSKLDIYIEDIRRGKHGSDSGSYDAQGRFVPEKFEEIFARHARTVPDALTSDEIDQLLQANREPGDYSGWAGAEAEWKILYSLGKDGDGLLRKDVARSVYDGTLFHRLAPRWKSPDSDMERS

SEQ ID NO: 256228 - protein, 454 aa, Zea mays
  Clone ID: MRT4577_165270C.1.pep
MALQNIGASNRDDAFYRYKMPRMITKIEGRGNGIKTNVVNMVDIAKALARPASYTTKYFGCELGAQSKFDEKTGISLVNGAHDTAKLAGLLEVFIKKYVQCYGCGNPETEILISKTQMISLKCAACGFVSDVDMRDKLTTFILKNPPEQKKGGKDKKKAMRRAEKERLKEGEAADEEQKKLKKDAKKKGASSKDSTAKGLKKKATTATGSDEDHSSSPTRSHDGDKAAADDDDDDVQWQTDTSIEAAKQRMQEQLSAATAEMVMLSTEETEKKMKQATHKDGSTNGSAKEIPNDKPAVTKPSPYEELIGDIKASLGSAPTPTQLKAVLASSTLPPQDVMNALLEALFGGVGKGFTKEVVKNKKYLAVAVPDEGAQTLLVQAIEAFGGKCNPEALKEVPVVLKALYDGDILDEETIVDWYNDAVAAGKDSQVVKNAKPFVEWLQSAESDEEGDDE

SEQ ID NO: 256229 - protein, 228 aa, Zea mays
  Clone ID: MRT4577_165271C.1.pep
SEMKRLGAMRHANLLPPLAYHYRKDEKLLVYEYIPKGSLLYVLHGDRGMDYAALDWPTRLKVAVGVARGTAFLHTALAGHEAPHGNLKSANVLLAPDFEPLLVDFGFSSLISHMQSPNSLFAYRAPECAAGHPVSAMADVYCLGVVLLELLTGKFPAQYLQNAKGGTDLVVWATSAMADGYERDLFDPAIMAAWKFALPDMTRLMQVAVDCVETDLEKRPEMKEALVR

SEQ ID NO: 256230 - protein, 43 aa, Zea mays
  Clone ID: MRT4577_165272C.1.pep
NSKKWSLGEKKKKKKKKKKKKKKKKKKKKKKKKKGDRSRSRTS

SEQ ID NO: 256231 - protein, 178 aa, Zea mays
  unsure (1)..(178): unsure at all Xaa locations
  Clone ID: MRT4577_165273C.1.pep
MGDPRPRRSPAAPTLADKLRKHSTWLLLLLWFAVSLALFLSATPPAAAPLRRSSFLRSKPRALAATGAAAAPPVRIYVYDLPARFNRDWAVADARCARHLFAAEVAVHEALLAYTGRAARPEDADLFFVPVYVSCNFSTPNGFPSLSHARGMLADAVDLVQARMPYWNRSXGADHVFV

SEQ ID NO: 256232 - protein, 105 aa, Zea mays
  Clone ID: MRT4577_165274C.1.pep
ERPPGQVHSCPATGPPLWRLRCHAALLLIHAFREIYSIHLSLSIYVIVRYRPHGLFCLGFHQSYLPGSSCNGLGSYCIPMAGRCPVHCLVVLLSGCLVEPCLSPA

SEQ ID NO: 256233 - protein, 83 aa, Zea mays
  unsure (1)..(83): unsure at all Xaa locations
  Clone ID: MRT4577_165275C.1.pep
SDFSASSLSNITYLTIKMMNXDTMPKPPCHFFITQKSKPCDKLVWSLHSLYRQSKASHKFRTIFQNQTHPIRKAEQIPAELSP

SEQ ID NO: 256234 - protein, 59 aa, Zea mays
  Clone ID: MRT4577_165276C.1.pep
LAATDGCGRVGGLAFHPLDGILQAMPHVLALFLFPTHFRTHIALVFLEGVWTTNIHDWP

SEQ ID NO: 256235 - protein, 95 aa, Zea mays
  Clone ID: MRT4577_165277C.1.pep
RRLGWSADPKTNSRISPPRRGSFRERNPGAVGDIRRLCARVDHTAIRRGPSSLSAETLAPASGHRPSGPRSQTVRAAAESTAPGAHRNDWRRTRG

SEQ ID NO: 256236 - protein, 258 aa, Zea mays
  unsure (1)..(258): unsure at all Xaa locations
  Clone ID: MRT4577_165278C.1.pep
MQEKIRSMPKDFRPATPKGPDPKWRYMWRVGPRPTNTRFKELNSEPVIPEGLPEWEEMMDSWGSKMISAIEVVAEMAAIGFGLSKDAFTSLMKEGPHLLAPTGSDLQRHGSEGTXVFAGFHXCILNFLXTIHGRSRVPXGLNIWLRNCKKMEVKSPCWCXLIQSGKQLDWLTGGDCLAGMHEVVVTKRTLEAIALAKEQNRSLXWRVSSTLFAHIASDAILKPLGHFAETPDAHSYPPICAGDYVEQELSVINLKGKD

SEQ ID NO: 256237 - protein, 145 aa, Zea mays
  unsure (1)..(145): unsure at all Xaa locations
  Clone ID: MRT4577_165279C.1.pep
PFXGGAGGPPXPKQGETEXGGRGGGNXXXPXPRARHSRGGKQHKGTGNNRPENTRGGGTKQEPPQQPQPAEGTRSRGNKKGHRDQEATHKGPQKRRGRTRPGPGQRRGPGHQRQQPHGARPAQQAHQGHGGARRPRGSGGETHGR

SEQ ID NO: 256238 - protein, 136 aa, Zea mays
  unsure (1)..(136): unsure at all Xaa locations
  Clone ID: MRT4577_16527C.1.pep
RTKFYFFLNFLERFYKVLRCALASAGISLRKHCRLGYGYSGRLKVLQRWSDINSNKNPWTSIPLQAYWTLPAIXLLTRQAITPELTTEVCLWIIALYRWLPVTGMLEKTCRGADLYYWRRNDRLCAIGGSTPRLRD

SEQ ID NO: 256239 - protein, 86 aa, Zea mays
  Clone ID: MRT4577_165281C.1.pep
GKTMTGLRRRCACYTLGVRHQEPWCLNMFKRRVEVGSRSGRGSFGMARASLLGTLGQVFFGLNHVLGKKSRSYPASGLLWGKNFGP

SEQ ID NO: 256240 - protein, 94 aa, Zea mays
  Clone ID: MRT4577_165282C.1.pep
FRLFCGALVSVGLGSVGGACPSCLAVRAFRIYSVGSRKWSACAFGCWVFSFGVCFSMPLGLLGLFAVGCFVVLFFLFLVLGRAFGVGWVGSLPL

SEQ ID NO: 256241 - protein, 79 aa, Zea mays
  unsure (1)..(79): unsure at all Xaa locations
  Clone ID: MRT4577_165283C.1.pep
MGTGTTPIASAVDLHLLLLAPLAAASDSMSIVIYGERSXEDALRMYSQWISAHGRTYNATNEEELYCEELMNKIGYLNT

SEQ ID NO: 256242 - protein, 145 aa, Zea mays
  unsure (1)..(145): unsure at all Xaa locations
  Clone ID: MRT4577_165284C.1.pep
CERVAGGYYVPGLRLLGSGHRRLRRGGPCRGCSGGEGVPRSGWRTTTTTREHVGSFDKDNANVGTGLDGAPRLRDVRSFTTRLQEXGMIEDGCFKYFWLXSAITXASTXTEWMNGKPMDEAQTIKNTSICPNTXLPPAELHCRML

SEQ ID NO: 256243 - protein, 592 aa, Zea mays
  Clone ID: MRT4577_165285C.1.pep
MELGRRHHCLSGGAGQMGHRSCSLRPESAQGRVVMALPVDVAGPRPRPGDVGAPPKLGSNLSSVAEAESEPLGRARRKSFGRGQGGVRALGSGEAEFVVFRGRARVRALGSGGAEFAVFRVLARVRALGSGGAEFAVFRVLARVRALGSGGAEFAVFRVLARVRALGSGGAEFAVFRVLARVRALGSGGAEFAVFRVLARVRALGSGGAEFPMAPLARPDCLSDSLFRVAPQSEWRRRRCPSVRPLYQMDVKSAFLNGPIKEEVYVEQPPGFEDSEYPNHVYKLSKALYGLKQAPRAWYECLRDFLIANGFKVGKADPTLFTKTLDNDLFVCQIYVDDIIFGSTNESTCEEFSRIMTQKFEMSMMGELKYFLGFQVKQLQEGTFFFQTKYTQDILTKFGMKDAKPIKTPMGTNGHLDLDTGGKSVDQKGSTFDLIGYSDADWAGCKINRKSTSGTCQFLGRSLVSWASKKQNSVALSTAEAEYIAAGHCCAQLLWMRQTLRDYGYKLTKVPLLCDNESAIKMADNPVEHSRTKHIAIRYHFLRDHQQKGDIEISYINTKDQLADIFTKPLDEQTFTKLRHELNILDSRNFFC

SEQ ID NO: 256244 - protein, 146 aa, Zea mays
  unsure (1)..(146): unsure at all Xaa locations
  Clone ID: MRT4577_165286C.1.pep
MGLAFGKLFNRVXGKKEMRILMVGLDAVGKTTILYKLKLREIVTTILTIGFNVETGELNNISSTVWDVGGXDKIRPLWRHYLQNTQRLIFVVVRNARDRVVEARDEVLRILNHDELRDDVLAGYANQQELPNAMNAAEITDKLGLL

SEQ ID NO: 256245 - protein, 296 aa, Zea mays
  unsure (1)..(296): unsure at all Xaa locations
  Clone ID: MRT4577_165287C.1.pep
MGARLAHGFAAFFSMCRNIAADVHEVARRQRETDDNLRRQASSLGTLFAPRSPDVPLHPPPPEINEWYQQAYGVPFMTADDVEEEEEAYFDDQGQRRLRHSDCSATRQSESDRQLGLAKGATANSAPPDPRARTRAKTRKTANSAPPDPRARTRAKTRKTANSAPPDPRARTRAKTRKTANSAPPDPRARTRAKTRKTANSAPPDPRARTRAKTRKTXNSASPDPRARTPPWPRPDDFRLARPPGSGSATATEGKTQPRLRRKPHVALLVGLGTPLSRNADNSSLFWHQSPKRGRL

SEQ ID NO: 256246 - protein, 75 aa, Zea mays
  Clone ID: MRT4577_165288C.1.pep
DLNTCHDIWQEQSTHLMNPTDPIPPQHPRTIRHDRDLKGEASPGISGRTNLQPWIKANKILQTVYTMLQFHNSLF

SEQ ID NO: 256247 - protein, 187 aa, Zea mays
  unsure (1)..(187): unsure at all Xaa locations
  Clone ID: MRT4577_165289C.1.pep
NHDGDPPRDRHDQQPRTRRQTTTNADAPEGNDNDALTERPPGPSLREDHHRTDKVGHSTRERIPESVAHARGATAQDDCECTHDETTQTCADIPRAPGARTPKSGRCATAIHERPCPETIRDPXGIAKKLDTRESNGDLLRNNLTVYFIRDGGKFAEENHAIKPNPRPHRQEYRRENDNLAHHPQSL

SEQ ID NO: 256248 - protein, 103 aa, Zea mays
  unsure (1)..(103): unsure at all Xaa locations
  Clone ID: MRT4577_16528C.1.pep
MAAAGERRKLCGCGGAVVSIPGGDVAAAASILPLSPCTLSACGAVALAPXPDDVRAQPRWPRSRAPGXVRLFRTLVANXCVEVEGTLXRVVTRRRFGEGDGEG

SEQ ID NO: 256249 - protein, 162 aa, Zea mays
  Clone ID: MRT4577_165290C.1.pep
MATAFDSPTSSPAAAPFHDDPFLHFDGSAPAAHRDGPPPPPTASRPPRTPTRPPPSACPTPTATSTTTLSPHLLTPTVGPSFEEGFLLREWCRQNAIHLEEKEKKEKELRSQIIVDAEEFKKAFVEKRKLNAETSKGQNRDREKLFLANQEKFHAGADKQYW

SEQ ID NO: 256250 - protein, 284 aa, Zea mays
  Clone ID: MRT4577_165291C.1.pep
MATAFDSPTSSPAAAPFHDDPFLHFDGSAPAAADGFPASPDAYAPSPFGMPHSNGDLHDDPFAAPADSNGGPILPPPTEMGREEGFLLREWCRQNAIHLEEKEKKEKELRSQIIVDAEEFKKAFVEKRKLNAETSKGQNRDREKLFLANQEKFHAGADKQYWKAISELIPHEIANIEKRGARKDKEKKPGIVVIQGPKPGKPTDMARMRQILLKLKHTPPPHMKPPPPPAAATGKDGAPAAAGKDGAKPATVANGSVPEMEKAAAEASVPAAAPPAATEPIAAA

SEQ ID NO: 256251 - protein, 80 aa, Zea mays
  Clone ID: MRT4577_165292C.1.pep
RRKEFSRGLFEFSLNQGFSARTLFSKWKNPGFKPLFSPRCIQTRAPNFATTWVSRVPKLLREDPVIKFVPSGSRGFPTGD

SEQ ID NO: 256252 - protein, 86 aa, Zea mays
  unsure (1)..(86): unsure at all Xaa locations
  Clone ID: MRT4577_165293C.1.pep
DREQFVXNXNTXVWPXIXFPITXLXLFLITXLXIXNTNYHXPPSPKPIXXXNYNKPXEPXXTXICSLHSCPHPRPRRSTDHSIPSI

SEQ ID NO: 256253 - protein, 442 aa, Zea mays
  Clone ID: MRT4577_165294C.1.pep
MEMLHQQVQRKKEKMARLAELQRQINEASEEVRHLTQDEQNRRPQHKDLHQEGFLNEDDWYDNFHHGNFAFDDASPLSAELQATSWPPSYKPPQLPIFDGHSDPKQFLMSYEATVSSYGGNTAVMAKSFVMAVRSVAQTWYSSLRPGTITSWQKLKDMLLTSFQGFQTKPDHEEYLQAYVRRFLRLRAQAPTVPNEIVIEAMIKGLRPGPSAQYFARKPPQTLEKLLQKMDEYIRADNDFRQRREEAFRFSEMTRGFGGRFYPRHVRSIHNSTQNDDKGSQQQRPQCSSQASGQQQSSFRPPAPKGRGARGFGGRFGDQPRRIFCLFCGENKGHTTRMCHVTIQKQKEIAEAAAQQGQPKQVMHTASYHSPYIPEYVGNHPAVSVASASQPQASWQQPPPPPPMQQGQQPEGGQYAQQQRDFREQSEARTVNSTVLESKHIY

SEQ ID NO: 256254 - protein, 64 aa, Zea mays
  unsure (1)..(64): unsure at all Xaa locations
  Clone ID: MRT4577_165295C.1.pep
PCARTTLHAVATTETEAAHPLEHQANGDGXHKRLYSEDTRKSWRKSDDLYQHILDTSVCPREPA

SEQ ID NO: 256255 - protein, 482 aa, Zea mays
  Clone ID: MRT4577_165296C.1.pep
MAPKKASATGAAALQPLDHNQETVSLREARSQKRKAVQRKKEKIARLAELQRQIDEASEEVRHLTQDEQHRRPQHQDLHQEGFLNEDDWYDNFHHGNFVFDDASPLSAELQATPWPSSYKPPQLPIFDGHSDPKQFLMSYEATVSSYGGNAAVMAKSFVMAVRSVAQTWYSSLRPGTITSWQKLKDLLLTSFQGFQTKPVTAQALFQCTQDHEEYLQAYVRRFLRLRAQAPTVPNEIVIEAMIKGLRPGPSAQYFARKPPQTLEKLLQKMDEYIRADNDFRQRREEAFRFSEMTRGFGGRFYPRHVRSIHNSTQNDDRGSQQQRPKCSSQASGQQQGSFRPPAPRGRGARGFGGRIGDQPRRIFCLFCGENKGHTTRMCHVTIQKQKEIAEAAAQQAQPKQVMHTASYHSPYIPEYVGNHPAVSVASASQPQASWQQPPPPPPLQQGQQPEGSQYGPHQRDFREQSEARTVNSTVPESKHIY

SEQ ID NO: 256256 - protein, 62 aa, Zea mays
  Clone ID: MRT4577_165297C.1.pep
FHTTLKREAAEDVHASIAICVPAGPTLTTLLPHPNSLDPSITTLILWNLWCTPSGIFSPLKN

SEQ ID NO: 256257 - protein, 514 aa, Zea mays
  Clone ID: MRT4577_165298C.1.pep
REECPRALTRHRKKASAPGAGTLQPLDPNQDVLSLREARSQKRKATSPTPPEDDLDQEIQNLEILQQQVQRKKEKMARLAELQRQIDEASEEVRHLAQDEQHRRPQHQDLHQEGFHNEDDWYDNFHHGNFVFDDASPLSAELQATPWPPSYKPPQLPVFDGHSDPKQFLMSYEATVSSYGGNASVMAKSFVMAVRSVAQTWYSSLRPGTITSWQKLKDLLLTSFQGFQTKPVTAQALFQCTQDHEEYLQAYVRRFLRLRAQAPTVPNEIVIEAMIKGLRPGPSAQYFARKPPQTLEKLLQKMDEYIRADNDFRQRREEAFRFSEMTRGFGGRFYPRHVRSIHNSTQNDDKGSQQQRPQYSSQASGQQQSSFRPPAPRGRGARGFGGRFGDQPRRIFCLFCGENKGHTTRMCHVTIQKQKEIAEAAAQQAQPKQVMHTASYHSPYIPEYVGNHPAVSAASASQPSASWQQPPPPPPLQQGQQPEGSQYAPHQRDFREQSEARTVNSTVPESKHIY

SEQ ID NO: 256258 - protein, 459 aa, Zea mays
  Clone ID: MRT4577_165299C.1.pep
MALKKASATGAAALQPLDPNQETLSLREARSQKRKAVSPTPPEDELDQEIRDMEMLHQQVQRKKEKMARLAELQRQIDEASEEVRHLTQDEQNRRPQHKDLHQEGFLNEDDWYENFHHGNFAFDDASPLSAELQATPWPPSYKPPQLPIFDNHSDPKQFLMSYEATVSSYGGNTAVMAKSFVMAVRSVAQTWYSSLRPGTITSWQKLKDMLLTSFQGFQTKPVTAQALFQCTQDHEEYLQASVRRFLRLRAQAPTVPNEIVIEAMIKGLRPGPSAQYFARKPPQTLEKLLQKMDEYIRADNDFRQRREEAFRFSEMTRGFGGRFYPRHVRSIHNSTQNDDKGSQQQRPQCSSQALGQQQSSFRPPAPRGRGARGFGGRFGDQPRRIFCLFCEYVGNHPAVSVASASQPQASWQQPPPPPPMQQGQQPEGGQYAQQQRDFREQSEARTVNSTVPESKHIY

SEQ ID NO: 256259 - protein, 280 aa, Zea mays
  Clone ID: MRT4577_16529C.1.pep
DEFMEEDSKITDEEDEDSFVVPDGYLSDNEGIQIESLLDDKDEEASSSPTGQCAEVEEFRSLLRQQRVLNILTEQALRKSQPLIISNLNHEKAELLTAEDLKGTAKIEQLCLQVLSMHICPGGAVVDVPLTDSSSATVEEIRQPNPKDGSPGAASAIPETDLPEIVQVIRSCRDGIHKVVELLQHKFPNVPKTQLNRKVREISDFIDNHWKVKKEILDKLGLDSSPVKPKKNKSIAMYFSKRCLPPEEAVNALAASPELRLKSRNGGREAPQINLFPSEQ

SEQ ID NO: 256260 - protein, 65 aa, Zea mays
  Clone ID: MRT4577_1652C.1.pep
HNRYGNVPCPVCFVKKKILKRLGFFPIKPCSPFKVSKGISRKAPVFFVTLRVKLWKIKPRGVQCF

SEQ ID NO: 256261 - protein, 55 aa, Zea mays
  Clone ID: MRT4577_165300C.1.pep
QLVFSHSGFAKQLPRACCGAPSTPEKAAYNFNVTAKCGEPGATACADPTTHWSWD

SEQ ID NO: 256262 - protein, 378 aa, Zea mays
  Clone ID: MRT4577_165301C.1.pep
MEMLHQQATTWPPSYKPPQLPIFDGHSDPKQFLMSYEATVSSYGGNAAVMAKSFVMAVRSVAQTWYSSLRPGTITSWQKLKDMLLTSFQGFQTKPVTAQALFQCTQDHEEYLQAYVRRFLRLRAQAPTVPNEIVIEAMIKGLRPGPSAQYFARKPPQTLEKLLQKMDEYIRADNDFRQRREEALRFSEMARGFGGRFYPKHVRSIHNSTQNDDKGSQQQRPQCSSQASGQQQSFSRPPAPRGRGARGFGGRFGDQPRRIFCLFCGENKGHTTRMCHVTIQKQKEIAEAAAQQAQPKQVMHTASYHSPYIPEYVGNHPAVSVASASQPQASWQQPPPPPPLQQGQQPEGSQYAPQQRDFREQSEARTVNSTVPESKHIY

SEQ ID NO: 256263 - protein, 63 aa, Zea mays
  Clone ID: MRT4577_165302C.1.pep
TRNRGRTYHLLSIKNKHLYIYPTHVTLTLEIYTTMFILYLLALNNASNHPYINPIYHTDRPTN

SEQ ID NO: 256264 - protein, 428 aa, Zea mays
  Clone ID: MRT4577_165303C.1.pep
MEMLHQQVQRKKEKMARLAELQRQIDEASEEVRHLAQDEQHRRPQHQDLHQEGFLNEDDWYDNFHHGNFVFDDASPLSAELQATPWPPSYKPPQLPVFDGHSDPKQFLMSYEATVSSYGGNAAVMAKSFVMAVRSVAQTWYSSLRPGTITSWQKLKDLLLTSFQGFHTKPVTAQALFQCTQDHEEYLQAYVRRFLRLRAQAPTVPNEIVIEAMIKGLRPGPSAQYFARKPPQTLEKLLQKMDEYIRADNDFRQRREEAFRFSEMTRGFGGRFYPRHASGQQQGSFRPPAPRGRGARGFGGRFGDQPRRTFCLFCGENKGHTTRMCHVTIQKQKEIAEAAAQQTQPKQVMHTASYHSPYIPEYVGNHPAVSVASASQPQASWQQPPPPPPLQQGQQLEGSQYAPHQRDFREQSEARTVNSTVPESKHIY

SEQ ID NO: 256265 - protein, 464 aa, Zea mays
  Clone ID: MRT4577_165304C.1.pep
MAPKKASATGTAALQPLDHNQETVSLREARSQKRKATSPTPPEDEIDQEIRDMEMLHQQVQRKKEKMARLAELQRQIDEAFEEVRHLAQDEQHRRPQHQDLHQEGFPNEDDWYDNFHHGNFVFDDASPLSAELQATPWPSSYKPPQLPVFDGHSDPKQFLMSYEATVSSYGGNAAVMAKSFVMAVRSVAQTWYSSLRPGTITSWQKLKDLLLTSFQGFQTKPAMIKGLRPGPSAQYFARKPPQTLEKLLQKMDEYIRADNDFRQRREEAFRFSEMTRGFGGRFYPRHVRSIHNSAQNDDRGCQQQRPQCSSQASGQQQGPFRPPAPRGRGARGFGGRFGDQLRRIFCLFCGENKGHTTRMCHVTIQKQKEIAEAAAQQAQPKQVMHTASYHSPYIPEYVGNHPAVSVASASQPQASWQQPPPPPPLQQGQQPEGSQYAPHQRDFREQSEARTVNSTVPESKHIY

SEQ ID NO: 256266 - protein, 84 aa, Zea mays
  Clone ID: MRT4577_165305C.1.pep
TTNPQTLELKTFEQDAVPGDFEVKPNSETCIQACDDAYPTKDRVLLIEHIGMKHSVTTQNLLGRFKKFLGAGENLHYSVHKILV

SEQ ID NO: 256267 - protein, 65 aa, Zea mays
  Clone ID: MRT4577_165306C.1.pep
NQKVDLCFFFFFFFFFFFFFFFFFFFFFFFFFVWGGGKFKPRAKCLLWGQKFHPPKLIIERTPQD

SEQ ID NO: 256268 - protein, 456 aa, Zea mays
  Clone ID: MRT4577_165307C.1.pep
MAPKKASATGAAALQPLDPNQETLSLREARSQKRKAVSPTLQENELDQEIKDMEMLHQQVQRKKEKMARLAELQRQIDEASEEVRHLTQDEQNRRPQHKHLHQEDFFNEDDWYENFHHGNFAFDDASPLSAELQATPWPPSYKPPQLPIFDGHSDPKQFLMSYEATVSSYGGNTAVMAKSFVMAEHEEYLQAYVRRFLRLRAQAPTVPNEIVIEAMIKGLRPGPSAQYFARKPPQTLEKLLQKMDEYIRADNDFRQRREEAFRFSEMTRGFGGRFYPRHVRSIHNSTQNDDKGSQQQRPQGSSQASGQQQSSFRPPAPRGRGARGFGGRFGDQPRRTFCLLCGENKGHTTRMCHVTIQKQKEIAEAAAQQGQPNQIMHTASYHSPYIPEYVGNHPAVSVASASQPQASWQQPPPPPPLQQGQQPEGGQYAQHQRDFREQSEARTVNSTVPESKHIY

SEQ ID NO: 256269 - protein, 505 aa, Zea mays
  unsure (1)..(505): unsure at all Xaa locations
  Clone ID: MRT4577_165308C.1.pep
MAPKKASATRAAVLQPLDPNQETXSLRETRNQKRKAVSPTPQEDELDQEIRDMEMLHQQVQRKKEKMARLAELQRKIDEASEEVRHLTQDEQNRRPQHKDLHQEGFFNEDDSYENFHHGNFAFDDACPLSAELQATPWPSSYKPPQLPMFDGHSDPKQFLMSYEATVSSYGGNTAVMAKSFVMAVRSVAQTWYSSLRPGTITSWQKLKDMLLTSFQGFQTKPVTAQALFQCTQDHEEYLQAYVRRFLRLRAQAPTVPNEIVIEAMIKGLRPGPSAQYFARKPPQTLEKLLQKMDEYIRADNDFRQRREEAFRFSEMTRGFGGRFYPRHVRSIHNSAQNDDKGSQQQRPQCSSQASGQQQSSFRPPAPRGRGARGFGGRFGDQPRRTFCLFCGENKGHTTRMCHFTIQKQKEIAEAATQQGQPKQIMHTASYHSPYIPEYVGNHPAVSVASASQPQASWQQPPPPPPLQQGQQPEGGQYAQHQRDFREQSEARTVNSTVPESKHIY

SEQ ID NO: 256270 - protein, 59 aa, Zea mays
  Clone ID: MRT4577_165309C.1.pep
NTCHPGLRQTMAKLSCFPALLPGKRNKKTRKITDASLFLKINHYSQSKRQNNKSQKKKT

SEQ ID NO: 256271 - protein, 68 aa, Zea mays
  unsure (1)..(68): unsure at all Xaa locations
  Clone ID: MRT4577_16530C.1.pep
GFLXTTLIFHHAGVAATLNTRLCSNRGPSTNLFHLTLVTTAVICCWMMYAIVYLAQMKPLINPILSGE

SEQ ID NO: 256272 - protein, 77 aa, Zea mays
  Clone ID: MRT4577_165310C.1.pep
VTQCSIHRYVTLTPIIGFRQSYNKHSLSVAPAGKSLSSLCMLSSLFQYFHQLVHLLGAVHVMDQVFHSCLVSALVVV

SEQ ID NO: 256273 - protein, 66 aa, Zea mays
  Clone ID: MRT4577_165311C.1.pep
IFLVGAPLLFLGGFLKRLGGHYNYYSRSNILSRKQMEHHTLLHTHHHHHRSLLTDPAQTTNSPSYY

SEQ ID NO: 256274 - protein, 49 aa, Zea mays
  Clone ID: MRT4577_165312C.1.pep
KPADPHLGSISSMKVEVFTHKSSTMTIMNICMLILIYLTTGPEILRPYF

SEQ ID NO: 256275 - protein, 68 aa, Zea mays
  Clone ID: MRT4577_165313C.1.pep
LNKCVVTIRPCSDLPTPNGLCHLRTIWLHYNILDLVQEAISFFGSRLVLASFLKCYYSNDYQVSPWSA

SEQ ID NO: 256276 - protein, 249 aa, Zea mays
  Clone ID: MRT4577_165314C.1.pep
MARRIAVAAAFLALAVVAPAALAQAPGPAATPSGPPNVTAILEKGGQFTMFMRLMKETQQDTQLNSQLNSSYASSGGGYTVFAPTDNAFNNLKPGTLNSLTQQQQVALVQGHVLPQFYSMDSFQTASNPVRTQASGRDGPYTLNITATANNQVNVSSGVAEVTINNALSAVKPLAVYSVDKVLLPLELFGAKAPAAAPAASQGKPKKGGSSDAPSGSAGSDDAAPTGAAGARVVGWSFAGLAAVLGCLL

SEQ ID NO: 256277 - protein, 249 aa, Zea mays
  Clone ID: MRT4577_165315C.1.pep
MAAARTRSLLAAAFLALAAVPAVLCQAPGPAAAAPPNKGPPNVTAILEKGGQYTTFMRLMKSTQQDTQLNGQLNNSFGSGYTVFAPTDSAFSSLKPGTLNKLSQQEQVSLVQYHVLPQFYSLDSFETASNPVRTQASGSDGPYTLNITADSSGQANVSTGLVATRVGQALRAQQPLAVYSVDQVLLANDLFGVKPPASAPPAARKPAKGGSVAEAPAAGSADAPPTGAAGARAVGWSFAGLAAVLGCLL

SEQ ID NO: 256278 - protein, 241 aa, Zea mays
  Clone ID: MRT4577_165316C.1.pep
MAALALAFLALTAVPAVLCQAPGPAAPKGPPNVTAILEKGGQYTTFIRLMKSTQQDTQLNSQLNNSFGSGYTVFAPTDNAFASLKPGTLNKLSQQEQVSLVQFHVLPQFYCLDSFQTASNPVRTQASGRDGPYTLNITATANNQVNVSSGVAEVTINNALSAVKPLAVYSVDKVLLPLELFGAKAPAAAPAASQGKPKKGGSSDAPSGSAGSDDAAPTGAAGARAVGWSFAGLAAVLGCLL

SEQ ID NO: 256279 - protein, 157 aa, Zea mays
  Clone ID: MRT4577_165317C.1.pep
MEDQRKGNYVITSEELEDVMEEAMHILWEFIKADRVETTTTAASVLKGLSSAHVELQDPSDHDLMAHIHSTLQKKEKRLKDLLRTGNCIVKKFKKPKEDRSNQNLFFSQVDMKLVARVLRMPRITSEQLQWCKAKLDKIVLVDRKIHREASFLLFPC

SEQ ID NO: 256280 - protein, 128 aa, Zea mays
  Clone ID: MRT4577_165319C.1.pep
LKNVVHRFVALDTSHPRSAEIYAYLEKLMERLKEMGYTSRTDLVVHDIEEEQRETSLKFHSEKLAIAFGIISTPVGTALRIFKNLRVCEDCHEAIKFITRATDREIVVRDLYRFHHFKDGQCSCEDFW

SEQ ID NO: 256281 - protein, 49 aa, Zea mays
  Clone ID: MRT4577_16531C.1.pep
NIFTNKFPSYNNGSNGISINLSYVCPNTTSQINSFTINFISTLSSSASL

SEQ ID NO: 256282 - protein, 80 aa, Zea mays
  Clone ID: MRT4577_165320C.1.pep
EKQMICCCNMIDASTPKYSMARYDVIVKDVSSYLKKVRLHPDQIAFVPISGFVGYNLIERSTYLCCFKGPTLLAGIDLIT

SEQ ID NO: 256283 - protein, 40 aa, Zea mays
  Clone ID: MRT4577_165321C.1.pep
KPPSSYMIHKVICIRSWRSTPLIHSQFMYALLSSRHHKSI

SEQ ID NO: 256284 - protein, 147 aa, Zea mays
  unsure (1)..(147): unsure at all Xaa locations
  Clone ID: MRT4577_165322C.1.pep
MSTSXEGAPTSXPSLSRRGASFAVVCSGGKKIKVDKPLGLGGGLTVDIDANGRKVGKKGVCQFVDKYGANVGGYSPAYTPEEWAGCGDRCAGGPAGLVMWGGALGELLGGGGALGCGTGGGGAGWGAWGGGRGGGGRWPGSRQGRGG

SEQ ID NO: 256285 - protein, 48 aa, Zea mays
  Clone ID: MRT4577_165323C.1.pep
GRGHGTWSYDPTFVPNQGLRLVFSPGCLISHAISMYQYLLLFVDIRNC

SEQ ID NO: 256286 - protein, 50 aa, Zea mays
  Clone ID: MRT4577_165324C.1.pep
ISKKKKKKKKKKKKKKKKKKKKKKKKKKKKFKKKKKKKKKKNFFPPRGAL

SEQ ID NO: 256287 - protein, 84 aa, Zea mays
  unsure (1)..(84): unsure at all Xaa locations
  Clone ID: MRT4577_165325C.1.pep
VGGVFFVVWVFFLKKRPGLGYIFRIKSYYGGPINIWVXXTGGGQATWMWTHFHEPKDWPQTCRGGLQTEELCFFFSHTHPTQFL

SEQ ID NO: 256288 - protein, 69 aa, Zea mays
  Clone ID: MRT4577_165326C.1.pep
GTYLYRHAFFIYIPLMIMFFNSYSRGYAFMHDELLSPFDSLFLGIISRKRTIKKREREYSMRGHTRFVL

SEQ ID NO: 256289 - protein, 75 aa, Zea mays
  unsure (1)..(75): unsure at all Xaa locations
  Clone ID: MRT4577_165327C.1.pep
LPVSRASPRGFLSMTARGAPAXRIARELYANEGAKTSENFRALSTGEKGVGMSGKPLHYQGSTFHRVIPEFMSQG

SEQ ID NO: 256290 - protein, 329 aa, Zea mays
  Clone ID: MRT4577_165328C.1.pep
STRPPTRPPTRPPTRPPTRPIQGTGKNSLMKGTTIASSYLSDLTTLAVGYMFIFCLVFLYIGSLALLRYARGERFTIGRLYGIATILEAIPSLCRQFFAGMKHLMTMVKVAFLLVIELGVFPLMCGWWLDVCTLKMLGTTIAQRVEFFTVSPLASSSIHWLVGIVYMLQISIFVSLLRGVLRNGVLYFLRDPADPNYNPFRDLIDDPVHKHARRVLLSVAVYGSLIVMLVFLPVKLAMRVAPSIFPLDITIFDPFTEIPVDVLLFQICIPFAIEHFKPRATIKSLLHHWFAVVGWGLGLTDFLLPKPEENGGQENWNGRAERKDRGHGG

SEQ ID NO: 256291 - protein, 100 aa, Zea mays
  Clone ID: MRT4577_165329C.1.pep
MPLPPLLPRLYPTPPPLRGGDRGNAVPLSPGRRRPALLAVVRAKRKDEASFTDRILDYIEGGPKLRRWYGAPDLLPKDGAAEDEEDESQDGDISTNSEKG

SEQ ID NO: 256292 - protein, 102 aa, Zea mays
  Clone ID: MRT4577_16532C.1.pep
FNNVMLLAAPPVRPQSIANRYWLAPGGLARGRNCQSRFVEQRAQDALILIAGSITISPRASWGGPALNKTLVIPKRCNSPEGPLEVTHVKPDGKACGPRLTV

SEQ ID NO: 256293 - protein, 176 aa, Zea mays
  Clone ID: MRT4577_165330C.1.pep
QIDIEESRDAVLVTNGDSEIGQMVILALILKRARTKALVKDKRTTEEAFGTYVECMVGDIGDKSFTKRALRGVRAIICPADDGFFSEPIDLKGVQHIVLLSQLAVYRNSGGLQAIMNSKLKTLAEKDEEVVLASGIPCTIIRTGSLQSTPGGERGHSKQGKNKQRGCCYNMCGSSE

SEQ ID NO: 256294 - protein, 107 aa, Zea mays
  unsure (1)..(107): unsure at all Xaa locations
  Clone ID: MRT4577_165331C.1.pep
MDSEASMFDHIELMLLDESVEPSDMPLSFVGGVTNNFSEDQTIGXRGGFAVVYKGLLRNGLSVAVKKFYDTIELSDEMYRKEVQSMMRLKHANIVRYYGYCADTQCK

SEQ ID NO: 256295 - protein, 43 aa, Zea mays
  Clone ID: MRT4577_165332C.1.pep
AWETRVTLNGAPQHRLLPTQSGRVLFYIHAWKHPGLVAGPVEP

SEQ ID NO: 256296 - protein, 126 aa, Zea mays
  Clone ID: MRT4577_165333C.1.pep
QKRRGAFSFPPGRPLVCHPRGTGLHKSSTPRGKNNPPNGGGFLEGAPPFFNQTNCRAKKNQKLGNLGPRFRFIKIKYFGSPRGPLIGGTFFFWCPPPGSGPLKKYLGPLLLGTPPFKTVTPFFFLG

SEQ ID NO: 256297 - protein, 43 aa, Zea mays
  Clone ID: MRT4577_165334C.1.pep
AIPNPLLDRMEIIAIAGYITDRGGRSVCRSYFTHLTVNFPHAS

SEQ ID NO: 256298 - protein, 83 aa, Zea mays
  Clone ID: MRT4577_165335C.1.pep
SACAKKGPRPASYSSCKRCFNVHKGRKDRARHGVKRLVCVFWLGGGGRGKRVPGAPCGCDNRGVALGDFLLIQKKKGMGWGGQ

SEQ ID NO: 256299 - protein, 68 aa, Zea mays
  Clone ID: MRT4577_165336C.1.pep
LVRWTGWRSGTLTRGRGRWRRRAWNRCFWRMSWTRIPRSRSRAKDSACHSPRQVQRQVCNADDVEPFS

SEQ ID NO: 256300 - protein, 96 aa, Zea mays
  unsure (1)..(96): unsure at all Xaa locations
  Clone ID: MRT4577_165337C.1.pep
EKLQGMMGQSEEAALYYKKDLERMQVEXSQGQNFVEALLFLAKHYKSIGRFEDAEHYCTRLLDYTGPEKETAKNMLQGIKRLQSGFPSMDIDHFAL

SEQ ID NO: 256301 - protein, 106 aa, Zea mays
  Clone ID: MRT4577_165338C.1.pep
SPPGASIFAPLAKPTCGAQAVTLKGLFPVSLLKIAPPLGPNKNPPSPRELTGFLMRVARLFSPLGTGRFPPGNWSVCAPPLGSPGFPFRPPGFYVLCFCDRMSVSL

SEQ ID NO: 256302 - protein, 43 aa, Zea mays
  Clone ID: MRT4577_165339C.1.pep
PTRPRTRVLKYGCGHEWWVCLLLTFLGYIPGIIYAFYAITKNN

SEQ ID NO: 256303 - protein, 69 aa, Zea mays
  Clone ID: MRT4577_16533C.1.pep
MGFWVTTLIFLLAGVAASLFTLLCCNRGPSTNLFHLTLVTTAVICCWMMYAIVYLAQMKPLINPILSGE

SEQ ID NO: 256304 - protein, 181 aa, Zea mays
  unsure (1)..(181): unsure at all Xaa locations
  Clone ID: MRT4577_165340C.1.pep
KTLLLLSSHLTIHWTPSKIARRTWGSPRLASDGDKPTDYATEPEPTVTAHSGLDNYDYMIALLSLCPHFGILLCYTMXRADVSESPTYLHLMKHGALEGLKDIWPMPTVVAWKIISXFGLFEAGLQLLLTGKXIRGXISSAGNVPVYMANGIQAYVATLITYXLGCRWXGTFXPAIVYDHL

SEQ ID NO: 256305 - protein, 57 aa, Zea mays
  Clone ID: MRT4577_165341C.1.pep
YLSQISDWQWANYKDWLLQKRAIQIKMRYWKKMKVAKRQIFGLYIKQPNTSLFMQQP

SEQ ID NO: 256306 - protein, 152 aa, Zea mays
  Clone ID: MRT4577_165342C.1.pep
KKPHYLLYIWQGSQASQDEIRASAYQAVILDQEYNNEPVQIRVPMGKEPPHLMSIFKGCMVVYQGGTSRANSVEPVPSTRLFQVRGTSANNTKAFEVSPRAASLNSNDVFILKTQSCCYLWCGKGCSGDEREMAKMGADTVSRTEKQVVVEG

SEQ ID NO: 256307 - protein, 52 aa, Zea mays
  Clone ID: MRT4577_165343C.1.pep
LVHISFWFWFLGQATNPCWAQIQTGSLFVGAGDLTLAAYWPWFYLNPWIAPP

SEQ ID NO: 256308 - protein, 63 aa, Zea mays
  Clone ID: MRT4577_165344C.1.pep
NAEASFHAESAWASAYLTLATSQWPASTNIFGMCSHGLAHPVSPSRCGTATHCFVVPLGRCRL

SEQ ID NO: 256309 - protein, 204 aa, Zea mays
  unsure (1)..(204): unsure at all Xaa locations
  Clone ID: MRT4577_165345C.1.pep
MASEHAQLSAKAAGGSRFAVTYGLLRQYMKEQXQRRHQVPXPAVGVGLMPEADAAAAAAEATEERTTVLELFPQQAGTLKDEQQRKRKERADGRAPLTIFYGGKMVVFDDFPAEKAEELMQLAGSGXTPPRTXAGQPSLTDMPLARKVSLKRFLEKRKNRLTAADPYPAAAAAAAAASESSTKPPAVKDEGAPWVGVNSALSLS

SEQ ID NO: 256310 - protein, 157 aa, Zea mays
  Clone ID: MRT4577_165346C.1.pep
MASEHAQLSAKAAGGSRFAVTYGLLRQYMKEQGGSGATRCLAPAVGVGLMPEADAAAAAAEATEERTTVLELFPQQAGTLKDEQQRCVNSPLPSVSASPCACELLIADLRRRPLRKRKERADGRAPLTIFYGGKMVVFDDFPAEKAEELMQLAGSGN

SEQ ID NO: 256311 - protein, 46 aa, Zea mays
  Clone ID: MRT4577_165347C.1.pep
WSGWEPIQVKGLGCVWTPGQNCLKDLKEKRTLFELGIIKGHPCCYC

SEQ ID NO: 256312 - protein, 251 aa, Zea mays
  Clone ID: MRT4577_165348C.1.pep
ARPPPPRVERDMEENRNLPQEAFDTVELAKAAVESKCPGIVSCADVLALAARDYVQLVGGPYYAVKKGRKDSKVSLAGKVRGSLPRANSTVDELLRVFAGKGLGAADLVALSGAHTVGFAHCVHVLGRIYDFRGTRRPDPVMDARLVKALRMSCPSSGGSARVVVPFDVSTPFQFDHAYYANLQARLGLLASDQALFLDARTRPLVQDLAANKTRFFQAFVASMDRMGSIRIKKGRKGEVRKVCSQHLFSA

SEQ ID NO: 256313 - protein, 49 aa, Zea mays
  Clone ID: MRT4577_165349C.1.pep
VSHVQSVVLMERDTGHPNLLAHNLLTAGKGTDLVIRGDVVLNTLSARST

SEQ ID NO: 256314 - protein, 83 aa, Zea mays
  Clone ID: MRT4577_16534C.1.pep
KGNFCWMCPRQRILFPPPPVRVAKSPYMGGDPKSSSKKKPQVLYRGFFPPKAPPEYFFGPPDAPYLNILPPKKKRGGEKEKKN

SEQ ID NO: 256315 - protein, 158 aa, Zea mays
  Clone ID: MRT4577_165350C.1.pep
EGVGIPEDAYDPVSTIYTKIISLAKEFKEGKMPSEDDVAEWNGQEWELYLENLPKSCEPSQVMALDKRYRLAESKDYEVKVSFLQLAVTSKCREYHGEVKKTLKEVGRMKYLRPLFTALAQSGGTEEKQLAKQVFAEARETYHPIAQGVVESILSKYI

SEQ ID NO: 256316 - protein, 120 aa, Zea mays
  Clone ID: MRT4577_165351C.1.pep
RPGLRVRGDRHRRPTQQCRDSLSLPLPGHLSLTSLPLGSWCLHLLLLLALRSLTFQLWFSYGNMLFFTRRRRVVKDGVDFRQIDAEWDWDNMVILQTLVAAVAMGSAAFPAVSELFVCDP

SEQ ID NO: 256317 - protein, 54 aa, Zea mays
  Clone ID: MRT4577_165352C.1.pep
CSCTRVNFYFQFRHLPLFVCAAPEFFKRTFPVCGSSQIMSDSNIYGPLRPFRIR

SEQ ID NO: 256318 - protein, 108 aa, Zea mays
  Clone ID: MRT4577_165353C.1.pep
NTQFFRYRIRVILYTGRIRILPGYTSDTGRIQDDHYPANTREVRVGYRYPVSGYPVQFLRAQGCNLNKYYPTSDTKYPIHFSNTSESEHDSINIRSNFIYIFLKYDLV

SEQ ID NO: 256319 - protein, 270 aa, Zea mays
  unsure (1)..(270): unsure at all Xaa locations
  Clone ID: MRT4577_165354C.1.pep
MGAPLASWPWASLGSYKYLLYGPLVAKVAHAWRETGSLPLGSWCLHLLLLLALRSLTFQLWFSYGNMLFFTRRRRVVKDGVDFRQIDAEWDWDNMVILQTLVAAVAMGSAAFPAVSELRAWDXRGWALALLLHVAVSEPAFYWAHRALHRGPLFSQYHARHHSSPVTQPVTAXGFGTPLEALLLTLVVAPIIGFRRDCTYGKLAAMRLPKDVQGLSSCEYTMERGVVHACHAGGVVHFLEGWGHHEVGAIDVDRIDVVWKAALKHGLAPV

SEQ ID NO: 256320 - protein, 623 aa, Zea mays
  unsure (1)..(623): unsure at all Xaa locations
  Clone ID: MRT4577_165355C.1.pep
MGAPLASWPWASLGSYKYLLYGPLVAKVAHAWRETGSLPLGSWWDHVLLDLALRPLPVQHYLSYHNVVFFPGCARAVKDDVGSLQYDAEWEWDNLGNVPTSVAEEXRATGHLLTSTGEXIGLWQLXRMFCYTEQVHTXISYWIPTALHRGPPYREYHARHHSSPVTQPFTAGFGTPLEALLLTLAMGAPLAGXLPGGRRVREXLVYGHVXSSSTXPVHGVQQRGGHLAQXFAAFPPLRYLVYTATYLSLHHREKDCNFCLFMPLYDALGGTLSSRSWGLQREVDQGMNDRVPDFVFLAHVVDVVSSMHVPFAFRSCSSLPWAMRPVLLPLWPVAFAFMLLQWFFSKSFTVSLSLLRGRRHRKWSVPKYSXWYFIPSVIXGINHQQALAIDSTAKLGXRSVNLAALNKTEVLNGGGTLFANKHPTLRLRVVHGKTLTASVILHEIPSSVREVFLTGATSKLGRAIALYLCRKRIRVLMXMTLSTERFLKNQREAPPEFQQYIVQVTKYQAAQGCKTWIVGKWLSPREQRWAPPGTHFHQFVVPPIIGFRRDCTYGKLAAMRLPKDVEGLGSCEYTMERGVVHACHAGGVVHCLEGWEHHEVGALEVDRIDVVWEAALKHGLTPA

SEQ ID NO: 256321 - protein, 219 aa, Zea mays
  Clone ID: MRT4577_165356C.1.pep
MSPTLPPSSRCLLCPHHRRRIVLYLGCDGNTLTAAVILNEIPSNVREVFLTGATSKLGRAIALYLCRKKIRVLMFTVSSERFVKIQREAPPEYQQYLVQVTKYQAAQNCKTWIVGKWLSPREQRWAPSGTHFHQFVVPPIIGFRRDCTYGKLAAMRLPKDVQGLSSCEYTMERGVVHACHAGGVVHFLEGWGHHEVGAIDVDRIDVVWKAALKHGLAPV

SEQ ID NO: 256322 - protein, 185 aa, Zea mays
  Clone ID: MRT4577_165357C.1.pep
GLPSTAAATAQPPFYCRRNLPSSSPIRPSPATRRTTSSEARGRDGPVPDGGAATERVNHRRERDPHHRAGPHLQLCLLRYLPPPGAWACPHHRRRIVLYLGCAVLFESRPCRFEEIPSNVREVFLTGPTSKFGRAIAVYLCRNHLAVLSSRLSPAGARRAAQRQHGHTSSARILPLLLCYWSLYC

SEQ ID NO: 256323 - protein, 624 aa, Zea mays
  unsure (1)..(624): unsure at all Xaa locations
  Clone ID: MRT4577_165358C.1.pep
MAPPPLSSWPWASLGQYKYVLLGPLVWKVLQEWREQAGLPLGSWWLHLLLLFAARGLTYQFWFSYGNMLFFTRRRRVVADGVDFRQIDAEWDWDNFLVLQTLIGATVVNSPLLPGLRQLCLWDPRGWAVALLLHVGFSEPVFYLAHRALHRAPLFARYHAAHHSSGVTQPLTAGFGTPLEVLLLTLVMXPAGRGLPGGGRLHXLVYVHXSPSTTXRHGLQQRGGRVAQXFEAFPLLRYILYTPSYLSLHHRERCRNFCLFMPALDLAGGTLDERAWALQRXVRRGAGRRXLGTPEFVFLAHVVDMMSSMHVPFALRSLSSTPFANHFILLPFWPVAFGFMLLMWCCSKTFVVSFYYLRGHLHQTWSVPRYGFQYFLPAAKKGINQQIELAILRADRMGVKVLSLAALNKNEALNGGGTLFVNKHPDLRVRVVHGNTLTAAVILNEIPSNVREVFLTGATSKLGRAIALYLCRKKIRVLMFTVSSERFVKIQREAPPEYQQYLVQVTKYQAAQNCKTWIVGKWLSPREQRWAPSGTHFHQFVVPPIIGFRRDCTYGKLAAMRLPKDVQGLSSCEYTMERGVVHACHAGGVVHFLEGWGHHEVGAIDVDRIDVVWKAALKHGLAPV

SEQ ID NO: 256324 - protein, 373 aa, Zea mays
  Clone ID: MRT4577_165359C.1.pep
MNRQKLQSFSLFMPLYDALGGTISSRSWGLQREVDQGMNDRVPDFVFLAHVVDVVSSMHVPFAFRSCSSLPWAMRSVLLPLWPVAFAFMLLQWFFSKTFTVSFYFLRGRLHQTWSVPRYGFQYFIPSAKKGINRQIELAILRADKMGVKVISLAALNKNEALNGGGTLFVNKHPNLRVRVVHGNTLTAAVILNEIPSSVREVFLTGATSKLGRAIALYLCRKRIRVLMLTLSTERFLKIQREAPPEFQQYIVQVTKYQAAQGCKTWIVGKWLSPREQRWAPPGTHFHQFVVPPIIGFRRDCTYGKLAAMRLPKDVEGLGSCEYTMERGVVHACHAGGVVHCLEGWEHHEVGALEVDRIDVVWEAALKHGLTPA

SEQ ID NO: 256325 - protein, 126 aa, Zea mays
  Clone ID: MRT4577_16535C.1.pep
GGGGGFKKNFFFFFFFFFFFFFFFFFFFFFWTRRRTPFLLLAKKKTKGFKGGAHSQPKKTGKTPKQKRGQAKPLGKTKKNRGPYQAKCQPKSLKFYIKKVPNHTKKQTGAKKNEFLTKLTPGEQSR

SEQ ID NO: 256326 - protein, 74 aa, Zea mays
  unsure (1)..(74): unsure at all Xaa locations
  Clone ID: MRT4577_165360C.1.pep
YLLALIVLDASATNAWIITQCSLAPRSIITQILPPTTXMGCEHPDVQAYTLQQAIAASGLLQPISXVQQLSLAH

SEQ ID NO: 256327 - protein, 97 aa, Zea mays
  unsure (1)..(97): unsure at all Xaa locations
  Clone ID: MRT4577_165361C.1.pep
AKGHLDEGNRQYYFEKSLDTDLVSDRCFDLQLVGDSQREELPKLPPVRLKSXSKLVNMNWEDKINHHGSGAKQSSADHAFMIGSYLDVPIGQEITSS

SEQ ID NO: 256328 - protein, 50 aa, Zea mays
  Clone ID: MRT4577_165362C.1.pep
LVKAVSSRSSILSPILFSILNFIISIVLCPIFYTTYWRQSKDCLFELELF

SEQ ID NO: 256329 - protein, 100 aa, Zea mays
  unsure (1)..(100): unsure at all Xaa locations
  Clone ID: MRT4577_165363C.1.pep
NTDTYNYYRTHNNPPATVGGIFCFLMLLALSASAATTHTIRQCXQPPIASFHLPYLLAVAPSVYEQPIVHLYTIEQVMAAGHLPSSXLXLQQPYVLLQPL

SEQ ID NO: 256330 - protein, 82 aa, Zea mays
  Clone ID: MRT4577_165364C.1.pep
LTHLVRPFNHTINFSFREALSTLTQEICPVDELFWLYRENSELWVSQPVFKGLPQEGLLASVICSCLFLDPVSSISSGPCHR

SEQ ID NO: 256331 - protein, 84 aa, Zea mays
  Clone ID: MRT4577_165365C.1.pep
MPRHIFFLGPPKSNSLAAFLQRKNWKNPGVPQFNPLAENPLFPNWGKTKKAPPDRLSKNFHTLNGKWDPPFNGPLSPGGLGVTP

SEQ ID NO: 256332 - protein, 109 aa, Zea mays
  unsure (1)..(109): unsure at all Xaa locations
  Clone ID: MRT4577_165366C.1.pep
MAPXKDKAPPPSTKPTKPGAAXSRYEQLKYRLDKRKCSSLRCMLQHATYDIMVSEVPKYKQITPSILSERLRIDASLARRNIKDLMERALIRMLSLHSRHEIYSRATDT

SEQ ID NO: 256333 - protein, 618 aa, Zea mays
  Clone ID: MRT4577_165367C.1.pep
MQQRARDGEQHRLLDLAVESGFDRDLAASCLARLLEVYGEDGLDMVTVDNCGNDFLASLADATQPTDDWDDLKGIETEACGNLNDMMMKNVPDCNGGVAIDISYTSREPNLSSQRAPNHLEAFKFASDDSDFEMDNLPDKSSSMQRQTQSRNSGMQTRSSAKSTVTRETSRYDPTTPTSNREMPPAAFHQRRELLSYEQLCCLDDVNFANAVIFGNKSFRPLQYEACRAAMDNQDCFVLMPTGGGKSLCYQLPATLHPGVTVVVSPLLSLIQDQIVALTYRFAVPAAFLNSQQTSAQASAVIQELRCGKPAFKLLYVTPERIVTNYSFMETLRGLDQRGLLARFVIDEAHCVSQWGHDFRPDYRGLGCLKQNFPRVPIMALTATATESVRKDVLGALRIPNAVVLKRSFDRLNLNYEVIGKTKTFQKQLGDLLKERFMNESGIVYCLSKNECADTAKFLREKYKIKCAHYHASLAARQRTSVQEKWHSGEVKVICATIAFGMGIDKPDVRFVIHNTLSKSIESYYQESGRAGRDELPAHCIVLYQKKDFSRIVCMLRNGENFRSESFRVAMEQAKKMQAYCELKTECRRQALLQHFGEQYDRRRCRDGPSPCDNCLKT

SEQ ID NO: 256334 - protein, 89 aa, Zea mays
  Clone ID: MRT4577_165368C.1.pep
REGQRLCRTCMEEIDGAERQPNRGYMDRRWILYAMMTRRLLQPETRWRGLDIGEHSHAVKGVARVRSGCDGHGDGGVALSSGVSWASPA

SEQ ID NO: 256335 - protein, 85 aa, Zea mays
  Clone ID: MRT4577_165369C.1.pep
YRPFMAFCCVSCEVLYIILFLFADEKSTSLLSACKGLLNQSPIIILVFISPLVGWAVKQVTNVIQMKTAADACVVYDLKRSKRKA

SEQ ID NO: 256336 - protein, 36 aa, Zea mays
  Clone ID: MRT4577_16536C.1.pep
RLVWMNSDINMISFFSGKSYFSMNPTPLIYIFLASD

SEQ ID NO: 256337 - protein, 121 aa, Zea mays
  Clone ID: MRT4577_165370C.1.pep
LPQPPCRVDSIPSAGLGRLNSMDTSGEQSDVDASVPRLTKMPYPLCSASNGKVAHVVSYTNAPHTTISAPHRSKPSSDSSISMCSDIAANDNTVTPAQTHSKQNMALSTQRTIPSGTDTPE

SEQ ID NO: 256338 - protein, 84 aa, Zea mays
  Clone ID: MRT4577_165371C.1.pep
RSRTGSRTCLRHGPRPLPCPRKEEYKVGPNGALRRRETPVPEKVDGVVARQQLAVVVGECDDRRAHEEQIPRCERAALIAAPPP

SEQ ID NO: 256339 - protein, 211 aa, Zea mays
  unsure (1)..(211): unsure at all Xaa locations
  Clone ID: MRT4577_165372C.1.pep
ISDEGLVYISXKXCXKLVELDLYRCSAVTDDGLAAVASGCKKMRMLNLCYCTQITDGGLKHVGGLEELANLELRCLVRVTGVGITSIAVGCSSLVELDLKRCYSVDDAGLWALSCVSQNLRQLTVSYCQVTGLGLCHLLGSLRCLQDVKMVHLSWVSIEGFEMALRAACGRLKKLKLLGGLRSVLSTELLLTLQACGCRVRWVDKPLVYKG

SEQ ID NO: 256340 - protein, 222 aa, Zea mays
  Clone ID: MRT4577_165373C.1.pep
IYRYRMRTFTLLSSYVCMHDGDLIDLLCLAYPYLGVPPSASRRSPCLHRGETQSGGVLLPLRQPLQPNVPRPVLPLAPRDNSPAKSPVTTHATQPECPPTEIAYKRTAELRGDTLFAEALLFRSSAVNTMNCSPLKAARSKDAIDLRTNRRSIETIRLEYLLKRSVIHVKIILAIWSRLSGSWAACQLYGIADERYHYISSRCILVYHINHRRLIEDAHLFF

SEQ ID NO: 256341 - protein, 120 aa, Zea mays
  Clone ID: MRT4577_165374C.1.pep
RKNCFKGSRFETSRQIGFQQDPPEGSGKLFSLLGVKRKMKVWITCSMAWTPRVLGARRQVNMMKNLVKWLPSQALESCSFHCLLVAVFLVNVNAYYFGYSRQVFLRCMFVRVFLCLERSE

SEQ ID NO: 256342 - protein, 49 aa, Zea mays
  unsure (1)..(49): unsure at all Xaa locations
  Clone ID: MRT4577_165375C.1.pep
XCRGAQLFSAYVGLXTCXLAFSYGLAVTRXSRFGYXXPGPPCSIELRNR

SEQ ID NO: 256343 - protein, 54 aa, Zea mays
  Clone ID: MRT4577_165376C.1.pep
GIFSLWWGTQTRGANSIYNICFSVGGLKKYIDTKSYPESTKSKSFLQHIKKCFL

SEQ ID NO: 256344 - protein, 64 aa, Zea mays
  Clone ID: MRT4577_165377C.1.pep
LFSEITLVNVHLYLFPNYKTDTLPIGAKPQWRHYMTTDRGLYLITRPLLIGPLDTRPSTLASSI

SEQ ID NO: 256345 - protein, 134 aa, Zea mays
  unsure (1)..(134): unsure at all Xaa locations
  Clone ID: MRT4577_165378C.1.pep
VRPMXIRGPRSAGLSSDPFLDGESLIPLRLRLNSALILKLTVSGALQREPLPTAAPRASTMGGVPLLNLRTRTTNLIKTNKPYRTSSNQLLPMLPATRTLGRPRRIKLLPSPWLQSMLMHPRNESSNSNRMKEM

SEQ ID NO: 256346 - protein, 109 aa, Zea mays
  Clone ID: MRT4577_165379C.1.pep
DGRASIFVSVTLLLSRCRMAVLRPGCSCDAVGLGDEAENRRVHLVGRPAAAAAGRPGEVGGGASRRRRRARRRVVQVPSPILETTHDAPLDYKCKSSSKTLAKKFSDTY

SEQ ID NO: 256347 - protein, 116 aa, Zea mays
  Clone ID: MRT4577_16537C.1.pep
PAPESRPSFYSPIIHPPQKPFMPFPTNSNNAPKHHGFLSQFILKPVPPFILKFPFVPNLSKKNLRPFLLKKPFKRVLFKIFGSKTSPNKTFYFKNFSKSLSTSIPQFVGSQNFFYK

SEQ ID NO: 256348 - protein, 77 aa, Zea mays
  unsure (1)..(77): unsure at all Xaa locations
  Clone ID: MRT4577_165380C.1.pep
GRVGAYCTKKSIARPSTGGLMASLCICKHRALMLXAGGLLSKLSTASASAGTYCLPGRAMPYIPIARCPLCVTSRTC

SEQ ID NO: 256349 - protein, 99 aa, Zea mays
  Clone ID: MRT4577_165381C.1.pep
ILQRSSSDSLTLYKGHHSLLSTHGFEEKYQEALAKGDVTAQIALQPALKFNGGGHINHSIFWTNLSPNGGGEPRGELLEAIKRDFGSFVKFKEKLTAAS

SEQ ID NO: 256350 - protein, 80 aa, Zea mays
  unsure (1)..(80): unsure at all Xaa locations
  Clone ID: MRT4577_165382C.1.pep
RVQPIATPGLSAHLIKKVMPVVFIRQSKPRRLMDWVYMFFXDNAXVIVNAKGEMKGSAITGPIVYECADLWPRIASASYA

SEQ ID NO: 256351 - protein, 108 aa, Zea mays
  unsure (1)..(108): unsure at all Xaa locations
  Clone ID: MRT4577_165383C.1.pep
VRRSRLXGSGPLRVWRAEHTETTCRRRLTASSSRDQGGRGRDDDPAHGVRLQTGTNVTDKALRRHRRRTKIGLRGSKIGRMPRSNRTAEVHFRSTSRRATTDWASTGW

SEQ ID NO: 256352 - protein, 252 aa, Zea mays
  unsure (1)..(252): unsure at all Xaa locations
  Clone ID: MRT4577_165384C.1.pep
YGNTRLYVGRLSPRTRSRDLEYLFSKYGRXFGVFTQPWRCGGRVPLMELVAIVPMFVEDFGEGRPXIREVELKRDYAFIEFSDPRDADDAQYNLYGRDVDGSRIIVEFAKGVPRGSGGSRDYNGRGPSPGTGRCFNCGVDGHWARDCQAGDWKNKCYRCGERGHIERNCQNSPRNLRRERSYSRSLSPRRGRGRSRSYSRSRSYSRSRSPSGSPRGGRRDRDERRSRSLIYSRSASPRRSVSPVKEKERNRT

SEQ ID NO: 256353 - protein, 263 aa, Zea mays
  Clone ID: MRT4577_165385C.1.pep
MMKLQVNVFEYFDSRQLIVCGNHFRRIREVELKRDYAFIEFSDPRDADDAQYNLDGRDVDGSRIIVEFAKGVPRGSGGSRDYNGRGPPPGTGRCFNCGVDGHWARDCQAGDWKNKCYRCGERGHIERNCQNSPRNLRRERSYSRSPSRSLSYSRSASPRRSVSPVKEKERSRTPDGSRSPSPRDKVSPPPKDNGAHNGSDREDSPGGREMSKRSRSSSDGYRSPVGNGRSPSRSPSPKVNNGDDPSPRATMVTTQAPRATMVM

SEQ ID NO: 256354 - protein, 100 aa, Zea mays
  Clone ID: MRT4577_165386C.1.pep
FFKKKKKKRNKRNKKKKKKKKKKKGGPFLRIQSFLPRPANVKFFFWGPQIKINGPCFKNLGLGKTWGYPNKMPVKKIPFSQGGKKKKGPYQFPFPKIGPS

SEQ ID NO: 256355 - protein, 219 aa, Zea mays
  Clone ID: MRT4577_165387C.1.pep
VLDSCQQLTVCGNYLRRIREVELKRDWKNKCYRCGESGHIERNCQNSPRNLRRDKSYSRSPSPRGGRGRSRSYSRSRSYSRSRSPSGSPRGGRRERDERRSRSLSYSRSASPRRSVSPAKEKERSRTPNGSRSPRSPSPRAEVSPPLKDNGARNGSDHEGNPGGGENSKRSRSPSDGYRSPVANGRSPSPRDDRSPSPKGNNEDDERRGSPRGSQSPLN

SEQ ID NO: 256356 - protein, 208 aa, Zea mays
  unsure (1)..(208): unsure at all Xaa locations
  Clone ID: MRT4577_165388C.1.pep
MPRNDDRYGNTRLYVGRLSPRTRSRDLEYLFSKYGRXRFFTQPWRCGGRVPLMELVAIVPIIREVELKRDYAFIEFSDPRDADDAQYNLDGRDVDGSRIIVEFAKGVPRGSGGSRDYNGRGPPPGTGRCFNCGVDGHWARDCQAGDWKNKCYRCGERXHIERNCQNSPRNLRRERSYSRSPSPRRGRGRSRSYSRSRSYSRSRSPSIS

SEQ ID NO: 256357 - protein, 95 aa, Zea mays
  unsure (1)..(95): unsure at all Xaa locations
  Clone ID: MRT4577_165389C.1.pep
KKKIKTPNPFGIGGGLPVDVXPHGKKGKGKGVSQFFHKFGANVSGYSPFFNGDGCFPPGEVFVGGTPGFFIWAVPPLGILGGGALFVLNTRALSG

SEQ ID NO: 256358 - protein, 95 aa, Zea mays
  Clone ID: MRT4577_16538C.1.pep
GRRPGHGRRLRHPLVRGQAPRPRRGEGAGGRTGAREPQTQLHRSPWAPRGTPWEAATAAGRPPPRGRRSSSCRRGPCCGSRRSVLRVPSSQPPGL

SEQ ID NO: 256359 - protein, 69 aa, Zea mays
  unsure (1)..(69): unsure at all Xaa locations
  Clone ID: MRT4577_165390C.1.pep
VAGCGGYARRLQGSRRLWVVADGDVVLVVVAATASGCRVAVISWHKQEEXEERKKIDPFSKGGARSLPV

SEQ ID NO: 256360 - protein, 309 aa, Zea mays
  Clone ID: MRT4577_165391C.1.pep
MMKLQVNVFEYFDSRQLIVCGNHFRRIREVELKRDYAFIEFSDPRDADDAQYNLDGREVDGSRIIVEFAKGVPRGSGGSRDYNGRGPPPGTGRCFNCGVDGHWARDCQAGDWKNKCYRCGERGHIERNCQNSPRNLRRERSYSRSPSPRRGRGRSRSYSRSRSYSRSRSPSGSPRGERRDRDERRSRSLSYSRSASPRRSVSPAKEKERSRTPDGSRSPSPRDKVSPPPKDNGAHNGSDREDSPGGREMSKRSRSPSDGYRSPVGNGRSPSPRDDRSPSPKVNNGDDPSPKGNNGDDEHRGSPRGSQSP

SEQ ID NO: 256361 - protein, 312 aa, Zea mays
  Clone ID: MRT4577_165392C.1.pep
MPRYDDRHGNTRLYVGRLAPRTRSRDLEYLFSKYGRIREVELKRDYAFIQEFSDPRDADDAQYNLDGREVDGSRIIVEFAKGVPRGSGGSREYMGRGPPPGTGRCFNCGMDGHWARDCKAGDWKNKCYRCGESGHIERNCQNSPRNLRREKSYSRSPSPRGGRGRSRSYSRSRSYSRSRSPSGSPRGGRRERDERRSRSLSYSRSASPRRSVSPAKEKERSRTPNGSRSPSPRAEVSPPLKDNGARNGSDHEGSPGGGENSKRSRSPSDGYRSPVANGRSPSPRDDRSPSPKGNNEDDERPGSPRGSQSPLN

SEQ ID NO: 256362 - protein, 175 aa, Zea mays
  Clone ID: MRT4577_165393C.1.pep
VLDSCQQLTVCGNYLRRIREVELKRDYAFIEFSDPRDADDAQYNLDGREVDGSRIIVEFAKGVPRGSGGSREYMGRGPPPGTGRCFNCGMDGHWARDCKAGDWKNKCYRCGESGHIERNCQNSPRNLRREKSYSRSPSPRGGRGRSRSYSRSRSYRYAEERKPLVLILYRLFRVC

SEQ ID NO: 256363 - protein, 316 aa, Zea mays
  Clone ID: MRT4577_165394C.1.pep
MMKLQVNVFEYFDSRQLIVCGNHFRRIREVELKRDYAFIEFSDPRDADDAQYNLDGRDVDGSRIIVEFAKGVPRGSGGSRDYNGRGPPPGTGRCFNCGVDGHWARDCQAGDWKNKCYRCGERGHIERNCQNSPRNLRRERSYSRSPSPRRGRGRSRSYSRSRSYSRSRSPSGSPRGGRRDRDERRSRSLSYSRSASPRRSVSPVKEKERSRTPDGSRSPSPRDKVSPPPKDNGAHNGSDREDSPGGREMSKRSRSPSDGYRSPVGNGRSPSRSPSPKVNNGDDPSPKGNNGDDPSPKGNNGDDDEHRGSPRGSQSP

SEQ ID NO: 256364 - protein, 53 aa, Zea mays
  Clone ID: MRT4577_165395C.1.pep
LPVVFDRLTWETPAVPHLNRLADHPLFAGWRISERARTDRLSNQLPSLIGDWA

SEQ ID NO: 256365 - protein, 134 aa, Zea mays
  unsure (1)..(134): unsure at all Xaa locations
  Clone ID: MRT4577_165396C.1.pep
PRPSRGFGXGGGGGGGKQQKHGAGAPGKAPKQGKASGNGHGQGGHGGGGXGGHGGGGGNGHGQKQAXXHGGGGQGGHGGGGKPXKKKHKDDDDRDDDDDDRDEPARRHAHAHGHGHGHGHRHDGKPKKRRTTNT

SEQ ID NO: 256366 - protein, 331 aa, Zea mays
  unsure (1)..(331): unsure at all Xaa locations
  Clone ID: MRT4577_165397C.1.pep
MDPWVSSQPSLSLDLHVGLPPMGHPHSHHQAAPMVALAKPKILVEENFMQLKKDPEVAVLESELQRVSEENRRLGEMLREVASKYETLQGQFTDMVTAGAHAGGNNHYNNQPSSASEGGSVSPSRKRKSEESNGTPPPSHQQQQQHYAGGLAYAAAPDQAECTSGEPCKRIRXEERKPVISKRYVHADPSDLSLVVKDGYQWRKYGQKVTKDNPCPRAYFRCSLAPSCPVKKKVQRSADDSAVLVATYEGEHNHARPPQHDGAAKRSSAPPAGEAARPPAPLPLQKQEAGPSSEVARKNLAEHMAVTLTRDPGFKAALVSALSGRIFDKGL

SEQ ID NO: 256367 - protein, 112 aa, Zea mays
  Clone ID: MRT4577_165398C.1.pep
KKKKKRGNYYKKNRASILKEPYIIYPNLPRRSCCSCFLSFTSSAVVFLLRHLKPLGCPPFTPLALLNPFASSPFFALGLLLLFPSPLFFALFGPLLSPLFYRCFSLLAIFTL

SEQ ID NO: 256368 - protein, 71 aa, Zea mays
  Clone ID: MRT4577_165399C.1.pep
SRTIFLTCMPSRLLPIRVPILAKPTAFRFVKHMSSYTDKKLILKRLELIYRVSYGALLEKRIFEISYGANH

SEQ ID NO: 256369 - protein, 154 aa, Zea mays
  Clone ID: MRT4577_16539C.1.pep
IWPQEKKQFGAPLAAFQVNQKKVVRKLGHNPGMVLVGWRLCHLYESGQNTPGRFSLGKAWTSQKAKEVVFFGPKLLGGKGNLVDFLVPQAFCYVEPLFLFEGPYAIKSLVGGKKIPGIPSFKPSVSAKSPLLKLFFFLFPKTVEIHLGPSKDWE

SEQ ID NO: 256370 - protein, 206 aa, Zea mays
  unsure (1)..(206): unsure at all Xaa locations
  Clone ID: MRT4577_165400C.1.pep
LSPFPPPAXDQMECTSAAVTAAGAAFHHEPARRIREERKPKVSRRYVHADPSDLSLAVKDGYQWRKYGQKVTKDNPCPRAYFRCSFAPSCPVKKKVQRSADDRTILVATYEGDHNHAQPPRHNGGGNKAATRSTPAATEAARPAPPLPLQHQQQQKQEAATGPSSEVARKNLAEHMAVTLTRDPGFKAALVSALSGRILDLSPPRD

SEQ ID NO: 256371 - protein, 146 aa, Zea mays
  unsure (1)..(146): unsure at all Xaa locations
  Clone ID: MRT4577_165401C.1.pep
MDPWVSSQPSLSLDLHVGLPPMGHHQAAPMVALAKPKVLVEENFMQLKKDPEVAVLESELQRVSEENRRLGEMLREVASKYEALQGQFTDMVTAGAHAGGNNSHYNNQPSSASEGGSVSPSRKRKSEESLGTPPRXSQHQQQHYAG

SEQ ID NO: 256372 - protein, 77 aa, Zea mays
  Clone ID: MRT4577_165402C.1.pep
AFDGSQPARADGLLVHDPWFLRNQRHPAPLELGWPNHRRPTYSSGGDGIGFASSSFAPTVRIHRSDVAACRRRKDNG

SEQ ID NO: 256373 - protein, 137 aa, Zea mays
  unsure (1)..(137): unsure at all Xaa locations
  Clone ID: MRT4577_165403C.1.pep
MGTIVSLSTSGNPSEIYRLQAHLGMPVKGVAXGAWSAXRPQRYIWCQGVSSIXPLYRVRNKDKRKLMNLLLLXYISVPTVRMDVPYCYFLVPAVSCNVGGVTYAKDKLGNDITVDAWIITHGPNYLTLVQGLKGDPT

SEQ ID NO: 256374 - protein, 109 aa, Zea mays
  Clone ID: MRT4577_165404C.1.pep
GTGPEFPGRPTRPARSYPNMIHSETPVEIPSSVTFIPRKKSVDTMAVDEGPRAIDSNSSAIGMVAGASDEPDQCEMDEDDSKSPSMPQMHTNSKASSRRYRSSRTDDDE

SEQ ID NO: 256375 - protein, 55 aa, Zea mays
  Clone ID: MRT4577_165405C.1.pep
IKQCYNLVGIIPVNISVSGCMFHVQVEHSAALDLSTFWSWFLLWPCKLAEFFNSI

SEQ ID NO: 256376 - protein, 86 aa, Zea mays
  unsure (1)..(86): unsure at all Xaa locations
  Clone ID: MRT4577_165406C.1.pep
NKQXXXRXXRKRXXXRXEHXQPXRXTEEXRXRKGKXXQXKAXAKERGEXXSTKRQPXXPKXGXXXEGTTXETXXPXPXXXXXXXKG

SEQ ID NO: 256377 - protein, 111 aa, Zea mays
  Clone ID: MRT4577_165407C.1.pep
LRAELVGVLGAFSKPPEGREMGGESLGPLVTGPRNRKRVVQEGPQLGRVLQLVGPHQEKGKPGPGKAVLVVTGGALNGRKFRRKENIVFEPGKVFRSIPTTTPPYPILRAY

SEQ ID NO: 256378 - protein, 84 aa, Zea mays
  Clone ID: MRT4577_165408C.1.pep
MVCVACLLPLFLIPVVNALPYLIDLIISKVYRLFGWEYRRPERVPPACPYKPAAQKNDEGASESKPLAEPHGAGAAAAEDKKVE

SEQ ID NO: 256379 - protein, 108 aa, Zea mays
  Clone ID: MRT4577_165409C.1.pep
KQGGNFRGGGAMVNKTQHLGAPKMGLKLGPNLFFQKKREGGVSPGGLFIKGWCETLIFPKKIGYFSLGKKEKHGGPKLAPRGLKTGEKRGFRSPKYALGGRTPGAQKG

SEQ ID NO: 256380 - protein, 141 aa, Zea mays
  unsure (1)..(141): unsure at all Xaa locations
  Clone ID: MRT4577_16540C.1.pep
GRAGLFSFDRYRRTPRVHPHVREKPRSPPKWCTRITYREGHGYPAPSSHTRARQTPGVTLVYQYTENRASAPNCPCTLKNIQGIPXHLTPAAYIKSRMARNRRTEKRPYAGGLSAAXARDSIIRAFLHEEPRIWKNALMIS

SEQ ID NO: 256381 - protein, 132 aa, Zea mays
  unsure (1)..(132): unsure at all Xaa locations
  Clone ID: MRT4577_165410C.1.pep
RLNHNVWCTSIDRKKNGTLDENFPEVHECLSAQPNECLSAQPNELKTIISRPVQLQLTIGHCRXGWEAKRSEKTREGPSDSMSFSQIFTSCDISDRFSRYSXILDSTPFLQFGTEENNDRFRNSANGFWSSR

SEQ ID NO: 256382 - protein, 51 aa, Zea mays
  Clone ID: MRT4577_165411C.1.pep
QNSSSMVDGLKPGQRKILFCSFKRNFVKESKVNHFSGYVSEQNLPLAWFKA

SEQ ID NO: 256383 - protein, 618 aa, Zea mays
  Clone ID: MRT4577_165412C.1.pep
MVYLDTAPAGHMPQAAASVPGATTNEEHPNAAPTDSRMVCLDTAPAGHVPQVVASVLDATEDGVSLVDAAGGAAPVLLQDGVRARQEADTQECPDVVTAGNVTATVGVLSSPLTAPMDTTQTTLPARAIPVVQVDNAHGMQTRGKTGFRLPVNKLNLQVSSLSPLPKTYRGALADPNWRDAMIEEHTAIQANNTWDLVSRPRGVNVVTGKWVYRHKFHSDGSLDRYKARWVLRGFTQQPGVDFGETFSPVVKPATIRTVLSVGLSHNWPIHQLDVKNAFLHGTLTETVYCEQPSGFVDSALPDHVCRLNKSLYGLKQAPRAWYSRFASHIRTLGFVGARSDTSLFIYKHGTDTAYLLLYVDDIVLTASSTLLLRRIIDALTTEFSMKDLGNLHHFLGVSVTQHNGAGALQYLTFTRPDIAYAVQQVCLFMHDPREPHFALVKRILRYIRGTLDHGLQLYRSPVTDLVAYSDADWAGYPDTRRSTSGYGVFLGDNLVSWSSKRQHTVSRSSAEAEYRAVAETSWLRQLLDELRHPIRRATLVYCDNISAIYLSTNPVQHQRTKHIEIDLHFVRDKVATGAVRVLHAPTTSQYADIFTKGLPSTIFTEFRSSLNVLPSGR

SEQ ID NO: 256384 - protein, 267 aa, Zea mays
  Clone ID: MRT4577_165413C.1.pep
MRRFFFFGSPAANAGEGAGQPVNDSRTGHRKTDEGKDISTARLSRSRSRRQKRNKEEPANPKQLRRSMSFSSPARSSCVEERCFSFSGDVPCSLYDESDAPHHAKDVAPDMWSPEGNPFSREYAIRTPKDHSAMENDSPRSKYCSCSAGHSPVSSPVAIQCRSTRLGNLLNRNEVLDRYIDRGHGDAIVDEKQKQCVPTVSNLGRPPRPHSTVPSIPRPFKETTESYPDVDLNDAFLWRLAQEGIGDTHKITTMCSASRRHINMSDA

SEQ ID NO: 256385 - protein, 104 aa, Zea mays
  Clone ID: MRT4577_165414C.1.pep
DCVNESLGARCAYYFNGGYGLWFTGTAVLQSLSAEGIHREMTSLQVGEEWMVDELVYREMSGPLGSWVDFKVESYQGGGDMAAELLGSLIDEVVADLLTTGSFS

SEQ ID NO: 256386 - protein, 56 aa, Zea mays
  Clone ID: MRT4577_165415C.1.pep
PICIRSIGSGRDTASSSVVLVVTDHPKPKNTANNVHAPLALTSMAIIGAVLSTYML

SEQ ID NO: 256387 - protein, 67 aa, Zea mays
  Clone ID: MRT4577_165416C.1.pep
WISRLIDRNISNRSIATSIRPVVQQSGSSVTYAAYLGPSHRRLTARIESRSSTIFNGLCKNRYTRAE

SEQ ID NO: 256388 - protein, 102 aa, Zea mays
  Clone ID: MRT4577_165417C.1.pep
MPRYDDRHGNTRLYVGRLAPRTRSRDLEYLFSKYGRIREVELKRDYAFIVCSTTLRLSPTIPPPNPPICTFYSYLNTFPSTILPPIFPPLHPFPLFSSPFTL

SEQ ID NO: 256389 - protein, 91 aa, Zea mays
  unsure (1)..(91): unsure at all Xaa locations
  Clone ID: MRT4577_165418C.1.pep
AFXWGXLSLXXXXSXXXXXGLFXGXXXXXCPWRCCXXXARAPXPXLPXXXXGSRXPGXRGXXGRXLXVXVXXVXGPRPALSLSPARARAAG

SEQ ID NO: 256390 - protein, 71 aa, Zea mays
  Clone ID: MRT4577_165419C.1.pep
QSRVIRFFGYKRCHAGAPWGTRLSPPFAPFFNVNGWKGFPSFNRSVGARQFMSVNFLFRPPWVSPVFLWMV

SEQ ID NO: 256391 - protein, 86 aa, Zea mays
  Clone ID: MRT4577_16541C.1.pep
QQALEGGAPSPPPRKKKKTGGKTKKGGPVPPGRGGGPVPFMGAIQADNFCFFPLLSPGRQVTLGDCFGPPHQKTGKLIVMFPRGLL

SEQ ID NO: 256392 - protein, 36 aa, Zea mays
  Clone ID: MRT4577_165420C.1.pep
MPRYDDRHGNTRLYVGRLAPRTRSRDLEYLFSKYGR

SEQ ID NO: 256393 - protein, 87 aa, Zea mays
  Clone ID: MRT4577_165421C.1.pep
WTAALLIVLMPPPTSTSDCDVTAQLDALLARQSAMNTSSIMFHPKATPQINCLNAMNTTRLHVLRIASGRHGTDHPQDTESDTLQHL

SEQ ID NO: 256394 - protein, 52 aa, Zea mays
  unsure (1)..(52): unsure at all Xaa locations
  Clone ID: MRT4577_165422C.1.pep
SSCSCVVSCSPWSGMLRESXVSTPRLSPGSRVDVTAMVSARCLVATSDDGPL

SEQ ID NO: 256395 - protein, 192 aa, Zea mays
  Clone ID: MRT4577_165423C.1.pep
PSVRAVTPLEKNIQFGVFTSVVINGIIYSQCFDPHHSITYDCRATEEDLIITFDIETEKWGPFMRGPPISFSDAAAQVFNDLRLPPIKQLTLANLNGSLAVVHGPAPSMDIWILMDSGKGLWVKQYIIQFKEYASFQYVHPLVVLRDGRVVLYKEDMQLLQIYDPRTNTLTDSVEVCHFSAVALFGGNLLSL

SEQ ID NO: 256396 - protein, 67 aa, Zea mays
  Clone ID: MRT4577_165424C.1.pep
IKWVTEFKIGRFCPKQFLVSDSKPQSSDKHHMITTPLSYSLRSRIYHTVISKKTQHIIIGQTLPLKH

SEQ ID NO: 256397 - protein, 156 aa, Zea mays
  Clone ID: MRT4577_165425C.1.pep
FSIKKKKEKEISRRPALTVLIRQGFFLPPPLGFLPAVVRRFFPSIGFISWSRRLLSPCGVLFSDQPAAPPQRPAGTLAAAPLLARPCSPWLPSLSTHLPGRAPSSFSARLHHLLHARRAVLGSELEQVSSPMAEYLPWRSTFPLFLGGWHSARLCP

SEQ ID NO: 256398 - protein, 58 aa, Zea mays
  Clone ID: MRT4577_165426C.1.pep
SPSNHNEHSWYLSQQTSHHNINPLYSILSPSFSKYLQLASSPNTNTHLINSYSPLSTS

SEQ ID NO: 256399 - protein, 38 aa, Zea mays
  Clone ID: MRT4577_165427C.1.pep
CLNACQLRGSHLVSRCVPPPLGERQAGVPLVEGNVEFR

SEQ ID NO: 256400 - protein, 117 aa, Zea mays
  Clone ID: MRT4577_165428C.1.pep
PMGVPADGRVTKLPGMENFPNTRGGVLGNKWDFPPPPPPPKRAPCGEGQGGFPFGPPPGGPGFGFGPPGVQIPGLILNPPPAQRGLPFLGQKKKPWARGETGRKEIKVVFSRGGAFC

SEQ ID NO: 256401 - protein, 158 aa, Zea mays
  unsure (1)..(158): unsure at all Xaa locations
  Clone ID: MRT4577_165429C.1.pep
PARRAPACAGPAPPGXXPRRRAXXRPAAPCGXRXRPXXGRRXXGGXAXRPRRAPPXCPXAGPRRRPPRRXPRPSXARSCACRGPPXRXSCRRPRRXPPPRAPXPXGRAAPPPPXSPRXXRXRPXXGLXAXRVXAAXXXXAGSXPPRXARPPAXRAARR

SEQ ID NO: 256402 - protein, 44 aa, Zea mays
  unsure (1)..(44): unsure at all Xaa locations
  Clone ID: MRT4577_16542C.1.pep
IFNTGMALAPSSHLDCSLCKKMCYSIICFPLCPXPKKHKQKNKX

SEQ ID NO: 256403 - protein, 82 aa, Zea mays
  Clone ID: MRT4577_165430C.1.pep
ATASIYHTNHYKHPSLSIQPLTFIHKTPHRILNSLYPNTPYSHISTIHSLQVNILQSFNLIPSYSNTDYHYYKNYTELPQCH

SEQ ID NO: 256404 - protein, 640 aa, Zea mays
  Clone ID: MRT4577_165431C.1.pep
MPKELLPTVIKVLCSRLLNKHSNKTEHYAVLVTVLSCLETAFSKVPPTLDVFAVLTEDCCAGPSHEQEESNVIAFLLHCIEEEMHYSVRHGAFQVLRSAVHNYPSCANMIWEKLRDNVLNLLQIQSFEDQKYDANFGPPGAKEESSIKGRCLVAGIKVMDECLRVSSGFTGADDIKECRLLDIQQISDCTINKTIKSAPHFEMEAAGSSQNCTLDITLGINRWIEVIETHLPKGLSHGSAMVRTASLTCFAGMTSDVFFSLPENKRDYVTSSSVHAALNDMVPSVRSAACRAIGIVACFPQILSSSSLPGKFIDAIEFNTHNSSTPVRVTAAWALANLCSCIRFRALEVHTDPYAGVGVLSKSSISLLVEVALRLAKDSEKVKSNAVRALGYLSRFIRFNYHAGTINDPSDSVFYGDPVWLERMVQALMSCVTTGNVKVQWNVCHALSNLFMNDTLRLQDMPWASSVYSILLLLIRDSNNYKIKMHAAVALSVPVSRLDYSSSFPDVVRGLVHALESLNSNNSSLPSNFKQRDNLEKQLTFTALHLLSFVSPNDDPSLKDFLTKKSSFLEDWLRSLCASFNSSERQPLPTEATNDEDGFSPNVTQKGMLSSALQSLLGVYAGRTQQVITQRFEQLARSVA

SEQ ID NO: 256405 - protein, 57 aa, Zea mays
  Clone ID: MRT4577_165432C.1.pep
LKTVHSTPPKLLKNVVFGYKNCTLFVLIRMNNTPMQPNKMLKPKIPLNNELNLQQMV

SEQ ID NO: 256406 - protein, 85 aa, Zea mays
  Clone ID: MRT4577_165433C.1.pep
HIADQDVTKPCDVALCNTSDDCSHGQWGNIVLKHLYQSLGDGNGGIEGCIREALIHYPKHNHTTTVMETFKIDKDGQECSLQFEP

SEQ ID NO: 256407 - protein, 63 aa, Zea mays
  Clone ID: MRT4577_165434C.1.pep
GDEFTLADANHASYLFYLSKTPKAGLFPAPPHVKAWWKPIFAPPAFQKTVAPIPLPPPPSSWV

SEQ ID NO: 256408 - protein, 92 aa, Zea mays
  unsure (1)..(92): unsure at all Xaa locations
  Clone ID: MRT4577_165435C.1.pep
GKRQVSEQAXVMLPNQEPLSRKILWSPSRSGSGSTPNPQPRNRNRKGPIILPGRAGPRLNVPACLAKQTLYNDVDCTAQPAKQFIGSSSVTR

SEQ ID NO: 256409 - protein, 96 aa, Zea mays
  unsure (1)..(96): unsure at all Xaa locations
  Clone ID: MRT4577_165436C.1.pep
ADQAAILNAKAIKNGRIVMXSMFAFFIQAYVTGESLVENLSKHLIYPFVNNLLTVISGAADRTPSLRRLATRPAVMPSHALLPYLILPGKDLCVTV

SEQ ID NO: 256410 - protein, 116 aa, Zea mays
  Clone ID: MRT4577_165437C.1.pep
AGQDVFGNFLKSEFSEENIEGWLACEDYKKTKSDLLHCKAEKIYKAFVQSDAAKQINIDFRTRESTAKKIKAPTPTSFDEAQKIIYTLMEKDSYPRFLKSNIYLNLLNDLQANSLK

SEQ ID NO: 256411 - protein, 167 aa, Zea mays
  Clone ID: MRT4577_165438C.1.pep
MGDPLQAAVAAAHALSLLWRKPLMEVKYPIYDQTVYLNDYHKKMLKDQYEGLKTIEQITMDSASVETNMFKLCKVMSVQFGQKGIPYLNTYDGRTIRYPDPLIKANDTIKIDLETNKIMDFINFDVGNVVMVTGGRNTGRVGAIKNREKHKGSFETIHVLLGAFCYV

SEQ ID NO: 256412 - protein, 87 aa, Zea mays
  unsure (1)..(87): unsure at all Xaa locations
  Clone ID: MRT4577_165439C.1.pep
LRGPSGPRLWVGRSARALXCFGFXVLCXGCXXXSRPPARXLVCVGSCPPSSLXSAGLRAAVXLFLSCLCXFCSLLFCPLGVFCLFCL

SEQ ID NO: 256413 - protein, 66 aa, Zea mays
  Clone ID: MRT4577_16543C.1.pep
YIILVVQKGKKKKKKKKKKKKKKKKKKKKKKKKKKKKKKKKGGGGKKKNLSFQKIKILIACFIKKN

SEQ ID NO: 256414 - protein, 133 aa, Zea mays
  unsure (1)..(133): unsure at all Xaa locations
  Clone ID: MRT4577_165440C.1.pep
VATNHHVEDASSVAVQNYFGVLMAYGGLQDXNRILPLYSLDPCSPYLISTANWVIGQLAICLPEDMSSSIYQSLMKALTMEYVEDITCYPVCASASGAIAELIENSYVPPDWLILLQVXLKRVSTGDENESAL

SEQ ID NO: 256415 - protein, 189 aa, Zea mays
  unsure (1)..(189): unsure at all Xaa locations
  Clone ID: MRT4577_165441C.1.pep
PRVRGRVGFLLWAPKPSSGPHKSRECLPLILIIRNRLKYALTYHEVISILMQRHVLVDGKVRTDKTYPAGFMDVISIPKTNENYKLXFRLHPIXFKLCKVRSVQFGQKGIPYLNTYDDRTIRYPDPLIKANDTIXDLETNKIMDFIKFDIGNVVMATGGRNIGRVGVIKNREKHKGSFETIHVLLGACY

SEQ ID NO: 256416 - protein, 120 aa, Zea mays
  Clone ID: MRT4577_165442C.1.pep
NPPSMVFKQMEQVAQFLKAAVDYGVIKTDMFQTVDLAEGKDMAAVQRTLMALGSLAVTKNDGHYRGDPNWFMKKAQEHKREFTESQLQEGKHVIGLQMGSNRGASQAGMTGYGRPRQIIS

SEQ ID NO: 256417 - protein, 60 aa, Zea mays
  unsure (1)..(60): unsure at all Xaa locations
  Clone ID: MRT4577_165443C.1.pep
LISRYLDPLIKANDIIKIDLEXNKIMDFIKFDVGNVVMVTGGRNTGRVGVIKNREKHKGS

SEQ ID NO: 256418 - protein, 524 aa, Zea mays
  Clone ID: MRT4577_165444C.1.pep
MSSPSSYSRTGYPRPRRGYSGRPSPPPPPPPPDAASEIVSRDYHLSAVHAANESLRRGGGGDIRWPPPPYRQGPHPHQPHYGYGYGYGYGYGQTWQPGPSYGFVPYNYGHPQQQPPGPQYGYGAPNPYVHGHLQPQPHVRGAASPGFRPGAPQLTPRLADYLRRWRFAKQRPPHQAGRFIILSYKRPADYLAQEHRFLYEKISPFILDWNWRKDKLLFEFGLWSPDILCLQEVDKFTDLEQEMASQGYNGTWKIRTGDAADGCAIFWRTTRFQLRYEEDIEFTKLGLRDNVAQLCVLESVGLQYVQTDSVSLSTSSNHPQQAKQVIICNIHVLYNPKRGDIKLGQVRTLLDKANALSKMWNDAPVIVCGDFNSTPKSPLYNFMLGQKLNLSGLARNTISGQQIGGSSQGLYTGPNISGWTPEEIKAATGKDECTFMKHSLKLRSVYTDVEDFEGTKDASKEPLVTSYNRKFMGTVDYIWASEGLHTVKVLDTFPIEILKKTTGFPTKKWGSDHIALACELAFTK

SEQ ID NO: 256419 - protein, 58 aa, Zea mays
  Clone ID: MRT4577_165445C.1.pep
HTNVMSQMRASNTWDIPPSHIAMATYKYLFFTRRSTRSPNGAIEGRPRIDESVGIVNG

SEQ ID NO: 256420 - protein, 146 aa, Zea mays
  unsure (1)..(146): unsure at all Xaa locations
  Clone ID: MRT4577_165446C.1.pep
CTTHREVISILMQHHVLVDGXDVISIPKTNENYRLXFRLHPIRDEDXKFKLCKVRYVQFGXKGIPYLNTYDDHTICYPDPLIKANDTIKIDLETNKIMDFIKFDVGNMVMVTGGRNTGRVGVIKNREKHKGSFETIHVLLGAFCYV

SEQ ID NO: 256421 - protein, 66 aa, Zea mays
  Clone ID: MRT4577_165447C.1.pep
SYFLVHLYAGAPFFNPTEHIPRGGSLNKGPPPKRRISPHRPTLVASRIRVDSGLKKDGTRYFVRDR

SEQ ID NO: 256422 - protein, 148 aa, Zea mays
  unsure (1)..(148): unsure at all Xaa locations
  Clone ID: MRT4577_165448C.1.pep
MNLQRHVLVDGKVRTDKTYPAGFMDAISIPKTNGNXRCLRLHPIRDEDAKFKLCKVRSVXFGQKGIPYLNTYDGHTIRYPDPLIKANDTIKIDLETNKIMDFFKFDVGNVVMVTGGRNIGRVGEIKNWEKHKGSFEVIDVLLGAFCYV

SEQ ID NO: 256423 - protein, 74 aa, Zea mays
  Clone ID: MRT4577_165449C.1.pep
RSKSLVCSPEVTACFVYFLLVLRVGYPAVLPDLQLVSLGWQAAELDHGGGEVGIPLPLGVLVFIELAGGEVIRA

SEQ ID NO: 256424 - protein, 91 aa, Zea mays
  Clone ID: MRT4577_16544C.1.pep
KPRARLALEGYTGGGRRSYGIHEYVWPQQRPDEAGGQEAEEDANEMAYMNISAPVLEFGVLDCCTGISGGAQCPVKRNDHHVLTGNKERKL

SEQ ID NO: 256425 - protein, 54 aa, Zea mays
  Clone ID: MRT4577_165450C.1.pep
LRHHEFDGLRESQGGKKASRSRPMMHEAPLGYSIDDVRPAGGAKKVQPGAHYSC

SEQ ID NO: 256426 - protein, 67 aa, Zea mays
  Clone ID: MRT4577_165451C.1.pep
LKVCRNGTIKIDLETNKIMDFIKFDVDNVVMVTGGRNTGRVGVIKNREKHKGSFETIHVLLGAFCYV

SEQ ID NO: 256427 - protein, 89 aa, Zea mays
  Clone ID: MRT4577_165452C.1.pep
KGTPAPCFFLFGPVLYKGPTGVPTGISFPPPPVGWVGGPPPLGKLKILVGPGTFEISNPGRKIIILIPICCGCQNPQKKTKKKKKKKAA

SEQ ID NO: 256428 - protein, 159 aa, Zea mays
  unsure (1)..(159): unsure at all Xaa locations
  Clone ID: MRT4577_165453C.1.pep
CHLLTLFFWFQGPPVASAASKRKKGDKNKGKSEMSSIGELLVIPFLSKFPIPSHGEDASSVAVQKXKGLKTXTYHYVYLLYYYLDVLNDFXSYFGVLMAYGGLQDFLTEKKDLTITLIRNRILPLYSLDPCSPYLISTANWVIGQLAICLPEVTCFSCF

SEQ ID NO: 256429 - protein, 372 aa, Zea mays
  Clone ID: MRT4577_165454C.1.pep
VLETGPGWRLVSPHFSSLLDSAIFLALALNEKDIEEWEEDTDEYMQKNLPSELDDISGWTEDLFTARKSAINLLGVIALSKGPPVASAASKRKKGDKNKGKSEMSSIGELLVIPFLSKFPIPSHGEDASSVAVQNYFGVLMAYGGLQDFLTEKKDLTITLIRNRILPLYSLDPCSPYLISTANWVIGQLAICLPEDMSSSIYQSLMKALTMEYVEDITCYPVCASASGAIAELIENSYVPPDWLILLQVVLKRISTGDENESALLFKLLGTIVEGGQEKVLSHIPKIVSNIASTVMELLSPVPDPWPQVVVHLSSVWSIFWYFIMMTGGRNTGRVGVIKNREKYKRRVIKNREKHKGSFETIHVLLRAFCYV

SEQ ID NO: 256430 - protein, 46 aa, Zea mays
  Clone ID: MRT4577_165455C.1.pep
TIYSKILIKHYHKSSILTCKYHEHIKICIKIISGIVIIISLRNLFP

SEQ ID NO: 256431 - protein, 88 aa, Zea mays
  Clone ID: MRT4577_165456C.1.pep
SDLILKSYSAKFTAHCQPYPDPLIKANDTIKIDLETNKIMDFIKFDVGNVVMVIGGRNTGRVGVIKNREKHKGRFETIHVLLGAFCYV

SEQ ID NO: 256432 - protein, 278 aa, Zea mays
  Clone ID: MRT4577_165457C.1.pep
MARRRGGPAPATAVASPAVLGTVAVMVFVYYSTVFVFLDHWVGLATPIGAAHAAAVSLAVAACFLAFVCAAGADPGAVPPAFAPDAEAAQGQGLKSRYCDKCCMFKPPRTHHCKVCRRCVLKMDHHCVWINNCVGYANYKAFIICVLNATIGSLYSFNILQVIFLCDLLLKEHDFDILYVKILYILAGVLLFFLSLTIGSLLGWHIYLLCHNMTTIEYREAVRARWLAKKSGQKYRHRFDLGILKNIQMILGPNILCWLCPTATGHLNDGTEFQITNN

SEQ ID NO: 256433 - protein, 94 aa, Zea mays
  unsure (1)..(94): unsure at all Xaa locations
  Clone ID: MRT4577_165458C.1.pep
TTQPDTLPSWLELWRATHIFTTCANHILARINECNLICTHCETKPAAXIXYGTTSDHSTHRVIQIMRTYHHDVVRLYYIDDMLDITEVQTYLIN

SEQ ID NO: 256434 - protein, 131 aa, Zea mays
  unsure (1)..(131): unsure at all Xaa locations
  Clone ID: MRT4577_165459C.1.pep
ARASLSRLRQKQXIXFTDKLPKLYPAALNLLKMVLGFXDPMDRQPARKFIXDPYSEGLSELNRKPCCQKFTYMDFXSERHKATKXDADELIWRQIQEDHAFLTRDYMRRTDISNFLYDSAADHLKRTFAYW

SEQ ID NO: 256435 - protein, 539 aa, Zea mays
  Clone ID: MRT4577_16545C.1.pep
MVNTRKGGGIDLHANDRRRRIANQPQPEMNPPPNPPPAGIDPVAAAHMQQMQQMANTMSEMQAQMRQECQEMHQERQEMRQEMRQERLERQQQPTLPPPPPRLGQAPRIHESQAAHIFKKKEILSLKQGNMTFSEYQDKFIQLLSVVRLGTTPMLVRRGTPTLRLEAMFRKQQTPASGKGFNISRVNQVSGDATADGADIAIAILFDPRATHSFIYGRYVNTNGLPLQNMQKPMIVITPKRPIEANYMTNRLTLPEQGAIHEEDQEPAPEPATEDLPAAPAFEGKPRAILKKNIKMWEECLPHVEFDYNGSQHSTTKKSPFEIVYGFVPRAPIDLLPLPTSERLNFDAKQRAGLMLKMHETTKENIETMNAKYKFAGSRGKKHVTYEPGDLVWLHLRKDRFPDLRKSKLLTRADGPFKVVAKINDNAYKLELPADFGLLLLSGKRVCRLDHPICWIQNPNFVCIRFLLWARFKVVLGTTRTTQIGGGVTVAKVQPSPCGVVVGQHNVDPPQIALSPTLIERSGANPSGFHHVPFHRSPA

SEQ ID NO: 256436 - protein, 37 aa, Zea mays
  Clone ID: MRT4577_165460C.1.pep
LSRVIRIRRVSRLGLASSARSMEGDAAQRGGCRPGTA

SEQ ID NO: 256437 - protein, 179 aa, Zea mays
  Clone ID: MRT4577_165461C.1.pep
GTLSFGRVGEVEVPANILSDGTLICYSPQHKPGRVPFYITCSNRLACSEVREFEFRPTVSQYMDAPSPHDETNKVYFQIRLDKLLSLGPDEYQATVSNPTLEMVDLSRKISSLMASNDEWSNLLKLAVDNEPSTADQQDQFAENLIKRKLHIWLLNKVGMGGKGPSVLDDEGRVLLVGT

SEQ ID NO: 256438 - protein, 78 aa, Zea mays
  Clone ID: MRT4577_165463C.1.pep
IGGVWVRLIPNQVKTLQNFFPPFPIPWGIGKPDQGPIVAVLVPFPQCVIEPVCVPGPLGKFIGPPPYENRAILKGDLN

SEQ ID NO: 256439 - protein, 139 aa, Zea mays
  unsure (1)..(139): unsure at all Xaa locations
  Clone ID: MRT4577_165464C.1.pep
MRAQQLQQLVLANLAAYSERHQLVSFNRLTASNSAGYLXQQFPFSQLVACYPQQFLPFNQLAQCNSAADLQKQLLLXFNQLADVSPAGFLTQQXQCCPVYLHAIPNAGSLLQLRQLLPFNQLAVTNPTVLYQQPMLLVP

SEQ ID NO: 256440 - protein, 79 aa, Zea mays
  Clone ID: MRT4577_165465C.1.pep
VLAELGLDYQVTIMIFVFAITSEARTMFNVIQSTMQSITIGLLTHATPFRLSSASYLYTYQYLTYRHIYDVDQRGRAKE

SEQ ID NO: 256441 - protein, 39 aa, Zea mays
  Clone ID: MRT4577_165466C.1.pep
WLGGTSTLISPFTLGGSFFNDLNFSFKWKGIIYKEKICL

SEQ ID NO: 256442 - protein, 119 aa, Zea mays
  unsure (1)..(119): unsure at all Xaa locations
  Clone ID: MRT4577_165467C.1.pep
SAQKETASDKAPTGKKLKSEYRVSAGKSLCQXGGEGKRGNKKGKKSVXETFKIFIFXVLKQVHPDVGISSKPMSIMNSFINDIFEKLAAQAAXLARYTNKPTISSREIQXSVRLVLNKE

SEQ ID NO: 256443 - protein, 44 aa, Zea mays
  Clone ID: MRT4577_165468C.1.pep
EFTYPQHLTPATHLAQGVEPSQARTHDTYLATYLAYATIYPLVS

SEQ ID NO: 256444 - protein, 117 aa, Zea mays
  unsure (1)..(117): unsure at all Xaa locations
  Clone ID: MRT4577_165469C.1.pep
AAKVTEENLATLFINCGQVVDCRMCGDPNSVLRFAFIEFTDXRSDDEREMCARTIYCTNIDKKVTQADLKLFFESICGEVGRSLLQTQSPFCIAKSLQKWHHQDRSGDQQNHGLHQV

SEQ ID NO: 256445 - protein, 128 aa, Zea mays
  unsure (1)..(128): unsure at all Xaa locations
  Clone ID: MRT4577_16546C.1.pep
LLVVTGVECPWRDADSAMHNMAPVQSLDLHPASSSSRNSAXASFSGLSLGSSIYARLDLSPLLPASRGSHALMGGGIRRTLRAEGRQVWILTRGPMTEFEELRESTIEWDDPGRRHTKPSSMWEDDXG

SEQ ID NO: 256446 - protein, 139 aa, Zea mays
  unsure (1)..(139): unsure at all Xaa locations
  Clone ID: MRT4577_165470C.1.pep
MAGGKVYSFEEVSKHSDRKDCWLIIAGKVYDVTPFMEEHPGGDEVLLACVGKDATADFEDIGHTDSAKELMPQYCVGEVDAATIPAKLTHAXSPRTPPAGPRRPRRXAGTWATLLQLALPVLLLALAFALQNYSRAKAA

SEQ ID NO: 256447 - protein, 66 aa, Zea mays
  Clone ID: MRT4577_165471C.1.pep
PILVIIYFFKFDVSNVVMVTGGRNTGRVGVIKNWEKHKGSFEVIDVLLGGFCMLFLVFSYLLYKKT

SEQ ID NO: 256448 - protein, 152 aa, Zea mays
  Clone ID: MRT4577_165472C.1.pep
DITRAAFSTRPRLAWRCSARLYISGNTGVVVMLYEPRYKHSVSRLEREPGVKFKHISAPQPTDVAQSAGSEAADAIASVSDSVIPIFRQQAEQLLSSSSLSAADLLAKALAKAVGYTDIKKRSLLSSLEDYSTLHLQTGRPMWSPGFAITFR

SEQ ID NO: 256449 - protein, 336 aa, Zea mays
  unsure (1)..(336): unsure at all Xaa locations
  Clone ID: MRT4577_165473C.1.pep
LWAGAGTRVTDNCNTHVRNSLAKANYPPYGIDFAGGPTGRFSNGYTMVDEIAQLLGLPLLPSHTDAASSGGGDAALHGVNYASAAAGILDNTGQNFVGRIPFNQQIKNFEQTLEQLRRRTTXRPGAGAGGLARSIFYVGMGSNDYLNNYLMPNYNTRNEYNGDQYSTLLVRQYARQLDALYGLGARRFVIAGVGSMACIPNMRARSPVNMCSPDVDDLIIPFNTKVKAMVTSLNANRPDAKFIYVDNYAMISQILSNPWSYGFSVADRGCCGIGRNRGMITCLPFLRPCLNRNSYIFWDAFHPTERVNVLLGRAAFSGGNDVVYPMNIQQLAAWQP

SEQ ID NO: 256450 - protein, 206 aa, Zea mays
  unsure (1)..(206): unsure at all Xaa locations
  Clone ID: MRT4577_165474C.1.pep
MEYYWMLDKLGGAFVGLFLLWAPKPSSGPHKSRECLPLILIIRNRLKYAPTYREVISILMQHHVLVDGKVRTDKTYPAGFMDVISIPKTNENYRLXFRLHPIRDEDAKFKLYKVRSVQFGQKDIPYLNTYDDRTIRYPDPLIKANDTIKIDLETNKIMDFIMFDVGNVVMVIGRRNTGRVGVIKIREKHKGNFETIHVLLGAFCYV

SEQ ID NO: 256451 - protein, 74 aa, Zea mays
  Clone ID: MRT4577_165475C.1.pep
LISRYPDPLIKAIDTIKIDLETNKIMDFIKFDVGNVVMVTGGRNTGRVGVIKNREKHKGIFETIHMLLGAFCYV

SEQ ID NO: 256452 - protein, 93 aa, Zea mays
  Clone ID: MRT4577_165476C.1.pep
KKQTFLLPRITPNSVSAKQLPPEFGKYLNSDKRHKLCSMLIHLIDQNPHVPNHICTHLNNTPGHFLQPTTCSVETTLEPNDLPSPQGADNYWP

SEQ ID NO: 256453 - protein, 136 aa, Zea mays
  unsure (1)..(136): unsure at all Xaa locations
  Clone ID: MRT4577_165477C.1.pep
MFMPIVLDEVSPACKIRNLCKQEHSYLVSFLLFLKIDLXTNKIMDFFKFDVGNVVMVTGGRNTVRVGVIKNWEKHKGSFEVIDVLLGAFCMLCLVFSYLLYTKTYNGIQIWWLQKYGDLNSYKVRLNISANSCILV

SEQ ID NO: 256454 - protein, 126 aa, Zea mays
  unsure (1)..(126): unsure at all Xaa locations
  Clone ID: MRT4577_165478C.1.pep
GSTAYGVKNIDVLEGARAALNLSGAVLGYYPVNVLPSKTAIAPVNKTFLPRSNDEHEMCARTIYCTNXIDKKVTQADLKLFFESICGEVGRSLLQTQSPFCIAKSLQKWHHQDRSGDQQDHGLHQV

SEQ ID NO: 256455 - protein, 30 aa, Zea mays
  Clone ID: MRT4577_165479C.1.pep
KIPCNLGTEDENKNMPFEPGGLLKLLNYIT

SEQ ID NO: 256456 - protein, 68 aa, Zea mays
  Clone ID: MRT4577_16547C.1.pep
GKLRRLHVPYRNSISDPPLSYLFNQKHTKRSDINNNRGRALLPIYNPFLRYLRFFPCATKSFHYFTIL

SEQ ID NO: 256457 - protein, 123 aa, Zea mays
  unsure (1)..(123): unsure at all Xaa locations
  Clone ID: MRT4577_165480C.1.pep
EVISILMQRHVLVDGKVRTDKTYPAGLMDVISIPKTNENYRLXFRLYPIKDEDAKFMLCKVRPIHFGQKGIPYLNTYDDRTIRYPDPLIIDNDTITIDLETNKIMNVIKFDVGNVIMVTGGRN

SEQ ID NO: 256458 - protein, 106 aa, Zea mays
  unsure (1)..(106): unsure at all Xaa locations
  Clone ID: MRT4577_165481C.1.pep
PIRDEDXKFQLCKVRYVQFGXKGIPYLNTYDDHTICYPDPLIKANDTIKIDLETNKIMDFIKFDVGNMVMVTGGRNTGRVGVIKNREKHKGSFETIHVLLGAFCYV

SEQ ID NO: 256459 - protein, 87 aa, Zea mays
  Clone ID: MRT4577_165482C.1.pep
MILIYIILIKKKKKKKLETSSPRAEFGTRLELAGNAAKDNKKTRIIPRHVLLAIRNDEELGKLLAGVTITHGGVLPNIHSVLLPKKA

SEQ ID NO: 256460 - protein, 73 aa, Zea mays
  Clone ID: MRT4577_165483C.1.pep
KYPKQNWYRPALVMKANLKQLVPARPDLLHLVQPLKKHRTQKELDIHLKENSTRRLPGNYKIKGAREKRTGTS

SEQ ID NO: 256461 - protein, 140 aa, Zea mays
  Clone ID: MRT4577_165484C.1.pep
ARRQVALGEGDAFPGKHRRSPRPRFGGPNEGQIGRGGVPPPAPGSPPKPGARPGHWGEWLLCPAQYGRHFGWIRLAKQRCFVFLNSPDADGGVTSVGHEWAKWIRGPVYCWICCSAPFLWEGFGTKIFFWTPIFNCEVET

SEQ ID NO: 256462 - protein, 88 aa, Zea mays
  Clone ID: MRT4577_165485C.1.pep
VPHYEGVRFIFAAHGFSINYAIEHETYLILARNVNTMVTDISVGAWALYLLSHRCARHVCRISNLMQTSPMRTPFGTTRCACTSCKWW

SEQ ID NO: 256463 - protein, 65 aa, Zea mays
  Clone ID: MRT4577_165486C.1.pep
RGGFFKGYFPPPGGPSWGNPPRPQGWPYWGQRCFLGGNFFRIKFPPGKKSCPLSFKTGGPHGGKK

SEQ ID NO: 256464 - protein, 66 aa, Zea mays
  Clone ID: MRT4577_165487C.1.pep
MTNTRSARTTPRTRSASPCLIPSAKTALPKEELGKFYSGDCYVVLYTYHSADKKEEFHLAYWIGKN

SEQ ID NO: 256465 - protein, 106 aa, Zea mays
  unsure (1)..(106): unsure at all Xaa locations
  Clone ID: MRT4577_165488C.1.pep
MSDFVRSRYDKKEDFQVLLSKKDPGEQPQHKDYLWMAHWTKASSAAEPRNSDSNPLEDTNNGTATKDSETLPXYDXMKSTVAXRLMVXVRHGSASMQHARQFKSSM

SEQ ID NO: 256466 - protein, 110 aa, Zea mays
  Clone ID: MRT4577_165489C.1.pep
IKRSCERQGDTRHNSSPSVSTAPHLANGNSAHPMAQSTTTRGTATTHAAHSETARPGGADGEAEALTPVVERSGATGVRRGRGLVTGQPAQETGSRGWPDGRPGEGRGGT

SEQ ID NO: 256467 - protein, 62 aa, Zea mays
  Clone ID: MRT4577_16548C.1.pep
RTRGETRGRTRGGPWDLTYADPSKFRLTHQSSFVSSTCKLLEQNHNHALFCESFHGSFLWLQ

SEQ ID NO: 256468 - protein, 187 aa, Zea mays
  Clone ID: MRT4577_165490C.1.pep
LASLHGRIPLRWTPRRKPTTRSPRSPSSSYRTAPRHSFHGAQQAKLLQRRPPLRCSTPTAPFSHGAAANLHGRPSVAYQRPCPYLQPLLAVLRGACRLFDEMSSCCRRAPCLSPRDCSLDVVVEPSLLRLAPSMFLGRSIKCLTEQLVLGSPFAMSSTPVRHLAALAAIVFLCLVKMVELLYVSNRS

SEQ ID NO: 256469 - protein, 64 aa, Zea mays
  Clone ID: MRT4577_165491C.1.pep
MKYFEILSQRATGERPTIAKWIRNFVLKHPKYEKDSIVSRDIGADLISAMNVIADGVKTYEDFA

SEQ ID NO: 256470 - protein, 196 aa, Zea mays
  unsure (1)..(196): unsure at all Xaa locations
  Clone ID: MRT4577_165492C.1.pep
TDPTKIQAIVDWPTPQCLKELRSFLGLAGYYRKFIRYFGIICQPLTSLLKKGVLFVWTADHDLAFHTLQQALVSAPVLALPDFSSQFTIETDASDLDIGAVLMQHGHPLAFLSKALGPKSRGLSTYEKEYMAIIVAVQQWXSYLQHREFXIVTAHKNLXEQRLHTPGKNKKKTKWHGLQYRFQSRKRTENRTARSW

SEQ ID NO: 256471 - protein, 422 aa, Zea mays
  Clone ID: MRT4577_165493C.1.pep
MVRGSLGKLASRALSVAGRWQHQQLRRLNIHEYQGAELMGKYGINVPRGAAAGSVHEVKDALKNMFPSEKEIVVKSQILAGGRGLGTFKSGLQGGVHIVKAEEAELIASKMLGQILITKQTGPEGKIVSKVYLCEKLSLTNEMYFAITLDRKTAGPLIIACSKGGTSIEDLAEKYPDMIIKVPIDVFKGITDEDAAKVVDGLALKAADRQSSIEQIKKLYELFCKCDCTLLEINPLAETADNKLVAADAKLNFDDNAAFRQKEIFALRDTTQEDPREVAAAKADLNYIGLDGEIGCMVNGAGLAMATMDIIKLHGGTPANFLDVGGSASEGQVVEAFKILTSDDRVKAILVNIFGGIMKCDVIASGIVNAAKQVDLKVPVVVRLEGTNVDQGKRILKESGMTLITAEDLDDAAEKAVKASVK

SEQ ID NO: 256472 - protein, 45 aa, Zea mays
  Clone ID: MRT4577_165494C.1.pep
AEASHVGYSCVPYQHSSPWTSSPLSLNASPAHYSYVFMRVWAPVD

SEQ ID NO: 256473 - protein, 434 aa, Zea mays
  unsure (1)..(434): unsure at all Xaa locations
  Clone ID: MRT4577_165495C.1.pep
MVRGSLGKLASRALSVAGRWQHQQLRRLNIHEYQGAELMGKYGINVPRGAAAGSVQEVNDALKNMFPSEKEIVVKSQILAGGRGLGTFKSGLQGGVHIVKAEEAESIARKMLGQILVTKQTGPEGKIVSKVYLCEKLSLTNEMYFAITLDRKTAGPLIIACSKGGTSIEDLAEKYPDMIIKVPVDVFKGITDEDAAKVVDGLALKSADRQSSIEQIKKLYELFCKSDCTLLEINPLAETADNKLVAADAKLNFDDNAAFRQKEIFALRDTTQEDPREVAAAKADLNYIGLDGEIGCMVNGAGLAMATMDIIKLHGGTPANFLDVGGSASEGQVVEAFKILTSDDRVKAILVNIFGGIMKCDVIASGIVNAAKQVDLKXMLNAAKQVDLKVPVVVRLEGTNVDQGKRILKESGMTLITAEDLDDAAEKAVKASVK

SEQ ID NO: 256474 - protein, 121 aa, Zea mays
  Clone ID: MRT4577_165496C.1.pep
PLALVRGSISRRGVCVAGDAFHPMTPELGQGGCAALEDGVVLARCLGEAFAVGGHGSAEAALEKYAGERRWRAVRLVTAAYVVGFVQQSSNPAIKFLRERFLSGLLARVMVDMADFDCGKL

SEQ ID NO: 256475 - protein, 151 aa, Zea mays
  unsure (1)..(151): unsure at all Xaa locations
  Clone ID: MRT4577_165497C.1.pep
CVAYPIHVSLDEAPDCAYRRRGVCARRRPGAGCYRKAGREMMKENLVPGELVGPELLLFKAMPSALLGVRYRGKDRDMRIRGRGGGNTXDIYAIHQDLXARLLVSYYXRYCXEEASTQVREQVILMRYXHTMVVLEPRRWEGKKADWTISR

SEQ ID NO: 256476 - protein, 94 aa, Zea mays
  unsure (1)..(94): unsure at all Xaa locations
  Clone ID: MRT4577_165498C.1.pep
VEAFTFLSPDALDAAVRLAELRRAAEDHAFGMRLTKNWMHLHLLPAXIATAVSMRAGVAADTGAALLFRMLSPPTLLFPPLRHAGGVDVHHEPL

SEQ ID NO: 256477 - protein, 121 aa, Zea mays
  unsure (1)..(121): unsure at all Xaa locations
  Clone ID: MRT4577_165499C.1.pep
PRVXLEQHADFNLFTRFCQTGLRGSSSQKRLNISXKLIAXHGANVNKKDTTSCTPMHRAATTRNSDLREFLIEERTEVDAFDKTPQTPMTHAGIXEHMXTAIMLIRHTSDVNIHDKEGYTD

SEQ ID NO: 256478 - protein, 92 aa, Zea mays
  Clone ID: MRT4577_16549C.1.pep
IKNIINPIDMMLAVTEITNTRRYSIRYWSATALLSSRTKRTTLCITWSSCRIHRRAAGHRFQISLQVGVGAGLFPKFWSTVSLLICLAQFVV

SEQ ID NO: 256479 - protein, 48 aa, Zea mays
  Clone ID: MRT4577_1654C.1.pep
MVKNKKQNMERKTAKKKKKKKKKKKKKKKKKKKHASKKKKKKRPSSCQ

SEQ ID NO: 256480 - protein, 87 aa, Zea mays
  Clone ID: MRT4577_165500C.1.pep
AARQDNSTRDEPHKKRPPANKAMCHKTQSIVDPPYFFSNFSFPFFFFSFFSLSSTNKQTAVSLNRFNSSPLGPRLALFPLRDSSHGA

SEQ ID NO: 256481 - protein, 78 aa, Zea mays
  unsure (1)..(78): unsure at all Xaa locations
  Clone ID: MRT4577_165501C.1.pep
LISCLGRVSKEDIERMVHEAAKYEAXEDEQQRDKVSSKNSLEYYAFNMNATVGDERLQGKINDDDKQNILDKCNEIIN

SEQ ID NO: 256482 - protein, 143 aa, Zea mays
  Clone ID: MRT4577_165502C.1.pep
FCSALVVVPVAVGDRQRLSACNSHLLLSVTVQERASRPRLVHEHVLRRVRVLVCGCGQDGKVAHYLLGPRAVARTRELVRRVAVDPAVAFHPEVVVVVEPVRSHTEEFDPMLLLFRRDVLLFSGAGGARLREARGVGQHVVVL

SEQ ID NO: 256483 - protein, 133 aa, Zea mays
  Clone ID: MRT4577_165503C.1.pep
DRPPPSPPPPRRTCASPSSPPLLLRTRLTFHWRQRRKHIGRSSPPNLIQIQSLPSEGRIRNVSSLPLDPAVNCITPSFTSLSPPNSARGTHRFYIATSLVVEEDTEDLVSFHLFSLLSLDLLSIFDSRYRRSC

SEQ ID NO: 256484 - protein, 140 aa, Zea mays
  Clone ID: MRT4577_165504C.1.pep
MADQEAPVAVEAPTPVLGEPMDLMTALQLVMKKSSAHDGLVKGLREAAKAIEKHAAQLCVLAEDCDQPDYVKLVKALCAEHNVHLVTVPAAKTLGEWAGLCKIDSEGKARKVVGCSCVVVKDYGEESEGLNIVQEYVKSH

SEQ ID NO: 256485 - protein, 109 aa, Zea mays
  Clone ID: MRT4577_165505C.1.pep
MLAAFLLVCVQFMLCKVRSVQFGQKGIPYLNTYDDRTIRYPDPLIKANDTIKIDLETNKIMDFIKFDVGNVVMVTGGRNTGRVGVIKNREKHKGSFETIHVLLGAFCYV

SEQ ID NO: 256486 - protein, 120 aa, Zea mays
  Clone ID: MRT4577_165506C.1.pep
GKIAHVLLSTESVMVHFCWLVRGFGPIPNFFCAEFFPTRVGGFCIPICPFTFWMGDFLVPSTLLVMLNVIGLGGVLRKYAVECLISLGLVSLKVPKTKGMPFEVIPNFFSVGGNQGVAKA

SEQ ID NO: 256487 - protein, 89 aa, Zea mays
  unsure (1)..(89): unsure at all Xaa locations
  Clone ID: MRT4577_165507C.1.pep
PRVRSLAVKIRNSGQTRGCAVLIHVHEGIYQKLAQALIQAEHRLKVENGLXESTPQGPLINETAAQKVEKTTKDATSKGANVMPRRKRH

SEQ ID NO: 256488 - protein, 140 aa, Zea mays; identical to SEQ ID NO: 256484
  Clone ID: MRT4577_165508C.1.pep

SEQ ID NO: 256489 - protein, 86 aa, Zea mays
  Clone ID: MRT4577_165509C.1.pep
VSLGGFDAAQAASRACVRPVFESRGVDGDVFFSLGAFVGGIMLMGKPVLSGVLCSSCAVVFFRRLRASLRVQKRPHAQGRPPTYDI

SEQ ID NO: 256490 - protein, 578 aa, Zea mays
  Clone ID: MRT4577_16550C.1.pep
MAAIHLRPLRSVAVSSARYRSLLHLLARPLSSSQSSHAYHPFPTPAAAAPNHVHHHHPTHHSQQQSAPPRNPPPLGPSPQWSPQPPPPRGYGPPPPQHPHVPPPPPRGYGPLSPGQHLPPSPHGYGPPLPPPPPPHGHGPPPPGQHVVPPLPPSHGHRPPPSCQHVPPPPPSHGHGPPPPGQYVPSALPRDHGPPPPHQQAPPPPPPPEPVAGPGELMGLCREGRVKDAVELLDKGACADPAAFYELAAACSNPKLLEELRKVHDFFLRSPFRGDLRVNNKLLKMYAKCAAMPHARRTFDNMPDRDMDSWHIVIDGYSVNGLGDEALRLFELMKECMSPTSHTYLLVLNACANSEAIEEALLYFDAMHRDHGIEPGVEHYVGIIEVLGKSGQLNEALEFIEKLPFEPNAMVWESLLNLARMNGDIDLEDRAEELLVSLDPSKANPKKLPTPPPKRRLGINMLDGRNKLVEYRLPPKIEKKVVNEQRYVPDTRYVLHDIDQEAKEQALLYHSERLAIAYGLISTPARTPLRIIKNLRICGDCHNAIKIMSRIVGRELIVRDNKRFHHFKDGKCSCGDYW

SEQ ID NO: 256491 - protein, 96 aa, Zea mays
  unsure (1)..(96): unsure at all Xaa locations
  Clone ID: MRT4577_165510C.1.pep
EGRLKPHGFLFWGRVTGPAEGRCRLHISWWNRACWILSLCVKLGGNRPLAGNMNNVAPFFFWGGGTQLFXGGGQKGLQRDLLNCFYEILDGLPFPL

SEQ ID NO: 256492 - protein, 101 aa, Zea mays
  unsure (1)..(101): unsure at all Xaa locations
  Clone ID: MRT4577_165511C.1.pep
KFEHISVPQPTDVAQSAGSEAADAIASVSDSVXPIFRQQAEQLLSSSSLSAADLLAKALAKAVGYTDIKKRSLLSSLEDYSTLHLQTGRPMWSPGFAITFR

SEQ ID NO: 256493 - protein, 99 aa, Zea mays
  Clone ID: MRT4577_165512C.1.pep
KGLREAAKAIEKHAAQLCVLAEDCDQPDYVKLVKALCAEHNVHLVTVPAAKTLGEWAGLCKIDSEGKARKVVGCSCVVVKDYGEESEGLNIVQEYVKSH

SEQ ID NO: 256494 - protein, 1093 aa, Zea mays
  unsure (1)..(1093): unsure at all Xaa locations
  Clone ID: MRT4577_165513C.1.pep
MDIETHAAALARDELRRLLAATLSPDKASVDAAAAGLDALSSDPRFPLAILAVAAGDGDQGMRVAAATYLKNFTRRNLETRLCSSEVYKEFRDQLAQALLRVEPAILRVLIEVFRQVVEKDFVKDNLWPELIPQLKLVIQSSNLISPGQHPECNTINALTVLQSVVRPFQYFLNPKVVKEPVPQQLEQIAAEILVPLQVTFHHFSDKVLLSPDGTNLEYEQLLLITCKCMYFTVRSYMPSRVKQILPSFCKDMFRILDSLNFNSLIEDGSTMKLKIAKRCLIIFCALVTRHRKHTDNQMPHIVNCAIKISKQSIHLSKLDSLPNRIVSLAFDVISRVLETGPXVTSFTTFFFTSXSAIFPALALNEKDIEEWEEDTDEYMQKNLPSELDDISGWTEDLFTARKSAINLLGVIALSKGPPVASAASKRKKGDKNKGKSEMSSIGELLVTPFLSKFPIPSHGEDASSVAVRNYFGVLMAYGGLQDFLTEKKDLTITLIRNRILPLYSLDPCSPYLISTANWVIGQLAICLPEDMSSSIYESLMKALTMEYVEDITCYPVCASASGAIAELIENSYVPPDWLILLQVVLKRISTGDENESALLFKLLGTIVEGGQEKVLSHIPEIVSNIASTVMELLPPVPDPWPQVVEQGFAALVAMVQAWESSAPDENKTPEKRFWQSGQSAIAQTISLLLQKAWLLQADNMEGSALALPPPSCVNDASVLLEFVMSSVTCMEETASLKVFELVATWADAIANWDSWEEMEDQGVFNTIKEAVNFHQRFDLDGLFLKTLPSQSENGSQSSVIGRVSNFVTRAIAAYPSATWRACSCVHTLLHAPKFSLGAQDTRKTISESFAQAAFSRFKSVSDSPAGLWKPLLLAISSCYICYPDAIEQVLNNVDGNGFAIWASALAQVSSSLFNPGLSSESEIKLAVLTLSTVINHLVSLSTGGTKLLQDCYASLMESCIQLKEVQDDGDNDDDDDGAEDVDDNDEEEDTEDDDEDSDDDDDAREETEEEFLERYALAAAAGESVEEGDIDEETQDIELGSLDDVDIQQVVIPLMQKLPALQPAGAFPDSLVERIAETFPEYEQFLQALRRA

SEQ ID NO: 256495 - protein, 140 aa, Zea mays
  Clone ID: MRT4577_165514C.1.pep
MAEQEAPVAVEAPTPVLGEPMDLMTALQLVMKKSSAHDGLVKGLREAAKAIEKHAAQLCVLAEDCDQPDYVKLVKALCAEHNVHLVTVPAAKTLGEWAGLCKIDSEGKASKVVGCSCVVVKDYGEESEGLNIVQEYVKSH

SEQ ID NO: 256496 - protein, 164 aa, Zea mays; identical to SEQ ID NO: 192461
  Clone ID: MRT4577_165515C.1.pep

SEQ ID NO: 256497 - protein, 141 aa, Zea mays
  unsure (1)..(141): unsure at all Xaa locations
  Clone ID: MRT4577_165516C.1.pep
MAEQEAPVAVEAPTPVLGEPMDSMTALQLVMKKSSAHDGLVKGLREAAKAIEKHAAQLCVLAEDCDQPGYVKXLVKALCAEHNVHLVTVPAAQTLGXWAGLCKIDSEGKARKVVGCSCVVVKDYGEESEGLNIVQEYVKSH

SEQ ID NO: 256498 - protein, 697 aa, Zea mays
  Clone ID: MRT4577_165517C.1.pep
MEFPKRGRAFLQGSLRRSPKATIPGAATGADENASSKHLVPVGAASPKRKKVLGERNDSGVGGMEGAASAPVQQPKLALSPPTPASRGAGPYDPKTNYTTPRPAFLRYDPERRREILLRVSRAAEVMDDDCSSTTSGTAASEEDGGSSLASDAAAGSLISSPPRSDSEAELDDSEEEEEVVPARRGRWARRLLLLLVCVSCSFCYMYCAKPSGFPTYSEDALDLDRGIGGMYDAYDHELDSLRLLGPVHMMGPEDVLEEITNQLVHEDSKSVDHLYGNRAPRNLVAVAMVGLADICLNVSSGEFTCQIGGEKGENVPDLKEDSEMDKLDTELTISFQNDKQSSEVDCLGGNAPLDSIGSTSTHTDNLEGSLESFHLEEWDDYSNQSELQLVSMERAIKSASYKLKDRTGLESEELDLWQYENTAEAAKTICSTVKFLWSAMEPHLLQVLACLSFAGLVAALYRYYQRSRECCNCIITYDSLAEQPLLVQHQVAQLSVTSVRDAQLPVHSSEQPIQLAIPNQGTAGSLEVPMELTLPKLDPLVSLEDPAQESLPMTDPLVTVKIPVIGRGIHDQKLKRGDSENIKASNGMFLNHSDVDSSKPPVVELLGEFVLASSSRERSTKKLYQNAGDATDKKLLKPLKKDEDVEKMQMHSSIIQSPSVGRAKKEQEKSINREKTDATPTPLRRSSRLRNKVTSP

SEQ ID NO: 256499 - protein, 74 aa, Zea mays
  unsure (1)..(74): unsure at all Xaa locations
  Clone ID: MRT4577_165518C.1.pep
LISRHPDPLIKANDTIKIDLETNKIMDFIKFDVGNVVMVTGGRNTGRVGVIKNREKHKGSXETIHVLLGAFCYV

SEQ ID NO: 256500 - protein, 164 aa, Zea mays
  Clone ID: MRT4577_165519C.1.pep
RSFRLLDCSRYLHSQSAVSSEPREMADQETVAVVEAPTPVLGEPMDLMTALQLVMKKSGAHDGLVKGLREAAKAIEKHAAQLCVLAEDCDQPDYVKLVKALCAEHNVHLVTVPSAKTLGEWAGLCKIDSEGKARKVVGCSCVVVKDYGEESEGLNIVQEYVKSH

SEQ ID NO: 256501 - protein, 66 aa, Zea mays
  Clone ID: MRT4577_16551C.1.pep
ARCSSRNHVLCQKTQAHTVVVNEVAVLCNNTEFMCSWLMKNCVGSTVVIMVDVAHNSTSSMHQLVE

SEQ ID NO: 256502 - protein, 367 aa, Zea mays
  unsure (1)..(367): unsure at all Xaa locations
  Clone ID: MRT4577_165520C.1.pep
SRASRSRRSADRLCSNPPPSLRCKRAPRGISPLRCCLRGAADRVASLKSYCRALGLCDRCAEKWFQGHKCANMVQLHAIEEVXDLLTLDEAIVEVIEPAEELMMVVSLSNAAWSGSDTISTMRLQGQIQRHNLLVLIDSGSSHTFLNDSRRPLLFGVQELTTPITVXVANGQVITCSHHLPAAPWTIXYNPMRVDWTNKWMVISYQENTIYLQGIRSSLLVGMVVELLLLSETSLSTSDSSIAVVVVYSRVQAVLDSYPSIFIDLVGLPPTCPCDHSISLIPGAQPFHIRPYRYPPTLKDEIETQVKEMLSQGVIRKSSSPFGSPILLVKKKDHSWRFCVDYRYLNATTVKSKYPVLIFDQFFVLRH

SEQ ID NO: 256503 - protein, 140 aa, Zea mays
  Clone ID: MRT4577_165521C.1.pep
MAEQEAPVVVEAPTPVLGEPMDLMTALQLVMKKSSAHDGLVKGLREAAKAIEKHAAQLCVLAEDCDQPDYVKLVKALCAEHNVHLVTVPAAKTLGEWAGLCKIDSEGKARKVVGCSCVVVKDYGEESEGLNIVQEYVKSH

SEQ ID NO: 256504 - protein, 265 aa, Zea mays
  Clone ID: MRT4577_165522C.1.pep
MARGLKKHLKRLNAPKHWMLDKLGGAFAPKPSSGPHKSRECLPLILIIRNRLKYALNYREVISILMQRHVLVDGKVRTDKTYPAGFMDVISIPKTMENYRLLYDTKGRFRLHPIRDEDAKFKLCKVRSVQFGQKGIPYLNTYDGRTIRYPDPLIKANDTIKIDLETNKIMDFIKFDVGNVVMVTGGRNTGRVGVIKNREKHKGGFDTIHVEDSMGHQFATRMGNVFTIGKGNKPWVSLPKGKGIKLSIIEEQRRRDFAAQAAAKA

SEQ ID NO: 256505 - protein, 178 aa, Zea mays
  Clone ID: MRT4577_165523C.1.pep
MGDWDPRGRAGKTLAATRFSLAPDLPSQPARDPFTAREMADQEAPVAVEAPTPVLGEPMDLMTALQLVMKKSSAHDGLVKGLREAAKAIEKHAAQLCVLAEDCDQPDYVKLVKALCAEHNVHLVTVPAAKTLGEWAGLCKIDSEGKARKVVGCSCVVVKDYGEESEGLNIVQEYVKSH

SEQ ID NO: 256506 - protein, 76 aa, Zea mays
  Clone ID: MRT4577_165524C.1.pep
ASLVRKQGPKASELIKNHILLVPQLLLYPCTTNISSLLYQSSEFATVCNSFLLFYFCRTNLFLQKYIIAGKHKVKK

SEQ ID NO: 256507 - protein, 164 aa, Zea mays
  Clone ID: MRT4577_165525C.1.pep
RPFRLLDCSRYLHSQSAVSSEPREMADQETVAVVEAPTPVLGEPMDLMTALQLVMKKSGAHDGLVKGLREAAKAIEKHAAQLCVLAEDCDQPDYVKLVKALCAEHNVHLVTVPSAKTLGEWAGLCKIDSEGKARKVVGCSCVVVKDYGEESEGLNIVQEYVKSH

SEQ ID NO: 256508 - protein, 85 aa, Zea mays
  unsure (1)..(85): unsure at all Xaa locations
  Clone ID: MRT4577_165526C.1.pep
VMHETPPLRAIAQLAQCASRVYYWWIYVPYELLTPDVFSLVRPVSVSEGMTVSPSYPETANVVNCLSCRPVASKWPVLIWAXALY

SEQ ID NO: 256509 - protein, 99 aa, Zea mays
  Clone ID: MRT4577_165527C.1.pep
LWIDRFPNWRRTEGLGQDRFGILFEDLRRGALATAGKVIKRKAAVAWEAGKPLSIEEVEVAPSQALEVRVKILFTWLCHTDVYFWEAKGHTPVFPRIFG

SEQ ID NO: 256510 - protein, 162 aa, Zea mays
  unsure (1)..(162): unsure at all Xaa locations
  Clone ID: MRT4577_165528C.1.pep
AASRHPRRALISRGLQRCPWIRTCPRSWTRRWSCRRRRPPRRHRTRRPRPPPPSPSHHRPATPLPSXPLVPRPSPPRRQPPTXSCPTPPPPPLRRPPMPPARRACSSPCPSPRPAPTSSLSWVPAAPASRRCSASCPAAARAPRSPSPARCRSTGTRAPPAR

SEQ ID NO: 256511 - protein, 121 aa, Zea mays
  unsure (1)..(121): unsure at all Xaa locations
  Clone ID: MRT4577_165529C.1.pep
XKKKKKKKKKKKKKKKKKKKKKKKKKKKKRKKSKKRKKIYVRRLSRIPSVFFGATLVSFHWPGVSQRWSLGKTLLVPGFIGACPAIPLSPAGSIFSRPAPCAFAHIGPPFLAIGTPPGLMD

SEQ ID NO: 256512 - protein, 106 aa, Zea mays
  Clone ID: MRT4577_16552C.1.pep
FGEPPRYFLTRGESQSSKVYSKSFTLTPLFHTPVHHTLSFPIPSLSSHLPPLAVLLLSSPPPPAWLLAAPTSPSRSPPAASALWSPRPWRSAGSSRRLVRTKRPAA

SEQ ID NO: 256513 - protein, 72 aa, Zea mays
  Clone ID: MRT4577_165530C.1.pep
LWASTGGLTAGAELKEYTEERTGGGARHRSLRKDYGASPGGRGSAFLWWGGVFSGGAEGKRHKPSLKRGGRP

SEQ ID NO: 256514 - protein, 88 aa, Zea mays
  Clone ID: MRT4577_165531C.1.pep
FGVVWSVVVGRGRRAAVAGFLGRCHRAADGCGEVALSLLWSGVERFECGWPPFRGRHGASRDSRWPWRIVKMGWLVDHRISVYPGLGF

SEQ ID NO: 256515 - protein, 351 aa, Zea mays
  Clone ID: MRT4577_165532C.1.pep
MATSKLAVLALFALLGSVSCQAGGYYDYYYPTPQRPPTPSPAGTHLKVGYYRNKCAAAYVDVEAIVKKHVKATDAGMQAGLVRLFFHDCFVRGCDGSILLDTFSNDTSLTPEKFGVPNFPILRGFEVIDAAKAEIEAACPGTVSCADIVAFAARDASYFLSGGGISFAMPAGRYDGNVSLASETLPNLPSPFTGFDQLVKVFADKGLDAFDMITLSGAHSIGRSHCSSFTRDRLPPSNTTDIDPAFAATLQASCASPNGTDNTVMQDFKTPDVLDNQYYKNVLAHKVLFTSDAALTTNFTSNNLVRAYADFVPYLWQQKFAKAMVKMGGIQIKTADNGEIRKTCRKVNNRT

SEQ ID NO: 256516 - protein, 79 aa, Zea mays
  unsure (1)..(79): unsure at all Xaa locations
  Clone ID: MRT4577_165533C.1.pep
KWGSPSPPPRGLFFSKPFPXXXPPPYGGGVAXFLSWVTPGFSXSRQRAAPAFAVNFGVSMRELWRRRVASVSLELFPRP

SEQ ID NO: 256517 - protein, 350 aa, Zea mays
  Clone ID: MRT4577_165534C.1.pep
MTTSKLAVLTLFALLGSVSCQSGGYYFYPTPQPSPTPSPPPPSPQLMVGYYKDKCGALVDVEAIVKKHVKATDAGMQAGLVRLLFHDCFVRGCDGSVLLDTFSNDTSLTPEKFGVPNFPSLRGFEVIDAAKAEIEAACPGKVSCADIVAFAARDASNFLSGGSISFAMPAGRYDGNVSLASETLPNLPSPFTGFDQLVKVFADKGLDAFDMITLSGAHSIGRSHCSSFTRDRLPPSNTTDIDPAFAATLQASCASPNGTDNTVMQDFKTPDVLDNQYYKNVLAHKVLFTSDAALTTNFTSNNLVRAYADFVPYLWQQKFAKAMVKMAGVEIKTAANGEIRKTCRKVNSRS

SEQ ID NO: 256518 - protein, 53 aa, Zea mays
  Clone ID: MRT4577_165535C.1.pep
CSGAQTSSSCGATSTSGRSNSLDKWVDKLRPQKKISPHAPSQVLWCGRHGTCY

SEQ ID NO: 256519 - protein, 90 aa, Zea mays
  Clone ID: MRT4577_165536C.1.pep
GDTAAAGLPSLLQRRRYNHSAESTRTRVRCMLRRRVASVTGTGGCVAAGLGNLLLCRGQLIVRRTVRDPAAGRNADVTGAGMSRGWVACC

SEQ ID NO: 256520 - protein, 143 aa, Zea mays
  Clone ID: MRT4577_165537C.1.pep
WNSDEGSATVRSGLRTDRLRWSATRVDAPLGCGAQDADESSPIVLQDRWLELAGAALEYLLACRQRANLRRVIGVDVPALHHVVVRVPAVPLSDAAERAANGRHIARGVAPQPAGDALSESLTAAGRDPPSLLGSHRLLPRPR

SEQ ID NO: 256521 - protein, 49 aa, Zea mays
  Clone ID: MRT4577_165538C.1.pep
LLNVLLFYSGKCCSLMSSTCSHIHQHYSKISGKNIFYHLSRDIFQNLDP

SEQ ID NO: 256522 - protein, 117 aa, Zea mays
  Clone ID: MRT4577_165539C.1.pep
HKILYMLRGCARVQVVNHGGDAVFDDNVEQGQLLTVPQNFAFMKQAGNEGAEWISFFTNSEATNTPMAGSVSFMRALPEEVVAASYQVSREDARRIKFNNKNTFFFTPSQSERRADA

SEQ ID NO: 256523 - protein, 40 aa, Zea mays
  Clone ID: MRT4577_16553C.1.pep
SSSTVDTAVTIKTTCFFTDFGNCDSHIQDFASHSLVAGGG

SEQ ID NO: 256524 - protein, 110 aa, Zea mays
  Clone ID: MRT4577_165540C.1.pep
PRGWPEKKKFEEEKCKTLEMQRIWKSEAQKSEEYRRVADTERKVANDWRASCERLRSEANEIRAQLTAQIQKTEEILKRAEAEKQKVAREKKRADSEKSLSDKNRTLVEV

SEQ ID NO: 256525 - protein, 109 aa, Zea mays
  Clone ID: MRT4577_165541C.1.pep
SGYPYFTLSVAGTLFHLITDRRTLAARQPRVHLLCHTIVESECPETHPMAGANQPLSTPAREDSRRAALLGTITSLPYTEEHDEDQPHHADKGTGDLIRCSSREESPPN

SEQ ID NO: 256526 - protein, 104 aa, Zea mays
  Clone ID: MRT4577_165542C.1.pep
ASRRGQLEREETPPGSGAAFRIHLGTTYSCVGMGQGDRGEIIGKDHSVRTTTSGVGFKVFRRYDHRPESHRAPFDCGGWASRCARFPGDPAEDLQGRDCGIPAS

SEQ ID NO: 256527 - protein, 64 aa, Zea mays
  Clone ID: MRT4577_165543C.1.pep
RCSPSPPPRLKGTSLPIPTGYLPAIRAPYSPNLKSFTYSRLNTSSHLHHSSHALYFVDLTAPFQ

SEQ ID NO: 256528 - protein, 112 aa, Zea mays
  Clone ID: MRT4577_165544C.1.pep
TPFPATTVELGSTPVMGKKTKPLGQLQDFLKKKPVSVFQPGKPKALKQKWFQALFCPHKFPRVFPLGGHVNQPRLGFWRLASQGATPVLRVPDKEKFGKKFEWTIPPPKKRR

SEQ ID NO: 256529 - protein, 70 aa, Zea mays
  Clone ID: MRT4577_165545C.1.pep
ICLYMSYFISLLSSNRSRDKLIFRPKITKSNFEGQNHSCTSIQEQKHNFSNFYSVKFRVYYHPYVRCADL

SEQ ID NO: 256530 - protein, 113 aa, Zea mays
  Clone ID: MRT4577_165546C.1.pep
TGPVAKEPSIIPSPCGCKCKAWPGLASSNARGVCVCVSLLRSPVRARPPLLGALAVPVPVQADHLRLTTLQQMHKILTPRQAARGLLALGDYFQRLRTLSSMWAARPREAAIS

SEQ ID NO: 256531 - protein, 89 aa, Zea mays
  Clone ID: MRT4577_165547C.1.pep
ASTHPHSRQLRFFTNYLDPTPTSSFLLDLQNNPNHEEGGSPHVIVTEPHLLMWQLRLHVSKNPTSTRNPDVEKRKHQPKATSRPRRTQT

SEQ ID NO: 256532 - protein, 164 aa, Zea mays
  Clone ID: MRT4577_165548C.1.pep
AHLRETYAILANKEVIAVNQNPLGVQGKKVRMEGNNEIWAAPLFEYRTAVLLLNRHAKEEAPIPAHWGEIGLPPGTPVEAKDLWLPETLDPPFPDKIKFDVAPHLCKMVVLKPRIQIQLNTPTLPQGGGYVRPSRRPPGLIYLYCRVLNANTWNQNPQKRFLFL

SEQ ID NO: 256533 - protein, 31 aa, Zea mays
  Clone ID: MRT4577_165549C.1.pep
MADGEDIQPLVCDNGTGMVKAGFAGDDAPRA

SEQ ID NO: 256534 - protein, 71 aa, Zea mays
  Clone ID: MRT4577_16554C.1.pep
LPHGPLCFWSPCVVGVPVSLCPVWGSGPFGVLAGWGASSCFLAFGGVGGAFCCLPPVAFFRFRERRFWAAA

SEQ ID NO: 256535 - protein, 71 aa, Zea mays
  Clone ID: MRT4577_165550C.1.pep
DRRSLLLTVSQDHMRASWRAMAAGHTGRNSKQHAADRFRRALANSRSLHHHTCATIAVANFFCTAGASATA

SEQ ID NO: 256536 - protein, 86 aa, Zea mays
  Clone ID: MRT4577_165551C.1.pep
RGEPRVRERSSSDLLFDLKNYLYLRGAVFHILLTILTAYGMHTQTLWMNPYYPVLRSLYPDITSLEFGTTLFKFPCIRVTLHTIFI

SEQ ID NO: 256537 - protein, 127 aa, Zea mays
  Clone ID: MRT4577_165552C.1.pep
LNTARRMGRHRGLGKRKGTKDARMPSQVLWMRRQRVLRRLLVKYRASGKIDKHLYHELYHLSKGNTFKHKRALVEHIHKAKAEKQRERVLKEEMDAKRAKTKAARERRQERILAKRNALTGEEEAQE

SEQ ID NO: 256538 - protein, 97 aa, Zea mays
  Clone ID: MRT4577_165553C.1.pep
DGTTLAVLRYFFLFPYSYTSSNYLKIIWSSWIPIQKVLLPFVGLDQPFILVANNVEYIGSWATQSNPQNLTQLVHRVGSGHECRTATTIRLGVDCNF

SEQ ID NO: 256539 - protein, 139 aa, Zea mays
  Clone ID: MRT4577_165554C.1.pep
RFRNRRRATDPQRGRAVARDAIGREASAPIIVRRFNSIACVRTHSIPTYCLPHSASDRNHRSAVSQYIRYSHGQRLTRIVSPATIIRPSVRKARFLSAASRIALVALLLASTPALADPIRQTKGDWQDKFRQLEGEDWL

SEQ ID NO: 256540 - protein, 45 aa, Zea mays
  Clone ID: MRT4577_165555C.1.pep
AVPIFTLKDVSFCFPPLIFQLWHSDRNVILGTCTRNHTVGSLKLA

SEQ ID NO: 256541 - protein, 36 aa, Zea mays
  Clone ID: MRT4577_165556C.1.pep
SLPGLGGSQTKIVKHKGSKKPYNSCHSAKERVDAMV

SEQ ID NO: 256542 - protein, 31 aa, Zea mays
  Clone ID: MRT4577_165557C.1.pep
RYPFSRESAQQILICATLKSGNHVHPNYPCF

SEQ ID NO: 256543 - protein, 64 aa, Zea mays
  Clone ID: MRT4577_165558C.1.pep
LQPILAGSVPIRISSPPPSTPSDSITVIWMQDTSKKSPMLLFNEVPTIKVDGLITAYEWGTLQS

SEQ ID NO: 256544 - protein, 99 aa, Zea mays
  unsure (1)..(99): unsure at all Xaa locations
  Clone ID: MRT4577_165559C.1.pep
ELALHLGTSNESPSRTRPHTPDSRTAARSSPPAKPPRERALPPVVSSSPARSPRHPFERDSSPXVAQAARXRPPSSPSSRQQGPGRPAWRCPSPRSSRR

SEQ ID NO: 256545 - protein, 301 aa, Zea mays
  unsure (1)..(301): unsure at all Xaa locations
  Clone ID: MRT4577_16555C.1.pep
MEHVFGGKFKLGKKIGSGSFGELYLGVNIQSGEEVAIKLESVKSRHPQLHYESKLYMLLQGGTGIPHLKWFGVDGEYNVMVIDLLGPSLEDVFNQCNRKFSLKTVLMLADQMITRVEYMHTRGFLHRDIKPDNFLVGLGRKANQVYIIDYGLAKKYRDLQTHKHIPYRENKNLTGTARYASVNTHLGVEQSRRDDLESLGYVLMYFLRGSLPWQGLKAGTKKQKYDKISEKKMLTSIEALCKSYPSEFVTYFHYCRSLQFEDKPDYSYLKKNFRDLFIXREGCQPDYVFDWDCILRQAAGQ

SEQ ID NO: 256546 - protein, 359 aa, Zea mays
  unsure (1)..(359): unsure at all Xaa locations
  Clone ID: MRT4577_165560C.1.pep
MAATAADEFVKGRVLPNGVAVITLDRPKALNAMNLEMDVRYKALLDEWETNPSVKCILVESSSPRAFXQQVFTAEYSLICKIHEYAKPYICLMDGVTMGFGIGLSGHGRYRIITERTLLAMPENGIGLFPDVGFAYIGAKAPGGGAVGAYLGITGKRISSPADAMFIGLGTHYVPSANLGSLKESLLSANFTNDTHRDVESVLTGYKKEPESEPQIEKLLPYIISSFSPDKSVAESVEELKKFSRSGDAAVAEWANEALAGIEKGAPFSLCLTQKHFSQVASAYGTSEHYLSKLAGVMKLEYRIALRSSVRNDFVEGVRAVLVDKDQNPKWNPATLEEVNMAEVESVFEPLGAEAELSV

SEQ ID NO: 256547 - protein, 61 aa, Zea mays
  Clone ID: MRT4577_165561C.1.pep
VDREKHMGPGETCYYKKGGPGGPIFSGVPLHGKSLEQIPTTLTRRGPKSGLDAAGQGRLFW

SEQ ID NO: 256548 - protein, 124 aa, Zea mays
  Clone ID: MRT4577_165562C.1.pep
CFNGRVGGKQPVRLYVKAQVLGYRKSKVDQYPNVSLLRLENVSTKEDTSFYLGKRVAYVYRAPKKNKNGSNVRVVWGKIARPHGSNGVVRARFKKNLPPKTVGSKARVMLYPSRCISQSLLSAK

SEQ ID NO: 256549 - protein, 427 aa, Zea mays
  Clone ID: MRT4577_165563C.1.pep
MRALVRIHLPTAISTGSFLHTSSTAASKTLVPNPNLVPLRLVRHFPAMAATAADEFVKGRVFPNGVAVITLDRPKALNAMNLEMDVRYKALLDEWETNPSVKCILVESSSPRAFSAGMDIKGVAVEIQKDKKTPLVQKVFTVEYSLICKIHEYAKPYICLMDGVTMGFGIGLSGHGRYRIITERTLLAMPENGIGLFPDVGFAYIGAKAPGGGAVGVYLGITGKRISSPADAMFIGLGTHYVPSANLGSLKESLLSANFTNDPHRDVESVLTGYKKEPESEPQLKKLLPYIISSFSPDKSVAESVEELKKCSRSGDAAVAEWANEALAGIEKGAPFSLCLTQKHFSQVASAYGTSEHYLSKLAGVMKLEYRIALRSSIRNDFVEGVRAVLVDKDQNPKWNPATLEEVNMAEVESVFEPLGAEAELSV

SEQ ID NO: 256550 - protein, 40 aa, Zea mays
  Clone ID: MRT4577_165564C.1.pep
VADCNPQPCLGLGSAGAHSLVGTRAWWLVRPWASPSSEFL

SEQ ID NO: 256551 - protein, 113 aa, Zea mays
  Clone ID: MRT4577_165565C.1.pep
SSQQIGGSLGPFADWETRSMGSSDIQIGPAFYYYERPNSVALQSPPPKSNETWGGVNIMRGTCRHACHIFTLASPTGGHRDAITGLPLVATTIANHRLCRIISSPDGWTNLWK

SEQ ID NO: 256552 - protein, 97 aa, Zea mays
  unsure (1)..(97): unsure at all Xaa locations
  Clone ID: MRT4577_165566C.1.pep
IEILLNNVVFNLPWNATRIGMEFTVINYSPDLKDEGFDSIDDEYSPGIFRQEAYMFENKQKSRSFISYKPNAYNANNRHIAATVEIXQSGFXLSTDT

SEQ ID NO: 256553 - protein, 180 aa, Zea mays
  unsure (1)..(180): unsure at all Xaa locations
  Clone ID: MRT4577_165567C.1.pep
MATENTHIDIELIGHVDSGKTTTTGHLIYKVXGIDXTAQRVLQKECCATTNKWFVEACVXLDKINAERXERRITIDIDLRNMYITKDYCTVIDDPLHRDFIRNMITXTSLPDCAVLIYDSTTGDXEVSICKDGQTHEHVLHAHTIGALQMSCCCNNMNATTPKYADARYXEIDNEISSYL

SEQ ID NO: 256554 - protein, 114 aa, Zea mays
  unsure (1)..(114): unsure at all Xaa locations
  Clone ID: MRT4577_165568C.1.pep
QGRRARPPNKTNQEPTPPRASTXTERPTTARNEXRQEPGGRPPPPPPKRRRKKKKKKEGRTEDXXERGGKRXGVKEGAGWWQGGRAGVDGYGDMEMTIGRGWVAGYXSERASKR

SEQ ID NO: 256555 - protein, 196 aa, Zea mays
  Clone ID: MRT4577_165569C.1.pep
QLSKIGFEMEILSMGYQACGALELWNYPSFFRDLIPQNLDGTNRSDRIDLAALEVYRDRERSVPRYNEFRRRLFLIPIKCWEDLTSDKDAIEAIRAIYGDDVEKLDLLVGLMAEKKIKGFAISETAFNIFILMASRRLEADRFFTSNFNEKTYTKKGMQWVKTTEGLRDVINRHYPEISAKWMKSSSAFSVWDADY

SEQ ID NO: 256556 - protein, 105 aa, Zea mays
  Clone ID: MRT4577_16556C.1.pep
ASTYRAANNIRLLQKCGTSFFSWMSSLTNGLPMLDGATAAVPLEQKFSASTGDGSAAPSQPLQNNRSVPMQFFGFNLLFQSLYTRNVLHVIALKKTGMVPSYIFS

SEQ ID NO: 256557 - protein, 109 aa, Zea mays
  Clone ID: MRT4577_165570C.1.pep
LFPPRRPEQGCLGTGWWGAPQGCPLTWGGRSPALRLWGGVPGGSLSAAPPSVVGGPGVWGQLRCPARVRRLPRRSCRDGLPRSSNSGGVLFPPVWYKRCSAAGVFKILV

SEQ ID NO: 256558 - protein, 596 aa, Zea mays
  Clone ID: MRT4577_165571C.1.pep
MDPRNKEVNLDSLMYGTIGGLTEQELKKQEAEYIYRYRYNGGGATQVWLSSGRFVVIDLSAGPCTYGKIETEEGSVSYRSMPRLSQIIFPRGLAAPSASSTQDIFIGQLGGAIATTIEHVIAPDIRFETVDMAVRLLVPIIVLQNHNRYNILQEGHNYSIDVQAIEREVKKMVHPGQEVIIISGSHALHQHEKLAVAVSKATRSHSLHETKSDGRFHVRTKTYLDGAILKEEMERSADVLSAGLLEVANPSLSSRFFLKQHWTDGEDDVKDSIKHRPLWESYMPKNNKGRRGTGKKKHGSLYRTYGTRVIPVFVLSLAGVDAELLMEEESLVWTSKDVVIVLEHNNEKIPLSYVSETTRQFALPSIAQRHILAGLASAVGGLSAPYERASRIHERHVVNWLWAAGCHPFGPFSNSSQISQILQDVALRTTIYAQVDAALRKIRDTSEFVQSFASEHLKTPLGELVKGNKNKSTTELWVEKFYKKVTNLPEPFPHDLVEKLEEYLDKLEGQLVDLSSLLYDHRLVDAYQNSTDILQSTIFTQQYVERVLANERDKMKCCSIEYSHPKQSSQAFVYGGILLAGFLVYSLVIFFSSPVR

SEQ ID NO: 256559 - protein, 168 aa, Zea mays
  Clone ID: MRT4577_165572C.1.pep
MYRRGDDDRLERDNIWNMIQVQKSQIQRRAMGEEGATIADQDGGQGRSQTCARPGESIESMPFIEALGQLSYRVGEKLHTYYDTYKPSASPGNFCLVHVSLVPVLNVVGEQKTKPTQHSVCGLRGLGLTPNILACFSTKELEDSVKEKLSQFCHVPVGNHFHSKLHMM

SEQ ID NO: 256560 - protein, 153 aa, Zea mays
  unsure (1)..(153): unsure at all Xaa locations
  Clone ID: MRT4577_165573C.1.pep
SACAXRGGRGGSHRRTHRRSGDRRAGGNRCRAGSSSGAGGGGAHLRDHGLSDMQRRHADGAAQDRRRQDRRDARARHDLARDRVAAAARDTXPRRAGSLRTHTRVKAAVSSMRRARMQSRLSTSSIREAIWRSDDEMREINKVQKLYFFSVSS

SEQ ID NO: 256561 - protein, 70 aa, Zea mays
  Clone ID: MRT4577_165574C.1.pep
HWTSQASKEQKAKHDHKRRDNLQENKLNLILESEIPQDSHHAVTSLILGTLKMSLSCFLLLLFSCSQLLR

SEQ ID NO: 256562 - protein, 37 aa, Zea mays
  Clone ID: MRT4577_165575C.1.pep
ALRLVLSVMHEAVEAIQFPLLKVPPMCYKTENTSSSR

SEQ ID NO: 256563 - protein, 60 aa, Zea mays
  Clone ID: MRT4577_165576C.1.pep
LAHGPPVDQGCIAVPGVGSPLGYTIWRRTFREQEMGWAHSATRLLGVPPACEARLLLSPS

SEQ ID NO: 256564 - protein, 103 aa, Zea mays
  unsure (1)..(103): unsure at all Xaa locations
  Clone ID: MRT4577_165577C.1.pep
TRKEKKKKRALPLANNMMIXYEGKIAGWPDDTGTQMXLAWKIKSPRPTRAKATDGTNAALGGADCGMLRPESAAGAYPAVNGKNMAPLFFEGESSPAQEAVFK

SEQ ID NO: 256565 - protein, 53 aa, Zea mays
  Clone ID: MRT4577_165578C.1.pep
FLADTMVTGRPGVRVYQPSGRGPPKGWVKSRPIILPFKMEWNGMESIMCVLAR

SEQ ID NO: 256566 - protein, 83 aa, Zea mays
  Clone ID: MRT4577_165579C.1.pep
PPRVGVPKGPPPVGNRFGETRWFPLSPFVRKEFGWVFFPGERLKSPGEECNKVFVGITQGKFLAPMFESPKEWGGKPLPFNFK

SEQ ID NO: 256567 - protein, 146 aa, Zea mays
  unsure (1)..(146): unsure at all Xaa locations
  Clone ID: MRT4577_16557C.1.pep
MDGHATAPDFSPAGSFGHATARSENSADSEGGEPRATYSPPEKVSGGAACPAIRLSSGRRAAVGVVLADLPSSFRGFAFKLRGSHTKPPSSVANSIRLAAAARXPVGLDCSVARGGSQHGIYLLLTNPGKPLFLVIPARIFCGLAR

SEQ ID NO: 256568 - protein, 67 aa, Zea mays
  Clone ID: MRT4577_165580C.1.pep
SRCSEVRRITPCPPRTPPPGTTSFPPPLSISAIDVGRHTYACVYPAGCSCIVSAFPVLVSLVSLSLS

SEQ ID NO: 256569 - protein, 61 aa, Zea mays
  Clone ID: MRT4577_165581C.1.pep
IPRTDPRVAETHTYYTRQPYPIYSLLLPSNPHERHFKDRLWPPLQGPTLTIDHSGCTNHML

SEQ ID NO: 256570 - protein, 38 aa, Zea mays
  Clone ID: MRT4577_165582C.1.pep
TLSWRLLIRMRSAVQSLWQQGAAVRSGAGYLPSVQRRL

SEQ ID NO: 256571 - protein, 55 aa, Zea mays
  Clone ID: MRT4577_165583C.1.pep
MNILISRSCKLTPRAALSASLDRLFEDVDTIKDELRDLQRIQRSLHYDNEAGKSM

SEQ ID NO: 256572 - protein, 173 aa, Zea mays
  unsure (1)..(173): unsure at all Xaa locations
  Clone ID: MRT4577_165584C.1.pep
SDIKGSLSVGVLVDYLQIWNLMSVIVLQPTIEGKYVFSIAPDGIYSAKVAYEGFFMGSTFSSHYSRVRRIWAPPKCRFFXWLFAHNCCWTSDRFARQGLDHPPICPLCDQEEETLDHLLVSCVFSRIFWFQLLRTFDLHRIAPQFGLASFMXLGKEASSSVSGLVRKGLNSLI

SEQ ID NO: 256573 - protein, 87 aa, Zea mays
  Clone ID: MRT4577_165585C.1.pep
RWLGGRLKGWWRQAITAAPKEARKGLNSLIILVAWELWKHRNACVFEKHRLRIQDVLSYVSLEGDLWCLAGASKLKELVFRSSTFLA

SEQ ID NO: 256574 - protein, 72 aa, Zea mays
  Clone ID: MRT4577_165586C.1.pep
GESQGFSKPKGVKPRPRKSKTPPQRGKWAPQKEAPTPPRGRENPQNPPKGGERPKNKKFFFYFFFLGKKNFF

SEQ ID NO: 256575 - protein, 78 aa, Zea mays
  unsure (1)..(78): unsure at all Xaa locations
  Clone ID: MRT4577_165587C.1.pep
LEAGRALETLVLCYFSRRXPXPLPFXRHXPXSPPXSXXATXWLXXARREWPARVMXPAIGHSISAXTYSCXSVWWQHD

SEQ ID NO: 256576 - protein, 104 aa, Zea mays
  unsure (1)..(104): unsure at all Xaa locations
  Clone ID: MRT4577_165588C.1.pep
HQGETSPFLFIAPKAYNIPSANNPSEDEPPVAIAPAVKKPNSXKLLPFVYSFCKEXLDNMGYNKANKXVXTFMIYIFKVLIYFHSFISLFSKVMSIMNYFINYI

SEQ ID NO: 256577 - protein, 63 aa, Zea mays
  Clone ID: MRT4577_165589C.1.pep
PRVRPRVRPRVRPLLLLKTKCAKQTRTFSGLLPCLWGGFTWIATYFVPAADMFDLLEYFLFYG

SEQ ID NO: 256578 - protein, 146 aa, Zea mays
  unsure (1)..(146): unsure at all Xaa locations
  Clone ID: MRT4577_16558C.1.pep
MGTLLRQISPQPVPSATRPRARKTPRTAKEVNQGRRICRRRRRQXRAANNIRLLQKCGTSFFSWMSSLTNGLPMLDGATAAVPLEQKFSASTGDGSAAPSQPLQNNRSVPMQFFGFNLLFQSLYTRNVLHVIALTKTGMVPSYIFS

SEQ ID NO: 256579 - protein, 177 aa, Zea mays
  Clone ID: MRT4577_165590C.1.pep
HLAASIHALDISPQGQGQDALPSLGLFLAALGLGGVWPCVPTFGADQFDDTDGAEKAQKERYYNWYYFAVNGGSLASTLLVYVQDSWGWGWGFGIPALFSVVGIAGFLASTKLYRYQKPGGSALTRVCQVVVAAVRKAHVDVPSDSSLLYEVPGKEAAAVVGSRKLVHTQGLRYGTL

SEQ ID NO: 256580 - protein, 357 aa, Zea mays
  Clone ID: MRT4577_165591C.1.pep
ATARSAGGSEECERRRVGPNTRGRGGQANERGGGAGGSGGVHRAAAAAGWARGGGGGGGRVWEFERDLVAGALMGGAVHTVVAPIERVKLLLQTQDGNAALLGRARKFRGFADCVARTVRDEGVLSLWRGNGTAVIRYYPSVALNFSLKDLYRSILKDAGTSSDNKFTSIALSNFFAGAAAGCTTLVLIYPLDIAHTRLAADIGRTDTRQFRGIRHFIQTIYKKNGIRGIYRGLPASLHGMVVHRGLYFGGFDTAKDVLVPLESPLWQRWVAAQAVTSMAGLISYPLDTVRRRMMMQSGMEVQMYSSTLDCWRKIYRLEGIRSFYRGALSNMFRSTGAAAILVLYDEVKKFMDRGRL

SEQ ID NO: 256581 - protein, 328 aa, Zea mays
  unsure (1)..(328): unsure at all Xaa locations
  Clone ID: MRT4577_165592C.1.pep
PTFYAAPPSLALPATPTPPXVSSRVADSGASYHTTPDVGTLSTTHPPHPSLPSSIVISDESVIPITSVGDAVLPGPFCLRNVLVTPNIIQSILCVRQFTTDNSCSMEFDPFGLSVKDLATRTLLARCESPEPLYTLRLPAVSSSTSTPHALTATTSSITWHRRLGYPGRDVMLKLSRSYVISCSRAANNFDLVHYDVWTSHVLSVSGNKYYLLILDDYSHYLWTFPLRLKSEVYADPTHSSYDALEFAFGLFSTFTPAAGLKIIQLYREGYRQDWELSFEKNTRTKGGWYQGGLIVAGPGIDNILYIHKDKEAGDDPNMQDVLRACCS

SEQ ID NO: 256582 - protein, 55 aa, Zea mays
  Clone ID: MRT4577_165593C.1.pep
IALQPFHPPTPVLHFQRMAGVHQSSQGVRLPPAAAGELCLPQGLEGLPGPQGPHK

SEQ ID NO: 256583 - protein, 317 aa, Zea mays
  Clone ID: MRT4577_165594C.1.pep
MDREWGSKPGSGGAASAQNEAIDRRERLRRLALETIDLAKDPYFMRNHLGSYECKLCLTLHNNEGNYLAHTQGKRHQTNLAKRAAREAKDAPAQPQPNKRKLAPRKSVKIGRPGYKVTKQYDPETKQHSFLFEIGYPEIEDNCKPRHRFMSSYEQKVQSWDKRYQYLLFAADPYEIIAFKIPSTEIDKSASKFFSYWDPDKKEYLLQLYFKPRPPEGSKPPPAPPGTLPNGTGAPGAPPRPPGQAPPPPPPQIPPPPPAPMGMPPRIPPPPIGAVQPPPPPARVANGLRPMIPPPPNFTPGAPPPRPPMQGFPGQQQ

SEQ ID NO: 256584 - protein, 94 aa, Zea mays
  Clone ID: MRT4577_165595C.1.pep
KVKPPAPKGQKRVLKVPKENYILDPPKKAGFDLPYSCRAGGCSTWPGKFLEGSVNQENQFFLKKAQVGSGKALPWVGYPRSDWVFQTPREENFF

SEQ ID NO: 256585 - protein, 76 aa, Zea mays
  unsure (1)..(76): unsure at all Xaa locations
  Clone ID: MRT4577_165596C.1.pep
RSGCKAANVAAVANPIAYLQQLLPFNQLTLSNYAEYLQQRQQLLNPLVVANPLVTAXLQQQQLLPYKTGFIKENWL

SEQ ID NO: 256586 - protein, 50 aa, Zea mays
  Clone ID: MRT4577_165597C.1.pep
RWHQDDETLSTGFWLPIIVALRKIKMSSTHILSDRFPSMHLSCSFALCTC

SEQ ID NO: 256587 - protein, 58 aa, Zea mays
  Clone ID: MRT4577_165598C.1.pep
NILTFPGLHNLRNATKRARAHSLQRNPSPVQQLATGGVSFSPYRHRCNPRVLCVVTTA

SEQ ID NO: 256588 - protein, 115 aa, Zea mays
  unsure (1)..(115): unsure at all Xaa locations
  Clone ID: MRT4577_165599C.1.pep
ASVSSHHVSPEDDETTDILLSEILASKRREGKSXIPDKNLVKTEQASIEEGPSRPVRKRTPRNREIITKEESNPKRRRVSREKPKSNAVMASRFSNRKRKRGKRRSGSAGLRKRS

SEQ ID NO: 256589 - protein, 83 aa, Zea mays
  Clone ID: MRT4577_16559C.1.pep
HSAKFAPIVIKHLPNQTQQSLLNAPSYCLLFTVAEAFLQYNSNLLEDRQNWNSFFYHFPPFWYMTDKAFHELQKDNSNQTSDH

SEQ ID NO: 256590 - protein, 51 aa, Zea mays
  Clone ID: MRT4577_1655C.1.pep
FKIQHVHEQNLATTHHVRWLQIIRLTARLQFSSSQYTHASWRTQLTSAEPM

SEQ ID NO: 256591 - protein, 212 aa, Zea mays
  unsure (1)..(212): unsure at all Xaa locations
  Clone ID: MRT4577_165600C.1.pep
MPRVFRIFTARSGDSGNVIQETPSNWVKRMRLELGMMYDDLYTKSCVLRTRSGIILRCISQVSVLVALVLFLTSDKRRYNRADIAITWSLFVGCFLLEVCAMFILIMSPWSWAWLKMRRCSMLAKLSWFLLCSGIGWPERKPYLNSIGQYNXHRWLDAGSDQPRSYGRRAMTTVIKSLVSLVGVKEDKMLFWMSRLLDTEHVEADKDTGVVL

SEQ ID NO: 256592 - protein, 60 aa, Zea mays
  Clone ID: MRT4577_165601C.1.pep
APLALLVCLVRPPLVPAVGLVLAPGSPSRVSSPVLAGVLWCASRRRLLGAALALGTGAAA

SEQ ID NO: 256593 - protein, 91 aa, Zea mays
  Clone ID: MRT4577_165602C.1.pep
WMGPHHEPMGVGCPRALVNVGRRCLAGGGAASSTSLPWTGSGASSDAAASRPPKAYFGSTAKALLISLQAKVLMRGGILGAFQTLWRIDLA

SEQ ID NO: 256594 - protein, 268 aa, Zea mays
  unsure (1)..(268): unsure at all Xaa locations
  Clone ID: MRT4577_165603C.1.pep
MVAAMELEILGMNFGCVLAALSDAKIPDKGCLLPLISKLLGYAIVAASTTVKLPQILKILKHGSVRGLSVASFELEVVGYTIALAYCIHKGLPFSAYGELAFLLIQXFDSCLGICSKLVFLTXSIILVAIIYYYSPPMGTKTWMKALLPAFPIQWLFRYCGMAPTVLAGKIDPALFEVLYASQHAIFFFARVPQIWKNFTNKGTGELSFLTCFMNFAGSIVRVFTSIQEKTPLSVIMGSAIGIVMNGTLLGQIVLYQKPAPKKQKKED

SEQ ID NO: 256595 - protein, 312 aa, Zea mays
  Clone ID: MRT4577_165604C.1.pep
MISALPVLCYGVTASALQSQSIHQITSSTSPAPAFFKLSRDPSSLTVCSPQIQAIRIQSLRGNQNLKAIEMSEGNRWGSGMKLDVRGMTIGCFISCPLHTNNLLPLISKLLGYAIVAASTTVKLPQILKILKHGSVRGLSVASFELEVVGYTIALAYCIHKGLPFSAYGELAFLLIQAIILVAIIYYYSPPMGTKTWMKALLYCGMAPTVLAGKIDPALFEVLYASQHAIFFFARVPQIWKNFTNKGTGELSFLTCFMNFAGSIVRVFTSIQEKTPLSVIMGSAIGIVMNGTLLGQIVLYQKPAPKKQKKED

SEQ ID NO: 256596 - protein, 71 aa, Zea mays
  Clone ID: MRT4577_165605C.1.pep
VLLPLFQFISCSSLLLNLSKLDQVYRKIHQHLERQCSFIKFCTKYVLIVHLLEPVDVRNIFLENLVKTREV

SEQ ID NO: 256597 - protein, 111 aa, Zea mays
  unsure (1)..(111): unsure at all Xaa locations
  Clone ID: MRT4577_165606C.1.pep
CSQLRDIVSSKPEKLDALDDDMGENWFLWQMSILCFGRLILKRXRILFMDEASEFVHSQSYAAMQKIMAEEFTERTEISVLHWIPTGMYRDLLLLLDPSLVAECDVPFKLM

SEQ ID NO: 256598 - protein, 93 aa, Zea mays
  Clone ID: MRT4577_165607C.1.pep
FWFPTRPRTRGDIPDLDDEVYSDAFNYKHLGNLGYIGNSSALDYNGYSHARGFLAMYAWRSTYWSEHTCMRTKVLLMIDWIKRGIFGRDLSKF

SEQ ID NO: 256599 - protein, 59 aa, Zea mays
  unsure (1)..(59): unsure at all Xaa locations
  Clone ID: MRT4577_165608C.1.pep
CLVCSNTTILRKXXKDRKLHRKISLDKSIIKGXXKYKKHQLDSIVPDLTHVRKHKLKYA

SEQ ID NO: 256600 - protein, 240 aa, Zea mays
  unsure (1)..(240): unsure at all Xaa locations
  Clone ID: MRT4577_165609C.1.pep
LGLHPCHRDRWSSGLLLPQERTRRSSVARLRHVARFFSVSDVHGQYSDLLRLFDYGGYPPQANYLFLGDYMDRGKQSLETXCLLLAYKVKYPENFFLLRGNHECASVNRIYGFYDECKRRFSVKLWKTFTDCFNCLLVSALIDEKILCMHGGLSLELNKLEQILNLNRPTDMPDTGLLCDLLWSHPSNEATGRAINDRGVSFTFGPDKVSEFLEKHDLDLICRAHQGTKLWLSRQSDACF

SEQ ID NO: 256601 - protein, 152 aa, Zea mays
  unsure (1)..(152): unsure at all Xaa locations
  Clone ID: MRT4577_16560C.1.pep
AFSIGGRRTGRLLAGSREWSTWFGGKFKLGKKIGSGSFGELYLGVSIQXGEEVAIKLESVKSRHPQLHYESKLYMLLQGGTGIPHLKWLXVXGEYNVMVIDLLGXSLEDVFNQCNRKFSLKTVLMLADQMITXVEXCHTRGFLHRDIKPDNF

SEQ ID NO: 256602 - protein, 86 aa, Zea mays
  Clone ID: MRT4577_165610C.1.pep
GIRTLLDIYQHNSNNHILHIKSRTYHTALPTLLVTAASNVHGSSQKGASIICGINILILPELHLELCEPYILPQHTLDGSGAPMLC

SEQ ID NO: 256603 - protein, 38 aa, Zea mays
  Clone ID: MRT4577_165611C.1.pep
SLTFSERRMVTQSSMPTYLTFFSPRITEPIPITTLDRL

SEQ ID NO: 256604 - protein, 86 aa, Zea mays
  Clone ID: MRT4577_165612C.1.pep
TEFSLQRLGQGAQKRVGASTNASKSIKFDTDKICKQLFFEIQEYARNLCAKGKNAKKIYSYKALWQCVAPKDRQKNIQFLCKKRCQ

SEQ ID NO: 256605 - protein, 214 aa, Zea mays
  Clone ID: MRT4577_165613C.1.pep
MSFSSLVSDIAYRNSERPDRPDLRSQVSEARSTRSYASTAATSVSISGDIKSQLHGGYSHPLSRAWQSERQLTKSMLIFPLFISDQPDEETLIPSLPNIHRRGLNKVVPYLTPLVAKGLKSVILFGVPLAPAAKDALGTNADDPKGPVIKAIRLLRRAFPDLFIVADVCLCEYTSHGHCGILRDDGSLNNALSVERIADVALSYAQAGAHCVAP

SEQ ID NO: 256606 - protein, 126 aa, Zea mays
  Clone ID: MRT4577_165614C.1.pep
LGSRGPPMVITAGTGAPALNVRGGVGSPVVRLPGVDRNRGVCSRPDRNCGVGFRARQLMSGSAASRCVASPRKCMRYRPRCRAGAMRRPSSRMMSASYVAPSTCEHLGHGYELSRNNHHSQESEPP

SEQ ID NO: 256607 - protein, 46 aa, Zea mays
  Clone ID: MRT4577_165615C.1.pep
YMFSVPNLTQERNTQGRSVSTKTAEYVKYITLHKAPPFRKRGTHCL

SEQ ID NO: 256608 - protein, 134 aa, Zea mays
  unsure (1)..(134): unsure at all Xaa locations
  Clone ID: MRT4577_165616C.1.pep
GTSRPAGYAYPGVNAYLNXKNDNVGXRSLDCVNITLDAEDXELHDDVGLNRPXVLVAFKWITGCTLXKEXVYSSDHCETTPKTANPTGLSDGXGTTCAPYWXLCRNSWGAECRDDGYFKMEMRKKMCXVATIAS

SEQ ID NO: 256609 - protein, 41 aa, Zea mays
  Clone ID: MRT4577_165617C.1.pep
QIYHLCTAIANMLYLYSHSTIILLALTHILTSLIDLEYSNL

SEQ ID NO: 256610 - protein, 47 aa, Zea mays
  unsure (1)..(47): unsure at all Xaa locations
  Clone ID: MRT4577_165618C.1.pep
KSXGTEDQPTGXPXDRAEPTTQEXGQVAXQAAREXRASXSXQHXTHE

SEQ ID NO: 256611 - protein, 100 aa, Zea mays
  Clone ID: MRT4577_165619C.1.pep
KNRKGKKKKKKKKKKKRAAPFKDSNFPSPSFQHIIFFFGPLNLIPLPPFYHLLTLKTLSFPKLIPFEKNPLFPICLNTKKPPPIPLSKHFPTLIANWTPP

SEQ ID NO: 256612 - protein, 137 aa, Zea mays
  Clone ID: MRT4577_16561C.1.pep
NRAKFVPNRWRSVVVLGGATSPRDTQDLIYLGACDRCLHSAHLMEEFVLCSGQRHGMEEEKPTSSAHAVRACLPGRIGFLRAPSEAAEPARGRGRGNYARARCQMDKGHAPGATTWVRRREQVQGPHRTFQIKKCLH

SEQ ID NO: 256613 - protein, 49 aa, Zea mays
  Clone ID: MRT4577_165620C.1.pep
TESVSLGLGSSPGEKKWGSFRDIYKLLLGYNRMWHVLFSFPTLTQYRGA

SEQ ID NO: 256614 - protein, 69 aa, Zea mays
  Clone ID: MRT4577_165621C.1.pep
MGFLDGLYRVVMRRFAVYATFVVADAFAGDGAVDYGVHKIWVMHNLGSRYEEISILGLRPAVEGEMMIY

SEQ ID NO: 256615 - protein, 125 aa, Zea mays
  Clone ID: MRT4577_165622C.1.pep
WPPLFGGWRGLDPPGGGRASSSKILLLTGRGGETKQRKFNGPGHNFTNFPMTGAFMKNWGPPTKKNGPRLPINPGKGPRGQSVKLIKRGPCQNMGTLTNDQGFRGKHFCYRTGPRALLEYGGKNS

SEQ ID NO: 256616 - protein, 239 aa, Zea mays
  Clone ID: MRT4577_165623C.1.pep
MVYRLLFGFLLPLVLQPSLVLCNPPELKIGFYQYTCPYAEVIVRDEIARIISHVPSLAGPLLRMHFHDCFVNGCDGSILLDSIPGLPSEKESEPNLSLRGFGTIDFVKAKLEQACPGVVSCADILALVARDVVLLTHGPYWNVPTGRRDGLRSVKDEALNNLPPPFFDATRNLNQFFVPKGLDAKDQVVLLGGHTLGTSHCSSFSDRLYNFSGTQMPDPALDRRYALRLKSKCRPGDAT

SEQ ID NO: 256617 - protein, 93 aa, Zea mays
  Clone ID: MRT4577_165624C.1.pep
ALKKNLLRLHHRSRDNMMKPGVIRNPPLSLCFNHHANKRPGEAIEYPQGESSHYKKNNPYQEGTATENKPDTKSKNMDGGDSTEAETKAMGSP

SEQ ID NO: 256618 - protein, 101 aa, Zea mays
  unsure (1)..(101): unsure at all Xaa locations
  Clone ID: MRT4577_165625C.1.pep
SGVPRSSRRVIMSAEARCLSFGKFLELSFSSHSTARRLPICGHSLNTDCLRFFXGLGSKVAMFPYSSVEIYNACKPQPTLEIHNPDMHKDAPRLLPSCFVL

SEQ ID NO: 256619 - protein, 86 aa, Zea mays
  Clone ID: MRT4577_165626C.1.pep
MRVLLVAVALLALAASATFTHTSRGCGCHPPPAVHLPASVHLPPAVHLPPAVHLAPTVHLPSPVHLPPSVHVPSPVHMPSTPCHYP

SEQ ID NO: 256620 - protein, 102 aa, Zea mays
  unsure (1)..(102): unsure at all Xaa locations
  Clone ID: MRT4577_165627C.1.pep
ESGVPXTSRRVIMSAEAHYLSFGKFLELSFSSHSTARRLPICGHSLNTDCLRFFXGLGSKVAMFQYSSVEIYNACKPQPTLEIHNPDMHKDAPRLLPSCFVL

SEQ ID NO: 256621 - protein, 86 aa, Zea mays
  unsure (1)..(86): unsure at all Xaa locations
  Clone ID: MRT4577_165628C.1.pep
EFFKYFSPNFIFFYFPKYQGFSPKFKKSPGFANKFPFLKKLGKTNFFSTHPFFFSGSPAXNYLLKKKGPLWVGFGFGKKNFPNLFF

SEQ ID NO: 256622 - protein, 59 aa, Zea mays
  Clone ID: MRT4577_165629C.1.pep
HIHSVYESLARGFKQQFCGHEHILLPFAALPFMSPLFALALLLNVLFGGFLFAPNVLFR

SEQ ID NO: 256623 - protein, 477 aa, Zea mays
  Clone ID: MRT4577_16562C.1.pep
MEHVIGGKFKLGKKIGSGSFGELYLGVNVQSGEEVAIKLESVKSRHPQLHYESKLYMLLQGGTGIPHLKWFGVDGEYNVMVIDLLGPSLEDLFNYCNRKFSLKTVLMLADQMISRVEYMHTRGFLHRDIKPDNFLMGLGRKANQVYIIDYGLAKKYRDLQTHKHIPYRENKNLTGTARYASVNTHLGVVIEVYPVLAPTQEQSRRDDLESLGYVLMYFLRGSLPWQGLKAGTKKQKYDKISEKKMLTSIEALCKSYPSEFITYFHYCRSLRFEDKPDYSYLKKNFRDLFIREGYQLDYVFDWTVSRQAVDNNRLRLSGKTSGLVGPSVDRAERAAARQDVPDRFTGQAGAFARRTGSGSGQYGEHTKHRTLLDSLMASKMAVDSDKRKHSSSRNGSTSRKALLSSSRGSGDPSDPNRSSHLVPTTSSSSRPSTNQRLHQSTGLEGRTSSFPKPGRIGQDDPTMRSFERLTISAERRR

SEQ ID NO: 256624 - protein, 120 aa, Zea mays
  unsure (1)..(120): unsure at all Xaa locations
  Clone ID: MRT4577_165630C.1.pep
NPLLPIYIERIHRDKHGSEXATYDTEGRFMPVNLENMFTKYALTKPDNLSLKELWQMTEGNRAAFDYLGWMASKLEWLLLYYVAKDKQGFLSKEAVRGCFDGSLFKNISKMYKDSDRKSK

SEQ ID NO: 256625 - protein, 79 aa, Zea mays
  Clone ID: MRT4577_165631C.1.pep
GLIISPSKNTVGIIPWGAFYMGQNYLNGEPQKFLGRDRSKATGHWISVSLGSRLVFIFPIGVQKKKLGGASSILKGGPI

SEQ ID NO: 256626 - protein, 129 aa, Zea mays
  Clone ID: MRT4577_165632C.1.pep
HLRIQVPTCFSDDTCPRSAPRHEQVAPGWSDGSLAVQWRCTGPDRNRLCAVQKITSPASWSCPRAPEAPAAPRPDVAKNASHDTGAVAAATRCQTPSKSPTRELAGEDPLGLFGYGNCGARLGIRGERR

SEQ ID NO: 256627 - protein, 95 aa, Zea mays
  unsure (1)..(95): unsure at all Xaa locations
  Clone ID: MRT4577_165633C.1.pep
GFRGPINYYRKMDPNWKLGAPWGDPKVGGPPRFIVGEGDLTYHYRGIQGXIPKGGFKANVPGLKKVVVIPGAGHFVKKKKAHKVNQQIXDFISKF

SEQ ID NO: 256628 - protein, 177 aa, Zea mays
  unsure (1)..(177): unsure at all Xaa locations
  Clone ID: MRT4577_165634C.1.pep
MERQRKAMWLYPKVVGFNPPERWGHSACFFEGVVYVFGGCCGGLHFSDVVTLDVETMAWSALATTGQRPGTRDSHGAALVGHRMLVFGGTNGGKKVNELHVLDLRTREWSRPQCRGAAPSPRESHSVTVVGGDRLVVFGGSGEGEGNYLSDVHVLDVPTMTWSTPXAIRGGAPAPRD

SEQ ID NO: 256629 - protein, 47 aa, Zea mays
  Clone ID: MRT4577_165635C.1.pep
ASLSEVSISEWTCIETWSILNGGPVFFLFIYFFYVYVSFDFLISLYF

SEQ ID NO: 256630 - protein, 43 aa, Zea mays
  Clone ID: MRT4577_165636C.1.pep
DKTSSDPHGLRFVWLFIAPGSEIVTQSLRMRSWLGSCSLIRLT

SEQ ID NO: 256631 - protein, 53 aa, Zea mays
  Clone ID: MRT4577_165637C.1.pep
LHTGVVVYSSVTSCYSHGGLSAHWRCSSPDLPEALTTLRPNTRVHSDRLLWRR

SEQ ID NO: 256632 - protein, 82 aa, Zea mays
  Clone ID: MRT4577_165638C.1.pep
PPSCFPRYKVGVGSFRPPFVWVPARFGRMGRAPLGFLAPGVCCLLLGFLTLSRCAGWQCGSLLYAVEYQNWFVNNPTKKKEG

SEQ ID NO: 256633 - protein, 61 aa, Zea mays
  Clone ID: MRT4577_165639C.1.pep
VETGPPIKIKIMEWDEQYTLIEGKSSKMGGGWAKKKYSAGFCDYPKKKENSSPGKFILGGT

SEQ ID NO: 256634 - protein, 111 aa, Zea mays
  Clone ID: MRT4577_16563C.1.pep
SPWGPFKGPPVFPPVPEIVVPPPGPWAPKINRGVPPPGEPGYRGAKFLPPIPPEGFAKVFLWGPKAQPLAKGQYFFFFCPPPQTCFSRGGLWIWVPPPTDLKIRRGESGGP

SEQ ID NO: 256635 - protein, 97 aa, Zea mays
  Clone ID: MRT4577_165640C.1.pep
MQLLKPKEAATLPREALEAHIVSLVRRCPGFLALRSAHAHLTRLRLPRLTAAFALSKLLASCVSAPATAAAQAAGSSYARNLFGQIPEPDAFCYNSL

SEQ ID NO: 256636 - protein, 61 aa, Zea mays
  Clone ID: MRT4577_165641C.1.pep
GGIHLYYNIISQPCLLCGNLTHVEILWKDTLLHSLPLGGKLKIIRDFLISATPKDCTLMIS

SEQ ID NO: 256637 - protein, 86 aa, Zea mays
  Clone ID: MRT4577_165642C.1.pep
KLRAALACSKELWILNRYLSYTLNPDLIRKQDATSTIISITNNVIGQGLVWDFVQSNWKKLFNDYGGGSFSFCNLIQAVTRRFSTE

SEQ ID NO: 256638 - protein, 102 aa, Zea mays
  Clone ID: MRT4577_165643C.1.pep
WKMRGREPFRDQRRTGEYDLACIESGAISFVVVSRHELVGSRLAAVFPSPRCWRTGPGTCAGALSIVFSSTAPHAWPMSGNRLSLRRSRSRGLCLLVDLDSR

SEQ ID NO: 256639 - protein, 185 aa, Zea mays
  Clone ID: MRT4577_165644C.1.pep
PRCSPALATVPFSLLARVDVPSARSCPSSQLPAHAKLSAHRRFSSATAQFLLGAQPSCCGRGPPRCQAALSARSRPLACVPAHRGHSCPARPLLLFPALAPPRALLVFPARSHELRSACSRSVASRSVCSTLPCRRTPTLSISSSPLCRSPFRCAPDVVLVVVGIITLPVSPDPQIYSAPAVRTR

SEQ ID NO: 256640 - protein, 179 aa, Zea mays
  unsure (1)..(179): unsure at all Xaa locations
  Clone ID: MRT4577_165645C.1.pep
HVTTSSRGCGLSELSGLRSSASLPMRRKATSDDFMSAVYFRTHTFGTSGGSRXRLTEAILKVVINGLRRIGRNFLRCWHGRGYAYPLDVIVINDTGGVKQACHLFKYDYTLGMLHTDVKPVCDNAMSVDGKVIKDESDRNPSNLPWGELCIDLVIEGTGLFVDREGAXKHMQAVAKKEL

SEQ ID NO: 256641 - protein, 246 aa, Zea mays
  unsure (1)..(246): unsure at all Xaa locations
  Clone ID: MRT4577_165646C.1.pep
MNEQCDSSRATLRARPQRTTMAASMMSSTTMLLGHDVLARLGRRDASFRVTWSQNSKRATQTNGYGPDLTEYLDPISKKTTANLTDEFPDDYGRDTADISHXRQTMTGHPQVKAIHSRRLMLXSAACPFLDISAKNASSFXRQVRSPAKDIHLSAMSVLYYLRNPNAVCYHLASMAAXACHVEIMXLLLGXRDCDGTHHXRIDPVYPGGAFDPLGLADDPDTAAELKVKELKNGRLAMFSMLRFFV

SEQ ID NO: 256642 - protein, 365 aa, Zea mays
  unsure (1)..(365): unsure at all Xaa locations
  Clone ID: MRT4577_165647C.1.pep
MTKHGVVIGPEDVAAARHFSFPPPRTAAGGESCRKLAAQVDLGPAVVGSWLDSMKASSPRHRLMAPVPGAADAEHDDWMERHPSALDRFDALAAAAKGKQVAVFLDYDGTLSPIVEDPDRAVMTDEMRDAVRGVAARFPTAIVSGRCRDKVFSFVRLAELYYAGSHGMDIRGPTADANHHXATARRRRRRRSSVLCQPASEFLPVMQEVYAALVAKVERAIPGAKVEDNKFCLSVHFRCVEEACWAALFEQVRAVLRDHPGLRLTQGRKVLEVRPMIRWDKGKALEFLLHALGFAADADRDDVFPIYVGDDRTDEDAFRVLRARGHGAGILVSRFPKDTSASFTLRDPAEVKEFLRKLVGANDDS

SEQ ID NO: 256643 - protein, 30 aa, Zea mays
  Clone ID: MRT4577_165648C.1.pep
IKIKKKVKYIKISRLSYSGMLFKRGCITTP

SEQ ID NO: 256644 - protein, 117 aa, Zea mays
  unsure (1)..(117): unsure at all Xaa locations
  Clone ID: MRT4577_165649C.1.pep
HQAPPPPPPCSPRPPSRFPSRHPTPPPRCSSTRSPHLGAPSSHRRGEPRSPCSPPPSSSSRSSCTTRTPAQMSSSPSTTTXPXTPTSTTXLRPAAPPGSRPGSASASSASSMMLLSG

SEQ ID NO: 256645 - protein, 100 aa, Zea mays
  Clone ID: MRT4577_16564C.1.pep
FTPTTPGLLARYFVVNPPPPYKTTVPPKGIITQLFLTTQLLSSPLARLSKSLFSFWGLSQTQFASPEVLVYPPLCKKKFKSGYYGPKKNPPPAPSIFKHF

SEQ ID NO: 256646 - protein, 109 aa, Zea mays
  unsure (1)..(109): unsure at all Xaa locations
  Clone ID: MRT4577_165650C.1.pep
KILKHGNSYVLKIANRIYVEKTYLFHNKYLEDMKTYFGAEPQSVNFVEASGQIRKEINSWVGXSQTGGKIPNLLPDDAVDNKTTMVLVNALYFKGTWEHQFSVLNTTER

SEQ ID NO: 256647 - protein, 182 aa, Zea mays
  unsure (1)..(182): unsure at all Xaa locations
  Clone ID: MRT4577_165651C.1.pep
IFAPRPTATARASSGGGHINSRPAPCGLLPGRGRCSLVATRLLYIAGTSVLARXSAAHASRARTLLKRPTXYRRRGSGGQIRLDLRFTTRVNRPSAAVDHRGPXEARTTRVFLRSPYPESERPAHSHXXRIWAPSPHSAFDRGSWMHLGYXFPITGQRKSNPAREPGWRASSTTRTSPGTTT

SEQ ID NO: 256648 - protein, 119 aa, Zea mays
  Clone ID: MRT4577_165652C.1.pep
VLPGEPQQKGDSPPQGSPFYGLTLGHPSPKKNGAKPGGWKMGHPLNTYLKKKERPGKTPLGHFFFGQIIGTGKRGSKKIRGVLHPQKKGDITTKGARGGALWILPGLNQIFGQNQQAGV

SEQ ID NO: 256649 - protein, 76 aa, Zea mays
  Clone ID: MRT4577_165653C.1.pep
KPQGSPRKSPLFYMAGLAKCVFLTPHTRRVQGPQRLNLYLTFRPLRLEVCLCHRDPKNPPEYLYPHGLDNAEINGC

SEQ ID NO: 256650 - protein, 377 aa, Zea mays
  Clone ID: MRT4577_165654C.1.pep
MALMLLARNLRSRLRPPLAAAAAFSSAAAEAERAIRDGPRNDWSRPEIQAVYDSPLLDLLFHGAQVHRNVHKFREVQQCTLLSIKTGGCSEDCSYCPQSSRYNTGLKAQKLMNKYAVLEAAKKAKESGSTRFCMGAAWRETIGRKSNFNQILEYVKEIRGMGMEVCCTLGMIEKQQAEELKKAGLTAYNHNLDTSREYYPNIITTRSYDDRLQTLEHVREAGISICSGGIIGLGEAEEDRVGLLHTLATLPTHPESVPINALVAVKGTPLEDQKPVEIWEMIRMIATARITMPKAMVRLSAGRVRFSMPEQALCFLAGANSIFAGEKLLTTANNDFDADQAMFKILGLIPKAPSFGEEEASAAAPTESERSEQAASM

SEQ ID NO: 256651 - protein, 106 aa, Zea mays
  Clone ID: MRT4577_165655C.1.pep
IGTTKDGYLEQEIDLGEEVEGEVREEVEQCVEHRLHAPWRHPPVAASNPSSPPCERLFARLIFFSPCPPQSSYRSLVSSLLLQKKVLSVFHKKATNHAHSERPSAE

SEQ ID NO: 256652 - protein, 95 aa, Zea mays
  unsure (1)..(95): unsure at all Xaa locations
  Clone ID: MRT4577_165656C.1.pep
RSLKAGNAYHFYXVNRNSWPRVXXVAMNPVEHTHGGGNHQHICHAFTVRRDAIPVQNDGLIDAIRTGWLISHAADTTTNANNDTYHIDSHDLFIP

SEQ ID NO: 256653 - protein, 59 aa, Zea mays
  Clone ID: MRT4577_165657C.1.pep
TRRGVDGFGGFPTMEFETRAQMDKANKLHHRIGGEGDQEHEPRVHGAVRRGGLLVPVVS

SEQ ID NO: 256654 - protein, 82 aa, Zea mays
  Clone ID: MRT4577_165658C.1.pep
PRRPFKKKKKKKKKKKKKKKKKKKKKKKKKKKNKLGGGVLDNPCFGSAWHAGSWFLFVAFQVDCFVRGCPWLSLGKPLSFPF

SEQ ID NO: 256655 - protein, 243 aa, Zea mays
  Clone ID: MRT4577_165659C.1.pep
MSVPMYNKQNSLGTPPPHKTNPFSDSEGPSRAQSVPVRRTNQSVQELEDYAITKARETTHKVNDCVRAAEAIREDATQTMLTLHRQGEQIMRSHQVAADIEQDLTVSEKLLGSLGGLFSKSWRPKRNHQIKGPVSGNNYSATTANDTEQRGKLGIAPARQEYPSHVQTTPVSAMEKVQAERTKQDDALSDLCSTLGQLKEMAVDMGTEIDRQNKALVPLSDDVDELNFRLKGANQRGRRLLGK

SEQ ID NO: 256656 - protein, 134 aa, Zea mays
  unsure (1)..(134): unsure at all Xaa locations
  Clone ID: MRT4577_16565C.1.pep
ATKIFSLLMLLALSXCVAXAXXFPXCSXAPXASLLPXSLXXXXAXXCEXPALXPFWLXPCFXXGPIPLSPLLFXPSPAXSLVXCLVXXXXAQPLPPLVPPGXXPVALAXLSPFSLXPXFLSFXPLSSLGPCCFF

SEQ ID NO: 256657 - protein, 103 aa, Zea mays
  unsure (1)..(103): unsure at all Xaa locations
  Clone ID: MRT4577_165660C.1.pep
MFYWGPFSVLPPQKSRFADKNPVSFPLPLPLPSSFPSPIIFGPPPGMHNPPCHNPPSXMGDPPPPNLFFPPQLFSPPPPPPKGTKKCVPPIFFFSPHSMLFGH

SEQ ID NO: 256658 - protein, 86 aa, Zea mays
  Clone ID: MRT4577_165661C.1.pep
MPPFFFSVCPGPPLLPAVFFLGPKGAIFLFSVYVGGNPPCRGIWESNWGGFFPPPKKKKKKKKKKKKKKKKKKKKKKKKKKKKKGP

SEQ ID NO: 256659 - protein, 58 aa, Zea mays
  unsure (1)..(58): unsure at all Xaa locations
  Clone ID: MRT4577_165662C.1.pep
FPGGRHXSXKYTKELLSYVKAGFIPWSLGGSVIGYTENREFHLMNEIYSGKGVSSQYK

SEQ ID NO: 256660 - protein, 140 aa, Zea mays
  Clone ID: MRT4577_165663C.1.pep
DVRVPCSSSSSAAAASPVQLRRVAKRQVDYIQGDNPLRMSYMVGYGPRYPLRIHHRASSLPSVSAHPARIGCKAGAAYYASPAPNPNLLVGAVVGGPSNSTDAFPDARAVFQQSEPTTYINAPLLGLLAYFSQHPDPAQH

SEQ ID NO: 256661 - protein, 182 aa, Zea mays
  Clone ID: MRT4577_165664C.1.pep
MAAGLAFPVASFQLACVSSHPHPGHRICCAIPSSSSRRIVKSSPLRATTVLSRERRGTGRGASVVCAVQGQDTTIQVPDVTKSTWQSLVIESELPVLVEFSAAWCGPCKMIEPVVGKLSKDYEGKLKCYKLNTDESPDIASQYGVRSIPTTMIFKDGEKKDSVIGAVPESTLVTCIEKFVER

SEQ ID NO: 256662 - protein, 114 aa, Zea mays
  unsure (1)..(114): unsure at all Xaa locations
  Clone ID: MRT4577_165665C.1.pep
SFGPNHPSGPHHNPEDKHQRLRFRXKDPTRGLAHHQGNNGKQAQNRYASRDEHMKNKLDRYEQYSEIRGARQNTISQHQSDLSETDKWTTPEGPTHPNEMHGYHNTERDNETAY

SEQ ID NO: 256663 - protein, 70 aa, Zea mays
  Clone ID: MRT4577_165666C.1.pep
WPEQGVPKTGEGFIDFIGQVHKTKEQFGQDGPITVHCSAGVGRTGVSITLSIVLERMRYEGVVDMFQTVK

SEQ ID NO: 256664 - protein, 88 aa, Zea mays
  Clone ID: MRT4577_165667C.1.pep
RRRTPPLPSGLSYRPRRRRRSIPSAQPWPHRLRRLASGMTRGFLSSDKSARRNKPSKGGTYSLKTTSLATKTARRTWVATALSGLLPR

SEQ ID NO: 256665 - protein, 105 aa, Zea mays
  Clone ID: MRT4577_165668C.1.pep
MNNPSLYHAEGPVMFGAQNYNTRGMNGMMRRSHMRATLSKKPAQTCEPIVNGAPFTICYNCYEVLQLPKNSLLLGKDEYKLRCGSCSHAIVVRLDGSRLDVSAPT

SEQ ID NO: 256666 - protein, 184 aa, Zea mays
  Clone ID: MRT4577_165669C.1.pep
GGAFRWRTSRIRSPPPTPPPRYFSTDGEDGTAKLHDAKDEIKSLRAPNGELKENVDAVRHENQILTSESRRLEDLVYQDREEVTVVEQGADSIESEDDTLRSEVECLEYLLVEKKASHDHDMRKGARVGDHVQTAYQEKGALEEEIETLKVSATAEGKGVEEGCESIAVRVATPMDQDVLPPAL

SEQ ID NO: 256667 - protein, 71 aa, Zea mays
  unsure (1)..(71): unsure at all Xaa locations
  Clone ID: MRT4577_16566C.1.pep
HTSXTLLLPQLISILSXHQPLVFRFLLYRERTSLKFPHNLYSNKYPTLLHALYLINYTLLSFKQSPNSPPT

SEQ ID NO: 256668 - protein, 60 aa, Zea mays
  Clone ID: MRT4577_165670C.1.pep
SSDTSISQPKMKIFTFGPHDQVILPFFGCRFVSPRHCRGQASTLLQDGKVFIYLQHSGRV

SEQ ID NO: 256669 - protein, 50 aa, Zea mays
  Clone ID: MRT4577_165671C.1.pep
PTHSMGFDADHKFDSTCIKREGSMKRRQWAAPFRRSKFIFNTHLDGLIIL

SEQ ID NO: 256670 - protein, 61 aa, Zea mays
  Clone ID: MRT4577_165672C.1.pep
RMWILVFKTVSTFTTAMMLYRNACPSVGPSRRGSTCLSCFVWKSCSRSCMPWNAQFGLCHR

SEQ ID NO: 256671 - protein, 73 aa, Zea mays
  Clone ID: MRT4577_165673C.1.pep
GGPPCKLINLGNDKGNPNTKKERPRTAYVWLGPPKKACLFFYVFPPPFFFFPFPLFFFFFFLKWNNASSRWLI

SEQ ID NO: 256672 - protein, 51 aa, Zea mays
  Clone ID: MRT4577_165674C.1.pep
IVVFRTDKNIRFSRLSRVNRHQTESHYMTENKKGSSHPSSINFNKCLSLLQ

SEQ ID NO: 256673 - protein, 77 aa, Zea mays
  Clone ID: MRT4577_165675C.1.pep
LYLTLRKRCPSPWHALTLDTVAGHLPLRRKSYATHAGSNTGPTSQPKINNGEPSSERTGQTRVQALLFWKKAQKGRP

SEQ ID NO: 256674 - protein, 118 aa, Zea mays
  Clone ID: MRT4577_165676C.1.pep
MTFSQAAAVFYSPQYGGYWYPPDYSYQQVLQHYYPQMYGPASHSVPPYQYMGYMPSGPSPSAGFSPMQQPMRPAFFQQPTAQMDGSFPPGHSLPPNFRLQLPSHAVSKESDDASGTLL

SEQ ID NO: 256675 - protein, 231 aa, Zea mays
  unsure (1)..(231): unsure at all Xaa locations
  Clone ID: MRT4577_165677C.1.pep
MHPPPHPSMKPGGEEEEDVQVLVVRSHHHSDQSSTRSHHHQQVVIRARPYYRRWSPWLVSGATVACVAIFLVTMYVNDCPTHNSNCAAAGFLGRFAFQPLRENPLLGPSSATLVKMGALDVAKVVHGRQGWRLITCMWLHAGVVHLLINMLCLLVVGIRLEQEFGFVRIGLVYLISGFGGSLMSALFIQSSSVLXVGASGALFXLIGSMLSELITNWSLYANKVAALLTLA

SEQ ID NO: 256676 - protein, 171 aa, Zea mays
  unsure (1)..(171): unsure at all Xaa locations
  Clone ID: MRT4577_165678C.1.pep
MAASNGAAAVDETVAATDSVQEPPQKISKISPLLKVKKLSEKAVLPSRGSALAAGYDLSSAEEMVVPARGKALVPTDLSVAIPHGTYARIAPRSGLALKHSIDVGAGVIDADYRGPVGVILFNHSDADFAVKPGDRIAQMIIEVIATPEVXEVEDLDATVRGDGGFGSTGV

SEQ ID NO: 256677 - protein, 103 aa, Zea mays
  Clone ID: MRT4577_165679C.1.pep
KTGAPIFFGFGKKKHSPFWLAQQKNVSDFEAGFRGLIKHFLHSPLGGGWVGEHLGRDRPWTSFLVLLIWGDTGGQPRIVLPQPLPQNQTTYLGGWARPIPSCF

SEQ ID NO: 256678 - protein, 216 aa, Zea mays
  unsure (1)..(216): unsure at all Xaa locations
  Clone ID: MRT4577_16567C.1.pep
MAPLVATATMNHAVAHLLGPNHESFSRHHLSSSLQQNSKRRCNLSFRPRAAESQNGSQTLSPSEVPKRDWFPSDFIFGAATSAYQIEGGWNEDGKKPSTWDHFCHTFPDWIADHSNGDVAADSYHMYKEDVRLLKEIGMDSYRFSISWSRILPNGTLEGGINPYGIKYYKNLINLLVENGIEPFVTIFHWDTPQALVDKYGGFLDERIVKDYTDFX

SEQ ID NO: 256679 - protein, 179 aa, Zea mays
  unsure (1)..(179): unsure at all Xaa locations
  Clone ID: MRT4577_165680C.1.pep
SCEAQLRALPDHAARCRYLSWASHPACAPRGYVHYLRLFYCAFGGAPWLGAAALALWLLLLFYLLGDTASQYFCAALQGLSAALRLPPAIAGVTLLSLGNGAPDVLSSVVAFAAADADAGDVGLSSVLGGALFVSTVVAGVXAIVASSSGTRGGPVEIERDGFVRXDTRFLLIALYYLP

SEQ ID NO: 256680 - protein, 178 aa, Zea mays
  unsure (1)..(178): unsure at all Xaa locations
  Clone ID: MRT4577_165681C.1.pep
MSGGAASGSGSGGASFQQHAKRRRPPAGPQRLTLSVQDADADDAAAAVVPPVTVVLDGRCICHRVHLNRHTGYRSLAGTLRRMFVDSDDDSDQQQQQQRRRAEDDLDLANAVPGHVVAYEDMEDDLLLAGDLKWXRSIYSLDGVHDCIXDFVRVAKRIRIIPAKKTTSSSSRGNKCGG

SEQ ID NO: 256681 - protein, 155 aa, Zea mays
  Clone ID: MRT4577_165682C.1.pep
MVRALDRYSSGSGKDVAYSCGYCGFALNLSSSTRNTANIGSKYGKHIRKGVVSFFAIDESRFTQADEVSCTPYFRSSRSWGFFRNRTRLLCRKCGGHTGYAYEDEGPALRDEGPADDLDMSSSSRGSSTSPRKKYVIKISALRPLSDDSGALLSP

SEQ ID NO: 256682 - protein, 33 aa, Zea mays
  Clone ID: MRT4577_165683C.1.pep
FLCSNQVSSSSQSLGVLPLCCACQPYFLVNTPT

SEQ ID NO: 256683 - protein, 50 aa, Zea mays
  Clone ID: MRT4577_165684C.1.pep
SYSESQRITICLVKPKPLSPLSRVFFPCIGQNLEVMVHAISSPRDHVCSL

SEQ ID NO: 256684 - protein, 458 aa, Zea mays
  Clone ID: MRT4577_165685C.1.pep
MELPMQSVSSLLLAGPSPSSPEAAETTPPPMQPLQCQHERLVGNMCPSLYLAVYRGRIADVTALLLEQPAVAIDCQATTTPGIKGTAIMHGQCDILELTAERNTALHVAAEQGHHELIRELYFRFSDQGLLNRLNSALDTPLHSAARAGHVRAVAVLFELARDRGVNILGCKNEAGDTALHLAARHGHGAAVEVLISAAAEPAAELNNAGVSPLYLAVISGSVQAVRAITTCKDASSLGPGAQNALHAAVFQSSEMVHLLLEWRPALADQVDSGGSSPLHFASSDGDRTIVKAILRASPPSTVYKKDSDGLSALHVAARMGHRRVVKDMLRSYPDAAELRDGNGGTFVHAAARERRSSVVSLAISNSMLRGVLDAQDRDGNTPLHLAVAVGSTGDVEALLREGKVRADVLNNDGHTALDLAARSNAGFFATINLVVALVAFGARLRPQRQDRLEQWGG

SEQ ID NO: 256685 - protein, 367 aa, Zea mays
  unsure (1)..(367): unsure at all Xaa locations
  Clone ID: MRT4577_165686C.1.pep
SRPGSSIHVGSPSVQHLDASGSSSSLHSKANRSSDVAVNHDIFDDSDKGGTAQYMVNVITPQFNLHSEEANGRFLLAAASGRVLARSFHSVVHLGKEILEQALGTSSAQILELQPEMTWNKSELSVMLKDVQAHVAPTDVDPGAGLQWLPKVLGSSEKLKRTGALLERVFMPCQMYFRYTRHKGGTADLRVKPLKELRFNSPDITATMTSRQFQVMFDVLRNLLFARLPKPRKNSLQYPSDDEDIEEEADEVVPDGVEEVELAKITLEQREREIKLLLDDIRSLTGNGDNGTDHCHSAEKGDCLWMINSGKASLVEGLKRDFANLQKSRIFASSALRKALSNASQXTFVKKKKKKRPXCAMRISMKI

SEQ ID NO: 256686 - protein, 96 aa, Zea mays
  Clone ID: MRT4577_165687C.1.pep
KRRCGRGYTAPAFGGASRSWRKLSTGDRVRPESKLSTSSSGDEWASFVFWGKKRGSRKGKHDCVLYTKITKLVFHFFLFVWKGKKLFFFFQKLSGA

SEQ ID NO: 256687 - protein, 112 aa, Zea mays
  Clone ID: MRT4577_165688C.1.pep
MANFGSSGFAFDIESYIHSQQLQYSQEMACTVDKANLDPPIVPLLVLKHLVHMGCEQSVKSFYRAAFGGFETDPRVPFSEGDLVKLLERSKIKRRFVDMVVNGEIQACFEAL

SEQ ID NO: 256688 - protein, 108 aa, Zea mays
  Clone ID: MRT4577_165689C.1.pep
MFRDQYDNDVTVWSPQGRIHQIEYAMEAVKQGSATVGLKSKTHAVLVALKRAQSELAAHHKKILHVDNHIGISIAGLTADARLVCNFMRQECLDSRFVFDRPLPVSRL

SEQ ID NO: 256689 - protein, 108 aa, Zea mays
  Clone ID: MRT4577_16568C.1.pep
IGLLNGRDPGHRRRADVDSTDIHAGRSHRKQNAYIYVQGERIGAKLLHYKGSLEGNYTTAARSTQAVSVTNYWFKEHEFWADRGTCGNPYKGYYGAAISALSATPNFG

SEQ ID NO: 256690 - protein, 67 aa, Zea mays
  Clone ID: MRT4577_165690C.1.pep
RQCQAQHFFKTSRVGACVLTSLAILYTCNSCYIRYFNCINFTIAHVSSNSYTFYKNQPMCYVIVATP

SEQ ID NO: 256691 - protein, 106 aa, Zea mays
  Clone ID: MRT4577_165691C.1.pep
HHHDPHYGYDYSPHPLLLGGQLVHASWLAWSSVSATTASPAVVRVDGIDLRPLVAAAVSVFVDTIGRAEWWPCGASPGPSPGEQQPPRSTTACPASSNSLPSFYLS

SEQ ID NO: 256692 - protein, 324 aa, Zea mays
  Clone ID: MRT4577_165692C.1.pep
MPSVDDDDDFEPPKKKCSIKMDAPNKTQRLNIRCNPGDVLASIQILNERQRQAIVRKGFSSILDMTIDAIGCRTLLCWLMQKLDPRDMTLRIGPDKELKNTKQTVHLILALPNSGGQKLRLGNDDELSIRCFFILFNRLLFPTTSWSISYNEVLLAEELEWFPHIDWCHLIFSDLCEAVQKWHNRSTNNISTTIYRCSIAVLLYYLDHLHHVVAPNNKSGTPCIKYFNKNIIRALSMADKRKPRQGGEPFGFCPFRSSSETCYVSKSASIGQLESTMRPETGEADPNEHGRLPNINIQLPLMQDLMSTKIQLLPVHQCSKSKLS

SEQ ID NO: 256693 - protein, 57 aa, Zea mays
  Clone ID: MRT4577_165693C.1.pep
RKWPREPRSAPPARGAGPSGRPTTGPTPGPGAASAARPTRGGSAGPPPPAPAPLPRP

SEQ ID NO: 256694 - protein, 57 aa, Zea mays
  Clone ID: MRT4577_165694C.1.pep
RLMVYNSISVTTGADTLLVSVLLLSMEDLMPWSVGLTPRTISKECKGKGVACSSKAA

SEQ ID NO: 256695 - protein, 98 aa, Zea mays
  Clone ID: MRT4577_165695C.1.pep
IPPFRFQGARNRMKEKKEREREGRDRRIAEFQGYMLQRAAGETQLSIKGGKKPHDRQKHSLGVASTAVLRRFQRGGSRGAAATTHFCPQRLLLSRLPF

SEQ ID NO: 256696 - protein, 81 aa, Zea mays
  unsure (1)..(81): unsure at all Xaa locations
  Clone ID: MRT4577_165696C.1.pep
PPGGFFIALGYGFWPSMVFLSEFVQTFILADFCYYFLKSXFGGQLVFRLPSGVVLKTAARKKSILFVPFVFGHTKGQFFCF

SEQ ID NO: 256697 - protein, 161 aa, Zea mays
  Clone ID: MRT4577_165697C.1.pep
MMIKLRYSKRLFKRSSSSSKQQAAARGDDNGSDGSAGAGEIEWEVRPGGMLVQKREEGRGGQETVTVRVSTGFSCHHVSIGATSTFGELKVMLSMVTGLKTREQRLLFRGKERDDTDHLHMVGVRDKDKVLLLEDPALKDIKLRALSAQEPGSSCQPFIQL

SEQ ID NO: 256698 - protein, 136 aa, Zea mays
  Clone ID: MRT4577_165698C.1.pep
FSEQFSSHILSSDPHLLIPQLLIPYLCSAGAGTDPGDYICGIGIRVRLSAPAITITIRGGRVPRLDERCHGGRLRLEREQEASANPADVRESISYRGLNREHTGFAHFLQGHVPPERCSQRYLLAPRCCGRQDRAV

SEQ ID NO: 256699 - protein, 231 aa, Zea mays
  Clone ID: MRT4577_165699C.1.pep
MHQQQHQERPREVYRECMRNHAAKLGTYASDGCCEYTPDDGQPAPMLCAACGCHRNFHRKTFLDAAAGAHGAMLPSPAGASPGYGSGTHHTATTAAGMGGDAGAHGSGGRRRTRTKFTEEQKECMARFAERLGWRMPKREPGRAPGDDEVGRFCREIGVTRQVFKVWMHNHKSGGGSGGAGAGAGGAAQTSSSTTRGGGSGAVGGGGSMSPAICADVEDDEEVMRGSGMCM

SEQ ID NO: 256700 - protein, 68 aa, Zea mays
  Clone ID: MRT4577_16569C.1.pep
FDRTVIPSIKFVMNLNKSGGPFGAFGVGWVTSFTVPVQPGSGAIVAFFARVEGAGDYLSAIGVYVRPL

SEQ ID NO: 256701 - protein, 137 aa, Zea mays
  unsure (1)..(137): unsure at all Xaa locations
  Clone ID: MRT4577_1656C.1.pep
PPSPPPRPPPPHTHPAPPPPPHPKHPPPPPPPXPRPPPTPRPPPXPTPPPPPXPPPPPQPPAXPRPLPGHPGEAPTXXXPPPXVXFVPXPPGAPPPXPALTPXXPPPLCRTXAAPSAAIRRTGSPRRPPSPTHPERA

SEQ ID NO: 256702 - protein, 139 aa, Zea mays
  unsure (1)..(139): unsure at all Xaa locations
  Clone ID: MRT4577_165700C.1.pep
SPPPPSPPPNRHLPLSTPXPAPPRPSHLPTRHRRSTSPPPESGFLPPPRGSSXPHRIPPPRSSLAGPDDASKAKPSXSPANEARRPPLPLFPXARPGCPSPALLLPDPFFPDXTPPPPPVTRSTSLLPRREPPARPSPA

SEQ ID NO: 256703 - protein, 33 aa, Zea mays
  Clone ID: MRT4577_165701C.1.pep
PLQDVGAQKCQSRSSQADLMVYESNINLNHAKY

SEQ ID NO: 256704 - protein, 86 aa, Zea mays
  unsure (1)..(86): unsure at all Xaa locations
  Clone ID: MRT4577_165702C.1.pep
RSSGQDPSNKFTGLHRSLVPGPMKMRAPPPXFGVRRALWLSPPAKIPLSRPWGLFKGGAFGVRLFFRGGGAPWAPSSRVGRPCPPR

SEQ ID NO: 256705 - protein, 136 aa, Zea mays
  Clone ID: MRT4577_165703C.1.pep
ASLEEIMCYPSLSSILSKFRRNSGTTSRSDDGRKGGEGESTMTPSKRTEEAASSKTTTRKQKREVTADTIGFHRSSVLRVKRRKMRRRKKIKREKSSKQTLGMRYRDIFFFFLPNSLWDAAALAVNLNSLQQNQRV

SEQ ID NO: 256706 - protein, 160 aa, Zea mays
  unsure (1)..(160): unsure at all Xaa locations
  Clone ID: MRT4577_165704C.1.pep
XRVXRXSPTCTSAXRQXXXXXGGEQNNXXGKEXRTCALXAPTKFFGXRQPISGXGGAXGAALTTRXLQXXXPAGARLXSSPGXLSSPWSFLTXXGHSXRVXVATFPLSFYXSPFLXTVIXXVFXXSTFXXCATXVGIPXAFAFGPFXRXXDXXALRLTLH

SEQ ID NO: 256707 - protein, 51 aa, Zea mays
  Clone ID: MRT4577_165705C.1.pep
EKPEAYVEESQSGKQMEEPTAVAGDVYPMINEHCLIQEEHCLPRVCVSRKC

SEQ ID NO: 256708 - protein, 71 aa, Zea mays
  unsure (1)..(71): unsure at all Xaa locations
  Clone ID: MRT4577_165706C.1.pep
RTRCGCDCQTPPXHITASSYMTPAFYLQTKQQSQPWQYPTGSPQVTPCQPYICCRVKRFYSPFMGQYDQIL

SEQ ID NO: 256709 - protein, 98 aa, Zea mays
  Clone ID: MRT4577_165707C.1.pep
MRVCISLHRGQVAIQDCLACWELYCFEHEIQSDGQLPGYKTSAHHDDVVSTILIQTGAGKHVPRSICDDLEPTVIDDVRTVTYRQLLQPVQVSSGKDD

SEQ ID NO: 256710 - protein, 92 aa, Zea mays
  Clone ID: MRT4577_165708C.1.pep
YPFECPARARAQFPLSSCVVRSGQQHTAPSQSLVDLLPLLKHSLSLLIYIVNGLMSVSVSTLLKATMMRELAPCVETVTYNRNVMCWYSRMP

SEQ ID NO: 256711 - protein, 45 aa, Zea mays
  Clone ID: MRT4577_165709C.1.pep
PQGTKCENSTALSQPRLSPMFCLLPGSKINQAPCYYEFPKQGLCV

SEQ ID NO: 256712 - protein, 563 aa, Zea mays
  unsure (1)..(563): unsure at all Xaa locations
  Clone ID: MRT4577_16570C.1.pep
MAPLVATATMNHAVAHLLGPNHESFSRHHLSSSLQQNSKRRCNLSFRPRAAESQNGSQTLSPSEVPKRDWFPSDFIFGAATSAYQIEGGWNEDGKKPSTWDHFCHTFPDWIADHSNGDVAADSYHMYKEDVRLLKEIGMDSYRFSISWSRILPNGTLEGGINPYGIKYYKNLINLLVENGIEPFVTIFHWDTPQALVDKYGGFLDERIVKDYTDFAKVCFENFGDKVNNWLTFNEPQTFSSFSYGTGLCAPGRCTPGQKCANPIGNSLTEPYTVGHNLLRAHAEAVDLYNKYYKGENGRIXHEIIGXGLAFDVMGRVPYEKSAFTDQQAEQRSWDINLGWFLEPVVRGDYPFSMRSLARERLPFFTDKEQEKLVGSYDMLGLNYYTSRFSKNIDISPNYSPVLNTDDAYASQETNGPDGNPIGPWMGNSWIYLYPEGLKDLLMIMKNKYGNPPIYITENGMGDVDHGDLPMEVALDDHKRVHYLQRHIATLKESRDLGANVQGYFAWSLLDNFEWFSGYTERYGIVYVDRNDGCKRYMKRSAQWFKEFNAAKKAAAKKILTPA

SEQ ID NO: 256713 - protein, 89 aa, Zea mays
  Clone ID: MRT4577_165710C.1.pep
MGKRKSAAKPPPKKRMDKLDTVFSCPFCNHGSSVECRIDMKNLIGEASCRICQENFSTTVNALTEPIDIYSEWIDECERVNTVEGDDDA

SEQ ID NO: 256714 - protein, 330 aa, Zea mays
  Clone ID: MRT4577_165712C.1.pep
MYYSFLCKKKKKKKKKKKKKKPGPPMRSPRGLLTASGYLAGRHAPSPSVSTTGHNSLLARTFQILAQPESVRLQKHPAPNSGILELRLERPEVKNAINWDMMRMLRSAIEKIQADTTAKVVLVASSVPGAFSAGADLKERRLMSSSDVGGYARSLRSTFSSFEALPIPTIAVIEGAALGGGLELALACDLRICGENAELGLPETSLAIIPGAGGTQRLPRIIGRSRAKELIFTGRRCGAAEAVTMGLANYCVPAGEAYQKALDIACEITQKGPMGIRMAKKAINEGAEVADMSSALAIEGECYEQLLYTQDRVEALAAFAEKRKPVYTGK

SEQ ID NO: 256715 - protein, 89 aa, Zea mays; identical to SEQ ID NO: 256713
  Clone ID: MRT4577_165713C.1.pep

SEQ ID NO: 256716 - protein, 571 aa, Zea mays
  unsure (1)..(571): unsure at all Xaa locations
  Clone ID: MRT4577_165714C.1.pep
PHPPARAQPPGSAGLRRRPTYPPPPPPPQRGSPTALPPPRYVPAAPPRPPVGSLLLSDCACCARHLVPLDFSHSSSPXRVRLLIGGEFVESRADEHVDVTNPATQEVVSRIRLTTEFKAAVDAAXRTAFPGWRNTPVTTRQRVMFKFQELIRANMDKLAENITTEQGKTXRCLGDVFRGLEVVEHACGMGTLQMGEYVSNVSNGIDTFSIREPLGVCAGICPFNFPAMIPLWMFPIAVTCGNTFVLKPSEKDPGAAMMLAELAMEAGLPKGVLNIVHGTNDVVNNICDDEDIKAVSFVGSNTAGMHIYSRASAAGKRVQCNMGAKNHAIILPDADRDATLNALIAAGFGAAGQRCMALSTAVFVGGSESWEDELVKRASGLVVSSGMVNDADLGPVISRQAKDRICKLVQSGVDSGARILLDGRKIVVPRYEDGNFVGPTILADVKSDMECYKEEIFGPVLLLMKAESLEDAIQIINRNKYGNGASIFTTSGVSARKFQTDIEAGQVGINVPIPVPLPFFSFTGSKASFAGDLNFYGKAGVQFFTQIKTITQQWKESPVQRVSLSMPTSQK

SEQ ID NO: 256717 - protein, 89 aa, Zea mays; identical to SEQ ID NO: 256713
  Clone ID: MRT4577_165715C.1.pep

SEQ ID NO: 256718 - protein, 62 aa, Zea mays
  Clone ID: MRT4577_165716C.1.pep
TQSKHGHMLDHVRNSYELTNSIATYEHTMCLGPVRKPGYTSPGERLLTLWTLTHRTLQGWGG

SEQ ID NO: 256719 - protein, 68 aa, Zea mays
  Clone ID: MRT4577_165717C.1.pep
SSRVELGGFRFHYYLPEPSDGRQNHQEPPKNDAHLMNTEGHLLLIYKPRNEPREDNGVFSSYPVGQPG

SEQ ID NO: 256720 - protein, 115 aa, Zea mays
  Clone ID: MRT4577_165718C.1.pep
FGPVLLLMKAESLEDAIQIINRNKYGNGASIFTTSGVSARKFQTDIEAGQVGINVPIPVPLPFFSFTGSKASFAGDLNFYGKAGVQFFTQIKTITQQWKESPVQRVSLSMPTSQK

SEQ ID NO: 256721 - protein, 89 aa, Zea mays; identical to SEQ ID NO: 256713
  Clone ID: MRT4577_165719C.1.pep

SEQ ID NO: 256722 - protein, 65 aa, Zea mays
  unsure (1)..(65): unsure at all Xaa locations
  Clone ID: MRT4577_16571C.1.pep
TQELWCLNVPMTXVRGDVPPAQAAEAPNERKGPEDHNSPTETTLSTARKTRAHPPYAEMSVQAIA

SEQ ID NO: 256723 - protein, 182 aa, Zea mays
  Clone ID: MRT4577_165720C.1.pep
AGPYVSSANAQLFGNSIRVLCNAGTSEGFDPARDVDVSLPEVNLRSDAVERQVGGPSADMMRRPVLAFCPGGNQVPSPRLAEALYLGCVPVVVDDGEYALPFADVLDWDAFALRLRVADIPRLKEILAAVSPRQYIRMQRRVRMVRRHFMLNGGPPRRYDAFHMILHSVWLRRLNVRIATAE

SEQ ID NO: 256724 - protein, 82 aa, Zea mays
  unsure (1)..(82): unsure at all Xaa locations
  Clone ID: MRT4577_165721C.1.pep
MGKRKSAAKPPPKKRMDKLDTVFSCPFCNHGSSVECRIDMKNLIGEASCRICQENFSTTVNXYSEWIDECERVNTVEGDDDA

SEQ ID NO: 256725 - protein, 101 aa, Zea mays
  Clone ID: MRT4577_165722C.1.pep
NSSMWTWATRHIPHVFGRVVLNERLVHTSEGSNVVAPVGMNNQVGTSTRRTGDCRTPRRPEAGSSATATCSCKATPAAADPARAARGRHLLLLLSLSAARS

SEQ ID NO: 256726 - protein, 323 aa, Zea mays
  Clone ID: MRT4577_165723C.1.pep
FGTRVPPRRTTTSSAAPSPSLLPCLHVHAHGRTSAAAACCLLVLETFLVVAACWWDPRRGEASICFLPPPRSDPYSFSCLTSAGGVGGGGQHLLATASSYYSGAAGFTNSTGKKVHQEVRGHGGDDRGFLSCRNSSFGYDEATPSSARRHQCNFTGGSDEVIIQATPPQVERRRDDVKLERLELGLARARSAIMEAIRKKDKVSPLPDKDYVPMGPVYRNAHAFHRSYLEMERQLKVYVYEEGEPPVFHDGPCRSIYSTEGRFIHSMETETEAEEGRRLRTRDPARAHVFFLPFSVVKMVQTIYEPGSRDMAPLKRTVADYVR

SEQ ID NO: 256727 - protein, 79 aa, Zea mays
  unsure (1)..(79): unsure at all Xaa locations
  Clone ID: MRT4577_165724C.1.pep
MGKRKSAAKPPPKKRMDKLDTVFSCPXCNHGSSFECRIDMKNLIGEASCRICQENFSTTINGMPNLCIKLYRLLLISLL

SEQ ID NO: 256728 - protein, 43 aa, Zea mays
  Clone ID: MRT4577_165725C.1.pep
KKKYKKKNKKKKKKKKKKKKKKKKKKKKKKKKKKKKKKKKKNK

SEQ ID NO: 256729 - protein, 598 aa, Zea mays
  unsure (1)..(598): unsure at all Xaa locations
  Clone ID: MRT4577_165726C.1.pep
MLRAALFRSAPGLRRSPATAHLSTAAAAAAAWLSNGPASTPPRVRLLIGGEFVESRADEHVDVTNPATQEVVSRIPLTTADEFKAAVDAARTAFPGWRNTPVTTRQRVMFKFQELIRANMDKLAENITTEQGKTXRCLGRXFRGLEVVEHACGMGTLQMGEYVSNVSNGIDTFSIREPLGVCAGICPFNFPAMIPLWMFPIAVTCGNTFVLKPSEKDPGAAMMLAELAMEAGLPKGVLNIVHGTNDVVNNICDDEDIKAVSFVGSNTAGMHIYSRASAAGKRVQCNMGAKNHAIILPDADRDATLNALIAAGFGAAGQRCMALSTAVFVGGSESWEDELVKRASGLVVSSGMVNDADLGPVISRQAKDRICKLVQSGVDSGARILLDGRKIVVPRYEDGNFVGPTILADVKSDMECYKEEIFGPVLLLMKAESLEDAIQIINRNKXIFLPDACRSEAFIAIWYKYLFVHVCRYGNGASILFLRYTLLITTSGVSARKFQTDIEAGQVGINVPIPVPLPFFSFTGSKASFAGDLNFYGXLLILTPPDPSQTVREXNTMAWDGMSGKAGVQFFTQIKTITQQWKESPVQRVSLSMPTSQK

SEQ ID NO: 256730 - protein, 89 aa, Zea mays; identical to SEQ ID NO: 256713
  Clone ID: MRT4577_165727C.1.pep

SEQ ID NO: 256731 - protein, 104 aa, Zea mays
  Clone ID: MRT4577_165728C.1.pep
PRGPPTGSAVEQAKFSCPSFILSIGPAVWDPISSPKFGGGGGPKKLWPKVVGLSVEDPKKVFLKDKPDADIVVLPVGSVVTPDFCPNRVRIFVEIVAQTPPVGL

SEQ ID NO: 256732 - protein, 89 aa, Zea mays; identical to SEQ ID NO: 256713
  Clone ID: MRT4577_165729C.1.pep

SEQ ID NO: 256733 - protein, 104 aa, Zea mays
  unsure (1)..(104): unsure at all Xaa locations
  Clone ID: MRT4577_16572C.1.pep
PTRPVNFTQRCRILQLSNCWGSTQDRVAWHXSAWARTYXIVLXEERYECFRVMKYDHXAVHAYKQGERPQHGHHXTQQLDXQDLEQQLPXLQYLLYRLDACPAE

SEQ ID NO: 256734 - protein, 49 aa, Zea mays
  Clone ID: MRT4577_165730C.1.pep
DGLERVVSGPRVLFHKGFSQARRLQVAPAGGRTGLKKGLMCCFRGLFYW

SEQ ID NO: 256735 - protein, 214 aa, Zea mays
  unsure (1)..(214): unsure at all Xaa locations
  Clone ID: MRT4577_165731C.1.pep
MATKIYIVYYSTWGHVAALAEEIKKGADAVAGVEATVWRVXHTLPEEVLGKMGAAPAREDHPVISPRQLADADAVLLGFPTRFGMMAAQMKAFLDATGGLWQGQALAGKPAGVFLCTGTQGGGQETTALTAVTQLAHHGMLFVPVGYTFGAGMFGIDQVRGGSPYGAGTFAGADGSRAPTEVELAMARHQGTYFAGIAKKLKAGAAALAAEALA

SEQ ID NO: 256736 - protein, 70 aa, Zea mays
  unsure (1)..(70): unsure at all Xaa locations
  Clone ID: MRT4577_165732C.1.pep
LCSLITSHDESANTKSFNLHTFYVFNIKLKYGRNLKWFVSVMMRGSTLSFFNNCMLMNICPFSCFCIYXK

SEQ ID NO: 256737 - protein, 629 aa, Zea mays
  Clone ID: MRT4577_165733C.1.pep
MKATAPPAKRRRGPRLAVLALVFCSLLVPIAFLFNRFPAVYVTDERPQQEIDLPSFDRVVFENGGSVIEDVSKKTSRSTSVSHRGIDSDPSIVSTKPKAIVLRPPKIEQVLPPPKVEPNPEVKPVLVPVPVHQNKKINLDKIRPPRVQSADEVEKAKACQLEFGSYCLWSIEHKEVMIDTIVKRLKDQLFVARSYYPSIAKLKGKETLTRELKQNIQEHERVLSESIVDADLPSFIKTKLERMEQSIARAKSCTVDCNNVDRKLRQILHMTEDEAHFHMKQSAYLYNLGVHTMPKSHHCLNMRLTVEYFKSMPLDPNDSSAHKFNLPDNRHYVILSKNVLAASVVINSTVSSSEDTENIVFHVLTDAQNFYAMKHWFARNSYRESAVNVINYEQIIFENFPEFGTQQLYLPEEFRVFISSLERPTEKSRMEYLSVFSHSHFFLAEIFKDLKKVIVLDDDLVVQHDLSFLWNLDMGDKVHGAVSFCGLKLGQLRNLLGRTMYDQQSCAWMSGVNVIDLEKWREFTMTENYLQLLRKFGNNDDEASLRASALPISLLSFQHLLYPLDERLILSGLGYDYGIKEELVQNSASLHYNGNMKPWLELGIPDYRKYWKRFLTRDERFMDECNVSP

SEQ ID NO: 256738 - protein, 165 aa, Zea mays
  unsure (1)..(165): unsure at all Xaa locations
  Clone ID: MRT4577_165734C.1.pep
RVHLGCVHAGLLPPAARRAVHSHRLSPATTAVFLLSGPPHPANPMRAPPCCARPATTSSWLPRSSRPALPWPRRFRAFCRALLAPMSEGSRSSISILASLVSPLLGRHPQAAPSSLLRSVTAFCSHGHRGVPWSSIPVRRSSHGXQPLLLARPDLPARPCRTQAS

SEQ ID NO: 256739 - protein, 112 aa, Zea mays
  Clone ID: MRT4577_165735C.1.pep
MPRLQELELIGNNLANDGLMSILDRCPRLESLDIRECFNIQMDDALKLKCSRIRDLRLPHDPVFFDDTRYWPYYINSGVFDSDIDSEVGTYDDPLDNMGESMSIMFNDDFYV

SEQ ID NO: 256740 - protein, 53 aa, Zea mays
  Clone ID: MRT4577_165736C.1.pep
RAGSNAHAREKQTLAAVAGRHGVPCPRADHSPPRRSSKAPARAGSVLSAVRME

SEQ ID NO: 256741 - protein, 81 aa, Zea mays
  Clone ID: MRT4577_165737C.1.pep
MFIFLASRELLCLFSLSMPFGFLSGRIPSPVERQHYREEAAAANQTAKNEGDDVDVLSQGIRMTKKNWKLSQDFKHFKSNF

SEQ ID NO: 256742 - protein, 104 aa, Zea mays
  Clone ID: MRT4577_165738C.1.pep
LETHEGRKVVQALKDVYAEWVALDRILTSYLCFGGLFKLASNSFLSQRICSVNAISILCEVTGANVYYVVYAVGIDTIIVPIVPNTRVVVGGLCFHNDILYLVY

SEQ ID NO: 256743 - protein, 40 aa, Zea mays
  Clone ID: MRT4577_165739C.1.pep
TGRVFMVSGHVFKKPGMYQINSVFIEMKPILDFGLNPPTM

SEQ ID NO: 256744 - protein, 37 aa, Zea mays
  Clone ID: MRT4577_16573C.1.pep
DIEVAAITVDELMIRPADESVSPTAKISRARLQTQKE

SEQ ID NO: 256745 - protein, 125 aa, Zea mays
  unsure (1)..(125): unsure at all Xaa locations
  Clone ID: MRT4577_165740C.1.pep
AENYTGVYQPAYAFTNIRFSSRTTGEPTSITWTHIIHLKAIADGSCPMDIQKGDVLAWPTNLARMMGPWLVYACLLNGTSMALYDWIRTMSSISKSVHDAXRTMLGLQHRIVRTWKNTDCTDGLD

SEQ ID NO: 256746 - protein, 55 aa, Zea mays
  Clone ID: MRT4577_165741C.1.pep
KGFSLIKVLVFSMEVFFGFFFPCKFFFFFELPKSLNKCWVFWNIFFAKKIRFCPP

SEQ ID NO: 256747 - protein, 98 aa, Zea mays
  Clone ID: MRT4577_165742C.1.pep
CCFRSKNGYVYVFLSKASVVEKRIPDLIFFNTTDGVAAHSPEFILIQSEKEWYMLRSSKNALCSSDISDEVQLYVPGEASNSNQFLNKVASAGGTGPT

SEQ ID NO: 256748 - protein, 93 aa, Zea mays; identical to SEQ ID NO: 237603
  Clone ID: MRT4577_165743C.1.pep

SEQ ID NO: 256749 - protein, 97 aa, Zea mays
  unsure (1)..(97): unsure at all Xaa locations
  Clone ID: MRT4577_165744C.1.pep
KAGKGFAPLSMAYAGAVFAKACFKGLNGVPALVEGFFGPSPVAKLPFFAPKVWLGKNGVEEVLGLGEPPPFEKKGVESLKGGLKFSLXKGFKFAPGD

SEQ ID NO: 256750 - protein, 37 aa, Zea mays
  Clone ID: MRT4577_165745C.1.pep
KLPPVLFFKKKKKKKKKKKKKKKKKKKKKKKKKKKKK

SEQ ID NO: 256751 - protein, 93 aa, Zea mays
  unsure (1)..(93): unsure at all Xaa locations
  Clone ID: MRT4577_165746C.1.pep
GFATLSLANAGAVFSKASFKGFNGVPAILKGFFGQSPVTKLPFFAPKVGLGKNXLEEVLGLGELPPFKKKGVESLKVGLKFSFXKGFKFAPGN

SEQ ID NO: 256752 - protein, 50 aa, Zea mays
  Clone ID: MRT4577_165747C.1.pep
SINITVPCSYDWVTYEALLSISFFGASLSFIMCYNLMNITWSRTISNRSL

SEQ ID NO: 256753 - protein, 131 aa, Zea mays
  unsure (1)..(131): unsure at all Xaa locations
  Clone ID: MRT4577_165748C.1.pep
WFXPXSLVXXGXASSXXXPXSLXXXXSXXSSRGXPPXGAXXXASSPXSAXCXXPGXGFSPLLLLXGCCLCXPXXXVXGRRLWVAXFXLXLAXFCPFVSLPAPXCXXSARXXGPXXXLFAAXXXXXXXXPPA

SEQ ID NO: 256754 - protein, 126 aa, Zea mays
  unsure (1)..(126): unsure at all Xaa locations
  Clone ID: MRT4577_165749C.1.pep
MADGVLAVRLHLCAANNPIRLHSRGHGRYALPARIGFRLIRGAHSFLSVIALLFSVRGRIPTPRSGPFRHGNRLFLGRLPRFLAVCVLGEREVVRFVXVAVGTGGAPPRVAHRGRSGETGESKRAA

SEQ ID NO: 256755 - protein, 66 aa, Zea mays
  unsure (1)..(66): unsure at all Xaa locations
  Clone ID: MRT4577_16574C.1.pep
MEILRPSPPPSHCPXSYAAAVTGSXHHGETWVHVAVGRSPEKTLSLLRWALRRFGCSRIVLLHVHH

SEQ ID NO: 256756 - protein, 101 aa, Zea mays
  unsure (1)..(101): unsure at all Xaa locations
  Clone ID: MRT4577_165750C.1.pep
EKIGFEAQQPNLALRKCARVQLVKNGKKIAAFVPNDGCLNYLQENDEVLIAGFGCKGPAVGDLSGVRFKVVXVFGVSLLALFQEKKEKPRFLVPFGSPEWC

SEQ ID NO: 256757 - protein, 170 aa, Zea mays
  unsure (1)..(170): unsure at all Xaa locations
  Clone ID: MRT4577_165751C.1.pep
MAPLRYAGAAAAVASNNLVLSFGXMLIDFVPDEAGLSLAETGGFVKAPGGAPANVTCAIAYVGGTGPAPGAATRKVFHYISISLISESCRSASHGSPCAQAMSSAAVCSYDLDVRLPLWTSSDXADXGILCIWKEDCFIXATDDKVAFLTLGYANDDNNMLCLCVDIVKV

SEQ ID NO: 256758 - protein, 77 aa, Zea mays
  Clone ID: MRT4577_165752C.1.pep
RYRSAARAAEAIWVSGGLKVDKYVAILGRMDRLQGPVFGNSHALVPIGQHDGVIANGGYRGRGTQGCKSLKGRGSPR

SEQ ID NO: 256759 - protein, 103 aa, Zea mays
  Clone ID: MRT4577_165753C.1.pep
LFRSKLAAAILGGVGQIHIKPGATVLYLGAASGTTVSHVSDIVGPDGLVYAAEFSHRSGRDLINLAKKRSNIIPVIEDARHPHKYRMLIAMVDVIFADVAQPD

SEQ ID NO: 256760 - protein, 192 aa, Zea mays
  unsure (1)..(192): unsure at all Xaa locations
  Clone ID: MRT4577_165754C.1.pep
MSSKPASQSMPEQAAKPKEMGEDDRQRSAAEEVSGEPDQQQESPAPVLDKDAPDLSPDSGVLDVPLAPEAESDESKETKNSDSNENQEKKSSQKSSISDSFISAKVSDGTNSLGKTSGSAKTSGRDFTESGKSSMCRVSASSDLSDESSCSSMSSATTKPHKGNDSRXEAIQVVKXREGVLGLNXFRLLKKL

SEQ ID NO: 256761 - protein, 69 aa, Zea mays
  Clone ID: MRT4577_165755C.1.pep
KKKKKKKKKKKKKKKKKKKKKKKKKKKNPRFLGRGFFKKKEKTFSPYRVKKFRGQRPRIWKFIIFPAPF

SEQ ID NO: 256762 - protein, 58 aa, Zea mays
  Clone ID: MRT4577_165756C.1.pep
CSSPLPRFLARCCWDVGSFTRTQHIDCAASLRWTREAYACVRKGARVGVFLRSVCCCL

SEQ ID NO: 256763 - protein, 114 aa, Zea mays
  unsure (1)..(114): unsure at all Xaa locations
  Clone ID: MRT4577_165757C.1.pep
SFLAIQQILERENLKTKIMDXIKFDVGNVVMVTGGRNTGRVGVIKNREKHKGSFETIHVEDSMGHQFATCMGNVFTIGKGNKPWVSLPKGRGIKLSIIEEQRRRDFIAQAAANA

SEQ ID NO: 256764 - protein, 171 aa, Zea mays
  Clone ID: MRT4577_165758C.1.pep
PGFRRGFQADRSLDLLHCHHRSRLPSLRIRRAHGRRLVERRRHLVRPRNAGRLQVQYIRVACNWNGLDIAFRVDAGSNANYLAMAIEYESGDGDLRAVELKQSGAAAWAPMQRSWGAVWQYKSGSTNLQAPLSVRLTSGSGRVLVASNVIPAGWQPGRTYRSVVNFGGNHA

SEQ ID NO: 256765 - protein, 119 aa, Zea mays
  Clone ID: MRT4577_165759C.1.pep
IRYPDPFIKANDPIKIDLETNKIMDFIKFDVGNVVMVTGGRNPGRVGVIKNREKPKGGFDTIPVEDSMGPQFATRMGNVFPIGKGNKPWVSLPKGKGIKLSIIEEQRRRDFAAQAAAKA

SEQ ID NO: 256766 - protein, 109 aa, Zea mays
  Clone ID: MRT4577_16575C.1.pep
FTLACIKMGRPELARRAIAVAEERLSDDKWPEYYDTRSGRFVGKQSRSYQTWTIAGFLTSKMLLENPELASILTCDEDLELLQGCACCLSKKRTRCSRRVAKPHAGVKL

SEQ ID NO: 256767 - protein, 98 aa, Zea mays
  unsure (1)..(98): unsure at all Xaa locations
  Clone ID: MRT4577_165760C.1.pep
AGFSVTARRETYEKPLGRGATMTGCPPADHXEYLEERRLTDLIKKXIPLIIYPVCLWRERTSETESSAHEHEEDNNDDEGRDEDGDAAHEHQQNRKKT

SEQ ID NO: 256768 - protein, 243 aa, Zea mays
  Clone ID: MRT4577_165761C.1.pep
PGFRHGFQADRSLDLLHCHHRSRLPSLRIRRAHGRRLVDQPPFSSMITAGSQSIFQDGKGCGTCYQVKCTGHESCSGSPVTVVITDLCPDATCQVEPVHFDLSGTAFGAMAKPGQADKLRNAGRLQVQYTRVACNWNGLDIAFRVDAGSNANYLAMAIEYESGDGDLRAVELKQSGAAAWAPMQRSWGAVWQYKSGSTNLQAPLSVRLTSGSGRVLVASNVIPAGWQPGRTYRSVVNFGGNHA

SEQ ID NO: 256769 - protein, 139 aa, Zea mays
  unsure (1)..(139): unsure at all Xaa locations
  Clone ID: MRT4577_165762C.1.pep
YLGHSPMVCLDSQRRSDAPSVRRSAVSCTSQGARSCGDIHVSPEGRITAIAHHLNIYIVTDYAPRFIALMISYPLSVPSHALNATRYYECEDSYFFIDSSMVYTLITAAHFSAYSRFMXDCNYRSTHPISCLRGATPCR

SEQ ID NO: 256770 - protein, 222 aa, Zea mays
  unsure (1)..(222): unsure at all Xaa locations
  Clone ID: MRT4577_165763C.1.pep
MASKQIGVLTCFIAITALAFRPCASAVPMDGGWSNGGATWYGPAKGAGSDGGACGYQGAVDQPPFSSMITAGSQSIFQDGKGCGTCYQVKCTGHESCSGXPVTVVITDLCPDATCQVAIEYEFRGRGPACRGAEAEVDAEYVGHGRCVAVQVRLHQSAGPPVCPPHLGLRQGPRRQQRHPAVVTTQSTRALRRQLRRKPCITSDIKDVVCRCLHPTIRCMHI

SEQ ID NO: 256771 - protein, 170 aa, Zea mays
  Clone ID: MRT4577_165764C.1.pep
SGGSSDASDLRRSSSYSSIFHETSSSSGELHHSSYIRRPSLVHVLEHRVPFVVLSFRKSNEIDVPTHHSHALVHRTRAMCKAVACHSLMMPLQFLVQSTQGHFLCDPSSLPRRRLRDCRRQHPSSVSEGSTYLTCVLLHLRGSRTRVGVARRATWYMIQEAVPRPASRYP

SEQ ID NO: 256772 - protein, 82 aa, Zea mays
  unsure (1)..(82): unsure at all Xaa locations
  Clone ID: MRT4577_165765C.1.pep
QTLTSFSNYFYSYSISSVPCLFPKLFCPITLLXSLSFFKHSSNFSFPFPPKPSNFSPYLIQPFKIPLNFFLNSPYSNFFPFN

SEQ ID NO: 256773 - protein, 226 aa, Zea mays
  Clone ID: MRT4577_165766C.1.pep
PGFRHGFQADRSLDLLHCHHRSRLPFSSMITAGSQSIFQDGKGCGTCYQVKCTGHESCSGSPVTVVITDLCPGAACQAEPVHFDLSGTAFGAMAKPGQADQLRNAGRLQVQYIRVACNWNGLDIAFRVDAGSNANYLAMAIEYESGDGDLRAVELKQSGAAAWAPMQRSWGAVWQYKSGSTNLQAPLSVRLTSGSGRVLVASNVIPAGWQPGRTYRSVVNFGGNHA

SEQ ID NO: 256774 - protein, 195 aa, Zea mays
  unsure (1)..(195): unsure at all Xaa locations
  Clone ID: MRT4577_165767C.1.pep
TQAKKPFSFSREWGNQTEKKNSPLGGWTGGPAFKKTPKGPGPGGGPXKKQKKPXGPNKRGGPXDRHPFGPKNPWKRPGPRGIPPPGPPPTAKRKTPGGRRGGQGETTPGPPGRGAGPPPGDPPGGYRFPPGTGPKRGPPNTGGPGPRGPPLKKTPGGRRPKKRGGAPGPQGGGAPPRGQGMPGLSGGELPRPPRG

SEQ ID NO: 256775 - protein, 149 aa, Zea mays
  unsure (1)..(149): unsure at all Xaa locations
  Clone ID: MRT4577_165768C.1.pep
MASKQIGVLTCFIAITALAFRPCASAVLMDGGWSNGGARGGGPXKGAGSDGGACGYQGAVHQPPFSSMITAGSQSIFQDGKGCGTCYQVKSTGHETSSVSPETGDITDLCPDATCQVEPEHFNLSGTGIGAMTKPDQSNMVQNARRLQD

SEQ ID NO: 256776 - protein, 180 aa, Zea mays
  unsure (1)..(180): unsure at all Xaa locations
  Clone ID: MRT4577_165769C.1.pep
MASKQIGVLTCFIDITALAFRPCASAVPMDGGWSNGGATWYGPAKGAGSDXGASEYQSAVDQPPFSSMITAGSQSIFQDGKGCGTCYQAKCTAHXSSSGSPVTAVITDLCPDATXQVETVHFDLSGTALGAMEKPGQADMLRNDGRLQVQYTRMECNWNGLHIGFREDAGSNGNYLAMGI

SEQ ID NO: 256777 - protein, 62 aa, Zea mays
  Clone ID: MRT4577_16576C.1.pep
PFQSRSYMLRDRMMIRILVRCHTLAQDCMHGRGCSHGDPVTLSETNNTPQLSIGFSCVSGSR

SEQ ID NO: 256778 - protein, 68 aa, Zea mays
  Clone ID: MRT4577_165770C.1.pep
PQKLRSGSGKSTDFFTNTPRRKMQGPGRIPTNYTFSQLFSSDIQMRALVFPKTKTLSQMPAPRWIPLL

SEQ ID NO: 256779 - protein, 88 aa, Zea mays
  unsure (1)..(88): unsure at all Xaa locations
  Clone ID: MRT4577_165771C.1.pep
MDGGWSNGGATWYGPAKGAGSDGGACGYQGAVDQPPFSSMITAGSQSIFQDGKGCGTCYQLKRTVHETXTGKPVTVPFTXDLCPRRYL

SEQ ID NO: 256780 - protein, 90 aa, Zea mays
  Clone ID: MRT4577_165772C.1.pep
RAAGAPNHGRRRLLVALALVTGDVASPQVDQGIWLSQAVKRLGTKKRGPNRRAAATLAACSRSRVRDREGDEDRRGYERRAWPLAASASA

SEQ ID NO: 256781 - protein, 148 aa, Zea mays
  unsure (1)..(148): unsure at all Xaa locations
  Clone ID: MRT4577_165773C.1.pep
MASKQIGVLTCLIAITALAFRPCASAVPMDGGWXNXXATWDGPAKGAGSDXXAXGXQXADDQXPXXXRTTAGSQXSXQDVFCCPTCYQVKCTGHESCSGSPATVVITDLCPDATCQVEPVHFDLSGTAFGGMAKPGQADKLRNAGRLQ

SEQ ID NO: 256782 - protein, 92 aa, Zea mays
  Clone ID: MRT4577_165774C.1.pep
VRHTGQMQPNIRCRLPTSAERQPHWRTGALFSCRRPGRIRSHDSMQYSAHRTNPVATTAVNILATHSLDVYFFDNSISPTPTALSKIVKLKR

SEQ ID NO: 256783 - protein, 176 aa, Zea mays
  unsure (1)..(176): unsure at all Xaa locations
  Clone ID: MRT4577_165775C.1.pep
MASKQIGVLTCFIAITALAFRPCASAXCHGRVGWSNGGATWYGPAKGAGSDGGACGYQGAVDQPPLWSMITVGSQSILQDGKGCRTCYQGKCTGHESCCGSPGTGVITDLCPDATCQGEPVHFDLSGTAFSAMAKPGQGDKLRNAGRLQVQYTRVACNWNGLDIALKVDVRSNTNY

SEQ ID NO: 256784 - protein, 77 aa, Zea mays
  Clone ID: MRT4577_165776C.1.pep
WRVTMPKAKMTKSRRMPATVRMLLSVMVPATLVVVGAGGGGPAPAWSESCAISLWMEREAKRRSPSCWRSRLGVRRV

SEQ ID NO: 256785 - protein, 217 aa, Zea mays
  unsure (1)..(217): unsure at all Xaa locations
  Clone ID: MRT4577_165777C.1.pep
HFFPRSVMEAALLAAAGTGRKDGGSEESGVVCEVKKQLYLAGPLVVGFLLQNTVQMVSVMFVGHLGELALASASLATSFAGVTGFSLLAGMACSLDTLCGQAFGARQHHLLGVHKQRAMLVLALVSVPVALVWAYTGDILAWCGQDPEIAAGAGSYIRCLIPALLVYGALQCHVRFLQTQNLVXVPVMLSSRATALCPPAVCWLLVRGLXGLGCNGA

SEQ ID NO: 256786 - protein, 96 aa, Zea mays
  Clone ID: MRT4577_165778C.1.pep
SLPLFFFFPPPPPPPGEAREKNKTHTPQPKPKKKQNPHPLFWKGETYLFYPLTALTKKLVFIPSTPSTTKKFTFEILNPTLLLFQVFILLVNLNYK

SEQ ID NO: 256787 - protein, 67 aa, Zea mays
  Clone ID: MRT4577_165779C.1.pep
IEPGRGKSKLSTGVQQNGKNGAQNGHPQVLNHGFVFLSLRSDHKLTPGLTDAHKEVWAGKTGSSEGP

SEQ ID NO: 256788 - protein, 69 aa, Zea mays
  Clone ID: MRT4577_16577C.1.pep
TVLWLWPYFYSFLTKIYLGSYHFVKNHLDGDPLPSLVVARYCIEASRQWKIGFVQGCSKLRIRLFVVYI

SEQ ID NO: 256789 - protein, 101 aa, Zea mays
  Clone ID: MRT4577_165780C.1.pep
TQFFPPAKKTKRVPEPPFFEVAGPTPTTFFPLILLTKSSGLRGGTYFWEPLNFPPLRYKINRCLVLVPRNLFAWSRPGRYYCKAKGGGAFFCRLPLGVLGG

SEQ ID NO: 256790 - protein, 118 aa, Zea mays
  Clone ID: MRT4577_165781C.1.pep
MTPISEQQQANKEPPHHTQSATCHIAPAPSEVAGVVGDAENADQEQEQDQQQQAARRERDFLAGIRKLFKSFKSLSHIFEIYKDDDDSDDEDDDMDTSIEIGLPTDVQHVAHIGLDGS

SEQ ID NO: 256791 - protein, 38 aa, Zea mays
  Clone ID: MRT4577_165782C.1.pep
SDTSFEAPGERCQCRWLHTPQLTTRLLPIRTGRLGASP

SEQ ID NO: 256792 - protein, 194 aa, Zea mays
  Clone ID: MRT4577_165783C.1.pep
KTKKNPPAQFSKNLTEPKNGEKNGTFWGKRVFPKPPPRKKKNKKFFRGPNSEIGPIWEPKTGKLQGSNFFRGPNSGGGKKKSSLHETQGDCFPPNQRGLDWETIFHPGRIIFEIGEQAPSFLRKRFLPPLERGTKFDGTASPIWVPPKILAGLAPIPKKPPSRAGGGKKKPIGPGGGAPKNWNAPTMFVLKRAP

SEQ ID NO: 256793 - protein, 40 aa, Zea mays
  Clone ID: MRT4577_165784C.1.pep
MSNDIKKVSTLEEVAKHNSKDDCWLIIGGKVYTGSKFLED

SEQ ID NO: 256794 - protein, 35 aa, Zea mays
  Clone ID: MRT4577_165785C.1.pep
SILKKISVGLAVAKVLNVAVPGSPDPVKIVYLKGS

SEQ ID NO: 256795 - protein, 93 aa, Zea mays
  Clone ID: MRT4577_165786C.1.pep
VKMADTHRCRWVCIGVGFHGSSPIRRPHDCIRVDSQLSPKSQHTQLNPNSPSLHPCTGSRILLLAPATRVSPLPKSSPRRTELPWPLLTTDAN

SEQ ID NO: 256796 - protein, 72 aa, Zea mays
  Clone ID: MRT4577_165787C.1.pep
VGKCRDFSRNRFLKRGPFILISPPYRVKGPLKMKHQPTVQFFEFRKISPFGGTPGEVIFKWSLKPGIFFLKN

SEQ ID NO: 256797 - protein, 124 aa, Zea mays
  Clone ID: MRT4577_165788C.1.pep
MANSSYGSREGLTIRPAASSSSSEISLQIDPINADLDDHILGLHGQVRGRRGVAQEIQTEAKYQNDFISQLQMTLAKAQAGVNNNMRRMNQSIIQNGSNHLVHVVLFALGCFFLVYLISKFSRR

SEQ ID NO: 256798 - protein, 90 aa, Zea mays
  unsure (1)..(90): unsure at all Xaa locations
  Clone ID: MRT4577_165789C.1.pep
LKGCFDSPIRQEVSDNNCVYRNEVHHTAGERTQVLQDVASDPTLPRTKTVRCNLCGHGEVVFFQXXXXXXXXXTLFFVCCSPDCGHRWRE

SEQ ID NO: 256799 - protein, 383 aa, Zea mays
  unsure (1)..(383): unsure at all Xaa locations
  Clone ID: MRT4577_16578C.1.pep
LSHYSGALDLGEHKNLDFEELLELCIRTQESCSGFRRFELFQIIDATGNFPESRIIGSGGFAIVYKGQLPDGSMVAIKRMDEGATMFDFSSEFLAARLQHTNLIRLLGWCIHGKERILVYEFMHKGTLHSLIFDKRMGLLLDWSKRIDIIRGVAQGLPYLHKQAKLWIVHRDLKLXNVLLDHDMKPKLADFGSARTLTSDSAEECTSRVVGTSGYKAPEYTSRGVYSLKTDVFSFGVVVLVTISGRENTILEKQGDSVGTLVRDAWQLWNDGRLHELVDPVLGDGFELAEVMQYAQVALLCAQEEPADRPTMSDVVSLLNFESIGLLPDPKQPSELCKGGGGTSGDRLPTCGSQSSRTIDITITSSAPVSTRTRVRIIVDPET

SEQ ID NO: 256800 - protein, 73 aa, Zea mays
  Clone ID: MRT4577_165790C.1.pep
RLVVLLGAIVDAVQADAGVDPRQRGDVPHAHDLAQAGAGGGVPSCCTVGVGVGAGASCAAPWGSLCSAPVTGS

SEQ ID NO: 256801 - protein, 316 aa, Zea mays
  unsure (1)..(316): unsure at all Xaa locations
  Clone ID: MRT4577_165791C.1.pep
MDSSSRVIAFDCSSFKLYMDGQVEXRPNAWKPCPPAXDADTGVASKDVVIDVATGATVRLYLPPVQGATTKLPVVVFFHGGYFIVGSAREPMYHRYVNSLVARARVVAVSADYRLAPEHPLPAAYDDSWAALXWAVSGADQWLSDHGDLGRVFLVGISAGGNIAHNMAISXGVSGLPAAEPPRIXKGVILLHPSFSGEQKMDVEEEEFWRSNNSRWAVIFPGATGGADDPRINPMADGAPSLEKLVGERLLVCTASLDPRAPRGPGYCEAVRASGWRGKVEWFETEGEDHGFFVLNPGSHKAVEVMDRVVAFLADQ

SEQ ID NO: 256802 - protein, 195 aa, Zea mays
  unsure (1)..(195): unsure at all Xaa locations
  Clone ID: MRT4577_165792C.1.pep
MASSVAXAASTFLGXTRLAXPAPHNGRIVAXFWFGLGGKANPAPKRRPXSTSSDRPLWFPCALAPDYLDCSLVGDYRFDPFCLGKPVKYLQFELDSLDQNLAKNEVDGIISTRFESFKVXSTPRCSAYSEVFGLHLFRECELIHRRWAMLATVGALCVEWLTVVTWHDAIKVELVDGYSYLGQALTVSISTLMWD

SEQ ID NO: 256803 - protein, 43 aa, Zea mays
  Clone ID: MRT4577_165793C.1.pep
PPSMLSMVPSFQMTFNWQRKSATRRPNRHLKHRDKNMKSWGYC

SEQ ID NO: 256804 - protein, 64 aa, Zea mays
  Clone ID: MRT4577_165794C.1.pep
CARTSPSSTWIRMHTGQNRSVPMPGANASCLPSSYEGGWTIVHTVVFRTIGTLPLSLLCSRYCT

SEQ ID NO: 256805 - protein, 344 aa, Zea mays
  unsure (1)..(344): unsure at all Xaa locations
  Clone ID: MRT4577_165795C.1.pep
MVLESTMICIDNSEWMRNGDYSPSRFQAQADAVNLICGAKTQSNPENTVGVMTMAGKGVRVLVTPTSDLGKILACMHGLEVGAEANLAAAIQVAQLALKHRQNKRQQQRIIVFIGSPVTYDKKVLETIGKKLKKNNVALDVVDFGETDDEKPEKLEALIAAVNSSDSSHIVHVPPGDHALSDVLISTPIFTGEEGGSGFAASAAAAAATGATGYDFGVDPNVDPELALALRLSMEEERARQEAIAKKAAEDNKDQPSSSTDAIMAEAELTLNAPADVDADLLKDDDDAQLLQQALAMXMDEGASGAAAVADAAMAEAAADDQDLALALQMSGQDAEAAGQSDMS

SEQ ID NO: 256806 - protein, 57 aa, Zea mays
  unsure (1)..(57): unsure at all Xaa locations
  Clone ID: MRT4577_165796C.1.pep
PAGFFVHDTYDMPRLMGLTHWLCYSLPFIYHAGTCGVTTALHMTTKVSSICXSSHNH

SEQ ID NO: 256807 - protein, 56 aa, Zea mays
  unsure (1)..(56): unsure at all Xaa locations
  Clone ID: MRT4577_165797C.1.pep
GEMSLSLVRRHSFAMGXNGLVCGNSALSVGPXLSSVSSLYATSFVANEQTQSDRCW

SEQ ID NO: 256808 - protein, 93 aa, Zea mays
  Clone ID: MRT4577_165798C.1.pep
MGNGPDRLSCPCSVPFYYACFSETLTRMLARPPAPSLVTAQTPEVGIFITARNVSGALVAKLSGNKNKCGGRSNVRQRNIQPVKRGCRPEWRA

SEQ ID NO: 256809 - protein, 225 aa, Zea mays
  Clone ID: MRT4577_165799C.1.pep
MVKRWLPLEANPDVMNQFMWGLGVPEDVGFCDVYGLDDELLAMVPQPVLAVLLLYPQDRSKESQASATSSVETKEPSKNVYFTKQTVGNACGTVGIIHALGNATSRIKLGEGSYFDRFYKRTADMDPIQRAAFLEEDEEMENAHSIAATAGDTEAKDGVIEHYICFSCVDGELYELDGGTSQPIPHGPSTPDTLLQDAAEVIKARIAMYSQSNNFNVMALSGKAI

SEQ ID NO: 256810 - protein, 68 aa, Zea mays
  Clone ID: MRT4577_16579C.1.pep
EPEQNSGFKGESSRTHPKTNILKGKAPISPPKGASRGKDSFFPGKRAPYSLNKIYIGEKDRWTPKLPY

SEQ ID NO: 256811 - protein, 107 aa, Zea mays
  unsure (1)..(107): unsure at all Xaa locations
  Clone ID: MRT4577_1657C.1.pep
KIELLVDKTENLRSXAQDFRQHGTNVRRKMWLQNMKIKLIVLGIIIALILIIILSVCHGFKCGSNVKMGGVTYKLLVCPGTGEEKNHWEGVLLCGPRVGDACAYYSW

SEQ ID NO: 256812 - protein, 49 aa, Zea mays
  unsure (1)..(49): unsure at all Xaa locations
  Clone ID: MRT4577_165800C.1.pep
HWYTLDNVTSXAPAQIEVCLPLGMSNCVLWQHRRKLIKFLPYCTSSPFF

SEQ ID NO: 256813 - protein, 43 aa, Zea mays
  Clone ID: MRT4577_165801C.1.pep
GNVWNYRFSFLVQGNDLKCECGFLEGSVCPLAPMVWLITQYMT

SEQ ID NO: 256814 - protein, 175 aa, Zea mays
  unsure (1)..(175): unsure at all Xaa locations
  Clone ID: MRT4577_165802C.1.pep
SSALSIKLSTPRSCSAGGRTKVPHXNFYKGAEKVHEEEAIGPERLAGDVLYYGDSHSAVVQLHSREDVEALIDEHRGDKGKLVVLDVGLKHCGPCVKVYPTVLKLSRSMVDNTVFARMNGDENDSCMEFLRAMKIVEVPTFVFIRDGQIVGRYVGSGKGELVGEILRYNGVRVTY

SEQ ID NO: 256815 - protein, 300 aa, Zea mays
  Clone ID: MRT4577_165803C.1.pep
MASTSTFLSTLASRSAAADSLRSAVPSFAKIVRFLPAQAQISRRRRAAVLPTPRAALSGTEKAPSSKHERVVRVHSTQEFDDALKAAKNRLVVVEFAASDSEDSSQIYPTMVQLSRTCGDVDFLLVLRDDESEATEELFRREGVTKVPHFNFYKGAEKVHEEEAIGPERLAGDVLYYGDSHSAVVQLHSREDVEALIDEHRGDKGKLVVLDVGLKHCGPCVKVYPTVLKLSRSMVDNTVFARMNGDENDSCMEFLRAMKIVEVPTFVFIRDGQIVGRYVGSGKGELVGEILRYNGVRVTY

SEQ ID NO: 256816 - protein, 154 aa, Zea mays
  unsure (1)..(154): unsure at all Xaa locations
  Clone ID: MRT4577_165804C.1.pep
RWKKHTRTITKDQGEQPPGAHTDDRNRRPQTGRILRDLGASKGTQSRKKWRMLSSRQNGGGKGGRDAAYTGCKRHQVIREYMRERHDWTRERGTIRELIYGKNVPDEDLQRKHTERRALSIEXGGRNTKHIXFFMRSGHTSWLHGKRCCLPHCF

SEQ ID NO: 256817 - protein, 107 aa, Zea mays
  Clone ID: MRT4577_165805C.1.pep
LIWGKTTTLGAFHLFGPKKTLGSMFNGLEEEKRFRRDYCCLRHGQAQDPHDGQQHWPRFLVKKGREKGFNRGPGVVRRRTFPCWGGPCSRRGAQRGLTPVGLWGVGF

SEQ ID NO: 256818 - protein, 71 aa, Zea mays
  Clone ID: MRT4577_165806C.1.pep
VLDAMPEGIRQNRARTILQHLSEAWRCWKANIPWKVPGLPVPIENMILRYVKSKADWWTNVAHYIRERIRR

SEQ ID NO: 256819 - protein, 783 aa, Zea mays
  unsure (1)..(783): unsure at all Xaa locations
  Clone ID: MRT4577_165807C.1.pep
MRIFEPFRAIGYITASGVPFSVQRLSTETFVTVSVGKAFQVYNCAKLNLVLAGPQLPKKIRAIASYKDYTFXAYGSDIAVFKRTDQVATWSRHEEKVNMLYLFGEYVLSADAKGNVFMWAFRGAEPNTEPVGSISLGDKFTPTCIMHPDTYLNKVIVGSEERLLPPGNSPTKIXLYDFNGWNSPVRCCVSSPALDVVAVGCSDGSVHVHNVRYDEELMSFNHQIRGAVTALSFRTDGQPLLASGGSSGVISIWNLEKRRLHSVIREAHDGSIVSLHFFANEPILMSSAADNSVKMWIFDSNDGGARLLRFRSGHSAPPRCIRFYGNGKCILSAGQDRAFRLFSVIQDQQSRELSQRHVAKRAKKLRVKEEEIKLKPVVTFDCAEIRARDWCNVVTCHMDTPQAYVWRLQNFVIGEHVLTPSSSTVTPIKACVISACGNYTILGTEGGWIEKFNLQSGFSRGSHIDTSLAMQCAHDGEVVGLPCDARNGFLISAGYQGDIKAWDFKPCKLKSRLDVGKSVTKIAFHRPNGLLAPVAGNMVLILFDPVSMKMVRRFEGHTDARADLCFSEDGKWLISSSMDGTLRIWDISLARQIDAMHVDVSITSISMSPNMDVLATTHVDQNGVYLWVNQSLFSVSTNTENYASGKHVRNVCLPAVSSTERSEEEQVQNLGESYKSSIKPFVITDHQIPNLVTLSLLPKSQWQSLTNLDIIKVRNKPIEPPKKPEKAPFFLPSVPSLSGEILFEPPASSKDTDISTTKNTNHKMSELSSHFSQQLQFCGETKN

SEQ ID NO: 256820 - protein, 33 aa, Zea mays
  Clone ID: MRT4577_165808C.1.pep
CSSSSVYGVWTRRTRLALGALPRSRLLGLCRCV

SEQ ID NO: 256821 - protein, 101 aa, Zea mays
  unsure (1)..(101): unsure at all Xaa locations
  Clone ID: MRT4577_165809C.1.pep
IPSSIMDFIKFDVGNVVMVPGGTYTGRVCVIKNTYMHKDGFKAILVGATMGHQFASSMGHVFTSGQATKPWVSLPKGQGVKLSIIXGQRRRGFAAQAAATA

SEQ ID NO: 256822 - protein, 104 aa, Zea mays
  Clone ID: MRT4577_16580C.1.pep
HQKTPPFFCPPINKTLMLKLRRNLLKPTFQPPPPFLPWVGSIALNPPVPFLPGLKVALKTLDPGWLGGGPLAETFCQNKKFRHPLKLILLFFPSGPDPPLAVEK

SEQ ID NO: 256823 - protein, 61 aa, Zea mays
  Clone ID: MRT4577_165810C.1.pep
AAGVDHVNHEVLAVQEAVGHELPAAEVDRRGGVGVRHCSTDRAAAGGDVKWRSWLRYRNER

SEQ ID NO: 256824 - protein, 72 aa, Zea mays
  Clone ID: MRT4577_165811C.1.pep
SFPSPPKFKIMCPPPYKNVQPPRFPPQVSIMVFPLSFRGGGGKALGPNQAFPPPFRKAPTPSFWFPRGFSGV

SEQ ID NO: 256825 - protein, 80 aa, Zea mays
  Clone ID: MRT4577_165812C.1.pep
LSPLGKKFLHLPVRRQNIDQRVGVHVQHLYGAHPLRHVHARACITLHILALDHSHARLYSDVFDHPLCKRVVSCSGPDVW

SEQ ID NO: 256826 - protein, 165 aa, Zea mays
  Clone ID: MRT4577_165813C.1.pep
LRVGRRCPPAPGHHASCLRAHARIEREIEYGIVQCRLPCYSSRVYLPGSTMTRWPVRIFWLARTFQFHGFTTPFTPSRKYIICMYSSFFPYSNINKFSQKKKKKKKKKKKKKKKKKKKKKKRFFTRGEFWFFWVFFPFWEKKKKKRGPPAQGSRRTKAWKQHHMY

SEQ ID NO: 256827 - protein, 239 aa, Zea mays
  Clone ID: MRT4577_165814C.1.pep
MSGGGCSIRAIWILTPNDTVAFSRRFAVVEKRWRAAWEEEEGDGERHRWGTGAAKMPLPADHEVAAAFAERRRREGTARSSGIRTNVSSVGLDSWVDDPITRHIISLHMDKEEGDPFMLWPVVLQKRGGYYVLVLPLVDPQPFRAYENLLKRSDCGGSAKENNNFSSILFNLPCITGAFMVAQVVGDIITGDIAEPEVIVSSGPSVGGLLDSLTGSIGISARAKPIAAPVAAPTASVSS

SEQ ID NO: 256828 - protein, 101 aa, Zea mays
  unsure (1)..(101): unsure at all Xaa locations
  Clone ID: MRT4577_165815C.1.pep
IQRGRGTPKSASVSKIVLQNDIDLLNLPSXLEMLTPKKKRLVQSPNSFFMDVKCQNCFSITTEISHSQTVVVCPYCQTILCQPTHGKARLTXGCSFLQKVD

SEQ ID NO: 256829 - protein, 85 aa, Zea mays
  Clone ID: MRT4577_165816C.1.pep
PPFFFFFCNEKYVLKNNPLLFSIIKFRHISDCHLIKPSLNPLKRSSISHPFHYPPPTARPSHPSILAPSLTTASLMSPVVEHFSL

SEQ ID NO: 256830 - protein, 175 aa, Zea mays
  Clone ID: MRT4577_165817C.1.pep
SRSRPEKKKKKKKKKKKKKKKKKKKKKKKKTDKRNLKKKPATPLGWGKPRVFWGRRGRKTPPVPNREGQAPSPKKKGGGSGRTFLGEGGKNFGRRKLGFGKDVSPLNWVPVSPTKVKKLRFLPVKKIKGWGPVQQNFFTGGGEQNFFQRKVNIRGSHQREKSQGSLLFSNWRIRP

SEQ ID NO: 256831 - protein, 34 aa, Zea mays
  Clone ID: MRT4577_165818C.1.pep
RHFIVSEMCPAVWKARLDSHSNNFLGAHSLHLDR

SEQ ID NO: 256832 - protein, 156 aa, Zea mays
  Clone ID: MRT4577_165819C.1.pep
MSPREWIHDGDYTPVIVVMIFIVLLTVASVLFSHYCVGDRAFMRTGYDFEGYVMRKFAVCVDSGLPKRAHHDIKNTNPHEVRVEVVEEVHASEPSTPALPLATPAPPTAPYHVATGARAEEVPSAAEEEQEEDEDWEDDGDDEEFDFEEEGDLLNL

SEQ ID NO: 256833 - protein, 63 aa, Zea mays
  unsure (1)..(63): unsure at all Xaa locations
  Clone ID: MRT4577_16581C.1.pep
QGSIRRYASPGYLCGVYLXPQPFEISSCIPSMKPMWVGSIKPYGSGRYQNLRSSHARRIGSGA

SEQ ID NO: 256834 - protein, 53 aa, Zea mays
  Clone ID: MRT4577_165820C.1.pep
GFRGPRLWYYNIWVVMKMKLVCSCAQGGRGRLLCLFRVIGTCWIASTCDLFMY

SEQ ID NO: 256835 - protein, 125 aa, Zea mays
  unsure (1)..(125): unsure at all Xaa locations
  Clone ID: MRT4577_165821C.1.pep
QLEEVRSSLHAEIAXVRAEKETALSELHMSQTSIRNLESVVEKQTENILTLEKANDKLNNKICILTEQVEQAKAELHKEVAAIQEEKDTALTQLRQSEFSIQDLENEVTRLKDELQFNLEKNPPW

SEQ ID NO: 256836 - protein, 79 aa, Zea mays
  Clone ID: MRT4577_165822C.1.pep
SRIHHPQAQHSHCSSKGVECCFKPMVYDHLLGGPTFAPVRDLQHAWNIEVACQKGGKDVTQPGGLVIHTAVERVAVREA

SEQ ID NO: 256837 - protein, 111 aa, Zea mays
  Clone ID: MRT4577_165823C.1.pep
FGISFQAPPIFAVGCLFRVMGVPPGQVLVLGCGPSGVSPTKHFSWGFQREFFFPPLLVFGFVFVDPSPGSKLNRVFFLVRVGRVGINIFPPSRCLVLFIVVPLVRPCSPYY

SEQ ID NO: 256838 - protein, 75 aa, Zea mays
  Clone ID: MRT4577_165824C.1.pep
RVQTHVIFWGGPGLTSKKKTLGLTKRKKKPHSGGGGSIKAFWLQNPRRVYRTLLFLQGGINTPSSLGRLSDHIPS

SEQ ID NO: 256839 - protein, 262 aa, Zea mays
  Clone ID: MRT4577_165825C.1.pep
MAGLYEKQSETYAKKRPQYPKEWFSMLASLTAGHQRAWDAGCGTGQAAISMAEHYESVVATDVSEGQLRHATAHPKVRYLHTPEHLSEDELVSLVGGEGSLDLVVVATSIHWFDVPLFYAVVSRALRKPGGMLAVWGYNYEIHPFEDALHGQLYPALRPYLDPRAGLAMERYRSLPFPFEPVGVGAEGAPADVDIEVEMTLEDLVGFLNTGSVVTTARAKGVDLEAVTRAALKRVEEQWGGAPTVPRKLVFKAFMLAGRPKC

SEQ ID NO: 256840 - protein, 66 aa, Zea mays
  Clone ID: MRT4577_165826C.1.pep
EFGRALEATSVYLLFTTVMLSVCQEDVSHSLLLEVSVGLHYSALVSFQASSQHLTQRSTVQQQATS

SEQ ID NO: 256841 - protein, 37 aa, Zea mays
  Clone ID: MRT4577_165827C.1.pep
DSNWSINCSGALRSFILCVCIRKSRIINVEFLIVHSS

SEQ ID NO: 256842 - protein, 65 aa, Zea mays
  Clone ID: MRT4577_165828C.1.pep
EVYTQEPERMLARGARRNQKRQQLRRSRRIDPEYLTMQKDAVPSHSLNGAEHYHELTQIEIAVHR

SEQ ID NO: 256843 - protein, 46 aa, Zea mays
  Clone ID: MRT4577_165829C.1.pep
TNSTTPYNANSQTNATTSFYQTHPPLTPLTTNMHSFIIRNTYSLLH

SEQ ID NO: 256844 - protein, 200 aa, Zea mays
  unsure (1)..(200): unsure at all Xaa locations
  Clone ID: MRT4577_16582C.1.pep
MEPPVAKKATQPEEEDRLSVLMDDVLLSILRKVDISTTVRTSSLSTRWRKLPWLLPELSIDVRHFLPVPCPDSITANDCQQAMVALTKAAKCLLAKPHRQSTITTLQLKLYLISTFLSDIGPLLGDVIDSGLLKDLDLCLLDDLKPGDSSELHMIQLAXDMYGFFXVYPSVFGCLTRLLWHGVCFIELDMXISCLTAAHS

SEQ ID NO: 256845 - protein, 187 aa, Zea mays
  Clone ID: MRT4577_165830C.1.pep
MAAVATAPRGLQPNSSLPAKVQPIPPNQTLYVTNLPSSKIQKDDLRTALYLLFSTYGSVLDVVALKTMRMRGQAHITFRDVQSATQAMRSLEGQSFLGRDLKIQYAKSKSNFVAKLDGTFKIPSMNAGAANVEQTELQQSIFNAPPPGSAPAPGSGLPPKPTANTDQVMEDAGTPGDRQKRTRDEEG

SEQ ID NO: 256846 - protein, 62 aa, Zea mays
  Clone ID: MRT4577_165831C.1.pep
IAPFSQEAVQKANAGAQSPSSPDINHHLAKWYRPDQMTYLPDELDETVRGVAVPHRRGTCKL

SEQ ID NO: 256847 - protein, 54 aa, Zea mays
  Clone ID: MRT4577_165832C.1.pep
VDSRVRSSPTRCSPALFRPTSWRLCHPTHRPRGLPHPPGAWLPLGRCCQHSDIP

SEQ ID NO: 256848 - protein, 52 aa, Zea mays
  Clone ID: MRT4577_165833C.1.pep
LTIQDGWSIHVPNSIEYMPRWLIHRASQSTLHYLNERTTTGRGTNQNESLGT

SEQ ID NO: 256849 - protein, 100 aa, Zea mays
  unsure (1)..(100): unsure at all Xaa locations
  Clone ID: MRT4577_165834C.1.pep
GGFLGACVFLNSVXEGPSSARVGMVPQGPPAXRGPPQLVXGSGERLGPVSPGGFRPFLKKNLPMGSFESGMPXVWTEFKVVVFGKSLDPVVPKIPFVPPQ

SEQ ID NO: 256850 - protein, 150 aa, Zea mays
  unsure (1)..(150): unsure at all Xaa locations
  Clone ID: MRT4577_165835C.1.pep
MLVSLFLTHHVNMAISGPNVSARDLGFPYPKAGTAKPTDVVVKFYVLYEKWRRGELLGSSSVARYLKSITHSNGQXKNFRVWVDRLVTSPIGTSNWLVRFDNWEMEGGVRYCCRTTLLLNNKVKILWFCEDHCLSCCCLISCTCIHKDSS

SEQ ID NO: 256851 - protein, 96 aa, Zea mays
  Clone ID: MRT4577_165836C.1.pep
MAILSALATEVLIPVAAVIGIAFAVVQWVVVSSVKLSGGGSGGGGGGAGCADSLISEEDGLSARSGAAACAAIQNAMFRGATSFLCSGSPCAGRFL

SEQ ID NO: 256852 - protein, 54 aa, Zea mays
  Clone ID: MRT4577_165837C.1.pep
LVLSQATLLLPSIISRAEETGSLSPAALRAIASVVPEGIMPSRSHIFGKETENT

SEQ ID NO: 256853 - protein, 65 aa, Zea mays
  Clone ID: MRT4577_165838C.1.pep
VFLAYYFLVEGSFLLLVVLHMGLHTISCLYCWCWLHWSRLAGSVIFSVVAVRYQSQLVMSKGRVK

SEQ ID NO: 256854 - protein, 91 aa, Zea mays
  unsure (1)..(91): unsure at all Xaa locations
  Clone ID: MRT4577_165839C.1.pep
RVLTNPARYSHKQLVLEFKRICSLSAADHARQHHLPVKQLPAAYPHXWLPSNHLAXWNSPAYXQQRQLLPLTHLAGETPATLLTQPQVWPM

SEQ ID NO: 256855 - protein, 117 aa, Zea mays
  Clone ID: MRT4577_16583C.1.pep
GRTLKKFFQKIFFPARGGGFKTLNFGGGRKIFFFWKGCWPIGCFLGGPRFFGVVLNQEFVWEGWLTPWGGTLLKWPGGFFKGGGFLKKKKKKKKKKKKKKKKKKKKKKKKNRGGTGD

SEQ ID NO: 256856 - protein, 94 aa, Zea mays
  Clone ID: MRT4577_165840C.1.pep
EQKLLQSNTFLALQRFHNCKRYWCYALCSLVPSKLKINKKSNVTAVTTTKYLHQLPSINLEEMQKNPTITPFISYMDHPATIAKNISNYYKHKQ

SEQ ID NO: 256857 - protein, 762 aa, Zea mays
  Clone ID: MRT4577_165841C.1.pep
MARSVRAQGRARQRLLLRPRPGSGEDAIPPEAEAEAESWALPGWLIQQSERGERHCFPVRIRCQVIFALNAPAIRSVGKAIWPRLLLDEACPSWASGEPRVALGIKPEPEALYPKYPNPYSPKPVTRIAFAGRHSAVGTRQGKAASQQPSTTVAGDRRPGVTASGGQRPASSGTDVQPLGGQPASAHHPASQLDSIRRPAPSPLGQRPTLQQPSRRRQATAPVRHRKMPEIEEHTDMEVESVALGTETSHIQIVVAPTSQSHDVTTRQEEPELTKDGGRKEIAPRSDVWQHFVKIKDDKDIVRHAKCKYCHRNMKAEAGRHGTSSLKRHLVACKRNPNKFNKDPSQGTLQATQHEGVSTWRFDQDTLRVAFAEMVIEDELPFCFGEKPGFRKFMSKACPRFLVPSRRTCTRDVVRCFSQEKAKLKKFFKDSCQRVCLTTDGWTSKQLDSYMTVTASFIDDNWKFHKKVIGFFLVKGHKGDDIGKNVLRCMVEWGLERVMTITVDNASANDTSISYLRRQLSSTNLASGKYKLSLYTKITVEEIFSEERGQIVSEAINTCLHELFEEYMKMYASGEDTTNVSDPITSKEGRGRGGKLKEIVAKKMRLGKGIGSSNNTKSELDKYLSEETEDTEMKLDLLVWWKASEQIFPILARMARDVLAIPISTVASESAFSTSGCILDDFRSSFTPFMLEALVCAQDWLRWSIPIDIEENLEELTMLEKELKEEFGGKGKGKQEATTTTGTSMETWRLESGPVRCLLLSA

SEQ ID NO: 256858 - protein, 101 aa, Zea mays
  Clone ID: MRT4577_165842C.1.pep
KNIKTTTTIKNNLSIIMTMKSNLLVAESRVSKSNSASKTRGPGKNITKKRKNTRERRDRVGSKAIYIEDPNTPQEIVLRLARRIRFSVRGIASSRTIDVTL

SEQ ID NO: 256859 - protein, 212 aa, Zea mays
  unsure (1)..(212): unsure at all Xaa locations
  Clone ID: MRT4577_165844C.1.pep
ACCNGSAVGGRSLTEAELERLQQALKILSDAEKQISLSSERPTWFTAALLQLGCGHSSDVNQQKGSTQEHHKVANDAMSEIARESSSRTFSHSLSAFGISKRTLDSKTISVHSSPQVLASHSSRLRLNDXWFMESVGLLIEFHSILINXNGNCSQQRALVNGISDSLAQVWIRCIENCHSKTLQHLLLDHGKLVSIRQFEGHATAFIAIDCG

SEQ ID NO: 256860 - protein, 61 aa, Zea mays
  Clone ID: MRT4577_165845C.1.pep
RHTVKCISQVLRQHLATTVPCSNYHDVMLKNSITVTQISMTIPSQLYPDGSGGKHQCLNRI

SEQ ID NO: 256861 - protein, 381 aa, Zea mays
  Clone ID: MRT4577_165846C.1.pep
FPPNPVIPSLFSTSTGTSQRLPEGSSDPRRFRATRGEIQELPAMVKDSAYYDVLGLSVDASPAEIKKAYYIKAKLVHPDKNPGNPDAALKFQELGEAYQVLSDPGKKEAYDNYGKEGIPQDNMVDPAAVFGMLFGSDYFEDYVGQLALASIASVEVEENSNSQEARAKVQEKIKELQREREQKLTQSLKDRLQSYVDGRNDEFVSYASAEARRLSEAAFGEAMLHTIGYIYVRQAARELGKSRIYMGVPFIAEWVRDKGHHIKSQVNAASGAISLIQLQEGMKKMEGSEDSEEQLMKSFEEKKDAMLSSLWKINVVDIESTLSRVCQAVLRDSMVSKDVLKLRAKALKKLGTIFQGAESMYRRENSLRVETSTDQQAASSH

SEQ ID NO: 256862 - protein, 34 aa, Zea mays
  Clone ID: MRT4577_165847C.1.pep
LNIGCLTYGEKAMNLSESVDQADEITKALSTSSE

SEQ ID NO: 256863 - protein, 368 aa, Zea mays
  unsure (1)..(368): unsure at all Xaa locations
  Clone ID: MRT4577_165848C.1.pep
PSLGACSFRATRGEIQELPAMVKDSAYYDVLGLSVDASPAEIKKAYYIKAKLVHPDKNPGNPDAALKFQELGEAYQVLSDPGKKEAYDNYGKEGIPQDNMVDPAAVFGMLFGSDYFEDYVGQLALASIASVEVEENSNSQEARAKVQEKIKELQREREQKLTQSLKDRLQSYVDGRNDEFVSYASAEARRLSEAAFGEAMLHTIGYIYVRQAARELGKSRIYMGVPFIAEWVRDKGHHIKSQVNAASGAISLIQLQEGMKKMEGSEDSEEQLMKSFEEKKDAMLSSLWXKINVVDIESTLSRVCQAVLXDSMVSKDVLXKLRAKALEKXLGTIFQGAESMYRRGKQPAALETSTDQQAFVHEAVGTTV

SEQ ID NO: 256864 - protein, 64 aa, Zea mays
  Clone ID: MRT4577_165849C.1.pep
SPPPKSLLGPVCAPSRSWPSSHFFTWPAGYVFSRRDQSPWTGGFSPLTVGAVTPAAPVVRLVPN

SEQ ID NO: 256865 - protein, 44 aa, Zea mays
  Clone ID: MRT4577_16584C.1.pep
ELESKENTKCIIHRSSYLKNVVFKRIGVVRRIEELLQSHRIPHF

SEQ ID NO: 256866 - protein, 102 aa, Zea mays
  unsure (1)..(102): unsure at all Xaa locations
  Clone ID: MRT4577_165850C.1.pep
TQPQHKERWMEIQKQKRIYRGGSLPADLLVXTKKDEACHHRKNQHRLSXNNKHSRNRPLHTGPGRLMHTAGKGKPWNRLYTGRACPLDHTRKEDDLYIHGDY

SEQ ID NO: 256867 - protein, 247 aa, Zea mays
  Clone ID: MRT4577_165851C.1.pep
FHPCSPLPPELPRDFQKALATPRYRPLPLLRGGRSGPSPPVDYRRPPSLGACSFRATRGEIQELPAMVKDSAYYDVLGLSVDASPAEIKKAYYVKAKLVHPDKNPGNPDAALKFQELGEAYQVLSDPGKKEAYDNCGKEGIPQDNMVDPAAVFGMLFGSDYFEDYVGQLALASIASVEVEENSNSQEARAKVQEKIKELQREREQKLTQSLKDRLQSYVDGRNDEFASYASAEARRLSEAAFGEAML

SEQ ID NO: 256868 - protein, 74 aa, Zea mays
  unsure (1)..(74): unsure at all Xaa locations
  Clone ID: MRT4577_165852C.1.pep
SLNRHLLIAFGGLAGLEESIEEDXKLEGKRADDVFTSYLNTCPNQGSRPIRTEEALLISLQYFQDPIRRAEQKL

SEQ ID NO: 256869 - protein, 93 aa, Zea mays
  Clone ID: MRT4577_165853C.1.pep
PTLQPTGPTFDAANSYTSVGEIGKRHCHLGIKILMGMCLNNSIDLANATIPLTHGLYYKPLESCTKALISLLNIIKPFFVLFYLNPFFIIKPF

SEQ ID NO: 256870 - protein, 95 aa, Zea mays
  unsure (1)..(95): unsure at all Xaa locations
  Clone ID: MRT4577_165854C.1.pep
MAALSMEDMIDWMHGGGRXLVLHNLHEIMKCCTQSDRINLSXVGIFDATNNTRKRIYILMKMAEGNCKVIDSIHIYIGYDSLIFCIFKHLQLYFI

SEQ ID NO: 256871 - protein, 140 aa, Zea mays
  Clone ID: MRT4577_165855C.1.pep
TILLGSFKREFRLLKKKPCKKRSIFPSGPFLPFLSPPTPPQRSLKGPPPKTFLFTRGRPPFFKGLTNSIPPVVFFPPFRPPSKFFSPQNSFFSTHRSPIFFFFFRGPLVFQKAFFFYFFQVKKIFFFCLKITPPPPPFYI

SEQ ID NO: 256872 - protein, 80 aa, Zea mays
  Clone ID: MRT4577_165856C.1.pep
PNRGSRYSWMSGRYLGLSDPVDDLLFAIVLRIVKSASSKPDAAGTLSHLPRKSVDARDIVVISITAAFIIALGNKETRSP

SEQ ID NO: 256873 - protein, 97 aa, Zea mays
  Clone ID: MRT4577_165857C.1.pep
RRCLNGRGFSITPKLAGGATIGQPQGHYTGLRGKQRRKTNPALWGLFFSPGLPAPVYQPLMGWPRLGFLINFLGPSKKRLQKRQDKILLVMATPIFF

SEQ ID NO: 256874 - protein, 144 aa, Zea mays
  unsure (1)..(144): unsure at all Xaa locations
  Clone ID: MRT4577_165858C.1.pep
MAXSAAXSTAAXXXXLXXSRASXGXXVKGLGVSMGREXXQRSIAWEAXSSXXXXXXXXWXKRKLMNLLLLGAISLXXVGMGXXYGXXXXXGXXXNXRXXTYXXDKXGXNIXVEAWXNTHXPNDRXXXQGXKXXXXXLXXVEQDK

SEQ ID NO: 256875 - protein, 93 aa, Zea mays
  Clone ID: MRT4577_165859C.1.pep
PTLPAPTFTSGAGVLHSELGFTAPHRAPLTPHPIRALLFHLSGMEQTAPEGSQNDAYHYDSKMHELLITSETEELYTYHRSKASLARASSMLQ

SEQ ID NO: 256876 - protein, 87 aa, Zea mays
  Clone ID: MRT4577_16585C.1.pep
MDGPTMGPKLIRPQGYLRWLAHVTALDFDVTLISIDMPMTIKGQTDTTLIVPKLITLYRLPFVQLAYYRRGHRRSALPEFGLPECLL

SEQ ID NO: 256877 - protein, 44 aa, Zea mays
  Clone ID: MRT4577_165860C.1.pep
AIPIPIHPQVADSTHREAQTWGWGRIQGGGSIAISSRMVFSDRP

SEQ ID NO: 256878 - protein, 145 aa, Zea mays
  Clone ID: MRT4577_165861C.1.pep
MVQLILPRLATLEGEVKLHKAEVIAAFQGVIQKPVEQEEMTKKEKFELVSKIQEMLQCHKVDVFAKQNKMEASVLAHCQKLDTTFVHKQNSLEQNLIRQMKQLEESMQSRLHLIEEENLKKHNEMTEKFDTMIGLLQKLSDTSSQ

SEQ ID NO: 256879 - protein, 141 aa, Zea mays
  Clone ID: MRT4577_165862C.1.pep
NTITSIIFIPETWNHFIVSMPSCHRPPPPPRCPRDAPPTDENLSGFAPFFFFSTVFNTKRPGPRPAAAAGGRALFPGNNPTLWARDGLFFSCPPGEKGVALPVPPHRGAGPHGRQKGHWVRPPQPTGVVLLKGLSPKTPWA

SEQ ID NO: 256880 - protein, 397 aa, Zea mays
  Clone ID: MRT4577_165863C.1.pep
GQKESTLHLVLRLRGGMQIFVKTLTGKTITLEVESSDTIDNVKAKIQDKEGIPPDQQRLIFAGKQLEDGRTLADYNIQKESTLHLVLRLRGGMQVFVKTLTGKTITLEVESSDTIDNVKAKIQDKEGIPPDQQRLIFAGKQLEDGRTLADYNIQKESTLHLVLRLRGGMQIFVKTLTGKTITLEVESSDTIDNVKTKIQDKEGIPPDQQRLIFAGKQLEDGRTLADYNIQKESTLHLVLRLRGGMQIFVKTLTGKTITLEVESSDTIDNVKTKIQDKEGIPPDQQRLIFAGKQLEDGRTLADYNIQKESTLHLVLRLRGGMQIFVKTLTGKTITLEVESSDTIDNVKTKIQDKEGIPPDQQRLIFAGKQLEDGRTLADYNIQKESTLHLVLRLRGGV

SEQ ID NO: 256881 - protein, 247 aa, Zea mays
  unsure (1)..(247): unsure at all Xaa locations
  Clone ID: MRT4577_165864C.1.pep
MGAGGRMTEKEREKQEQLGRANGGAAYQRSPTDKPPFTLGQIKKAIPPHCFQRSIIKSFSYVVHDLVIVAALLYAALVWIPTLPSVLQLGAWPLYWVVQGCVMTGVWVIAHECGHHAFSDYSLLDDTVGLVLHSWLLVPYFSWKYSHRRHHSNTGSLERDEVFVPKQKEALAWYTPYIYNNPVGRLVHIVVQLTLGWPLYLALNASGRPYPRXACHFDPYGPIYNDRERAQIFISDVGVLGVSLALL

SEQ ID NO: 256882 - protein, 157 aa, Zea mays
  Clone ID: MRT4577_165865C.1.pep
NLESEQNLEHVDVKYHISIKNSLRYAIQEMRRQSSLLHTIDGLCCSIPEVEGGKVGKPAGHLKVICQSLEKTSIVCEEDLENKSPGWDLHHPPSDVEGSNPSDIEDPMDGYVSEDPELWEMVFDDMKWEENKVAVSLAEHCRIWGYDYDQVYDRETK

SEQ ID NO: 256883 - protein, 223 aa, Zea mays
  unsure (1)..(223): unsure at all Xaa locations
  Clone ID: MRT4577_165866C.1.pep
MGAGGRMTEKXGAARPRRRRRDLXQRSPTDKPPFTLAQIKKAIPPHCFERSVIKSFSYLVHDLVIVATLLYAALVWIPTLPSVLQLGAWPLYWVVQGCVMTGVWVIAHECGHHAFSDSSLLDDIVGLVLHSWLLVPYFSWKYSHRRHHSNTGSLERDEVFVPKQKEALAWYAPYIYSNPVGRLGLLAVQLTIGWPMYLSLNTCGRPYPRFACHFDPYSPIYND

SEQ ID NO: 256884 - protein, 53 aa, Zea mays
  unsure (1)..(53): unsure at all Xaa locations
  Clone ID: MRT4577_165867C.1.pep
RSRIDHKFDLMFSKRAFIHWYFGEGLVEGLFSXAHYDLVXLEKDYYVVCANFD

SEQ ID NO: 256885 - protein, 36 aa, Zea mays
  Clone ID: MRT4577_165868C.1.pep
GVNGGSDAENVCYLRDIADADKLVRVMRSCPAGADA

SEQ ID NO: 256886 - protein, 107 aa, Zea mays
  unsure (1)..(107): unsure at all Xaa locations
  Clone ID: MRT4577_165869C.1.pep
QSFRPEVLDRLDEMNGFPPLTXLEGKGNAGLMLKEVFDRLKANGINLQVTEKFPDRVVDQRYYPSYCARPLRRAIMRVLEDSLAKKMLAGEVKEGDSSLVDVDSKGK

SEQ ID NO: 256887 - protein, 35 aa, Zea mays
  Clone ID: MRT4577_16586C.1.pep
LYAHNQTCTSGPCTTHVIKLVVPHSCHTRGITRSD

SEQ ID NO: 256888 - protein, 35 aa, Zea mays
  Clone ID: MRT4577_165870C.1.pep
VRRDLNVDKPVRSSHQIPPIAGVSTPLSDLRRLPT

SEQ ID NO: 256889 - protein, 65 aa, Zea mays
  Clone ID: MRT4577_165871C.1.pep
DSLMRTTLVFGFDELVESGFQGYRRGQYSRVENIFGTLAHHKPCLLTGRTKTHTTGFAIGCKISK

SEQ ID NO: 256890 - protein, 116 aa, Zea mays
  unsure (1)..(116): unsure at all Xaa locations
  Clone ID: MRT4577_165872C.1.pep
LPGPRAGVPGVPARWWLSCWRPAVSPGPGGPAPGGVPXGRACPWRGXXPPRGGGCGFSPRSVCRVARCRGRPPPRPVPGAFWPSPGGFCSAPLSAFSGVVFFGAFCFGVRSGSWPG

SEQ ID NO: 256891 - protein, 130 aa, Zea mays
  unsure (1)..(130): unsure at all Xaa locations
  Clone ID: MRT4577_165873C.1.pep
PPPPAPPPGAPPPPPAPPPPAPPRAPPXXPXPXAPRAPPXXPPALPRXAPPSXPGACPPXXWAPPPPPSVPRCRPPRXRXRSSSSPSCRGXWPAXPWSAPXXXPXXLPPXSXPCPLLWRVVFFFPAGPGV

SEQ ID NO: 256892 - protein, 77 aa, Zea mays
  Clone ID: MRT4577_165874C.1.pep
DNQELKRQNCSYLNRNYWPSYHAYAEAIGYDSETARGIPIAHSQEIRRLFCAGVNSNYLLCYYAYTEAKGHEIGISW

SEQ ID NO: 256893 - protein, 94 aa, Zea mays
  Clone ID: MRT4577_165875C.1.pep
LPPLAPQAFPFLFPGLIFCGIVRGLQFFPRNGFAPVFPKIGNKKGNNKKNHQYKKNKKKKKKKKKKKKKKKKKKKKKKKKKKKRKKKKKKKKSL

SEQ ID NO: 256894 - protein, 53 aa, Zea mays
  Clone ID: MRT4577_165876C.1.pep
LKVGMENSSCLAVLCLALVFFSMGSRADCDLNFSSLSLVLTGQQAPVYTDGLT

SEQ ID NO: 256895 - protein, 44 aa, Zea mays
  Clone ID: MRT4577_165877C.1.pep
LNLYGHKLPVLCMDIPSLNLYGHKLPVTSKAPSDDIGRVGGRVG

SEQ ID NO: 256896 - protein, 75 aa, Zea mays
  unsure (1)..(75): unsure at all Xaa locations
  Clone ID: MRT4577_165878C.1.pep
RPXFFFLTFYFLWGDRFTWSFGKILKNGPLELGLKSPVETNIFNSTRCKGQALSICNFSWWEKLIFSKERRGGHK

SEQ ID NO: 256897 - protein, 124 aa, Zea mays
  Clone ID: MRT4577_165879C.1.pep
MKLHNMHQMWETNHIMRIRSARDRMGDHDVCAAMSRALMDKSETITLDICTSIMPVVTNLLDSKIDRHSIIASESFVKLVTTSCPMIHTTVSTGPCVGLDLDAEHTTQRCNLCFIELEKAKNNL

SEQ ID NO: 256898 - protein, 74 aa, Zea mays
  Clone ID: MRT4577_16587C.1.pep
QPLHLCRIMAKTICLYLEVGRSLDYMSIMSNCLLPSIFFVSCYMLLTVSCNYQYHDPAFEFFAFERIYKYCCQY

SEQ ID NO: 256899 - protein, 97 aa, Zea mays
  Clone ID: MRT4577_165880C.1.pep
RISHIVGEKEYSMCRHFKRGEQTKRTCRLFFLSRTVQSKYKCPGDYNLPSFTDFNSHSRQNSTGKTSILTNPTPFRGRKEFSYRHPIKPTTAMEPYY

SEQ ID NO: 256900 - protein, 48 aa, Zea mays
  Clone ID: MRT4577_165881C.1.pep
TIRSNINFTVLRGTIVIHTLERKVIPYNPQTGVILWTFSYLQCTTLCR

SEQ ID NO: 256901 - protein, 79 aa, Zea mays
  Clone ID: MRT4577_165882C.1.pep
FTFSFYKLGLVAINVIYHFFIFVLFLYFFFFFFSLFFFFFFFFFFFFCISNVYPQIIKISMAYYLLLYIFIICAYQMFI

SEQ ID NO: 256902 - protein, 114 aa, Zea mays
  Clone ID: MRT4577_165883C.1.pep
DKCDQCYWLLPCTTTVLGNLFLVLTYRYLMYNAAMGVVPADVYLLLNAEDAHLVVGPVDHRLLSRRTGASSAACSADVSRNHPCIGDCSGCTYCLGILAGDGSETGGPTLLWTR

SEQ ID NO: 256903 - protein, 82 aa, Zea mays
  Clone ID: MRT4577_165884C.1.pep
PRVRPRVRSVEAAFQPETTAYSPGLKLKMIKWLQNSECAPSVQVKSFKEGSLAQGTLPRSESKNLTTATFQSGQEEAISSID

SEQ ID NO: 256904 - protein, 97 aa, Zea mays
  Clone ID: MRT4577_165885C.1.pep
RLELPQEIVFVVLHIIKPLERPLWLQVVFTSLTQTQTQYSCLLHRLSRMRLNHGFQAICVFYQRYVLFFNLMCGSSPSTWAQLSLGGAPSKSLGVGA

SEQ ID NO: 256905 - protein, 48 aa, Zea mays
  Clone ID: MRT4577_165886C.1.pep
TKTCYFTLLHLAICTSRGVRGGSDRQSGDVDVYSIEERITRVIHCGTT

SEQ ID NO: 256906 - protein, 39 aa, Zea mays
  Clone ID: MRT4577_165887C.1.pep
FLLQTPHQKESLNESLNAMQQTMGLRMRLYVELVVEVRR

SEQ ID NO: 256907 - protein, 48 aa, Zea mays
  Clone ID: MRT4577_165888C.1.pep
KPDLLGQITFLEGFIPYQKLLGKAKAPPSKFGLPPKLTNMEFFKHTFL

SEQ ID NO: 256908 - protein, 80 aa, Zea mays
  unsure (1)..(80): unsure at all Xaa locations
  Clone ID: MRT4577_165889C.1.pep
FGFSAVPVFMFYNIWSTCEVIKSPQTNGTTGVEQICVDIRQYGIIPWNAFPGKICGSAXXENICNTNEFYMSYHLFIVAC

SEQ ID NO: 256909 - protein, 90 aa, Zea mays
  Clone ID: MRT4577_16588C.1.pep
QSSFASCISSSPSLTPNRRAPPGPGVSFSSPARAPLFSLSSVVVFELIFSCCSIFSYPGCVCGRQIIGVAQLTNRILVSHRFHVFHGPHV

SEQ ID NO: 256910 - protein, 72 aa, Zea mays
  Clone ID: MRT4577_165890C.1.pep
LVRPMVFLPSGAFLVNGRTWQRPCLPITWWSLIVDTHLKYTKFQFPGWVAKVICRDRYISDVTVCHKKTAPP

SEQ ID NO: 256911 - protein, 284 aa, Zea mays
  Clone ID: MRT4577_165891C.1.pep
MVMEETIDDSEMSLSNMVLGFLEDFERDERRPENDDDNNEEEGSSGGDTAESKAFWQTQHLQLREALAKGSPAESRIRADTEEAVKSMRAAACSCSCTGRPAARDCRPCMLRHVADRLRDAGYDSALCKSKWTRSPDIPSGEHSYVEVAVQTRSGKSVRVVVELSFRAEFEVARASAGYRALVTALPEVFVGRADRLRGVVKVMCAAAKQCMKDNNMHMGPWRKHKYMQAKWLGTPERGAAAVAAAETPVVAVPSVTVGSPEKQTKFRASMLTFDFGRTALEVA

SEQ ID NO: 256912 - protein, 120 aa, Zea mays
  unsure (1)..(120): unsure at all Xaa locations
  Clone ID: MRT4577_165892C.1.pep
PASEFGTLCVVPAGSGPPPSFIVGHLVAIVDGGAFAAFIDLVRSGDTXRAGLGVLFLKVVLLGPREGPGPKLVETEDGVEAMGRFQFPENQMLRNLAHGLVGENFGADYGPLSCPAQHSG

SEQ ID NO: 256913 - protein, 210 aa, Zea mays
  Clone ID: MRT4577_165893C.1.pep
MPGTRLFLRRFSVSGGVHTNPLGLGPKDACYLPNILKNLNPDIRCRTGWFVRLLTCSLPIRRNACAGEHSYVEVAVQTRSGKSVRVVVELSFRAEFEVARASAGYRALVTALPEVFVGRADRLRGVVKVMCAAAKQCMKDNNMHMGPWRKHKYMQAKWLGTPERGAAAVAAAETPVVAVPSVTVGSPEKQTKFRASMLTFDFGRTALEVA

SEQ ID NO: 256914 - protein, 71 aa, Zea mays
  unsure (1)..(71): unsure at all Xaa locations
  Clone ID: MRT4577_165894C.1.pep
PGGMGPDGELRDPAHPDSNGNGKIPGTSAYQXNDRGQXSPLQAAEEAARKPXEWGHGGTTDAGGDHNRAGD

SEQ ID NO: 256915 - protein, 119 aa, Zea mays
  Clone ID: MRT4577_165895C.1.pep
PGAKGHGPNAPTDSDVHTDGRTACILAPPGVDACMKHNSPWVTQLMSALYYYSASLPFRPLSLPVSMKSDDVCLLTLSALDLASERAYQSSSILILTSTPERIHASTCSCTITMSFFAT

SEQ ID NO: 256916 - protein, 198 aa, Zea mays
  Clone ID: MRT4577_165896C.1.pep
MGCGLSAMLTSKLAKGLCCQGELGQCASTGRVKAWMTTYRWIAEKSIPFLKKDPNMGAKKLQEELEDKYNVKLGYSTVWAGRQKAVEQIFGTWEESFADLYRFKAEIDAKMPGSVVDLEVQEEEDGVYFRRFFCCFKPSIDGFLNGCRPFWSVDSTALNGRWNGQFSEKEESRQTRATIRISKYLHAQKAKSCAKRVN

SEQ ID NO: 256917 - protein, 88 aa, Zea mays
  Clone ID: MRT4577_165897C.1.pep
SSLLQLLFPPRSLRRDGHGEASFTVAESRFGGNGKLASSGDQLRARLGGLVLDYPTEFMACSIYKVRERCCLIWTNCAGGREGNESRR

SEQ ID NO: 256918 - protein, 91 aa, Zea mays
  unsure (1)..(91): unsure at all Xaa locations
  Clone ID: MRT4577_165898C.1.pep
PSVPLRCLRWLVGWLSRLVPVCGAVWLVLGGAVGRVAAPGAXGGGGGLGAGPGLGLAAGLGGRAAGRGGXGVAVVGAVPRALLRLSPSPLL

SEQ ID NO: 256919 - protein, 105 aa, Zea mays
  Clone ID: MRT4577_165899C.1.pep
LAARWRVAGRPRTGDDEGGQGRAGGTPVSRRPAQSRPAASSLLFSSSLAFALRSFMPSTANTSALSSPRPRGGVASSTSGGMGPRWGRAAEVTAVRLWCGAGRVG

SEQ ID NO: 256920 - protein, 98 aa, Zea mays
  Clone ID: MRT4577_16589C.1.pep
ISYNVLIHALCGMGRTQLASHHFHEMLERGLVANKYTYTLLIDGNCKVGNWEDAMRFYFEMHQNGIHPDYLTHKALLKGFDGHVHHTIEYLDNVILGE

SEQ ID NO: 256921 - protein, 85 aa, Zea mays
  Clone ID: MRT4577_1658C.1.pep
MADPESGMVDKAAYVLHSMVSSGRYRAAAVEEGGIPVLVEMVEVSTSRQKEIATLSLLQIGINRDGTDDGDHGAEGEDVGGVDGR

SEQ ID NO: 256922 - protein, 72 aa, Zea mays
  Clone ID: MRT4577_165900C.1.pep
MAASSKIVSATMASPVETPSMKTAGSIVYFLHGHSCPVLILHGRYCYYKSAPLAAADGSCDEKLRTNEGVES

SEQ ID NO: 256923 - protein, 94 aa, Zea mays
  Clone ID: MRT4577_165901C.1.pep
YISKTQSCCVFSRKKILRNCHGSTIVLDSSKNTMVLRNIVWIQHYKSWYLGKASHAMKTLGCSGVSNTPKRPWYLEYHGFENIVFRNATKHFMT

SEQ ID NO: 256924 - protein, 198 aa, Zea mays
  unsure (1)..(198): unsure at all Xaa locations
  Clone ID: MRT4577_165902C.1.pep
EAPAGASSTRIKEGTARTLLQXXXARWRRRRHHPVSPXXXALSLHGCQGSATAATRAATPGVVSPACPGPTWRASTVAWSSTSGRRPSSPRCRPSWTAXXXXXXXXXXPPSSGRPATAAASSSGREPRREGMATQTNGLLPDGWLSVGKSFLAVLHWGATYTSSAYRTYPTRVPEIPGCLGYLQGSCVVMWXXXMHLL

SEQ ID NO: 256925 - protein, 108 aa, Zea mays
  Clone ID: MRT4577_165903C.1.pep
VVFRVIIGVFFYLNKKTNSGSPLIIVPDEQSEKCVHFFAGLIIERFVLVTSLFLLHFAFRSYFGGLVPAPRIQGLLATPFVGARLSSASERGGGENPFGLPRAAGEDL

SEQ ID NO: 256926 - protein, 66 aa, Zea mays
  unsure (1)..(66): unsure at all Xaa locations
  Clone ID: MRT4577_165904C.1.pep
XYAWASRHISXSTLAPSRGKVRSDGARRGVGEGRRGRXHEERVGXLYDWVYDSQWRTRSWRXSRSR

SEQ ID NO: 256927 - protein, 75 aa, Zea mays
  Clone ID: MRT4577_165905C.1.pep
SPVNVVTVKHGSIANAACDGSSLSTVMEVGRVKGVTQLQEESSHTFLPLVSLFSLSALARARRRRRMPSYCFGFT

SEQ ID NO: 256928 - protein, 78 aa, Zea mays
  unsure (1)..(78): unsure at all Xaa locations
  Clone ID: MRT4577_165906C.1.pep
MNANEECQRWFMDMKTNKVHRFTLYNIDERTHAVLVYKVQRPPARTHXLVVALPDDDCQYAVFDFDLVTVNYCQNSMI

SEQ ID NO: 256929 - protein, 320 aa, Zea mays
  Clone ID: MRT4577_165907C.1.pep
MGAPDFCARCARIYCAAGEQWSARGSSAAEEAALSACSAQGCRNQQCCVPQADGWCPYWETHESSAAAVDSTDPPAEKHEYQVEVNRLMVLIVHNLYSNKEVFLRELVRYDSGETVRSAKFISRKQWVVAGADDMFIRVYNYNTMDKVKVFEAHTDYIRCVAVHPTLPYMLSSSNDMLIKLWDWDKGWVCTQIFKGHSHYVMQVTFNPKDINTFASASLDRTTKIWSLGSPDPNFTLDGHQKGVNCVDYFTGGDRPYLITGSDDSTAKLPIIITGSEDGTVRIWHSTTYRLENTLNYGLERVWAVGYMKGSRRSMLVATS

SEQ ID NO: 256930 - protein, 623 aa, Zea mays
  unsure (1)..(623): unsure at all Xaa locations
  Clone ID: MRT4577_165908C.1.pep
MPLRLEIKRKFAQRSERVKSVDLHPTEPWILSSLYSGSVCIWDYQAQAMVKSFEVSELPVRSAKFISRKQWVVAGADDMFIRVYNYNTMDKVKVFEAHTDYIRCVAVHPTLPYVLSSSDDMLIKLWDWDKGWMCTQIFEGHSHYVMQVTFNPKDINTFASASLERTTKIWSLGSPYADFILNVXNVYWADSGDLVAIASDTSFYILKYNRDIVASYLEGGKPVDEEGVEDAFELLHEINERVRTGIWVGDCFIYNNSSWRLNYCVGGEVTTMYHLDRPMYLLGYIANQSRVYLIDKELNVIGYTLLLSLIEYKTLVMRGDLDHANKILSSIPKAQYNSVAHFLESRGMLEEALEIATDADYKFDLAVQLGKLDVAKAIVIEAQSESKWKQLGELAMSTGKLEMAEECLLQAKDLSGLLLLYSSLGDAEGIEKLASLAKEHGKNNVAFLCLFMLGKVEDCIQLLVDSNRIPEAALLARSYLPSKVPEIVAIWRDDLSKINPKAAESLADPSEYPNLFEDWQVALTVEKSVASQRGNYLPADQYLNHAEKSDMTIVEAFKRMQVVQHEEPEDVAEENGELDQQAFEETEMQNTDDDADEPEETVLVNGNKGEEHQGTDNEGALSA

SEQ ID NO: 256931 - protein, 80 aa, Zea mays
  Clone ID: MRT4577_165909C.1.pep
NHAEKSDMTIVEAFKRMQVVQHEKPEDVAEENGELDQQAFEETEMQNTDDDADEPEETVLVNGNKGEEHQGTDNEGALSA

SEQ ID NO: 256932 - protein, 71 aa, Zea mays
  Clone ID: MRT4577_16590C.1.pep
KHFISKKFGGEQLDYPFHGIMDEHELLFVFIYVLFLVDSNSMDELFCNLLFSFWMKNYANATMQVSVLFRL

SEQ ID NO: 256933 - protein, 84 aa, Zea mays
  unsure (1)..(84): unsure at all Xaa locations
  Clone ID: MRT4577_165910C.1.pep
PQCQXFRQQCCPPFRQVDPQPRFQGFFGLVLQSILQQQPQNGQVSGLLAAQIAQQLSAFLGLQQPIPCPYVSAGGVPPLKNFFL

SEQ ID NO: 256934 - protein, 78 aa, Zea mays
  Clone ID: MRT4577_165911C.1.pep
NSTGILQSTIFTQQYVDGVLANERDKMKCCSIEYSHPKQSSQAFVYGGILLAGFIVYSLINACCNIIVHLMGNPTCFT

SEQ ID NO: 256935 - protein, 149 aa, Zea mays
  unsure (1)..(149): unsure at all Xaa locations
  Clone ID: MRT4577_165912C.1.pep
GPHDPILGLMVGYDXDPAPECKLVVGVYRTEKGIPLMMNAIRRAEQMWINNLVTCXEYLTVTXLAEFNNLXAKLIFDADRPAIQVNRDDTAXCLSLTGSLQFDXEFLERNYHQRTIYITLTTCGYLPKVFTLSVLKAMSYRXYYDPAMC

SEQ ID NO: 256936 - protein, 71 aa, Zea mays
  Clone ID: MRT4577_165913C.1.pep
KKGRSFGFGGLFPVMSLFKSPKGVRVGFMVLRVFVMPQIMGNIDPWGFKPAQKPIGAPPVFFFGFLTKGQG

SEQ ID NO: 256937 - protein, 516 aa, Zea mays
  unsure (1)..(516): unsure at all Xaa locations
  Clone ID: MRT4577_165914C.1.pep
MPLRLEIKRKFAQRSERVKSVDLHPTEPWILSSLYSGSVCIWDYQAQAMVKSFEVSELPVRSAKFISRKQWVVAGADDMFIRVYNYNTMDKVKVFEAHTDYIRCVAVHPTLPYVLSSSDDMLIKLWDWDKGWVCTQIFEGHSHYVMQVTFNPKDINTFASASLDRTTKIWSLGSPDPNFTLDGHQKGVNCVDYFTGGDRPYLITGSDDSTAKVWYYQTKSCVQTLEGHTHNISAVCFHPELPIIITGSEDGTVRIWHSTTYRLENTLNYGLERVWAVGYMKGSRRMVIGYDEGAIMIKMGREVPIASMDTGGKIIWAKHNEIQTVNIKTVGAGFEVTDGERLPLAVKELGSCDLYPQSLKHNPNGRFVVVCGDGEYIIYTALAWRNRSFGSALEFVWSSEGEYAIRESTSRIKIFSKSFQEKKTIRPSFSAERIFGGVLLAMCSSDFICFYDWVDCRLIRRIDVNVKNVYWADSGDLVAIASDTSFYILKYNRDVVASYLEXGKPVDESVEDAFEL

SEQ ID NO: 256938 - protein, 111 aa, Zea mays
  unsure (1)..(111): unsure at all Xaa locations
  Clone ID: MRT4577_165915C.1.pep
HKRGPHRQPKRPAPQNLTRGEGANRRQRGXQQPPAAEQEXQQXAKAARAAKTARPRQAKEEAERETAEDXAQTEADAQRKGAESSGDPGANAKRHEEETAEKNEQHTQQAA

SEQ ID NO: 256939 - protein, 84 aa, Zea mays
  Clone ID: MRT4577_165916C.1.pep
CHVRCTGLVAGGSPSAFQSGISCLRPMVLSLPIMPSVCAIDISLVWYSETSLYTPPPAGCPDARRKISSSTPHLTSGPAPAGVP

SEQ ID NO: 256940 - protein, 70 aa, Zea mays
  Clone ID: MRT4577_165917C.1.pep
KKKKKKKKKKKKKKKKKKKKKKKKKKKKKKKKKKGRGAAHKSEIFQNYKKTCGPSKNTLIGGKFPIKKVY

SEQ ID NO: 256941 - protein, 76 aa, Zea mays
  Clone ID: MRT4577_165918C.1.pep
QRRVLFFFFFFFFFEQQTLPSRTSSRRPQDGACPDIRLLLQHCLNNLQKIQAETWKEKGYFSNQKVGPAYSALLPP

SEQ ID NO: 256942 - protein, 82 aa, Zea mays
  unsure (1)..(82): unsure at all Xaa locations
  Clone ID: MRT4577_165919C.1.pep
MASANVYYRCFVTGLAWATSNHSLDNAFASYSXILYSNVITNHETARSRRFVFVTFSCDNSMLDAIYNMNGKDLNLPNITAN

SEQ ID NO: 256943 - protein, 678 aa, Zea mays
  unsure (1)..(678): unsure at all Xaa locations
  Clone ID: MRT4577_16591C.1.pep
MKAADAARAAATELEALRGSSAGNSVSGDGSTNNELGLAREAMQVQATQWAAARPRSDSLDRRRRVDGAPSENARSGSPDGRGRTDGAPGGSGRVDRDRGLYRRHGSPSPDRYHGHCGVQAVVRDIGLGGGLPTLTKTDYVEWAAMMRVRLQFSLSQKWTAKEAWDAIAATRIGSDRARKTTLQALPKEWENLAFKPGEDVDDFALRLNTLLQKMVQFGDDNYDEERAVEKLSRCIPEKYKQIARSIESLLDLSTMTIEEAIGRLKVVDGDEPQAPSGPITIGGKLHLTREQWEACQGDKKKGESSTRGRRRGKPRKARGGAQAGVRGHAEVGAHGGAQGGAVGNKKPARDDGCHNCGKLGHWARDCRQPRRGQVNVAQAEAEEETLLLAHANIEPSPAASAAAALLHLDESKARTFLGDGSSKDMIEGWCLDTGATHHMTGRREFFTELDSSVRGSVKFGDTSGVEIKGAGSVVFTAASDEHRLLTGVYYIPASRNSIISLGQLNENGSRVEVEHGVMRIWDPSRRLLAKVRRGPNRLYILNVKVAQPXAARRDDVAWQWHERFGHLNFEALKRLSAKEMVRGLPCLDHVEQFCDVCMLTKQRRLPFPQQSSFRAKERLELVHGNLCGPVTPATPGGRRYFLLLVDDLSRYMWVMILGSKGEAANAIRRVQVAAEAE

SEQ ID NO: 256944 - protein, 40 aa, Zea mays
  Clone ID: MRT4577_165920C.1.pep
AAEETYQEAIAADPGNAHHAAAYAHFLWNTGGEDTCYPLD

SEQ ID NO: 256945 - protein, 86 aa, Zea mays
  Clone ID: MRT4577_165921C.1.pep
LNREPFLINLNPPLNYHHFFQIQRNRPRGSPPLPKEGGPTNQIKKILENLPQSTTLTTLEGEPLPVPNFLIGFNNFIPLNNLPKNN

SEQ ID NO: 256946 - protein, 125 aa, Zea mays
  Clone ID: MRT4577_165922C.1.pep
RGGKSRRERGEKKEREEKAKGAGALRALGKSVSGSRCCAVKPPPTRRAFKMRRYTRARVPFAIRGCATTVGKRARSVRGPSFAILRRQRWRKRGICAARRRLSFGCNAQGFFPKSRRFVKRNAAQ

SEQ ID NO: 256947 - protein, 104 aa, Zea mays
  Clone ID: MRT4577_165923C.1.pep
LHKHAGNLLYPCTDMIRENIGNRYSQHAMPLCSNSATSTKYLKKRPFIFPLLFSTAFILNSLSIRTMASRDGAFYAGFTLYSAPSPDKIQNSVVRSTWDIDGHH

SEQ ID NO: 256948 - protein, 157 aa, Zea mays
  Clone ID: MRT4577_165924C.1.pep
MLAAVMADSGDAAMAVVLGWSSSWICGEEDGGRLTLTVASKCVQRTLIDCVNVVLFIAYVCTLAAACVRRRQRSADASSGRSGAPSRWVLLVVSTCCVAAAVAYCVTALQDAYDIKTAVPYFVRGLVWIALAASLHAQPTRPARGRGRALVGALVAA

SEQ ID NO: 256949 - protein, 169 aa, Zea mays
  Clone ID: MRT4577_165925C.1.pep
PPCESTAADHSPAGRPPSRFGSDGHGRRSSTPPSAEEGLRCPHHRRRLPTPKRLDARTATETTILSKQWRDLYTHSHTGYDLTVDDILPPRYHRLKQIVVEAKARYEAEKNALKLDGSYASRDWLYSFKDWRWKVCLLTPILQRYERWAMRRYVKRVNAFLLAPDNVQQ

SEQ ID NO: 256950 - protein, 181 aa, Zea mays
  unsure (1)..(181): unsure at all Xaa locations
  Clone ID: MRT4577_165926C.1.pep
TRPCSTARNGHGPFRSARGGRVPAHTVLHPXXAXVXVXAXTXPFFTPPSPPPPAFPFPLPPLPWTTPPSPPPSPSFPFPHLPPIFTTPSPPPPPPPPTIPVPXMPPLPHLPPLPHFPPLPSLYSPPPPPPPPPPPPPSFPWTFPPLPFFPPGPGSSGPSPPPLISGYRKDPTTWSPSNKQP

SEQ ID NO: 256951 - protein, 91 aa, Zea mays
  unsure (1)..(91): unsure at all Xaa locations
  Clone ID: MRT4577_165927C.1.pep
FFPKDVRPISIIMIGINGFCRIGRLFAIVFLQSDDVELFAVNYPFIFTFYMTYMFNFDTVHFQFXHHEVNVXDSITLLFGENDVAVFVFCN

SEQ ID NO: 256952 - protein, 53 aa, Zea mays
  Clone ID: MRT4577_165928C.1.pep
GHDLIQVSHSLMDVAYIILTLNATLALGAVPSPECLHSFFNEFLIGRVGGRVG

SEQ ID NO: 256953 - protein, 62 aa, Zea mays
  Clone ID: MRT4577_16592C.1.pep
WDRFSPLRPGLGSFYRFLPPPTFFWKPNKKGFLGFRKQFTGVPHPPHVYYGFANYLFKRFAN

SEQ ID NO: 256954 - protein, 158 aa, Zea mays
  Clone ID: MRT4577_165930C.1.pep
GRDSEYTTVRSPLPVFPSPTPVFIPPRSAPRARSRRYRQLTDLAVLHWGAACNCKCIAALHSSLSFPAASSSRLGFPPPAPAPHLTAPTQNSSPRMASPARPADASVSGAFSLPPDVCCSYDQPLPRRREETALRSAPLCSRRALSIPNYLPILSLNS

SEQ ID NO: 256955 - protein, 262 aa, Zea mays
  Clone ID: MRT4577_165931C.1.pep
PDYKFVKELSKQCKQIVRHHLDSVTSPYSHICYDDDFLSGVGSVANSTCRFNHFTGVTSFDLADSGSALEEAQENLPPKDQHHMTPPINKGNDSKEVLRESQLTVPETPSPDLPSDIHGGRKKENGIPNDGGPRKRHARMAAYTNRNHHNSMIGADDMGSKSGSSYSTICAISAQYFAKMREVLIERNAPSALNSGFLTPCRERLFLALGFELFAVSDNKFMDMFVLPGAVDGIQNERHSLLKRQKILLSCLNEFKNISRAL

SEQ ID NO: 256956 - protein, 206 aa, Zea mays
  Clone ID: MRT4577_165932C.1.pep
MRLGSMPVLSLFVNALPLFVVLRSDANAFATPTDNIVRQLSSVVKWPRGSPPHSPKQSSHPQYDGNVAVQFESGYFVETLVEGDKLGVTPHTIRVSPVEGGELLAVDSAHSNIVRITPPLSEYSRGRLVAGSFQGHAGHIDGKPIDARFKRPTGVAVDDTGNVYIADTANLAIRKIGESGVTTIAGGKSNIPGYRDWSSGYAKVST

SEQ ID NO: 256957 - protein, 72 aa, Zea mays
  Clone ID: MRT4577_165933C.1.pep
PVVPASGQVPSARHSSLSAVPRARLILGGLVAIGAPGHLGGSFCTDGAFPPCFIRVTFLCSSNECVVSLPQG

SEQ ID NO: 256958 - protein, 72 aa, Zea mays
  Clone ID: MRT4577_165934C.1.pep
ILFPSAASKTTTAKAKADASISTAVDAISCWAMLAQSALPQLEDLQGASSTKITGPRSTTNAIHPSIVATIS

SEQ ID NO: 256959 - protein, 137 aa, Zea mays
  Clone ID: MRT4577_165935C.1.pep
CSARPDFHGARPASGALLSLYFSCREPGAQPQLPAECSLRASCSLLAQLSVRRRPLLTRPQLVRPLRVAELRFSGRRILSASCSTGLASSSPNSAVLQVSPSPVARLLCSSTRVPLSACRVRPNVPASRLLSSPRSL

SEQ ID NO: 256960 - protein, 132 aa, Zea mays
  unsure (1)..(132): unsure at all Xaa locations
  Clone ID: MRT4577_165936C.1.pep
SAPHXPXRGXXGXAXXRRPDPXKRPXPXXXXXPLVAXPGAXXXGARXPQEQHKTRXPXXPXPXDGAPPTRXXPKAXGKPRPKAEPPRPXPXGGPKPEPEPEAXPXPEPRANPAPPPEDTKEDRADAPGHRRG

SEQ ID NO: 256961 - protein, 131 aa, Zea mays
  unsure (1)..(131): unsure at all Xaa locations
  Clone ID: MRT4577_165937C.1.pep
CRFLSSCGCRGARRRWLAARSSAFRRSPLFWVGVAPCSWSLCRLGPCGRRGRPGALVRVRLSGVLGVRFRRSASXSVACAFRGRSWGGVSSAAFVCLPVSRLRWLGPVCARGFARCRGSPSVFVRLSPVAL

SEQ ID NO: 256962 - protein, 159 aa, Zea mays
  Clone ID: MRT4577_165938C.1.pep
VMVDARGRSKGSGFVSFATAEAGQRAINRMNGRIVGKKPLYVGLAQPKEERKAMLMAHFAQRNLAMAASQYAGPQQVYFGHPSSPGPIAPPQGAVFGFPQHFVPGMGPISPVMMPPHNMQRPRYPGPAPYRQQQAMIHANANHMPNARPGPYPTATEFE

SEQ ID NO: 256963 - protein, 42 aa, Zea mays
  Clone ID: MRT4577_165939C.1.pep
MGKKVCLLIVDENILIALAVVAVVVLAFVALLLPPPRRRGFF

SEQ ID NO: 256964 - protein, 195 aa, Zea mays
  Clone ID: MRT4577_16593C.1.pep
PRSRQRLKRWLGEARDRCSEEESNQFQLNKLGDEISVLEKTLSGLQQSVGFCHNDLQYGNIMIYEETRQVTLIDYEYASFNPVAFDIANHFCEMAADYHTATPHVLDFTKYPDTGEQRRFVEAYLSSAGEKPTDGEVEELLGLIAKYTLASHLFWGLWGIISAHVNENIDFEYKEYARQRLDQYWQTKPRILGPK

SEQ ID NO: 256965 - protein, 104 aa, Zea mays
  unsure (1)..(104): unsure at all Xaa locations
  Clone ID: MRT4577_165940C.1.pep
AGIAEPLVYSLPVPDSLPLQQILDSLTSLRDGLKFSGRCRXSMGKELIREITDLGHRHDIYVSTSHRAQHLLRRGPFSFKRYVDACKALRFDTTELNARSLNLP

SEQ ID NO: 256966 - protein, 126 aa, Zea mays
  Clone ID: MRT4577_165941C.1.pep
FNAQGGPGKPRRWPLGGIKTSRGSRWSRGTWFPQNLGGANFAQQRPKGQKPLKKEGFLGPSKKGCFFKGGVGGPPPWGGLLALPRGKALLRTFLGPPNLRPWEPKGGETNYFFFQISGWGGGFWFF

SEQ ID NO: 256967 - protein, 95 aa, Zea mays
  Clone ID: MRT4577_165942C.1.pep
HCISRAITWSISGKITWGSFTIQHRPGLSGGGTSGPYGFVLQRVAFMVQDLLLICSRSPLSSRACRIFELRDLSSVSRCRMRSREGEESRSTVAR

SEQ ID NO: 256968 - protein, 343 aa, Zea mays
  Clone ID: MRT4577_165943C.1.pep
HWDLEPACPDTARAGGVFLPIIKSLSLSAESKPNHPSSRKLGSYLVMTQFQASGNSSALFLTAAAQNLLCLKLAEELGVIIANPWVSWFKAASLPALVSLLATPYLLYKIFPPETKDTPDAPALAEKKLKRMGPVTKNESVMIGTMILAVSLWVFGDAIGVSSVVAAMLGLSILLVLGVLDWDDCLNEKSAWDTLAWFAVLVGMAGQLTNLGIVSWMSNCVAKLLQSFSLSWPVAFCVLEASYFLIHYLFASQTGHVGALYSAFLAMHIAAGVPSVLSALALAFNTNLFGAITHYSSGQAAVYFGAGYMELPDVFRLGFITALANTLIWGVVGTIWWKFLGLY

SEQ ID NO: 256969 - protein, 65 aa, Zea mays
  unsure (1)..(65): unsure at all Xaa locations
  Clone ID: MRT4577_165944C.1.pep
VESAXSXXPGXIISLMEAIXGXXHXXCVVGLXCXXHKPXTGXXTACEXXPPSFRXAIXTXXMIMA

SEQ ID NO: 256970 - protein, 60 aa, Zea mays
  Clone ID: MRT4577_165945C.1.pep
VPGLVDAFMSLTDDIYRAAGICLIMPGHHALVCVVNPRRNCPLCWLLWFYGTPRCLVLLA

SEQ ID NO: 256971 - protein, 230 aa, Zea mays
  unsure (1)..(230): unsure at all Xaa locations
  Clone ID: MRT4577_165946C.1.pep
SSSSRLHRVEPHPHARLLRHHPREVHPHARLLHHHLREHLRRRSNIFSDAIPFPSTRSDPIVLDPALDPILLCLVAPPSCLLLLISTRFARGRQNRLAPVEPPPPPPPASRDNPRARRSTGFPSEKATHGLSCTPRPGWNGPFLGLATFSLLVLTYSPRKRSAALGMGXWLGCLLVGLWGVGRRPLSSASGFLTTASTPKENRGVEVLGFMKXFGGGEGLIKGHYWFLRH

SEQ ID NO: 256972 - protein, 76 aa, Zea mays
  Clone ID: MRT4577_165947C.1.pep
PHVLSIHHYLYVLMEAGSGKLIAALNSSTFHELLTSDGILSLLYTCYNTSMCIFKTPESTYNTEKAILITLFLGPS

SEQ ID NO: 256973 - protein, 809 aa, Zea mays
  unsure (1)..(809): unsure at all Xaa locations
  Clone ID: MRT4577_165948C.1.pep
MPPATAMAPPSQPPSNSGDPLYPELWRACAGPLVTVPRVGDLVFYFPQGHIEQVEASMNQVAGNQMRLYDLPPKLLCRVLNVELKAETDTDEVYAQIMLMPEPEQTDVPAEKPSSAPAASPRPAVRSFCKTLTASDTSTHGGFSVLRRHADECLPPLDMTQSPPTQELVAKDLHGMEWRFRHIFRGQPRRYHDQIVWXADDDACVMNPFLVXGGASPGPREVKTPXDLLLVRCSPIPSPFASQRMHLRVLATAWSAKNTXKSMCTVYYKPRTSPSEFIIPYDQYMESVKKNYSIGMRFRMRFEGEEAPEQRFTGTIVGCENLDPLWPDSSWRYLKVRWDEPSTIPRPDRVSPWKIEPASSPPVNPLVHSSRAKRPRQNVPPPSLESSVLTKEGATKVEIDSAQTQHQNSVLQGQEQMTLRNNLTESADSDSTVQKPMMWSPSLNGKAHTHFQQRPAMDNWMPLGRRENDFKDTRSAFKDARTASQSFGDTQGFFVQAYDDNHHRLSFNNQFQDQGSAHRFADPYFYMPQQPSLTVESGTRTQTANNDLRFWSERNSMYGNPSDQQQGFSFGQNTSSWLNQPLPQVEQSRVVRPHATVAPFDLEKTREGSGFKIFGFQVDTTNPSPVQLSSPLSAIREHVVQTRPSAPVNELQPVQIECLPEVSVSTAGTAAENIQQVQQSSKDIQSKSQGASTRSCTKVHKQGVALGRSVDLSKFTDYGELKAELDKMFDFXGELVSGSQNWQIVYTDDEGDMMLVGDDPWEEFCSIVRKIYIYPKEEVQKMNSKSAAPRKEESPAPGGGGCAAAAANE

SEQ ID NO: 256974 - protein, 226 aa, Zea mays
  unsure (1)..(226): unsure at all Xaa locations
  Clone ID: MRT4577_165949C.1.pep
MADQATIQNEQQQPPAAAAPAAADGAEELNPDGTPLSENQKKKRAQKAEKERIKAEKAAKLAAEKAAREAADVDFASQNYGKLPLNMSQERAGRKFTKISEISPERDGEAIILSARVQTSRAPSAKLVFLTFRQGVDCVQATLAQAPEKVSRQMTKWAAGLAAETIVLVEGTIVKTPKPVESNTVTVREAEIKISKIHSTSEIXSTSFPFGVDDATRSGVEIQLHS

SEQ ID NO: 256975 - protein, 101 aa, Zea mays
  Clone ID: MRT4577_16594C.1.pep
IFCNFDEVIRQSSRDCCCKKKKKKKKKKKKKKKKKKKKKKKRGKKKPKRPKKGGAPQKEPRLQTRGWGVKKIQKGHKNSKPRPGGKKRQHRKNPGATKQKG

SEQ ID NO: 256976 - protein, 86 aa, Zea mays
  unsure (1)..(86): unsure at all Xaa locations
  Clone ID: MRT4577_165950C.1.pep
KLGIRLELLAAVYCHSPNTAHKGAPRGGGGCITNNRGSIVTDAMYILMTNLVTDPLKVQXVETLSNQLTCAILKNQTELLASIWTP

SEQ ID NO: 256977 - protein, 51 aa, Zea mays
  Clone ID: MRT4577_165951C.1.pep
QNFRTVLNCISQLYSCTSSYLIVMSDYESTHRKCLWVTRHSRCIAMYALLE

SEQ ID NO: 256978 - protein, 101 aa, Zea mays
  Clone ID: MRT4577_165952C.1.pep
MAKPTPVASAEEAAAMRRRLRRLVAAVAAGSADAEAFDEAAEALAKLRDAELGPRKDRTGDGRENKRSTEAAVPEHFLCPISSEIMRDPVVLASGQVVHKS

SEQ ID NO: 256979 - protein, 50 aa, Zea mays
  Clone ID: MRT4577_165953C.1.pep
MQIRLSPSMRSMTMSNSHGQIDLMRLKDAWRHFFYRTVVHTGMILVFLLP

SEQ ID NO: 256980 - protein, 520 aa, Zea mays
  Clone ID: MRT4577_165954C.1.pep
GFFIRGHAWTMDTISFAVHFWSKGEAQAMFLRHEGFLGALGAFMSYEKHGLDDLRVHHLVERFPMGAPYVGGKIHGPPLGDLNEKISWMEKFVQKGTQIIAPVPMGVPATTGMGGFERPTAKGDILRSDASAALNVGVLHLVPTLDVFPLLEDPKTYEPNTIDLDQDEFKYWFKILSDHSPDLVDKAVASEGGTDDAKRRGDAFAHAFSAHLARLMEEPAAYGKFGLANLLELREECLREFQFVDAYISIKQRENEASLAVLPDLLMELDSMNEEARLLALIEGVLAANIFDWGSRACVELYHKGTIIEIYRMSRKKMQRPWRIDDFDMFKKRMLTDRKDQSYKRALLFVDNSGADVVLGMLPLARELLRHGTEVVLVANSLPALNDVTANELPEVIAEASKHCGILRKAAEAGGLIVDAMAGIQDDLKDETVSVPLMVVENGCGSPCIDFRQVSSELAAAAKDADLLILEGMGRSLHTNLNARFKCDALKLAMVKNQRLAEKLFNGSLYDCICKFEPVP

SEQ ID NO: 256981 - protein, 75 aa, Zea mays
  Clone ID: MRT4577_165955C.1.pep
TGSFARRLPWGPEHYLSKPFQSLFTFSSGVGLMDFPMRVVLITNQAISDQRALISMPRAARCGMGPRVHTQGPGA

SEQ ID NO: 256982 - protein, 37 aa, Zea mays
  Clone ID: MRT4577_165956C.1.pep
FMVLLLQDKRQLRPGHTRTGASCRGVLHYTLTAHKNT

SEQ ID NO: 256983 - protein, 348 aa, Zea mays
  Clone ID: MRT4577_165957C.1.pep
MATRIALCLLGHVLLAVASMAVAAAAGDAGKIGICHGRVGSNLPPPSAAAALLKRNGITKARLFLPDPAVLPAFAAAGIDLMVGVPNENLTFLAAAGPEGAAQWLRSAVLAHAPAERVRCLAVGNEVLYNNQFYAPHLVPAMRNLHAALATLGLDGRVKVSSAHASSVLAASYPPSAGAFDAASLPVLRPMLRFLADTGAPFMVNAYPFISHVNDPANVQLAYALFGAGAAPVQDGALVYTNLFDATVDALVAALEKEGFGGVPVAVTETGWPTAGHPAATPQNAAAYNAKIVERAARGVGTPKRPGVPVEVFLFDLYDEDGKPGPEFERHFGIFRADGSKAYDINFA

SEQ ID NO: 256984 - protein, 146 aa, Zea mays
  unsure (1)..(146): unsure at all Xaa locations
  Clone ID: MRT4577_165958C.1.pep
NRGPEESKWGGSPPPKSPNPXNQLPAPKXGPNQRRKQGGGPPKTGNHGKSRDPKPGXFRKXSGPPGPKISPQNPTHPGQGHQAGPPLTTPAGGKKRGGTPXPETRKPPPSPRGNPDGPGPPGGHHPFXPDFAPRPGFPNRGPPPCP

SEQ ID NO: 256985 - protein, 95 aa, Zea mays
  Clone ID: MRT4577_165959C.1.pep
RAAWAIVQVGWLPSSQPRAVTANEKCFMRDSPESTHGSSIFGAERLPPAHGIPATDEPPAHPVATPRPTTEDAPAGAACTRSAQHAVGLRQGCAQ

SEQ ID NO: 256986 - protein, 114 aa, Zea mays
  Clone ID: MRT4577_16595C.1.pep
SCPSFLMTSLALVDVTLGLNSLAGLAYLTLGLREGVGRRRASRRPRTCETEPWNGTCSRGPPAQPRYGRHLQMCITLTGRSSMPLQGPRMTILRLLQFTSSANTAGQTGQNLDV

SEQ ID NO: 256987 - protein, 181 aa, Zea mays
  Clone ID: MRT4577_165960C.1.pep
GNPTRRVVNIDGGGGAPDRRGGIIPAPPVGFNFSRAAELDFCLPPPVGILGSRRPAPFFVLWGENLFPAVGVGGFPSGLCSPYGVCPRSVAIVPPAEYALPPPLRDGFAVLSDSSVSGSVALGAGPTRGRAAGARIPRAGAASVFLKKHAPPPRVVWWASCFFFKIAVALNAVSKQKIVMV

SEQ ID NO: 256988 - protein, 70 aa, Zea mays
  Clone ID: MRT4577_165961C.1.pep
IHNKFNRTALGRNCFFIWPISSEVTLDSGFAHYQVCPLHCDPSCTCHIEGKSCASVKLSPSRISSSTTSL

SEQ ID NO: 256989 - protein, 91 aa, Zea mays
  unsure (1)..(91): unsure at all Xaa locations
  Clone ID: MRT4577_165962C.1.pep
LMTLQSLDSTGSISRLTAASSHENREPVRSAHASSIANACSAXACGVTHREANLTRLCLSLLLSSPGVSSLSRSRAVASTIIHGSVQRKVE

SEQ ID NO: 256990 - protein, 91 aa, Zea mays
  unsure (1)..(91): unsure at all Xaa locations
  Clone ID: MRT4577_165963C.1.pep
MSAYCGKYTDELIKNAAYIVTPGKGILAADESTGTIVKRLSSINVXNVVVNRRALRELLFCXCPGASQYINGVNPIXQTLYKKRLVGSPFF

SEQ ID NO: 256991 - protein, 35 aa, Zea mays
  Clone ID: MRT4577_165964C.1.pep
AGERCLFQLLRCDIRALVRPAPLRENRATHGDWHQ

SEQ ID NO: 256992 - protein, 92 aa, Zea mays
  unsure (1)..(92): unsure at all Xaa locations
  Clone ID: MRT4577_165965C.1.pep
TFIRTFLGFSIFIKPTSSYIFWLLQVPEAPEFPILKPNVNCMHQEWRNFPTAYKGMXTGHYKHPTMIPKPNASYDLCIWHAYFGMPVNCDDP

SEQ ID NO: 256993 - protein, 87 aa, Zea mays
  Clone ID: MRT4577_165966C.1.pep
MSASRSSSPNSMSQWSQKENKMFEEALAYYGEGTPNRWDKVSSAMGGIKSAEEVRCHYENLDYDVKMIESGNVPYPKYKTQGFWTRG

SEQ ID NO: 256994 - protein, 93 aa, Zea mays
  Clone ID: MRT4577_165967C.1.pep
RALTVPELTQQVFDAKNMMAACDPRHGRYLTVAAVFRGRMSMKEVDEQMLNVQNKNSSYFVEWIPNNVKTAVCDIPPRGLKMAVTFIGNSTAI

SEQ ID NO: 256995 - protein, 224 aa, Zea mays
  Clone ID: MRT4577_165968C.1.pep
LNFNFSIHCVMVKGENLMNGECTKIKVWLNDLAGSEWAAKTDAQGERLKQAQNVNNSLSTLGDVICTLVTKTSHIPFSTGGDSKTLMFVQISPNENDVGETLCSFNFTSRVQSIELGRAKKQVDVGELSRYKLMVGRAKRDSKNKNAHNMSMEERIQALEVKNKAKYMLTLNLQEKANSTQYLVMEPNPIDTQSGFNNRLSIIYAIRTYQQCVVHIIEGVVVLT

SEQ ID NO: 256996 - protein, 101 aa, Zea mays
  Clone ID: MRT4577_165969C.1.pep
MSASRSSSPNSMSQWSQKENKMFEEALAYYGEGTPNRWDKVSSAMGGIKSAEEVRCHYENLDYDVKMIESGNVPYPKYKTQGFWTRGKVHGTSKANWKHIT

SEQ ID NO: 256997 - protein, 67 aa, Zea mays
  Clone ID: MRT4577_16596C.1.pep
SRASGTQSLACRKIRNIVGSTVAIWIRYYNAGVKMNNIARVSAARACNALVFSWYRMSAIERCAQCT

SEQ ID NO: 256998 - protein, 165 aa, Zea mays
  Clone ID: MRT4577_165970C.1.pep
MASSSSSLTRLFIPPHRAHHEAAMAASAGASLRNGGGMQMLDLVMQRWAEMVLCCGADWNCVSQLWNRVVLRKWLNIGAGSGDSDFSADEHDTSEGETDREGMSGLNHALCNEERILGGLGASTTGDEMSNLPYCLRMHRSEISRAQYVDVRELRIYVGTWNVGG

SEQ ID NO: 256999 - protein, 117 aa, Zea mays
  Clone ID: MRT4577_165971C.1.pep
MANLNITNILEKMTGKDKDYRYMATSDLLSELNKESFKADQDLEPKLTITVLQQLEDASGEVSGLAVKCLAPLVKKVGEDRVVEMTNKLCDKLINGKDQHRDTASIALKTIIAGGTT

SEQ ID NO: 257000 - protein, 214 aa, Zea mays
  unsure (1)..(214): unsure at all Xaa locations
  Clone ID: MRT4577_165972C.1.pep
WISTCQSEGSSSPRSRHAPTSATSXPPCRPPRWPDGPSATTTTTTSPPPPPRGCPRRERRRCAGASSASSPMRGPATPPAPRARARAAPXAEAAPPQPQPLLLLLRRPAATEEPRPLLRMRXRRRRHAPAPPEASSCPRSPATRAAAAAPARRRTSAGTAASPPPRRPREDVRSLAWQRRLHCRPCRRPERLLLLRRTGETPACSPPSPPRRRG

SEQ ID NO: 257001 - protein, 70 aa, Zea mays
  unsure (1)..(70): unsure at all Xaa locations
  Clone ID: MRT4577_165973C.1.pep
LWRVLGVGDPARCVAQITSGITSGDNGVSAAQPXLLSGGSQRAPGEQGQRSALXWCRVLQSGVDELIARL

SEQ ID NO: 257002 - protein, 49 aa, Zea mays
  Clone ID: MRT4577_165974C.1.pep
RSSWYLESQVPGQEQVPQDEAHKGCCDEFMRGQAVVSQSTLGCWTVVSL

SEQ ID NO: 257003 - protein, 104 aa, Zea mays
  Clone ID: MRT4577_165975C.1.pep
FYFNFVFQLVSTFDKNSFAYSIMTTVNPKIFGFYERTGDLWWSDYRTHFYQTWNQIRVPYFVRSIAGENAWQKWENGDENVKRNHKPLKGMKILEIGLWRRSFD

SEQ ID NO: 257004 - protein, 85 aa, Zea mays
  Clone ID: MRT4577_165976C.1.pep
SLCLLQTANRILQTKMETYKYSDLSSSDILRLVQRNVDPANEIRTLVEDVIGNVKQHGDRALYDYAHQFDKVLLQKLYLDKAEHT

SEQ ID NO: 257005 - protein, 96 aa, Zea mays
  unsure (1)..(96): unsure at all Xaa locations
  Clone ID: MRT4577_165977C.1.pep
KNXEEIFHHYTEXIXFRNXQXLXPPLNTTGAXHQHXLKSPXXDQKTIQRPXTQXXKNPXPIXPPGTEFRRDSVLEFVVADPQXKXRRXGMRRXRQA

SEQ ID NO: 257006 - protein, 166 aa, Zea mays
  Clone ID: MRT4577_165978C.1.pep
MSTAPRRPFRGRGAPPPGTGYVRRGPAPAPGPADGAKTLRKPVFTTVDQLRPQTHGHTLTARVISARTVLDKPSTHIGRTRVAECLVGDSTGTVLVTARNEQVDLLKPDTTVIFRNAKIDMFKGTMRLVVDKWGRIEVTQPADFKVNQDNNMSLVEYELVDVDEEE

SEQ ID NO: 257007 - protein, 114 aa, Zea mays
  unsure (1)..(114): unsure at all Xaa locations
  Clone ID: MRT4577_165979C.1.pep
QRGRGAGAPRXFQDPQVLGGAPPGFSPEGGGPPRGXVPKGPPPVANRISDNRLFPLYPFVPKELGWVFLTGERLKSPGEECNKVFFGINQGKLLGPLLECPKEWGGKPLPLNVK

SEQ ID NO: 257008 - protein, 227 aa, Zea mays
  Clone ID: MRT4577_16597C.1.pep
ALSLYCVSGMDARAYRLSCLKGCTVFELDFPELLELKSDLLREAAASSASRQKLTVAAKSLARVPANIRDGDWIAKLQSCGYVPGRNTVWVLEGIIYYLHHADAMQVLQSIAASRSSASAVLLVDFMNKNATLLSPTMYHFYHDSPDLLLPSMGFSRVTLTQIGDPEAHFGLLSHPENLFDKLRKLPRSVEKNPDDGTPCCRLYFVEASASPDDQIMCPLNRYLEME

SEQ ID NO: 257009 - protein, 164 aa, Zea mays
  Clone ID: MRT4577_165980C.1.pep
MSTAPRRPFRGRGAMPSGTGYVRRGPAPGSADAAKPLRKPVFTTVDQLRPQTHGHTLTARVIAVRTVLDKPSTHLGRTRVAECLVGDSTGTVLVTARNEQVDLLKPDTTVIFRNAKIDMFKGTMRLAVDKWGRIEVTDSSVFKVNEDNNMSLVEYELVDVDEEE

SEQ ID NO: 257010 - protein, 183 aa, Zea mays
  Clone ID: MRT4577_165981C.1.pep
TQLCVFPNRGLHHLQLQPHPIPPPPPLGFWSEDRRCRRLPGAPAPAPGPADGAKTLRKPVFTTVDQLRPQTHGHTLTARVISARTVLDKPSTHIGRTRVAECLVGDSTGTVLVTARNEQVDLLKPDTTVIFRNAKIDMFKGTMRLVVDKWGRIEVTQPADFKVNQDNNMSLVEYELVDVDEEE

SEQ ID NO: 257011 - protein, 74 aa, Zea mays
  Clone ID: MRT4577_165982C.1.pep
RTSCTRTLECTTHPPDDGLGHTDDTPAPMFKNVTNFSQILGASSTSDEHTRITGQYMTLLMSFAEHPPLPYLIE

SEQ ID NO: 257012 - protein, 66 aa, Zea mays
  Clone ID: MRT4577_165983C.1.pep
FRHTHHDTDAVLHAVIHLLQLVLAAPDHHARALAVYEPLRDLAHSSTVPELCPDAAGLYSFKRHVA

SEQ ID NO: 257013 - protein, 48 aa, Zea mays
  Clone ID: MRT4577_165984C.1.pep
LCFWSTSTLDNLTLPWVSFAPHFESICVLPHAVRRKINNKGGRRHMNS

SEQ ID NO: 257014 - protein, 70 aa, Zea mays
  Clone ID: MRT4577_165985C.1.pep
AKWDDQIYIGGGWEITVLAPEHFEKKNKGGIKIRQVFFRANTEMVTLKDPDFDYYKAQHHIEFPNQIWQD

SEQ ID NO: 257015 - protein, 160 aa, Zea mays
  Clone ID: MRT4577_165986C.1.pep
VRVFPPRFFFLGRWAGSRSKVFFFGAPAPPLGKGFVSGGVPWFPGAHFVGTPFSVNFPWSGGVLRRFRFFYPPFFGSPEGFFFFVPLPVCGRGEFFSYWVLPGAPLVGVGSFSPFVFSWPRSCKFLPPFFLCTFSFLKQHLCYVFLPLLLIKQTCVKIKH

SEQ ID NO: 257016 - protein, 69 aa, Zea mays
  Clone ID: MRT4577_165987C.1.pep
KSPTFLPPYIGAIRSSKGNAPGASRPFTIPCSRRILRVTSYPFRHLQGSWCSLPLSPIKFSCLISTFRS

SEQ ID NO: 257017 - protein, 115 aa, Zea mays
  Clone ID: MRT4577_165988C.1.pep
MALASATSRPLLGRPAGTARPHLAVSSSSPASSIRFPRGADGGASRAAVSLRAPTPPVCDPKSLLFMFGMELDYSDALIGGGFLFQNPNATKTCGCGKSFATGKETEAAATTCNN

SEQ ID NO: 257018 - protein, 190 aa, Zea mays
  Clone ID: MRT4577_165989C.1.pep
MALASATSRPLLGRPAGTARPHLAVSSSSPASSIRFPRGADGGASRAAVSLRAPTPPAAATATSGSIAPAISLTEKALKHLNQMRAERNEVLCLRIGVKQGGCSGMSYTMEFENRENASPDDSVVEYDGFAIVCDPKSLLFMFGMELDYSDALIGGGFLFQNPNATKTCGCGKSFATGKETEAAATTCNN

SEQ ID NO: 257019 - protein, 200 aa, Zea mays
  unsure (1)..(200): unsure at all Xaa locations
  Clone ID: MRT4577_16598C.1.pep
MVVLAASIVSKSGKALVSRQFVDMSRIRIEGLLAAFPKLVGTGKQHTYVETENVRYVYQPIEGLYLLLITNKQSNILEDLDTLRLLSKLVPEYSPSLDEEGICKTAFEIIFAFDEAISLGNKENVTVQQVKQYCEMESHEEKAHKLMMQTKINETKDLMKKRANELDKMRMERGKLDKGGYSSIXSGPRVIEKTFSDMSI

SEQ ID NO: 257020 - protein, 83 aa, Zea mays
  unsure (1)..(83): unsure at all Xaa locations
  Clone ID: MRT4577_165990C.1.pep
SFCTVTDRRHFLLACSETTAFRAAGLVSGRWTLLPVLPARTRCTKRITSDCFLLHSSDTYLYAPMPVPAAVALASSCIXEXTR

SEQ ID NO: 257021 - protein, 131 aa, Zea mays
  unsure (1)..(131): unsure at all Xaa locations
  Clone ID: MRT4577_165991C.1.pep
KTTTPFILGTTHWWGGLVAYLMGSLLVNPGWVSIGFGSGGGDWVGFAFSWGFRGGVFLAFFFTSRGWVLSSLLLFWGFLFLVSLLGLPTLSLFLGXSSTSSCFLARPSSLLCALLVGCFGQGGSPPSFSLG

SEQ ID NO: 257022 - protein, 112 aa, Zea mays
  unsure (1)..(112): unsure at all Xaa locations
  Clone ID: MRT4577_165992C.1.pep
GVSEQQEGGQGLHXVFRPFLLTRLTSDVXKGLPPKTETLLKVGMPQMQKQHYRALLQKDSEVINAGGERTRLLNIAMHLLKCXNHSYLFQGAEPGPPYTTGEHLIENAGQMV

SEQ ID NO: 257023 - protein, 71 aa, Zea mays
  Clone ID: MRT4577_165993C.1.pep
EKHTLPDGQVITIEKEGYIVGEALFQPRILGLEDYGIVHQLVTSVSNVSSEYHRQLLENTMLCGGTSSMTG

SEQ ID NO: 257024 - protein, 43 aa, Zea mays
  Clone ID: MRT4577_165994C.1.pep
ADITIGKLTAGDAHRHQLDIKTIPYPAPGPITPMLPHAKLLHT

SEQ ID NO: 257025 - protein, 89 aa, Zea mays
  Clone ID: MRT4577_165995C.1.pep
KREQGLKTKPGMIQDAHSPCFRGTKLSPLCTQFKRNPPLKKTTGPKEGTKRKPREDFFSSHNHHKKPIKRISLSHNYKFLGPACQHGAN

SEQ ID NO: 257026 - protein, 97 aa, Zea mays
  unsure (1)..(97): unsure at all Xaa locations
  Clone ID: MRT4577_165996C.1.pep
AGSIPHEGCDQSEQDIRGVXPLLKNPTKYEDXRANIPKGALLGCPPRTGKTLLDKATAGESRWPLVTITGTQFXELLLDIGPSMVQNLAQEARQGAA

SEQ ID NO: 257027 - protein, 156 aa, Zea mays
  unsure (1)..(156): unsure at all Xaa locations
  Clone ID: MRT4577_165997C.1.pep
ISCSFLSTGKKHSQTGKGRQAPAQGLAPPSEPRHARGRNENHGGHPRGPRANVLVSRPARRPTRGPHTGRQGSHPNQPRERNAGHPRPGGHPPRREKPGXKQRRTSRGXKPTGGRPEEQRRPRMASAPTGARAPRARSGQKTHPEGPGARPCPPKG

SEQ ID NO: 257028 - protein, 130 aa, Zea mays
  Clone ID: MRT4577_165998C.1.pep
FHSSMLVVWTNLLRSSSAAVRLRACQQQFPSTLILIGHNSRFYSTPAPTANSTSKSSSLPPPAPNNTRKPKVELRPAPVRPQRGSQPSSSTESATRTPVKPTLNSNLQPKTPPSSSSSPFLSEIKNEAVP

SEQ ID NO: 257029 - protein, 69 aa, Zea mays
  Clone ID: MRT4577_165999C.1.pep
HYTTPVPRFKFVGNHGLAILNVGCDSQIRRYSFPLSQTKGYINKKVQNKIFIYGTISIQMLLFLPYRCF

SEQ ID NO: 257030 - protein, 206 aa, Zea mays
  Clone ID: MRT4577_16599C.1.pep
LKRVVLAASIVSKSGKALVSRQFVDMSRIRIEGLLAAFPKLVGTGKQHTYVETENVRYVYQPIEGLYLLLITNKQSNILEDLDTLRLLSKLVPEYSPSLDEEGICKTAFEIIFAFDEAISLGNKENVTVQQVKQYCEMESHEEKAHKLMMQTKINETKDLMKKKGKGEGMKRKRDDGTEDVDVKDGKKVKKEAEEPDIMYANVFVD

SEQ ID NO: 257031 - protein, 118 aa, Zea mays
  unsure (1)..(118): unsure at all Xaa locations
  Clone ID: MRT4577_1659C.1.pep
APPERSSAERAAPHARRRRKPRPPRRRRRGTPTRSRRRPRRAAXQPSPRXPPPPQATARGLRRGSRXPASATSGKQGAQGLAAFGPCSRQPSAAXPGQXRRPQRTPSPGRRNALAGXR

SEQ ID NO: 257032 - protein, 56 aa, Zea mays
  unsure (1)..(56): unsure at all Xaa locations
  Clone ID: MRT4577_165C.1.pep
EVEVLKEQIRELADXERALEQENGLLRALASPEQLAQLPSSGVPRLGPPAPNGPSV

SEQ ID NO: 257033 - protein, 356 aa, Zea mays
  Clone ID: MRT4577_166000C.1.pep
MEFKNCGSSSQPRPAVVVGEAALARQGSVYSLTFDEFQSALGGAAAGGGGGGSIPKGFGSVNMDELLRSIWTAEETQAMASASAGAGAGMPPTPLQRQGSSLTLPRTLSTKTVDEVWRNLVRDEPPQGADGGGHQQPHRQSTLGEMTLEEFLVRAGAVKENPASAPPAPPPMVPPRPVPVAPKSSAFFGDLPGADDDAATAAVGFAPVGMVDLALIPPRAAGMGGSAMAVQTAVSQLDSVGKGYSDLSSLTEPQTFSFERMIRGRRHGGGVEKVVERRRRRMIKNRESAARSRARKQAYTMELEAEVQKLREQNQELERKQAEIMEMQNNEVSEMLKDPFGRKKRLCLRRTLTAPW

SEQ ID NO: 257034 - protein, 299 aa, Zea mays
  unsure (1)..(299): unsure at all Xaa locations
  Clone ID: MRT4577_166001C.1.pep
MNMDELLRSIWTAEETQAMASASXAGAGAGMPPTPLQRQGSSLTLPRMLSTKTVDEAWRNLVRDEPLQGADGGGHQPHHRQSTLGEMTLEEFLVRAGAVRENPAPAPPAPPPMIPPRPVPVAPKSSAFFGNLPGADADTAAAAAALGFAPVGMGDLAQIPPRAAGMGGGAMAVQAAVNQLDSGGKGYSDLSSPTEPLPFSFEGMIRGRRHGGGVEKVVERRQRRMIKNRESAARSRARKQAYTMELEAEVQKLKEQNQELERKQAEIMEMQKNELPEMLKDPFGRKKRLCLRRTLTGPW

SEQ ID NO: 257035 - protein, 80 aa, Zea mays
  Clone ID: MRT4577_166002C.1.pep
ESLMESFLDIGDCMFNKILLREHNTSAGNRDRVIPPCLICRQGKCQNCSHKFLNLGGPILNNPSAWQTILYRTLRLGESP

SEQ ID NO: 257036 - protein, 94 aa, Zea mays
  unsure (1)..(94): unsure at all Xaa locations
  Clone ID: MRT4577_166003C.1.pep
RDLMISLNFDAYRXSVXWSRILPVGERKVNSHGVPNFNNLINYMVQKGLTPYNNPYXHFDLPLALEKIYGSRXSPKIPDLFTDYADFCFKTYGD

SEQ ID NO: 257037 - protein, 134 aa, Zea mays
  unsure (1)..(134): unsure at all Xaa locations
  Clone ID: MRT4577_166004C.1.pep
TPTKPTHSPTSPSCMPLLVPFEPHKVHHLMAVYKHTVAPLISEHLEPTNRHHAPILAQTAEKXALDAQAQNSXRLHASLKDLLMITRQCTAKTNFSKYVVRFNIRXLNTIIIESTLRYXIMYNFLNRLINLGLP

SEQ ID NO: 257038 - protein, 166 aa, Zea mays
  unsure (1)..(166): unsure at all Xaa locations
  Clone ID: MRT4577_166005C.1.pep
GRARGPAGSXEKGKKKKTTFQKKKKEREEKKKKIKKKKKKLSARTPIAHKGSQERGKPKFWGGGGKKRIYEGNSPLFGSFLSKKGGADKRKRGEFKPKEERPRVKENSPGRNEGISPKVWFMGQPRPRTVGSGRFKTKVSKNPIWGPNFPLKGLFARFELGNGKET

SEQ ID NO: 257039 - protein, 523 aa, Zea mays
  Clone ID: MRT4577_166006C.1.pep
TRPCPLCGSDISDLSEELRQLHTNNCLDEPAKESSPNHKKEPSVGQNVETGRVVEWLRNLGLSKYEEVFIREEVDWETLQWLTEEDLLGIGISSLGPRKKIIHALGELLKKHDDPSEMEAVLNSGNTKKTKLPMNGNKLITEYFQCSSFDQRQRRVCKANKPSNLNEKKISSAKVPTRRTAGKGKIKDTPLWCCIPGTPFRVDAFRYLRGDCSHWFLTHFHVDHYQGLTRSFCHGKIYCSSITASLVHHKIGIPWDRLHVLTLNEKLNIAGVNLICFDANHCPGSIIILFEPPNGKAVLHTGDFRFSSKMANNPVLQSSCVHTLILDTTYCNPRYDFPSQEIVIQFVIEAIQAEAFNPKTLFLIGSYTIGKERLFMEVARLLQKKVYVGAAKLQILKHLELPQEIMHWFTANEAESHIHVVPMWTLASFKRMKYLSNQYAGRYDLIVAFCPTGWAFGKGRKKTPGKRWQQGSIIRYEVPYSEHSSFTELQQFVKFISPEHIIPSVNNDGPESANAMLAQLLNE

SEQ ID NO: 257040 - protein, 136 aa, Zea mays
  unsure (1)..(136): unsure at all Xaa locations
  Clone ID: MRT4577_166007C.1.pep
MGKTRGMGAGRKLKTHRRNQRWADKAYKKSHLGNEWKKPFAGSSHAKGIVLEKXPNCGLRKRVRYQLVKNGTNIADWEPNGCRWNYREENDXIGVMDXGREGHAGGDGAGCRIYVWRASEGRLGALCKDNMDIPGD

SEQ ID NO: 257041 - protein, 263 aa, Zea mays
  unsure (1)..(263): unsure at all Xaa locations
  Clone ID: MRT4577_166008C.1.pep
MARGPKXHLKRLNAPKAWMLDKLGGVFAPRPSXTGPHKLRESLPLVIFLRNRLKYALTKADVTKIVMQRLIKVDGKVRTDSNFPAGFMDVITIEKTGEHFRLIYDVKGRFTIHRISAEEAKYKLCKVRKVQLGAKSVPFLVTHDGRTIRYPDPIIKANDTIQLDIATTKITDHIKFESGNLCMITGGRNLGRVGTVLNRERHPGSFDIVHIKDSQGHVFATRLSNVFIIGKGTKAYVSLPKGKGIKLSIAEERDKRLAAKIAH

SEQ ID NO: 257042 - protein, 55 aa, Zea mays
  unsure (1)..(55): unsure at all Xaa locations
  Clone ID: MRT4577_166009C.1.pep
VVVDSVLISEGLDCGCLGDGLWIIECIFXGWWGXVLGTQKILDATGVVXIGFEIV

SEQ ID NO: 257043 - protein, 61 aa, Zea mays
  Clone ID: MRT4577_16600C.1.pep
ASAKERRCNILHFKFQIVKIVPDLSRFYCIVKGGLMPDAIQKLQAIQLIQHDVFKTSFLTN

SEQ ID NO: 257044 - protein, 101 aa, Zea mays
  Clone ID: MRT4577_166010C.1.pep
GGFYPQNLQTKLSKAQEMPNVEYRSPNIPSSTSNYNNGGRTFPTWPEKLNPPPNQSFRGTTCHANEGDQAFNRSAWGLVIVPPGRGGQIRPFQNFGFPVRV

SEQ ID NO: 257045 - protein, 171 aa, Zea mays
  Clone ID: MRT4577_166011C.1.pep
MGKMNCFSGLLSGKSKAFKGGNKGAYAKKAASGGNDCPKVKPVEFVDMADTAVDDFVSRRGGGSVHASACSSSFVVHAATELPRHATAENGEDEAAVNKDSSSAGAGSPGYSIGRMSPTASPKLTRSCSNMETARSVPPPGSDSDLPARSRSHNDLLKNCPPESRRPPAAA

SEQ ID NO: 257046 - protein, 94 aa, Zea mays
  Clone ID: MRT4577_166012C.1.pep
APMFLGRRGNDYHAVPFQSRRLQYLAPPAGGAVLHHRTPVLLPCAHGTRVPPPPGPCAPPGPFLLPTGPSRTPPAESCAPPRLSQRPSASLRRS

SEQ ID NO: 257047 - protein, 374 aa, Zea mays
  Clone ID: MRT4577_166013C.1.pep
MAVVEEDAAASADPAAASDPAAGSSENEITVEEASFVHSEPPQDGSAPPVVSSDMEALHDKVKKQIIKEGHGRKPLKFATCFVHYRAWVQGSSHKFEDTWQEQHPIELVLGKEKKQMSGLGIGVGSMKSGERALLHVGWELGYGKEGSFSFPNVPPMADLVYEVELIGFDDVKEGKSRSDMTVEERIAAADRRKIEGNAYFKEKKLEEAMQQYEMAIAYMGDDFMFQLFGKYRDMALAVKNPCHLNMAACLIKLKRFDEAIAQCSIVLTEDESNVKALFRRGKAKSELGQTESAREDFLKAKKYSPEDKEIIRELRLLAEQDKALYQKQKELYKGLFGPSPEAKPKKAKYLVVFWQCLVSFILYLAGMFKRKNE

SEQ ID NO: 257048 - protein, 100 aa, Zea mays
  unsure (1)..(100): unsure at all Xaa locations
  Clone ID: MRT4577_166014C.1.pep
PRVRPRVRPRVRAGLRGDACGFPSLAKCCAALRLPGLGRAVHXRISRGRCXSRDAFVRTYLVDMYAKCGRLPDAHRLLDETPCSSRTLVXWNCMILAYGR

SEQ ID NO: 257049 - protein, 84 aa, Zea mays
  unsure (1)..(84): unsure at all Xaa locations
  Clone ID: MRT4577_166015C.1.pep
VVVAGLPLRWXXRVGWVRAAAFAXGRXGSXWFGGSVLVGPVVVVALCWLCXVRCGXXLLLXLGPLVVVXRLARXGLLLLVAPPP

SEQ ID NO: 257050 - protein, 121 aa, Zea mays
  unsure (1)..(121): unsure at all Xaa locations
  Clone ID: MRT4577_166016C.1.pep
KAEAPENTTSRERNRTAATKANERHQAGETRRDGGRARRRRRRNRQTGVERPRAGTGTHTRHGTATREAAARGKADDVATGSAIDRHTRPKGTATXGHHPGKRELPATPDTWVDRGTERVE

SEQ ID NO: 257051 - protein, 55 aa, Zea mays
  unsure (1)..(55): unsure at all Xaa locations
  Clone ID: MRT4577_166017C.1.pep
SLSYSNNXINYLXLTKXMTPYINLYHYDHPLALDKKYARXCNTXIADLLTDYPDF

SEQ ID NO: 257052 - protein, 179 aa, Zea mays
  Clone ID: MRT4577_166018C.1.pep
NPPFAPLIFPQTIANQIASQNPSTLWATLRWPWWWPPGTLASIESAPPFLKGPWVFLRVFFFSPRNKSIFNVKVLRNFFGILALVQATTILPGRVRKPLKVQKVSTQNRVKKVGLVALAKVPVPVFRAPPEAAGLVAEAAPPLLETAFQAAAAAAAARTGLVPDPNTRFFFFFFFFFFF

SEQ ID NO: 257053 - protein, 92 aa, Zea mays
  Clone ID: MRT4577_166019C.1.pep
MRRSVSSESASSSSAAAGASSFRECGSSCFSCSASFSSTSVGAAQRSSAREIWLPEDTGTDDAKALQEKAARKAVHAAGGACAKGGKNTGKK

SEQ ID NO: 257054 - protein, 81 aa, Zea mays
  Clone ID: MRT4577_16601C.1.pep
MNSPKMELSPWLVFSLGFLAQALVILADTNAQDASGLNGIQDSWNKKPSNWRVGTDPCGDKWNGISCTTSRVTAIRLSSFG

SEQ ID NO: 257055 - protein, 57 aa, Zea mays
  unsure (1)..(57): unsure at all Xaa locations
  Clone ID: MRT4577_166020C.1.pep
PPPQPFFLLXLFSFFFFFFFFFFFFFFFFFLNPNRLPMLRMMSSKDLTAAEQLSPSQ

SEQ ID NO: 257056 - protein, 38 aa, Zea mays
  Clone ID: MRT4577_166021C.1.pep
KDFSLVHSYPYMLWRPFFFLHYVFYFELLFLACFFTSG

SEQ ID NO: 257057 - protein, 66 aa, Zea mays
  Clone ID: MRT4577_166022C.1.pep
CCMLYSLLMVSSCGYTTATYEGLVQRIYTDSSGLSEIVRFVDHSDVLKRVNSSLKMHSMSRSPNLS

SEQ ID NO: 257058 - protein, 127 aa, Zea mays
  unsure (1)..(127): unsure at all Xaa locations
  Clone ID: MRT4577_166023C.1.pep
MSWPPSSGWGQRRRNVSAAALLFLHLLLLFSAPGTCTPARGVAPPPTTEQDGYSWSWWDPAATAARRGLVGPGSSPPTCRSRCGGWHPCRPXPSASXPAGASRSYTYPEGWRCKSGNKLFMPLTGPT

SEQ ID NO: 257059 - protein, 97 aa, Zea mays
  unsure (1)..(97): unsure at all Xaa locations
  Clone ID: MRT4577_166024C.1.pep
RCXRFFCVXASXXXXGCPXXRPRAXXVAPXRXGVVXCLXGGGXVLXXXXXLXWXCXCCXXWPCSGSXWXXWPSSVXXXXWXCXCXWLCPWPCPWXWP

SEQ ID NO: 257060 - protein, 65 aa, Zea mays
  Clone ID: MRT4577_166025C.1.pep
APFMFSRAIEKIESSHNVHGRPSKIDYHPEGLFSSWKLSTNLKLVPYGNLNQNVKWSASVCFHEQ

SEQ ID NO: 257061 - protein, 57 aa, Zea mays
  Clone ID: MRT4577_166026C.1.pep
LMAKTRAIRIHKGEDHHVIPGKYLVHLVKRPPIYRRPSIIHVDLISTKIALSLIGNA

SEQ ID NO: 257062 - protein, 131 aa, Zea mays
  Clone ID: MRT4577_166027C.1.pep
SALRNQAVQEHIILSGFVIGNRYIRRTNSGDGWSVKCDKTCLSSPPCFPSRLGHNTISCTPELHCSARESARWVSTALPRSPPKGKPNKSQPLYVHSIVGFRSVPSCPGRSAPQRDGGVVHQRPGGLPTRP

SEQ ID NO: 257063 - protein, 120 aa, Zea mays
  Clone ID: MRT4577_166028C.1.pep
PVGMGSKKGKFFWPLWGPLFSLPLSMGAIFGLSPGTGSVKNSQYFPLKKFWGGFRTGLFLGGWRRGGVGKPPPLFSPTLKFVLGGPGKSRGDFWAPFGGKGPGPKFIFFYFKPRSPWDFF

SEQ ID NO: 257064 - protein, 159 aa, Zea mays
  unsure (1)..(159): unsure at all Xaa locations
  Clone ID: MRT4577_166029C.1.pep
MPINMIVLRSHLEVYHPGALKGAFAEFISTXLMFVFICQCSGLGFSMLSSRVPTTPAAIIAGVVAHAFALSLALFVGANMCASLFNPDVNFGAFLGGYITLFLRLLYWVVHLLGYTVACFLLRFLMGLXATGTFRLTFVLTCEALVLEIVLTFGLIFTV

SEQ ID NO: 257065 - protein, 132 aa, Zea mays
  unsure (1)..(132): unsure at all Xaa locations
  Clone ID: MRT4577_16602C.1.pep
LLTWYTNEEMHEGIQDRDESVMDIMRDIMWATIGDTLGFMLDSYSCFKHFFHDLCARTMADHIDPEYDPAMETAIETDTEWNLAQNLLQKILKKXPKNGSPITKTIDCASDCNSFYNSFDPADDHDIDDDTD

SEQ ID NO: 257066 - protein, 322 aa, Zea mays
  Clone ID: MRT4577_166030C.1.pep
MASGSSNGEPSTAPQANRWYDLRLGSSCRDPSPTAKFCTLRYEFKPASIDKTQAGSLQSTKDNRVTVEFHNNQPGKPKVTFEGSQEEYKDNDGVLFFDGETFRLERLHRAVKRLRHVRVPGESAALNLAGTTTGVGAESQSPPLPKVSKSQTMNKPAVHSVPVEVERIDIGEPENPGPKYNNRSTYQSVTVDPFALSPDPNEQENLDILGDDDGNASPNNLAAGQEASVRGFDINLPNQDDMDDEIADVDVNDEADEGLNAADALRAQVNAEGQQGQDSSSSSGTSSSSSSGSGSGSGSGSSSSDSDGSDADSASSGGDVDI

SEQ ID NO: 257067 - protein, 88 aa, Zea mays
  Clone ID: MRT4577_166031C.1.pep
SSFFFFFFFFFFFFFFFFFFFFFFFFFFFKRNKMGETKGGVLGFAYKGKLSFYFYVKKKGGALGDLHPGFLLIAPKNGPFLPLSCPHF

SEQ ID NO: 257068 - protein, 30 aa, Zea mays
  Clone ID: MRT4577_166032C.1.pep
HTIYIDHTYSFLKTTVTIHSSDDMNIHHHY

SEQ ID NO: 257069 - protein, 85 aa, Zea mays
  unsure (1)..(85): unsure at all Xaa locations
  Clone ID: MRT4577_166033C.1.pep
EVAMQQSATEHAKGTIDMDLIMTGISASERQRRNDLVAATRNLIVEKMQLGGPSMHMIELLEELRKQSSMEIHLHELXCSWHSDD

SEQ ID NO: 257070 - protein, 65 aa, Zea mays
  Clone ID: MRT4577_166034C.1.pep
KGRLGCKVGQPSSVVLGCLIIGLSLDFLNTVFWIGLNGLGFWDLYHLTHLYSQIQTPLCTKQCFE

SEQ ID NO: 257071 - protein, 58 aa, Zea mays
  unsure (1)..(58): unsure at all Xaa locations
  Clone ID: MRT4577_166035C.1.pep
KVQEEFWYFGQISRFSLVGCVRGVTVVCLGWTQGRPGWVSFFFPSLGXRREYTVTVRI

SEQ ID NO: 257072 - protein, 159 aa, Zea mays
  unsure (1)..(159): unsure at all Xaa locations
  Clone ID: MRT4577_166036C.1.pep
WPTPSLGVDHRARPRPPLLATMSAGSLAAGGDDNAAGRRASCKHGLALPVVLLLAEIETGPFLPXXXXXXXXXXXXXXXXXXXXXXXXXXXXXXXXXXXXXXXXXXXXXXXXXXXXXNTKDIAAGRRRSHPSSLQMRGRGQEEHANDQNCTPRRHGSSP

SEQ ID NO: 257073 - protein, 60 aa, Zea mays
  Clone ID: MRT4577_166037C.1.pep
GGARLFHSEPLRLVHQALLLVILSLAELRVLPPQALSIRHHCLSPVVRAKEALCSESVSR

SEQ ID NO: 257074 - protein, 43 aa, Zea mays
  Clone ID: MRT4577_166038C.1.pep
WFAYLNTTGFFMGNRLVWKHLCRGERRQQPGGYPLALELNNLL

SEQ ID NO: 257075 - protein, 72 aa, Zea mays
  unsure (1)..(72): unsure at all Xaa locations
  Clone ID: MRT4577_166039C.1.pep
LGSLQRSPLCLGPWSRRPLPSRLRVGSRTFWLCIRLRHMSIMPQGHLSPPLXXRRPPQNTWHCVLVEVHLPV

SEQ ID NO: 257076 - protein, 82 aa, Zea mays
  Clone ID: MRT4577_16603C.1.pep
AFPLQHRPSPLRGGSAPVGARGPAGCIVVVSGGGGMRGHTGSARVWSRARWRSALDQGPSTLRRRERRRHARVLERVPPPRG

SEQ ID NO: 257077 - protein, 40 aa, Zea mays
  Clone ID: MRT4577_166040C.1.pep
TLWDPGGPSLQHPLRLDICSSDRMKQGCYITSWMLPRMNI

SEQ ID NO: 257078 - protein, 103 aa, Zea mays
  Clone ID: MRT4577_166041C.1.pep
GKKKRPGLVLVLKLSVFFFFFSIPVFFVLRPGPKFYKPLFHRLFFPQVVRTWEPLFFFAPPFFYPSRPLRKISLTLTPWKAPKKGLFPIFLFFLKPVRGPVGF

SEQ ID NO: 257079 - protein, 72 aa, Zea mays
  Clone ID: MRT4577_166042C.1.pep
SIFSCRTPDPFLSTGLVSWSTGLDPGQLSPAALSVNHLLSDGIQDRCASPPCSCTDCPYDPGVAVPALVLRR

SEQ ID NO: 257080 - protein, 75 aa, Zea mays
  Clone ID: MRT4577_166043C.1.pep
LVEVLVCDCPQKKGRTNGAAILGPFTLYSRSLAQPPWTCYQITRGPTIWCPSRITQNGISLKDNVHTARINTWIQ

SEQ ID NO: 257081 - protein, 44 aa, Zea mays
  Clone ID: MRT4577_166044C.1.pep
FGCFKVLGKGMLLSNPIIVRAKLISKIIEKRINVTGGTVLLTAT

SEQ ID NO: 257082 - protein, 95 aa, Zea mays
  Clone ID: MRT4577_166045C.1.pep
TPMGEWDPRGRPGSSSVSHRCPLPAPLESPPPTRGADASPPLSSTAPPLAPSLHQGIVLFLVYGWKRQNQLISVFITNPRCRCCRQICVEENRYA

SEQ ID NO: 257083 - protein, 57 aa, Zea mays
  Clone ID: MRT4577_166046C.1.pep
LSPNVGLRKGCGHLLTSMPHQKNLTNSMRHIKRQNLVLKYLDLESGHSFTCANNVLE

SEQ ID NO: 257084 - protein, 57 aa, Zea mays
  Clone ID: MRT4577_166047C.1.pep
ATIAYQIPILACMEMRSGAKANMNRTSHYLIDYISCEMGCFISSIKNILILAKHHFI

SEQ ID NO: 257085 - protein, 72 aa, Zea mays
  unsure (1)..(72): unsure at all Xaa locations
  Clone ID: MRT4577_166048C.1.pep
IDVCIYRKLYNLEKTKHLIIWKNLHRLTTPAPKPPDESSIDGLRFLSFMQRAAAGRCXRPRRQPRTAPPVAA

SEQ ID NO: 257086 - protein, 36 aa, Zea mays
  Clone ID: MRT4577_166049C.1.pep
FWGCFQYYFRIYSAARFIHDRSSTSHRSNRKCLSLS

SEQ ID NO: 257087 - protein, 58 aa, Zea mays
  Clone ID: MRT4577_16604C.1.pep
MPAPSAVASAVERLQAAAQDAAKSSSRSAGAFSEQAQQALVSRTAGVHTQEKAAQMGC

SEQ ID NO: 257088 - protein, 46 aa, Zea mays
  Clone ID: MRT4577_166050C.1.pep
STQATQGPVTLLLMTKQTPPYKRQIYMEPTHSIDTNLTNSCITLKT

SEQ ID NO: 257089 - protein, 55 aa, Zea mays
  Clone ID: MRT4577_166051C.1.pep
QILLFLVDAKSRVEDIWKKMNSGFPNKMPKPAMTKLSTTEKQKKNKPTNVSNSCL

SEQ ID NO: 257090 - protein, 63 aa, Zea mays
  Clone ID: MRT4577_166052C.1.pep
GQSPCRTHILPTKQGSEVISMDRNLGRVQRIQVNGSLRREPVHRGYGSQPRGPILLLICGTWP

SEQ ID NO: 257091 - protein, 99 aa, Zea mays
  unsure (1)..(99): unsure at all Xaa locations
  Clone ID: MRT4577_166053C.1.pep
TRQTNATQEQQQTPPAESHPARANPVANRQQQXQAANPXAXANXXANQHQQLQQFXPAQAKQARENPAAYRQQQQLLSSSPLAGAKAPTHLQQELXQQX

SEQ ID NO: 257092 - protein, 122 aa, Zea mays
  Clone ID: MRT4577_166054C.1.pep
PTRPGSPHHQHAKISRSQLVFAEKMFAHRKGVKGLGKGGPNRHRKALRYNIERITKPAIQLLARRGCVNRISGLIYDETRGVLKIFLENVIRDAGTYTEHARRKTVTDMDVDYALKRPGRTL

SEQ ID NO: 257093 - protein, 97 aa, Zea mays
  Clone ID: MRT4577_166055C.1.pep
YSAAFPCSRGYSFGLSSMESNKVPPAGVFFILKPSFSSVSSFKAILLASAILPSVAYSSSEALSDASKSRGMAGPGPQNVLMYLSFVVARSIVTPCF

SEQ ID NO: 257094 - protein, 92 aa, Zea mays
  Clone ID: MRT4577_166056C.1.pep
IPLCSPKLKLKRAPQKVYPCGQNQDPQIMPMFLRLMVVKAVFPPILARLCWKMFLLFHPRGSMFPHVFNRVNCKGFFGEFFLKPPFPLWLSP

SEQ ID NO: 257095 - protein, 192 aa, Zea mays
  unsure (1)..(192): unsure at all Xaa locations
  Clone ID: MRT4577_166057C.1.pep
HHRTRGRAPTVAAKTFTLLMLLXLSAAADTXPICRHGAQATIGAFLTAYVSPXAAASVXENPIAXPYRIQQAGEEGIIPLSPSCVQQPTALLQQEPLVALXTHNIKAQQLQQLGLGNLAAYSDHEPCLTLNQLGALNSAAHMQQQLPVSQLAVGYRQKTLTFNQLATLNSVAYSQQQRLPPFSQLADVSPIG

SEQ ID NO: 257096 - protein, 52 aa, Zea mays
  unsure (1)..(52): unsure at all Xaa locations
  Clone ID: MRT4577_166058C.1.pep
QSTLFSALACEAYSQSLVFLHCAKHIQHYWESTCWDXLWACGVRLSSGKRRR

SEQ ID NO: 257097 - protein, 172 aa, Zea mays
  unsure (1)..(172): unsure at all Xaa locations
  Clone ID: MRT4577_166059C.1.pep
AAPCPWPPPTPPPSFPWSMPPLAREQVPPCKPPPPXPQSSTSPSPTCTSPQARAWVCLLPPAPPXRGRPCPCPPPXLSPPRPAPLSLPLLAASSLGMGPSSSPVFGPSPKLPLPTPSTLAPAPSXCAESPPLARPTXPLLASPPTDIPSPNPRGSTSSRPRRLLRPLPSPGL

SEQ ID NO: 257098 - protein, 103 aa, Zea mays
  unsure (1)..(103): unsure at all Xaa locations
  Clone ID: MRT4577_16605C.1.pep
MKDGTLLGGGAFSLGRESRQASTARPYPPPXLWGRDLPLYYFGFLSVAFCVLRXLFRYKACSWSENIFFAQLLWVLNKFFTHLPQXPMCPHVYCYWSGDELFF

SEQ ID NO: 257099 - protein, 65 aa, Zea mays
  Clone ID: MRT4577_166060C.1.pep
NERCGISYLQHRTQLGSEVYKYQPLRPNKYQPDCTLLSLGLGFLFLHCRETGNQALATTTLLVGS

SEQ ID NO: 257100 - protein, 65 aa, Zea mays
  Clone ID: MRT4577_166061C.1.pep
KVFCFPCRDGHVFLFPCCTVGFFFSFLAGHQVDCSLLMVSSIKSYVGLLCAGQLFLLILLGVSVH

SEQ ID NO: 257101 - protein, 104 aa, Zea mays
  Clone ID: MRT4577_166062C.1.pep
SIQVYNQKNNEDIHKSARKNGKMTNYPNEISTLNPCRASRKCRTPNSQPKFAIESEEDASGDLPDDGSDTSTFPARTAALKLESRCARITVPAPSSDSPPLGTT

SEQ ID NO: 257102 - protein, 86 aa, Zea mays
  Clone ID: MRT4577_166063C.1.pep
MVLQNDIDLLNPPAELEKLKHKKKRLVQSPNSFFMDVKCQGCFSITTVFSHSQTVVVCPGCQTVLCQPTGGKARLTEGCSFRRKGD

SEQ ID NO: 257103 - protein, 105 aa, Zea mays
  unsure (1)..(105): unsure at all Xaa locations
  Clone ID: MRT4577_166064C.1.pep
LPSFLLYHISLSNXSLSLLFSPIHIQSHPLHNPLXPSSXLFSFXSSFSQFFHXSPHTKCSFSSSHILWSFYIQRFLXXFXPTXXRKGYCHFYQGLSSMNIISIPL

SEQ ID NO: 257104 - protein, 216 aa, Zea mays
  Clone ID: MRT4577_166065C.1.pep
PAGTDLVLYPGRVSGPIPAGLGAGLRRLRLLSLAGNQLTGPVPASLAGLPDLHTLDLGGNRLDGAVPPDLLLPASPSLKVLILANNGGVSGEIPAGFASSGLFHVDLARNALAGALPPLPPTLRYLSVAGNTMEGTLEGAFCSGDGGSASPPLPADLAFLDLSMNNFSGQIPAALFALPGLSSLLLSRNNFTGALAVPSQQQQWAVVDVSHNGISG

SEQ ID NO: 257105 - protein, 86 aa, Zea mays; identical to SEQ ID NO: 257102
  Clone ID: MRT4577_166066C.1.pep

SEQ ID NO: 257106 - protein, 86 aa, Zea mays; identical to SEQ ID NO: 257102
  Clone ID: MRT4577_166067C.1.pep

SEQ ID NO: 257107 - protein, 186 aa, Zea mays
  Clone ID: MRT4577_166068C.1.pep
MAPSAALAPVAFRSAFSTPLASNPTRNRINIEGAFCLPCSARKRASYRSFRVYSLFGGKKDKDENGDEAPSKAGIFGNMQNLYETVKKAQMVVQVEAVRVQKELAATEIDGYCEGELIKVTLSGNQQPIRVEITEAAMELGAEKLSELVNDAYKDAHQRSVQAMKERMSDLAQSLGMPAGLGDGLK

SEQ ID NO: 257108 - protein, 77 aa, Zea mays
  unsure (1)..(77): unsure at all Xaa locations
  Clone ID: MRT4577_166069C.1.pep
RRVRFAKLSXCYFFMFAGTAXKGHRLKCKLXFHNTFNYKXEPYLXSALNRHFSDGIYIYFENVFGEILYSFLTNINP

SEQ ID NO: 257109 - protein, 92 aa, Zea mays
  Clone ID: MRT4577_16606C.1.pep
MPAPSAVASAVERLQAAAQDAAKSSSRSAGAFSEQAQQALVSRTAGRVVSLSTCAKVSAISFAIGVVAGFTLKKRLRRWAARLLKRIKDDDY

SEQ ID NO: 257110 - protein, 213 aa, Zea mays
  unsure (1)..(213): unsure at all Xaa locations
  Clone ID: MRT4577_166070C.1.pep
MAPSAALAPVAFRSAFSTPLASNPTRNRINIEGAFCLPCSARKRASYRSFRVYSLFGGKKDKDENGDEAPSKAGVFGNMQRLYETVKKAQMVVQVEAVRVQKELAAXIYIINLSISCRCKIASLCDFFLLFFRTEIDGYCEGELIKVTLSGNQQPIRVEITEAAMELGAEKLSELVNDAYKDAHQRSVQAMKERMSDLAQSLGMPAGLGDGLK

SEQ ID NO: 257111 - protein, 63 aa, Zea mays
  Clone ID: MRT4577_166071C.1.pep
DNFCLFTKDPTKFGASKKGDATTTTTNECTPVKNDIIALTDETLNTKILNYYHLTNNDVKTAL

SEQ ID NO: 257112 - protein, 41 aa, Zea mays
  Clone ID: MRT4577_166072C.1.pep
RCCVKGVLAIGARKQLFFFSIHMFSLQVILPLLFGKGIIGK

SEQ ID NO: 257113 - protein, 59 aa, Zea mays
  Clone ID: MRT4577_166073C.1.pep
ALITTCIWRMHFGLENSYLLDTTQLLSLFTGYSRLLMILPKRFLVLYGPHQMCTTMNWA

SEQ ID NO: 257114 - protein, 392 aa, Zea mays
  Clone ID: MRT4577_166074C.1.pep
PTRPHYHSSSVQCIEALGERIWVGYASGTIQVMDVEGNLQAGWIGHSCPVISMAVGDSYIFSLAHHGGIRGWSLSSPSPLDDILRYELASRELSYTRLENLKILVGTWNVAQEKASPEALKSWLGGAFFDVGLVVVGLQEVEMGAGVLAMAAAKESVGLEGSANGQWWIDSIGKTLDEGISFHRVGSRQLAGLLIAAWATNDLRPHVGDVDTAAVPCGFGRAIGNKGGVGLRIRVFGRRICFVNNHFAAHQENVSRRNADFDRIYRAMTFTKPQGSAASATAVQLHKAANENQADEGRPDLAEADMVIFLGDLNYRLDGITYDEARDMVSQRSFDWLRERDQLRAEMKAGNVFQGMREGPIRFPPTYKFQRHQSGLSGTLHLMLPHSTCLAS

SEQ ID NO: 257115 - protein, 72 aa, Zea mays
  Clone ID: MRT4577_166075C.1.pep
DAGRSRSSRSPSPVGPPSLEARAGFVAPKLRQSAARVRIRMRQVSEACTYSSPPPTVPAANAAAFLQCRGRG

SEQ ID NO: 257116 - protein, 61 aa, Zea mays
  Clone ID: MRT4577_166076C.1.pep
SSLSLSHTYIYSIPHSNIKYIHIYNQTNYVHGRHQLISPPCHHRRFIRVLAASQENVSSSM

SEQ ID NO: 257117 - protein, 56 aa, Zea mays
  Clone ID: MRT4577_166077C.1.pep
YTVIIQKTRKVPANEEPIMKGSFKVGEPGKLVLTVNNPASKKKKLLYRSKVKSISE

SEQ ID NO: 257118 - protein, 53 aa, Zea mays
  Clone ID: MRT4577_166078C.1.pep
ACFRHMLVGSHHNPVYYTHNALVFLSPPIRYLQRGVYNSATFENKSGHSIANT

SEQ ID NO: 257119 - protein, 112 aa, Zea mays
  unsure (1)..(112): unsure at all Xaa locations
  Clone ID: MRT4577_166079C.1.pep
MAEAAVENRCFYCGLDWATRSESLENAFGYYGEILDSQVITDRETGRSRGFGFVTLYYKNSMLDAIENMNGKELDGRNITAYQAQAQXGSGGGGGGGYRGRRGGGGYGGGRR

SEQ ID NO: 257120 - protein, 64 aa, Zea mays
  Clone ID: MRT4577_16607C.1.pep
LLSGLPYPPHAPQEALGPGWGRRWRFHCSLHLLYLALLRCLSHLRCLLVRAIFSFRPTVSLSFL

SEQ ID NO: 257121 - protein, 106 aa, Zea mays
  unsure (1)..(106): unsure at all Xaa locations
  Clone ID: MRT4577_166080C.1.pep
KNPHXRXAAXLAYXWCSLVLQNGKSVPLTEVQIGDKLLEFRQKQDGIIETGCHTISGYGAHGAIIHYTPTTESCNCVRSDNLYWLDRGAQYIDGTTDISRTAHYGE

SEQ ID NO: 257122 - protein, 88 aa, Zea mays
  Clone ID: MRT4577_166081C.1.pep
FLTITSITGYGDKEASAILLWQDFCPVLFIISILVDIGSRCFVLNLDKWPSLSFIFGCVLYLSRRIRILWVFGNSCISAKQRLENGVF

SEQ ID NO: 257123 - protein, 123 aa, Zea mays
  unsure (1)..(123): unsure at all Xaa locations
  Clone ID: MRT4577_166082C.1.pep
DXAYXCAVWNXXGGRGGXKYVPGISVATDNGPFKGAMQAFVEKMVSMMKLEGLLEWQGGPIILSQGGREYGPMEFVMGAGAKPYANWAVNMVVATGPXLPCVMCMKDDARDPVIPICPGFYCD

SEQ ID NO: 257124 - protein, 164 aa, Zea mays
  unsure (1)..(164): unsure at all Xaa locations
  Clone ID: MRT4577_166083C.1.pep
MPKEKSHITVAPIXGLDHSGQPTTTGHPIYIPXGIDIRAIGRLXMEDAVMNQRSFKYTRKVDHIKVDRDTRITIEIALCHLVTTKNYCTDIDAPVHXDFIRXMITVTVPQTDXLILSYDSTTDVSEDQISXDVLTRRTSHLLLXYSVGSSMMTXCCDPRHCTTP

SEQ ID NO: 257125 - protein, 51 aa, Zea mays
  Clone ID: MRT4577_166084C.1.pep
VHLNRTKLLSEPTCYFEIGLYSYNQELTALSDHSYVLVAAILYATEQGYQS

SEQ ID NO: 257126 - protein, 209 aa, Zea mays
  unsure (1)..(209): unsure at all Xaa locations
  Clone ID: MRT4577_166085C.1.pep
MGGVPWNRVELTLLVLYALGFYLVVIWRSLRLSHEYSGRLYGLRVGSLAGHLNDLSDAQWRNFRGNLPILTVVMGAFLILVNTLRYCYGLKGRGTALLWLILSLSYLCYLHGACVVFVLLIALINYSIVKLFAHYKYCTSLIWSFNLSVLILNRVYEGYSFSLFGQNMAFLDNYRGTFRWHICFXFFVLRMFSFGCDYCWTIIXSHFDF

SEQ ID NO: 257127 - protein, 83 aa, Zea mays
  Clone ID: MRT4577_166086C.1.pep
CGRAGRPQSHSCSSENRQAHHRPCGASPQHKSGSTVLCWLPHMIVWRRDQPGISTSWGHYCSCEEGQSFKRTLLSRRPPWVGQ

SEQ ID NO: 257128 - protein, 508 aa, Zea mays
  Clone ID: MRT4577_166087C.1.pep
VLHWLDAGGLCNRHPLLRSLPAGPVFPSQVASPYCRPLLLLSSHLTTHRSPSKIARRPWRSPSLPPPAPSRPRPAPPVTVHSALVTYTSMLALLSLCPPFVILLWYTMVHADGSVVRTYEHLRDHGVLEGLKAIWPMPTLVAWKIIFGFGLFEAVLQLLLPGKRFEGPISPAGNVPVYKANGLQAYAVTLITYLGLWWFGIFNPAIVYDHLGEIYSALVFGSFVFCIFLYIKGHVFPSSSDSGSSGNVIIDFYWGMELYPRIGKYFDIKVFTNCRFGMMSWAVLAVTYCIKQYEMNGRVADSMLVNTALMLIYITKFFWWESGYWCTMDIAHDRAGFYICWGCLVWVPSIYTSPGMYLVNHPLNLGPQLALSILLAGMLCIYINYDCDRQRQEFRRTNGKCSVWGKAPSKIVASYQTTKGETKTSLLLTSGWWGLSRHFHYVPEILSAFFWTVPALFNHFLPYFYVIFLTILLFDRAKRDDDRCSSKYGKYWKIYCNKVPYRVIPGIY

SEQ ID NO: 257129 - protein, 76 aa, Zea mays
  Clone ID: MRT4577_166088C.1.pep
SSSSSEDESSIQDDIPSKYSSMKVGHPVLRIEGSHLLAAVVVSIDKGGNELIAAVSFSLEASEAVAELRSSFQLKR

SEQ ID NO: 257130 - protein, 79 aa, Zea mays
  Clone ID: MRT4577_166089C.1.pep
PPKGFFLSFERNIPPFPTKTKWQTHQKKLQSYSLAGSQDPYNGSGIAPKLQKVELNGSYLGWLLLLTNPWKKLLTASIS

SEQ ID NO: 257131 - protein, 105 aa, Zea mays
  Clone ID: MRT4577_16608C.1.pep
FFFFFFFFFFVFFIFYFFFIFFFFFFFFFFSRGQLTIIGGKGKFTKYPSKMGFYYHKNKPGKQREKKQLTRHDTTVENGANPKIVGESALFFSLVFLKTLNTEWP

SEQ ID NO: 257132 - protein, 71 aa, Zea mays
  Clone ID: MRT4577_166090C.1.pep
EIHHPIMPVCRSRTVPSSISPMMDYECRHERGHAYVRAVCLMGLVQTWSLLPDCSSLGGVNVSVLSLVRTR

SEQ ID NO: 257133 - protein, 146 aa, Zea mays
  unsure (1)..(146): unsure at all Xaa locations
  Clone ID: MRT4577_166091C.1.pep
MCDESLGEHAHERGALGALMNMCLQRLHGTSGKWAATLTLAYKRQPPKRPEDAKLYTPATEGLLRISTGHFHIVCDNSTYVMLYXLLLRIFKSCWMIQAAERHMLVETATDVGLEYICALINXLICIDLNFXELIPKPLEALPQNY

SEQ ID NO: 257134 - protein, 88 aa, Zea mays
  Clone ID: MRT4577_166092C.1.pep
MDNQSTIAHNKILVLHDRTAEFSEVELGRFVFDRRLFTTEPKNTGNHIVIANLYSNAGKWEEAEIIKERDVGSWAPSVLVGIEGWSPC

SEQ ID NO: 257135 - protein, 77 aa, Zea mays
  Clone ID: MRT4577_166093C.1.pep
TTIHNNFFNNPLEKRGGHNQKVLQHNGFKTTSGTKVVHNPYYYLIIFLLDFITIIIFFILIKYITNLLFFFLSASIS

SEQ ID NO: 257136 - protein, 141 aa, Zea mays
  Clone ID: MRT4577_166094C.1.pep
GGGETVFLKKKNRPRLFLTFRQPPPLGGKQPKIISGPVPPVKGGGGAARQAFFYKTRGKKTPPPPLRTKGGGGKKKPPPPAPPHKKGGFLLGGPPGLSPGMLRGPTSRGRSSPGRPWNISPQSRSRVWGRGTPVCFCLTNP

SEQ ID NO: 257137 - protein, 67 aa, Zea mays
  unsure (1)..(67): unsure at all Xaa locations
  Clone ID: MRT4577_166095C.1.pep
MATAYGPMARQVMKSRLVVHSRPRGLSGAAAVTRRPGRFTVKAIQPEEATXQVVQRINGDPFIGSLE

SEQ ID NO: 257138 - protein, 61 aa, Zea mays
  Clone ID: MRT4577_166096C.1.pep
GGNPLSLTVYLRVPLLSLGAKASPLGVNLLTESTPTPLLGPWPPFFRGCLNLYMSLFYKPI

SEQ ID NO: 257139 - protein, 242 aa, Zea mays
  Clone ID: MRT4577_166097C.1.pep
SSAGQLVGHVAAELSLPGGPGPAAAVHYTRCDVTDEAQVAAAVDLAVELHGRLDVMLSNAGISGSLAPAPVAALDLADFDRVMAVNARAAVAGVKHAARVMVPRRAGSIVCTASVAGVLGGVALPPYSVSKAAVLGLVRAVAGQLARSGVRVNAISPTYIPTPLVMGAMAEWFPGATAEERRRIVEKDMNEMDGPVLQVEDVASAALYLASDESKCVNGHNLVVDGGFTVGKAPNMPPPGNY

SEQ ID NO: 257140 - protein, 76 aa, Zea mays
  Clone ID: MRT4577_166098C.1.pep
GPNKKTILSQAGVSKLGIGLEYNHPPSTVFKGANPPGGKKEFPPLPYGSNFRAGDGDNHAQRLGPGGKLEKAERMV

SEQ ID NO: 257141 - protein, 237 aa, Zea mays
  Clone ID: MRT4577_166099C.1.pep
MFRSAVQRLVRASGKSTADPAAAASAFFLSRFSAAAGPPPPPPQRLAGKVALITGGASGIGRATAAEFVRHGAKVILADVQDDLGRHVAAELSLPGGPGPAAVHYTRCDVTDEAQVAAAVDLAVELHGRLDVMLSNAGISGSLAPAPVAALDLADFDRVMAVNARAAVAGVKHAARVMVPRRAGSIVCTASVAGVLGGVAPPPYSVSKAGVLGLVRAVAGQLARPGVRVNAISPTTS

SEQ ID NO: 257142 - protein, 51 aa, Zea mays
  Clone ID: MRT4577_16609C.1.pep
NKMAERYNNLHLYFYFYSISRVQKRLLLKFANPHLNASWLQRNQSVTLGST

SEQ ID NO: 257143 - protein, 36 aa, Zea mays
  Clone ID: MRT4577_1660C.1.pep
NTHKHLTYHNPNIQHTQKKSLIVHTIHKPKQQILHT

SEQ ID NO: 257144 - protein, 132 aa, Zea mays
  Clone ID: MRT4577_166100C.1.pep
MEDSCVSKKKKKKKKKKKKKKKKKKKKKKKKKKKKKKKKKKKKAGPFFPPPFSPGPGKTGNSTLFPPRSQKFNNLFPVSGGNPPPRKFGGPLGCTQKKAGEWPPPLWQTPPFGPQNTSPPPPPRAQAPLFQF

SEQ ID NO: 257145 - protein, 141 aa, Zea mays
  Clone ID: MRT4577_166101C.1.pep
RGRPGFHFGSGPSQFPSLLLPSPHGFSLSAGSASAAAGRFFVFTRTQGRAAPPRLVVLSSPPLMLPHHGSSSPASPEPPPSSSFAAVPFQSPSAAGEDFLVTLDAHSSTFLCSALPRFTSTPPAVPPSTLRTSNNKKLIVW

SEQ ID NO: 257146 - protein, 270 aa, Zea mays
  unsure (1)..(270): unsure at all Xaa locations
  Clone ID: MRT4577_166102C.1.pep
MLPRCRRRRSGASCLAVLLLLLLHAGAASAQGALARQDVAALHGLRASLGVRASDWPDRADPCTFWSGVVCRAGRVAELRLSGLRRTRAGARSAAFAVDQLPRLAALQAFNASGFPLPGRIPSWFGRGLPPSLAVVDLRSARVNGDLPADLGMSGNLTTLVLXSGNNLSGPIPLSLLSIAGLRVLDLSANNLTGPLPNVSFSGSGGAGVLFNASGNALYGAVGDATGSLRKRFWVVDVSDNCFDQVLGTGFQNGTDGVVDLRMNCLSGAA

SEQ ID NO: 257147 - protein, 46 aa, Zea mays
  unsure (1)..(46): unsure at all Xaa locations
  Clone ID: MRT4577_166103C.1.pep
MREIISIHIGQAGIQXIGNACWELYCLEHGIEHDGTMXDDSSVGVA

SEQ ID NO: 257148 - protein, 76 aa, Zea mays
  Clone ID: MRT4577_166104C.1.pep
QNYRLSQQNQKGICIQAFNKNTSFANKRRKLTNRMRKKRPPLDHKHNRIMTHYWYHIRNQRIPQTHYASWAHQQKI

SEQ ID NO: 257149 - protein, 85 aa, Zea mays
  Clone ID: MRT4577_166105C.1.pep
GVGAPKKWWWSWLLRRGGRSPPGGCYTSSPPPILHIKKRGLVGICQKAFFFGHNVRPGEVFVSGLGCKPLMSCGLNKLLRRCVFP

SEQ ID NO: 257150 - protein, 37 aa, Zea mays
  unsure (1)..(37): unsure at all Xaa locations
  Clone ID: MRT4577_166106C.1.pep
IILRTRRYPRIIIKMEPKLILPYRXLHLSKKXLIRMQ

SEQ ID NO: 257151 - protein, 64 aa, Zea mays
  Clone ID: MRT4577_166107C.1.pep
APGFPSFQILDKIFGGLFKGPSSFGGWKKMNPPPGGIRAYDQPLVPLLAWGDFFFSFDPLGAFF

SEQ ID NO: 257152 - protein, 62 aa, Zea mays
  Clone ID: MRT4577_166108C.1.pep
RPSTATASTTTCASTKVARIWIGSPAPSQHRDSPRCSSGRSVGHEQGMQASVDVQTQIVALE

SEQ ID NO: 257153 - protein, 160 aa, Zea mays
  Clone ID: MRT4577_166109C.1.pep
MDRHPPHPQLLQIQARHGSRANPSPSSLLSRPSLTRRDVTRQRDARAAHTSSKARRGQPTNRVRPGLVVAGMGLLDQLWDETVAGPRPDSGLGKLRKYSSFSPSSSSSSSILAPAPAPAPAVTRSITIARPPSLSVESYSSSSVPSSPASTPDSPLAAGW

SEQ ID NO: 257154 - protein, 98 aa, Zea mays
  Clone ID: MRT4577_16610C.1.pep
LHIYALDQIMLTASCAFMMHTDTDGGFMMIPTGGGLLCCCCGAARGGPPHQQDRGPFVSRQNNSGHSALFPRSLEFVHRTPSFCGGDDDPTKPPRMLP

SEQ ID NO: 257155 - protein, 128 aa, Zea mays
  unsure (1)..(128): unsure at all Xaa locations
  Clone ID: MRT4577_166110C.1.pep
SARGELSCPLLKCRRGHATQGADDRHTGLKARGTAGPCYHPTEGVHGRLRHEQDWAGMXSPKTLDSEAGLXRALHXPVHCAMEEXRKAQCRYNAAELSGLEQATTLVREGDWTFAPLPTDIPDRTRTI

SEQ ID NO: 257156 - protein, 187 aa, Zea mays
  unsure (1)..(187): unsure at all Xaa locations
  Clone ID: MRT4577_166111C.1.pep
SSSSTYSLLMLPQTHAHTIQKNANMPSASSVVAYWRXICSNSAVQRADHHPVRRRWGSWARRPAPARRRPWFSGGTSSRXSALGGVAANECLASLGGPDNHTATAPSPPKFXTNHHLLSRRHCVLCSGRSVTASRLRGRRRKKNNVNRTSKFIYFFSIPFTAPISSEIQSCAAAQQCADITRNRNDL

SEQ ID NO: 257157 - protein, 88 aa, Zea mays
  Clone ID: MRT4577_166112C.1.pep
EYSCGLLHVFLTQDKKKSDRCKRKKPHIHQIETLCLSYYRTGRRRACTHLHWATKNSLLISMRSNQTRDYGYAITTNTASIYIGSMPG

SEQ ID NO: 257158 - protein, 80 aa, Zea mays
  Clone ID: MRT4577_166113C.1.pep
KKKTRIVPAADSLHNPSTQHRDIIVSPVPGSTGFWTLEERSTLTKQICQETATDASSHHQALGAGRCPFRRWVWLLRADF

SEQ ID NO: 257159 - protein, 131 aa, Zea mays
  Clone ID: MRT4577_166114C.1.pep
MGLLDQLWDETVAGPRPDSGLGKLRKYSSFSPSSSSSSSILAPAPAPAPAVTRSITIARPPSLSVESYSSSSVPSSPASTPDSPLAAATPPKADVWRRFRRKTKVSDGPEPAVGPRSPTVYDWVVISSLDR

SEQ ID NO: 257160 - protein, 109 aa, Zea mays
  Clone ID: MRT4577_166115C.1.pep
MGLLDQLWDETVAGPRPDSGLGKLRKYSSFSPSSSSSSSILAPAPAPAPAVTRSITIARPPSLSVESYSSSSVPSSPASTPDSPLAAGGLPLFLVASPPRSWATNRFCF

SEQ ID NO: 257161 - protein, 69 aa, Zea mays
  Clone ID: MRT4577_166116C.1.pep
ITIFHLHTKDNLLINDQPCCNRIALRLEETEKLKSSSKPRPGTFLCLLIVANSNHITKSKGHNHFADAW

SEQ ID NO: 257162 - protein, 53 aa, Zea mays
  Clone ID: MRT4577_166117C.1.pep
SPCTLVSLCLHSSVTGSRILPAVQLYRHHEERHAVRELSSPSAWHGPSGLRVR

SEQ ID NO: 257163 - protein, 94 aa, Zea mays
  unsure (1)..(94): unsure at all Xaa locations
  Clone ID: MRT4577_166118C.1.pep
NKDQXASQXRPTTSKRXHXTNKQQRTPPRKHSSNNXXXXASKQXXAXQXXTHNHRXXRXXPPPAPNXGTXXQXQPPPHPTXXXXKKKKSPPHNP

SEQ ID NO: 257164 - protein, 88 aa, Zea mays
  Clone ID: MRT4577_166119C.1.pep
NLIDKNTTHQTLSFLPPLPVFCPPPPYLCPKPRCFAAPKAFLPRCLKTTPFFQHSWINGSGDKIACSLRPYPVADQADKNRPRRCCVP

SEQ ID NO: 257165 - protein, 109 aa, Zea mays
  Clone ID: MRT4577_16611C.1.pep
GKKIFHPGWWILMHPTTGMHLIPVGQKPTGINPKPTRISNSRRFRAYSRRLSVARRPLSGISLSRRRLPGSRRLVSGRWELRLTPVGFAGRRASFINSRRFPRPTGVMN

SEQ ID NO: 257166 - protein, 86 aa, Zea mays
  Clone ID: MRT4577_166120C.1.pep
FSGGGCHSSRGGGRGARYLFSAVGSLDESIGGWRLGRAVLVVVRASSHLSVAAQVVGAGALTLRTTVRATGVTREFIVENGWFPGR

SEQ ID NO: 257167 - protein, 45 aa, Zea mays
  Clone ID: MRT4577_166121C.1.pep
DFLQHDFVNFIHPHAVLIIGHKKPVFIHTLLVQEPYFLFIIFEYI

SEQ ID NO: 257168 - protein, 132 aa, Zea mays
  Clone ID: MRT4577_166122C.1.pep
HELAKPGLNDKLRHCGIMDVEFRRVRCKYPAGQKIVFHIEKGCNPNYLAVLVKFVADDGDIVLMEIQDKLSAEWKPMKLSWGAIWRMDTAKALKGPFSIRLTSESGKKVIAKDIIPANWRPDAVYTSNVQFY

SEQ ID NO: 257169 - protein, 261 aa, Zea mays
  unsure (1)..(261): unsure at all Xaa locations
  Clone ID: MRT4577_166123C.1.pep
MGSLANNIMVVXGGSCGPPKVPPGPNITTNYNGKWLTARATWYGQPNGAGAPDNGGACGIKNVNLPPYSGMTACGNVPIFKDGKGCGSCYEVRCKEKPECSGNPVTVYITDMNYEPIAPYHFDLSGKAFGSLAKPGLNDKIRHCGIMDVEFRRVRCKYPAGQKIVFHIEKGCNPNYLAVLVKYVADDGDIVLMEIQDKLSAEWKPMKLSWGAIWRMDTAKALKGPFSIRLTSESGKKVIAKDVIPANWRPDAVYTSNVQFY

SEQ ID NO: 257170 - protein, 60 aa, Zea mays
  Clone ID: MRT4577_166124C.1.pep
LAPDAFPQHIFGSSYFTETVTLTSHTQTAHLVEDLYLHQFLFLLLVDAIDLFHELVPLYL

SEQ ID NO: 257171 - protein, 125 aa, Zea mays
  Clone ID: MRT4577_166125C.1.pep
MGSLANNIMVVGVVLAALVAGCSCGPPKVPAGPNITTNYNGKWLTARVTWYGQPNGAGATDNGSACGIKNVNLTPYSGMTACGNVHMYNDRKGCGSCYEARCKEKPECSVNPVTVYITDMNYEPI

SEQ ID NO: 257172 - protein, 112 aa, Zea mays
  unsure (1)..(112): unsure at all Xaa locations
  Clone ID: MRT4577_166126C.1.pep
PKTKRGEGVLGRLKRYKGVPPPLAKTKGMVIPPAFKVLRVKPGPKYSLLGEFFKGGGGNSPAPPRDLXEKRKEKAKVASKRKKQLAKLGVKAQKPPKEKLGFQLEIFAPTKN

SEQ ID NO: 257173 - protein, 269 aa, Zea mays
  Clone ID: MRT4577_166127C.1.pep
MGSLANNIMVVGAVLAALVVGGSCGPPKVPPGPNITTNYNGKWLTARATWYGQPNGAGAPDNGGACGIKNVNLPPYSGMTACGNVPIFKDGKGCGSCYEVRCKEKPECSGNPVTVYITDMNYEPIAPYHFDLSGKAFGSLAKPGLNDKIRHCGIMDVEFRRVRCKYPAGQKIVFHIEKGCNPNYLAVLVKYVADDGDIVLMEIQDKLSAEWKPMKLSWGAIWRMDTAKALKGPFSIRLTSESGKKVIAKDVIPANWRPDAVYTSNVQFY

SEQ ID NO: 257174 - protein, 128 aa, Zea mays
  Clone ID: MRT4577_166128C.1.pep
QAGPRVVVHLHPRRQRRRHHIRLRVLHRAAPAALVGRPARLRHRLLLHPPDRDHHVVYRYRRHWWERHNYLLSGALDAGLAFMAVLIYLCLGLENVGLNWWGNDLDGCPLASCPTAKGIVVEGCPVYT

SEQ ID NO: 257175 - protein, 151 aa, Zea mays
  unsure (1)..(151): unsure at all Xaa locations
  Clone ID: MRT4577_166129C.1.pep
MGSLANNIMVVGAVLAALVAGGSCGIKNVNLPPYSGMTACGNVPIFKDGKGCGSCYEVRCKEKPECSGNPVTVYITDMNYEPIAPYHFDLSGKAFGSLAKPGLXDKIRHCGIVXFQLERVRCKYPAAEKSCSHXEKGXHPNYWPGLVKYVA

SEQ ID NO: 257176 - protein, 80 aa, Zea mays
  Clone ID: MRT4577_16612C.1.pep
PLNRQLYTLIYRYNLHIFQVLFLKMLNLDITQTVKPNPKHTPSPNYLLYHAFVDKPPRTALCSNTPPLSNSSTRYMNSSV

SEQ ID NO: 257177 - protein, 311 aa, Zea mays
  unsure (1)..(311): unsure at all Xaa locations
  Clone ID: MRT4577_166130C.1.pep
SRPAEFACEYYXEQLQLPWWGVLLACAIAFFFTLPIGIITATTNQTPGLNIITEYIMGYLYPGRPVANMCFKEYGYISMTQALAFLQDFKLGHYMKIPPRTMFMAQVVGTLIAALVYIGTAWWLMDSVPNICSTELLPADSPWTCPMDHVFYDASVIWGLIGPRRIFGDLGTYSAVNWFFLGGAVAPLLVWLAHRVFPSQSWILLVNMPVLIGSTGMMPPATAVNYTTWIIAGFLSGYVVYRYRRHWWERHNYLLSGALDAGLAFMAVLIYLCLGLENVGLNWWGNDLDGCPLASCPTAKGIVVEGCPVYT

SEQ ID NO: 257178 - protein, 58 aa, Zea mays
  Clone ID: MRT4577_166131C.1.pep
IASCALFFFFFFFFFFFLHAPWITTTSYSDIIIIFLHLHNYMMRVAILRSHRTKNIHP

SEQ ID NO: 257179 - protein, 501 aa, Zea mays
  unsure (1)..(501): unsure at all Xaa locations
  Clone ID: MRT4577_166132C.1.pep
MGLISGMMMGVIVGVCIMAGFGLVLRXRDSVALPXAADIKVLGSLSRDDLRKLCGDNFPEWISFPQFEQVKWLNKHLSKLWPFVVEAATVVVKESVEPLLDDYRPPGIKSLKFSKFSLGNVSPKIEGIRIQNLQPGQIIMDIDFRWGGNPSIILAVDAVVASLPIQLKDLQVYTVIRVIFQLSEDIPCISAVVVALLADPEPKIQYTLKAIGGSLTAVPGLSDMIDDTVDSIVSDMLLWPHRHVVKLGVNVDTSDLELKPQGRLSVTVVKATSLRNKEMIGKSDPYVKLYVRPMFKVKTKVIDDDLNPEWNETFDLIVEDKETQSVIFEVYDEDKLQQDKRLGVAKLAVNTLESEITQDATLKLLHSLDPIKNKDTKDRGTLHLKVKYHPFTKEEQLEALEMEKQAIEERKRLKEAGIIGSTMDAVGSGVGFVGTGIGAGLGFVGSGIGAGAGLVTSGIGAVSSGLGKAGKFMGRTVTGPFSMSRKNGSSSTAPQHDQPSA

SEQ ID NO: 257180 - protein, 492 aa, Zea mays
  Clone ID: MRT4577_166133C.1.pep
MPHPPRATTTMASSPQPPPHPPPRQEEDQQREEGHHHGDGGDDDQITTPLLVEAATTSSPSPSEGDDPENSPIEQVALTVPVGDDPSTPVLTFRMWVLGTASCALLSFLNQFFWYRKEPLTITAISAQIAVVPLGRLMAAALPARAVLRGTRWEFSLNPGPFSVKEHVLVTIFANSGAGTVYAIHVITAVRVFYGKHITFFVSLLVVLTTQVLGFGWAGIFRRYLVEPAAMWWPSNLVQVSLFRALHEKERRVKGGMTRNQFFLVAFVCSFAYYVFPGYLFQMLTSLSWLCWAFPRSVVAQQLGSGLSGLGVGAVGLDWSTISSYLGSPLASPWFATANVAAGFVLIMYVITPAAYYWLGLYGARSFPIFSDGLFTAAGQTYNISSIVDSNFRFDTEAYERNGPLYLSTFFAVTYGVGFASLTATVVHVFLFHGSEIWQLSRSAFQEKKVDVHTRLMRRYRQVPEWWFICILVANVAVNIFACEYYIEQLQL

SEQ ID NO: 257181 - protein, 269 aa, Zea mays
  Clone ID: MRT4577_166134C.1.pep
MGSLANNIMVVGVVLAALVAGGSCGPPKVPPGPNITTNYNGKWLTARATWYGQPNGAGAPDNGGACGIKNVNLPPYSGMTACGNVPIFKDGKGCGSCYEVRCKEKPECSGNPVTVYITDMNYEPIAPYHFDLSGKAFGSLAKPGLNDKIRHCGIMDVEFRRVRCKYPAGQKIVFHIEKGCNPNYLAVLVKYVADDGDIVLMEIQDKLSAEWKPMKLSWGAIWRMDTAKALKGPFSIRLTSESGKKVIAKDVIPPNWRPDAVYTSNVQFY

SEQ ID NO: 257182 - protein, 85 aa, Zea mays
  Clone ID: MRT4577_166135C.1.pep
KMFGTLQKFFGFNLTKKTGRNEQKEEGIKKKWRGQGNQTGVRRDYKKNGVGKENTWPNLKPQEKLLQNKKRKSLTLKRLGGDRKV

SEQ ID NO: 257183 - protein, 269 aa, Zea mays
  Clone ID: MRT4577_166136C.1.pep
MGSLVNNIMVVGAVLAALVAGGSCGPPKVPPGPNITTNYNGKWLTARATWYGQPNGAGAPDNGGACGIKNVNLPPYSGMTACGNVPIFKDGKGCGSCYEVRCKEKPECSGNPVTVYITDMNYEPIAPYHFDLSGKAFGSLAKPGLNDKIRHCGIMDVEFRRVRCKYPAGQKIVFHIEKGCNPNYLAVLVKYVADDGDIVLMEIQDKLSAEWKPMKLSWGAIWRMDTAKALKGPFSIRLTSESGKKVIAKDVIPANWRPDAVYTSNVQFY

SEQ ID NO: 257184 - protein, 69 aa, Zea mays
  Clone ID: MRT4577_166137C.1.pep
TCVILDDGCRLNIAPSGEWLTSHQPGLFQESCGDMMLSSASLSAGVSQQVGSRCSVIRWACSPQLSLSP

SEQ ID NO: 257185 - protein, 100 aa, Zea mays
  Clone ID: MRT4577_166138C.1.pep
LTTQLVKFTGGTYCAIYIDRATKTKTTPAAPANRVLRPRTVQGPPTALAQTACSIMSLNSRKLMRPSPSASCAAIIRAQSSRAELESPIPRRRNTSQKLG

SEQ ID NO: 257186 - protein, 142 aa, Zea mays
  Clone ID: MRT4577_166139C.1.pep
FPSTLYIGGALAASAAVIPPCPLEQKPPRSPRPLVTPGDGDLVDDSCTREMRDDHAQLHHGPPEKVKYQERPRFRSRLDPTTLPRATQSAPESDDSDRRPRLLLIHELVLFADCMRLRRETAIFSRLTDALLGHRVGVFTIM

SEQ ID NO: 257187 - protein, 170 aa, Zea mays
  unsure (1)..(170): unsure at all Xaa locations
  Clone ID: MRT4577_16613C.1.pep
VEAVAQEMEAREAFLADVRYRLQQAQSAQKHHYDKSHRLVTYQVGDWALLRLRQRAAASLPRTVAGKLKPRYVGPYRVSELINDVAVRLELPAGARLHDVFHIGVLKKFVGAPPSSPPALPPTIDGAVVPEPARVVRARLARGVRQVLVQWXGEPAESATWEDVATSAPG

SEQ ID NO: 257188 - protein, 77 aa, Zea mays
  Clone ID: MRT4577_166140C.1.pep
ESVSFFEVSVMSLSNTVSRVEQEGLPVEESVPQVISGSVIRMISIYAKAVHLVGTIKAVSSLQNFFLQAWLCTLISL

SEQ ID NO: 257189 - protein, 315 aa, Zea mays
  unsure (1)..(315): unsure at all Xaa locations
  Clone ID: MRT4577_166141C.1.pep
MMQGRRKNTREMAREHPQPPPVAAAAASAASSKGQAWFCTTGLPSDVVIEVGDMTFHLHKFPLMSRSKKLHDLITNKESREASRRGRGAEQEEDVGEIREEEADLVLEEDEEAGVHRIRLLEFPGGAEAFELAAKFCYGVKLDLTPATAAPLRCAAERLGMSDDHSDDNLVSRADRFISQTVLRNPRDAIRALKSCEGLLPLADDLGLVSRCVDAVAAKTVASTPTTLFGWPIAADXGPANASAAKNAAAAAGATWCDDLAGLSLATFXVCIAAMKERDVGREVIEGALHCXYAKRAIPRLSRTGRHAGGGGGAG

SEQ ID NO: 257190 - protein, 60 aa, Zea mays
  Clone ID: MRT4577_166142C.1.pep
WVAQTIYEKGSKIVVDMACSIINMAIMEHRSEGLRFSWCKTDGRKLFPQFKTAPLILSCL

SEQ ID NO: 257191 - protein, 68 aa, Zea mays
  Clone ID: MRT4577_166143C.1.pep
LYGSRAKISWNLGCNFSFGILPPLVSPCCTWARCVWFCKNRLSKMYSRRGLPDLACAPPLVLTLDSIQ

SEQ ID NO: 257192 - protein, 57 aa, Zea mays
  Clone ID: MRT4577_166144C.1.pep
CLPETGNTHKQFLHYGGPMANKRSQQSCQVKTDSKCSLLPICWRQNRPKAGRDGSKP

SEQ ID NO: 257193 - protein, 111 aa, Zea mays
  Clone ID: MRT4577_166145C.1.pep
FRDGDANVHSGHGWIFTFRISILSFNRLACFMDMEWSMDGVYSSRVMKELYHSLTHNCCMFCIMSFWLMELGLWVIDASSQIVFTWGRVHGFCAEHKLTKAHVLTLNTSFA

SEQ ID NO: 257194 - protein, 226 aa, Zea mays
  unsure (1)..(226): unsure at all Xaa locations
  Clone ID: MRT4577_166146C.1.pep
MMATTTRSRPMLLALAAVVATLLVVAAPAPASGQPGPGGVVGGAMSCTASLVTSFTPCLNFITNGSASPTDDCCRSLGALMRASTGCACLILTGSVSVGVPVNRTLAVRLPRACNSTSLQLQCRDASSAQSPAPGPVADAPAPSLSTAPLPPPATAAAAPEPDEAPAPATPTAXAGQPGADEADGCARRLLLLLLDSKLGRASDGWVCTVACNWSCAHDLMRWFAK

SEQ ID NO: 257195 - protein, 109 aa, Zea mays
  Clone ID: MRT4577_166147C.1.pep
PSGLNTRLRYVKPPVCPISALGMGPGRRGRFVMAFIKVFTILSGALAGSAIVSLGVVPELCPQGNSPAQKFPVVTPLGPFRRRWSLQQRLWVSWKLSAEDGGHFFKTPA

SEQ ID NO: 257196 - protein, 74 aa, Zea mays
  Clone ID: MRT4577_166148C.1.pep
AFGTAPPPKGWKNGWSLNGTNVGRFTSNHAPFNIKPSRMVPPPLFPFFVCRLFSPPNNWQRSPLYIFQVRPGNS

SEQ ID NO: 257197 - protein, 104 aa, Zea mays
  Clone ID: MRT4577_166149C.1.pep
RVDPAFVHASAPRPACGHAALYESMRVFPPVQVDCKLAAGDDALPDGAAGAKGTRVTYHAYAMGRRESVWGPDCSELRPERWVRDGRVVPVSPCRGPVFQAGMR

SEQ ID NO: 257198 - protein, 83 aa, Zea mays
  Clone ID: MRT4577_16614C.1.pep
GPHEVHWHPWLWHWVLQSVAGASHGRGNARGPVFSARSLRLCVFRCGLGENQRICFNKKPKMKGRPPTRRIVDPAKYSGPAPA

SEQ ID NO: 257199 - protein, 48 aa, Zea mays
  Clone ID: MRT4577_166150C.1.pep
LCVKKLDSTHPFGSPPPSACHNPTRRFHPAPPEVALQERSAKPLPHPE

SEQ ID NO: 257200 - protein, 64 aa, Zea mays
  Clone ID: MRT4577_166151C.1.pep
TSPGSAVTGVLWMHATPYPIVNNGYLCPDALHDMPLHNDTANGPTRYSRENLSSLTNVLSILNY

SEQ ID NO: 257201 - protein, 263 aa, Zea mays
  unsure (1)..(263): unsure at all Xaa locations
  Clone ID: MRT4577_166152C.1.pep
LKLWLGRSVSRSRKDREGVRIPGWCSSAAKRRQRDRRRPGHLEKGGGDDGRPAVAESERKIEGRPEGTELFEIVTISSRGFATLLLHSRASPFWYSGAHSRARLGQLFPRALLTSVFQFFGLIYPQGVLALGCSSCHQKTELAPPCATRGLATRWSRSRLPPYACDAACFQLRALPSPSSRPRHPLPAAPARWPRHPLPAARWPRRHPLLSLVSCFLCPNEADFLFSEILLSLVEWTEXSDYRMGLXTEIQLSKSSWSFWTHP

SEQ ID NO: 257202 - protein, 182 aa, Zea mays
  Clone ID: MRT4577_166153C.1.pep
ERLDAHVEHMLDGLDDADGAEDVPFDELVGMQGPVFHLVENAITVLASNAIFLIVVIFVPFSLGRIILYYLSWFFSSASTPMLAKVMPFTETAISIANDTLKSALNVVKNFSSDSNNEGVIGHVIEVVTQSLKINATGLSVIQGTGKNSLMKGTTIASSYLSDLTTLAVGYMFIFCLVFLYI

SEQ ID NO: 257203 - protein, 75 aa, Zea mays
  unsure (1)..(75): unsure at all Xaa locations
  Clone ID: MRT4577_166154C.1.pep
MQQLFASLFLPTKHYQHKEEEQVCSEGLNNTWLQTKRKEKGLRELAREYTLGDCAWRWRCXVXCVXRVCLIDERT

SEQ ID NO: 257204 - protein, 73 aa, Zea mays
  Clone ID: MRT4577_166155C.1.pep
RKPPVFCFLRRTFKVTGAKRKKVGGAKRGLTHFLAFLDDFTPHYLHMLSSLRAERTLGASSHPKHVPELQLSG

SEQ ID NO: 257205 - protein, 44 aa, Zea mays
  Clone ID: MRT4577_166156C.1.pep
SSLSAIISEYASVALHHGGQCQFEPYPQFLLSMVKIKVHLWFLF

SEQ ID NO: 257206 - protein, 58 aa, Zea mays
  Clone ID: MRT4577_166157C.1.pep
PPPPPPPFFFGKKTNFGSPSVGPLTATNASFFPCWAPWNPHQKVVKMGLFRNPPVFVF

SEQ ID NO: 257207 - protein, 113 aa, Zea mays
  unsure (1)..(113): unsure at all Xaa locations
  Clone ID: MRT4577_166158C.1.pep
CGNWATAAAAYSGCPGIRPYLLGLHRXXXXXXXXXXXXXXXXXXXXXXXXXXXXXXXXXXXXXXXXXXXXXXXXXXXXPSPATITDKGIAPFPFRFCRHPNPNISYLATFIPI

SEQ ID NO: 257208 - protein, 65 aa, Zea mays
  Clone ID: MRT4577_166159C.1.pep
QRAVDIYKRVGFSSATTHYKLLRMNIRGGKVTSTILSEMHSRWPPAYQKRDRRTILIKVNLGRFV

SEQ ID NO: 257209 - protein, 51 aa, Zea mays
  Clone ID: MRT4577_16615C.1.pep
FSVVDTDRGLQRLSVIAARLSLTLSPLHTTFHWILTSFLPCVPVSPFLYLS

SEQ ID NO: 257210 - protein, 63 aa, Zea mays
  Clone ID: MRT4577_166160C.1.pep
KNCSVDAGYVVQLYYYTITRPSGYQDDANMPVLSDKIEPMRSSGGTHADSALRWASISNHINL

SEQ ID NO: 257211 - protein, 87 aa, Zea mays
  Clone ID: MRT4577_166161C.1.pep
CSQRGTCGYRSMKRNLRSLNLGLTYLAVPTACTSNSQLSSSNIVGYVCSSLPLLGMIRFSTKVHIAQARYEDSCVTNISITRDVHYI

SEQ ID NO: 257212 - protein, 64 aa, Zea mays
  Clone ID: MRT4577_166162C.1.pep
NLDTCMFSLCERLPYDANSTSNGSPVCAGWHVNFTFICLEQHILPPVKMVGSAVYHSVILTEQS

SEQ ID NO: 257213 - protein, 117 aa, Zea mays
  Clone ID: MRT4577_166163C.1.pep
PRPTAFPVCSPTDCYALARILLGAVFLVVSGAANHDQSQPTDSTLGQNDCHEPHYLGGVVVCSRSQRLPRRERLPRPWVLTCGTAIPVPLRGSVLTSDERCTLQTMCTTAVAVSRED

SEQ ID NO: 257214 - protein, 86 aa, Zea mays
  Clone ID: MRT4577_166164C.1.pep
TSLSRLGSRGGRGDSCLAREMGTGATLGGQEVGLYACFNKIFDFFFHFLNKHEYIYILSLIKLSWNKGRVGASVAWLHGITRSSKF

SEQ ID NO: 257215 - protein, 110 aa, Zea mays
  Clone ID: MRT4577_166165C.1.pep
QHELSRVCALCRQLRSPHFEMCDKSHMTCPDECNVGCTASALKDVILYVSPTSFLSSSPSSSPPPLLGTCRREPPSNPWPPPRGCLFRRRALPRQVPGGRPPPGLWAPLN

SEQ ID NO: 257216 - protein, 106 aa, Zea mays
  Clone ID: MRT4577_166166C.1.pep
LLYLLASEYVQARSQARSCGLSTLGYALLLVCVQYLGSAVDGDSSLSFAFTAPISLATIAVFLRHCFWPVCASMCPEWMDEFSLEHPTMPEAPVPGYSRLTILLTN

SEQ ID NO: 257217 - protein, 97 aa, Zea mays
  Clone ID: MRT4577_166167C.1.pep
TSIQHRRGGLPQKNQGTDRSLGEGDHIHFIGQAPGWGSCCLGKNNQGTNKFLGEGDHIYFIGQAGEPAALKKTGLMYRAEKILENRRQHNLLTGLPL

SEQ ID NO: 257218 - protein, 785 aa, Zea mays
  Clone ID: MRT4577_166168C.1.pep
YSRSTGKGALTSPFKLLKSNHLGVVLTFTVYKYDLPPNATPQERIHATLGYLGASFDVPSLVDKLLEQLASKRKIVVNLYDTTNHTSPIEMYGSDFTPSGDLHISSIDFGDPTRKHEMHCRFKHEPSLPWSAIIISTAVAIIVLLVGHIIYATLNSLEKAEHDYRVMRELKGQAEAADIAKSQFLATVSHEIRTPMNGVLGMLQMLMDTELDTTQQDFVVTAQESGKVLINLINEVLDLAKIESGRIELEAVPFDVRDILDNVISLFYDKSQAKGIELAVLVSDQVPDVLIGDPWRFRQIITNLVGNSMKFTEQGHIFVQVHLVKELNRKGNNFCDVSAHNREILYDSDNSMLWNTLSGLEVADSWRSLENFTMFKNSNGETDTIRLAVRVEDTGIGITKDAQMRIFTPFMQADSSTSRTYGGTGIGLSITKRLVELMGGEIGFTSKSGVGSTFSFTAIFKENRGCPGDMKRYYSEPTPLDFQGMRALIIDGRSARAEVTMYHLRRLGIQCSLVATSESESASSALMKACTSSKNNPDMVLVDTEAWGKGSGLAFYHRFVDCQLKGAHKFSQPMPKTILLGSSISPVESDYLRLTGFGDCIRKPLRLSTIVACLRKTLGVGVTRQQSRDQSLVLQSVLTGKQILVVDDNAVNRKVAAGSLKKYGSKVTCVDSGSDAIDMLKPPHTFDACFMDVQMPEMDGFEATRLIRSIEKKINDMIMMGEISANNYGNKAHWHVPILAMTADVIQATFEKCMQCGMDGYVSKPFEEQQLYFAVAHFLETDETE

SEQ ID NO: 257219 - protein, 143 aa, Zea mays
  unsure (1)..(143): unsure at all Xaa locations
  Clone ID: MRT4577_166169C.1.pep
MPYLLMLSFIFYMLSSKNNPDMVLVDTEAWGKGSGLAFYHRFVDCQLKGAHKFSQPMPKTILLGSSISPVESDYLRLTGFGDCIRKPLRLSTIVACLRKTLGVXXTRQQSRDQSLVLQSVLTGKQILXVDXYAVNRKVAAWFF

SEQ ID NO: 257220 - protein, 102 aa, Zea mays
  Clone ID: MRT4577_16616C.1.pep
TRIYSSLSRTSSSASLVASIYFMPSRLALDFCEQENTALWCSKRSATSSYEIWLSSLSIETDHCLEELSAGRRPRCGRRSTTYKTAFLTMSTLRLIMSCCDD

SEQ ID NO: 257221 - protein, 69 aa, Zea mays
  Clone ID: MRT4577_166170C.1.pep
MIMMGEISANNYGNKAHWHVPILAMTADVIQATFEKCMQCGMDGYVSKPFEEQQLYFAVAHFLETDETE

SEQ ID NO: 257222 - protein, 82 aa, Zea mays
  Clone ID: MRT4577_166171C.1.pep
AERNLTDRVCLAGIDLSSRQFVTSAFSYISSSDFCPSVKSWKICRLCLYSLLLFLLPPADQFLNRPVFLFPFVRQPKSLARS

SEQ ID NO: 257223 - protein, 78 aa, Zea mays
  unsure (1)..(78): unsure at all Xaa locations
  Clone ID: MRT4577_166172C.1.pep
TFSHLVVIAHDVDPIELVGWVSALGRKIEVPYFIFKGKARLVSIVYNKNALFFCLTTVKNEVXLDFIKILCAINAILI

SEQ ID NO: 257224 - protein, 299 aa, Zea mays
  unsure (1)..(299): unsure at all Xaa locations
  Clone ID: MRT4577_166173C.1.pep
MDFCSHLRLAAVLALLLAVCASAASRGAGSFDPSRVVQLSWCPRAFLHKGFLSDAECDHLIALAKDKLEKSMVADNESGKSVQSEVRTSSGMFLERKQDEVVTRIEERISAWTFLPPENGESIQILHYQNGEKYEPHYDYFHDKKNQALGGHRIATVLMYLSNVEKGGETIFPNAEGKLLQPKDNTWSDCARNGYAVKPVKGDALLFFSLHPDATTDSDSLHGSCPVIEGQKWSATKWIHVRSFDXPVKQPGPSDGCEDDNVLCPQWAAVGECAKNPNYMVGTKEAPGFCRKSCKVCAE

SEQ ID NO: 257225 - protein, 159 aa, Zea mays
  unsure (1)..(159): unsure at all Xaa locations
  Clone ID: MRT4577_166174C.1.pep
ETTKFNGIIPPEIGQLQALFTLNLSFNNFXGEIPXSVGNLTNXLQVLDLSYNNLTGEIPSALERLHFLSKFNISSNDLEGPVPTGGQFSTFPDSSFFGNPKLCGATLMRHCNSADXSSHRCLHGRVRRXVIFAVAFGMFFGVGVLYDQMFLWSAAAAWV

SEQ ID NO: 257226 - protein, 124 aa, Zea mays
  unsure (1)..(124): unsure at all Xaa locations
  Clone ID: MRT4577_166175C.1.pep
PPPPPPFGPSXAPRXPXXPPPAARRRRRPSSPPSPRAPGPARRXRCAPPXAWGAACSPPAPGPRXXXNSRKNPPPPTTXSXQKSTEMAFSAFGLSGGSRSSFTTIFFDKSDPRKEKRGRRQGPS

SEQ ID NO: 257227 - protein, 69 aa, Zea mays
  Clone ID: MRT4577_166176C.1.pep
LRAPENHGPVGKGSLFLPRKGPPPCPPGVFSQGGKKGEGFSAFFFQIHWGISPSFLFVGSGGLLGLEPG

SEQ ID NO: 257228 - protein, 142 aa, Zea mays
  Clone ID: MRT4577_166177C.1.pep
KIIAVQTKAHSGGGGNRTPGAKHKTHFRPGFEQTPKPPTGPQRTEPHSGDPGTHPTPYLVGRGSFRCTPTTGRGTPRQPGGAVYVGESKGPPQTGRRRRGPPRLGIEHSRGETPAGPASGGAQRGPRAQGAGGGARTPGPPG

SEQ ID NO: 257229 - protein, 100 aa, Zea mays
  Clone ID: MRT4577_166178C.1.pep
MERYNIITEVGDGTFGSVWRAINKESGEVVAIKKMKKKYFSWEECINLREVKSLRRMNHPNIVKLKEVIRENDMLFFVFEYMECNLYQLMKSKGKPFSET

SEQ ID NO: 257230 - protein, 91 aa, Zea mays
  unsure (1)..(91): unsure at all Xaa locations
  Clone ID: MRT4577_166179C.1.pep
MALKGVLFLALRQLIAATGHGCEPYSCSIXPTPPVGPTTTFDSDGRCPIHAHNLKVCANELGLLXERLPEYEQCSPXLEGLEDLDPTLRLC

SEQ ID NO: 257231 - protein, 115 aa, Zea mays
  unsure (1)..(115): unsure at all Xaa locations
  Clone ID: MRT4577_16617C.1.pep
MLDKLWDYLVXAGPRPXRVLRSLCKATTARPFVINKDADGGSYKRSQSMPXSPTTPVTPLSFSSXLRRAVPAYVWCSVXFHPGSNLATKGMGAHLFYRSLPNXPPVYDWLYSDET

SEQ ID NO: 257232 - protein, 145 aa, Zea mays
  Clone ID: MRT4577_166180C.1.pep
AGRFGNTTMDSQFPEQEDLNNTVDSYSVTINGFIFCTRHGLEVCDKCPTDNRSANNMMVEDMLHDKLSEEEYSTKWKGDEREPFSVAHKWTRVAKGKPGCVAHKTVACDECFNWGEQLYRGIHGGRKPRVSRVQRKSRDNTDKLS

SEQ ID NO: 257233 - protein, 141 aa, Zea mays
  unsure (1)..(141): unsure at all Xaa locations
  Clone ID: MRT4577_166181C.1.pep
QKNPLPFSXQDGYDIQAPIVCNERNIXKTLLSKTQGTTIAFGGLQHRGFXVFLSDLQGDDDQAYRXKIMLPDSNMXTEVNVLTNSWGMNSTTHKXRSLVKNXRHYIESHVAVXTSLNYLMGMFCISFTNRRPYHINRTCYA

SEQ ID NO: 257234 - protein, 99 aa, Zea mays
  Clone ID: MRT4577_166182C.1.pep
DSGLLYTTKIHDVLDSQHIPACPGRGHVRSLSARMDLARPTMDVCSPYYAAAHALQEEHHVRTAPSSIVPTHTGAPPRRLRHQPYVDRRRRTSRLECAE

SEQ ID NO: 257235 - protein, 132 aa, Zea mays
  unsure (1)..(132): unsure at all Xaa locations
  Clone ID: MRT4577_166183C.1.pep
FSCKNLVIDATSSFVRPSKKGXNVLRPRTSSLSAVHXGILQDVVYPPEIVGKRVRSGLVGSKVIKIFLDPKXGNTLAVKVDTFITVFSGLCGKDMVFEYPMSTKASISGHAVIALFVMAMPKDMMGLRDEVL

SEQ ID NO: 257236 - protein, 92 aa, Zea mays
  Clone ID: MRT4577_166184C.1.pep
SLQANVQRLKEYRSKLILFPRKPSAPKKGDSSAEELKLATQLTGPVMPIRNVYKKEKARAITEEEKNFKAFASLRMARANARLFGIRAKRAK

SEQ ID NO: 257237 - protein, 59 aa, Zea mays
  Clone ID: MRT4577_166185C.1.pep
MATEETAADEITYPTKITTSKRLSLLGHGITDMEIHFIHVKFYSIGGYLEPEVVGHLDQ

SEQ ID NO: 257238 - protein, 141 aa, Zea mays
  unsure (1)..(141): unsure at all Xaa locations
  Clone ID: MRT4577_166186C.1.pep
GGAGKTFKTRGENRLGEKKGRGHPNQQXPPPQKTGGGGPKITPPKXGEKKGGGPPRNKNNNPQTQGFIRGGPAKXGGGGFKKPQGPGKRGXKGPTNSPEKRGGGPGPGAGKPTQNGGGVGPRPAKKGGPQPPGGQGAPRGE

SEQ ID NO: 257239 - protein, 275 aa, Zea mays
  unsure (1)..(275): unsure at all Xaa locations
  Clone ID: MRT4577_166187C.1.pep
GHPKQESASVPLHPSPSQSRMPHAKTDSEVTSLAPSSPPRSPPRTRGAVYYVQSPSRDSHDGETIKAATSVHSTPALSPMASPRHSHSHSHSSMGRDSSSSRFSGHGHDKRKADKCYCFLAFLLGFVALFSFFALVLWGASRSQKPRIVMGTIRFDNFIIQAGTDASLVPTDMATTNSTVRFTYRNRGTFFGIHVTADPFQLSYSQLTLASGDLHNFYQPRSSSRTVSVAVVGNKVPLYGGGPTLTAAPAAXGKGQQQASAKVASVPMVLRTRCT

SEQ ID NO: 257240 - protein, 94 aa, Zea mays
  Clone ID: MRT4577_166189C.1.pep
PRLSQASEDSKAQWCLRLGLGVHVPLYPWWPGQFLFAVKLCPQCRGDVIPPVLDLGGCDNHIFIKTRIVLQKKEKRGVPSIFKWTVYPHKKLKL

SEQ ID NO: 257241 - protein, 88 aa, Zea mays
  unsure (1)..(88): unsure at all Xaa locations
  Clone ID: MRT4577_16618C.1.pep
MTTSAVLSTAANPTQVXRSRASXLGKPVKGLGLSMARKRAQRTIACHAASTISADRVPDMDRRKLMNLLLLNDISLSSGGVVVHDGAF

SEQ ID NO: 257242 - protein, 354 aa, Zea mays
  Clone ID: MRT4577_166190C.1.pep
GHPKQESASVPLHPSPSQSRMPHAKTDSEVTSLAPSSPPRSPPRTRGAVYYVQSPSRDSHDGETIKAATSVHSTPALSPMASPRHSHSHSHSSMGRDSSSSRFSGHGHNKRKADKGGSNKGAPGGKGWQEIGVIEEEGLMDEEDHTRIVPRKCYCFLAFLLGFVALFSFFALVLWGASRSQKPRIVMGTIRFDNFIIQAGTDASLVPTDMATTNSTVRFTYRNRGTFFGIHVTADPFQLSYSQLTLASGDLHNFYQPRSSSRTVSVAVVGNKVPLYGGGPTLTAAPAAGGKGQQQASAKVASVPMVLRTTLHSRAYVLGALVKPKFTLAVECRVLMNPNKQNKPISLGNACHYS

SEQ ID NO: 257243 - protein, 160 aa, Zea mays
  unsure (1)..(160): unsure at all Xaa locations
  Clone ID: MRT4577_166191C.1.pep
LRDLQCCQEVFYSSLDACRQVLVWXLTGGGVAGPFRWGFGLRICCCQQLXDVIRECRCAAMXAMVRGYEEAIPXLELGCXPWGCQQHPPLEGGVXGQGGYXYYPCNRVLEGYLRQMYPKCGPPPPGPRIRKIKXLKKDREYTKGLKIMXRLKKPKKKRYY

SEQ ID NO: 257244 - protein, 106 aa, Zea mays
  Clone ID: MRT4577_166192C.1.pep
IGPSHLALPCMHIRGRVSRSRRCREGGRLLAGCGPATTDEQDISLSVLYKGQMASRIGGLFCEHLRFPLGQSGTGSRILRIMKVLCDDYQEHDRSSTSCMNICRGI

SEQ ID NO: 257245 - protein, 68 aa, Zea mays
  Clone ID: MRT4577_166193C.1.pep
SARIARSGSIAKASGCPVSMHGNLYFIGGVSDAGETLGTVEVYNERQGWSISGCKSVGKRAFACAITV

SEQ ID NO: 257246 - protein, 64 aa, Zea mays
  Clone ID: MRT4577_166194C.1.pep
MGRGGKGGWDGNKFHMSLELPVVDTVNCADNKDAKNLYIIYVKGIKESLNRLPSDCVRDMVMAT

SEQ ID NO: 257247 - protein, 96 aa, Zea mays
  Clone ID: MRT4577_166195C.1.pep
RTRGRRGESPRGTAAIIPDRWCAHGRGTPLVSPDRVGVGAWREERSRWPYSLAAAATSPHAVDHSLAAISTYVRSRESEESSWYLESQVSGQEQVP

SEQ ID NO: 257248 - protein, 66 aa, Zea mays
  Clone ID: MRT4577_166196C.1.pep
DRHCHLYECSCLCALRAMVRVSIRSDHQTCVVCFIVQLGKASAESHLAMPRVEKKRGARQRVPADG

SEQ ID NO: 257249 - protein, 76 aa, Zea mays
  Clone ID: MRT4577_166197C.1.pep
AGFPDREAAASRGFPLAIAPHYLPQNEQSQRKRKSRAAAEAHAVRRAWTCRGSGVDSGQQGGGVTIFSFFSFEARA

SEQ ID NO: 257250 - protein, 349 aa, Zea mays
  Clone ID: MRT4577_166198C.1.pep
IIFQFLPNVLIFVSMYIIIPSVLSYFSKFECHLTVSGEQRAALLKMVCFFLVNLILLRALVESSLESWILSMGRCYLDGPDCKQIERYLSPSFLSRSSLSSLAFLITCTFLGISFDLLAPIPWIKHIMKKFRKNDMVQLVPEENEDYLPMQNGEETNNLTAPLMPEREDGGLLDNIEGHDLSLYPLNRSFHMPKQKFDFAQYYAFDITIFALTLIYSLFAPLVVPVGATYFGYRYLVDKYNFLFVYRVRGFPAGNDGKLMDRVLCIMQFCVIFFLAAMLLFFAVQGDSMKLQAICTLGMLVFYKLLPSRSDRFQPSLLEGMQTVNSFVDGPTDYEVFSQPDLDWSLYQS

SEQ ID NO: 257251 - protein, 49 aa, Zea mays
  Clone ID: MRT4577_166199C.1.pep
IKASMWCLCSPLATTHVRAFAPQGPVPLAQPDRPTHRGGPPRSSLPNGR

SEQ ID NO: 257252 - protein, 482 aa, Zea mays
  Clone ID: MRT4577_16619C.1.pep
MAGGAVVSGGSGGNPLRHGFIKREYLWAFILVTSLFFLWGFAYGLLDVLNAHFRAVLGITKTQSTGLQAAYFGIGYFAFSPVAGEVLKRRGYKFTIIMGLSLYSLGAILFWPCAKFSGKGNNAAVFGGFVICTAVIACGLATLEVSANSYVSVMPPHNVANFRLQFSQSFNGVASFTGPLIASKYFFSGEHNDNLDTVQWVYLAVALLGVAVAIAFFFTKLPEVSEEALQAEAELLADAAGADPQTLKPFYKQYRAISGAVAQFLYVGAQVTIGAFFLFLAEEAGINHEKGSQLLSYGLITFTVARFIGTALLSFIAAPVLLGVYAVACTIIAIMIGAVHGPTGVYLAIVIMFFESIMYPVIFVLSTHNLGRHTRRAAAMVVMGVSGGAVFPPIQGAISDKFDTRVSFFIVVPCFVYIALWAVYIWHKDGRKWGVASNDAVLNAQSAQLEATPAANLMFGGAQRTENYEGSIKEDLHQVEKV

SEQ ID NO: 257253 - protein, 54 aa, Zea mays
  Clone ID: MRT4577_1661C.1.pep
YVSNQSSGSVKQGLGPVYQGGAAEVFMLHNLVCMYELQLTVSAQVFRASLCPVK

SEQ ID NO: 257254 - protein, 129 aa, Zea mays
  Clone ID: MRT4577_166200C.1.pep
LVLVGRRDRDCPSHQRESVPEKIDARPHRSGRMRQRQKTCHQHVEIFLQRNLDEAAWQAATRKAQAAASNRGGSGYRPALSPNKHGELGQVKLRGGHFTPEGNRNPRSRDVRKHTWRSRTILYIDSIRS

SEQ ID NO: 257255 - protein, 343 aa, Zea mays
  Clone ID: MRT4577_166201C.1.pep
MPRYDDRYGGTRLYVGRLATRTRSRDLEHLFGRYGRIREVELKRDYAFIEFSDHRDADEARYQLDGRDVDGSRIVVEFAKGVPRGSGGSREYMGRGPPPGTGRCFNCGVDGHWARDCKAGDWKNKCYRCGERGHIERNCQNSPRSLRRERSYSRSPSPRRGRGRSRSYSRSRSRSRSYSRSRSLSRSPRGGRRDRDDRRSRSPSYSRSPMRSASPPVKEKERSPAPDGSRSPRSRSPQDQVMSPPPKDNGEGNGSDRGGSPRGRENSRSRSRSPSGSNRSPAANGRSRSPGGERSPSPGGERSPSPGGDRSPSPNGNGNNDAAADVDADAAARGGSPTGSKSP

SEQ ID NO: 257256 - protein, 328 aa, Zea mays
  Clone ID: MRT4577_166202C.1.pep
RLTVCGNPLRRIREVELKRDYAFIEFSDHRDADEARYQLDGRDVDGSRIVVEFAKGVPRGSGGSREYMGRGPPPGTGRCFNCGVDGHWARDCKAGDWKNKCYRCGERGHIERNCQNSPRSLRRERSYSRSPSPRRGRGRSRSYSRSRSRSRSYSRSRSLSRSPRGGRRDRDDRRSRSPSYSRSPMRSASPPVKEKERSPAPDGSRSPRSRSPQDQVMSPPPKDNGEGNGSDRGGSPRGRENSRSCSRSRSPSGSNRSPAANGRSRSPGGERSPSPGGERSPSPRGERSPSPRADRSPSPNGNGNNDAAADVDADAAARSGSPTGSKSP

SEQ ID NO: 257257 - protein, 89 aa, Zea mays
  Clone ID: MRT4577_166203C.1.pep
LWGVSGWACLLFLLFLSPPCCCSSRGSPLFCPVFGRALLSRVLRVGLLWFFLAVSPLSSWCLCPFPAFCFYAPYCPSNPPYDCEKKKNI

SEQ ID NO: 257258 - protein, 89 aa, Zea mays
  Clone ID: MRT4577_166204C.1.pep
MAVHFVSETEQLSGSYSKADDLSCSDANSDRTSTNVHYSTDEEEEDCDQSHDYLLASGVPLMVQLYAVRVGNSRIAFQTSFEVHDVKSL

SEQ ID NO: 257259 - protein, 113 aa, Zea mays
  Clone ID: MRT4577_166205C.1.pep
SSSGSSNYVIAGIPVFRLVLTSPQSPNLVSHRNLHAIFLPEVTTPTRSSPHHGQGSSTGFSATLCWFHNLRRSVMLTRVLFLMLSLFVGRNKVAPLCSGAGDSLRIDPFTHAI

SEQ ID NO: 257260 - protein, 284 aa, Zea mays
  Clone ID: MRT4577_166206C.1.pep
MAPGLYTDIGKKTRDLLYKDYNTHQKFCLTTSSPNGVAITAAGTRKNESIFGELHTQIKNKKLTVDVKANSESDLLTTITVDEFGTPGLKSIINLVVPDQRSGKLEFQYLHEYAGVNASVGLNSNPMVNLSGAFGSKALSVGVDVSFDTATSDFTKYNAALSLTSPDLIASLHLNNHGDTLVASYYHLVKNHSGTAVGAEHSGTAVGAELSHSMSRNESTLIFGSQHSLDPHTTIKTRFNNYGMASALVQHEWRPKSFVTISGDVDTKAIEKSTKVGLSLVLKH

SEQ ID NO: 257261 - protein, 39 aa, Zea mays
  Clone ID: MRT4577_166207C.1.pep
SRKGNVLQADYFRSNKALLFSSVVNTRTVNFVWAPPYDI

SEQ ID NO: 257262 - protein, 91 aa, Zea mays
  Clone ID: MRT4577_166209C.1.pep
GESESDEEDDVPYCLGFFHLVFSMGAMYFAMIFVGWNANASHTMERWTIDVGWASTWVRVGNEWLAAIVYMWMMIAPVIWKTRQVGSAAET

SEQ ID NO: 257263 - protein, 65 aa, Zea mays
  unsure (1)..(65): unsure at all Xaa locations
  Clone ID: MRT4577_16620C.1.pep
GGAEEAAVEGXLAEGAADGSHAQDGPRRRRRDFHAWTWTWGGAASLTSLVGEGCRVLVLSRRLEV

SEQ ID NO: 257264 - protein, 88 aa, Zea mays
  unsure (1)..(88): unsure at all Xaa locations
  Clone ID: MRT4577_166210C.1.pep
MRVIDLQSVAQKMXMMMQLERAVVDSSSLYKPALLHKXQQLLAAQGLNPMVMMMAQNMPGMGGLYQFQLNNYRTXPXCGVFAAIPPYY

SEQ ID NO: 257265 - protein, 213 aa, Zea mays
  unsure (1)..(213): unsure at all Xaa locations
  Clone ID: MRT4577_166211C.1.pep
NNGALRSSSQKLVEAEPLRGALLHACRPCAITLLFFSNSRQETYSATPSNVNAKTTTGETLHINCDVTRSVLPWSLLAGDTMEATADSQYDISHDIIKKTSEHPAKATESRKDPAGGPKIERPLQKHGAKLDHNEVYCSSCYGAEKSDDQXCNSCEEVHDAYRKKGCAVNNVELIDQCKREGYVQRLKDEQGEGCTIHGSVHVNKVAGNFHFA

SEQ ID NO: 257266 - protein, 55 aa, Zea mays
  Clone ID: MRT4577_166212C.1.pep
MAVSDSLAHPGLAIVVMGVSGCGKSTVAAMLAEALGCSFIEADDYHSEANKGRGS

SEQ ID NO: 257267 - protein, 92 aa, Zea mays
  Clone ID: MRT4577_166213C.1.pep
LQEQPGVRHLNVFASLGRVAHRGCQHSRPGPRGEGAIRRGCVRRAGGHGRRWSCHELQTQQYGPPRSGHFLLVALHDRLCALSLSVIGSWVS

SEQ ID NO: 257268 - protein, 75 aa, Zea mays
  unsure (1)..(75): unsure at all Xaa locations
  Clone ID: MRT4577_166214C.1.pep
ADDXXDPXXAQDXARFPHADSXXPNXGXNXGAXXDXDXXGGXAXAPSXPXYSSYTAAXLGHSGSSSEVGLGPDVM

SEQ ID NO: 257269 - protein, 84 aa, Zea mays
  Clone ID: MRT4577_166215C.1.pep
RVLTAALLRSAGHGFLSIPPRQPFFIAPTLRLFLTPVARPRQGAAPCLEKFDSSDGTPKAFWAPPRVATLRALSFSAPFIGTPR

SEQ ID NO: 257270 - protein, 112 aa, Zea mays
  Clone ID: MRT4577_166216C.1.pep
MDSSRRPSGIQQLLAAEQEAQQIVNAARAAKTARLRQAKEEAEREIAEYRAQMEADFQRKLTETSGDSGANVKRLEQETTVKIEQLKQQATLYYLFISLGGIIRNGFCHFQL

SEQ ID NO: 257271 - protein, 288 aa, Zea mays
  Clone ID: MRT4577_166217C.1.pep
TARTSRRSSTTHAPDADNYHDSRHSQRYHSTITHSTPPIHGLGDAAAAPPPPPPPRRAVPGDPPRPVAAAGPPPPRKPVVRRGGRAADGAGDGDAGFRGAGPAARLRQRGLLLRADGGGAPRQGVARGRAGGAQRDAGDAGGVRGRARQAPCRRARRGRHRLDSIQVHLANVVSKFAGALSDAGHICVEGKVRDGGASHLTLVGSLSVDVSLEGNLILCGQLDHPGIIGRVGSILGKMNVNVSFMSVSRTAPGKQAIMAIGVDEEPGKEALKLIGDTPSVEEFVFLKL

SEQ ID NO: 257272 - protein, 56 aa, Zea mays
  Clone ID: MRT4577_166218C.1.pep
AQYPSKVSFGRHGILALDNVPIILYYQGVVGYSDFCLESRYKMRHVWHIMIFCAKF

SEQ ID NO: 257273 - protein, 59 aa, Zea mays
  Clone ID: MRT4577_166219C.1.pep
RLGHAVPGQILLRGLRAGQRLRAHGYRGTTARVLDAMNEALGIPSGPTAERMHYTSVCV

SEQ ID NO: 257274 - protein, 165 aa, Zea mays
  unsure (1)..(165): unsure at all Xaa locations
  Clone ID: MRT4577_16621C.1.pep
PKLRGMAGGMHIGPPKXVPXKXKDTARGGXKDGDETSLEXPKXRGXIXPSGRXXXPXXXTXGDGDAPRQXEHQGRSAPSPRAKSKRERSRXPXTPQPKRKKXTHKTTKRTNARAEEHHAKNKSRRRSTTAQRAQQRRTQEAHTHKSTSRRARHTGTTKNENNNNQ

SEQ ID NO: 257275 - protein, 38 aa, Zea mays
  unsure (1)..(38): unsure at all Xaa locations
  Clone ID: MRT4577_166220C.1.pep
EFLMEGTTNDGLVXECWRACHSKLLEWQGVLPPVDGAR

SEQ ID NO: 257276 - protein, 174 aa, Zea mays
  Clone ID: MRT4577_166221C.1.pep
MSFLAASIKRSSLLSIVRPIAKRSSVPARDMHIQSIPMWEGTGNNYAYLVSDDKTKEAVIIDPANPSEVLPVLKEQTTTGGLKLTKIINTHHHHDHAGGNTEILKAFNLPIIGGRDCEKVSTTPAHNDTFNIGSINVKALHTPCHTQDSICFFFEDGNDRVVFTGDTLFIGGCG

SEQ ID NO: 257277 - protein, 80 aa, Zea mays
  Clone ID: MRT4577_166222C.1.pep
TPAVYRAANYTVDLSVRFCMHGGLKKRLKTGPKRNIGRPEVWSSMWVLLCDLKSSGPDEDIDKWGETDQRKNLHLGSWST

SEQ ID NO: 257278 - protein, 76 aa, Zea mays
  unsure (1)..(76): unsure at all Xaa locations
  Clone ID: MRT4577_166223C.1.pep
XXRIGGTTAGVRISIGSRWRLFWHDDNAKTRGGAAHVQRTPYPWRSRDGAMLLLRPGDASPRGVLQTYLTSRRQCN

SEQ ID NO: 257279 - protein, 217 aa, Zea mays
  Clone ID: MRT4577_166224C.1.pep
MIQLLFLVLFAEGAVALLLMVKVGPLRELAMRGVDQVKTGKGPATVKTLACTLSVILMSSVASILKIQNRGLKLGTVSPMDQVLWRTHLLEASLIGYTLFLAFVIDRLHHYLRKLLTLRKTSSTSREEVEKLQMENRSLREKEEKSSSETKRLQREIARLNEGMKKLKSETEEHERKASVAEAHVDALQKQSEELLLEYDRLLEDNQILQTQLLSRG

SEQ ID NO: 257280 - protein, 167 aa, Zea mays
  unsure (1)..(167): unsure at all Xaa locations
  Clone ID: MRT4577_166225C.1.pep
GRVLPSRAPPASPRPQSPPQSSHPRPQPSSPAAPAVPQRRRARASPRQPPCALSXVPTPPPPPARDPPSXPFLTRRDPPSAPPXPGEPQPSXPGHRRPPFSSPXGEPTPPPHGCPPDPSPVRASAPSSATHRFSPTSPXRGQRPPSPCTLATKGRISYLPGHQNKCS

SEQ ID NO: 257281 - protein, 217 aa, Zea mays
  Clone ID: MRT4577_166226C.1.pep
MIHLLFLVLFAEGAVALLLMVKVGPLRELAMRVVDQVKTGKGPATVKTLACTLSVILMSNVASILKIQNRGLKLGTVSPMDQVLWRTHLLEASLIGYTLFLAFVIDRLHHYLQKLMTLRKTSSTSREEVEKLQMENRSLREKEEKSSGETKRLQREVVRLNESMKKLKSEAKEHERKASIAEAHVNALQKQSEELLLEYDRLLEDNQILQTQLLSRG

SEQ ID NO: 257282 - protein, 217 aa, Zea mays
  Clone ID: MRT4577_166227C.1.pep
MIQLLFLVLFAEGAVALLLMVKVGPLRELAMRGVDQVKTGKGPATVKTLACTLSVILMSSVASILKIQNRGLKLGTVSPMDQVLWRTHLLEASLIGYTLFLAFVIDRLHHYLRKLMTLRKTSSTSREEVEKLQMENRSLREKEEKSSSETNRLQREIARLNEGMKKLKSETEEHERKASVAEAHVDALQKQSEELLLEYDRLLEDNQILQTQLLSRG

SEQ ID NO: 257283 - protein, 46 aa, Zea mays
  Clone ID: MRT4577_166228C.1.pep
MKKKIKKKKKKKKKKKKKKKKKKKKKKKKNKKKKKKKKKPARAAAR

SEQ ID NO: 257284 - protein, 58 aa, Zea mays
  Clone ID: MRT4577_166229C.1.pep
DSCSLQDEKPTHCGLYPSTYRQHSQKDQNYVKETCIHLFCLPFFRSCQIHIFNLLLYV

SEQ ID NO: 257285 - protein, 96 aa, Zea mays
  unsure (1)..(96): unsure at all Xaa locations
  Clone ID: MRT4577_16622C.1.pep
NPRRPRVRVGXGCGVALLLTLARSEVEEVHETAAGALWNLAFYSGNALRIVEEGGVPVLVKICSSSRSKMARFMSALALAYMFDGRYHFCYFFLVA

SEQ ID NO: 257286 - protein, 66 aa, Zea mays
  Clone ID: MRT4577_166230C.1.pep
LVDVFIVSLGGFNLILDLRTEGVHPITHQIVRSHSAGWPINSFYRSICRSFNATTTPIYLSYIIYY

SEQ ID NO: 257287 - protein, 541 aa, Zea mays
  Clone ID: MRT4577_166231C.1.pep
MGMLASALSSFNKKSTLLQMLTSLAKTVGRIPASWGRHAWSIGSEDPRRAVHALKAGTALTLVSLLYILEPFFQGIGKNAMWAVMTVVVVLEFTAGATICKGLNRGLGTVLAGCLALLIELVAAGTGKVLRAFIVGASVFIVGFAATYTRFFPAIKKSYDYGVLIFLLTFNLITVSSYRQQDVVSLTRDRLSTIAIGCAICLFMSLLVLPNWSGEDLHSSTVGKFQGLATSIEACVNEYFRDQDEGDDVLGKQEARASIQIGYRAVLDSKSSDETLAHYASWEPRHSMHCYSYPWQKYVKLGSVLRHFAYTVAALHGCLESEVQTPPSVRSLFRGPCTRVAREVAKVLQELAASIKHHRRCAPDVLSDHLHEALQDLNSAIRSQPRLFLGSKHACAANKRVLLMELNSGSGKLSASRAALRSFKTDATALSETRNARSDQPPPPSDRSERSGGLLRPTLSKIAITSLEFSEALPFAAFASPLVEMVVRLELVIEEVKNLERVANFRELATGHNHLIVDLGSKEKTRNSNAAALHPVSAAAE

SEQ ID NO: 257288 - protein, 234 aa, Zea mays
  unsure (1)..(234): unsure at all Xaa locations
  Clone ID: MRT4577_166232C.1.pep
MLTSLAKTVGRIPASWGRHAWSIGSEDPRRAVHALKAGTALTLVSLLYILEPFFQGIGKNAMWAVMTVVVVLEFTAGATICKGLNRGLGTVLAGCLALLIELVAAGTGKVLRAFIVGASVFIVGXACCKPNRFFMPQAKQLDVDDIRNTQLLAAXFVNFLWTIGFAATYTRFFPAIKKSYDYGVLIFLLTFNLITVSSYRQQDVVSLTRDRLSTIAIGCAICLFMSLLVLPNWS

SEQ ID NO: 257289 - protein, 66 aa, Zea mays
  Clone ID: MRT4577_166233C.1.pep
LKPRFFFPKWVCPPWPNRPLGPQCCRLNLWYPTCGPPFVCPPFSVRHWASPTRLNGHVSFKKKNHP

SEQ ID NO: 257290 - protein, 66 aa, Zea mays
  unsure (1)..(66): unsure at all Xaa locations
  Clone ID: MRT4577_166234C.1.pep
CIQFNICIKGLSISLRVGSRLIRTTPFYPXGGVYRNIYNATARXATGVEKEKRDGXRRXRKTRSPR

SEQ ID NO: 257291 - protein, 472 aa, Zea mays
  Clone ID: MRT4577_166235C.1.pep
MVRAWGRRTALPPLLILGLLRLHYSSLVVAQEGQEKDPATLFAQASGMMDLRKYDGALGLLNAVLEIDPNHSEAYRQRASVLRHKCRYEEAERDYNKHLELSPGSASVVKELSQLLQAQNSLQSAYGQFDSGDFSKVVEYINKIVLVFSPGCLKAKLLKAKALLALKDYSSVISETGFILKEDEDNLDALLLRGRAYYYLADHDVASRHYQKGLRLDPEHSELKKAYFGLKNLLKKTKSAEDNAAKGKLRVSVEDYKAALAMDPDHTAYNVHLYLGLCKTLVRLGRSKEAISTCTEALIIDSELVDALTQRGEAKLLSEDWEGAVQDLKEAAQKSPQDMGIREALMRAEKQLKLSKRKDWYKILGVSKTASAAEIKRAYKKLALQWHPDKNVDNREKAENMFREIAAAYEVLGDEDKRVRYDRGEDVEEMNMGGGGGFNPFGGGGQQYTFQYDGGFPGGGFPGGGGFQFNFG

SEQ ID NO: 257292 - protein, 84 aa, Zea mays
  unsure (1)..(84): unsure at all Xaa locations
  Clone ID: MRT4577_166236C.1.pep
SQAVSSTTXLVRDKILMFCRQQSCVPCPTEVLPSLLRCTAAASRLLSIPAPCAHDLLYLCKITNLQSLLLFPPLRCWKIIGLSI

SEQ ID NO: 257293 - protein, 87 aa, Zea mays
  Clone ID: MRT4577_166237C.1.pep
IDKEQAESPQFPNSAKARILTLGTPLLVPGGQPLGQCLQPISHRVPPADVQAQPRHRGCARAARLCRWEPGTLPPPCQAQYARVRDY

SEQ ID NO: 257294 - protein, 60 aa, Zea mays
  Clone ID: MRT4577_166238C.1.pep
YCSRVGHVSKPLGFSSCIVFHPAPKVHFVQNCLSEVWISPGIALFISRLSKPPAYSVFRR

SEQ ID NO: 257295 - protein, 123 aa, Zea mays
  unsure (1)..(123): unsure at all Xaa locations
  Clone ID: MRT4577_166239C.1.pep
GVALGRRAAVVVLXGLGGVGVAGVRVLVGAAVVRXPCPWSRPRSSPLRGRVARLGAAACPRSGSRRPPSGCRPCCGWRGAGRRAPPGRAGGVAAAAGRVAAAACLLAVVWPALRGAAAGAGRF

SEQ ID NO: 257296 - protein, 100 aa, Zea mays
  Clone ID: MRT4577_16623C.1.pep
PFLRVRELKRGRLPHFSHFAFFHQGLVPREGPGGNPPKALKGPFGKQFVTVFFRPPGGVPHPLRSRPNPPANTSQAVLRPLIFPGKNLVFKGLKLKTSLA

SEQ ID NO: 257297 - protein, 182 aa, Zea mays
  Clone ID: MRT4577_166240C.1.pep
MGHGVSCARTGDEHDYFRAAQVGDLEALDALLDADPSLARRATLYDRLSALHIAAANGRPEVLSMVLDHGVPPDVVNRHKQVRCGIPSPSTLFFFLSSFLSILCRSQGSLVGYPLQKSHLFFSYPLQSNQQGKKSHLSTGLLCLFFSVQTPLMLAAMHGKTDCVLKLLQAGANVSGNLLLLF

SEQ ID NO: 257298 - protein, 63 aa, Zea mays
  Clone ID: MRT4577_166241C.1.pep
MESLAQRAALLRESLHKSQHVTDAVCFILGSLDKSLTVLDSAMRPIQVRTHAVWNRHHNIYRT

SEQ ID NO: 257299 - protein, 85 aa, Zea mays
  Clone ID: MRT4577_166242C.1.pep
FVFKKFIKKLDNIRKHFCQPQASEYSTSIRAPAASLCGGQKKQSMDYTGTGSTENEYSGSARCVSTHRKSGVSVKTFMKTCSSRG

SEQ ID NO: 257300 - protein, 51 aa, Zea mays
  Clone ID: MRT4577_166243C.1.pep
GQELGFCRTGEVRASKHYKGIARGGVAAADCCSTNSHLQPFNKLHESISTQ

SEQ ID NO: 257301 - protein, 101 aa, Zea mays
  unsure (1)..(101): unsure at all Xaa locations
  Clone ID: MRT4577_166244C.1.pep
VDVGAPILEGRQXFLVXXRXXXVGGEHHLDVLLALGQRPDATAFSRHGGRLGFRTRAPCARERGGRGGTGGGGGSRSDGSACCFSSSVDAEIWLWIGLSAF

SEQ ID NO: 257302 - protein, 90 aa, Zea mays
  unsure (1)..(90): unsure at all Xaa locations
  Clone ID: MRT4577_166245C.1.pep
MATTAVSVDENIDKIRAEVAMLDQIRENEKSVFIILMSRYLSXEWLHIEWSKIHTPTDDAMLTYHTVRVDSRDLDVTDKLMHNLGGLWLD

SEQ ID NO: 257303 - protein, 121 aa, Zea mays
  unsure (1)..(121): unsure at all Xaa locations
  Clone ID: MRT4577_166246C.1.pep
MTGGRSYLHCYLDKLITNAPDCPASYDXLRFDPRLTDCKQGDSHEDYSXLSSCQSXRTSAVTILKDPIDLVFSTYEYSDDVADRSFAHANLTYGMFMTTHMFTKCRACNALNIXSWKYLDP

SEQ ID NO: 257304 - protein, 224 aa, Zea mays
  unsure (1)..(224): unsure at all Xaa locations
  Clone ID: MRT4577_166247C.1.pep
MLLKQTLAGYHAAFPKTFRIRITGHITTMVTITGVETKDVRFPTSLDKTGSDAMNAAGDYSSAYCILHTDSKFKGHGMTFTIGRGNEIVCTAITHLADRIKGHTLDSLVANWGKTWRHLVNDSQLRWIGPEKGVIHLALGAVVNAIWDLWAKSLGKPVWRIVADMTPQQIVDLIDFRYITDALTPAEALEILTKAEAGKKERLQEALDSRAVPXYTTSAGWLGY

SEQ ID NO: 257305 - protein, 79 aa, Zea mays
  Clone ID: MRT4577_166248C.1.pep
FGSSLCLAFSSFLWLPASSSYGRSARFGDGGGAGGPLGEPYADLQESSSARPIRQARECQGRTYDALGGAYRMLPEAER

SEQ ID NO: 257306 - protein, 282 aa, Zea mays
  Clone ID: MRT4577_166249C.1.pep
MDLAPLLLLSQLLLLPVVAVVSGETAAHPGYTHAEEACSGVLEAEAEKATVLVPAPERREEFDGGRIVDISHYYREDMPEWESSEGSGEFLQLARSMRNGSDIANFSELRLTAHSGTHVDAPGHVFEHYYDTGFDVDTLDLAVLNGPALLVDVPRDKNITADVMASLNIPKGVRCVLFRTLNTDRKLMWKKEFDTSYVGFMKDGAQWLVDNTDIKLVGVDYLSVGAFDECIPAHLVFLEKREVILVEALNLEHVSPGIYILHCLPLRLRGAEGSPARCILIK

SEQ ID NO: 257307 - protein, 64 aa, Zea mays
  Clone ID: MRT4577_16624C.1.pep
LAFFTQSSICNTLGPVMKAMRAALYGNAGGSTHFISKKPRLAVQAYRFMEQMVHCQLLSNESMD

SEQ ID NO: 257308 - protein, 103 aa, Zea mays
  Clone ID: MRT4577_166250C.1.pep
GLETLFWLPCNVISFLFWPSISIPWPSFYTLLFGKIPFFSHFSFVTSRLFFKFWVFIHVPLSVPPFLHLGPLFVDFNFPWGVSLIPGVFLVPFNLSGPLCFSL

SEQ ID NO: 257309 - protein, 176 aa, Zea mays
  unsure (1)..(176): unsure at all Xaa locations
  Clone ID: MRT4577_166251C.1.pep
MDLASLLLSQLLLLPVVTVVSGETAAHPGYAHAEEACSGMLEAEAEKATVLVPAPKRREEFDGGRIVDISHYYREDMPEWESSEGSGEFLQLARSMRNGSDIANFSELRLTAHSGTHVDAPGHVFEHYYDTGFDVDTLXDLAVLNGPALLVDVPRDKNITESLCGRKNLIQVMLAS

SEQ ID NO: 257310 - protein, 90 aa, Zea mays
  Clone ID: MRT4577_166252C.1.pep
SCSPPNREVRLGLASRESGWFYPICFRSGKSIWLSTASPCKFPQLVPAVGLKSTGPAAFGHQYIIGGALFETDQAWAFLARVLEKMNVTS

SEQ ID NO: 257311 - protein, 53 aa, Zea mays
  Clone ID: MRT4577_166253C.1.pep
LVIKDKRGGIKKSLFKRFAPRGGLPLKVRQFQKGQTHSEILFFQGKGQAFLGN

SEQ ID NO: 257312 - protein, 125 aa, Zea mays
  unsure (1)..(125): unsure at all Xaa locations
  Clone ID: MRT4577_166254C.1.pep
MTPLSSGGMGTTADQPLTPWHVLRSSRQCRSVRRLTQDGGFCVTLMATQTITAPRRGHTDAPPLSRARMGHXWIFTHKKFDEGHQVRMHVNFDKISESIMDADEVVLDAEMVTFEDTERIRHDLR

SEQ ID NO: 257313 - protein, 68 aa, Zea mays
  Clone ID: MRT4577_166255C.1.pep
RRVGELLGRHFKVDPNRTNVSGMKHRPPSVYIPYHGYPYRPYWAPNFPPYGYGRAPRFCRPILFRPYF

SEQ ID NO: 257314 - protein, 121 aa, Zea mays
  Clone ID: MRT4577_166256C.1.pep
APRKQLATKAARKSAPTTGGVKKPHRYRPGTVALREIRKYQKSTELLIRKLPFQRLVREIAQDFKTDLRFQSHAVLALQEAAEAYLVGLFEDTNLCAIHAKRVTIMPKDIQLARRIRGERA

SEQ ID NO: 257315 - protein, 122 aa, Zea mays
  unsure (1)..(122): unsure at all Xaa locations
  Clone ID: MRT4577_166257C.1.pep
LRTWRPPSNSGPKSAPTTAGVNKLHRYRPGTVALREIRKYHKSTELLIRKLPFQRLVXREIAQXFKTDLXFQSHAVLDLQEAAEAYLVGLFEDTNLCAIHAKRVTIMPKDIQLARRIRGERA

SEQ ID NO: 257316 - protein, 133 aa, Zea mays
  unsure (1)..(133): unsure at all Xaa locations
  Clone ID: MRT4577_166258C.1.pep
MARTKQTARKSTVGKAPRKQLATKDARKSAPTTGGVKKPHRYRPGTVALREIRKYQNSTELLIKKLPFQRLVRXIAQDFKTDLRFQSHAELALQEAAEAYLDGLFEDTNLCAIHAKRVTIMSKDIQLSRQIRG

SEQ ID NO: 257317 - protein, 196 aa, Zea mays
  unsure (1)..(196): unsure at all Xaa locations
  Clone ID: MRT4577_166259C.1.pep
MSKLQSDPVEDAISQIAVDAQGKNTEVTDTVXELHIALKNYDPQKDNRFTGSDKVPRIPRPKMNVCLLGDAQPAEEVDQHGXLTYLDVEALXKKMNNNKNLVRXLRTTYHAFLLSKAIIKQIPRLLGPGLNKAGXFPTLDTHHESLESKGNQTNATVXLQLEKDXCMGVADANVAMEEKQILANLQMSVIFLVSLL

SEQ ID NO: 257318 - protein, 125 aa, Zea mays
  unsure (1)..(125): unsure at all Xaa locations
  Clone ID: MRT4577_16625C.1.pep
GDYRATYRAPLAANICSILMLLAHAACVANATSYRDYSHAPIAGFYSSYLSSMTVTVCEYPVRXPYRLQLAVATGNXDLDXMFIQQAPAISMMQISAQTIGAHHVTQHELPVIXQLVLANFVAYF

SEQ ID NO: 257319 - protein, 91 aa, Zea mays
  Clone ID: MRT4577_166260C.1.pep
MARIKAHELTGQPKTELGGELKDLKAEPSLLGHAKGTGGAPNKLCQTKAERLSIGQVFTVRYKKHKAALREAYTGKTFLTLDLRPQKTTTI

SEQ ID NO: 257320 - protein, 144 aa, Zea mays
  unsure (1)..(144): unsure at all Xaa locations
  Clone ID: MRT4577_166261C.1.pep
MIMLVKRLFFRPPIPRAATTRFEACGETEEAGEMARTKQTARKSTGGKAPRKQLATKAARKSAPTTGGVKKPHRYRPGTVALREIRKYQKSTELLIRKLPFQRLXEAYLVGLFEDTNLCAIHAKRVTIMPKDIQLARRIRGERA

SEQ ID NO: 257321 - protein, 141 aa, Zea mays
  Clone ID: MRT4577_166262C.1.pep
MGLMRQVIHIMDMVHLRHRSINLLRPIEWGSIDSKPIPKQHMSILNKMTIRKGCKLTSTNGAIKRQARVLDGLWNLWAEPPSAPLDPPLPKKTLEPIGRCFKSYFYGTYNFTEPLWTYSYANLAKDVVCAAGLMKMAPTYC

SEQ ID NO: 257322 - protein, 54 aa, Zea mays
  Clone ID: MRT4577_166263C.1.pep
TSQSYIRLLRNRHKSSHLPAYIDTSQFAVHKADRPCPADHYTVLSWTHHLVSFG

SEQ ID NO: 257323 - protein, 136 aa, Zea mays; identical to SEQ ID NO: 199630
  Clone ID: MRT4577_166264C.1.pep

SEQ ID NO: 257324 - protein, 136 aa, Zea mays; identical to SEQ ID NO: 199630
  Clone ID: MRT4577_166265C.1.pep

SEQ ID NO: 257325 - protein, 53 aa, Zea mays
  Clone ID: MRT4577_166266C.1.pep
CFDKCYFRVAPRMHMFKVFHYNVCSVLLQSCLVFSDKLDFGNNTLLAPNLDNA

SEQ ID NO: 257326 - protein, 87 aa, Zea mays
  Clone ID: MRT4577_166267C.1.pep
GPHNLLASGSPLRSVCVSLVFLLLLPPKVYGGFFFVDYPDLAVLTLDAVPSHLLLASRMPAHALCRWTVRLSYKIPPARRSPLAWTT

SEQ ID NO: 257327 - protein, 49 aa, Zea mays
  Clone ID: MRT4577_166268C.1.pep
AGNTPFRAGARAGTSFFFLFIYSLFFGLRKSSDFTEQTKRGKNESYANR

SEQ ID NO: 257328 - protein, 83 aa, Zea mays
  Clone ID: MRT4577_166269C.1.pep
PAGSATHTFTHHDQPVDFIDHTLRCHLPRTRLSSPLRWMHRPSSYLHLSHTWPVNPLKDTLISSRDTTGSYTRLQFLDYTLDN

SEQ ID NO: 257329 - protein, 72 aa, Zea mays
  Clone ID: MRT4577_16626C.1.pep
VSTEGHIEVGCSVDEEERVHDESEGLFEWQGGPIILAQVENEYGPMESSWAPAPSPTLTEQTDVDEPAQSVV

SEQ ID NO: 257330 - protein, 92 aa, Zea mays
  unsure (1)..(92): unsure at all Xaa locations
  Clone ID: MRT4577_166270C.1.pep
EGVYLRLWSSGARMFRFVLVVVVAHLCPPPQKSSSDVVKKVNNRPIPSLHWAPPDYLIGLPLKKKKKKNKKKKKKKKNTQGGRNKRXQENVR

SEQ ID NO: 257331 - protein, 52 aa, Zea mays
  Clone ID: MRT4577_166271C.1.pep
WRGEHHRWWKSFGCALRDVCSSLKGEASSEVSAVLKKIDLRGGAPRRSGAPP

SEQ ID NO: 257332 - protein, 49 aa, Zea mays
  Clone ID: MRT4577_166272C.1.pep
SILCNLRSRWRCSVWKNKYVICIYDRICRWLEIGSHLVLTVSEMILFNI

SEQ ID NO: 257333 - protein, 130 aa, Zea mays
  Clone ID: MRT4577_166273C.1.pep
MAEGSKPDVPLFQLLSDLLQQVESMSNQEEVELRAKIEALGLEVTKVPEQPANHLSELEIAAELDKLSSRLDNVDKMISSAMASDPEVKSLLSSTSDIWMPVITASANERRGFVGTSSEGSQEEQENSKQ

SEQ ID NO: 257334 - protein, 219 aa, Zea mays
  unsure (1)..(219): unsure at all Xaa locations
  Clone ID: MRT4577_166274C.1.pep
MDSDYGVPRELSEVQKKRTLYQPELPPCLQAVRVGIVFCGRQSPGGHNVVWGLYEAIKAHNQNSKLIGFLGGSDGLLAQRTLEITDKVIASYKNQGGYDMLGRTKDQIRTTEQVNGAMASCQALKLDALVIIGGVTSNTDAAQLAETFAEAKCATKVVGVPVTLNGDLKNQFVETXVGFDTXCKVNAXLISNVCTDALSAEKYYYFIRLMGRKASHVAL

SEQ ID NO: 257335 - protein, 236 aa, Zea mays
  unsure (1)..(236): unsure at all Xaa locations
  Clone ID: MRT4577_166275C.1.pep
MDSDYGVPRELSEVQKKRTLYQPELPPCLQPIAHFLRKTAVVPDAKVISEHQAVRVGIVFCGRQSPGGHNVVWGLYEAIKAHNQNSKLIGFLGGSDGLLAQRTLEITDKVIASYKNQGGYDMLGRTKDQIRTTEQVNGAMASCQALKLDALVIIGGVTSNTDAAQLAETFAEAKCATKVVGVPVTLNGDLKNQFVETTVGFDTICKVNAQLISNVCTDALSAEKXYYFISLMGRKA

SEQ ID NO: 257336 - protein, 156 aa, Zea mays
  unsure (1)..(156): unsure at all Xaa locations
  Clone ID: MRT4577_166276C.1.pep
MATVTNLKNPVNKWRCGATPISYYYFIRLIGRKASHVALECALQSHPNMVILGQEVAASKLTIFDITKQICDVVXARAEKDKNHVVILXPEGLVENIPELYALLXEIHGLHAKGVSVENISSQLSPWASALXEFLPPFIRKQLLLHPESDDSAQLS

SEQ ID NO: 257337 - protein, 618 aa, Zea mays
  Clone ID: MRT4577_166277C.1.pep
MDSDYGVPRELSEVQKKRALYQPEVPPCLQGTTVRVEYGDAAIAADQAGAHVISHAFPHTYGQPLAHFLRKTAVVLDAKVISEHPVVRVGIVFCGRQSPGGHNVVWGLYEAIKAHNQNSKLIGFLGGSDGLLAQRTLEITNEVLASYKNQGGYDMLGRTKDQIRTTEQVNGAMASCQALKLDALVIIGGVTSNTDAAQLAETFAEAKCATKVVGVPVTLDGDLKNQFVETTVGFDTICKVNAQLISNVCTDALSAEKYYYFIRLMGRKASHVALECALQSHPNMVILGEEVAASKLTIFDITKQICDAVQARAEKDKNHGVILIPEGLVESIPELYALLQEIHGLHGKGVSVENISSQLSPWASALFEFLPPFIRKQLLLHPESDDSAQLSQIETEKLLAQLVETEMNRRLKEGTYKGKKFNAICHFFGYQARGALPSKFDCDYAYVLGHVCYHIIAAGLNGYMATVTNVKSPVNKWRCGAAPISSMMTVQRWSRGPSATQIGKPAVHMASVDLKGKAYDVLRQNSSSFLLEDVYRNPGPLQFEGPGADSKPISLCVEDQDYMGRIKKLQEYLEKVKRIVKPGCSQDVLKAALSAMSSVTETLNIMTSSSTGQTPLSH

SEQ ID NO: 257338 - protein, 335 aa, Zea mays
  Clone ID: MRT4577_166278C.1.pep
PDKVILGEEVAASKLTIFDITKQICDAVQARAEKDKNHGVVLIPEGLVESIPELYALLQEIHGLHGKGVSVENISSQLSPWASALFEFLPPFIRKQLLLHPESDDSAQLSQIETEKLLAQLVETEMNRRLKEGTYKGKKFNAICHFFGYQARGALPSKFDCDYAYVLGHVCYHIIAAGLNGYMATVTNVKSPVNKWRCGAAPISSMMTVQRWSRGPSATQIGKPAVHMASVDLKGKAYDVLRQNSSRFLLEDVYRNPGPLQFEGPGADSKPISLCVEDQDYMGRIKKLQEYLEKVKSIVKPGCSQDVLKAALSAMSSVTETLNIMTSSSTGQTAL

SEQ ID NO: 257339 - protein, 162 aa, Zea mays
  Clone ID: MRT4577_166279C.1.pep
GTTRGAKKKKNRAKQGNKHLSIFTRPPPKKFYHPPIQTQGPSFKKLRRKQPKNPISDPIEKKKKGGAFKTRGGGDFTHPPKKKFPGTKKKIGFPNGKTIYSPKGGPLMLGREQFKLFFKPPEKPQLKSPPFQRGGLDQGPLGGNPPPPSPWEAGPFPHGGGG

SEQ ID NO: 257340 - protein, 280 aa, Zea mays
  Clone ID: MRT4577_16627C.1.pep
GPLRGPAWGREIQKKKKKKKKSDRGGRVYSGPGDSTASAKGPIKKETELLPPPNTSTSDAVKDSNPMETISEAGNLADAKSTSFQPPQVQHGWGGVPGRPSLAEIVKMGRPQAKSGARPVANNAAKPVGGSVAANANLNTVLPSEGDRVTAEKLPNGTIQSPSVPKEDSVGILPPGQGSDVPEGIGAASANVSAPRSFTLEVKNDDAGDANEQTKETSGSNATGLTSPGPLSPSDKGTILNNDLIEKTDVYLSDEHSFEQTKMQIQMVICLLQRMSWTLD

SEQ ID NO: 257341 - protein, 175 aa, Zea mays
  Clone ID: MRT4577_166280C.1.pep
MDSDYGVPRELSEVHKKRALYQPEGTTVRVEYGDAAIAADQACAHVISHAFPHTYGQPLAHFLRKTAVVLDAKVISEHPVVRGGIVFCGTESPRGHDVVWGLYEAIKAPHQNSKLLGFLGGSDGLLAQRTLDITNEVLASYKNQGGYDMLGRTKDQILFLTLVSLFLQGLSWKGW

SEQ ID NO: 257342 - protein, 184 aa, Zea mays
  Clone ID: MRT4577_166281C.1.pep
MDPTTPVLALSKAFASSRTKPFLLLAPLRRRSLFAARASVPSSPSVPGDLLISLARLALRGPGPPAAPRRWFASVSSASPLASGGPPRGGGGRGNGDGDGGGGGDGWKRPRASQGAGVVEEAAAQGADVIVLDVGGMSCGGCAASVKRILESDPQVRSATVNLATEMAVVWAVPEDSGVQDRKE

SEQ ID NO: 257343 - protein, 616 aa, Zea mays
  Clone ID: MRT4577_166282C.1.pep
MDSDYGVPRELSEVQKKRALYQPEVPPCLQGTTVRVEYGDAAIAADQAGAHVISHAFPHTYGQPLAHFLRKTAVVLDAKVISEHPVVRVGIVFCGRQSPGGHNVVWGLYEAIKAHNQNSKLIGFLGGSDGLLAQRTLEITNEVLASYKNQGGYDMLGRTKDQIRTTEQVNGAMASCQALKLDALVIIGGVTSNTDAAQLAETFAEAKCATKVVGVPVTLNGDLKNQFVETTVGFDTICKVNAQLISNVCTDALSAEKYYYFIRLMGRKASHVALECALQSHPNMVILGEEVAASKLTIFDITKQICDAVQARAEKDKNHGVVLIPEGLVESIPELYALLQEIHGLHGKGVSVENISSQLSPWASALFEFLPPFIRKQLLLHPESDDSAQLSQIETEKLLAQLVETEMNRRLKEGTYKGKKFNAICHFFGYQARGALPSKFDCDYAYVLGHVCYHIIAAGLNGYMATVTNVKSPVNKWRCGAAPISSMMTVQRWSRGPSATQIGKPAVHMASVDLKGKAYDVLRQNSSRFLLEDVYRNPGPLQFEGPGADSKPISLCVEDQDYMGRIKKLQEYLEKVKSIVKPGCSQDVLKAALSAMSSVTETLNIMTSSSTGQTAL

SEQ ID NO: 257344 - protein, 619 aa, Zea mays
  unsure (1)..(619): unsure at all Xaa locations
  Clone ID: MRT4577_166283C.1.pep
MDSDYGVPRELSEVQKKRTLYQPELPPXCLQGTTVRVEYGDAAIAADPAGAHVISHAFPHTYAQPIAHFLRKTAVVPDAKVISEHQAVRVGIVFCGRQSPGGHNVVWGLYEAIKAHNQNSKLIGFLGGSDGLLAQRTLEITDKVIASYKNQGGYDMLGRTKDQIRTTEQVNGAMASCQALKLDALVIIGGVTSNTDAAQLAETFAEAKCATKVVGVPVTLNGDLKNQFVETTVGFDTICKVNAQLISNVCTDALSAEKYYYFIRLMGRKASHVALECALQSHPNMVILGEEVAASKLTIFDITKQICDAVQARAEKDKNHGVILIPEGLVESIPELYALLQEIHGLHGKGVSVENISSQLSPWASALFEFLPPFIRKQLLLHPESDDSAQLSQIETEKLLAQLVETEMNRRLKEGTYKGKKFNAICHFFGYQARGALPSKFDCDYAYVLGHVCYHIIAAGLNGYMATVTNLKNPVNKWRCGATPISSMMTVKRWSRGPSATQIGKPAVHMASVDLKGKAYDVLRQNSSSFLLEDVYRNPGPLQFEGPGADSKPISLCVEDQDYMGRIKKLQEYLEKVKRIVKPGCSQDVLKAALSAMSSVTETLNIMTSSSTGQTPLSH

SEQ ID NO: 257345 - protein, 127 aa, Zea mays
  unsure (1)..(127): unsure at all Xaa locations
  Clone ID: MRT4577_166284C.1.pep
MVAIKYNKRGFMASNSKNFRVKEHASFTSQVIIITHRGQIGIVYTPEMHCYSSHIAVKFADLMPNTNRRSVKELDKXTKFMKNGYAGTVNMIPSLAYXVQTFTANPPLXRFTVPDISHTELLKSSDS

SEQ ID NO: 257346 - protein, 117 aa, Zea mays
  unsure (1)..(117): unsure at all Xaa locations
  Clone ID: MRT4577_166285C.1.pep
LRHTVIGFCRSELIFFASYVWISAVFFFDYGSHFFGGRGGSXPXXALSDFWVRMHFLCYGWVFGVLLPPGILVPTVPFVREYRGFCLCVVCCDVGRFCVWVARFVKFSVVDVLCLPS

SEQ ID NO: 257347 - protein, 48 aa, Zea mays
  Clone ID: MRT4577_166286C.1.pep
LIYKAIPKGKQQWARTTWTTVFEGVNCPLQGLPGGAQKWAGGCPLPPG

SEQ ID NO: 257348 - protein, 72 aa, Zea mays
  unsure (1)..(72): unsure at all Xaa locations
  Clone ID: MRT4577_166287C.1.pep
MATTMLSGTTGPLQQVQGGGLTEFCGLVRSCGSLAMRRNATFDDLMSRRXLRTQAVCTSCGTPRRAPTDAKA

SEQ ID NO: 257349 - protein, 62 aa, Zea mays
  unsure (1)..(62): unsure at all Xaa locations
  Clone ID: MRT4577_16628C.1.pep
MASKRILKELKDLQKDPPTSCSAGPVGEDIVHWHASIMGPSVSPFAGGVFLLNISLXPDYPF

SEQ ID NO: 257350 - protein, 61 aa, Zea mays
  unsure (1)..(61): unsure at all Xaa locations
  Clone ID: MRT4577_166290C.1.pep
MVNIATMALLKPAAKAAARSAPSTSSGSVSLRVRTGQAAKXAALTMYETSTLAGAFLAALA

SEQ ID NO: 257351 - protein, 62 aa, Zea mays
  Clone ID: MRT4577_166291C.1.pep
TTPLPIFFTLNSPFTFSKTPFLTLYFPTNFLNITHTFSPTLKNPLLLKTQSFYHPFPFQNPQ

SEQ ID NO: 257352 - protein, 140 aa, Zea mays
  unsure (1)..(140): unsure at all Xaa locations
  Clone ID: MRT4577_166292C.1.pep
LSSGLAQMKDWKFYLTNVPRELNWISAPNSRQTIEEELPKSGLGDTXLLKTTDHRRRLMTTTARLYHSTERVKERTWTMCXSDEISTSSFQDLNQQTQSLTHADTSLDAIGANXIGKTKKILAVYXPRMDTNKLHHSVGA

SEQ ID NO: 257353 - protein, 131 aa, Zea mays
  Clone ID: MRT4577_166293C.1.pep
MIVTTTDLGLLRSKQLFTNDRYCEILTHALALEMRELSDNLSAADLRYISLEVADASSGTDTLLDLHNLIDNHMMDTGCDADVPDTSSDRDNDHNESLYHEKLRHVVTNLDEKLTSQVRNKVIRKACVAGN

SEQ ID NO: 257354 - protein, 300 aa, Zea mays
  unsure (1)..(300): unsure at all Xaa locations
  Clone ID: MRT4577_166294C.1.pep
MMDHLSLVPYDGAGGGGDAAGGKYKECMRNHAAAMGGQAFDGCGEYMASSPDTLKCAACGCHRSFHRRXGVGEPVRAARLLPPXPPPPALPAXAAALPPPPPPPGXLQGFLPSVPVPVPAPPPHLALAYHAVPNAAAAPXGSPRAPAPRRRRAWTTSASASASRPAAARAAAAAAXRRKRFRTKFTPEQKERMREFAEKQGWRIQRNDDGALDRFCDEIGVKRQVLKVWMHNHKNQLASNSVAAAATADIGLSPATGAGTATGTGTGVGITGDGDDDDDDDTDSPPRAAVSSPSPSPIRV

SEQ ID NO: 257355 - protein, 83 aa, Zea mays
  Clone ID: MRT4577_166295C.1.pep
TFMQEQGANQFFFFCYPVWHPPLYSFCSPPICFFLFSLLTFFDRRCFFSVSKFNPCTNAYSDKVKVSPIPFLAPPPPPIKLCL

SEQ ID NO: 257356 - protein, 26 aa, Zea mays
  Clone ID: MRT4577_166296C.1.pep
LFETGNFLRHLNRAMKDYSYQVNLHE

SEQ ID NO: 257357 - protein, 93 aa, Zea mays
  unsure (1)..(93): unsure at all Xaa locations
  Clone ID: MRT4577_166297C.1.pep
CPLGASASGCPCLVLGRLARLACLLSSHGCAGSVRPPCALFQXGFSFCLWLGYSYSFSPPALGWPAVRRSRXSTMTSAPAFAVAWVVPGFPGR

SEQ ID NO: 257358 - protein, 452 aa, Zea mays
  unsure (1)..(452): unsure at all Xaa locations
  Clone ID: MRT4577_166298C.1.pep
MLTAPPLAAAARRAATAAACGAAHRLLLPVCFLSSNPSAPSTLVPRRRFGHMSQECMAPRAPLPPVGRNFAVAVGDEILYGEAPELVVVSFYRFADFPDHAAFRLPLKELCEELRVSGGIILAPEGINGSICGTPVAVDKILNFIQEDGRLKGLRMIQSPVTPEDEAIHHGHTSHSPVGAGEDAPFRWDHVRVKLKKEIVTFGDPGVMPTKIVGKYVKPKDWNDLISDPDTVIIDVRNMYEIRIGKFKKAVDPRTNSFREFPTWVDDQFQLVQSGTXGQGEMIMEPVNHRQXNASKSKQLPRVAMYCTGGIRCEKASSFLLGKGFKEVYHLEGGILKYLEEIPKAESLWEGECFVFDKRVSVGHGLAQGTHKLCYGCKQPVSDEDMVSPQWEYGVSCPHCFATKSEEEKERARARQRQFETFGVIGGPHMGRSPRGSAANNAVEFIQLPKPV

SEQ ID NO: 257359 - protein, 58 aa, Zea mays
  Clone ID: MRT4577_166299C.1.pep
HTGQNHKLLSMQLRKLSLLIVRERLWVPDTCIGEIPPVIGVGSGFCRTHKYGYVTNVG

SEQ ID NO: 257360 - protein, 263 aa, Zea mays
  Clone ID: MRT4577_16629C.1.pep
LAVLSSSFPPSAAAFRREVVPYMAPLLGFLARTGAPFLVNAYPYFAYKADPARVDLGYALFEPGAGGVADAATGLRYDNMLHAQVDAVRAAICAANYGRALEIRVSETGWPSQGDDDEAGATPENAARYNGNLMRLVAQGKGTPAAPDEPLQVYVFALFNEDQKPGPASERHYGLFKPDGTPAYNVGVKAPTITVPKGSGSGNGTGTGGLVVAQGPGGADGVGPGTGYYTVSAASVYNVKSRQRRRRSLVAAAAVLAMVSGLW

SEQ ID NO: 257361 - protein, 125 aa, Zea mays
  Clone ID: MRT4577_1662C.1.pep
AYSLLLSLLESSRLVSLSNFPFSYSVRILSFCESIQECTLRQRSKFSFLFSLSMPCELTLTSNLKSFGAVHLWLHQILSVCSYYIRRLQPAFRSKTSHDQKGRPPISMIVVPALYLRPGTCRRAS

SEQ ID NO: 257362 - protein, 183 aa, Zea mays
  unsure (1)..(183): unsure at all Xaa locations
  Clone ID: MRT4577_166300C.1.pep
MYKIDDIDEDEVPTTVMRTMAIYDMRLQEQQEQDQPFPQQWHNLQVKMRNRKSSTTSREMNSRAWCHIQSKTLWEPSGCSATSKLYQMDMKSVVLNGPIKEYVEQPXGFKDDRYPDHVYKLSKALYRLKQAPRACQSTHRXLLKRFGMKDTKPIKTPMGTNRHLDLNMGDFKPIPRNHLVAVK

SEQ ID NO: 257363 - protein, 69 aa, Zea mays
  Clone ID: MRT4577_166301C.1.pep
YFPILMGWEGPSLARFPAPSLAFASCLFCLQGFDLFWAYFFHVLSGVRLRVCKKILVFPLASLRGDLKQ

SEQ ID NO: 257364 - protein, 79 aa, Zea mays
  Clone ID: MRT4577_166302C.1.pep
KEDLFMTHKHPKFFCQLRAVYKRQEPGVVYSFCQLLKLQVTMCTAQNASLMLTASWSWGFCEHSLWHLLPPGQEQIYND

SEQ ID NO: 257365 - protein, 147 aa, Zea mays
  Clone ID: MRT4577_166303C.1.pep
AFLGYKAGMTHIVREVEKPGSKLHKKETCEAVTIIETPPLVIVGLVAYVKTPRGLRTLNSVWAQHLSEEVRRRFYKNWCKSKKKAFTKYALKYENDAGKKEIQLQLETSRLALEEIKLKFIDTSSKFGHGRFQTTDEKQRFFGKLKA

SEQ ID NO: 257366 - protein, 61 aa, Zea mays
  unsure (1)..(61): unsure at all Xaa locations
  Clone ID: MRT4577_166304C.1.pep
MALAFFTAILFVRELIDGYLAQVAHDINLASGNFXAVASAIPGYWRGLVDDLYRPIVVYLR

SEQ ID NO: 257367 - protein, 389 aa, Zea mays
  Clone ID: MRT4577_166305C.1.pep
MSHRKFEHPRHGSLGFLPRKRSSRHRGKVKSFPRDDPKKPCHLTAFLGYKAGMTHIVREVEKPGSKLHKKETCEAVTIIETPPLVIVGLVAYVKTPRGLRTLNSVWAQHLSEEVRRRFYKNWCKSKKKAFTKYALKYENDAGKKEIQLQLEKMKKYASVIRVIAHTQIRKMKGLKQKKAHLMEIQVNGGTIADKVDYGYKFFEKEVPVDAVFQKDEMIDIIGVTKGKGYEGVVTRWGVTRLPRKTHRGLRKVACIGAWHPARVSYTVARAGQNGYHHRTEMNKKVYKIGKAGQETHDASTEFDRTEKDITPMGGFPHYGIVKGDYLMIKGCCVGPKKRVVTLRQSLLKQTSRLALEEIKLKFIDTSSKFGHGRFQTTDEKQRFFGKLKA

SEQ ID NO: 257368 - protein, 173 aa, Zea mays
  Clone ID: MRT4577_166306C.1.pep
GSHDAHLPYLIDSSRVPHQGSIHLVNSQVRNKVRIILVQVPGRYIRENIWSVISFLMSSRSSLGNKVHWRVVVQVDPCVDHKPFLGMMISPDLKALTVQGNKVMSSFPFPLNSCRHPVLTCRVLSSITVCICVQRSTSRGFGHRGYFVVRRPVFRTGTRGLSGPGHGENNSQA

SEQ ID NO: 257369 - protein, 137 aa, Zea mays
  Clone ID: MRT4577_166307C.1.pep
PELCSSIELCTCSSIGLEIEDPKEAGLCGNSDAGFPSWLAQLVGKPTISSIFDSGNEILDHNDFRCISNFHSNMFSSNSSCLNSMSTPEQSYKVGAKGLLDSSFGLSCLAGLEEYSTDAELPDDSDRFLQVLDQLPV

SEQ ID NO: 257370 - protein, 447 aa, Zea mays
  Clone ID: MRT4577_166308C.1.pep
MTLRGLMLLCCTQDSMLHCDAKLKNLCYLKKKKKKKKKLWLLTSAPPPTTGKEEEEGRMSHRKFEHPRHGSLGFLPRKRSSRHRGKVKSFPRDDPKKPCHLTAFLGYKAGMTHIVREVEKPGSKLHKKETCEAVTIIETPPLVIVGLVAYVKTPRGLRTLNSVWAQHLSEEVRRRFYKNWCKSKKKAFTKYALKYENDAGKKEIQLQLEKMKKYASVIRVIAHTQIRKMKGLKQKKAHLMEIQVNGGTIADKVDYGYKFFEKEVPVDAVFQKDEMIDIIGVTKGKGYEGVVTRWGVTRLPRKTHRGLRKVACIGAWHPARVSYTVARAGQNGYHHRTEMNKKVYKIGKAGQETHDASTEFDRTEKDITPMGGFPHYGIVKGDYLMIKGCCVGPKKRVVTLRQSLLKQTSRLALEEIKLKFIDTSSKFGHGRFQTTDEKQRFFGKLKA

SEQ ID NO: 257371 - protein, 389 aa, Zea mays
  Clone ID: MRT4577_166309C.1.pep
MSHRKFEHPRHGSLGFLPRKRSSRHRGKVKSFPRDDAKKPCHLTAFLGYKAGMTHIVREVEKPGSKLHKKETCEAVTIIETPPLVIVGLVAYVKTPRGLRTLNSVWAQHLSEEVRRRFYKNWCKSKKKAFTKYALKYENDAGKKEIQLQLEKMKKYASVIRVIAHTQIRKMKGLKQKKAHLMEIQVNGGTIADKVDYGYKFFEKEVPVDAVFQKDEMIDIIGVTKGKGYEGVVTRWGVTRLPRKTHRGLRKVACIGAWHPARVSYTVARAGQNGYHHRTEMNKKVYKIGKAGQETHDASTEFDRTEKDITPMGGFPHYGIVKGDYLMIKGCCVGPKKRVVTLRQSLLKQTSRLALEEIKLKFIDTSSKFGHGRFQTTDEKQRFFGKLKA

SEQ ID NO: 257372 - protein, 233 aa, Zea mays
  Clone ID: MRT4577_16630C.1.pep
MKNKKREREDRVMEGLGHLLLFAFLFWFSTFMVAPVMTDVTMAALCPGRDECSLAIYLTGLQQAVSGLGALVLTPVVGNLSDRYGRKALLALPATASIVPLGILAYGRTKGYFYAYYVTKTLTAMVCEGTMMTLSLAYVADRVPETRRAAAFGVFSGVCSAGFVGGTVAARFLPVSSTFQVSAVAAVATAVYMKAFLQETDGGASVSSSSSSSSGSSERREALPPAALPPLLQ

SEQ ID NO: 257373 - protein, 391 aa, Zea mays
  unsure (1)..(391): unsure at all Xaa locations
  Clone ID: MRT4577_166310C.1.pep
MSHRKFEHPRHGXSLGFLPRKRSSRHRGKVKSFPRDDPKKPCHLTAFLGYKAGMTHIVREVEKPGSKLHKKETCEAVTIIETPPLVIVGLVAYVKTPRGLRTLNSVWAQHLSEEVRRRFYKNWCKSKKKAFTKYALKYENDAGKKEIQLQLEKMKKYASVIRVIAHTQIRKMKGLKQKKAHLMEIQVNGGTIADKVDYGYKFFEKEVPVDAVFQKDEMIDIIGVTXKGKGYEGVVTRWGVTRLPRKTHRGLRKVACIGAWHPARVSYTVARAGQNGYHHRTEMNKKVYKIGKAGQETHDASTEFDRTEKDITPMGGFPHYGIVKGDYLMIKGCCVGPKKRVVTLRQSLLKQTSRLALEEIKLKFIDTSSKFGHGRFQTTDEKQRFFGKLKA

SEQ ID NO: 257374 - protein, 389 aa, Zea mays; identical to SEQ ID NO: 257367
  Clone ID: MRT4577_166311C.1.pep

SEQ ID NO: 257375 - protein, 389 aa, Zea mays; identical to SEQ ID NO: 257367
  Clone ID: MRT4577_166312C.1.pep

SEQ ID NO: 257376 - protein, 81 aa, Zea mays
  Clone ID: MRT4577_166313C.1.pep
GGGAILSQSLIRCWLIAIIAQWGGQSEDGRCLLICRLVASQRLFGCLCSPVSQGEAWTLDCARNFSGKRLTCRMFVLDMQQ

SEQ ID NO: 257377 - protein, 32 aa, Zea mays
  Clone ID: MRT4577_166314C.1.pep
MASRSSSQQLGAAVAASLLLLLAAGAETLLRR

SEQ ID NO: 257378 - protein, 82 aa, Zea mays
  Clone ID: MRT4577_166315C.1.pep
MELGRGGGGGGGGGKKKKKKKKKKKKKKKKKKNKRKKKKKKKKKKKKKKGGGRFKDTNFKTRSMGRIISLLGPPKPSRWPVY

SEQ ID NO: 257379 - protein, 76 aa, Zea mays
  Clone ID: MRT4577_166316C.1.pep
FLFFVLHHIGWMYSNSSLVPIIRLTLAVGRIYCFATVWCQIVAFYLRPSDLQDMIQPNMSVLSFTQQVHPLWVLHS

SEQ ID NO: 257380 - protein, 51 aa, Zea mays
  Clone ID: MRT4577_166317C.1.pep
FVTRPPTRTNGWIPNTFQNFLPRGGKTSQDLNTYPSGAEIKGSLLRPLTRN

SEQ ID NO: 257381 - protein, 178 aa, Zea mays
  unsure (1)..(178): unsure at all Xaa locations
  Clone ID: MRT4577_166318C.1.pep
KKKKKKKKKKKKKKKKKKKTKTKHQTKKGKKQKKNQTHCWPLPPPPRXPSPIKPPPHCGPHWPCPSRAPFPPXDPVNNPTDPPFPPSPLENPALSPPNPPRNPPPFSPLPKCKSPPPFPLPKIRPPXGYTPPPRSPPXNPLGPGGFPPWPPFLCPXPLPPPFCPFSPSSLAGAPFSPG

SEQ ID NO: 257382 - protein, 41 aa, Zea mays
  Clone ID: MRT4577_166319C.1.pep
LLVGQGFQGYLPLDVPIVFTPSYLLTLARSLAQVTVRALCL

SEQ ID NO: 257383 - protein, 54 aa, Zea mays
  Clone ID: MRT4577_16631C.1.pep
ERVIPNDSKVSCHVYPHLIKAKLNHMRSTSKSLILKRHNVDQSNKIQLYLYIVS

SEQ ID NO: 257384 - protein, 82 aa, Zea mays
  Clone ID: MRT4577_166320C.1.pep
VLCVRMRMCVCVNFFLEPVTVAMKVHYVLFSLLFKLSLKLSTSHQYDFFEKFVSRINNIISPCVCVSVSTTLCVHLYRVFKK

SEQ ID NO: 257385 - protein, 363 aa, Zea mays
  Clone ID: MRT4577_166321C.1.pep
MIIFDPCLMHLTYCNFYVNLKLGVNQHRERGLNMGLGLQRMNRARRGKLPIVITEGRIRPVAPIVAAKFATECNIAVRNHVLVLKSWKEYEKHPGLFKLFTAKLSAKFDINTEDALVKNACFQMMRNALRQQRYKLKKQYFDPFPLHLVRKTSPIKSTSDEQWNDLVEHWKGPKNMATCEHNKGNRGKVKFHQTTGSRSYMVHVENLGDKYMDQEPDALDLFKECHYSMKKQGYTSTLNLAITQMEDKRSTPGEGEQPMSTTQVVADVLAENTKKNRFLQNVGIQNARPRSSVQNIEAQLEVERKANAELQSLVSIQRERMDVLLKQVHEAELVRIREQEEMKKKQDAMDAQLELMLSQIQPS

SEQ ID NO: 257386 - protein, 123 aa, Zea mays
  Clone ID: MRT4577_166322C.1.pep
SYCLPFLEDGFDQFDDNMTNQGEGITQPGGKGVNQHRERGLNMGLGLQRMNRARRGKLPIVITEGRIRPVAPIVAAKFATECNIAVRNHVLVLKSWKEYEKHPGLFKLFTAKLSAKFDINTED

SEQ ID NO: 257387 - protein, 124 aa, Zea mays
  Clone ID: MRT4577_166323C.1.pep
LKLCICLPLYFKLCFNILYTRSRSCILDSHIFKKPILLCVLSKHIRYNLSRRHWLFTFSWCRSLVFHLSIECNRHTCNCFMRHFNISIANSIILPCNNQLYSGSVALLFLNVVALLEQIQCNRI

SEQ ID NO: 257388 - protein, 507 aa, Zea mays
  unsure (1)..(507): unsure at all Xaa locations
  Clone ID: MRT4577_166324C.1.pep
VVYTDPLQYGGAPGEGWFPXSRWLPPSGVQVGSLFRGVGDPTTPMWASSEGCERVSWRRRMNTDGMPLIPALPVSAQDAMEIHRAMGGAVAPEDWQGREDGPVYRLGPGPAVLNLTYLGNDSMATIENVFAIIEGAEEPDRYVILGNHRDAWTFGASDPNSGTAAMIELAKRFSMLQKQGWRPRRTIIFCSWDAEEYGLTGSTEWVEENREMLYSRAVAYLNIDVSVVGPGFLPSTTPQLDELLQQVTKVVQDPDNSSQTVYDSWIKSSTPLRVLRLGDGGSDYSAFVQHVGIPSMNIIXEKDQDIRFTTPYMMTTYGWRNSEILRSVGMXAASIWGMMALRLANEDILPFNYMSYAIELEAYTKTVENEVKGTTVTCSPLYNSIRTLGAAATKVNNEQKELQKLLLSKQLNKDSLKIRQLNDRLMQTERAFTSREGIFKLEWFKHLVYGPSDQNDWDTAVYPGIANAIASARSSNTSESWKFVQHEIYRVARAVTQASAILSGRLT

SEQ ID NO: 257389 - protein, 128 aa, Zea mays
  Clone ID: MRT4577_166325C.1.pep
ALATNRRHTNWDDSTAKPHGRWAQPDTLRVARVRWPRRRPGKRPRRTGASPSGVGVRSGGRSPRASPRSWQRGQAARPRRCRRASLRPARYGLDHSRSETSTRCDRDHMQALFFFAPIVENGNENKKN

SEQ ID NO: 257390 - protein, 129 aa, Zea mays
  Clone ID: MRT4577_166326C.1.pep
RRGWFFQITSSRGFFFFLTPGAHTGILALNSKKWALALQVKSFFRVPKRAGPFLFFWCRGWGSPYKFGVFQVLIKFPKLLGVEGFWTFSGGLGVKFKNFKCWGGGVFSQGGAGQVRGPFFFGFFWKAGG

SEQ ID NO: 257391 - protein, 133 aa, Zea mays
  Clone ID: MRT4577_166327C.1.pep
KKPPGGPKTERPPPGGGDFLKTGGSGFSPVEGGEVGAPHLIGGGPPLGPPEFFPFCLPAGFVGKIERENHFPPGNPFFPFFPPPFYGPLMGKRGGPRGPGPDFWGYPPGLTPIFKAEFVLEGRSFLTKIESLI

SEQ ID NO: 257392 - protein, 67 aa, Zea mays
  unsure (1)..(67): unsure at all Xaa locations
  Clone ID: MRT4577_166328C.1.pep
LXGSPETAIRDDSMKSPAARAGRSRPTQFTTFRDGHPTGKARIMPALTSKRICMLEGSAHRYWIKCP

SEQ ID NO: 257393 - protein, 115 aa, Zea mays
  Clone ID: MRT4577_166329C.1.pep
KTQRLFFLLPGPRGGFFLKGGTPFWGFKKWPVFGFFFVKKRVLVMGKNFFFYGLKKKPGGVFFRGFGPQMFLQKFFFFRLLGKGVCPSGIGPRFSIVVHYRWVCKNKKEEVRIML

SEQ ID NO: 257394 - protein, 109 aa, Zea mays
  Clone ID: MRT4577_16632C.1.pep
MAASASRARAGAGGAGEEYEDLLPVMGERLGVAGLLAELRAGFRLLADRERGAITPDSLRRGAAAALGVAGMAHADRRQGQAHRQDAAPLEEDPRAYPACMGDVHSFFL

SEQ ID NO: 257395 - protein, 64 aa, Zea mays
  Clone ID: MRT4577_166330C.1.pep
WGAFWGESGYIRIFRHSDGDMKWCGIDPSPQDGTGCDGGPPQVTCCGSCGIWYDSSYPLGASLV

SEQ ID NO: 257396 - protein, 181 aa, Zea mays
  Clone ID: MRT4577_166331C.1.pep
MAAGRGINQLLRKTLQSQSSGSSLLSSFRGKHEESSAGLRALALLGVGASGLLSFGTIASADEAEHGLAAAEYPWPHAGILSSYDHASIRRGHQVYQQVCASCHSMSLISYRDLVGVAYTEEETKAMAAEIEVVDGPNDEGEMLTRPGKLSDRFPQQLYPKEHERLIIDGGAPPPDLSPIT

SEQ ID NO: 257397 - protein, 90 aa, Zea mays
  Clone ID: MRT4577_166332C.1.pep
TKQMGNFCLNQNKSTRLFFGGGAVKFRPPNFFSPFFGKLTPFFHLFFPGVNQAWTLSVYGPHPSLFRIMSWHVLLAASTFKKKKIPGFFL

SEQ ID NO: 257398 - protein, 77 aa, Zea mays
  Clone ID: MRT4577_166333C.1.pep
REHEQERAVHGERDPQVPDERGQAHEEQQQRVRREHPAPCCAATASPKTSERHRCSSAADMSMAVAACGLVWWLPCE

SEQ ID NO: 257399 - protein, 133 aa, Zea mays
  Clone ID: MRT4577_166334C.1.pep
DAWADAWADAWVRAQQSALPPPWGWGSHFHPVAAELNHPSRCRLRLRAPSPPFPSLPPAGLPDSEPKESDDAPRARIAVASVTNKGGSCNNDRKPNTSRIESARLVGPVGAAGAGGTAMPEAARGLLDPAAEG

SEQ ID NO: 257400 - protein, 214 aa, Zea mays
  Clone ID: MRT4577_166335C.1.pep
MTPAASPAQFAPAPLRMGYGRPAPVMGMWSSEPFKVDSGGHATCSASTVMEADTKLETSRLQDVPQVALEPERSTDQETSRPPERVRTVMRRLAQNREAARKSRLRKKAYIQQLETSRMKLAQLELELQRARRQQGAYANGSMGDPALGYTGSIDPGVAAFEIEYRHWVDEQKRHTAELMSALQGQQTSSTSELELRLLVETGLSNYEHLFRIK

SEQ ID NO: 257401 - protein, 40 aa, Zea mays
  Clone ID: MRT4577_166336C.1.pep
QVMPFLMYLFNDFDQICFLVFLLVSTQLLNLINYISPRTN

SEQ ID NO: 257402 - protein, 156 aa, Zea mays
  unsure (1)..(156): unsure at all Xaa locations
  Clone ID: MRT4577_166337C.1.pep
MTGAIDVSVYYRLASEHKLPAAYDDAWAALRWAVTLGEDLWLLEHADLSGVFLVGCSAGANIVHDTXVRASAAGVAIRGLALVPPYFTGREAMGGETVFGPEIRSSMDRTWRDDVRGRRGAQGLRACCVKWEQNKENRKRNGKRESVNTVALGDRI

SEQ ID NO: 257403 - protein, 176 aa, Zea mays
  Clone ID: MRT4577_166338C.1.pep
MAGGNNKDGKKKRVLVVGAGAAGMSCAHHLSEHPDKFDVTLIDAVDYCGGQAFSIDIDKERHGAAWLNQGVQGGSYIFHHTMTMFARQGHHADPVNLHVSFGKDDIFWTNVFPTELLARHQKEIRRFNTMLKIVRWFELFFALIPIKVLFKMFMFSREFTNTVAMPMIALFLCTGN

SEQ ID NO: 257404 - protein, 78 aa, Zea mays
  Clone ID: MRT4577_166339C.1.pep
GQDSLKVTAPDGLKGNYECAIGKFGMAQYGGNMVGFIAYPKANRKACKSFDDLDISYKAKSGEFTTFLLDDMGDCYFA

SEQ ID NO: 257405 - protein, 143 aa, Zea mays
  Clone ID: MRT4577_16633C.1.pep
LNNLTTTSVKIVDNVHSPCRHQRPPLDKSSYVSYIEQYINNLAPVLEPDKWNQLIKGVEGAIKFCLSEFKGRLFLVGETTQDYVVVLTSHTDSGWSTSAFQFLCQGAQLIKCYALHVVRSPCVVLVRSYGSIQVYCCPVCISH

SEQ ID NO: 257406 - protein, 81 aa, Zea mays
  Clone ID: MRT4577_166340C.1.pep
LISLVATLLLSGLLQGTMAHTYWACSCPRQEHPLSRSCFIYPPGGVHGKDAWADKTPVLLLVRMHAWARSMGAMVISYVGS

SEQ ID NO: 257407 - protein, 56 aa, Zea mays
  unsure (1)..(56): unsure at all Xaa locations
  Clone ID: MRT4577_166341C.1.pep
VNVEVHKHMGIACNLLVISNFPKDLVLPSEVIXYCYKKKKKKGRPXAIVRVGRTGL

SEQ ID NO: 257408 - protein, 65 aa, Zea mays
  Clone ID: MRT4577_166342C.1.pep
ILICICSFEHRNQIDDGYAITHDVLAVVSPLYSLYASNDNPAQERKGSSQTFNDNHMAGKTEMKC

SEQ ID NO: 257409 - protein, 72 aa, Zea mays
  unsure (1)..(72): unsure at all Xaa locations
  Clone ID: MRT4577_166343C.1.pep
KKKIYRFPKCLRKTMFPRSRKHFLEIIPVKRLVVYCCYSDEKLPVLITLGPIPLFQMFLLEQKKKTKNQFFX

SEQ ID NO: 257410 - protein, 54 aa, Zea mays
  Clone ID: MRT4577_166344C.1.pep
HDSTTAATPFSVSILASSLITRFIPLWPLVCFQTSSSSSPAPPVRLFRTLSASE

SEQ ID NO: 257411 - protein, 104 aa, Zea mays
  unsure (1)..(104): unsure at all Xaa locations
  Clone ID: MRT4577_166345C.1.pep
ELREVKGKLVNQSAYILLIMPNTSAKGEEDKLVDHRAVNVTVIIDRFRIQDEPLFAKKXRALSYXITHYDYLCCVRSIKSNHVNKGVDRSNKLLLTWLKDLQFF

SEQ ID NO: 257412 - protein, 256 aa, Zea mays
  Clone ID: MRT4577_166346C.1.pep
MAATYPMPDPPVLNNYAIAQRLDSSATETTGRDKSIGYLDIFVHQARDIHNVCIYQKQDVYAKLSLTSDPQVSCSTKVINGGGQNPVFDEGLRLDVRSVEASLRCEVWMLSRVKNYLEDQLLGFTLVPLSDILLADGNLAQEFSMSSSDLLHSPAGFVHLSLSYVGSSPDVIEISSLNKSASAVTDCGNGSLDPCEIEKMEFPDLNMVNENEMMVSKYFEMDCESAVKAENCKLPQHDADEPGPEGLKITPQEYPD

SEQ ID NO: 257413 - protein, 108 aa, Zea mays
  Clone ID: MRT4577_166347C.1.pep
WQNSILDRPLNQTIIPNRTPSLGPNLGGPKFPAPLPQKKSGENTKTQAQSPPPFASPTQTDTYGMDHAPNKGRNKTPINDPTPTLQFPTLTFKISAPPTQQPPKIILL

SEQ ID NO: 257414 - protein, 254 aa, Zea mays
  unsure (1)..(254): unsure at all Xaa locations
  Clone ID: MRT4577_166348C.1.pep
MEPPAASSSSDPHSPSPSPSPSASPAKRSAWKHPAPNDTAVMDANNWPALSDAAKGNKLPDSSAPSPAPVAAPSAVANSSSSQKHGAHHGRHKSARRIGGGGDHSPRDHPDRNVAAGWDHAAGGGGGRGAQRNHNNGGGRRGNGAPASATGPSHHGSGAGGGSGGGFGARRRGAYEPPFYRGPPPPMGMGHYMRGAPPPPPMTVAPPFMGPPPXPVSSMRPYAGPMMFHDMPSPMSPVSPIYFYGPPPPEALRG

SEQ ID NO: 257415 - protein, 560 aa, Zea mays
  Clone ID: MRT4577_166349C.1.pep
AEKAEAHLYTIIKVARDEDLKEQIGKGIYFDLVDHEKVHNFRIQKQMPFSCFKEEVAKEYGIPVQFQRFWLWAKRQNHTYRPNRPLTVHEETQSVGQLREISNKAHNVELKLFLEVELGLDLRPLPPPEKGKEDILLFFKFYNPEKEELCFMGRLFVKALGKPSEILAKLNEMAGFPPDQEIELFEEIKFEPNVMCETIDKKLTFHYSQLEDGDIICFQKSPGAEYDAPVRYPDVPSFLEYVHNRQVVHFRSLEPTRPDDFSLELSKLHTYDDVVERVARQLELDDPAKIRLTPHNCYSQQPKPQPVKYRGVVHLSDMLIHYNQTSDILYYEVLDIPLPELQFLKTLKVAFHHPTKDEVVIHSIRLPKNSTIADVIYDLKTKVELSSPNAELRVLEVFYHKIYKIFPLHEKIENINDQYWTLRAEEIPEEEKNIGPNDRLIHVYHFKKDINQTQQIQNFGDPFVLVVHEGETLAEVKKRIQSKLQVSADEFSKWKFAFISMNRPDYLQDSDVVPTGFQRREVYGAWEQYLGIEHADTAPKRVYTVNQNRHAYEKPVKIYN

SEQ ID NO: 257416 - protein, 122 aa, Zea mays
  Clone ID: MRT4577_16634C.1.pep
IMTLPVASVQCTAMIYYCSSTTLVPHPVTPSGGMSASVTREYNSSSSFSSLVVMCQTRTRTHLDTVRIALLTDVLAEFHINQDVSECARASERNILVFPSITIRGASIYQNESHADGGSPWW

SEQ ID NO: 257417 - protein, 104 aa, Zea mays
  Clone ID: MRT4577_166350C.1.pep
MSRIEDVLGADLATRDDPKNAAGSMRIASLPCSDDTDKVVSDAKAEVERMRRMEPVPPAPMLYDFVGPRDQDLGPRVTKISSVATKRFSYLENLGGTRSPIARH

SEQ ID NO: 257418 - protein, 176 aa, Zea mays
  unsure (1)..(176): unsure at all Xaa locations
  Clone ID: MRT4577_166351C.1.pep
GARESNXNRRXXRIXXXKGXRXRGXLXTXAXXXASRAEARALAETISTDVNDDAESAANGADDTKMAVGGFGSYDNTPYGNNPHFGRGFGQYGGVPYGYKPYFRHGFGQYGGGPFEGXDNGDGYDNRPYYYKRGSDGDYNFPDGGKVYNSGFGQNYDGDEAYYRGDGYTGYNCPGR

SEQ ID NO: 257419 - protein, 746 aa, Zea mays
  Clone ID: MRT4577_166352C.1.pep
MASRKSPVAAEERAGTGEGKGERCAVEEVALVVPETDDPSLPVMTFRAWALGLGSCVVLIFLNTFFTYRTQPLTISGILAQILVLPAGRFLAAVLPDREVRILGGRLGSFNLNPGPFNVKEHVIITIFANCGVSYGGGDAYSIGAITVMKAYYKQTLSFACALLIVLTTQILGYGWAGLLRRYLVDPAEMWWPSNLAQVSLFRALHEKEEEGGKSRGPSRMRFFLIVFFASFAYYALPGYLLPILTFFSWACWAWPHSITAQQVGSGYHGLGVGAFTLDWAGISAYHGSPLVAPWASIANTAVGFVMFIYVIVPLCYWQFNTFDARRFPIFSNQLFTASGQKYDTTKVLTKDFDLNVAAYDSYGKLYLSPLFAISIGSGFLRFTATIVHVLLFHGSDMWKQSKSAMNAVKLDVHAKLMQRYRQVPQWWFLMLLLGSVVVSLLMSFVWKEEMQLPWWGMLFAFALAFVVTLPIGVIQATTNQQPGYDIIAQFMIGYALPGKPIANLLFKIYGRISTVHALSFLADLKLGHYMKIPPRCMYTAQLVGTVVAGVVNLAVAWWMLDNIENICDVEALHPDSPWTCPKYRVTFDASVIWGLIGPGRLFGRHGLYRNLVWLFLVGAVLPVPVWLLSRAFPEKKWIALINVPVISYGFAGMPPATPTNIATWLVTGTIFNYFVFRYRKGWWQKYNYVLSAALDAGTAFMGVLIFFALQNAHHELKWWGTEVDHCPLASCPTAPGIAVKGCPVF

SEQ ID NO: 257420 - protein, 23 aa, Zea mays
  Clone ID: MRT4577_166353C.1.pep
MYCCCHHHHHLFEDIHHHHIGTF

SEQ ID NO: 257421 - protein, 194 aa, Zea mays
  unsure (1)..(194): unsure at all Xaa locations
  Clone ID: MRT4577_166354C.1.pep
WLSRRHVLLHQIVMFIYVIVPLCYWQFNTFDARRFPIFSNQLFTASGQKYDTTKVLTKDFDLNVAAYDSYGKLYLSPLFAISIGSGFLRFTATIVHVLLFHGRYFSPSLPLXDRRIHERCADQSSLYVLLDXDMWKQGKSAMNAVKLDVHAKLMQRYRQVPQWWFLMLLLGSVVVSLLMSFVWKEXMQLPWXGD

SEQ ID NO: 257422 - protein, 153 aa, Zea mays
  unsure (1)..(153): unsure at all Xaa locations
  Clone ID: MRT4577_166355C.1.pep
MAAAAKAGLLNFWGSPFGKRCRIALGKKGGPYKNREQDLLNKGELLLRSNPIQKKIPVLLHAGRPVCKSLVILQNINKAVAEXAPFLPKDDPYARGKGRFWADYFDKKIYDSQTRLXNFKGEARNQAKKDRXEVLKTLKGELGDKPFFGGGPS

SEQ ID NO: 257423 - protein, 122 aa, Zea mays
  unsure (1)..(122): unsure at all Xaa locations
  Clone ID: MRT4577_166356C.1.pep
PVWLLSRAFPEKKWIALINVPVISYGFAGMPPATPTNIATWLVTGTIFNYFVFRYRKGWWQKYNYVLSAALDAGTAFMGVLIFFALQNAHHELKWWGTEVDHCPLASCPPAPGIXRQGCPVF

SEQ ID NO: 257424 - protein, 54 aa, Zea mays
  Clone ID: MRT4577_166357C.1.pep
PTGPPEKNLCVSQREFLKLPESKLSSRTSLIVPPDMQPSPALNDGDPLRDMNAN

SEQ ID NO: 257425 - protein, 114 aa, Zea mays
  Clone ID: MRT4577_166358C.1.pep
PSRATMSSSAASTAPASPPRTCATWSGTTAVTSAALTEISGSSAMRLCSVARAQVTDIEELKPEESYRNDDEADDCVEYNDAYADQVRADAHCERDCKNVAHLLILTRVHYVCS

SEQ ID NO: 257426 - protein, 50 aa, Zea mays
  Clone ID: MRT4577_166359C.1.pep
LHLLPRLSAIPPLTPSFLRRGATSYWMGSILDVMSCTHNGLRSCSGASTG

SEQ ID NO: 257427 - protein, 96 aa, Zea mays
  Clone ID: MRT4577_16635C.1.pep
YVGLTFVVDGGRIRVERDSTLCGCLNKEVGHHCGVTEPGDRSCVSYVLTHCICLCSLFSHQSVKELFVSFWCVDFEKCSSQIYYFEQYGSSNTSHL

SEQ ID NO: 257428 - protein, 44 aa, Zea mays
  Clone ID: MRT4577_166360C.1.pep
EKKNYQIPFSISWLLLPLSPSVFPHPYIFLKSCNVTTNTYSCNV

SEQ ID NO: 257429 - protein, 68 aa, Zea mays
  Clone ID: MRT4577_166361C.1.pep
RNTTLRIQETFWGLGSIIYITCTGDKKTCSGATPALCEHLKADWPIWLEGRYSRSACSKQQGCSKVTC

SEQ ID NO: 257430 - protein, 58 aa, Zea mays
  Clone ID: MRT4577_166362C.1.pep
ARNSARAGLGLRTTTAPSNHPRGARLCLCRCISTSADPQTQYERVSGAPGGSSGMRHG

SEQ ID NO: 257431 - protein, 85 aa, Zea mays
  Clone ID: MRT4577_166363C.1.pep
MSRVHPSACASPPLYVELPLGPRVPSPPYWGMLPSSPPIRHASRTRARVVISSGFPESRDERGRCPRSSSRLARPAAAGKGGEEL

SEQ ID NO: 257432 - protein, 65 aa, Zea mays
  Clone ID: MRT4577_166364C.1.pep
FHPLKGKPLGPFSGGQPFYGPLIMGLFPPLKHLSSQKNVKPLLHEKFLMPKWFPKHGVPPTNQFV

SEQ ID NO: 257433 - protein, 199 aa, Zea mays
  unsure (1)..(199): unsure at all Xaa locations
  Clone ID: MRT4577_166365C.1.pep
MASLADSFLADLDELSDNEAYPEEDNAEAVGMDEDGDDDMPDLESLNYDDLDSVSKLQKTQRYSDIMQKVEGALEKDTYLSNQGFILEEDPEYQLIVDCNALSVDIENELIIIHNFIRDKYRLEFPELGSLVHHPIDYARVVKKIANEVDITLVDLEGLLPSAVIMVVSVTASTTSGKPLSQENLVKXIEACDRALNLD

SEQ ID NO: 257434 - protein, 267 aa, Zea mays
  Clone ID: MRT4577_166366C.1.pep
MAMMASNNTRPRKLSLPCRTRTFQALILSTAVFLAASTAVVVGKEPQPPSSSGGGCHYRFELTHVDANLNFSSDELMRRAYDRSRLRAASLAAYSDGRHEGRVSIPDASYIITFYLGNQRPEDNISAVVDTGSDIFWTTEKECSRSKTRSMLPCCSPKCEQRASCGCGRSELKAEAEKETKCTYAIIYGGNANDSTAGVMYEDKLTIVAVASKAVPSSQSFKEVAIGCSTSATLKFKDPSIKGVFGLGRSATSLPRQLNFSKFSYCL

SEQ ID NO: 257435 - protein, 168 aa, Zea mays
  Clone ID: MRT4577_166367C.1.pep
MDDCGKPFVKRELRLSLNPAPCGDDNPTTPTGAASDGGSSACTSAVALFVLGLNSAIAIYGSRHDPQSILFVAVSFFCVVLLFHLLRAFERTPPGSPRRLQVKAAIWVVTTALTVMFSGRVAPLMPAPVAAVVWSMAAVTILAGFYMFFVCPDAAEERPTSKVVAEGP

SEQ ID NO: 257436 - protein, 144 aa, Zea mays
  unsure (1)..(144): unsure at all Xaa locations
  Clone ID: MRT4577_166368C.1.pep
APTRPKPENSPXEHKPTPTAYAHSPKPTPTTYTPTPTPPKPTPPTYTPDPTPHKPTPKPTPTNTTYTPTHKAPTPKPTPPTYTPNPKRXTPKPTPATYTPCRKPSTPNPTNSTYTPNPKPPDTKPFTPNPTTSTYTHSPKPTTP

SEQ ID NO: 257437 - protein, 55 aa, Zea mays
  Clone ID: MRT4577_166369C.1.pep
TSKWCLDIGFTIEDHAKLKGCNLVGVPHIMLAPFKHTELFFYPPGPCLYLCFPVQ

SEQ ID NO: 257438 - protein, 96 aa, Zea mays
  Clone ID: MRT4577_16636C.1.pep
FLFVLTRQHGSWGAGAVTFCYNSKAVSEIISRDTNVARQIITGKNGLLRNALPGAEAGSTSARWQRPRPRGSRRQAVSGPLAAGTSLSWTTSTPST

SEQ ID NO: 257439 - protein, 82 aa, Zea mays
  Clone ID: MRT4577_166370C.1.pep
GIPSLFLIKLTPQSTGSVKQSGYSVRKSPKWLKIIMSDLKLGHTTSGVMSDLCVYMWPARHEVPQCDHLLWCCLCPTKVACF

SEQ ID NO: 257440 - protein, 126 aa, Zea mays
  Clone ID: MRT4577_166371C.1.pep
MDGTSWSYTPPSRSRDTTAKNATSAHGSLSDRATECGADAGAFDRRSEATRDAPEQDWAADGCSDGGTTGRDEDEDAERYEAIKNLREQMLTGHAFLFLSKGEADDDSDRRRRGFASHFEEDGDLW

SEQ ID NO: 257441 - protein, 72 aa, Zea mays
  Clone ID: MRT4577_166372C.1.pep
GMPIQCPMQGCHLRYPSMPVYKKNWAKCEKFCISQAKDKSLNVTTDLTAIYPFWTSQMQLSSCSNSAGHHYP

SEQ ID NO: 257442 - protein, 139 aa, Zea mays
  Clone ID: MRT4577_166373C.1.pep
VAQRRTPLAPLPRPASRCFLSFSLLLLAPLVSRLGSRQSAHFIFFFFAPSLAPPGFPFYALGYVCCVDLSPPHTFPPGPPLPLLPPRFTPPRFGGGWGAGRPRSGLPGSPPAPAPASASSCFLISSGFAFSLVAILFTP

SEQ ID NO: 257443 - protein, 59 aa, Zea mays
  Clone ID: MRT4577_166374C.1.pep
ERGCESHLLAGQYRSDDQVVGYPGRWCVVSLEASTLGKLVVDRLLFFFLCWYQLYTSVY

SEQ ID NO: 257444 - protein, 99 aa, Zea mays
  Clone ID: MRT4577_166375C.1.pep
TSLFIEERGWTLYTTGFRANFANLANKHSTKLGTLNYSAHARTGRPTRADCPYRVPSGLRPQGRTVRQAQNGAQQDPVRNELEEQRAGAVRAERHARWA

SEQ ID NO: 257445 - protein, 74 aa, Zea mays
  Clone ID: MRT4577_166376C.1.pep
YLLNIRAVRDLSHLVDQQKNECQSDAVRMNLIQTGSVYVGRIRTQPNSTRLDNTAPNLNGSFFSNAKLNGPKKL

SEQ ID NO: 257446 - protein, 90 aa, Zea mays
  Clone ID: MRT4577_166377C.1.pep
RKQHSPGVATTRSWFYLLYLYSESLCIPCRGSFCCLAHASLISKGGSSTLCNIVVCNEQLCSDNTLKQEVRAHRRMEASNTCVLVSPTNY

SEQ ID NO: 257447 - protein, 57 aa, Zea mays
  Clone ID: MRT4577_166378C.1.pep
PPSTRPFTAIFCPTKAHKGDTKGRHSERTKNAHEPGSRRGAAPRIHGLQGDLARQIR

SEQ ID NO: 257448 - protein, 85 aa, Zea mays
  Clone ID: MRT4577_166379C.1.pep
ANQNSVERIRKQEGRTKHLEHGQRPPLAPGTACCQHMPYAYALPQRWDGALARLTTMTDDDDRHPHAVPLRQAHDTPVAQAAYYG

SEQ ID NO: 257449 - protein, 48 aa, Zea mays
  Clone ID: MRT4577_16637C.1.pep
RKSFRREQQMTSTGSGGMCESAATCIHRPELWGGAASWSSRVGIGLVA

SEQ ID NO: 257450 - protein, 112 aa, Zea mays
  unsure (1)..(112): unsure at all Xaa locations
  Clone ID: MRT4577_166380C.1.pep
LATPTPPVRILIHEDLRYWXVGLQIEIAPSDVEYRCFVICLACSTDYHSIHNSFSTYCEVLESKIILDRETHKSHGFGFDTFSTDDAILNAIEGMNRKDLDCLNITVNEAQS

SEQ ID NO: 257451 - protein, 56 aa, Zea mays
  Clone ID: MRT4577_166381C.1.pep
PRPAHRALHVGPVNPGRGFVAPHNRHFPGGVRGVQRCHGRPVQALLQKHVKPAAPA

SEQ ID NO: 257452 - protein, 94 aa, Zea mays
  unsure (1)..(94): unsure at all Xaa locations
  Clone ID: MRT4577_166382C.1.pep
MAASTMAISSTAMAGTPIKVGSFGEGRITMRMTVCKPKVAASGSPWYCPYRVKYLCPFYGXPPSYLTGEFPGDYCWDTVRLSAYPETFVKNLQL

SEQ ID NO: 257453 - protein, 103 aa, Zea mays
  Clone ID: MRT4577_166383C.1.pep
EEFFFFFFFFFFFKKETNNEFNNPSTQGKQKREKGQHLQGGTVAQVHGAGERHQARVLIFSAEQSNQKIKGTGYTSSTPAGAAASKQRRRESHFKTRAHHVPP

SEQ ID NO: 257454 - protein, 93 aa, Zea mays
  unsure (1)..(93): unsure at all Xaa locations
  Clone ID: MRT4577_166384C.1.pep
LVCFFFFLIFXFXXXRVGANGTLINLGPKILFFFNREKNTAMPGTPHQTPNFFSHGVTLHIPLTTLLPFWPKTLLFQPFSGHSFRRRIWSPPP

SEQ ID NO: 257455 - protein, 349 aa, Zea mays
  Clone ID: MRT4577_166385C.1.pep
MQRDTSSSDVSASHVGRVRRRKHPTEATTDGNRANGQPLLVNDQNKYKSMLTRTYSTVWMIGGFAFIIYMGHLYIWAMVVVIQIYMARELFNLLRKSSEEKQLPGFRVLNWHFFFTAMLYTYGRFLSRQLVNTVTSDHLLYKVVSGLIKYQMFICYFLYIAGFVWFILTLKKKTYKYQFKQYAWTHMILLTVFAQSAFTVANIFEGIFWFLLPASLIVINDIFAYLFGFFLGRTPLIKLSPKKTWEGFIGASVTTIISAFLLANVMGHSQWLTCPRKDLLTGWLYCDPGPMFKPEHYSLGEWVPHWNDKRIKAIPCDSKDLGAQLSPPLQETPSSYWGANAEGSLEKAA

SEQ ID NO: 257456 - protein, 139 aa, Zea mays
  unsure (1)..(139): unsure at all Xaa locations
  Clone ID: MRT4577_166386C.1.pep
VSSEFGSRSAPVYLLQPVQIECGGDAXISRGGTGTVNIHHAPYSAKDIQSTAQGALTRSWTTAHKHGVLLGMGEDLCKSTDYGELQSELDKMLDFXGELVSRYQNWEMVYTDHQGDMMLEGDDPREDDCNITRKSYIYT

SEQ ID NO: 257457 - protein, 421 aa, Zea mays
  unsure (1)..(421): unsure at all Xaa locations
  Clone ID: MRT4577_166387C.1.pep
MQRDTSSSDVSASHVGRVRRRKHPSEASTDGNRANGQPLLVNDQNKYKSMLIRTYSTVWMIGGFAFIIYVGHLYIWAMVVVIQIYMARELFNLLRKSSEEKQLPGFRLLNWHFFFTAMLYTYGRFLSRQLVNTVTSDHLLYKVVSGLIKYQMFICYFLYIAGFVWFILTLKKKTYKYQFKQYAWTHMILLTVFAQSAFTVANIFEGIFWFLLPASLIVINDIFAYLFGFFLGRTPLIKLSPKKTWEGFIGASVTTIISAFLLANVMGRFQWLTCPRKDLSTGWLYCDPGPMFKPEHYSLGESVPHWFPWKDLAIMPVQWHALALGLFASIIAPFGGFFASGFKRAFKIKDFGDSIPGHGGITDRMDCQMVMAVFAYIYHQSFIAPQNFSVEIILDQILRNLTYEEQKYLYEQLGEMFXRGN

SEQ ID NO: 257458 - protein, 117 aa, Zea mays
  Clone ID: MRT4577_166388C.1.pep
MAARRNVRYSPLPSEDGDDSNFIKEDVDLRYTYTPKSYRRIPWKSIALALFLLLLGTSLLFLSYFIFTGHMEGDSSQAYGLLFLGFLSFLPGFYETRVAYYSWRGAPGYTFASIPDY

SEQ ID NO: 257459 - protein, 34 aa, Zea mays
  Clone ID: MRT4577_166389C.1.pep
HNSQTANRPTPHMAMHTRIFFVVVVVKRHTSGGV

SEQ ID NO: 257460 - protein, 430 aa, Zea mays
  unsure (1)..(430): unsure at all Xaa locations
  Clone ID: MRT4577_16638C.1.pep
MTPPSIFHHHRCLVSLPSASPTXLVPSXIHQLAKPTVLSLHLRPVLSSSFAVAAVGDDEDVVVGDCLVFDDDAFEEPDLDLPSSPWPSASASRHGRRSEAGESDSLVPERWRHAEEEINLTKKDKRRIAHGLRFGSRLERRAPPAVAAPDEFRAYRKGMLSAEREHVSHXPGAAGEDSSAGSEGTSTAGAXPGTRVAPRNPRXWGMGVGTLDDIDEFFRSREYVQDEMEDSKSPKGRQKLFSNEEKILLNKRVPDLETATSSKWLPLHTLAASGDFYLLNSLLKHNVDINALDKDGLPAIHKAILSKKAAIINYLLRNSANPFIQDKDGATLMHYAVQTACSQTIKTLLLYNVDINRPDDYGWTPLHLAVQTQRTDIVKLLLIKGADRTIRTQDGLTPLELCLRLGHDVRTYELIKLLKSFRGQKQHDLV

SEQ ID NO: 257461 - protein, 117 aa, Zea mays; identical to SEQ ID NO: 257458
  Clone ID: MRT4577_166390C.1.pep

SEQ ID NO: 257462 - protein, 118 aa, Zea mays
  unsure (1)..(118): unsure at all Xaa locations
  Clone ID: MRT4577_166391C.1.pep
PGPHMQPSTVTPIDDKARVPGHTWVSSRHRLSADRGSSIPGWRRAKCARPGEKTKPALARDSVPNRPGLRRNCHRARDSGPLYDSRAERFSALAVINRVEWENLTRPASRYTFXXXXP

SEQ ID NO: 257463 - protein, 78 aa, Zea mays
  Clone ID: MRT4577_166392C.1.pep
FTFDLRRAGRALVTNLTLNPLLQRCLSPLQRPMGRVHYREGKTKPASDGHLQRRRKMLDRAQDWPVSQEEEAVPDGAK

SEQ ID NO: 257464 - protein, 181 aa, Zea mays
  Clone ID: MRT4577_166393C.1.pep
AGQGIKHRSRQDGVHKQCDESLVPPGPLLPRPRRGRFSRPPPRARPVLPDVHYWSTKEYPLKASGVQIVPDPVEPGKPATFKISASTDKTIEKGKLLIDVKYFFFYVHSQIRDICGEISCPAPAALRAVPRADRCHASLPSRLPPPLTRRWSGASPRGRSPLPSSAPPSLFALLPPLPPVT

SEQ ID NO: 257465 - protein, 76 aa, Zea mays
  Clone ID: MRT4577_166394C.1.pep
FGSRCDDDDAFAHFDALATDEPREVAKIGTLVPPLPERGGLFADQATLLPARRGLFIGVTAHHAVCDGSGSTHLLH

SEQ ID NO: 257466 - protein, 96 aa, Zea mays
  Clone ID: MRT4577_166395C.1.pep
QDRSLPCTTTTQCSHNHIHSLTLLHHCTEDTMAKYTAMIVAALSLEVAMATTSTERGRAGSSMRSQAVGGERSGVHMTERNTGPHADAHISAQDAC

SEQ ID NO: 257467 - protein, 105 aa, Zea mays
  Clone ID: MRT4577_166396C.1.pep
QLVAELFMACHRHKSRRRGRSPATARPRIAASPCCYGQTEGDPSSPYKIIPPPLPLGAPSSSSPSFASPLIFINPFSPLAHLAAHRQVLYSGGGGAWSGGASCRI

SEQ ID NO: 257468 - protein, 134 aa, Zea mays
  unsure (1)..(134): unsure at all Xaa locations
  Clone ID: MRT4577_166397C.1.pep
THASAGSWPALFTVLRHKFNVRAMRICKDDQAQVVRGTYKGREGKVVQVYRRRXVIHVERITREKVNGSTVNVGIHPSKVMATKLKLDKDRKALLDRKARCRAVDKAKVKFTADYVRDAAGGAAVTGAYFHEID

SEQ ID NO: 257469 - protein, 131 aa, Zea mays
  Clone ID: MRT4577_166398C.1.pep
MAPADMAEPAMATMSRVEDAGRMSSIEWEPKTLTLAQIKFAREAALYVVSTQTEQEAIRIFTEGLKPVRIMAVSKSTSSIDSSSSDDDVELGGCCCSSTTKGCRGGGSKGGRRRGRRRGSMDDRDVATTPF

SEQ ID NO: 257470 - protein, 73 aa, Zea mays
  Clone ID: MRT4577_166399C.1.pep
FYGRTQADYNRGKEKTLHRVLRPRGGNIEPSLQALGRKNNQDKMIRRKSYARLHPRAANSRKKKSGHSNPAEG

SEQ ID NO: 257471 - protein, 42 aa, Zea mays
  Clone ID: MRT4577_16639C.1.pep
RALCLSTDSTCASLDDASARLRSGSVLGRSSHHIQPSLCTRP

SEQ ID NO: 257472 - protein, 65 aa, Zea mays
  Clone ID: MRT4577_1663C.1.pep
FDAHSCGTLFLWGLVKHEPCFEAPSCVVQVCCYCRLCSTALRSLMTLVSLVLFHISWMVVCTCFY

SEQ ID NO: 257473 - protein, 137 aa, Zea mays
  Clone ID: MRT4577_166400C.1.pep
RGPPILHGAPKWDDRAKTGGPPPVLQKPSGRPAAHRKKTLGSLKTSAPEGANKQGLHGFTLKKHGREPRQAKKRGPAPPLKKNKARYLFPILGTESYFGRNKRGEKYPPPKRGKRTAINFPAFSGLLPTLKATIAAP

SEQ ID NO: 257474 - protein, 109 aa, Zea mays
  Clone ID: MRT4577_166401C.1.pep
DHAVEWPSTAKAKAKAKQAQESLKVGQSIIQKFRARVLSEGPALRAAAPMSRADWAAKLKHWKDESACTPQQHRLGTKPPRADDKNPSKLPEKPAGGKKPPRRERQQPT

SEQ ID NO: 257475 - protein, 77 aa, Zea mays
  Clone ID: MRT4577_166402C.1.pep
ATYCNLFRLFSVSPCPPSPPFKVQVRAQEFFSWIRGHIQTTTKLVTQESSCCIIVQQTVSHIISFFHKKKKKGAAPI

SEQ ID NO: 257476 - protein, 78 aa, Zea mays
  Clone ID: MRT4577_166403C.1.pep
VSSYSRLKAYVFSFSAYQPGAFFFTVFFFLCLLALFFSIFKSSAPLLVCAKSTYICGVGGRWIWYEKKKKRSKCITPC

SEQ ID NO: 257477 - protein, 106 aa, Zea mays
  unsure (1)..(106): unsure at all Xaa locations
  Clone ID: MRT4577_166404C.1.pep
AGARWGSLRPNALRVINEPPAAALAYGLXKKATDAGEKNDLIFDLGGGTFDVCLLTIAEGIFEATATVGDTHXLXGEDLDTRTGNHLAQEAKRKNRTDINAPPRAL

SEQ ID NO: 257478 - protein, 68 aa, Zea mays
  Clone ID: MRT4577_166405C.1.pep
LPTLDNWMLVILARFSSGDDAIGTVSMFSLKTMPNKVTVIDFLSGCREGRLHRYVQHGNVSSVQVRYV

SEQ ID NO: 257479 - protein, 283 aa, Zea mays
  unsure (1)..(283): unsure at all Xaa locations
  Clone ID: MRT4577_166406C.1.pep
SQTQFAMPYYVINYSKLRMWEXVGVPSVVPIHYFICVVVRRLVAIDHVHVYVCMQFVEYERMVYLDADMQVYENIDHLFDLDKGKFHAVMDCFCEKTWSHTPQYKIGYCQQSPDRVAAWPEQELDLPPQPPPLYFNAGMFXVHEPSLRTARDLLDALAATPPTPFAEQDFLNLFFRDAYAPLPPTYNLVLAMLWRHPDRVAPALHEVKVVHYCAAGAKPWRYTGKEPNMEREDVRALVAKWWDIFDDESLDYDKQQGAAPPVEDQARLPLRQDLHRPASRYPM

SEQ ID NO: 257480 - protein, 77 aa, Zea mays
  Clone ID: MRT4577_166407C.1.pep
EARGGIDSQGGVFEKDAMATTGLGLVGTVELNAYCVSNSSVLRLNIGNLTRLSAITWVPLYVHTDDTLNGGDTGRIG

SEQ ID NO: 257481 - protein, 83 aa, Zea mays
  unsure (1)..(83): unsure at all Xaa locations
  Clone ID: MRT4577_166408C.1.pep
RERCTAWRREEEEEESSDEQEEVCQGYHTISTRLTPDTXYVEPRDHPFVAVAFLHSNLQIACLEVHPDRNEKVFLSSAYNDLH

SEQ ID NO: 257482 - protein, 64 aa, Zea mays
  Clone ID: MRT4577_166409C.1.pep
PISSSLSLSVLRVERAGRIWRRYCEIGLVDGLGSPRSTKKDNKLPEGMEHRSGQRKLERERSRT

SEQ ID NO: 257483 - protein, 37 aa, Zea mays
  Clone ID: MRT4577_16640C.1.pep
DPEISRRYIHQVILPVIADSLGACHFIACLAQVARRD

SEQ ID NO: 257484 - protein, 163 aa, Zea mays
  Clone ID: MRT4577_166410C.1.pep
YPPGWPGQAERERLIRLDRAASPAVGVPCPSLRLGRWPTGDGPPAHPCWWAGWLAGRVVGRILLGRLRFDPPVGLRCSARHRGRRHLQPPSLRATSPPAEATATRREESNALNSKALYKQIFQALRAFTGMYICASVGRAIGSLLGLETWAREPGARSLRDAL

SEQ ID NO: 257485 - protein, 46 aa, Zea mays
  Clone ID: MRT4577_166411C.1.pep
KKIIKKKKKKLIKKKKKKIRGGRFGGGALFYNLNFPSFPFYSVTLI

SEQ ID NO: 257486 - protein, 94 aa, Zea mays
  Clone ID: MRT4577_166412C.1.pep
RPRAKESPGPRKGRHDEQESSTEVQTLSSNEHESSRAPALSGSASTDTPDGGGPRPADLVSGDAEPEEPQHESGDRATRRGLCIGVDNDAGRPG

SEQ ID NO: 257487 - protein, 65 aa, Zea mays
  unsure (1)..(65): unsure at all Xaa locations
  Clone ID: MRT4577_166413C.1.pep
RPTERGFRFLENLLKLVPNKTTEAPATLSGALKFFTCSLNFRPFXPXMAPSNRGLTPAGGNGPRF

SEQ ID NO: 257488 - protein, 45 aa, Zea mays
  unsure (1)..(45): unsure at all Xaa locations
  Clone ID: MRT4577_166414C.1.pep
CRTMPSLINAVCFVLWGATNRVSCCCQXILEKMELXLXNKNXWFF

SEQ ID NO: 257489 - protein, 82 aa, Zea mays
  Clone ID: MRT4577_166415C.1.pep
DPENLPFGVLGNTIGVYGGNSRPVSVNKAIAWCASKGNIPYFDTSDIEGFNAVDPFKGLARNAVQNEADEDMSLPDTNEVGG

SEQ ID NO: 257490 - protein, 164 aa, Zea mays
  Clone ID: MRT4577_166416C.1.pep
GLGVGSSEFGSSLGRIEYLLSDKTGTLTQNEMELKKIHVGTVSYANEAMEEVASYIKQGFAIADSTRQSMITPSTVFGAQVGSGAATRTRREIGTRVKDLLLALALCHNVTPTTDEEDGRRVINYQASSPDEIAIVRYTEEVGLRVAYRDRKTILLWSTTTNQV

SEQ ID NO: 257491 - protein, 178 aa, Zea mays
  unsure (1)..(178): unsure at all Xaa locations
  Clone ID: MRT4577_166417C.1.pep
GLVVFFFFFFFFFFFFFFFFFIFKQQPFLFDGQKQSLKTNPNKKKTARYWGGGPPPPPXGGGRGPPLTXGTKPAAKTPPGRGQGGGARTPXGRGHGGVGGPGRAPGRGPPPPRVAPRGXPPPWARGRAKGPLPPGGPCREGPTCFWPLWGPPGTRPXGAPPGEDPPPCPPGSRASSPW

SEQ ID NO: 257492 - protein, 83 aa, Zea mays
  Clone ID: MRT4577_166418C.1.pep
MTFKRRNGGRNKHGRGHVKFIRCSNCGKCCPKDKAIKRFLVRNIVEQAAVRDVQEACVYEQYTLPKLYVKMQYCCSCAIHSQC

SEQ ID NO: 257493 - protein, 49 aa, Zea mays
  Clone ID: MRT4577_166419C.1.pep
EIYAWDDLNDLLHQFLSLNSPRHHPLILHAFADLWTRNGLFCPPSPCQF

SEQ ID NO: 257494 - protein, 87 aa, Zea mays
  unsure (1)..(87): unsure at all Xaa locations
  Clone ID: MRT4577_16641C.1.pep
PVVAHQVMLCARSPFCQLKHRTDCXDRKEVRVCNQKLDCGRSXDSSIYCILINFMETVDDSGKLXEACKVXKCEDLQKVGDKEVVHQ

SEQ ID NO: 257495 - protein, 172 aa, Zea mays
  unsure (1)..(172): unsure at all Xaa locations
  Clone ID: MRT4577_166420C.1.pep
XKWNKSLSCQPCDXRGDPLPGTELKEIWRVAPAPQNDGYQYTHFAHKINSFNTAPKKLLASDSRLRPDRYALEKGDMSKSGSEKSRLEEQQRAEKRTREAKGEQFTPRWFNVTDAVASTPWGDLEICEYSGRYTEHRAAIDSSNTTDDDDETDVTSVEFDPWQYGGSSSSPQ

SEQ ID NO: 257496 - protein, 62 aa, Zea mays
  Clone ID: MRT4577_166421C.1.pep
STLESQGPVGALLSTNKCIRSLVRGQQGSYILGSCADPVPSHRAGRYSVVKPSAQACLPGNS

SEQ ID NO: 257497 - protein, 113 aa, Zea mays
  Clone ID: MRT4577_166422C.1.pep
GNNHSHPLIFVHRGDPFNSWEDGGTTGSFRQPPPLATGAFVRGRTTPTDYKPITGVFKCLDKPGEPKTQGGGGFFFTLFFWAPFGHDGDPYALVGWTSFVPQSNGLWGCTPAC

SEQ ID NO: 257498 - protein, 413 aa, Zea mays
  unsure (1)..(413): unsure at all Xaa locations
  Clone ID: MRT4577_166423C.1.pep
MWKDXRLQDRDSYCKMMHKYIGSDVTSLVTLPVIIFEPMTMLQKMAELMEYCELLDKADECEDPYMCMVYASTWAVSVYFAYQRTWKPFNPILGETYEMVNHQGITFLAEQVSHHPPXMGVAHCENEHFTYDITSKLKTKFLGNSVEIYPVGRTRVTLKKSGVVLDLVPPLTKVNNLIFGRTWVDSPGEMVMTNLTTGDKVVLYFQPCGWFGAGRYEVDGYVYSAAEEPKIMITGKWNKSLSCQPCDQEGDPLPGTELKEIWRVAPAPQGDKYQYTHFAHKINSFDTAPKKLLASDSRLRPDRYALEKGDMSKSGAEKSSFDTTPEFLQTFRLEEQQRAEKRTREAKGEQFTPRWFNLTDVVSPTPWGDLEIYEYNGKYTEHRAAIDGSDVTDETDVTSVKFSPWQYGSSSSQ

SEQ ID NO: 257499 - protein, 402 aa, Zea mays
  unsure (1)..(402): unsure at all Xaa locations
  Clone ID: MRT4577_166424C.1.pep
MNKRMDRDSYWKMMHKYIGSDVTXLVTLPVIIFEPMTMLQKMAELMEYCELLDKADECEDPYMRMVYASTWAVSVYFAYQRTWKPFNPILGETYEMVNHQGITFLAEQVSHHPPMGAAHCENEHFTYDITSKVKTKFLGNSLEIYPVGRTRVTLKKSGVVLDLVPPLTKVNNLIFGRTWVDSPGEMVMTNLTTGDKAVLYFQPCGWFGAGRYEVDGYVYSAAEEPKIMITGKWNKSLSCQPCDQEGDPLPGTELKEIWRVAPAPQNDGYQYTHFAHKINSFNTAPKKLLASDSRLRPDRYALEKGDMSKSGSEKSRLEEQQRAEKRTREAKGEQFTPRWFNVTDAVASTPWGDLEICEYSGRYTEHRAAIDSSNTTDDXDETDVTSVEFDPWQYGGSSSSPQ

SEQ ID NO: 257500 - protein, 266 aa, Zea mays
  unsure (1)..(266): unsure at all Xaa locations
  Clone ID: MRT4577_166425C.1.pep
QQQQQKEMXGAXEFRDVHFSYPTRPGTTVLDGFSLEIGAGKTVALVGPSGSGKSTVIGLIERFYDVQKGSVLIDGRDIRSCSLAHLRSHVALVSQEPTLFSGTIRDNIVYGDEHATEDEVTSAAKLANAHEFIXTDSAAGWCAHAFVVPEKLLQSRRXSAMEGGYDARVGERGAQLSGGQRQRIALARAILKNARVLLLDEATSALDTVSERLVQDAIDRMLQGRTCVVVAHRLSTVQKVDMIAVVRGGKVAERGRHGPGRPRGTQ

SEQ ID NO: 257501 - protein, 302 aa, Zea mays
  unsure (1)..(302): unsure at all Xaa locations
  Clone ID: MRT4577_166426C.1.pep
MALPTRSVVPLSTIRASIPFLRAAPFHPWLASRNPPTYGAASQSGIHPQNHYPLCGDGRESKRVLPPSILDVARIAWPSFRAPNPSMQGTRASPFHPRRCANCRLRIAWSSFRPGSLPASDGRAPRSASPPSMRCLPFLHGDAKEKEPVTKSASVRSMXTSTERDVRSGSDFTSLNVSDMSAESIRRTQYPSFIDRPSNLRVFSFAELKSATRNFRRSLMVGXGGFGCVYRGVIKTSDDLNERIEIAVKQLNRKGLQEVALPLHEQLLVEWSLAICCSCYQFCLLAAQETTRAFFQCIWLQS

SEQ ID NO: 257502 - protein, 91 aa, Zea mays
  Clone ID: MRT4577_166428C.1.pep
LISFVNNPNLCGPGTTKPCPNAPPFSPPPPYNPTTPMQSPGSSSSTTGAIAGGVAAGAALIFVVPATSFAYWRHRKPQEHFFNVSCFKVSL

SEQ ID NO: 257503 - protein, 120 aa, Zea mays
  Clone ID: MRT4577_166429C.1.pep
RVLDLSLGQPSFSISVWRVPTPCGRRRRISFSSRGTNVCHCSGRRPSTRRSWGHCIGSQGFVRAFLFFFFFFFFFFFFFFFFFFLTVILNVVNNEQRHMLQQHRCSRKCYSQKKKKETPL

SEQ ID NO: 257504 - protein, 97 aa, Zea mays
  Clone ID: MRT4577_16642C.1.pep
IKKPQNGFEKKKVHSIYQKGGGGKNPNLLGPQTQTKIPMENRGKNGWRQGGGEVFMNSSSHTWGAPKKGGPFHFFLKSPGGFSYTKPLHPCSGGGTS

SEQ ID NO: 257505 - protein, 99 aa, Zea mays
  Clone ID: MRT4577_166430C.1.pep
FLMCSGLLGLARTQNSNAPEDTLPGRRNKKVNPLPSLRAPPGGGTGAGPKRFCLTQPFRPPPDKEGRPPLHRKKPPRWGPRPKGWRGRGKERAPGGAPL

SEQ ID NO: 257506 - protein, 84 aa, Zea mays
  Clone ID: MRT4577_166431C.1.pep
MADAVGALPPPALPPAPECEYGRSSPYHAELPEFEFWMEGRNPCPALVTGDEVFYRGVMLPLHTLQAPGASDGDRSPQPQADAD

SEQ ID NO: 257507 - protein, 64 aa, Zea mays
  unsure (1)..(64): unsure at all Xaa locations
  Clone ID: MRT4577_166432C.1.pep
MAADKFEAVPCMRYCSQLLTSLHMTTEYALLYLDLTCVDPMADAVQPLTHAAXDHLAGKYKDLI

SEQ ID NO: 257508 - protein, 134 aa, Zea mays
  unsure (1)..(134): unsure at all Xaa locations
  Clone ID: MRT4577_166433C.1.pep
LSGMQVASLYEYWSLFTLEVFALSXQHLIDXFASGVSMGASQFMAMLYTPFGNVPHMFINVFKNVHAGTVKTVSSXPLLSRSCXYLKLPSKFAVPAPXVHAGASGVADAPKKEEKAAEPVEESAKKMGFSLFPG

SEQ ID NO: 257509 - protein, 144 aa, Zea mays
  unsure (1)..(144): unsure at all Xaa locations
  Clone ID: MRT4577_166434C.1.pep
IEGELTTMMMSFPMYPYTIYRRNPKCIPLTSWPYYFLRLQTRRLYLTLRKQSCQHXSTLSRIITLLSSSXMMMKLXATDAAIITMYEPCLMXLKQQLLAYQELNPMSIIMPQNMPXMGVLYQYQXMPNYRIYXCGVSGGIPAYY

SEQ ID NO: 257510 - protein, 198 aa, Zea mays
  unsure (1)..(198): unsure at all Xaa locations
  Clone ID: MRT4577_166435C.1.pep
CLARCYRQIKNEPYPKSSYCRAVPDPKIKIYHAGMKRNGVDEVPYCAHLVSXEKDNGYSEALEAARIACHHHMTKSARKDAFHLRHRVHPFHVLPINXMLSRAETDTLQTGMRYDFGKPQGTCARVDIGHDLLSVRCKDNNAAHAXKALRRDKFKIAVRLKIIEMRWRSYPQVRRGDYLKNEREGIIVPDGDNTNLLN

SEQ ID NO: 257511 - protein, 82 aa, Zea mays
  Clone ID: MRT4577_166436C.1.pep
HAVALIFACCEKRENFILKQYCRFVFLLEQELFLLHENKHSSVGSTVMEHPVTHPGSNLWPDRIHYSYQRNSKPRNAFQLQP

SEQ ID NO: 257512 - protein, 104 aa, Zea mays
  unsure (1)..(104): unsure at all Xaa locations
  Clone ID: MRT4577_166437C.1.pep
KKKDVLNLTGFPXPLKNLQLXPXKTTNNLVGGGRIKKKLFALPFWLSTHSLVSHRETPSISLKTLSSSPXKFXFQPQVSSLIHIMINSLYSNKDIFLTELISNP

SEQ ID NO: 257513 - protein, 111 aa, Zea mays
  unsure (1)..(111): unsure at all Xaa locations
  Clone ID: MRT4577_166438C.1.pep
MEIIGTAMGTSSGSCLTISLIKTTKTVALAPSTALAQXLRMTLYXRRYPSAMSTISSGMNFYVKQQARVGASLFMVHLHYCFDQGCNPSIVLNNTSGKQTNAPNLTIEPRG

SEQ ID NO: 257514 - protein, 88 aa, Zea mays
  Clone ID: MRT4577_166439C.1.pep
GNGNFCFFSYCFSGPGTLLFYYWDNRNPTVRPSGKRNRAPPYRERKNGRPVSGYGHSEPGSGFTLFFSDPLAWAQEKFFDGCFLRDHS

SEQ ID NO: 257515 - protein, 117 aa, Zea mays
  Clone ID: MRT4577_16643C.1.pep
MGIPSPSDEVVQIVHGDGAGDPTVVTVSCPDKTGLGCDLCRLVLLFGLNVHKGDMSTDGRWCYIVLWVAASRRGRPPVAWDLLKERLVELCPVPAPFGVDTAYLAAVGLRRDGLALA

SEQ ID NO: 257516 - protein, 147 aa, Zea mays
  unsure (1)..(147): unsure at all Xaa locations
  Clone ID: MRT4577_166440C.1.pep
FPFNQLXAFNSASYFHQXQLPFSHLPSPYPHQFLPFNQLXAFNSPAYFHHQQLLPFTQLARLTPXTFLIQPQLFPFYQHSAPNSFTLLQLQQFLPFNQLPXPHPTAFYQQPIIGGALFYISYHLYLNNKFFVSFFPSNKQITFFFLK

SEQ ID NO: 257517 - protein, 49 aa, Zea mays
  Clone ID: MRT4577_166441C.1.pep
QPLSSATLAALVNSEKGVWLEEPSGNSPASAAFMLMVKWRLTSVNILIC

SEQ ID NO: 257518 - protein, 641 aa, Zea mays
  unsure (1)..(641): unsure at all Xaa locations
  Clone ID: MRT4577_166442C.1.pep
MSTPGTSSSHAPTTGATIGSQVEIEAAAGPRTRARAAATAPPSDLATAAGDVLEIEDDVAVGSKRKPGPKLKSKVWLEFDRIELNGVWKAKCKWCKKHLGGDTRNGTSHLSGHLEICPDRAVRKALQPLFKVVSRNTLRKDILDMYEVQKQSMLKYFRKLSSRVAITSDLWTANHQKKGYMAVTAHFIDDDWKLKSFLIRFLYVPAPHTAEVIADLLHDVLLDWHIERNLSTITLDNCSTNDSVMRNMVGTSNENLRQRMDTVKGKLPLSSCMLQDGMSVMEHGIDSIRELVGFWSATPKRHEKFEKMAMQMKGKYDKKIALDCKTRWNSTYLMLNTALLYKDVFERLAARAPCIPTGDDWQFAKDLCDRLKIFYDVTELLSGTNYVTANIFFPKITNIYLAIRKWQVSANPKVEEMSSKMKEKFNKYWFDVHGLMAVGAVLDPRYKLHLLNVLFLKIHGSEITSMEAANKVKDILYNLVLEYQDTIEVVATTDGAQPRTSSXLLMTCLRRIXDTFDDYMSKQPDVTSTYVRTEMDLYLEEPLLPRTHDLDIIQWWQHAGLKYPTLRKIARDVLAIPVSTVASESVFSTGGRIISPHRSKLAPSMVEALMCMQAWSRADMLGSPTMMGVLMTCLDEQDEEM

SEQ ID NO: 257519 - protein, 310 aa, Zea mays
  unsure (1)..(310): unsure at all Xaa locations
  Clone ID: MRT4577_166443C.1.pep
GTLEAGQSRLCGGTGRNRNIHPAPLGPSLLFSGSPRHTLSCALSLGSAVSLACALSPVAPPPPPPSXRQIRFVDMADNEKEVGEGTTPRGADWEVVTLTASAYEAAPGPVGTEVKPVNENQEHSSSNALLMSDHFVFPPSEHENLPIQTSFDEIQPEKDVQKPSTTVEDYSIKNVVGSERVQFDDEGKDLLDDDVEMRDDTPGYGSSHAEDDAHGFVVHDDGVESGEDFDEKSGHPSDPADSRSCDTGASCKCWLKKHMTCLYNQAKETNAIWSVVVAAALVGIVILGRWHKDKLHLNQLKWRSGSAVRG

SEQ ID NO: 257520 - protein, 50 aa, Zea mays
  Clone ID: MRT4577_166444C.1.pep
RSHRPNGTRSVTSSYHRIHPGTHTLVPTLRFQSLSYYTRNNQNFLKSNDF

SEQ ID NO: 257521 - protein, 79 aa, Zea mays
  Clone ID: MRT4577_166445C.1.pep
GHHVQYPQLNQLQFYGAVKKKKKKLGLFLKLVNGGIQNPRVQGKGIKRTPVWTATGSLKSSGDANIFSGGVGYQIKGRG

SEQ ID NO: 257522 - protein, 125 aa, Zea mays
  Clone ID: MRT4577_166446C.1.pep
NSTMKPPGKTRLTISNPREKGQKTREGEKKKKGQTAPGKEERTTQKGHWAGGQKALNKDTTRGTKRRTKGKHQGGNLGFQPKKGPGRQRPPRLQAPRGPGGPVNNTCPGVKENLETMGEPGRQPT

SEQ ID NO: 257523 - protein, 383 aa, Zea mays
  Clone ID: MRT4577_166447C.1.pep
MATAFSLRAAAPATAPRAVSRSTSAARVVPVASALAGRGRLVARAAVTAKADVPSSTSDGHEVLLFEALREALMEEMELDPTVCVFGEDVGHYGGSYKVTKGLADTFGDLRVLDTPIAENSFTGMGVGAGMKGLRPVVEGMNMGFLLLAYNQISNNCGMLHYTSGGQFKIPLVIRGPGGVGRQLGAEHSQRLESYFQSIPGLQMVACSTPYNAKGLMKAAIRSENPVVLFEHVLLYNLKEKIPDEEYVLCLEEAEMVRPGEHVTILTYSRMRYHVMQAAKTLVNKGYDPEVIDIRSLKPFDLHTIGNSIKKTHRVLIVEECMRTGGIGASLRSAIVDNFWDYLDAPIMCLSSQDVPTPYAATLEDATVVQPAQIVAAVEQLCA

SEQ ID NO: 257524 - protein, 75 aa, Zea mays
  Clone ID: MRT4577_166448C.1.pep
VVLGRDQGGLQTYTLQGFGDLVNTTTGSLGWTQSSPSPTLPGAVDATQDTVNCTFPHCCPLPGSSGLTLRQSGEE

SEQ ID NO: 257525 - protein, 61 aa, Zea mays
  unsure (1)..(61): unsure at all Xaa locations
  Clone ID: MRT4577_166449C.1.pep
QKTLTGPTMSLDGESCRPIDSAEANIQXDKEGVAPDQDWLVLTRKRDDDGRSLTCYNIESE

SEQ ID NO: 257526 - protein, 87 aa, Zea mays
  Clone ID: MRT4577_16644C.1.pep
KKKKKKKKKKKKKKKKKKKKKKKKKKKKKKKKKKKKKKKKKKKKKKKGRPSQFKIIPIFKPQPPFLKIPILLPLPSNVLFFFLGPLI

SEQ ID NO: 257527 - protein, 144 aa, Zea mays
  Clone ID: MRT4577_166450C.1.pep
RCSSSSSPRTSSRCTSSPARRCRSTCPPPRRASTSGTPRRSSGTSTPPATRSRWHARSWPSSGGSAGRLRSSSSPCSPSSAPSTAIRRRSRTSMAGPRSPRASSRWPSSPTGSPSATLSTSAPTSSSRAWASRAATSRRSSRST

SEQ ID NO: 257528 - protein, 81 aa, Zea mays
  Clone ID: MRT4577_166451C.1.pep
GLKNILSSERIRTNAPYHPTKKENASVCMLYYACLIIFSNSLLRPTSAVHPKFTHKHCPALFYTIDCTVRRVEFEYGYKYE

SEQ ID NO: 257529 - protein, 192 aa, Zea mays
  unsure (1)..(192): unsure at all Xaa locations
  Clone ID: MRT4577_166452C.1.pep
MWNGAAFCVSCFLVPKEDVVACKWVYRIKQKADGMLDIYKAKSVAKGCKQRYGIDYETFSTVVKAAIIRIVLSSAVSRRWTFKQLDVQNVFLHGILEERVYMKQPPRYESMLQAMTNHVCKHAKAIYGLKQAPRVRYSRLNDKLLHLGFXASKKDTSMFFXNKRSVSIFLLVHVDDIILPPFLNICHPLVQF

SEQ ID NO: 257530 - protein, 107 aa, Zea mays
  unsure (1)..(107): unsure at all Xaa locations
  Clone ID: MRT4577_166453C.1.pep
IPXINQXSLTNLSPYSSQQQFLPFYQXSTLNPTPYFHXQLLPFIHLPTSYFQHLQLFLFNQLTSLNPSSYSPSYILLPFIHLSTSNYSFFXSQQLFFFFFPKFYFYF

SEQ ID NO: 257531 - protein, 125 aa, Zea mays
  Clone ID: MRT4577_166454C.1.pep
SSSRSSPVRVLYRPTALCPPASTTGFESRLSGHTASHCAPHHTSSAPGSANPLRGASHSLFPALSGLAAGSFAEKGLLLPGSPPGSQSRLGRRLRAPQRRNLKPTSRRLVFFAWPLGGASELVTG

SEQ ID NO: 257532 - protein, 111 aa, Zea mays
  unsure (1)..(111): unsure at all Xaa locations
  Clone ID: MRT4577_166455C.1.pep
ADPPPSSFLAPYPIPLQRLLPTDPGVTLKRSNFSLNNHLRGHVKYILCSNCSKCCPNDKSINRFFVRNIFXLSPFIDVQDAFVHHXIFLPKFYSKVHHCVLCAIHSHIVLV

SEQ ID NO: 257533 - protein, 60 aa, Zea mays
  unsure (1)..(60): unsure at all Xaa locations
  Clone ID: MRT4577_166456C.1.pep
ARELAEXRTGSARLGAAREPRTSRAEPLLRARFCSEPSRAGSFQLASLTKMINLWNNNEY

SEQ ID NO: 257534 - protein, 244 aa, Zea mays
  Clone ID: MRT4577_166457C.1.pep
MTDANNAIRKLYDVCRASLSEKGPLSPRDSLDNVRAALDMVTPSDVGLEREAGAVRAWSPRAALGRKRIFHSSPAIRYRHIYECASFSIGMFCMPASSIIPLHNHPGMTVLGKVLYGAARVRSYRWIESAGSSINLSKARPAKVVRDGEMSAPCGAMVLRPEEGGDVHALRAITPCAVLHILTPPYSSQDGRHCSYFRRRPRSHPSGVLLNRTGGSEFVWLEEYQPRHNFIIRRDLYTGPALKL

SEQ ID NO: 257535 - protein, 131 aa, Zea mays
  Clone ID: MRT4577_166458C.1.pep
AGCQSRDRDPSFSLHQKHAVFGRGAGSRWMMMRCVIFPAGGQAAFVTFVFRMPSPCHVAPLASGGSVLFSLDGLFSSNGRGFRGHVCQRQCQRRRTPLFLAYAPSIYRPWTRSSLSLYYIWVLVGAEHARV

SEQ ID NO: 257536 - protein, 129 aa, Zea mays
  Clone ID: MRT4577_166459C.1.pep
RRLPFSPSYGFSSPSSVFTPAHPRRSRHSLPRRRPPARPVPAEGPHLSHSLSGEPEGPAPIRRTARLLPPLLPRPAAIRGDDPRVRSKTQAPVRQSARAEGQGRRRDEGRVGDPRRGDHPFAALPLAGQ

SEQ ID NO: 257537 - protein, 100 aa, Zea mays
  Clone ID: MRT4577_16645C.1.pep
RSGQRHRRCPFQALVVVRQHHLLWGLPACSDGSSFSPWASAVGPSQPLWALHCGLVPACFPCFTCALPALPVRAVVMSCHLWKLGSLLSSRRSGGALLAF

SEQ ID NO: 257538 - protein, 41 aa, Zea mays
  Clone ID: MRT4577_166460C.1.pep
MWCNALIMVHSRQQFSLYYEDFIGTYFNYSYILLYFISFCI

SEQ ID NO: 257539 - protein, 55 aa, Zea mays
  Clone ID: MRT4577_166461C.1.pep
HRFLNLQPFFYLGITVKKHNQLFTKIVLYSGTPLLNFKPGGKNTPGGHPMAKSPT

SEQ ID NO: 257540 - protein, 208 aa, Zea mays
  Clone ID: MRT4577_166462C.1.pep
RPAEDKAVGANDLLIKHIQEKIKAKRGKSESTFYVVADATILRFMMESCWAPMMAAFSVLLDQCDDKAATSQCLKGLRFSVHITSVMCMQTQRDAFLTSIAKFTSLHSAAEMKQKSIDSMKAIISIAIEDGNYLQEAWEHVLTCLSRFEHLHLLGEGVPTDASFLTVPLNESEEKTKKSTSVLSSKKTRALQNPAVMAAVRGGTYDST

SEQ ID NO: 257541 - protein, 231 aa, Zea mays
  unsure (1)..(231): unsure at all Xaa locations
  Clone ID: MRT4577_166463C.1.pep
MEEVAVSPMIVAAVVLDNNGADAVSCTAIPSVTISLEEKENINGDVPTITSAASNEEEALFSVGESTKDDGHRLTMECTTPVSSSSPSTRKKRGAFSLFRAMFLSFGRSDDSMKKTDDDTTSPKKRAIAAADDDCKPADDESTSWKRLVDGRXRRRRRHGSASRSRXVGMTSRYASAEDLHQMDSDQEEGAEGGDDGDSSCPHAIDMQAEEFITKFYEQFKSESFNGRASE

SEQ ID NO: 257542 - protein, 295 aa, Zea mays
  unsure (1)..(295): unsure at all Xaa locations
  Clone ID: MRT4577_166464C.1.pep
PYSRRLLLPAGAAREESLXPSKPKASCLLFLPGMEEVAVSPMIVAAVVLDNNGADAVSCTAIPSVTISLEEKENINGDVPTITSAASNEEEALFSVGESTKDDGHRLTMECTTPVSSSSPSTRKKRGAFSLFRAMFLSFGRSDDSMKKTDDDTTSPKKRAIAAADDDCKPADDESTSWKRLVDGMRPLRLRGQLEYYPPPPPPPPLGHADVYHDVILPPPSQARFGFEIKEVGMTSRYASAEDLHQMDSDQEEGAEGGDDGDSSCPHAIDMQAEEFITKFYEQFKSESFNGRASE

SEQ ID NO: 257543 - protein, 195 aa, Zea mays
  Clone ID: MRT4577_166465C.1.pep
GDWRGRGRPKKKTPVSSSSPSTRKKRGAFSLFRAMFLSFGRSDDSMKKTDDDTTSPKKRAIAAADDDCKPAGDESTSWKRLVDGMRPLRLRGQLEYYPPPPPPPPLGHADVYHDVILPPPSQARFGFEIKEVGMTSRYASAEDLHQMDSDQEEGAEGGDDGDSSCPHAIDMQAEEFITKFYEQFKSESFNGRASE

SEQ ID NO: 257544 - protein, 85 aa, Zea mays
  Clone ID: MRT4577_166467C.1.pep
SARAMTTTRSNQRRRGLVLSARPVHTMTRMFHTVLRAMSPPVTHCASTATQWQAPNLLKLFGKPDASCTVGYTYSSDADEERLIN

SEQ ID NO: 257545 - protein, 63 aa, Zea mays
  unsure (1)..(63): unsure at all Xaa locations
  Clone ID: MRT4577_166468C.1.pep
SQSSRTPQEHPCYNMAPNLAKVLLLYFEITHLKLGSQWYIGTGYASXTRSLKLNAYRSSDQIH

SEQ ID NO: 257546 - protein, 149 aa, Zea mays
  unsure (1)..(149): unsure at all Xaa locations
  Clone ID: MRT4577_166469C.1.pep
PPPEIPKRPNFGYSRGPGTPEGSGPKSGTRAPGPGSKGXFGGHPPGLPGPGPQGIGLGLCQGASFLKGKTGTPWGVPQASPGTPKPVCLASPGGLGRYPGPVFCPPGPRVFLPPGNPXPGPGGTSGPXVGGPGPPGWPGPFRSQFCKFY

SEQ ID NO: 257547 - protein, 151 aa, Zea mays
  Clone ID: MRT4577_16646C.1.pep
MGRMHSRGKGISSSALPYKRTPPTWLKTAATEVEEMITKAAKKGQMPSQIGVLLRDQHGIPLVKSVTGSKILRILKAHGLAPEIPEDLYFLIKKAVAIRKHLERNRKDKDSKFRLILVESRIHRLARYYKRTKKLPPTWKYESTTASTLVA

SEQ ID NO: 257548 - protein, 160 aa, Zea mays
  Clone ID: MRT4577_166470C.1.pep
MSDSEDHHFESKADAGASKTYPMQAGAIRKGGFLVIKNRPCKVVEVSTSKTGKHGHAKCHFVALDIFNGKKLEDIVPSSHNCDVPHVDRTEYQLIDISEDGFVSLLTDNGSTKDDLKLPTDDAILTQLKDGFAEGKDLALTVMSAMGEEQICAVKDVGPR

SEQ ID NO: 257549 - protein, 88 aa, Zea mays
  Clone ID: MRT4577_166471C.1.pep
IYIKVFSAKSHSSRGQIDKNNYQAKKYSPTFITKYKEIPTAGQKNRPRVPKQGPGPKADRKKQCSYTQTIARKHITREPKHNPAQVRY

SEQ ID NO: 257550 - protein, 95 aa, Zea mays
  unsure (1)..(95): unsure at all Xaa locations
  Clone ID: MRT4577_166472C.1.pep
MLLNACSPSKKKKKKKKKKKKKKKKKKSTRXSVRGINKKKKKKKKKKKKKKKKKKKKKKNQGAWLWSVAQTVEGKGKPLLQFWKAPPSPPLFKEI

SEQ ID NO: 257551 - protein, 111 aa, Zea mays
  Clone ID: MRT4577_166473C.1.pep
SWTESTTPPATPRRGPPRRCQPLGRAGESRRCRVGGPGEGLTVACNWPWAAASAVNAGPPCTSPPPLAGPSTSRRPATAPRIPGGRPGQWDRSGKPQKRTFYISGDARKAG

SEQ ID NO: 257552 - protein, 59 aa, Zea mays
  Clone ID: MRT4577_166474C.1.pep
KRNSSPLLLVSVVLLKKKYKNSCKENKPYMYRYSLRGLQIYISHVYGIREKLLSKPRNK

SEQ ID NO: 257553 - protein, 144 aa, Zea mays
  Clone ID: MRT4577_166475C.1.pep
PEDKERERAVNKVSKKPNRGGNNIPGFTSAGVRLAAFPGPGVKKVKKIVIKKIVRKIGAKDKQTSSSTVPEKDIIDANVNASEKEEANANVSEKEESEITTSSFEKDAISAHNLVSTSDTAGVVNSVEVQKEQNSDLVNLKKTM

SEQ ID NO: 257554 - protein, 190 aa, Zea mays
  Clone ID: MRT4577_166476C.1.pep
MAAARHLRSGLPLLRAHLASSESAAVAQVSRGFASQAAKPTGKEIKVPKALFGGTGNYASALFLTAAKSNALDKVESEIKAIVEASKKSPLFSQFIKDLSVPKATRVKAIAEIFADAGFSDVTKNFLAVLADNGRLKYIERIAERFVDLTMEHKGEMKVVVRTVISLTKEEEKELKETLQDILGENKSFL

SEQ ID NO: 257555 - protein, 106 aa, Zea mays
  Clone ID: MRT4577_166477C.1.pep
MSRWSSELSNVRRRRAHGVGEWEQQPTGWSQAAWIARQTAIDIDGDRRRKLERRTTVQRAVGWAPAARAGEVTGERSGPAAVQGGDKLSGDPCMLIFWRHSVDLGP

SEQ ID NO: 257556 - protein, 241 aa, Zea mays
  Clone ID: MRT4577_166478C.1.pep
MAAARHLRSGLPLLRAHLASSESAAVAQVSRGFASQAAKPTGKEIKVPKALFGGTGNYASALFLTAAKSNALDKVESEIKAMRITSRKPNVEASKKSPLFSQFIKDLSVPKATRVKAIAEIFADAGFSDVTKNFLAVLADNGRLKYIERIAERFVDLTMEHKGEMKVVVRTVISLTKEEEKELKETLQDILGENKTILVEQKIDYSIMGGLVIEFGQKVLDISIRNRAKQMEAFLRQPLDF

SEQ ID NO: 257557 - protein, 161 aa, Zea mays
  Clone ID: MRT4577_166479C.1.pep
MIQLLFTLLAAEGAVAAVLLFKTPLRRLAVLALDHLKRGRGPVMVRTIAATVLVVLASSLHSMAKIRGHAEGELDGSGVVGFTPTDQVLLARHLLEASLMGYSLFLALVIDRLHNYVKENRRLRKKLEDVLKQNKALEEATNGKLEENRPDQKNLSHAKDN

SEQ ID NO: 257558 - protein, 61 aa, Zea mays
  unsure (1)..(61): unsure at all Xaa locations
  Clone ID: MRT4577_16647C.1.pep
LPFLLSILRRRRVGGGGADPKKAQRGXXXIIHSRTILRXNERITGCHNYLTIPSAGKLPTA

SEQ ID NO: 257559 - protein, 380 aa, Zea mays
  Clone ID: MRT4577_166480C.1.pep
MESPRTLEALTNDLVVEIFLRIGSPADLVRASAACVAFCRLIANPSFLRRYRSVHPPLLLGLLDPYGDIEPTETPHPSAALAGAVARAADLRFGEYFPSSKLSGYCVSDVRDGHVLLTITPYLEDDEDEKLVPDLAVCDPLARVCLRLPPIPDDLLASVQVQQQDLVHYSCDTFLVPSGDEEDVTSFRVIVMMRSTQMLVAFIFSSTTGDWSAGSPFSLGSLRIPYDNIPSYAYGCFYWKVESENRLLTLNMSSMEFSVVDLPPGPDRSFVIMVEAGESRLGMFSLINHGTTLCYAIRQIGSEKSNQLEMDSVIPLPEGYIYFRIHGSYEGHILIFGYAFSEDACFALEIKTMKIERVCRKWRGFCPYFVFLPSMSQRRI

SEQ ID NO: 257560 - protein, 48 aa, Zea mays
  Clone ID: MRT4577_166481C.1.pep
FGVSPPHILWSYVCVPMLVPPPPPPCLFVCARTSVCKGRFGKFYLILI

SEQ ID NO: 257561 - protein, 317 aa, Zea mays
  Clone ID: MRT4577_166482C.1.pep
DETDIAHQEVLKGSKDKRKETFAEGNTQEECKYYSTPGGCKFGKTCKYLHREGNGGKTEVEKAELNFLGLPLRPGEKECPYYMRTGSCKFATNCKFHHPDPTNASSKEPGLEHENGDVPLQNVQGSSQPSLQMWPDQRALNEQHVPFLAPAPSYSGGMVPPQGMYPSSDWSGYHQVPLNPYYPPGVPFPHFPAAHMNHPMYKAADIPGHQPPPSDEYPERPGQPECQHFVKSGFCKYRMKCRYHHPRSRQSAPPPAGLSPIGLPIKPDQPVCTYYGRYGFCKYGPACMFNHPFNFGPPVPAAGPPLPGQYPTHGNFA

SEQ ID NO: 257562 - protein, 161 aa, Zea mays
  Clone ID: MRT4577_166483C.1.pep
MIQLLFTLLAAEGAVAAVLLFKTPLRRLAVLALDHLKRGRGPVMVRTIAATVLVVLASSLHSMAKIRGHAEGELDGSGVVGLTPTDQVLLARHLLEASLMGYSLFLALVIDRLHNYVKENRRLRKKLEEVLKQNKALEEATNGKLEENRPDQKDLSHAKDN

SEQ ID NO: 257563 - protein, 80 aa, Zea mays
  Clone ID: MRT4577_166484C.1.pep
MKDFLRFFPYRGVVFFFWKQRAFLMGLCFTPPKSLGVKKFTPCYPPLFIQFKLLKGKFFFLPGGPPRYFRPGPWGVPHLP

SEQ ID NO: 257564 - protein, 61 aa, Zea mays
  Clone ID: MRT4577_166485C.1.pep
HIAAPTSARPCSVYSPLLSDGSRSACTRLVAGLDSIEPNFNHACASSELTQHPVHARLSVD

SEQ ID NO: 257565 - protein, 55 aa, Zea mays
  unsure (1)..(55): unsure at all Xaa locations
  Clone ID: MRT4577_166486C.1.pep
MVNIKIGINGFSRIGRLRAKAALHIDDVXLVFLNHPFINTDYMTYMFKSNTVHGQ

SEQ ID NO: 257566 - protein, 121 aa, Zea mays
  unsure (1)..(121): unsure at all Xaa locations
  Clone ID: MRT4577_166487C.1.pep
LLWELFSEKLYCFQILSDEELETYLKVIAVISMGTXVIEHDLLNIRELYDHVLALLYDYLRSKMNTITPILTALVGESVGAXIVHGGSLVNLAKQPGSIIXILGVEKVCYCLWIILESCNM

SEQ ID NO: 257567 - protein, 104 aa, Zea mays
  Clone ID: MRT4577_166488C.1.pep
CRFRKSPPKIRVFYFTALKINISFNEEVHMLSSLASSATVYDAYGVIHMRQDEPGSGRVQRTCDLVGFEFDTAGAQLPRCPKPVHLQTSFQLAFPAYSALLPLL

SEQ ID NO: 257568 - protein, 98 aa, Zea mays
  unsure (1)..(98): unsure at all Xaa locations
  Clone ID: MRT4577_166489C.1.pep
RTRESTHASLTNTIRHTREAYKTGGKDLPDLNGKLTDMYFQVPTVNIXNNNLTIIIKNGAYYEDIKKTIKAASXDPLKGIMGYVEEDLVYTDFLGNNM

SEQ ID NO: 257569 - protein, 151 aa, Zea mays
  Clone ID: MRT4577_16648C.1.pep
MGRMHSRGKGISSSALPYKRTPPIWLKTATTEVEEMITKAAKKGQMPSQIGVLLRDQHGIPLVKSVTGSKILRILKAHGLAPEIPEDLYFLIKKAVAIRKHLERNRKDKDSKFRLILVESRIHRLARYYKRTKKLPPTWKYESTTASTLVA

SEQ ID NO: 257570 - protein, 232 aa, Zea mays
  Clone ID: MRT4577_166490C.1.pep
PAGTETQAASHAGTRWRATGRTNRAGCRAPRQGCWPRRAAEQKTSRRAEQPRRRAAGRSRRAQPRAESGSTTSARGAAVAHQAPAPQRAQCSAPPAPLLGCSCPAALLSSPAQRLLSSARAAPPLQRPAPRRCALAASRRPGPGRTAAGGTARHSTAAQAPGAQRSALESVCPYLDRRWACRRATILSSFLISTVSIPTIRGVFWIGFCGSGTLHQDLPSLPGGGGQGNLNV

SEQ ID NO: 257571 - protein, 86 aa, Zea mays
  Clone ID: MRT4577_166491C.1.pep
ILTRELCNPRRSLRTYSISLPDRRRRRRMLIGDTRLEWPLVHELSAAATGHQLRRRAHPEPTTIIRPLPNHSARSYRPHVAQVSLV

SEQ ID NO: 257572 - protein, 69 aa, Zea mays
  unsure (1)..(69): unsure at all Xaa locations
  Clone ID: MRT4577_166492C.1.pep
PARGLPRPXPLXAVAVXRAVXLXRVPSACVRXXVFVAFAGXAXGXVPRGGVVVAXAVGVLQXPGAXVVL

SEQ ID NO: 257573 - protein, 147 aa, Zea mays
  Clone ID: MRT4577_166493C.1.pep
LNRDLQAKVAKMLKETFGEMLYVSESEHMAEFPSPDELKGKIVISTKAPKECFQTKSSKDAAATEEEEGVWGEEISDDKATARQARPRSPPTATLCLHLHACCSTKAPKEYFQTKSSKDAAAKEGVLGEEITDDKANARMSEQSNGK

SEQ ID NO: 257574 - protein, 79 aa, Zea mays
  unsure (1)..(79): unsure at all Xaa locations
  Clone ID: MRT4577_166494C.1.pep
RPCPCXGSFLLDHRRRLAYIYDRPGLARCARSSIPSRLLVGRAGRLVLAPVGGLRTRVRRRWVCAYMANWRCVAYEATG

SEQ ID NO: 257575 - protein, 96 aa, Zea mays
  Clone ID: MRT4577_166495C.1.pep
TTYSPTTSPSLCTCRLNAATRPHASLYAPAQTMQRMRQVPRRRDHRHGADQKRPTSPRPPRGTGRTPSTRPTRPPPPTATPATAAPAATAPAAPAT

SEQ ID NO: 257576 - protein, 36 aa, Zea mays
  Clone ID: MRT4577_166496C.1.pep
KVVIGHVMSKFALPAMLGIEVVNINHVEASALANAW

SEQ ID NO: 257577 - protein, 72 aa, Zea mays
  unsure (1)..(72): unsure at all Xaa locations
  Clone ID: MRT4577_166497C.1.pep
SVARLVPXAXXFLLPGGFSXLLVXVGCXXLXXGXXAWXXSLLLRXFCRXXXFXSXXXXGGXGACXXFCRCFL

SEQ ID NO: 257578 - protein, 397 aa, Zea mays
  Clone ID: MRT4577_166498C.1.pep
MNFHTASFCASAAIGLPTAPKISASLATGRFACRSERCLETWTFRSPAICLLAATPTRCTLTDTMDPSSDIILDTPFFRIYSDRRIDRLVGTDTVPAGFDPATGVTSKDVVLDSNSGLYVRLYLPDTATGSDHYSKKFPVLVYFHGGGFVTHSAASPPYQPFLNTLAAKAGLLIVSVNYRLAPEHPLPAGYEDSFRALKWAASGSGDPWLSHHGDLGRIFLAGDSSGGNFVHNVAMMAAASELQIEGAVLLHAGFAGKQRIDGEKPESVALTQKLWGIVCPEATDGVDDPRMNPLAAAAPSLRNLPCERVLVCAAELDSLRARNRAYYDALAASGWGGTVEWLESKGKQHAFFLYDSGCGEAVELMDRLVAFFAGNLNSSCVDVTTHHTTTSGETLR

SEQ ID NO: 257579 - protein, 48 aa, Zea mays
  Clone ID: MRT4577_166499C.1.pep
KIENVILNYSNKARGGRGVLTKVPFVCFKFSSMYIEQNAILKRGMWRT

SEQ ID NO: 257580 - protein, 151 aa, Zea mays; identical to SEQ ID NO: 257569
  Clone ID: MRT4577_16649C.1.pep

SEQ ID NO: 257581 - protein, 50 aa, Zea mays
  Clone ID: MRT4577_1664C.1.pep
GCDAADEVNVSDQPYRPRGRRELDTSSILDDVEEGDNLAASEHIRSHCFF

SEQ ID NO: 257582 - protein, 118 aa, Zea mays
  unsure (1)..(118): unsure at all Xaa locations
  Clone ID: MRT4577_166500C.1.pep
AAAFGGXCLGALAVLAGFLGAXGSGPGVLLAVALLCRXFXAFGGARAPALGFGGFWFVAVGPWLGSGCVFVRRPVVLPPLLFCGCLAAPLPAVRVFPVRVGCASVPSAWPLLSPPGPP

SEQ ID NO: 257583 - protein, 54 aa, Zea mays
  Clone ID: MRT4577_166501C.1.pep
LKGDLCQMLKLGSSTGPEKPSIHPDGLWLDGMCYPLQGLFLVYPEATRVNFGAA

SEQ ID NO: 257584 - protein, 217 aa, Zea mays
  Clone ID: MRT4577_166502C.1.pep
MLHSSLSKCHPLPLLATASSPRRTLVAFLLRAGYLSKHPATSTAPRPTTTARASARVDTSPGKSRFGLEGRVSFSTAPDGSALAGGGRALPWLAAETGNSGAPVARTSAGRSSSWESSAEKFFSRDDQYTRREVSGVRMSDKVAIKDDDDENEGNGNPERGRIKGRYQRREVSGNRMPNKVAIREQEDEDEPIDNPKWGRIKDRYQRIGGEGMAGSP

SEQ ID NO: 257585 - protein, 79 aa, Zea mays
  Clone ID: MRT4577_166503C.1.pep
SSSLSTGRLLLQLHPSLSVSVLLAIGSSYPRHSFVYPSAFSSPPMATVEVQTPTVLASDEAPVVETPPSAVVPEESAPA

SEQ ID NO: 257586 - protein, 211 aa, Zea mays
  unsure (1)..(211): unsure at all Xaa locations
  Clone ID: MRT4577_166504C.1.pep
GRVGVCERLSIRERRTTAALGCLLYLSLIGYKAAVPYFTAILLVNYFASFYVIFRRTSQNLEALQEQLSLVEEEGIHSLHGALNTKYTMFKRFQGTMQVAAVAFIMVYMRADDTPDNYWFRVLVREWVQFCIFMYIGWNFRIPEASLHLPAMPLVKSAWEITMPPPIYSVEMDAADFKGLVLDQRHVGVRTTEESSCSAHXVTGLVQNPTQ

SEQ ID NO: 257587 - protein, 151 aa, Zea mays
  Clone ID: MRT4577_166505C.1.pep
IYKTKSCGFRSVNPSLQAQSYSRGIASSQSFGPFSAQFHNNIDPSSAASTQRCAVGTSVSIESTETRYPTRVSSESVRGIICKVLGPDLQNSRERIRRSYPPAAISSWQYGSRRAANSNVVLCSKFIANIATIRRTAVKCRRGCRSHFQQI

SEQ ID NO: 257588 - protein, 76 aa, Zea mays
  Clone ID: MRT4577_166506C.1.pep
RRGIPVYTLSCGFTNGGVFGIFFAQIFLSPKFSLLGGHEEVSGSALTRLHGPIFDRRISPVDRVHGAIVSLCTNQL

SEQ ID NO: 257589 - protein, 123 aa, Zea mays
  Clone ID: MRT4577_166507C.1.pep
ENLYLSAHVNYQKNWSNMHRQFGSTKATGQRCYAVRLLPLLLLLVTAASARSRHLNTNDAQRDDNPAPSTNKPAPVKFIFSRARWLRRRIDSIIWICDHILRLEKEILLSLRGQVMIKDFKMN

SEQ ID NO: 257590 - protein, 128 aa, Zea mays
  Clone ID: MRT4577_166508C.1.pep
LTPHTPPPTNPPTHTTSPTTPPPSQPKPRPATQQRRHPPARTSTTLYQHTITPSPPLFKPLCIPPTTPTSTTSSSHSSETLQTYPRRPLPSSLSQSPHYRYRPSRHTTATETTLKSPAHPQAHKSAQR

SEQ ID NO: 257591 - protein, 87 aa, Zea mays
  Clone ID: MRT4577_166509C.1.pep
VKPQIDTSILNSYQLIKTFSRSTKLVLAAGGDEQIIDFEWHLSTNTSERVRRQVQSVTRELARCCKVSSKGADAELDCYCCSGVLRG

SEQ ID NO: 257592 - protein, 118 aa, Zea mays
  unsure (1)..(118): unsure at all Xaa locations
  Clone ID: MRT4577_16650C.1.pep
FHWCIIYSSRKSSQARLLCFVVTAIAKLATCHIELLPGARVSLGKVARSRTSDRRVWQWACDYLGLMNEPAICLSVLGPSTAQGNGPGVVHWRGGGTTMXIAGPPFHDFXFTDLLPTK

SEQ ID NO: 257593 - protein, 103 aa, Zea mays
  Clone ID: MRT4577_166510C.1.pep
NRCLRAHASLTQDAGHSDTYKYPRTVPVRGEINRAIAPEHVTLLSPPFTLVGLLAAESKFQQIACRCNHVMLYNTLFANYISISIHDHVISCRAPKIKSEDLR

SEQ ID NO: 257594 - protein, 116 aa, Zea mays
  unsure (1)..(116): unsure at all Xaa locations
  Clone ID: MRT4577_166511C.1.pep
MGTGIHREPSSIPGGGGEVKGDPERGITIDIALGKVETTKYYCPLIEAPGHRDFIKNKNTGTTPGDWAGLINDPTPGGFGGGISKGGQTREHALLGATLGXKQKIWGCNKRGATPP

SEQ ID NO: 257595 - protein, 55 aa, Zea mays
  Clone ID: MRT4577_166512C.1.pep
SIRKHFGSRQCLCEDTISLPMLFNIQYQSLLTVRDERGNESLLSYVSSKKKKRGG

SEQ ID NO: 257596 - protein, 120 aa, Zea mays
  unsure (1)..(120): unsure at all Xaa locations
  Clone ID: MRT4577_166513C.1.pep
KVDHVDHHFIQIVSGVIEFLCPKTVCSSLPIVYPKALFCTIDCAVRRVEFEYGYGDGYAAGDSLRCLSCTSVASAVLPEPRIPMMEIILGCFISLGPLTHRSNVVQACPPCRDWGPXAER

SEQ ID NO: 257597 - protein, 59 aa, Zea mays
  Clone ID: MRT4577_166514C.1.pep
LFLPPFLSPTQHAGAAVAVELGISSLAAHFAAPRQLPGNTLHLPSNSLRAPKIKSEDLR

SEQ ID NO: 257598 - protein, 360 aa, Zea mays
  Clone ID: MRT4577_166515C.1.pep
MARYSPPSLRCFFRCAASSASRAVGSGTRKKNLVFLGSPQVAASVLDKLLGASGSPESAFQVAAVVTQPPAAKNRGRKLMPSAVAQLALDRGFPEELIFTPERAREESFLSALKEVEPDVCITAAYGNILPQKFLDIPSCGTVNIHPSLLPLYRGAAPVQRALQDGVAETGVSLAYTVRALDAGPVIACERFSVDECIKAPELLSMLFHLGSKLLINELPSILDGSAKDKAQPQDDSKATLAPKLNSEESWLSFDEEAKVLHNKVRAFAGWPGTRAKLQLINQNSVPDVLEIKVISTKVSTSCVKVGDENEILFSGSSLLIPCSGSTWLEVLELQLPGKKVTKAQDFWNGLRGQKLMKLP

SEQ ID NO: 257599 - protein, 402 aa, Zea mays
  Clone ID: MRT4577_166516C.1.pep
MGAMEDRSSKQAGAGLVAHLHDDLLVEILSRVPAKSICRFKCVSKAWLDLIAGPDHRKKLRQPMQGLIYMNPEKDRHSFSFLDLPLTVGSVPLDVADPAGFISFLTEHPGIHRLVLLDSCNGLILFQHLMELPHYNSLGYVVCNPTTKQWRAVPEPNCSSNVPMNYTYLAFDPTVSSHFHLVRFKKNREYMEPMSVHAYSSKTGIWTYSQTEKEEEEWQNQVYLSISNRCAFVNGFLHLLVWGSNKMQILIVDVQGRPRRMIRLPDVAAGNCEGCYCVYFGQSQGHLHCITKQLFDFNEEKYELSIWALQDYDAQEWVLKDTVSSLQLFGGNCPTSVALELYSEVASMHLDRNVVFFFSHCERRFIAYDMDSKEVSVFSSSKAIHRWKVGCYVPCFSPAPLK

SEQ ID NO: 257600 - protein, 100 aa, Zea mays
  Clone ID: MRT4577_166517C.1.pep
WGIAPIPRCDSPPKLSGPHAPILALMASGGCARVPGNLTRLSSSPTGTHYPKDLPHNRYITVITFDTHTLEIERKTFTKYTLHSRTQVLQGRKRCIYYKS

SEQ ID NO: 257601 - protein, 201 aa, Zea mays
  unsure (1)..(201): unsure at all Xaa locations
  Clone ID: MRT4577_166518C.1.pep
VRALDAGPVIACERFSVDECIKAPELLSMLFHLGSKLLINELPSILDGSAKDKAQPQDDSKATLAPKLNSEESWLSFDEEAKVLHNKVXSDSQCVQQSFCQPTLVXRAFAGWPGTRAKLQLINQNSVPDVLEIKVISTKVSTSCVKVGDENEILFSGSSLLIPCSGSTWLEVLELQLPGKKVTKAQDFWNGLRGQKLMKLP

SEQ ID NO: 257602 - protein, 60 aa, Zea mays
  Clone ID: MRT4577_166519C.1.pep
GVISFPSSLPVFGFWGTASPPFRVPSFPPACFVQGLPFPPWALAAPEVFNLFGRRGGIFF

SEQ ID NO: 257603 - protein, 75 aa, Zea mays
  Clone ID: MRT4577_16651C.1.pep
SRVRCFLLIHTDRPRAVFITHMDDLDVASYQFEGSNMVKTWMEGANINDTGLTYKDDSIVIHSEGSLDLSGPDIC

SEQ ID NO: 257604 - protein, 162 aa, Zea mays
  Clone ID: MRT4577_166520C.1.pep
IFTLYFGSSSVECLASAMLISPSSPQRIFNHVCSTKLVLAAGGDEQIIDFEWHLSPNTSENMVRTNHGEMGTTKLLILSTRWHATEDEHAPSDGSRRKRAHDTVVESSGGALIWKGAGMTEPERVRRQVQSVTRELARCCKVSSKGADAELDCYCCSGVLRG

SEQ ID NO: 257605 - protein, 150 aa, Zea mays
  Clone ID: MRT4577_166521C.1.pep
VKPQIDTSIFNSYQQIKTFSRSTKLVLAAGGDEQIIDFEWHLSPNTSENMVRTNHGEMGTTKLLILSTRWHATEDEHAPSDGSRRKRAHDTVVESSGGALIWKGAGMTEPERVRRQVQSVTRELARCCKVSSKGADVELDCYSCSGVLRG

SEQ ID NO: 257606 - protein, 216 aa, Zea mays
  Clone ID: MRT4577_166522C.1.pep
GVPDQTYDMWSVSGVSAYTGGVWVAALQAAAGMARVVGDRPAEAYFRARRDRAARVYDAELWTGVYFRYYNSGGCGASESIMADQLAGQWYARACGLEPVVEDAKARSALATVLDYNVMRVKGGAIGAVNGMRPDGTVDASSTQSKEVWPGVTYAVAAAMVHEGMTEAAFRTAKGAHDAAWGNDGFGYAFQTPEAWTEDGGYRSLHYMPRNRGSKL

SEQ ID NO: 257607 - protein, 83 aa, Zea mays
  Clone ID: MRT4577_166523C.1.pep
MGKWLINLDQALSRQSRPSMSIKDRTVDWPVVVETLQLATYPGMGQGKLEPGYSIRKETIAHWEWRDGGSSMYPPGIVARLIG

SEQ ID NO: 257608 - protein, 74 aa, Zea mays
  Clone ID: MRT4577_166524C.1.pep
FPLEGQLLPEVPLLTKSFTVKEMLKQLVSSALTSFLAEAPYFLLSLGSYTVPLLCELKVWMILSLPIHATRTKI

SEQ ID NO: 257609 - protein, 150 aa, Zea mays
  Clone ID: MRT4577_166525C.1.pep
VKPQIDTSIFNSYQQIKTFSRSTKLVLAAGGDEQIIDFEWHLSPNTSENMVRTNHGEMGTTKLLILSTRWHATEDEHAPSDGSRRKRAHDTVVESSGGALIWKGAGMTEPERVRRQVQSVTRELARCCKVSSKGADAELDCYCCSGVLRG

SEQ ID NO: 257610 - protein, 50 aa, Zea mays
  unsure (1)..(50): unsure at all Xaa locations
  Clone ID: MRT4577_166526C.1.pep
XETPSITRLFYFPFFSHHRFIIFLAQPSTWIIRVMHSDLQRDNKMSSEKA

SEQ ID NO: 257611 - protein, 41 aa, Zea mays
  Clone ID: MRT4577_166527C.1.pep
GNKTSPAKTTGDKTLSTQLLSKTYPTKEKTLKGLLADWESR

SEQ ID NO: 257612 - protein, 104 aa, Zea mays
  Clone ID: MRT4577_166528C.1.pep
ETDIRAGFFFNDGRFLKPDKTFLFSPSCFPSLFGHNTILSTPVLHSTALHCTVRETAYWLLTSLPCSPPKGKPNKNPFSLPSSNPCLISPSLGFRSVPSRPGRS

SEQ ID NO: 257613 - protein, 67 aa, Zea mays
  Clone ID: MRT4577_166529C.1.pep
FSTWGDRVCNMIVPQEYHKPHTLCSHSSLFSEHFCLKVVGLVLLEHFVYYLGGALWWQKSTTSANRT

SEQ ID NO: 257614 - protein, 85 aa, Zea mays
  Clone ID: MRT4577_16652C.1.pep
PGHITSRNSTNCETSSSTELPHDGPSHMNSTELHEYKRSNYPRACLPLPEILFLHNSHLLRSRQRPNLRSDCSLSIILVNCHRLT

SEQ ID NO: 257615 - protein, 94 aa, Zea mays
  unsure (1)..(94): unsure at all Xaa locations
  Clone ID: MRT4577_166530C.1.pep
GIRWNYMRWGTNLIMVTTTTLMLFEGGLGLAPTANRKETEVLKLKARDSGTETGDPAXGITLADTLXCGDLCQMLYEWIVLALKNTGALRQSIR

SEQ ID NO: 257616 - protein, 174 aa, Zea mays
  Clone ID: MRT4577_166531C.1.pep
ILASDNILAASVVVSSTVRSSSVPEKVVFPVITDTKTSVADLSPLWATNLEGKVNGAVETCRREDNWVMCKRFRTYFNFSHTMIAQRLDPDECDWAYGTNIIDLAVWRKTSIRNTYHLWLNENLKSGLTLWKFGTLPPALHTCLHYYLHYLRLGGKPYFKRWGMSAHLHVGEWI

SEQ ID NO: 257617 - protein, 127 aa, Zea mays
  Clone ID: MRT4577_166532C.1.pep
DRKNGIGMNYYWSDSERKPRANLNTALRSSSLNQFKGAWYRQNRQHRDSTFPLDKAPTTCLPRAPTGNPIPLKSYLMLERCSLRGGIVLLTVTELAEVMGELFLLLGFPLDKAPTTCLTRGTTGKPN

SEQ ID NO: 257618 - protein, 65 aa, Zea mays
  Clone ID: MRT4577_166533C.1.pep
TFCKENTDFFLNLINRALIYIKPNLFGVPSFLMNSSLMYLFCFKSPLVFFACFLPSVLSSKNPSF

SEQ ID NO: 257619 - protein, 89 aa, Zea mays
  unsure (1)..(89): unsure at all Xaa locations
  Clone ID: MRT4577_166534C.1.pep
LNQTHAQSNVSLPSHNSQPIARPHSYAPTXEGSFTLFPMVPSRSPPTPSLSPSPLPPXFLSFTPHPPLPFPRPXGCXMALPPFPPPRPS

SEQ ID NO: 257620 - protein, 45 aa, Zea mays
  Clone ID: MRT4577_166535C.1.pep
NSDEGELHTAQRPTTRVRRHGAEMHTLASCYMTRLKTRYGLSHLI

SEQ ID NO: 257621 - protein, 125 aa, Zea mays
  unsure (1)..(125): unsure at all Xaa locations
  Clone ID: MRT4577_166536C.1.pep
LPPPPPPRPPLLPRPPPGPDGXPPPHALLSGEPPPPPPKNPRGTLGTPXAARPKDPRPGIPXPSPRRPPRPEYPPRDMXPPEIKPPTNQAEAESXPTAQNKKAGGPPRAPPPRPTRHSHAPPLAS

SEQ ID NO: 257622 - protein, 36 aa, Zea mays
  unsure (1)..(36): unsure at all Xaa locations
  Clone ID: MRT4577_166537C.1.pep
QYKGQVCXDIHVHDKPAHMQHGETKELLCTPGPARP

SEQ ID NO: 257623 - protein, 80 aa, Zea mays
  Clone ID: MRT4577_166538C.1.pep
PFLPIFPNGFFVSNQSKATRARGHATRTGHKKRHGHTTGRTNHTHSYGSRRPEHEQATTNASAPREGQTGSRPKTKWKAP

SEQ ID NO: 257624 - protein, 99 aa, Zea mays
  unsure (1)..(99): unsure at all Xaa locations
  Clone ID: MRT4577_166539C.1.pep
AQTPGTRKARGSGPAPPSSRRHXEPRREKATAGTTTTREDTTTKPQAXNSKXXHRQEXEHHNQNHANQEQVEKXQTKXHXNKXXXXXXXKXKKKKKKRP

SEQ ID NO: 257625 - protein, 108 aa, Zea mays
  Clone ID: MRT4577_16653C.1.pep
ARRSSYRWWCGSGAHVTCRTTCKGVLTRARSHRRGGLLHRHSRPRRLLRRTVVLRGRGGLGGKSWNGCPPLFLVLGACIWKDKSARRCLNLERKCHCYQFAFLSLVEQ

SEQ ID NO: 257626 - protein, 51 aa, Zea mays
  Clone ID: MRT4577_166540C.1.pep
NPPPTCYMLKQITLIKIRDMGPPTFQTGLHQYGPHPLKIKSHNVHFAPVET

SEQ ID NO: 257627 - protein, 174 aa, Zea mays
  unsure (1)..(174): unsure at all Xaa locations
  Clone ID: MRT4577_166541C.1.pep
MAPHTTAAAGGGGGEEALEEASTLRHRHSAAKDGGEEGQANNGVAAAADDDGEGNALSVERAFADQAVPXXRDLLILPPLPVSFFLDIMFSVIVMKINLTTGIIPSLNGSAGLLGFFFVRLWTAAIXRGGLPREPFTRQENTRIQNWVGRSLRHPPSAGGFGTNLGLGVGENHP

SEQ ID NO: 257628 - protein, 104 aa, Zea mays
  Clone ID: MRT4577_166542C.1.pep
LAHVHWLELQSMALQLGHLKAWSLSNIKVIHIITVGKRLDTSTIAKLSDAMPLKHIAHNRNLKEQLFSEIRKEMYKGAKLYHRSGGTPSIPLWKMWSSWCRRRK

SEQ ID NO: 257629 - protein, 422 aa, Zea mays
  unsure (1)..(422): unsure at all Xaa locations
  Clone ID: MRT4577_166543C.1.pep
MDAGNGCSARALAACVVGGIVLGASVLALHLAGGPAAIPPLPLPPPIGALXRRRRRPVRVYMDGCFDMMHYGHCNALRQARALGDELVVGVISDDEIKANKGPPVTPLHERMIMVRAVKWVDDIIPDAPYAITEEFMNKLFNEYNIDYIIHGDDPCLLPDGTDAYALAKKAGRYKQIKRTEGVSTTDIVGRMLLCVRERSSDAHNHSSLQRQFSSGHGQKVDDTGSGTGTRVSHFLPTSRRIVQFSNSKGPGPDSRIVYIDGAFDLFHAGHVEILRLARELGDFLLVGIHTDQTISATRGRHRPIMNLHERSLSVLACRYVDEVIIGAPWDVSKDMITTFNISLVVHGTIAENMDFTEDDLHPYAVPMAMGIYRRLESPLDITTSTIIRRIVANHEAYQKRNEKKEASEKKYYEGKSFVNGE

SEQ ID NO: 257630 - protein, 495 aa, Zea mays
  Clone ID: MRT4577_166544C.1.pep
MARKMLIDGEVAAVADGGHYDYDLFVIGAGSGGVRGSRTAASFGAKVAICELPFHPISSEWLGGHGGTCVIRGCVPKKILVYGASFRGEFEDSKNFGWEINGDINFNWKTLLENKTKEIVRLNGVYQRILTSAGVTMIEGAGSLVDAHTVEVSQPDGSKQRYTAKHILIATGSRAQRVNIPGKDLAITSDEALSLEELPKRAVILGGGYIAVEFASIWRGMGAEVDLFYRRDLPLRGFDDEMRAIVASNLEGRGIKLHPGTNLSELSKTADGIKVVTDKGEELIADVVLFATGRTPNSQRLNLQAAGVEIDRVGAIKVDEYSRTSAPSVWAVGDVTNRINLTPVALMEATCFAKTVFGGQQVKPDHRDVPCAVFSIPPLSVVGLSEEQALEEANGDILVFISSFNPMKNSISKRQEKTIMKLVVDAETDKVLGASMCGPDAPEIIQGIAIAVKCGATKADFDSTVGIHPSAAEEFVTMRTVTRRLSPTSKPKTNL

SEQ ID NO: 257631 - protein, 240 aa, Zea mays
  Clone ID: MRT4577_166545C.1.pep
FGSSQCVVHGDIKPSNIMLDESFNAKLGDFGLARLIDHGMSLQTMTAVAGTPGYLDPECVITGKASPESDVYSFGIVLLEVACGRRPMAPPASTGEGKDGQVFRLVEWAWDMRGRGAALDAADERLGGAFDPWEMERVVSVGLWCAHPDPKMRPRIRQAAEALRSRSFRMPLLPPKMPVAVYLQPFGPSTLHFSDTTTSVGSSVTVPYTSTTSRATTATGTGMSNSSSPPAVTQHLSPRA

SEQ ID NO: 257632 - protein, 347 aa, Zea mays
  Clone ID: MRT4577_166546C.1.pep
MARLGALIPLAIVLLAAVAATAAPSDRPPKAQGPKPHKEKEKEKPKPMKVKCRPRKLYPYCPGKPMECPAECSQSCYADCSSCKPVCVCSVPGACGDPRFIGGDGNAFYFHGRRDADFCVLSDRDLHINAHFIGKHGADGMSRDFTWIQAIAVLFDGHELYVGARKTAAWDDDVDRMELTLDGEPVRLLPGTDAAWTSGAVPALSVTRTSAANGVLVSLDGRFTIRANAVPITEEESRVHRYGVTADDCLAHLDLAFKFGALTADVHGVVGQTYRSDYVNRFDVKASMPTMGGDSNYTTSSLFAADCAVARYAPSGGSRDDGVAMVSEIAGITCASGMGGQGVVCKK

SEQ ID NO: 257633 - protein, 100 aa, Zea mays
  Clone ID: MRT4577_166547C.1.pep
DMTQTLDVRGFFCSHTILFLVGGHNHSVIRSNWHALDTQIRACAHWMQTGSLPLLGIRTHGDEHGLATEFITCCVCAHTIISIVCVPIYPHPHCSCGISP

SEQ ID NO: 257634 - protein, 368 aa, Zea mays
  unsure (1)..(368): unsure at all Xaa locations
  Clone ID: MRT4577_166548C.1.pep
DFKWATFLASQRKKIDPLLYRPTTFVSRAGHPPLPPRSGRLIFNAPGSGAGQMLFLDCGAGGGPGGGLFHRGGRPMLGLEEGRGVKRPFFTSPDELLEEEYYDEQLPEKKRRLTPEQVLLLERSFEEENKLEPERKTELARKLGLQPRQVAVWFQNRRARWKTKQLERDFDRLKASFDALRADHDALLQDNNRLRSQVVSFVSLTEKLQEKEDATEGGATADTAAPAVDVEASLADDVEEPAEPAATFEVLQEVKSEDRLSTGSGGSAVVDADAXCTAGSPRQLXSSVESYFPGGEDHYHDCGTMGPVNHGAGGGIQSDDDGAGSDEGCSYYADEAAAAAAAFFVGHATHHHADEDEDAGQISWWMWN

SEQ ID NO: 257635 - protein, 60 aa, Zea mays
  Clone ID: MRT4577_166549C.1.pep
IEGPGPAFFFVCWGGPNRTRGFFCFSLEKKKKKKKKKKKKKKKKKKKKKKKKEKKKKKKR

SEQ ID NO: 257636 - protein, 58 aa, Zea mays
  unsure (1)..(58): unsure at all Xaa locations
  Clone ID: MRT4577_16654C.1.pep
MTKGTSSFGKRLNKTHTLSRRCGSKAYHLQKSTCGKCGYPAKRQXQYNWSAKAERPDT

SEQ ID NO: 257637 - protein, 175 aa, Zea mays
  Clone ID: MRT4577_166550C.1.pep
MLGLEEGRGVKRPFFTSPDELLEEEYYDEQLPEKKRRLTPEQVLLLERSFEEENKLEPERKTELARKLGLQPRQVAVWFQNRRARWKTKQLERDFDRLKASFDALRADHDALLQDNNRLRSQVVSLTEKLQEKEDATEGGATADTAAPAVDVEASLADDVEEPAEPAATFEVLRV

SEQ ID NO: 257638 - protein, 74 aa, Zea mays
  unsure (1)..(74): unsure at all Xaa locations
  Clone ID: MRT4577_166551C.1.pep
KIFLKXKAKELIKYKDNFFFIKDKNGCFLLQASINRVQNMKELISFGESNEAENNITFQGRQRLVIAQNKKKVL

SEQ ID NO: 257639 - protein, 331 aa, Zea mays
  unsure (1)..(331): unsure at all Xaa locations
  Clone ID: MRT4577_166552C.1.pep
MESGRLIFNAPGSGAGQMLFLDCGAGGGPGGGLFHRGGRPMLGLEEGRGVKRPFFTSPDELLEEEYYDEQLPXEKKRRLTPEQVLLLERSFEEENKLEPERKTELARKLGLQPRQVAVWFQNRRARWKTKQLERDFDRLKASFDALRADHDALLQDNNRLRSQVVSLTEKLQEKEDATEGGATADTAAPAVDVEASLADDVEEPAEPAATFEVLQEVKSEDRLSTGSGGSAVVDADAXCTAGSPRQLXSSVESYFPGGEDHYHDCGTMGPVNHGAGGGIQSDDDGRXSDEGCSYYADEAAAAAAAFFAGHATHHHADEDEDAGQISWWMWN

SEQ ID NO: 257640 - protein, 59 aa, Zea mays
  Clone ID: MRT4577_166553C.1.pep
KKKKTKKKKKKKKIKKKKKKKKKKKKKKKKKKKKKKKASPGGNAPGCCRYKFGAGSPLS

SEQ ID NO: 257641 - protein, 169 aa, Zea mays
  Clone ID: MRT4577_166554C.1.pep
ARADCGWWSVGVILFELLVGIPPFNAEHPQIIFDNIMNREIPWPHVPEELSSEAYDLIDRLLMENPVQRLGATGAGEVKAHPFFKDINWDMLARQKVAFIPSTDDEYDTSYFACRHAWSGAGEHGGAAGSDYDDRSEASSMSCGSSPRSDYEEDGDECGSMEEFGAPLS

SEQ ID NO: 257642 - protein, 87 aa, Zea mays
  unsure (1)..(87): unsure at all Xaa locations
  Clone ID: MRT4577_166555C.1.pep
FFFIIWGYSYRPSPPMGYRRRARFPSTHDHYGGRCRDLSTRILXTNLRRDCFSQNLRRPFGHFVRVPDLYLPRDYYTGRNTCLQDYC

SEQ ID NO: 257643 - protein, 65 aa, Zea mays
  Clone ID: MRT4577_166556C.1.pep
HKGRKLVQSDNLFDHERVEVVDIHVFSVPNMVQFADITNGRVSSVFQYFRFSLNICSVESSNFRC

SEQ ID NO: 257644 - protein, 67 aa, Zea mays
  Clone ID: MRT4577_166557C.1.pep
LRDHWETCVHAAFKECGNRFRVSVLILESSLSDRGRPDRRPVQVRCQPKRQHCHQCEIGDNAVRKCE

SEQ ID NO: 257645 - protein, 278 aa, Zea mays
  Clone ID: MRT4577_166558C.1.pep
MARHFVLNTGAKIPSVGLGTWQSDPGVVGNAVYAAVKAGYRHIDCARVYGNEKEIGLALKKLFEEGVVKREDMFITSKLWNDHHAPEDVPEALNDSLNDLQLEYLDLYLIHWPFRVKKGTNTSPENFVTPDFPATWGAMEKLYDAGKARAIGQTKLHSFCQSTGVHLTAYSPLGSPGTTWMNGNVLKEPIIISIAEKLGKTSAQVALRWNIQMGHSVLPKSTNEERIKQNLDVYDWSIPDDLLAKFSEIKQARLLRGNFIVNPESVYKTHEELWDGEL

SEQ ID NO: 257646 - protein, 313 aa, Zea mays
  unsure (1)..(313): unsure at all Xaa locations
  Clone ID: MRT4577_166559C.1.pep
MARHFVLNTGAKIPSVGLGTWQSDPGVVGNAVYAAVKAGYRHIDCARVYGNEKEIGLALKKLFEEGVVKREDMFITSKLWNDHHAPEDVPEALNDSLNDLQLEYLDLYLIHWPFRVKKGTNTSPENFVTPDFPATWGAMEKLYDAGKARAIGVSNFSSKKLGDLLAVARVPPAVDQVECHPGWQQTKLHSFCQSTGVHLTAYSPLGSPGTTWMNGNVLKEPXIIISIAEXXKLGKTSAQVVRCWNIQMGHSVLPKSTNEERIKQNLDVYDWSIPDDLLAKFSEIKQARLLRGNFIVNPESVYKTHEELWDGEL

SEQ ID NO: 257647 - protein, 73 aa, Zea mays
  unsure (1)..(73): unsure at all Xaa locations
  Clone ID: MRT4577_16655C.1.pep
LRSSRDMLCMRTQVIHTTCIRCSRRPLNKSSRLEYVXTSHINWISASADFSRDTSLYSLKSLHVDACTSSYCY

SEQ ID NO: 257648 - protein, 33 aa, Zea mays
  Clone ID: MRT4577_166561C.1.pep
PKPSVHFNYNRGKKPKYKIVLYIRPQAPPLRIA

SEQ ID NO: 257649 - protein, 41 aa, Zea mays
  Clone ID: MRT4577_166562C.1.pep
KKKKKKKKKKLKNKKKKKKKRKREKKKKTKKKKKKKRGRPF

SEQ ID NO: 257650 - protein, 54 aa, Zea mays
  Clone ID: MRT4577_166563C.1.pep
LDPPLVHSNSISQYPGFSPTLIPTAYSTPVTSDCSYFESNQLDFTYSITPIRSL

SEQ ID NO: 257651 - protein, 88 aa, Zea mays
  Clone ID: MRT4577_166564C.1.pep
FRRDNPMTYPSKQASLLLLLLLGTWLLLVIGITALSPLTIPVKILGLGIPPAISLITLAIAPIGAPSPRGRTPFIGFLLELTPFVPKA

SEQ ID NO: 257652 - protein, 90 aa, Zea mays
  unsure (1)..(90): unsure at all Xaa locations
  Clone ID: MRT4577_166565C.1.pep
EXEGDPPRVPAAPPPLPLFTAAKRSSSLANLLFARLYRFFPASLILRLLSSSHSTLSSRRPSSTSGSAASTICAICSAXWTLCHSLCART

SEQ ID NO: 257653 - protein, 126 aa, Zea mays
  Clone ID: MRT4577_166566C.1.pep
MEDLAASLTPYPHSAPLYLLYDATSIANASRGLAPPPLLGDGDDDDGGFEFATTTTLLNGGGAALRACASDVSAAAFAGELFPLSLPPRLQRRPARSAGASAATSPTPSAAALQAGCRKHRGFDPF

SEQ ID NO: 257654 - protein, 70 aa, Zea mays
  Clone ID: MRT4577_166567C.1.pep
LPPRSSLWVTGLTGSPRRGPGSPPGPKSPKGPAPPPGFFNPVCYFSPAPLAFCFPTLPTSNDGVESSLKT

SEQ ID NO: 257655 - protein, 128 aa, Zea mays
  Clone ID: MRT4577_166568C.1.pep
LNLSPSRRRHHQRCRSRINAPKCPQEAMIVALGLHAMSCRPSRCAAEISPPLPLGQVDRRHHAEDQLRFQAPTMDAPPRHAICISVHLTERTFPPLAHGYVFVGKNTKRNYGREIVITACDCISVATT

SEQ ID NO: 257656 - protein, 95 aa, Zea mays
  Clone ID: MRT4577_166569C.1.pep
RPSSSLSESSCAVSVKRSHDFSTSERGVWMKSSPKSSISSMSAQSKVYRRHGRSQHLSETVIRSSARVNQDPISRRVNGWILFKVSSTLTTRIQK

SEQ ID NO: 257657 - protein, 443 aa, Zea mays
  Clone ID: MRT4577_16656C.1.pep
QSIANKSKNWQKNQEVPKQLPVNDKKKTIQELISKARKEVDADLRAVSFTLDPKERKGIQKETLSALFETYFRILKHSMAASNSRTKVNNVSPGGSHPLLTPCLEGLGKFSHLIDLDFMGELISCLKKLSGYSDRQDEIPNDNALSVSERLQCCIVVFKVWRSNLEALNVDLQDFFVQLYNLILEYRPDRDHGEVLADALKTLLWEGRQHDMLRAAAFIKRLATFALSFGSAEAIAALVTLKHLLQKNSKCRNMLENDSGGGSLSCLVAKYNPEATDPYLSGALASVLWELSLLEKHYDISVSSMASNILSMANLNPTQNPVPILNVNPLEAYRDLSLERELSKPASKALPLNLKRKRRAKEFVALSPDVLQKADCSVDKDELEEKLQSHFSVLRGISENERLRAELNHTLSSINMYKEYKKQKRKNMKVKTGRKKNSKALAV

SEQ ID NO: 257658 - protein, 35 aa, Zea mays
  Clone ID: MRT4577_166570C.1.pep
LPYSFSSSAVRYYQFKDGLSLCLRGLSLPPECSGS

SEQ ID NO: 257659 - protein, 56 aa, Zea mays
  Clone ID: MRT4577_166571C.1.pep
KASYDNWFTGEKCPTKAFLTWNTLAIITHDYVSTLFTQPAINRHGPISDIPNKTTI

SEQ ID NO: 257660 - protein, 107 aa, Zea mays
  unsure (1)..(107): unsure at all Xaa locations
  Clone ID: MRT4577_166572C.1.pep
MEGGAHNFNGSTLKEGFSFWGRNPYVLRLAFSAGMGGLFFGYNTGVIWGALFYIRDNFVXGDRNTWFQEMIVSMAVAGAIIGAAMGGWTTDRFGRRGSILGADSLFF

SEQ ID NO: 257661 - protein, 136 aa, Zea mays
  unsure (1)..(136): unsure at all Xaa locations
  Clone ID: MRT4577_166573C.1.pep
FVKTLTDKAITLXLGXSYTSDNVKAKIQDKKGIPPEXQRLIFAGXQLEDGRTPSRLXIQKESALHLVLRXLRGGQLSHGHLSCCCTWVSAWSSSNKHLWFVCHESWLWLRWFNETCCVLLCCTPKLFLQQYGLNPL

SEQ ID NO: 257662 - protein, 104 aa, Zea mays
  Clone ID: MRT4577_166574C.1.pep
VEVTQDVPLAQTNALAVLSQFNEAFIDQPFLVSKVPALFWEHQSRGCYKITFAQLCRGSLRQRSAGEGKPGDKTGAGQWQPWADHLCPVAHSSRALQGNRPKPH

SEQ ID NO: 257663 - protein, 42 aa, Zea mays
  Clone ID: MRT4577_166575C.1.pep
DIAHLLSAPLRRVRAHLSTIADMSRGLGGHRVCCAREWPSGS

SEQ ID NO: 257664 - protein, 37 aa, Zea mays
  unsure (1)..(37): unsure at all Xaa locations
  Clone ID: MRT4577_166576C.1.pep
VWVLELGYYQVYLVLSMLRRKCQGRVLETKSXRWSPR

SEQ ID NO: 257665 - protein, 46 aa, Zea mays
  unsure (1)..(46): unsure at all Xaa locations
  Clone ID: MRT4577_166577C.1.pep
TRQGALLHFVILRTPPVNSEGERDEFGGAPTPCKNFFFQQXCPALX

SEQ ID NO: 257666 - protein, 74 aa, Zea mays
  Clone ID: MRT4577_166578C.1.pep
ATKKLVILMANNPNQLNDPTLRRMPSATHDLGRDSPDTKAEPDQRWSDHCEASTNDRSEAPTQNRTVLYSLATT

SEQ ID NO: 257667 - protein, 89 aa, Zea mays
  Clone ID: MRT4577_166579C.1.pep
QAKGGQASVDHGGSVAGAREYNPSLFRMAVGAPPPVCSLALNSLISSPPLVEEHWFAGGRASVCISSQVVQRLFQGKPAFVNQSSARHL

SEQ ID NO: 257668 - protein, 48 aa, Zea mays
  Clone ID: MRT4577_16657C.1.pep
PRCISLRCRLHKILHCLKKWPVGCVLSPVCVKYYPYDWLAAKKKKNKT

SEQ ID NO: 257669 - protein, 103 aa, Zea mays
  unsure (1)..(103): unsure at all Xaa locations
  Clone ID: MRT4577_166580C.1.pep
ATHPPGPGPVTDPPEAGGERQARRVTGRCAEDRGRAPPVTGESPEGKPLTQSHSPRFSTAAGARARSATRRWRPPRRRRPGRSSRARAPWLPLRYCSGIXPAG

SEQ ID NO: 257670 - protein, 71 aa, Zea mays
  Clone ID: MRT4577_166581C.1.pep
PCITAVRTRACLTRSYQGRPALSRTWWPPAPAPSTAAWVPFPRKRLVGSGPEVGGVFVKGPRARVRPRVLK

SEQ ID NO: 257671 - protein, 119 aa, Zea mays
  unsure (1)..(119): unsure at all Xaa locations
  Clone ID: MRT4577_166582C.1.pep
LARITMDPTKFRPSSSHDTTVTTTNAGAPVWNDNEALTVGARGPILVEDYHLIEMVVYFSRERFPESVVDARGVSAKGFLEWTHDVMSLTCVDFLREPGVXTVLIVCFSCVLFIFLGFF

SEQ ID NO: 257672 - protein, 93 aa, Zea mays
  Clone ID: MRT4577_166583C.1.pep
CSQRALPRVHDRYEGNQPTACPHIVRLWVPVVTSYAPQSSLIPCWRDFWKINICFRMLCAEFCCPMLLCFHQINCKYMYMLSIGFYLKQYTCH

SEQ ID NO: 257673 - protein, 67 aa, Zea mays
  Clone ID: MRT4577_166584C.1.pep
SDMSFRLAHARSCESISICGSCLLRNTSRLSYKRHSMYPSIRCRGTRTNSALGSRPSGGPCTQRSRG

SEQ ID NO: 257674 - protein, 335 aa, Zea mays
  unsure (1)..(335): unsure at all Xaa locations
  Clone ID: MRT4577_166585C.1.pep
MAPLSGPTSKSKKRALRHVLLLCLLLPCISQPLPAPSPSPTAAPPATTLPLSPFNDRLDAAYIALQAWKHAIIEDPKNLTADWCGPFVCNYTGVFCTAAQDDPHILTVAGIDLNHGRIAGFLPDHIGLLADVALIHLNSNRFHGTLPPSMQHMRLLYELDASNNLFSGXFPSFLTSLPSLKYLDLRFXSFDGDLPDAVFGRQLNLDALFANNNRFNVTLSSQSLTNSTASVIVLANTELTGCLPPSIGDMADTLVELILLNTSISSCIPPEIGKLKKLRVLDLSHNELAGELPESVGDMESLEVLNVAYNQLSGVVPESICLLPKLKNLTVAGNY

SEQ ID NO: 257675 - protein, 193 aa, Zea mays
  Clone ID: MRT4577_166586C.1.pep
YVDSSLNIISAQFKVLLHCIQLLEYILQLLATYLISNPCAVITLFKWTVFASTFDFLTQRRLNFLHSHHELAAVRANCIGARALRVSQLLHHRSRNLQHPHYPLLDVLKALQGAALALGNHLHRRRGGEGAEKGIGGAEGWTECRDLTALGWVGWMERGRRSRTGAEAAEGRGQKRGRAPERAVSCERADDDA

SEQ ID NO: 257676 - protein, 161 aa, Zea mays
  Clone ID: MRT4577_166587C.1.pep
LVLSVADLISSFQPNPAQSRQIAALRPTLGATDPLLHPLSSSSSVKMIPQSQSSSLQRLQHVEKRIVRVLELAGAVMEELGYSQGPRTDAVGAHCREFMMAMKEIQTTLREEIKSACEYRPFEKCDYSARIANEICCKKLEYVLEKLDTMQQNLEQSTDNV

SEQ ID NO: 257677 - protein, 144 aa, Zea mays
  Clone ID: MRT4577_166588C.1.pep
MPRMVAPPPSGEFQIVLSKPFNGAPTHMIEVIGEPNRSASIRLSNYNGGSKSSEKKGDVPQDDVRELMSLVSTLRGFPSHPSKDIYGLDTKVDFNTMEVQWGNQDEDPAMEGGEVAGEQKDEFKRIAESIEALARQFAKQDSAV

SEQ ID NO: 257678 - protein, 73 aa, Zea mays
  Clone ID: MRT4577_166589C.1.pep
PHDDDDLLQQALAMSMEGGASGSAAVTDSAMAEASAVDPDLALAREEGRQVRQNRRREELLQAGVMSLWCFCD

SEQ ID NO: 257679 - protein, 75 aa, Zea mays
  Clone ID: MRT4577_16658C.1.pep
DNVKKSEGQAQDRYIDKHIRHELGGRSVSRVNRRDHLILLRESALRARPPSTTRGDVKDLTEALNSLPRSSTASR

SEQ ID NO: 257680 - protein, 76 aa, Zea mays
  Clone ID: MRT4577_166590C.1.pep
TLTQIWRYAGMKSLIHGLGPRPCTRRCIAWNSRFASRRCQARSSCISTSDYLGLIIRWKLFHLVKALYASYSDKAM

SEQ ID NO: 257681 - protein, 88 aa, Zea mays
  unsure (1)..(88): unsure at all Xaa locations
  Clone ID: MRT4577_166591C.1.pep
PHDDDDLLQQALAMSMEGGASGSAAVTDSAMAEASAVDPDLALXLPGVDPNDPSVKDLLASLHNQGEQEKKEDKXDKTEDEKNCFKLE

SEQ ID NO: 257682 - protein, 132 aa, Zea mays
  Clone ID: MRT4577_166592C.1.pep
GTLEAGRGLYYPTSTSTSPTTALPVSPSPIYAAAGTTYPRPRRPVTRPDQSAAPRYVTRPDHNEFDPARPANRRPRRDHCTLLLPYGGTSMNGKSSTTVNKYHKYHVYYECKEETRKSNYTDMTDKHYDTCH

SEQ ID NO: 257683 - protein, 94 aa, Zea mays
  Clone ID: MRT4577_166593C.1.pep
FANLFIGSSIHPFSKGPKSISSPGNQFQGAFFLESPIFYFQFNKGKFGNLFFQGFQRKISSFFFLGKKSFQKGFKPKKKKKKKKKKKKKKKKKK

SEQ ID NO: 257684 - protein, 68 aa, Zea mays
  Clone ID: MRT4577_166594C.1.pep
MPMKKKSLVLIWEKKKKKKKKIKKKKKKEKKKKKKKKKNKKKKKKKKKKAKKKKKKKKKSLYLPGRPL

SEQ ID NO: 257685 - protein, 84 aa, Zea mays
  Clone ID: MRT4577_166595C.1.pep
DEFDYYLLHEILMKTPQLILSALSKTFSAKKRKSKLQKAWDGTKVVYNIASWSATAIGIYQNPAIVQAATAAFWTSCRVISKFL

SEQ ID NO: 257686 - protein, 93 aa, Zea mays
  Clone ID: MRT4577_166596C.1.pep
MARAASSYVSRRGLSAAMTVAEESVKKVEEKAVKLGTVAKDIASAMATTTEEKTAFWEPDPETGYYRPVTGTKEVDAADLRAEMLKRRILQDD

SEQ ID NO: 257687 - protein, 143 aa, Zea mays
  unsure (1)..(143): unsure at all Xaa locations
  Clone ID: MRT4577_166597C.1.pep
MVFDAMDSDADRAAILEWLEVQISEAKDLEFNRKDVLEKMDRWQAALEEESWLEEYSRNENRYNVGKGTHLVLKRAEKARALVSKMPVMAEALMAKVVAWEKERGAKFEYDGEVLLDVLDDYGNARKEKEXERKRQRDQRRLL

SEQ ID NO: 257688 - protein, 112 aa, Zea mays
  Clone ID: MRT4577_166598C.1.pep
GGFMFPAKIMSLIFAHTMAKMLKAFHLKGLGFGVKIWRGHTMWCAHFQIPFFLKLGGIKMGWCPPLIMPLSRSSCVQRHRRGDRILLPRGRFSPLSCNLCPGRGVDVFLGAF

SEQ ID NO: 257689 - protein, 94 aa, Zea mays [sequence omitted]

SEQ ID NO: 257690 - protein, 84 aa, Zea mays
  Clone ID: MRT4577_16659C.1.pep
TWLSYDKDVLLISGRPRYLIKRNHYQVTQGLECIQSLSQLVWLTHNQACNVSKNIVATMKRKEGQINKELCTYDNADPDLRWEQ

SEQ ID NO: 257691 - protein, 52 aa, Zea mays
  Clone ID: MRT4577_1665C.1.pep
HALILNVLSVNYEKRKVYHAMLSSHLINCPGWPLVPNTRLGTPTRPERLETW

SEQ ID NO: 257692 - protein, 84 aa, Zea mays
  Clone ID: MRT4577_166600C.1.pep
DAWEKNTKTFNYKTKQQQKRRILKNKKTPKKTTNYQTQKQNSRSIAITAPTYSPFQTYSLLPKPKLPSISLTQTTSLTTAAYRH

SEQ ID NO: 257693 - protein, 65 aa, Zea mays
  unsure (1)..(65): unsure at all Xaa locations
  Clone ID: MRT4577_166601C.1.pep
LEAARPXSCLIALTPNQSVADTQGRRMPPSREYHQTHDEKDDDTSRVVKLIIAEGCAFVVDSKAA

SEQ ID NO: 257694 - protein, 73 aa, Zea mays
  Clone ID: MRT4577_166602C.1.pep
WDPRGRPGYLPARLARFLARLAISTLHIHRTYTCMVRHIYNPIKYLSHERSLAGTEALVGRAGLQPPLPLLSL

SEQ ID NO: 257695 - protein, 73 aa, Zea mays
  unsure (1)..(73): unsure at all Xaa locations
  Clone ID: MRT4577_166603C.1.pep
LPXXRLCPPCXLGGCCXGGXXAGFPSXXPWXALXAXGPCLVPXXLXRXXXRAPWPPXFVXXPXAAXXXLVFGP

SEQ ID NO: 257696 - protein, 39 aa, Zea mays
  Clone ID: MRT4577_166604C.1.pep
LILTMVYRVWGIPSIPLVEQHPHWKQHEPPEQKLLKRHT

SEQ ID NO: 257697 - protein, 55 aa, Zea mays
  Clone ID: MRT4577_166605C.1.pep
KKYYKPSETIYGILKTLNRNTQFPIEKRLRSLCSYKRFKTLFCGPKPCREPIWQA

SEQ ID NO: 257698 - protein, 71 aa, Zea mays
  Clone ID: MRT4577_166606C.1.pep
SPVSTLIESLNLLTWRRLFAPLFPTAIEYTEGLRPFLWLGNPVPQKIWWSRDISEGLQRGGQQGAPPLPPA

SEQ ID NO: 257699 - protein, 489 aa, Zea mays
  Clone ID: MRT4577_166607C.1.pep
MAMRKENPVLNACQASNGRITRAQAAANRRSFGAFPSVPLPAKTERKQTAQGKAKRGSSYDNTSASVALSGPQPKRRTVLRDVTNLSNANSNKSFAAAPKLQTKPSLRTGRTVSKSKPCAKKIPKKPPPAGNGSALTNVLNIAEETQAEKILAERVEPVLLLENRGPLSLQNVERNRDSACHEVFFEERNLRDKCEPSVSKNGDSYVLDIVDIDKDNGNPQMCASYVVEIYSNLMASELMRRPSPNYMEGLQRDITKGMREILIDWLVEVSEEYKLVPDTLYLTVYLIDRFLSRNYIERQRLQLVGITSMLVASKYEEICAPRVEEFCFITDNTYTKAEVLKMESQLLNDLGFNLSVPTTKTFLRRFLRAAQASRKTPSMTLGFLANYLAELTLTEYEFLKFLPSLVAASAVFLARWTLDQSDLPWNQTLEHYTSYKCSDIQLCVCALRELQHNTSNCPLNAIREKYRHQKFECVANLTSPEFPRSFFS

SEQ ID NO: 257700 - protein, 71 aa, Zea mays
  Clone ID: MRT4577_166608C.1.pep
SFILLLRPHPRRTGARYNAEKTVPSHCGEPETLHPCSETSRRRVVAYERQLLTDTCCYHGSIDGPIESGLI

SEQ ID NO: 257701 - protein, 139 aa, Zea mays
  unsure (1)..(139): unsure at all Xaa locations
  Clone ID: MRT4577_166609C.1.pep
GKNGTFNKKRKGTNNRKRKRQARPKGKRRGKPRPPGGGPSDKRGEHKKAAHPAHTRGEPPTTGRSSPGGGPQNDPGPHLRAQGPAPKKQKTPLAPPQXVPGVEKRGRPPPGPNPPSAPRPPGPPRASPXRPPWALPGPG

SEQ ID NO: 257702 - protein, 96 aa, Zea mays
  unsure (1)..(96): unsure at all Xaa locations
  Clone ID: MRT4577_16660C.1.pep
APQHCHQLRPISXVILCHLMAGPAAVVVVALHLLVRWHIPSEHSALHLDGHCVLSAATLDALHGRGVDLGVRHEFVQPIQRHNACMDITIVCGKFR

SEQ ID NO: 257703 - protein, 98 aa, Zea mays
  Clone ID: MRT4577_166610C.1.pep
KKVIIKKKKKKKKKKKKKKKKIKQQKKKQKKKQKIKRYVVPKQNSHHTSTTWGAPYGGLDVLEAGGVHGGPGSCRNRAPCTSTCLATFSGGTPSAPAR

SEQ ID NO: 257704 - protein, 47 aa, Zea mays
  Clone ID: MRT4577_166611C.1.pep
GVQARSLILSKYKNSLQILAFFCKNIFLGLQKSTKGTTILTHVVFHP

SEQ ID NO: 257705 - protein, 222 aa, Zea mays
  unsure (1)..(222): unsure at all Xaa locations
  Clone ID: MRT4577_166612C.1.pep
PGIEAAYNXCLKEKYCVADEDIILYGQSVGSGPTIDLASRLPDLRAVVLHSPILSGLRVIYPVKRTFWFDIYKNIDKIGMVNCPVLVIHGTSDDVVDCSHGKQLWEHCKVKYSPLWLSGGGHCNLELYPDYIKHLKKFVSSVSKKASSKPDPKETTSKDDTTSKETEEAYPEKPQEAKKCPQISRKSLDSRFGKSKTVDVPDKPRMSSDDIDKFRRSRCLVW

SEQ ID NO: 257706 - protein, 112 aa, Zea mays
  unsure (1)..(112): unsure at all Xaa locations
  Clone ID: MRT4577_166613C.1.pep
GTLEAGRXHTSKLNNTSFSKDHNDESLAVVVAMLVTALFPEPASPQQCESNCQQQDVHQLPALQPCRQKSLTPPSPAPGDTRDSTEAKVPKLPCNTTRAGCTTSCPRHCLTT

SEQ ID NO: 257707 - protein, 91 aa, Zea mays
  unsure (1)..(91): unsure at all Xaa locations
  Clone ID: MRT4577_166614C.1.pep
PSVVPGVDLAKVQRAVCMISNSTSVVEVFYRIDHKFDLMYAKRAFMHWYVGEGIEEGEFSXAREVLTPLEKDYEEGDASYDEDLEGDYGDE

SEQ ID NO: 257708 - protein, 157 aa, Zea mays
  unsure (1)..(157): unsure at all Xaa locations
  Clone ID: MRT4577_166615C.1.pep
FFFFFFFFFFFFFFFFFFFFFFFFFFFFFFFFFFFFFFWPKRERQKGPKKGKTEKSQKDWDGQRNWEKKKKRRKGLKKKKEEKRGXKKKKLKRGERGEKILKKEKKKGPKEEKKAKKMRXFGKPKKGLIFKKRGGXKKTGRTKKKKNEHVRGKMGKP

SEQ ID NO: 257709 - protein, 77 aa, Zea mays
  Clone ID: MRT4577_166616C.1.pep
RGGLQIFVMTLTGRTITREVQSCYTIDNVNASTHDIEGIPADQQHMIFAVKQMEDDRTLAVYNIQKESTLHLVLRLR

SEQ ID NO: 257710 - protein, 104 aa, Zea mays
  unsure (1)..(104): unsure at all Xaa locations
  Clone ID: MRT4577_166617C.1.pep
HWVPRGRPGLFSAVLITKRKLINYFERHSVSVVSMAPLGEIVRNHDASGHIVKWSHELNRPNIDYVSRTAIXSQALADLVVKWTESRTRSAQQGVTPLLPSPPP

SEQ ID NO: 257711 - protein, 55 aa, Zea mays
  Clone ID: MRT4577_166618C.1.pep
SLVRAPPIFYLSFYVCFLFFFFFYKRFHCFIPEFIRIKILADYHRSQSLIFIWPS

SEQ ID NO: 257712 - protein, 465 aa, Zea mays
  unsure (1)..(465): unsure at all Xaa locations
  Clone ID: MRT4577_166619C.1.pep
LYFVAEMGLPGFSVKDLEEGSVASVVECLLALKDNVTPGLRQTITTNAAKTPLRRKLDLEESDEPVISVMTPGRRSXEERWKGHWDPKSQQRSILHSGQKVHDAFQLKRASYTDLPAAKVSEMMHPRSIDNAPTQSLLRVVNGILDESIERKRGEIPHRVVYLLRNVVQENEHRIAIQADHIRNQNSIIKTREDKYRSKIKALETLVNGTNEENEMTVDRLELVEVEKSKLDEKRKLGEQDMVRLMQEKENAENTIASLQQEIQVLSRMHEQYHERKETEARQMEEHLAIRLKEAEFLLMQSEKKAEEIESVSQLKSQLWTRKANIFQSFMDNQKLSIKDIRISSQSIKQEMFALQMKWRDEISNIGHDLKGLVDAADNYHKVLAENQKLFNEVQELKGNIRVYCRVRPFLPGQDGKTTIIYYIGENGDIFITNXPSNYGKXACRMFNFNKIFNTPPFQVEAFFY

SEQ ID NO: 257713 - protein, 78 aa, Zea mays
  Clone ID: MRT4577_16661C.1.pep
RCDCPGQTNEDHDYRQTDHQEPAPAGPRGGLRAAVATATAALAVPADTDADAAGNEPSRKRNTSREDYNKLDKYSCGF

SEQ ID NO: 257714 - protein, 105 aa, Zea mays
  unsure (1)..(105): unsure at all Xaa locations
  Clone ID: MRT4577_166620C.1.pep
MFGRAPKXSSCTKYXYRFLRAPKSASQXDLKKAYRKAAIKNHPDKGGDPEKFKELAQVYEVLSDPEKREIYDPYGEYVLKEGMGGAGTHADPFDIFSSFFGTSFG

SEQ ID NO: 257715 - protein, 56 aa, Zea mays
  Clone ID: MRT4577_166621C.1.pep
KLGWPQPIASPLGETHLDLGPESNGEVMILPSSEDQLDLGGPITRRVQKLVKPSPV

SEQ ID NO: 257716 - protein, 157 aa, Zea mays
  Clone ID: MRT4577_166622C.1.pep
AASVIIGFCFGAQWPLLFAIISEVFGLKYYSSLFNFGSAASPAGAYVLNVIITGRMYDAEATRQHGGVAAVGDKICKGVVCFKRPFIIITGVTFAGALVSLVLVWRTRNFYRGDIYAKFKVTPAAASESESLDGKNVEMAEETEGKRKKQVVNDDLY

SEQ ID NO: 257717 - protein, 222 aa, Zea mays
  Clone ID: MRT4577_166623C.1.pep
KREKRKSRKKKKISYVPSLSSPPSLCFLSSKPDTHQYLSSSPVLVLALELISHRRSLIFLAVPLNVWRKKNPTAPARSSSPCALIFSRRSVFVGQKNLAVVLHAQLHRAPFSLAATLASVLCLLQLQRPASARAQAPARLSALRASSASPCAPRHRLSMTAVSSSSPELSVAPAAFPAMVVAAPAHGRARPSAVPLFLSAASSSLVLGPSSARFLLPWPAVL

SEQ ID NO: 257718 - protein, 70 aa, Zea mays
  Clone ID: MRT4577_166624C.1.pep
PPPDPKRVTPFGFSKGSPKVVYPWFWDLFPGAPSGPFRGYNPDPNNPFTGSLKFGPKKHVFWKHMARPPT

SEQ ID NO: 257719 - protein, 58 aa, Zea mays
  Clone ID: MRT4577_166625C.1.pep
FIRTILVVMMNESIIVVSLGAKIIGKDAKISGVREVVLNKGNKIGVYEFVVEEAIVVA

SEQ ID NO: 257720 - protein, 112 aa, Zea mays
  Clone ID: MRT4577_166626C.1.pep
ARVHFPRLGSGRTSEPRAPAHLSLSDSSHHRIRPRRSIHTLGSGRRGRRARAPEHWDSRGGGASTRRRGRITWPAGARRRRPADPRRSCPEDTVTRGRNPSVALGRTPPQAA

SEQ ID NO: 257721 - protein, 169 aa, Zea mays
  Clone ID: MRT4577_166627C.1.pep
MPSHSSHSSRPSTFRVPIWGAPTLPSFCCCLRSATPWGLALELGPASAWAGDPLLPLAFGGEGHPPALRKRRPSAMRGKVNCCCLARMQLSVLHPDDGRAVRRRLLSPVLMRRPPLVRLPIAAVVASVDETVSATCAPGLRLFGFNGWFSSPVRGRERGPSSGSVCPEA

SEQ ID NO: 257722 - protein, 147 aa, Zea mays
  unsure (1)..(147): unsure at all Xaa locations
  Clone ID: MRT4577_166628C.1.pep
KKQRTFXWVLVRGQKPLPWAPLNFPWFVGPPQNDFFFFDPFEGPQAPRFPPFPILGQEKPPKLRGPPVFPPRISFSPLFFKHFSPFSPGFIPHSEKKMGPPFPSKKLVPIPPHALGIKVPPRGFFFFFSQRPPVILKKNFGGNFGTP

SEQ ID NO: 257723 - protein, 40 aa, Zea mays
  Clone ID: MRT4577_166629C.1.pep
EQVRPGIQDVIHAAIISYGFKVCTPKEKLRNFYYKSGTGP

SEQ ID NO: 257724 - protein, 70 aa, Zea mays
  unsure (1)..(70): unsure at all Xaa locations
  Clone ID: MRT4577_16662C.1.pep
RVRRVGAGALRVLGRLVXGCRKLPTPALLXEAADXVXALXMQVXAMRALAXAXAQLSSPADAEAEAEAER

SEQ ID NO: 257725 - protein, 77 aa, Zea mays
  Clone ID: MRT4577_166630C.1.pep
ARVYTDFDLLADFPEPTLDFLADIPEEKLPLPEPFPAASPDECPSDAEAASPARWQQVDDFFQDITDLFQIDPLPVV

SEQ ID NO: 257726 - protein, 65 aa, Zea mays
  Clone ID: MRT4577_166631C.1.pep
KSKTDLRAQVKELKYELSLLRVDNVTGGAPNKLYKNNVVRTSIERELTAISHKQKSALREAYNKK

SEQ ID NO: 257727 - protein, 44 aa, Zea mays
  Clone ID: MRT4577_166632C.1.pep
VLAPQQAAQLLEVSEAEALHTFSKSLRKTPTNRLLGPGIPESES

SEQ ID NO: 257728 - protein, 315 aa, Zea mays
  unsure (1)..(315): unsure at all Xaa locations
  Clone ID: MRT4577_166633C.1.pep
MSYPRSSKSDPTTKKQAAAAAVASEEQQAKMINEVRELLRPAEMPGFLTDSTVRRFLHARSWSAAQATKALKETVKWRRQYRPDEIRWDDIPGREHEVKRAYIADYLDKDGRTVVVTVPAIKSQISAKEQVKLLVYTLESCTAGSENGQESVVWIADFRGWTLSSTPLAQSRQSMNIIQKHYPGLIAAAILFDPPKIFESFWKMLSYFIEPELEKKVKFVYTDNPESQRIMADMFDMEKLDSAFGGRSASGIDVAKYSERMRTGDQIXGSSLTANGILLSHSSSRNCSDNKIIKMDHYGILVVTSQQTRMNYDVC

SEQ ID NO: 257729 - protein, 57 aa, Zea mays
  Clone ID: MRT4577_166634C.1.pep
PRGSGRPDVTIPPSRVCGFVAVKLSRPQGVLSRFEALMHSRIPRRLNGYSFIYLLIA

SEQ ID NO: 257730 - protein, 100 aa, Zea mays
  Clone ID: MRT4577_166635C.1.pep
KAQLFWFFRNGVFYKNFEILAWFSSISDRTAHFLRVFFSFPPFFWSVKHAGLPFINLMTPALGDFRILLWWGHFFYNEFWASVWGILMWGAPFWPQWEEK

SEQ ID NO: 257731 - protein, 62 aa, Zea mays
  Clone ID: MRT4577_166636C.1.pep
PGWVPHVWASPVSKPPALVCPHSGTVVGSKVPSMSMSVSPRMCLHYMIPGGVPRFSMAVTFF

SEQ ID NO: 257732 - protein, 61 aa, Zea mays
  Clone ID: MRT4577_166637C.1.pep
RPTSNSVSSRASAILPACLGNHTTVCTPVAGLKGPSLELCVSSASIPRSAHSPTSAASAFS

SEQ ID NO: 257733 - protein, 782 aa, Zea mays
  Clone ID: MRT4577_166638C.1.pep
MATPPAAATASALPKSGAVSKGYNFASTWEQSAPLTEQQKAAIAALSHAVAERPFPPNLEKSSGKDEGVAVPEKESALEEAGAIDAVLVNTHQFYKWFSELESAMKSETEEKYRLYENTLQERVNTCDVILKQVDDTLSLFEELQSLHSSVATKTKTLHDACDQLLVEKQRLIEFAEALRSRLNYFDELENVSSSFYSQNMNIGNEQFLPLLKRLDDCISYVENNPQYAESAVYLVKFRQLQSRALGMIRSHVLSILKGASSQVQAAIRSSDSGKNIVTEGVEASLIYVRFKAAASELKPILGEIESRSSRKEYAQILSECHSLFCEQRLYLVRGMVQQRILEFARKEALPSLTRSGCAYLMEACQFEHQLFAHFFPASAADVSSMAPLMDPLCTYLYDTLRPRLIYEGNIDSLCELVDILKVEVLGEQLSRRGESVAGLRPILQRILADVHERLAFCARTHIREEIANFRPSVEDLDYPGKLERPVDMSSSATVGDNSDIYITWYRPLEKTVSCLSKLYRCLEPSVFTGLAQEAVEVCSTSLQNASRVISKKATPMDGQLFLIKHLLILREQIAPFDIEFSVTHKELDFSHLLDHLRRILRGQVSLFDWSRSTSLARTFSPRVLENQIDARKELEKSLKATCEEFIMSITKLVVDPMLSFVTKVTAVKVALSSGSQGQKLDSVLAKPLKTQAFASPDKVAELVQKVAAAIQQDLPKVMTKMRLYLQNPSTRMILFKPIKTNIVEAHIQLHSLLKSEYSSEEMQSIGMLPIPDLQSQLDSLL

SEQ ID NO: 257734 - protein, 175 aa, Zea mays
  unsure (1)..(175): unsure at all Xaa locations
  Clone ID: MRT4577_166639C.1.pep
CCEQNASRVISKKATPMDGQLFLIKHLLILREQVSIYLHFRKNSSCSLISFCDLXYHTCLQIAPFDIEFSVTHKELDFSHLLDHLRRILRGQVSLFDWSRSTSLARTFSPRVLENQIDARKELEKSLKATCEEFIMSITKLVVDPMLSFVTKVTAVKGALSSGSQDQKLDSVLAK

SEQ ID NO: 257735 - protein, 168 aa, Zea mays
  unsure (1)..(168): unsure at all Xaa locations
  Clone ID: MRT4577_16663C.1.pep
KRDPGGARARRRAHQRRGRGPHGPAPRARNRQRHPPXTTTAXEQRGAQAXRPQQARAASGRQQPRAQXQHHPAAQRTRQTNATQQQQQXRPARSHPARGNPGADXQQQRXAXNPXARANXXADQQQQQRQQXRPARRQRARXNXAGDRQQQQRRQTSPPAGAKAPTDP

SEQ ID NO: 257736 - protein, 34 aa, Zea mays
  Clone ID: MRT4577_166640C.1.pep
QGLYRIGKHDVPVYDGSWTEWEAQSDSDYPKVTA

SEQ ID NO: 257737 - protein, 44 aa, Zea mays
  Clone ID: MRT4577_166641C.1.pep
EIALREASERKHREFAKRKDGRCSTQHKFQIQQAEKIRVGLVPN

SEQ ID NO: 257738 - protein, 56 aa, Zea mays
  Clone ID: MRT4577_166642C.1.pep
GSINPPVSLGPPLVSWEWGYQWVYWVGPLIGEGLPGVILKVLFISPTGGQVPSRDY

SEQ ID NO: 257739 - protein, 170 aa, Zea mays
  Clone ID: MRT4577_166643C.1.pep
LAWSPNGQYLASGGYDNTVFIWKVEKEVTSLRTLEHPTILSAIAWHPDGELLATSCHDGNIRLWHWQTGQCVTRISGHQGEILTLKFSPDGKRLYSSSQDETWKTWDWQTGTCLASDRLDRPYEGMNISEVRGLTEVRKAALRALGATEGSQPPGDLVRWLRKTEQGRKL

SEQ ID NO: 257740 - protein, 45 aa, Zea mays
  Clone ID: MRT4577_166644C.1.pep
TVATYKIALLRWDQTLLVILIVVICAARRVDLVEPFNETGLTLLV

SEQ ID NO: 257741 - protein, 116 aa, Zea mays
  unsure (1)..(116): unsure at all Xaa locations
  Clone ID: MRT4577_166645C.1.pep
NARLFFFSWSPLYKNLCLCIVVLVRRVSPPFILPFVMGWVIFGPSLLVYSSECLVGLCXTELPPSTPHFLPGGNKCNVSPVTPCFAPSQKKKKKKKKKKKKKKKTTKKNFFNPTPP

SEQ ID NO: 257742 - protein, 99 aa, Zea mays
  unsure (1)..(99): unsure at all Xaa locations
  Clone ID: MRT4577_166646C.1.pep
LAERVPPVSCGCRPGFRGWGPRARASRCRPLSSCSMLQRALGVAVSLYPSASQTAPSLLSLGRLRRWCLSGWWPLLFAGAGGSAGRRLFCAVFRGXSPC

SEQ ID NO: 257743 - protein, 36 aa, Zea mays
  Clone ID: MRT4577_166648C.1.pep
QTRDMRRSVVFSLYVVCFASSNRSIFSKSKSLVIQP

SEQ ID NO: 257744 - protein, 69 aa, Zea mays
  Clone ID: MRT4577_166649C.1.pep
PFIRKLHGRWGQANEKFMIKMSFSSFSPNLLLHSFLNNNLLLHFFVIYKTLTTSSDSPLFDKFRLESLF

SEQ ID NO: 257745 - protein, 84 aa, Zea mays
  unsure (1)..(84): unsure at all Xaa locations
  Clone ID: MRT4577_16664C.1.pep
ILVLMCWRMIVAVVKWGSSRMHEAMPCKRWSAVFIVAAVVPLSCFGVTPAQWIRSVRAGAKRLRLRGDQGQGSLASXHRSRPAR

SEQ ID NO: 257746 - protein, 62 aa, Zea mays
  Clone ID: MRT4577_166650C.1.pep
CASCIHVGSHLPDAIPHYELYKSVSMLCIETKFPSCEEKMKHSLAYLNNTLKEEPKKTSAVH

SEQ ID NO: 257747 - protein, 599 aa, Zea mays
  Clone ID: MRT4577_166651C.1.pep
MAGAPLRRSDLDFADVFGGPPRRVSGNEHRSQRGSQDTSSFESATRAGSGGQDTPVFGDRGSSDRRRQLGEEFYKDIFPGSEAASPRRSGAGDWGNVFGAQASPVSTARPRSSFSIRFNRGMDSSMPTSPSQQMSNRNDDGTSYAYSVPTSPNASMNNYLAQGAARQDSKKNPFSWHRYPFLSRFRSQSGEKKSTSNHVSSMDNEFEGTPVNLESIMANNKFHFSFYKWAGKGALLVLPATAQEKSVDIIGLRSFPQVVIQGIDLIDCEDSMSTATGTAKNQTDYEDSKSGKHSAFSVTKDGAIPLLFEDYMQGTKQSNDHTKNDVSSTTLSSKISRSPSGERSRSSRVKEKMKGFIKLFSPECSPKRKRAPETQRQTSVGKNGTKTELHDKFSMSSLEASEDVETVQMNSQNAFTAEPFPLFQMTEVQERLDKPVLTANSKMDTATGSNEAASNEPIHDDTKDKAANTIEHEDIEDLDGCVVEHFSEDHVLHNDQEKELIKISEAKIREWSRGKEGNIRSLLSTLQYVLWPESGWKPVPLVDIIEGAAVKKAYQKALLCLHPDKLQQRGAAMHQKCIAEKVFDILQEAWKEFNSVTFG

SEQ ID NO: 257748 - protein, 81 aa, Zea mays
  Clone ID: MRT4577_166652C.1.pep
WCFNQEESGRPLPKFGEWDVNDPASADGFTVIFNKARDEKKGGNGQDTDSPSKDPRTERVESYAAKPSTVRLFMTCINSLL

SEQ ID NO: 257749 - protein, 119 aa, Zea mays
  Clone ID: MRT4577_166653C.1.pep
MTSWQLLLIIHQFSTASYKDALPEILEVLRAACLTHKLPLAQTWVTCAQQGKRGSRHSDENYRYCISTIDEACFVNEAEMRGFHEACSEHHLLRGEGVAGKAFTTYQPCFLPDIGSSTK

SEQ ID NO: 257750 - protein, 79 aa, Zea mays
  Clone ID: MRT4577_166654C.1.pep
LNRVFHHITDTHVAHHLFSTMPHYHAVEATRAIRPVLGEYYQFDPTPVAKATWREARECIYVEPENRNRKGVFWYNSKF

SEQ ID NO: 257751 - protein, 113 aa, Zea mays
  Clone ID: MRT4577_166655C.1.pep
WARLFVPFPAFRLGAGCAVAAFFVLFLFALRFFSLLLRWRSFPCGFPLPFFPLGFFPSPVSVFPVFCVSAPVRCPLFRLLSVIVSAPLRGGPGGLSFYPPPHRLLGLGLLLGG

SEQ ID NO: 257752 - protein, 390 aa, Zea mays
  unsure (1)..(390): unsure at all Xaa locations
  Clone ID: MRT4577_166656C.1.pep
MGAGGRMTEKEREEQEXKSPVXGGGAAVQRSPVEKPPFTLGQIKKAIPPHCFERSVLRSFSYVAHDLATAAALLYLAVAVIPALPSPLRYAAWPLYWVAQGCVCTGVWVIAHECGHHAFSDHALLDDAVGLALHSALLVPYFSWKYSHRRHHSNTGSLERDEVFVPRTKEALPWYAPYVHGSPAGRLAHVAVQLTLGWPLYLATNASGRPYPRFACHFDPYGPIYGDRERAQIFVSDAGVAAVAFGLYKLAAAFGLWWVVRVYAVPLLIVNAWLVLITYLQHTHPALPHYDSGEWDWLRGALATVDRDYGVLNRVFHHITDTHVAHHLFSTMPHYHAVEATRAIRPVLGDYYQFDPTPVAKATWREARECIYVEPEIRNSKGVFWYNSKF

SEQ ID NO: 257753 - protein, 392 aa, Zea mays
  unsure (1)..(392): unsure at all Xaa locations
  Clone ID: MRT4577_166657C.1.pep
MGAGGRMTEKEREKHEQEQVARATGGGAAVQRSPVEKPPFTLGQIKKAIPPHCFERSVLRSFSYVAHDLSLAAALLYLAVAVIPALPCPXRYAAWPLYWVAQGCVCTGVWVIAHECGHHAFSDHALLDDAVGLALHSALLVPYFSWKYSHRRHHSNTGSLERDEVFVPRTKEALPWYAPYVHGSPAGRLAHVAVQLTLGWPLYLATNASGRPYPRFACHFDPYGPIYGDRERAQIFVSDAGVAAVAFGLYKLAAAFGLWWVVRVYAVPLLIVNAWLVLITYLQHTHPALPHYDSGEWDWLRGALATVDRDYGVLNRVFHHITDTHVAHHLFSTMPHYHAVEATRAIRPVLGEYYQFDPTPVAKATWREARECIYVEPENRNRKGVFWYNSKF

SEQ ID NO: 257754 - protein, 185 aa, Zea mays
  Clone ID: MRT4577_166658C.1.pep
MGAGGRMTEKEREKHEQEQVARATGGGAAVQRSPVEKPPFTLGQIKKAIPPHCFERSVLRSFSYVAHDLALAAALLYLAVAVIPALPCPLRYAAWPLYWVAQGCVCTGVWVIAHECGHHAFSDHALLDDAVGLALHSALLVPYFSWKYSHRRHHSNTGSLERDEVFVPRTKEALPWYAPYVHGSP

SEQ ID NO: 257755 - protein, 52 aa, Zea mays
  Clone ID: MRT4577_166659C.1.pep
SPVDSQQNASSVCEEKPIPAERHRGSSHRQEAVQSPVFSPAQKQIHQKSLPL

SEQ ID NO: 257756 - protein, 566 aa, Zea mays
  Clone ID: MRT4577_16665C.1.pep
MMGALQLQSNGDGAAEGLLPDPGYVEVDPTGRYGRYNEILGKGSSKTVYRAFDEHRGMEVAWNQVQLHDFLRGPAELERLYGEIHLLKSLRHRAVMRLHASWADAAAPRLAVNFVTELFTSGTLRQYRLRHPRAGAAAVRHWCRQILDGLAYLHARGVIHRDLKCDNIFVNGSQGQVKIGDFGLATVARRRGSPHAARCVVGTPEFMAPEVYAEGYDERADVYSFGMCVLEMVTLEYPYSECVHPVHIYKKVTSGIKPAALYKVKDPAVRRFIDRCLAPASRRPSAAELLSDPFLQLEDGCGLGYGDDADYSAMYNYLHQPACLDHHHHAGSIGSTASNGVVSNGGGGGGGRWDDESEDEDDDGSMFQGIDQLFNEHEDDELHVAGVDITIKGKRMEDGRIFLRLRIADKDGTGRVRNIYFPFDADADTALSVATEMVAELDITDHEVTHIAEMIDGEVGALLPHWRPGPGMDDDGGGGAGPDTSGATDRCKNCRSSASSAGSLDDYMSAAAAARRGCRCAELHGRFEEITFQADEEQVRFQGSGCSSDDGGGQAEQCAGDGGSKA

SEQ ID NO: 257757 - protein, 66 aa, Zea mays
  Clone ID: MRT4577_166660C.1.pep
NDQDETTALYPFSFLFLFVLWFYPFSFVFFFLFFVSVFFDVTEGEKQGSGFDSVCGVIKREMVAAR

SEQ ID NO: 257758 - protein, 113 aa, Zea mays
  Clone ID: MRT4577_166661C.1.pep
ATRHACGMHIKRKKKKMVLKEHALGEAIAPQGQLPHVRTEDCTGTRLDACSAIGGSAQAKRLLGHRCEIYIARKYSTTWMTSKPTRRPCPFIMTQSRFLAVHYTGALLRSSGT

SEQ ID NO: 257759 - protein, 71 aa, Zea mays
  Clone ID: MRT4577_166662C.1.pep
PLNKSYRCIVWVIVFGVTVHASPPVALAVIVVRHRPVRHFFLENSKISCPVSITQLPAYDDLTNNVHELWT

SEQ ID NO: 257760 - protein, 52 aa, Zea mays
  Clone ID: MRT4577_166664C.1.pep
IKRTGKMASRKPGWRYARTRRRCQTCHMHLDRPRPPRPQRKRWGPSCSSYEA

SEQ ID NO: 257761 - protein, 49 aa, Zea mays
  Clone ID: MRT4577_166665C.1.pep
QKLQLYFNNRVSVEIPSHDGKDDLYVKVYVTVDYYLHCQQSSMEIQVSG

SEQ ID NO: 257762 - protein, 537 aa, Zea mays
  unsure (1)..(537): unsure at all Xaa locations
  Clone ID: MRT4577_166666C.1.pep
STLSAPLIPPLCRTMAGEEHQQNTSHRGHHFLVVAYGMQGHVNPARALAHRLAKLSDVVGGCPILATLSVHVAAHRRMFPAPLDPDTAGEEDEEEASDGVISYVPHSDGFDDGSLPRTPEDWARRRRVSRESLSAMLARFAGGGRPVTCVVCTLLVPAAVDAATRHGVPFAVYWIQPATVLAAAYHYFHGYGEAVAAADPAHEVSLPGLRRPLRVRDFPSYLVDTTGSPLARSVVGMFRELFESVDRWRPKVLVNTFDELEAGVLSETKRHLDVVYVAFGSAGAHTGXGDGGGGPRAAAGWTVQPRRRRQEEGXLEWLGAQPESSVVYVSFGSIATHTEQQMEEVVQGLLQAGRPYLLAARSWHGLEDDGARHVLDKAAQSSGGRGTVVDWCDQPEVLAHPAVGCFVSHCGWNSTLEAVAAGVPLVGVPSLFDQPTNTYLVVEEWGVGVRGERDGEGVLAATELARCVELVMGQGTKATAIRERVKALREMAQQAARAGGPAERNLEDFVNSVGDSFRPVGISVAEKTDESRTCSSE

SEQ ID NO: 257763 - protein, 149 aa, Zea mays
  unsure (1)..(149): unsure at all Xaa locations
  Clone ID: MRT4577_166667C.1.pep
RNRLGFELDLLGVTYLTAVIKETFRMHPATALWLPRVADEECVVDSVRMPDGTTLLVNVWTIVRDAEAIAEPLEVRTGRLLPGGSDAGVDXLGSDFELIPDGAGRGICALLTWSLMMVTLMTGTLVHALYWYLGDAMTVDKLDMEEAYG

SEQ ID NO: 257764 - protein, 79 aa, Zea mays
  Clone ID: MRT4577_166668C.1.pep
VGNNMFITKAIIRPRTVKRTSGWGFSISFLPLSSTANCDAAFMSGETRHGYKAYQTLRPGSAWCPILFATCGVPDTTPP

SEQ ID NO: 257765 - protein, 72 aa, Zea mays
  Clone ID: MRT4577_166669C.1.pep
AVPKKKLGRAQISFLLKKATKGAFLQGGKITFDHFFGLLLIGGVLLKGTLVVVVLKAGGYKTPGELVLCPST

SEQ ID NO: 257766 - protein, 249 aa, Zea mays
  Clone ID: MRT4577_16666C.1.pep
MAASAQELPPAQQQPAAEQPPSLALALVPQPQAQAQIKPTRVSLSYEEISKLFSLPIAEAASILGVCTSVLKRICRTHGIVRWPYRKIVSGKGDDAKNAEREKAMQLLELSKIAKQKAISSSGSLATSSSGAFQGVPKAQQGSAKAGSAIGRQNAPSLSQFSQAKDIPTYMDDFKYGFPSSGLSTETMKWWGTDSHTETAPAKDDNREGSESTNEASKGMTDDELDWGADEPEADADGVAAATDPSAQL

SEQ ID NO: 257767 - protein, 64 aa, Zea mays
  Clone ID: MRT4577_166670C.1.pep
INGCHPCPLNAYPFMWTCQPSQLSYFRTAELENLMSCHVPASAYHLVFVKVQHEVLCLFTSVLV

SEQ ID NO: 257768 - protein, 189 aa, Zea mays
  unsure (1)..(189): unsure at all Xaa locations
  Clone ID: MRT4577_166671C.1.pep
GPPPPPPXAPPRPPPAPRPAPPXPPPAPAPPRRPPPGPAGPPGRPGPPPAPGARGAQGPGPRGXPPPPGQGXNCRGEKGGPGTPPPPRGPPGXPRAPGGSPGRGXAKPGPPPPFTFGPLLSRGGREGPKTPAAGTAGSGVWMLYLAPPPXPRVPGPPPPGXPALVXSRPPALPESISPKPFFFWGFGSF

SEQ ID NO: 257769 - protein, 189 aa, Zea mays
  unsure (1)..(189): unsure at all Xaa locations
  Clone ID: MRT4577_166672C.1.pep
MPAATLAVRVAAILLLLARGGSGSAPVEFVLSGFASGNVTTSGAAVVTSSGLLQLTNATNEVFGHGFYPVPFRFKDASSTPRSFSTTFVFAMVPRYDDAHGHGIAFALAPSPTGPGAVAGKNLGLFNTSDDTGKARXXVVAVELDTXRDEEFSDINDNPXGIDXNXLVSVSSXPGGVRRRRQPSQILVS

SEQ ID NO: 257770 - protein, 116 aa, Zea mays
  unsure (1)..(116): unsure at all Xaa locations
  Clone ID: MRT4577_166673C.1.pep
LXFSXLFPPFSGGAPXGPRGXFPGFPRLXXPXRAFLLXSFXLFPLGGXXPGSPGFPGFFPXPGLCVPPSFGLWGXXLRGVSPLGFXFXGGALRPRRACLXXVPLAXGAVFFGVSAP

SEQ ID NO: 257771 - protein, 129 aa, Zea mays
  Clone ID: MRT4577_166674C.1.pep
LLLHVPLTELARSARSPFSFFDLENGNQELKIDLKDLFMNNAIQRDVTGSRKAVVIHVPYRLCKAFRKIHVILVRELEKKFSGKDVVIVATRIIVSTHMKGSAALRPCTMTLTAVHDGILEDVDYPSEI

SEQ ID NO: 257772 - protein, 156 aa, Zea mays
  unsure (1)..(156): unsure at all Xaa locations
  Clone ID: MRT4577_166675C.1.pep
MAAAXDVQHRCFAGDLAXATTSESLENAFASYAEILHSEXCTDRETERSRGYGFVTFSSENSMLEAILKLNAHELGGRNITDIHHHALGGGGEEXDYAAGRAGGPFYAGPRRDGPYGPPGDYGDRRKGGDSDYYGGGAYGAPSDFGGDEYGAPADF

SEQ ID NO: 257773 - protein, 171 aa, Zea mays
  unsure (1)..(171): unsure at all Xaa locations
  Clone ID: MRT4577_166676C.1.pep
MWPASPALPGMSALHGSHTQGPYSTGIFAAAMRFFAPSYDLFCMSRGTKMVTRIYNLNSTTDRPAPVTPNSTALTNPLXLCATEEVHLYFRWLGHQERPDTQDPVAVMGMHYLLSAQCGLSIGHSCRSRMDIDSCFFTLLPSRYRYKRQTYSLACTIMPALALLEEPHPLH

SEQ ID NO: 257774 - protein, 46 aa, Zea mays
  unsure (1)..(46): unsure at all Xaa locations
  Clone ID: MRT4577_166677C.1.pep
NXCXYPXSKTPCRXLTKAGKAVDFLXVAVKACEXXXXTKSSXHEKP

SEQ ID NO: 257775 - protein, 103 aa, Zea mays
  Clone ID: MRT4577_166678C.1.pep
HTPHAPSTGARGPPTNNHAEARRDAQTATARKEGQPKTAQTHERPNKQHRTSTPPDHQQRGGGGRQNRDDRTPTDHNKQKESSRRPHHGRAREGEHGTPRQQA

SEQ ID NO: 257776 - protein, 79 aa, Zea mays
  Clone ID: MRT4577_166679C.1.pep
TRDGNLTPGGRICFLSLAVLKKKKTAFLEPIIIFRMFGRMVSFVINVFTHELVGAPECPLKYWLKATSPLFYHVIMPIL

SEQ ID NO: 257777 - protein, 173 aa, Zea mays
  unsure (1)..(173): unsure at all Xaa locations
  Clone ID: MRT4577_16667C.1.pep
LTVIEAMNCGLTTFATNQGRQPQKAQDLVPXLHLGPKKGKCAHXRTLLKREPREQLTDQFDXFTIPNLVAATKTQTRIQXHDQLNMGSTYGFWKTLNKEERVAKQRYLQMCYNLQFRNLAKTVPRLFEHPPPQAPAGAGPSTMTVTRPKERKTQTRIQRIMTSLMGQKPATSE

SEQ ID NO: 257778 - protein, 378 aa, Zea mays
  unsure (1)..(378): unsure at all Xaa locations
  Clone ID: MRT4577_166680C.1.pep
KDVALNFLRKSLNKLENPNDVLALLLAAKICSKERHLASEGVEYARRVIACAESSDPHLKSVGLHFLGSCLGNKSKVVSSDYQRSLLQTETLKSLAESIGLNRYNADLIFDMGVEYAEQRNMNAALRCAKEFIEATGGSVSKGWRLLALILSAQQRFSEAEVATDAALDETAKLDQGSLLRVKAKLKVAQSSPMEAVEAYRALLALVQAQKNSPGGSCKSATEDADGSVSEFEIWQRTRGLYSSLSYWRDAEICLNKARALKLYSAATLHAEGYMHEARDQTTDALAAYVNAFSTELEHVPSKVAIGAMLSKQGPRFLPAARCFLSDALRVEPTNRMAWLYLGKVHRSDGRISDAADCFQAAVMLEDXDPVESLSSLL

SEQ ID NO: 257779 - protein, 120 aa, Zea mays
  Clone ID: MRT4577_166681C.1.pep
AGNGTIRERERAHSRHEGGKKEVAGAVVAILLVLQLMAAPPTAMAARSPHGSVPHLSLSTTPLLTMILMPSPLCPRNLPLSFLMPPSDTRPSLRLYPQDSLVMLMMLILLRHFFLLPLLL

SEQ ID NO: 257780 - protein, 55 aa, Zea mays
  unsure (1)..(55): unsure at all Xaa locations
  Clone ID: MRT4577_166682C.1.pep
INGFSVLSPXTGKKCWGDRFCQKGLGPVFPILALKSQGFSFGSKIGCLNPLFPLG

SEQ ID NO: 257781 - protein, 144 aa, Zea mays
  unsure (1)..(144): unsure at all Xaa locations
  Clone ID: MRT4577_166683C.1.pep
DNDLPDYXVIQGPLSICDILLCAGFXVPNVTEYIXAGAKVRXLECKHFGTGKLERSIDGVTDGNGTYTIELKDSHEEDICEVVLVESPRKDCDQVQADRDRAGVLLTRNVGISDNLRPANPLGYLKDVPLPICASLLKQLDSDD

SEQ ID NO: 257782 - protein, 201 aa, Zea mays
  Clone ID: MRT4577_166684C.1.pep
GGDPDRMMLTFSVFPSPKVSDTVVEPYNATLSVHQLVENADECMVLDNEALYDICFRTLKLATPSFGDLNHLISATMSGVTCCLRFPGQLNSDLRKLAVNLIPFPRLHFFMVGFAPLTSRGSQMYRALTVPELTQQMWDAKNMMCAADPRHGRYLTASACFRGKMSTKEVDEQMLNVQNKNSSYFVEWIPNNVKSSVCDMP

SEQ ID NO: 257783 - protein, 85 aa, Zea mays
  unsure (1)..(85): unsure at all Xaa locations
  Clone ID: MRT4577_166685C.1.pep
MRQKAVSLFLCYLLLFTCSGVEAGKKKCSESSDSGSGFWKALTFMAVGGGLAVAGLPALGFTGAGIAANSVAXSLMSWSAILDGG

SEQ ID NO: 257784 - protein, 69 aa, Zea mays
  Clone ID: MRT4577_166686C.1.pep
LVSAGRGGALGRGASLYCCPLYFRCMMICKLITHACCMDFLAIFGMQRVHVHGARGDIVCVYTHTYGST

SEQ ID NO: 257785 - protein, 82 aa, Zea mays
  Clone ID: MRT4577_166687C.1.pep
FRGLYRKAAILHESVLSIGSYKVDAPFWQVVIHVRRGDSSFFYSSRFVFLTFFFFPTVLSDKCRCNEVWSDAWATGNSGPGT

SEQ ID NO: 257786 - protein, 121 aa, Zea mays
  Clone ID: MRT4577_166688C.1.pep
VVEHPSASRCIWPFQTPAHQNFQQEFLPLGLLKRPFESWGNYLVQRHLNGWFPFEQQFGFLVKPFQAPCKMRSHHPVDNKNSSHLNQGKLVPPMEWLPPPPGKGCPFQWPVPSLKPPQKDP

SEQ ID NO: 257787 - protein, 131 aa, Zea mays
  Clone ID: MRT4577_166689C.1.pep
DSSYQGDSSNPRDLTADQDGKAEPRCPSKHAQVRDTAGRRRPRSLQRPARVPVRSTLTHREVPERPVHDSVEHSPGGNARVLSLLLTHGHGEAIDFFCVEWWCIQIDRRGETQSAGLVAIGERQSRRGFRS

SEQ ID NO: 257788 - protein, 43 aa, Zea mays
  Clone ID: MRT4577_16668C.1.pep
DSVTVGDIATVIPQCLWHRLRQDPHGSIDSGLLGSDKFYQFFS

SEQ ID NO: 257789 - protein, 71 aa, Zea mays
  Clone ID: MRT4577_166690C.1.pep
NTRNGNYPRNFDTDFLCLKDRPSEKTYNYKSYMNIFAYSLLENEESESPVESRYHSLRLQDRHIVKSNLYT

SEQ ID NO: 257790 - protein, 59 aa, Zea mays
  Clone ID: MRT4577_166691C.1.pep
SIEEHPESFQSSRSLEYRSIRGKEASVNFRAWQYLVMAPRLGFLCGGVRTFSGAALEPN

SEQ ID NO: 257791 - protein, 167 aa, Zea mays
  unsure (1)..(167): unsure at all Xaa locations
  Clone ID: MRT4577_166692C.1.pep
DLPKGKHFXQVRFGLPSHTHRFXSGFVQVDLEKGPPIPVGPPQYKTGGGPPKQGLAPAPVFPLIVGVFVGALGVRLPRFNGFFPSAVGGAFLGSGGAPPQKGPPPDFFRKRGLMAGLLSLWGREIGPAQLGHFQGGIGFGFPPGEFFPRKRKPVFLFDSPLPRFLSL

SEQ ID NO: 257792 - protein, 155 aa, Zea mays
  unsure (1)..(155): unsure at all Xaa locations
  Clone ID: MRT4577_166693C.1.pep
ANGYPSSRPGRACPRLGPQAARPHFPCGGASMALRPLLVSAAGGLPAPTPCAPAPAPRLMRCAVRLTPGGLLRVLRSRRGAVWRCALLXGSGPERRSTSGCWXRPEAPAGGWGLGTPCLRMGAATLLMITGVLHRETPGETLGVGSALSCVVRAF

SEQ ID NO: 257793 - protein, 157 aa, Zea mays
  unsure (1)..(157): unsure at all Xaa locations
  Clone ID: MRT4577_166694C.1.pep
MSSEELRASFSDLVVGSPTQIEGKTYPLGDLLSEEGIQVTCFTEDLHDAVLHFQIVRFSKQIYVWVGCNTAKFGHLYAAATTRTDNRVSVTSVLGGTSDNTGSSMARRLVLKTGLNIXLACSIPKDSPILEAAAERKLVEKLKGLGYIKTAVRSCEC

SEQ ID NO: 257794 - protein, 62 aa, Zea mays
  Clone ID: MRT4577_166695C.1.pep
YFDLPLELLRISSVDTESPVTAAFVFDGNRGRSAKKIVPEIPDLDFSFPAPPVFSNPSSPRS

SEQ ID NO: 257795 - protein, 35 aa, Zea mays
  Clone ID: MRT4577_166696C.1.pep
LLLFTRNPNTGENKLYKEFLVNAHGEDVVLLIQSP

SEQ ID NO: 257796 - protein, 173 aa, Zea mays
  unsure (1)..(173): unsure at all Xaa locations
  Clone ID: MRT4577_166697C.1.pep
MSSEELRASFSDLAVGSPTQTEGKTYPSGDLSSEEVMQVTCFTEDLHDVVLHFQIVRFSKQIYVWVGCNTAKFGHLYAAATTRPDNRVSVTSVLGGTSDNTGSSMARRLAXYQKGCILHVPVLKTGLNIVLACSIPKDSPILEAAAERKLVEKLKGLGYIKTAAVNANTSTAP

SEQ ID NO: 257797 - protein, 184 aa, Zea mays
  unsure (1)..(184): unsure at all Xaa locations
  Clone ID: MRT4577_166698C.1.pep
PRIFFSRSQFYRSPGCILKLTGWTPLTELMSVPFTHGELILGNSMRTSGMGVVHLREIFKVRVTPSWLERRSMTPDWHMSRRLPQIKAPPWHKVLNKSPPSDAVDLVSKRLECTPNTTCTAAEALEHPFFDQLRETNTRLPNGRLLPLLFNWPAYEEKGVPAYIDAKXVXEHAKKPCSYVGTGD

SEQ ID NO: 257798 - protein, 129 aa, Zea mays
  Clone ID: MRT4577_166699C.1.pep
VSAAALWTLTVQRASGSGHAQFVGAPFLSSNRPPHPTEGTHITDACLGSRALRRIGLSTMERCTVHEHDCMLLATSYLVYLYSRRAYVRTYGQLIKLEWDDDGEKKKKKKKKKKKKKKKNPRPRSNFCF

SEQ ID NO: 257799 - protein, 78 aa, Zea mays
  Clone ID: MRT4577_16669C.1.pep
YIRARETRWVCMRDLLKPRSWRLHIYSFIPLRPDQISVYCEICCGVACVVFICVLLIGELDDVKRVKVHMVTIDNNNL

SEQ ID NO: 257800 - protein, 73 aa, Zea mays
  Clone ID: MRT4577_1666C.1.pep
PAFFCFSPGYFPFRGIRRGGVGPFKQTGGCCLSQKFDCFVGPEMIEAQKYFGHAAPQLSFSFDPPKKKVLFAF

SEQ ID NO: 257801 - protein, 139 aa, Zea mays
  Clone ID: MRT4577_166700C.1.pep
VSAAALWTLTVQRASGSGHAQFVGAPTFPVPITVAGLVVTPTLSPNRSPHPTEGTHITDACLGSRALRRICRSTMERCTVHEHDCMLLATSYLVYLCIRRAYVRTYGQLIKLESDDDGEKKKKKKAAWGMSLVHIDNHL

SEQ ID NO: 257802 - protein, 119 aa, Zea mays
  Clone ID: MRT4577_166701C.1.pep
VSAAALWTLTVQRASGSGHAQFVGAPFLSSNRPPHPTEGTHITDACLGSRALRRIGLSTMERCTVHEHDCMLLATSYLVYLYSRRAYVRTYGQLIKLESDDDGENFLYWMMTCICRWFI

SEQ ID NO: 257803 - protein, 37 aa, Zea mays
  Clone ID: MRT4577_166702C.1.pep
MASSITRTACLLVLTLFVVSAAIILPTSLCHGARSVG

SEQ ID NO: 257804 - protein, 88 aa, Zea mays
  Clone ID: MRT4577_166703C.1.pep
QERSVVIPPPKNGMDNVDTVCFLLAFCNHGSSVECRIDMKNLIGEASCTICQENFSTTANALTEPIDIYTECIDDCERVNTVEGDDDE

SEQ ID NO: 257805 - protein, 109 aa, Zea mays
  Clone ID: MRT4577_166704C.1.pep
YGFPPRGMLTAKSYSSPFGGWPPDAPLRGGLSWDQRAARPTHASAKVVDMTATLIIHNHMICRDPPTLLSVGVTTVMGNIRAISLSKLMTLDMHRNSTTDMAVVIPATL

SEQ ID NO: 257806 - protein, 4 aa, Zea mays
  Clone ID: MRT4577_166705C.1.pep
FLQG

SEQ ID NO: 257807 - protein, 69 aa, Zea mays
  Clone ID: MRT4577_166706C.1.pep
SDQSNDSRIFSNNFSLATLTGSDGKRHNKGGTPFFWGGEKNPPKNFHFWKPAPKKTPFFRPTGVYLQTI

SEQ ID NO: 257808 - protein, 95 aa, Zea mays
  Clone ID: MRT4577_166707C.1.pep
VSAAALWTLTVQRASGSGHAQFVGAPFLSSNRPPHPTEGTHITDACLGSRALHRIGRSTMERCTAHEHDCMLLATSYSISCTCTVVVLMYVRMVN

SEQ ID NO: 257809 - protein, 62 aa, Zea mays
  Clone ID: MRT4577_166708C.1.pep
IQCLSASAPCQLSSAPVIASHKQYSQLHVSSGSLICSPSSLFSTCGRKCPESACMCCSSALC

SEQ ID NO: 257810 - protein, 99 aa, Zea mays
  Clone ID: MRT4577_166709C.1.pep
LVALLSVFFTLKNKSFLEMKQLDSVKQKAKDPSMPRGVIDIKKKKKKKKKKKKKKKKKKKKKEKKKKPAGGTLSKGHFLGVSFKLVADGACLSRAHLAL

SEQ ID NO: 257811 - protein, 109 aa, Zea mays
  Clone ID: MRT4577_16670C.1.pep
PCGEDLLGRVHFLPFCTRLAPNLTSEFVLFSKVSIPQASTRGLLPERKTRQHEPVKHSSKVPRHRHAIIRCQQEMQQRLTKSIRCSDGTATSGDFDRQDSPNACSYSKL

SEQ ID NO: 257812 - protein, 87 aa, Zea mays
  Clone ID: MRT4577_166710C.1.pep
AALASSRTSGPDFLLVIVASNVSKILLCTGQYGMSWSHQYRSAYVHHYWMNSRHYVRCMGQRLAVSGGARIFRQPPQWFGQISRNRT

SEQ ID NO: 257813 - protein, 66 aa, Zea mays
  unsure (1)..(66): unsure at all Xaa locations
  Clone ID: MRT4577_166711C.1.pep
SVGSGFAXGWCLFXCXXGXXPWXXXCAPSXAXXGXXXXWXXXFSALXFSFPXLXFXXSMVIXXXXX

SEQ ID NO: 257814 - protein, 218 aa, Zea mays
  Clone ID: MRT4577_166712C.1.pep
MEVPPLPTASEGERRSVATGSCLPRLVSGVLSGALTGIFAVAGGLTGAFTGALAGRASDSGVLRGAGLGAFAGAVLSIEVLEASRAYWSADRSSPQSTSSMGDFIEQLLHARFVQDQYEPSAYMAYRWQVGIADNDDMFDVLEDVLSEGLSQDTLKKLPHHVVPAPIGESLSCAICLQDVISGETARKLPKCSHTFHQPCVDRWFIDHGSCPVCRQDV

SEQ ID NO: 257815 - protein, 59 aa, Zea mays
  Clone ID: MRT4577_166713C.1.pep
MEFIDFVGRVLFVAAFLLYAYQEFNEFGADGGPAAKALRSKFNVFVKNVSAHLGVAMPH

SEQ ID NO: 257816 - protein, 57 aa, Zea mays
  Clone ID: MRT4577_166714C.1.pep
KTTRFKAPYHLTLIRVYGGDITTFINVHSLKAHIRILLPSYISSAEYSIFKNPILQP

SEQ ID NO: 257817 - protein, 67 aa, Zea mays
  Clone ID: MRT4577_166715C.1.pep
TRTSKAKFPYFLRHHTYLTTRDRVHFYHKAPKFHFQLQEHYKLHIKITNSLGSIQLNPDYMIHLQSS

SEQ ID NO: 257818 - protein, 75 aa, Zea mays
  unsure (1)..(75): unsure at all Xaa locations
  Clone ID: MRT4577_166716C.1.pep
XISWRRYCCGTDDDFRSTPKELQKIPQKLIMEGILKLITGGIKVYSSSFPKIKTGGGRDQLLMHVASPHACRWFF

SEQ ID NO: 257819 - protein, 42 aa, Zea mays
  Clone ID: MRT4577_166717C.1.pep
AKLLPNVYLCKALTTQLAQIPKVSMLSLKSQRRKSRTSLIYL

SEQ ID NO: 257820 - protein, 95 aa, Zea mays
  unsure (1)..(95): unsure at all Xaa locations
  Clone ID: MRT4577_166718C.1.pep
CCGSFCGFFLGSLLLRVGWCWRGPVCLVCGWHPCVSCALFLGLGPSALRAGVLLAGSFPLFFICFGVCWRLSPFWGRLGGXWANTLSFWFLVVGV

SEQ ID NO: 257821 - protein, 46 aa, Zea mays
  unsure (1)..(46): unsure at all Xaa locations
  Clone ID: MRT4577_166719C.1.pep
FFWSPVSVLLARVFIAGRYDMLXLPSHGSEVFIGGLPRDITDDDLL

SEQ ID NO: 257822 - protein, 87 aa, Zea mays
  Clone ID: MRT4577_16671C.1.pep
PVLLGAPGMMPPARSVNYLMWGAVGLAFNYVVYRRYKAWWARPNYVLSAGLDAGVAFMGILSYAVLQSRGVNGIDWWGLQVDDHCAL

SEQ ID NO: 257823 - protein, 31 aa, Zea mays
  Clone ID: MRT4577_166720C.1.pep
SSSATTCHTEANSSARACASSTFVSGSNGQV

SEQ ID NO: 257824 - protein, 71 aa, Zea mays
  unsure (1)..(71): unsure at all Xaa locations
  Clone ID: MRT4577_166721C.1.pep
PYGVAIGRKKKTPAAKKDNVXGQEVEAAVEETKKSTHVXRKLEKRKEGRPLDPPIEEQFGSGRLLACISSR

SEQ ID NO: 257825 - protein, 126 aa, Zea mays
  Clone ID: MRT4577_166722C.1.pep
QNAIPGVNCRIPRTIEFFERKLRPKPSGGGHVCLDAGPAGKAATVAVAVFLDSVTCCHFAKASPLLLFFLFFFSRRSEKKMTITIEQPQLDAVAERKVPGGGDPAELVLDAGFVVPDANAFGNTFR

SEQ ID NO: 257826 - protein, 109 aa, Zea mays
  Clone ID: MRT4577_166723C.1.pep
FKCFISIQYYGQLIKICLFLFLFLTSTSSSPHWCRCVWWFHCFLCYNLQPAVVRLFRASGTSSQGQFYLFWKILIHSAIRKERILPIILSGMVPVLIFERNFGGTLGLA

SEQ ID NO: 257827 - protein, 644 aa, Zea mays
  Clone ID: MRT4577_166724C.1.pep
MNSAAPAPIKRAGRPASALLSLLLALHVSISKAGLARVGQLDRPSLATSRSAGMHASLGMSSSSSSSSRGWSSYSPLLFATLLTLLLCSQLAIAKEQYHEFVVKEATVTRLCGTQQQRIMTVNGQFPGPTVEVAEGDALIVRVRNRGSYNVTVHWHGVRQMRTAWADGPEFVTQCPIRPGTSYTYRFTVAGQEGTLWWHAHSSWLRATVHGALIIRPRAGVPYPFNAGDTPAREITIILGEWWNMNPIDVVRTATRTGAAPNISDALTVNGQPGDLYKCSSNGTTTFSVTSGETNLLRFINAALNTELFVSLAGHTMTVVGADASYTKPYATPVILVAPGQTTDVLVTFDQPPSRYYLAARAYASAQGVPFDNTTTTAIFDYGTGASNSSSPAMPTLPAYNDTATATAFTTSLRGLRAADLPARVDESLFFTVGVGLFNCSSGQTCGGPNNTRFAASINNVSFVLPSTTSILQAHYAYAAGGATPAGVFTADFPANPPVRFDYTAPNVSRALWQPVPGTRVYSLKYGAAVQLVLQGTNVFAAENHPIHLHGYDFYILAEGFGNFDAAADTASFNMDDPPMRNTVGVPVNGWAVIRFVADNPGVWLMHCHLDVHITWGLAMAFLVEDGVGELQSLEAPPSDLPIC

SEQ ID NO: 257828 - protein, 165 aa, Zea mays
  unsure (1)..(165): unsure at all Xaa locations
  Clone ID: MRT4577_166725C.1.pep
SLRGTSLHHRPHRCLILRTPLRQPPNETSSCSPPYYRPYSSSADSHVSTRRTRILQVAHTAISRXLRRTLTXLASSVTASANAAPFEHCYLSLYALDPARPNMTPAAESDEXAEASQAVAASEETSKSMLVTRKLEKQTEGLILDPHLEETIGYERVVXCMSSRP

SEQ ID NO: 257829 - protein, 58 aa, Zea mays
  Clone ID: MRT4577_166726C.1.pep
VLVFLPSYFRDLLKIGTGAANHVERRKVNRLHVEVVIVIAHIASDSDCCMANCSSTHV

SEQ ID NO: 257830 - protein, 64 aa, Zea mays
  Clone ID: MRT4577_166727C.1.pep
RATPAPLGPMPDFWGPLWGIDPNRPLRGPFSMGFPNESARQFVAKKVFPANFFPEVGSRSFFQF

SEQ ID NO: 257831 - protein, 83 aa, Zea mays
  Clone ID: MRT4577_166728C.1.pep
HFGQTRGVPKIKGWATFFSFVARFFGLVSRLFKGQDLGPTQGPPQERENTHGWRLGFQLKRVFQPGFFLCTLDWASGFFGNNQ

SEQ ID NO: 257832 - protein, 57 aa, Zea mays
  unsure (1)..(57): unsure at all Xaa locations
  Clone ID: MRT4577_166729C.1.pep
RRXSPPXGSREHVQPPGKRVGDWESVLFRVEWVVRVPRMNTRLGPHLLWVFSIGTPR

SEQ ID NO: 257833 - protein, 354 aa, Zea mays
  Clone ID: MRT4577_16672C.1.pep
MAHERGAAASTHPAAPTSEEDALFIDLLHEAPLSGHREPRSIVGGTLYCILLVGFAAVAISAPWIFLFAPDMISPLLCSSNAILLVLTGIFQQYWVHQVRKVRLQGYYDFSQKLKRIARLPFATIACGTALMLLIMVWQPLLQILSVSLLLRIAIVVEVTCAGCFMGLYLWHIHKYNSLNGQPDILRSLYSALQPSNTLEDRRYHDARLSDQQMALLQYQRENIHYLSEEVLRLQECLSKYQRTAGTTPQVDLAHLLATRDQELRALTAEMNQVHSELQHARGLIDEKDSELQRIRLSNNQYVEENDRLRAILGEWSARAAKLERALEAERVSNVELRKNIAKFRGHLYKEQEA

SEQ ID NO: 257834 - protein, 75 aa, Zea mays
  Clone ID: MRT4577_166730C.1.pep
GRVGFGGMFSCLARKSCGWPAGAGGTAEGVNNYYTSYAAVRHLQRGNARATCYGQPNSACPYYNGGPCCFNNYNQ

SEQ ID NO: 257835 - protein, 43 aa, Zea mays
  Clone ID: MRT4577_166731C.1.pep
ASPGFMHNRYYVFTAIIFVGLYCALSIDVDHNPRYGKKKFLYE

SEQ ID NO: 257836 - protein, 172 aa, Zea mays
  Clone ID: MRT4577_166732C.1.pep
KRVGGLFGYPPSGAGFQKREFGGFPLPKPLVKTPGGGQASRPGGEILPGGTPGGPKMMKKISVVFFNGGGPLFFFPKFFFGPPPPPRGGGFFPLFPSGGDFLGVKGIRGGAPPDFPNGKGGFWGPGFRGLVGNRGPLGQKGFSPRAPKTLVGGAKKIFFWLGPPRFAPGSFF

SEQ ID NO: 257837 - protein, 103 aa, Zea mays
  Clone ID: MRT4577_166733C.1.pep
IFLHSPSLRRTLTRVGHFLLCLAITLAEPPDICAAGRGMSDRIDITLHDFITKNDKSNLSSARARLMRQLIRAVRDPRIHLHYQRFLEKRLQHEDHLPNYVQL

SEQ ID NO: 257838 - protein, 221 aa, Zea mays
  Clone ID: MRT4577_166734C.1.pep
MACINMYNPDGAPGFGGGPQPPAALGPRVSFSSDFAVEPPPVQNRAMSLRCQEEDVNFEFSVGSHPMMAADQLFSKGRILPLRDNGGCFAAARPTTTLRDELCGGGGGGGGASDDDERASAAGSKGSGRWKEMLGLRKALCVGVGGGGGNGAPAKKVGSGKKGVADDMAASNQDASCVYLHDRADGKNESDRHGEWVHSATHFTCMKLTFARLLLPDAVVR

SEQ ID NO: 257839 - protein, 47 aa, Zea mays
  Clone ID: MRT4577_166735C.1.pep
THACYIITIILWHLTIINRPASANNATIITKPSLTKIALLHNLLPSA

SEQ ID NO: 257840 - protein, 66 aa, Zea mays
  Clone ID: MRT4577_166736C.1.pep
FPLNQVSMLNSGGYLQQRLQSLNPLAVANTLVSAFLQQQQFMPYNRFFLMNHVLSRHQPIVGGAIF

SEQ ID NO: 257841 - protein, 58 aa, Zea mays
  Clone ID: MRT4577_166737C.1.pep
RTLGRTRGRTRGKKKKKKKKKKKKKKKKKKKKKKKKKKKKKKKKKKKKKKKKKKGRPF

SEQ ID NO: 257842 - protein, 58 aa, Zea mays
  Clone ID: MRT4577_166738C.1.pep
PAFLKLPYSPTALNLILLKANLSIAKIRNNLSSILIQFNLHAFKSCPSLLYSFHTTSQ

SEQ ID NO: 257843 - protein, 96 aa, Zea mays
  Clone ID: MRT4577_166739C.1.pep
PAGTLQPSLSSPMLRVCFTGVRGEIGERSAAIKALIHRRCGVRFGPEIFVRFQGPIPWRREGACDDRDAGIARRCQEPSRSRQTPSSALSTDLSPQ

SEQ ID NO: 257844 - protein, 93 aa, Zea mays
  unsure (1)..(93): unsure at all Xaa locations
  Clone ID: MRT4577_16673C.1.pep
KVEFSFNNRTTTGAGIYSLRMLLALSACNANATMLPQRSQAPIGSILXPRYLPSTIAXVCENPPLQPYTLQHAIVASNIPLSPLLQQSPALSL

SEQ ID NO: 257845 - protein, 114 aa, Zea mays
  unsure (1)..(114): unsure at all Xaa locations
  Clone ID: MRT4577_166740C.1.pep
MFSLSSAAATAPSFAAPAPARAAPRRRSFTVRASLRKATGTAAVSMAASALLAGAAMXQEVLLGACDRGIGFQPSKLTAKDXDTITSKNNDGFPNNLTXDEHKLSSVIKVTKIS

SEQ ID NO: 257846 - protein, 94 aa, Zea mays
  Clone ID: MRT4577_166741C.1.pep
LWYYGFVCVPIGNIYCITVRLCRVGKVIDDDCCLVISCEVNTIYLLSSSSHDQNVMPLLIHLQHAMIVTIHFGFGLLPKIYQKQHMLCILLKQQ

SEQ ID NO: 257847 - protein, 35 aa, Zea mays
  Clone ID: MRT4577_166742C.1.pep
HRPSRGSILVSFKDHYTKPRLERVKECGRYPSKQW

SEQ ID NO: 257848 - protein, 63 aa, Zea mays
  unsure (1)..(63): unsure at all Xaa locations
  Clone ID: MRT4577_166743C.1.pep
GRAEYLFYANTHTQDTTQFVGSERLYYTSERDRAKDRRXRDSLFLAGXRKGGVKGDXXINLIF

SEQ ID NO: 257849 - protein, 180 aa, Zea mays
  Clone ID: MRT4577_166744C.1.pep
GDRGGGGGPKPRAAPRRGGPGQKKKAPRGAREQGFNHRGPPAGPPGTGENPGVKGCYVAPGPSCWGTPNGGAPGGALPGVILAGRAKFFFFDPFSPGGFFKKRSRGGVWRFFFLVLGWVLNKTYLVPPPPPFFGVSKNVCGIYSWFFGSFCFVKKKKKKKKKKKKKKKKKKNFFLKNHTK

SEQ ID NO: 257850 - protein, 34 aa, Zea mays
  Clone ID: MRT4577_166745C.1.pep
NLYELFLAGTIPGTILCQPTRRKLYLCTRGSTCE

SEQ ID NO: 257851 - protein, 299 aa, Zea mays
  Clone ID: MRT4577_166746C.1.pep
MMGWGEEVVALSLRGYGYGNEEDDRPEKPRRYGVTEMRSPFYSFRPANQALQEILDSLSPFVDGLKFSGGCHSLMGKELVREITDLAHRHDIYVSTGDWAEHLLRQGPSSFKQYVEECKALGFDTIELNAGSLNLPEEALLRLVRLIKSSGLRAKPMFSVKFDSSDIPASGDRAFGAYIAPVKGKTSERVEDVDLLIRRAERCLEAGADMIMIDADDVCQRAESLRTDIIAKIVGRLGLDKTMFEASNSNTSEWFVRRYGPRVNLFVEHSDVMNLERLRGFNMRRSNSASRFASPFFLI

SEQ ID NO: 257852 - protein, 62 aa, Zea mays
  Clone ID: MRT4577_166747C.1.pep
KEQNNKFLNVNKTVSFMFMSYFDGVACLFLLPLLFKGKSRKGSLVFCHTRRISLLYISPMLQ

SEQ ID NO: 257853 - protein, 84 aa, Zea mays
  Clone ID: MRT4577_166748C.1.pep
PFPRVPPPEEFPARVGKMLPGFAPNSLWVNPAWGLKTRRSPGVKPALSIMVWAPKFFGPQVAGGKWGRLWAPWSNSAESASCFE

SEQ ID NO: 257854 - protein, 54 aa, Zea mays
  unsure (1)..(54): unsure at all Xaa locations
  Clone ID: MRT4577_166749C.1.pep
QTCLRCSSALFFVTFQCFGRKKTVXAYSYAKPVRVLIKVNRVPIDLILPEMLRL

SEQ ID NO: 257855 - protein, 123 aa, Zea mays
  unsure (1)..(123): unsure at all Xaa locations
  Clone ID: MRT4577_16674C.1.pep
GLCPRGPCLPCYGVPRQPLVWSRLVGFVLPGYPRSPGFFSEAVYVPPSRLSVSRPFRTFRKSSCVIFVLLLCLRHRPGVAPVRVFMRRCPFWFGPLSAVFFAPRVVFSLMQAFASPXVVAGXI

SEQ ID NO: 257856 - protein, 178 aa, Zea mays
  unsure (1)..(178): unsure at all Xaa locations
  Clone ID: MRT4577_166750C.1.pep
SFSLGRSVGKNLKKKRSVSRIASHLPDPLAPPPPPPPDPRRHAAPPPRAPSSCASHAVPSDAPLRRPAAPPPSXCQTPPPPPPPPRSSXAREEPVRLPXSASPGSNPAXAHPSSPAGVVRPPPRVAGRVTAAASAAYESPHCRHNLLPDTRPPPPPPLLPLNLPAPSHHEALLLLWIT

SEQ ID NO: 257857 - protein, 111 aa, Zea mays
  unsure (1)..(111): unsure at all Xaa locations
  Clone ID: MRT4577_166751C.1.pep
PIQQEWTLIPPQKCGLAGGLNKGHKTTPHVVKPRASRTKGHLIKHTVFVREAVKEDAGLAPYXRRVIEVLLNYKDKRARKLDKKILGTFGRAKDKVEELQSVIAEYRRAGH

SEQ ID NO: 257858 - protein, 27 aa, Zea mays
  Clone ID: MRT4577_166752C.1.pep
ERSKMRYQCLMCTIKPRAPTPQVSSKV

SEQ ID NO: 257859 - protein, 97 aa, Zea mays
  Clone ID: MRT4577_166753C.1.pep
TRRAYGEILRIQKLLSPYINNRPMNRPHYRRAMPRPQTKTSLPTIKPVWGMKPSCRAPLQMKNLALRPRPRLWWMLKITPSSMEPATSWLVQCDPLR

SEQ ID NO: 257860 - protein, 69 aa, Zea mays
  Clone ID: MRT4577_166754C.1.pep
SGVSGPRSSSNRSRSSQARFTLDLVIDGYVVAAAMARVDVPGPMAARYTFGGALGRCVMLSGLRQSLYG

SEQ ID NO: 257861 - protein, 60 aa, Zea mays
  Clone ID: MRT4577_166755C.1.pep
PRPLRQRLPIITDRGDEGISLWTNLAAEKLNAWISAGDHLYHPSVNTGASLNNLQRRPVL

SEQ ID NO: 257862 - protein, 851 aa, Zea mays
  unsure (1)..(851): unsure at all Xaa locations
  Clone ID: MRT4577_166756C.1.pep
MLILRKKMLMKSILIPSKPSHLDFEKSTVSEADVPMMMKLGYFGEAKRKFVRFAGEETTPTPKDDEVVVFKSFFRAGLRFPLNEMIGEVLKIFEIYLHQLTPNAIVRLSIFIWALRSQGVNPDAEAFCRVHELHYQTKAREDGLHENFGCYNFAYRKDTKASVLSYRTKWPTGWKSEWFYIKANEKRRGKLMTMVMHPLALSFRMTRLLCNMQPGSACQLSVLEFRVVAEQISTRDLVQEYLANRTSPTSSEWSILKLMGTKKKLELVRLPYRFKFEKQFKEPCQEWLEMIETMCNEILGNYTKKEDQLMIAAFGTRXPKRRLNQVPKGQKGKGLSXRSEQAGYQNXKEDEKTLKKRKSSPEPKAVALKKRKAATLEPKVTEVEEETPSTPPAAEVEEILKVMTESLPIMLLSPLGPQLTKLFQKKGEPSTTKRADGLKKRRIGSVMQAIEKTPPSALASKIAPTISAEAADEANVSAEAAAATKAANLEATLSGIDKMILGHGPVPDKGKGIAEAASEGKGFDLQNLVGQELFEAEKKELQEYGISCGYQLGAMLFGGIEEGALGCVCDRTGAKIIGTLSKSIGFPKLEADISSYRRQHIVGSLFYSNFKSMLLSKALQMQQDLEDKKNEIIIEGLESKIKEYEASLEKKDFLLQVVEGSLAEAQTKNARLNSELLQKSESFEQEREDLQTKYEAEATENTKLKQSLEELRNMCLEFGTRCIQRLKKVFNSVGASDEKFTPSAENICSTFEHVEGEIEALDEVIAGHCDFCALLASRGTAAAILKARYTHAKILNRPNFSLSASDLVDIPNIARSIGSRFITQIWAKGGRELASDEARSLLKSDDDAEGQ

SEQ ID NO: 257863 - protein, 127 aa, Zea mays
  unsure (1)..(127): unsure at all Xaa locations
  Clone ID: MRT4577_166757C.1.pep
LSALSAFKWRRKNLGDRITLRQQLVAPFGKTNTASVLHETIEYIKFLHDXVGVLSAAYLKNNGXHNSPRGFQSSSPDKSSKDDDSHASEISLKGRGLCLVPISSTFAVASEVPVDFVWSTPFAANFR

SEQ ID NO: 257864 - protein, 101 aa, Zea mays
  Clone ID: MRT4577_166758C.1.pep
MDTSLITFRLRDSYASGTPTPPGYGYLTHHLPRKVPPARISGSAIEKVLNARVENDFRAFDYIDCGILKTTRVHVSGKADRAEGLLRLRDTDTSLITIREK

SEQ ID NO: 257865 - protein, 37 aa, Zea mays
  Clone ID: MRT4577_166759C.1.pep
ALASRATPSCSHQPSHRHQWALPRSRLRPSWRLRKRP

SEQ ID NO: 257866 - protein, 130 aa, Zea mays
  Clone ID: MRT4577_16675C.1.pep
GDPLIGSLKTFFIFSPFGGGNLSNFPAYGTSLSPLLWGVKVGLVHGYFLGGPFGLTGPFRKTPLHGQAGPLGSSGLFAILRVCLTINGVAFLNKGDPSTGPLLTLTRWKKEANKLQTSNGWAKFTGGFFF

SEQ ID NO: 257867 - protein, 151 aa, Zea mays
  Clone ID: MRT4577_166760C.1.pep
ITKSNSTHIASESSEDELGALSVSMTATLDTKGNLVLGSSREFKGFSREPTRPVVQCIWERAGEFFPAMKNVSFDIDQNTQIRIGHRPYMPDGKPVIDFIPNLSNILIATGHEGSGLTLALGTAEMVTDMILGNPGKVSYSPFSIKRRFSG

SEQ ID NO: 257868 - protein, 67 aa, Zea mays
  Clone ID: MRT4577_166761C.1.pep
PLQELTASLFLQQGNCNHPAFTLARKPGNLNQDLTKSQAGFQVSCRCHKKGPVFFPFLLIPRLPNRF

SEQ ID NO: 257869 - protein, 550 aa, Zea mays
  Clone ID: MRT4577_166762C.1.pep
MGGCHSAIAATKLKILRRGGRGAAAVLPVTNHDGPCCSSDHGSKEKKKKKKGARKGRKRASILGDAGTFDPDFSRRYRLGAELGRGEFGVTRRCEDAATGEALACKTIRRKRLLLRLAGPDATDVQREVEITRRMSEVSGGRVACLREACEDDDGVHLVMELCEGGELFDRIFERKHYSERAAAKLARTIVEVVQLCHENGVMHRDLKPENFLFVNKSEESPLKAIDFGLSVFFKPGDRFTEVVGSGCYMAPEVLKRSYGPEIDVWSAGVILHILLCGFPPFWGGSDEKIAQSILRGVINLQKDPWPKVSQSAKDLVTRMLDPDPCTRLTAKQVLEHPWLKNADKASNVSLGEVVRSRLKQLSSMNKLKKKALGVVAMNLPMEEIGKFKEMFHTMDKNKDGSLSLEELKEGFRINDHPVPEEEIKMLLQAGDIHGTDTLDCEEFVTVLLHIKKMSNDEYLPKAFEFFDKDGNGFIEMSELMETLSDGELKPDEQLVNDIIQEVDKDKDGRISYPEFELMMKSGSDWRNASRRYSTENFSSLSQKLCKDTL

SEQ ID NO: 257870 - protein, 85 aa, Zea mays
  Clone ID: MRT4577_166763C.1.pep
RSSWHGSLTQHAVEPCTCDPRTLKELYILKGTDRACTKLSHWMNCRPQLDFKEACLKLTLLSQVGPLKAQWSSVLSDDDDADDSD

SEQ ID NO: 257871 - protein, 273 aa, Zea mays
  Clone ID: MRT4577_166764C.1.pep
MAQQLLLLLPAPSRTFLKALPSPFLSYLPRRHLVPVTAVPVAPGIRRGLLRYATKRSSLVEELEIAKEKQPHSRRANGIFWILLLNFGIYMADHLFQIRQIKSLYLYHAFPSWFQFVTSTFCHANWNHLSSNLFFVYIFGKLVEEEEGNFALWMSYILTGAGANLISWLALPTSSVSLGASGAVFGLFTISVLVKMSWDWRKILEVLILGQFVVDKVLEAARATTITGQSFQVNNIAHVSGALIGAALVFLVSRIPFSSNDDNPKATKRVNRK

SEQ ID NO: 257872 - protein, 49 aa, Zea mays
  Clone ID: MRT4577_166765C.1.pep
GNLNPRSYYEWAHRHPWTDGFLVAASTGLEGVVKGELRTPAELTLLSAT

SEQ ID NO: 257873 - protein, 154 aa, Zea mays
  unsure (1)..(154): unsure at all Xaa locations
  Clone ID: MRT4577_166766C.1.pep
TRRSVESTTTRPRPSTRSVATDKLAIPRPGTEAAPTNNPSLKIASRPKKLKAHRATGITTDIALGRGETXQSDRSDIDAPGDXDFIETMNTATIDAEXARSVRLTPPLKRCDAGISXAGQTREHAILAATPGVQQMHCFSTQMNDTGWQYMKVR

SEQ ID NO: 257874 - protein, 59 aa, Zea mays
  Clone ID: MRT4577_166767C.1.pep
LKVTDVQAEILRSRGCERSKANVNPRDPLYSNNNLENESINVNSHVSTQLDMSFTLDQA

SEQ ID NO: 257875 - protein, 40 aa, Zea mays
  Clone ID: MRT4577_166768C.1.pep
VNPRLVQCVDIFSLLNPHGVTPIQSAQRGETFQGLRSIEG

SEQ ID NO: 257876 - protein, 47 aa, Zea mays
  Clone ID: MRT4577_166769C.1.pep
ILITLETHVTCSYGAKKKKKKKKKKKKKKKKKKKKKKKNKKKNIFRY

SEQ ID NO: 257877 - protein, 83 aa, Zea mays
  Clone ID: MRT4577_16676C.1.pep
ICSSNGSSWQQISIISVRNGKSSHARLESSRPITRLHTIQEITWRCFSFVVGASHHLLELQAILVVVLVPVRLLRRRRRRRCH

SEQ ID NO: 257878 - protein, 72 aa, Zea mays
  Clone ID: MRT4577_166770C.1.pep
ASRWFSPVLIAKAIGKQVSIGGWSLRTKDQLRIVIRPGQHKVHPPIFHVFVLSLIRFRFIWFFWLFVLVLLF

SEQ ID NO: 257879 - protein, 98 aa, Zea mays
  Clone ID: MRT4577_166771C.1.pep
DYWPFILRGGKDKLEFFLKRKKGGEQNQRGSGKGDIKFHETPFSNGARGPTPMERKRDPGAPIHKGKASWTLTLVPENPPPVKLPWGGGGARNPGSKT

SEQ ID NO: 257880 - protein, 57 aa, Zea mays
  Clone ID: MRT4577_166772C.1.pep
HAPWSAGGDGLPVLNALDAAKTSREHFTAIIVAGMGFFTEAYDLFCISLRQQVLGRI

SEQ ID NO: 257881 - protein, 325 aa, Zea mays
  unsure (1)..(325): unsure at all Xaa locations
  Clone ID: MRT4577_166773C.1.pep
GTLEAGLRGVLYHMXARDQHGCRLLQQRLDDGKREVDYIFAGVWSHAAQLMVDPFGNYLMQKLLAVCDDGQRMALVLTLTADPFALVRISLNVHGTRAVQKLIERLSAREEIGLVMDALRPGFLELIKDTNGNHVVQKCLHSFASNDNKAIFAAAALHCVDIGMQIHGCCVLQRCIARSRGEHRDKLVAAIAHNGFKLAEDAYGNYVVQVVLDLKIPTANSSLAQQFGGKYIHLSMQKFSSNVVEKCLKVFKEVDKAKIILEILATPHLEQLLPHCYANYVVYSALKNSKGSLHSALINAILPHEELLRTSPYCKRIYSKFFLKN

SEQ ID NO: 257882 - protein, 279 aa, Zea mays
  unsure (1)..(279): unsure at all Xaa locations
  Clone ID: MRT4577_166774C.1.pep
LEAGLRGVMYHMXARDQHGCRLLQQRLDDGKREVDYIFAGVWSHAAQLMVDPFGNYLMQKLLAVCDDGQRMALVLTLTADPFALVRISLNVHGYNCQFTPRFFLSVVVTNVHIFAFAPGWLVVLVEFGDGVXTRAVQKLIERLSAREEIGLVMDALRPGFLELIKDTNGNHVVQKCLHSFASNDNKAIFAAAALHCVDIGMQIHGCCVLQRCIARSRGEHRDKLVAAIAHNGFKLAEDAYGDYVVQVVLDLKIPTAKIQLAQQFGGKYIHLSMQKVSSN

SEQ ID NO: 257883 - protein, 36 aa, Zea mays
  Clone ID: MRT4577_166775C.1.pep
IVVCYCCSQLLLMRQTLIDFGFKLTKLSYTVKLMIV

SEQ ID NO: 257884 - protein, 123 aa, Zea mays
  Clone ID: MRT4577_166776C.1.pep
ADRTISETVAGRGGPKKSRRSALVGWFGEKDVKAERVVYTADFTVDGSFGEPGAVAVLNRHQREFFVESIVVEGFPSGPAHFTCNSWVQPTRVHRDPRVFFTNKPYLPAQTPPGLRELRRLEL

SEQ ID NO: 257885 - protein, 95 aa, Zea mays
  unsure (1)..(95): unsure at all Xaa locations
  Clone ID: MRT4577_166777C.1.pep
YITTAYMPYIFNFISIXSDNVSSDXITLTLSNTLLSLEKPINYFSIMNHEXIPFRDANTYYVLKSYSLLTDHDKAYGHLKDLPKIILSIYNSYIH

SEQ ID NO: 257886 - protein, 88 aa, Zea mays
  Clone ID: MRT4577_166778C.1.pep
RDFRGKMWFQNLRFNLMVVGGITALIVIIWLMVGRAFKCYSTPSCSPFFLGGVAYAQTFGPDCVFNVTASQCSGLQSLQSFPRSILPK

SEQ ID NO: 257887 - protein, 47 aa, Zea mays
  Clone ID: MRT4577_166779C.1.pep
GNQNFTLVKKKGSGEIVSLWCYKITAILKFPFTEKSATLAKKPIGLD

SEQ ID NO: 257888 - protein, 149 aa, Zea mays
  Clone ID: MRT4577_16677C.1.pep
MGQVESQATRPSEEPSPPVVEPSPPSSAPPPSSLEALAAEAMSFDEDDTEESIEMKVQKALDCPCVADLKNGPCGGQFVDAFSCFLRSTEEEKGSDCVKPFITLQDCIKANPEAFSKEILEEEENEKEADKSNLKVRAPSWSRESNPKV

SEQ ID NO: 257889 - protein, 75 aa, Zea mays
  Clone ID: MRT4577_166780C.1.pep
QHWPIDRSTLLGKIALLGSTNACKNCHGPQRPAKTARAALAAVLVHRSVMPRGDCAVHERFLGPHLAAGCLAHGG

SEQ ID NO: 257890 - protein, 133 aa, Zea mays
  unsure (1)..(133): unsure at all Xaa locations
  Clone ID: MRT4577_166781C.1.pep
CSDSRVCPSGTLGLQPGEGFTGRNIAAMGPAYXKDKYTGIGAAIEERGWALKGEGLGVIGHRWWRGIKGVLSLQEGGTGNFQFGEKWGKKGFPGQNKVKKKHASVAVDDQXSILEKEGRGTCPWEKPQETTPL

SEQ ID NO: 257891 - protein, 124 aa, Zea mays
  Clone ID: MRT4577_166782C.1.pep
ERENLTNLLLLGLFSVTHRSLSRSPTSLVLLTMPVFPNAGMSTYLKNTPADNVHSDPIFTTITPTLRTVATAIMADPTDLWVCYVSTMRIHVYPRQSDMLIREGACKLPINDNLCPCCQTTLFH

SEQ ID NO: 257892 - protein, 395 aa, Zea mays
  Clone ID: MRT4577_166783C.1.pep
MESGYELHSRGRAARGLNALHNLQRIMEEEKVRMASYNLEGGAQMWYIQPLRPGPQPVVPRGCYEPGTPAGALGALYTDTFTSHGLLPAPAPFIGEVAARRLGLTIEPRPRLTAMVANGERVACLGVLRQAQVDISGLVFCVDLFVMPLAEHNVILGTQWMGTLGPIVWDFNARTMAFQWEGRNVRWSGICPPSTPILLAATTDDALVDGVLNPFTNIFAEPIVLPLAWGCDHHIVLKPGSSRVVDAFSIPIVDEHLDELHGARLFTKLDLQLGYNQVRMLSVDIHKMAFHTHDGLYEFLVMSFGLCNAPATLQALMNDVLRPYIRQFVLVFFDDILIYNTSWVDHLRHLRAVLDTLRQHRLFVKKSKCSFGVDFVAYLGHVILAEGVTMDPAKV

SEQ ID NO: 257893 - protein, 43 aa, Zea mays
  Clone ID: MRT4577_166784C.1.pep
KTIQLRVQVRDKIHRQMKNILYKPTTTLIEVKCKRTHQRRMLA

SEQ ID NO: 257894 - protein, 50 aa, Zea mays
  Clone ID: MRT4577_166785C.1.pep
QTALGLELIFSPIPKPSVGPHFINPRERVRPLQEERRVSSALLKFISRET

SEQ ID NO: 257895 - protein, 272 aa, Zea mays
  Clone ID: MRT4577_166786C.1.pep
MLRVAGRRLSSALAWRPAAAASGSRGPLAGTLPGRDDDDTRDCRARFAIESPFFAAARGFSAETLAPRNQDVGLSELPATVAAVKNPSGKIVYDEYNHERYPPGDPSKRAFAYFVLSGGRFIYASLLRLLVLKFVLSMSASKDVLALASLEVDLSSIEPGTTVTVKWRGKPVFIRRRTEDDIKLANSVDVASLRHPEQDAERVKNPEWLVVIGVCTHLGCIPLPNAGDFGGWFCPCHGSHYDISGRIRKGPAPFNLEVPTYSFLEENKLLIG

SEQ ID NO: 257896 - protein, 54 aa, Zea mays
  unsure (1)..(54): unsure at all Xaa locations
  Clone ID: MRT4577_166787C.1.pep
AFSAANGLDIXWCKAPENGLIASDLVSXLDVQPEKAAERGGYGGERYETIESSK

SEQ ID NO: 257897 - protein, 34 aa, Zea mays
  Clone ID: MRT4577_166788C.1.pep
WWRYLRLDEFTYTQSSPSFLSFYKLLVFHYLSRI

SEQ ID NO: 257898 - protein, 76 aa, Zea mays
  Clone ID: MRT4577_166789C.1.pep
MVAPDLNLDTSNPTPRLPKAWDGNGIPNTTTRYRERVSWHTTPFEQRLLKVLSDEDRCPPRKVVRGKLFHLEETAE

SEQ ID NO: 257899 - protein, 93 aa, Zea mays
  Clone ID: MRT4577_16678C.1.pep
VKMCLVSPRYPKMGNISGACHEAPLPANLKCGPPPPRSPGFETPALRNPAPFRGKFGEHFKAGKKPKSPRGGGGIIAISPPGFPSGPKNLFPL

SEQ ID NO: 257900 - protein, 184 aa, Zea mays
  unsure (1)..(184): unsure at all Xaa locations
  Clone ID: MRT4577_166790C.1.pep
MDPMPTLVKEEEDGHGTGESPGATAASRPVKGLRDARPSLFLTKTYDMVDDRSTDDVVSWSAGNNSLVVWDLHHFSTVLLPRHFKHSNFSSFVKQLNTYGFRKVDPDRWEFANEGFLRXQRHLLKNIRRRRPPANTASNQQSLGSYLEVGHFGKSXDTDQLKRDKQLLMAEVVKAKAEQQSMKT

SEQ ID NO: 257901 - protein, 93 aa, Zea mays
  unsure (1)..(93): unsure at all Xaa locations
  Clone ID: MRT4577_166791C.1.pep
LGWGAWSGGSPPGPGEPSPVFPFSINQRCPPPPGTGHVLAVCXSMSDPVFAVVTVSGPPRGRFPQKKKRKTTPHREKKKPPPPHLKKKKKKRP

SEQ ID NO: 257902 - protein, 266 aa, Zea mays
  unsure (1)..(266): unsure at all Xaa locations
  Clone ID: MRT4577_166792C.1.pep
FVGFVEPWSXMPQRNPKRLSXPYSPAQLLPVKLDPNEGTLHILVRANLKEDPKVTGSAHALFVKGFYIKEPGKLNLTPSCNHSVITIDGNTDIELFWNAKDLLRVSRVDTNENNGVLSRVVYRVEALKRLSFSDKVTIVLPATGQTEEVEVSYDTGEEAESPSSWGLTTTAVMLTCIIVTIVTVALFIKLLQRPIRQAPSGSMTASTPARAPAADPAAMADPASPANGQFSPRTPQPFMEYVRRTIDDTPYYKRDARRRFNPQNTY

SEQ ID NO: 257903 - protein, 139 aa, Zea mays
  Clone ID: MRT4577_166793C.1.pep
MIQGRWRGSKMTGRLGVIQPARSSIRNKFEWPRLRSRSVDPVVQIGRNFTPVGEQSPTSSPTTPTKTGGSRARVTEISVITVSDSGVPCLTFGSRNASFLLEVPLGVAASLPDEGHIGGRAVDSGVMIEERLNLVIHAC

SEQ ID NO: 257904 - protein, 94 aa, Zea mays
  unsure (1)..(94): unsure at all Xaa locations
  Clone ID: MRT4577_166794C.1.pep
DQNARECTNHMXGEKNMFTSYXKNKDSHNTIIFGDGNQGXRRSDGSLAFKGVSNRKLYLVDFTKENVDLDACLLAKTNMGXHLRLAHVGMKNLH

SEQ ID NO: 257905 - protein, 85 aa, Zea mays
  Clone ID: MRT4577_166795C.1.pep
FLGIPSFFLADASGGLEWNKRFKIIKGICEGLQYLHENNIVHLDLKPTNILLNDNMVPKISDFGLSRCFEEMQSRTMTSTLGWIH

SEQ ID NO: 257906 - protein, 229 aa, Zea mays
  Clone ID: MRT4577_166796C.1.pep
MPHLHHYSPVLLLLAVFVYLSTRYVHGDHADGGHQDLPALLSFKAYNPNATALASWVGPSPCTGTWFGVRCYRGRVAGVFLDSASLAGTVAPLLGLGRIRVLAVRNNSLSGTLPPLDNSTASPWLRHLLVSHNKLSGSLSISLAALRTLRAEHNGLRGGLEALRVPMLRSFNVSGNRLAGEISGDLSRFPSSAFGDNLALCGPPLPQCVHAYDALGRSSGNSSTSATAA

SEQ ID NO: 257907 - protein, 65 aa, Zea mays
  Clone ID: MRT4577_166797C.1.pep
LLKINCLAPSKFLKLFSPLPEYSVNSLSIVCLLVMVVCQELPLVLSCGPTTPQATSIHCLAFVSS

SEQ ID NO: 257908 - protein, 53 aa, Zea mays
  Clone ID: MRT4577_166798C.1.pep
CSKNVCLLFGIGHKWFDAPTCRWLLFIAPCVDVQCNSHKYGAGLFIHLLLKIK

SEQ ID NO: 257909 - protein, 150 aa, Zea mays
  Clone ID: MRT4577_166799C.1.pep
GSPYPAMPGMQYPGSYPGGPMGNRHLGNSHNPIKAPNSNANSTVSSSPSSNAGGQVEGPPGANLFIYHIPQEYGDQELSSAFQSFGRVVSAKVFVDKATGVSKCFGFVSYDSPASAQAAINRMNGYQLGGKKLKVQLKRENNTKHSSKPF

SEQ ID NO: 257910 - protein, 179 aa, Zea mays
  unsure (1)..(179): unsure at all Xaa locations
  Clone ID: MRT4577_16679C.1.pep
AYASHGDVENTLALFHMMLADDNYLKPDGVTLLAVLTVYAHKGCVEEGRTVFDAMQRGDYGKVEVTIEHYGCMVDLLSRAGQLDEAYKMIEQMSIPNNDVVWGVLLGACRMHGNIDMAEKAVQKLRILNPHEGGYYILLIDXYTAAGRTAEAMEIRRTMNETGANKTTGWSCSTTACLP

SEQ ID NO: 257911 - protein, 340 aa, Zea mays
  Clone ID: MRT4577_1667C.1.pep
MRICESGDGDDVAGLVFQQEQQEEVQASGELVRLKAKHALVGAGARVLFYPTLLYNVLRNRFEADFRWWDRVDQFILLGAVPFPSDVPRLKQLGVQGVVTLNEPYETLVPTSLYQANEIEHLVIPTRDYLFAPSFEDISQAIDFIHRNASQGGTTYVHCKAGRGRSTTIVLCYLIKYRNMTPEAALDHVRSIRPRVLLAPSQWHAVNSFGALTGGQLPVRSTNLACFLEAIEAGCTNTTGNDDYHVMEFDCEDSGLPLYQIMLPRPASPTGSGCTDAVLVTEADLEGYDTYIGTRKDAVSLEVATRSPIMRRLSCLFGSLKLSNSNCEPASSRFTEVRAC

SEQ ID NO: 257912 - protein, 78 aa, Zea mays
  unsure (1)..(78): unsure at all Xaa locations
  Clone ID: MRT4577_166800C.1.pep
HNQNFXVFSPNSIVQVNPNSPCLGFVPAPGPAPPPVIFWFQLQNPLLLLDLDKKQFGFSPFLNAIGLSCTSFNFPPAS

SEQ ID NO: 257913 - protein, 47 aa, Zea mays
  Clone ID: MRT4577_166801C.1.pep
GGLEVDDCQLALFIGFGHAGVELVVGVAGDLGKLLGCHYSDPVFTLS

SEQ ID NO: 257914 - protein, 136 aa, Zea mays
  Clone ID: MRT4577_166802C.1.pep
LRMWCICDGSKECGPRRTVDGGKPDRRLASPIGLSDDGCGDEEHPRRRWLLRCWLGVHRRQRFVSATPSFVCSWSSVTSSGAEFAFFRHAHRRLALGHSAPSGESKLPDPDRDVSSSGHTWRRPTEASDDSNGIRA

SEQ ID NO: 257915 - protein, 147 aa, Zea mays
  unsure (1)..(147): unsure at all Xaa locations
  Clone ID: MRT4577_166803C.1.pep
MHLSMNVAGPPFRDHGRDALVAAGSSPIKGDVTFMLSDLPEFTLNQVDEFDLPDRVVVKHXMVAGSLXSFGRSLXQGTAELVKALQDVEPDEPYWEDLRNVNLRKKDLTNLHRLDELCYQLEELDVSNNKISQVEGIPYSMRRLQVQ

SEQ ID NO: 257916 - protein, 37 aa, Zea mays
  Clone ID: MRT4577_166804C.1.pep
RGLFFFFFYLSDNLWATLSQGLLTRNDHLQHQTRHRD

SEQ ID NO: 257917 - protein, 50 aa, Zea mays
  unsure (1)..(50): unsure at all Xaa locations
  Clone ID: MRT4577_166805C.1.pep
FTLSGPQVCISSGYHRQXDACLQRVEQCICTCVACFACACPSKWDLGSAV

SEQ ID NO: 257918 - protein, 66 aa, Zea mays
  Clone ID: MRT4577_166806C.1.pep
DQLVVACVHPACSGPSAFFGSPLVGFTIFVFLKVAFKSVLLSPLSCRVAYEVLFVTQDSWFWSPNF

SEQ ID NO: 257919 - protein, 126 aa, Zea mays
  Clone ID: MRT4577_166807C.1.pep
EANREQDNKTPILNKTKSYTKKFTSSSVNMNSPDGAQSSGLLLQDEKDDEVECQLEHYYKDFSDLDPKRHYAIRIFNTDDTFTTLSCTPATTVEEIIPALKRKFNITAQGNFQISLKVGKLCSRSR

SEQ ID NO: 257920 - protein, 55 aa, Zea mays
  Clone ID: MRT4577_166808C.1.pep
LKKKKKKKKKKRKKKKKKKKKKKKKKKKKKKKKYKEKINHFLLKRRFTNDKGWEI

SEQ ID NO: 257921 - protein, 108 aa, Zea mays
  Clone ID: MRT4577_166809C.1.pep
TEKGFPPALYYKAITTTIHPSKQQKKGKGKTAKIHNATERLTGFKCTKQRLEHRSPQQAPHPAIDKVKPRRLVTVGGRPHCHLPCTITAEPPSASASKEGPLPSRPGP

SEQ ID NO: 257922 - protein, 78 aa, Zea mays
  Clone ID: MRT4577_16680C.1.pep
PAGFFDGLLSFFGGFAFAPTTYFLPCIMWLAIYKPKRFSLSWFTNWICIILGVLLMVLAPIGGLRQIIISAKTYKFYQ

SEQ ID NO: 257923 - protein, 61 aa, Zea mays
  Clone ID: MRT4577_166810C.1.pep
LQISTLHSAVINHFNSKFTVGLPPPKLSKKKTRRSILQATRPSFLTWRSNSNIHTGNAYVR

SEQ ID NO: 257924 - protein, 60 aa, Zea mays
  Clone ID: MRT4577_166811C.1.pep
HLFFSCLTIRLWPLCVRFCFLSLQSGIMHFSLGVGICCFMLGFCLLNSSYLSYSWHRWAL

SEQ ID NO: 257925 - protein, 69 aa, Zea mays
  Clone ID: MRT4577_166812C.1.pep
MASQGEPSASASDPKEKKDFSTAILERKKSPNRLVVDEATNDDNSVVALHPDTMERLQLFRGDTVLLKV

SEQ ID NO: 257926 - protein, 74 aa, Zea mays
  unsure (1)..(74): unsure at all Xaa locations
  Clone ID: MRT4577_166813C.1.pep
FTHPKNVCSFHTTGAIQSPTYAALDNWIPRYSAPLFXLPDRLILLFARLKILQRTGLYLNQTRPGSVISCTPLK

SEQ ID NO: 257927 - protein, 48 aa, Zea mays
  unsure (1)..(48): unsure at all Xaa locations
  Clone ID: MRT4577_166814C.1.pep
HDTTPSRGARXXPXIXRRELQXXRAQXXRGSAXAPPPHXXXXGXAGXA

SEQ ID NO: 257928 - protein, 124 aa, Zea mays
  unsure (1)..(124): unsure at all Xaa locations
  Clone ID: MRT4577_166815C.1.pep
MREREIDLLVQVSNEPDASCFDLFSKRYWEVVSVGATLFLFQXLAGINVAVYYSTSMFHSTGLASNVAASALVXGDANVFGTMIASPLMVKQGRKSLLITRLSGMGLSMLLLSLSFTWKALAPY

SEQ ID NO: 257929 - protein, 92 aa, Zea mays
  Clone ID: MRT4577_166816C.1.pep
NFILRAAGNYPIAISYSTNDFKKPSEGFYHINLNANGHHGHLLFFIIMKYSQLTNHFNAYSNLHSMVMNAKSILIHCHNLNGNHTPTYLHIQ

SEQ ID NO: 257930 - protein, 74 aa, Zea mays
  unsure (1)..(74): unsure at all Xaa locations
  Clone ID: MRT4577_166817C.1.pep
AQQXQQXXXGNXXAHXQQQQXXPNNQXXAXNTXXXXQQQQPXXQXXXAXPQHXXPNNQQAAXNXXAXXQQQQRP

SEQ ID NO: 257931 - protein, 106 aa, Zea mays
  unsure (1)..(106): unsure at all Xaa locations
  Clone ID: MRT4577_166818C.1.pep
RTAXGFISPDKLQVACQEFGLGXVQLEDLIGEVDQDNDGGINYNKFVAIIQKPPVGGPXRRPTCKTASVSGSGRRPGWPRPLCFXLPFCLGVGVNDLIEGMSGQLL

SEQ ID NO: 257932 - protein, 452 aa, Zea mays
  unsure (1)..(452): unsure at all Xaa locations
  Clone ID: MRT4577_16681C.1.pep
MGTQASPDNYTPPKDERTAREKAIDDWLPITSSRKAKWWYSAFHNVTAMVGAGVLSLPYAMSELGWGPGIAVMTLSWIITVYTLWQMVEMHEIVPGKRFDRYHELGQHAFGDKLGLWIVVPQQLVVEVSLNIVYMVTGGNSLKKFHDVICDGKCKDIKLTYFIMIFASVHFVLSQLPNFNSISGISLAAAVMSVGYSAIAWTASAAQGKAAEAEADYSLRATTMPGKVFGFLGALGDVAFTYAGHNVVLEIQATIPSTPGKPSKKPMWKGVIVAYVVIAACYLPVALVGYWAFGNGVDENILITLNRPRWLIAAANMMVVVHVVGSYQVYXAMPVFDMIETVLGREVXFTPGFRLRLIARTVYVALTMXFVAITFPFFSELAQFPSVGFAYAPTSYFLPCIMWLIIYKPKRFSLSWFTNWICIILGVLLMVLAPIGGLRQIIISAKTYKFYQ

SEQ ID NO: 257933 - protein, 107 aa, Zea mays
  unsure (1)..(107): unsure at all Xaa locations
  Clone ID: MRT4577_166820C.1.pep
TLLFSGRICEEXFYRILDITSYSLVLIMSPSMFSSFKPFLTLSTLLVTSSRRRRSTCRTLEVGRVVDSAGWFVVAAAGHPSAGDVWTVCLGSVVWMSVCNTARAVWG

SEQ ID NO: 257934 - protein, 177 aa, Zea mays
  unsure (1)..(177): unsure at all Xaa locations
  Clone ID: MRT4577_166821C.1.pep
GYLEAGRAGITYESPPGCGFGTAPSIRVRRKAPQTLSEPFLFPEGPTGRAHPQAAHAPSSKRTLRKYRYRGMEPYAICEMSTTHLRQIIARGARRTSQRGLKRTALAFIIKMINDRKDAHXGGXDTIQMKMHRRNLNVVPDMIASSGGDCHADTFEHVEIQAEMIRHYPADISNPDK

SEQ ID NO: 257935 - protein, 92 aa, Zea mays
  Clone ID: MRT4577_166822C.1.pep
HPPFALAPRPSAARPAPRHRRAVDGEQQGRRGARAPGGGRAGWAAGARGGARRHGDSYTGGLSVPGPRAAGYSRAAVLVFYIPVRRVLLFLL

SEQ ID NO: 257936 - protein, 177 aa, Zea mays
  Clone ID: MRT4577_166823C.1.pep
DDEVDAGQEVLRGIDLDIRTGALAAVVGMVGSGKSSLLGCILGEMRKFSGKVKVCGSTAYVAQTAWIQNGTIEENILFGKPMHRERYKEVIRVCCLEKDLEMMEFGDQTEIGERGINLSGGQKQRIQLARAVYQDCDIYLLDDVFSAVDAHTGTEIFKECVRGALKNKTIVLVTHQV

SEQ ID NO: 257937 - protein, 53 aa, Zea mays
  Clone ID: MRT4577_166824C.1.pep
QVKKSYIGVHQQIEAEMIKVTKTELEKLKNSYRQLIKEMNSAKEKYKEALAKG

SEQ ID NO: 257938 - protein, 63 aa, Zea mays
  Clone ID: MRT4577_166825C.1.pep
CFCLQRIIMGQIQVFSCGGWSIHYCLRWCPHDSAAPARSIRARDAIDEVSTLAAVCCVRIVLS

SEQ ID NO: 257939 - protein, 90 aa, Zea mays
  Clone ID: MRT4577_166826C.1.pep
TPYQGQKITTTKSNQPQKLSGHTALQTWRLGHDCSTLKLTKPYHLDLGPGPPCEGRLSAARRHVLRPVIAYGVKLHSYCSTVVGAGWVTS

SEQ ID NO: 257940 - protein, 56 aa, Zea mays
  Clone ID: MRT4577_166827C.1.pep
VLFVFFYRRENPLLDVVFSWMIALIPNNTAETPFLSPPGKTGPKNATNCAGGMSLK

SEQ ID NO: 257941 - protein, 267 aa, Zea mays
  unsure (1)..(267): unsure at all Xaa locations
  Clone ID: MRT4577_166828C.1.pep
MDDAAAEEEASMFETSHVLGALLASSPLLARAWDRCTAASAAAPWFVHGEDGGKVYVGFSGVQAALTAAGAAVAGGGADIFAPVSLGGDAAGRMFAPLVAAEPDPAATGEPVAVQALALQCFLKLCCSPDFQMLLNQIRGKAVVFTGHSLGGAVAALTALHYLCISSSSSPPAPPVLCVTFGSPLLGNEALSRAILREHWGGNFCHVVSQHDVXPRLLFCSPDAVPAHIIVGMQLQQWSAWTRPTGAVSTVTAHMAVTDKDVLRQLI

SEQ ID NO: 257942 - protein, 94 aa, Zea mays
  Clone ID: MRT4577_166829C.1.pep
GTKKGEGRLILFHMPKNTNPSQWTYRTYSLYNTKHIGPTIQQGLTNAKRIPMLKSQPKLQEILAPEPNRYTHSADTGDYCILARHFTGIAIRGT

SEQ ID NO: 257943 - protein, 112 aa, Zea mays
  unsure (1)..(112): unsure at all Xaa locations
  Clone ID: MRT4577_16682C.1.pep
AHQLQQLEEANLAEYCQHHXFXPFNQLGAVNCDGYWQQQXPFSQMGAGYPQQXFHXNQLCRIXNYAAHSQLLQLLPLIQVADVSPAVFSTQQQAVAGYLHAMPNAGTLLQQQ

SEQ ID NO: 257944 - protein, 185 aa, Zea mays
  Clone ID: MRT4577_166830C.1.pep
MAELALLSPPQRPYNNTHSVISSGSKENLPGDVITPCSRCSRKLLLAGAASFAFCLLSVAACLLLRFLLRRWCRRRRGPGLVQQEEEEAQLKLGGGGGLDAEAIALLPSSFPYHRRGNDNPEVECAVCLGVLDEGQTARQLPGCAHVFHQQCVDAWLASNASCPVCRRRTGPQAEEEAAAAPVDV

SEQ ID NO: 257945 - protein, 111 aa, Zea mays
  Clone ID: MRT4577_166831C.1.pep
CLCMILLKRSLSRTLTLRFTMMSLACSCASPYAPSFITWIMTRAFFCAGVSSVTTTETTERAQVDPMPDQEPANVLHDVVHGVLHGDHPAGVAPIHVNKHVWVQEFDIELV

SEQ ID NO: 257946 - protein, 85 aa, Zea mays
  Clone ID: MRT4577_166832C.1.pep
MAVPLMTHKIEKKRVTHFKRPYFDRYKCLKPSWLKPNGIDSGVRRQFKGCTWMPNTGYGCDMKTRHYLANKFKKFSCLQWILTGA

SEQ ID NO: 257947 - protein, 76 aa, Zea mays
  Clone ID: MRT4577_166833C.1.pep
VPRPPETVAMVRISYPTVAIANYDHIMGTITRDTRYRMVNTSNVPRGAKITTMLMNGSPRHRHTQKMHSCRQGRQT

SEQ ID NO: 257948 - protein, 71 aa, Zea mays
  Clone ID: MRT4577_166834C.1.pep
VLLRKVLTNPRWCPYIKGSPREGQAPRSSNSIESRGTSPTQVVLRFWLLSDAPRRLHYRAFSRNGRGPCSL

SEQ ID NO: 257949 - protein, 172 aa, Zea mays
  Clone ID: MRT4577_166835C.1.pep
MAAAPARHLAAAFTAAAAHQRVAFRRVQVRAPVSASLSFPPRHPAPFRGRASLACPAAASLSVPSGAAPPGSVPFNLLPPDSDPFIEWDPPPGDSAPSPLAGGGASGGATLVVLLGWLGARQKHLRRYADLYRERGVGAVRFVVPVRELVGLDLGRRVERRVADLSEQVAAW

SEQ ID NO: 257950 - protein, 86 aa, Zea mays
  Clone ID: MRT4577_166836C.1.pep
NSHFTVHLLNFLEVVVCIAIYHSLLHLGVLNGILKLTADSYACSILGHVWPMHKENVNYGDSTELNCGQWSSKFRIQAGCSKGAHV

SEQ ID NO: 257951 - protein, 70 aa, Zea mays
  Clone ID: MRT4577_166837C.1.pep
TKKVRPHGVGTKMLSLVRLIFQPLSVFEMTPVYVYCILECPVNLVWNRSASRLKIGMFTDQCKIIFPLFF

SEQ ID NO: 257952 - protein, 55 aa, Zea mays
  Clone ID: MRT4577_166838C.1.pep
LKKKPTGIKKGGVRVPYRVLHFGNENFSYDKDRVYRRGKSPFYLNITDFLKNDWD

SEQ ID NO: 257953 - protein, 81 aa, Zea mays
  Clone ID: MRT4577_166839C.1.pep
FVWPENAPRYFSLFLLYHCSLLSSFNVTISIFDVLPERVVIDLTVDGTTLHKHRLRVRDHLQGDVHHLLPRIIHYSLLTQA

SEQ ID NO: 257954 - protein, 95 aa, Zea mays
  Clone ID: MRT4577_16683C.1.pep
AILDKLAQGDVSYGNVIAYVTRGNDQHVCFYDEDDMFWHARNNSYCCYYYQNCSEPKSLYDDYICTFYTRNALKNHSYKRPLPYEGTELYTPTRC

SEQ ID NO: 257955 - protein, 66 aa, Zea mays
  Clone ID: MRT4577_166840C.1.pep
QNLPGSDSAPNLSLVRVLQMLSSLQLADIMPKSLLVQFVMRYSVYCASVILAQRLRVGVKRLYLGI

SEQ ID NO: 257956 - protein, 68 aa, Zea mays
  Clone ID: MRT4577_166841C.1.pep
AAGLQKKGVKAPSYPTPPASSSSSSMNTTSTPRLATLPKLPAEATPLMRADKKDAPKDPAEEKAAPGP

SEQ ID NO: 257957 - protein, 72 aa, Zea mays
  unsure (1)..(72): unsure at all Xaa locations
  Clone ID: MRT4577_166842C.1.pep
LVLVLGLLLVVGVLVVVPFLVVLLVGLLGVVFVGALVVAWALVLVVPPRFCFLPVLPLCVPALPPFAGXSRS

SEQ ID NO: 257958 - protein, 53 aa, Zea mays
  Clone ID: MRT4577_166843C.1.pep
LESTRIIHVDQIVPKANSQPIRLNNIDFTKDELYATVNQCRSFAFSVSLSYWS

SEQ ID NO: 257959 - protein, 68 aa, Zea mays
  unsure (1)..(68): unsure at all Xaa locations
  Clone ID: MRT4577_166844C.1.pep
HDDLLFHYSDQYLADDVACFXESLRHARREVFDDAQPRRRKIQRLLLADGITGKHIRTGEDVSLSMRI

SEQ ID NO: 257960 - protein, 178 aa, Zea mays
  unsure (1)..(178): unsure at all Xaa locations
  Clone ID: MRT4577_166845C.1.pep
LYQDLLSGYELXSDXSFTFNVLAIGILMEAXGKWLTQRPVDVDIGANPSDXGGEDKSLDDTAKKVVDIEDTFRIQEQPLFXDKKSFVNYIIKYIKNLTSCVWHPXKADDYKKGVKGAHQLLLINLNDLQFFAGESMKDDAAAVSDYYNDGATNTTFLYFSHGLKEINCYACRQITYPC

SEQ ID NO: 257961 - protein, 112 aa, Zea mays
  unsure (1)..(112): unsure at all Xaa locations
  Clone ID: MRT4577_166847C.1.pep
MLKDKIWRGVFFEKDGFQSVFITIPLSKFNLDFFPVKKKNFGLFSTVKRVLKGLIPSFGHDLDGLLFKGWYNPYVTRTNXGFLKCKSLGMNFLYFLFRLSNVFFYLVFFFEW

SEQ ID NO: 257962 - protein, 104 aa, Zea mays
  Clone ID: MRT4577_166848C.1.pep
SFAACGHFGGQISPRSTRRQEGLAEGFGPIISQGHPFVGQGRTTGGMGRCVIRNKSQAQATRQTQALSAASARLSRAQCPWTSEWIRDKSTRLQEDKFSRFTIV

SEQ ID NO: 257963 - protein, 88 aa, Zea mays
  unsure (1)..(88): unsure at all Xaa locations
  Clone ID: MRT4577_16684C.1.pep
AKRHASVGXGDHEALEKHQFASXKDAPFRLIKMNCMFPDATQRRKRHRVFGKHMHPMWIRSRNMANSPIHPHDKMNSILGADAIKNFI

SEQ ID NO: 257964 - protein, 102 aa, Zea mays
  unsure (1)..(102): unsure at all Xaa locations
  Clone ID: MRT4577_166850C.1.pep
LXKRGGRKSRSMASNYRXTPXGEXSGRFHXGPHSHSTSTTPTGGAAAAAASPATHAGSFKCRLHRTNSQGHGHGHPHPSPPASPVPPAHGVPGASSRTVEAL

SEQ ID NO: 257965 - protein, 49 aa, Zea mays
  Clone ID: MRT4577_166851C.1.pep
GHNKLFCPYNHNCANKNALPKVTTRAGNRSLPGGVTTQTNCLTVKKPMP

SEQ ID NO: 257966 - protein, 41 aa, Zea mays
  Clone ID: MRT4577_166852C.1.pep
MASNYVDTTGEEGRFHGPHSHSTSTAQGVSSSASSRTVEAL

SEQ ID NO: 257967 - protein, 79 aa, Zea mays
  unsure (1)..(79): unsure at all Xaa locations
  Clone ID: MRT4577_166853C.1.pep
RRVGKHVLIAQELGLQVLGGIXYDGQIQXAPKLSTTTPSLAIPNAISNAGLDSSNVHIVEINLAFSAAVLANQKLLVIA

SEQ ID NO: 257968 - protein, 123 aa, Zea mays
  unsure (1)..(123): unsure at all Xaa locations
  Clone ID: MRT4577_166854C.1.pep
ACCRLLPPPPPSSSSVDQRAGRKKKRSMASNYVDTTGEEGRFHGPHSHSTSTTPTGGAAXGGGGGAKCVCAPATHAGSFKCRLHRTNSQGHGHGHPHPSPPASPAAPARGAGASHSSLAYLVL

SEQ ID NO: 257969 - protein, 143 aa, Zea mays
  unsure (1)..(143): unsure at all Xaa locations
  Clone ID: MRT4577_166855C.1.pep
CCPSSAAAVVFVRRAADQRAGRKKNRSMASNYVDTTGEEGRFHGPXSHSTSTTPTGGAAAAXASPRNFRRSFSSASSAGHSHGGGGGAKCVCAPATHAGSFKCRLHRTNSQGHGHPHPSPPASPAAPAQGVSSSASSRTVEAL

SEQ ID NO: 257970 - protein, 166 aa, Zea mays
  unsure (1)..(166): unsure at all Xaa locations
  Clone ID: MRT4577_166856C.1.pep
SIITLVVNSFCLWCDGNGLCVHWGASYSRVFFGEELGPVKKKKKKKKKKKKKKKKKKKKKKTGGIDXGAVXWFVXLSRPIAPRSFXFAWVLXXLXAERVRGIXIDIALWKFETTKYYCTVIDAPGHRDFIKNMITGTSQADCAVLIIDSTTGGFXEVGISQAGQTS

SEQ ID NO: 257971 - protein, 81 aa, Zea mays
  Clone ID: MRT4577_166857C.1.pep
EKKGPTHTSEPCNIKRTIFYQQSNTNNGGDLYTSAAPQFFIPQHYNHNAHKIISISYFPHTSNLPTIKYFNTLLTNTSATL

SEQ ID NO: 257972 - protein, 194 aa, Zea mays
  unsure (1)..(194): unsure at all Xaa locations
  Clone ID: MRT4577_166858C.1.pep
CXSQSHEXAGAGIGSLACGVVVATVSSFLNPCSLEEIRFFAQKKNLGPILFDTEPAEIAGVFDGRLEDKEAKEAFEGLMRCHEFKLEANESDSRGCVSRTVTLLRSKLGRKNIAERESEASDGLPFPRNRHFVGREKELSEIEGVLFGSTAAGIQEVDCPRASSTNERSSGVSDGFADEDSDTARKSNARYISL

SEQ ID NO: 257973 - protein, 57 aa, Zea mays
  Clone ID: MRT4577_16685C.1.pep
PPQKDTTVPSDPNPSLTQPAPRRAPLRASPRTFWVQEGGPVSRSEGARRRCPLRPAR

SEQ ID NO: 257974 - protein, 55 aa, Zea mays
  Clone ID: MRT4577_166860C.1.pep
RCFFFFQPPIYAQKKRFSKRPFFFFSGVSPPVEQNPPLRVFGLKFFQKVLPLNPF

SEQ ID NO: 257975 - protein, 48 aa, Zea mays
  Clone ID: MRT4577_166861C.1.pep
SSCIDPNKDISPRVKHDTWASPGTLSSSTVGFNVSVILGARLLNICTG

SEQ ID NO: 257976 - protein, 153 aa, Zea mays
  Clone ID: MRT4577_166862C.1.pep
MDMELEHGGNEDDRGSESSSSSSKRSFGASSDATVSSTPSKLQALRFAEDLSLPSVQVVVMSANMGCSHCRQRVADVVSKMNGLLDYMVDFGKKEVTVRGKVAHTKNKRKHRKALLGAPAGWDDARSAAAASSSSPGGHARTTLSWFLGCYGS

SEQ ID NO: 257977 - protein, 72 aa, Zea mays
  Clone ID: MRT4577_166863C.1.pep
MELEHGGNEDDRGSESSSSSSKRSFGASSDATVSSTPSKLQALRFAEDLSLPSVRALPFFLIIASKLISAKK

SEQ ID NO: 257978 - protein, 26 aa, Zea mays
  Clone ID: MRT4577_166864C.1.pep
PGVGGGGYGGGNRGGGYGNSDGNWRN

SEQ ID NO: 257979 - protein, 84 aa, Zea mays
  Clone ID: MRT4577_166865C.1.pep
SPLMVWMCIMTLLPVCISYGGIHGLIEILGEHHSSHLMAQSNTTGMSNWVRSCNRGIRWGERMRNQMLEPHNLLRYQNSLIKPA

SEQ ID NO: 257980 - protein, 129 aa, Zea mays
  Clone ID: MRT4577_166866C.1.pep
RREQVRRAIPHALATIDARLYVTNARPRPILPKFSSLERYASEHPILWMRHLPHSWFLSKARMFSGLVRWGWPTGSSDSYGSGGGIVTELDLEPGFSVAVATSRASTARRRPPHNSSECLAGPAGNRGY

SEQ ID NO: 257981 - protein, 85 aa, Zea mays
  Clone ID: MRT4577_166867C.1.pep
MLLRCDLSYPSMDNKEVVDCCFIKKKKKKKKKKKKKKKKKKKKKKKKKKKKKKKKKKKKKKKKKGGRLLKKPNFTSPFFQIKIFF

SEQ ID NO: 257982 - protein, 81 aa, Zea mays
  Clone ID: MRT4577_166868C.1.pep
MAHVIAFVYEQHEAALHGVASRGRNESNKKAPASLSGLFHKRKVVDLAGPKRSLVEVPYTVTLAHTANALLAARVYGHSAR

SEQ ID NO: 257983 - protein, 78 aa, Zea mays
  unsure (1)..(78): unsure at all Xaa locations
  Clone ID: MRT4577_166869C.1.pep
MSNRGRGESAGXKFRMSLDLPAASTCNCADNTPAKNLYIISVXAIKDRLNRLPSVCVLDMRMASVTKGXKPDLKKKVM

SEQ ID NO: 257984 - protein, 65 aa, Zea mays
  Clone ID: MRT4577_16686C.1.pep
WGGQLTGSYLNPAINYFYTPRGRRPFNFGAPFPGRAGRFNCSCNRSTPKWGPNCRCCTPNRPPWG

SEQ ID NO: 257985 - protein, 290 aa, Zea mays
  unsure (1)..(290): unsure at all Xaa locations
  Clone ID: MRT4577_166870C.1.pep
MGSSKLSLLCLVPFLLLAGGDTLTTFIVHVQRPEPEENQTTGDREVWYRLFLPEDGRLVHAYHHVASGFAARLTQEEVDALSAMPGFVAAVPDEMYELHTTHTPLFLGLDARQGDSPSHGSERGAGVIVCMLDTGISPTHPSFNDDGMPPPPPEKWKGRCDFGVPVCNNKLIGARSFMSIPTAGGNSSSPVDDAGHGTHTASTAAGAVVPGAQVLGQAAGVAVGMAPRAHVAMYKVCNDTICASADILAGVDAAVGDGCDVISXSIGGXVQPYYRDTIAVGTFGAVEKES

SEQ ID NO: 257986 - protein, 258 aa, Zea mays
  unsure (1)..(258): unsure at all Xaa locations
  Clone ID: MRT4577_166871C.1.pep
SPPSEDPTPFISPPPPPTALGLAPPPXPSCSPPXLPTPPLSSPPXPPSSARGSXPPPHVDTARXASPDPNRPASSSPDPNRHSPDPNLPAPSSSPNRREGRSCRPHPCSPTDPRSGSLSGRASSPTPQQPXGASSPXERRSRPXASSPXPPLXPAPPCSTPRLPAPYASSSQAPXPPPCSLLSTPSPVRPTAGSTSDLCSVKVLTSSQAAARYSPLRRRTRFGEHEHQLHPRPWIHACRGQAAPPMEDKDGPVMVWCR

SEQ ID NO: 257987 - protein, 92 aa, Zea mays
  Clone ID: MRT4577_166872C.1.pep
LLVWFATRNSSPPGPRFFPRGGAQSPPPKRWGPLFLSRKLLAGRLPAHFLLGGLKGLKKKKKKKKKKKKKKKKEKKKKKKKKKKKYSALLPL

SEQ ID NO: 257988 - protein, 282 aa, Zea mays
  unsure (1)..(282): unsure at all Xaa locations
  Clone ID: MRT4577_166873C.1.pep
IGTLEAGRLKPRKKYLTHTHSLSRRRLRRVPRHSSGAGRCRPTPGAPVFFRPFAGDDHRQLPELCKETKEKFNTARARDPFRQDSIADGFVGAGAIGREDAMNSLAYEADMRIRDPVYGCVGVISILQHNLRQLQQDLARAKYELSKYQAAAAAASASTAPTGPQAMAEFIGSAMPNGAAHNFINLGHSAALGSLGGSTAMFGQQEQFGSNAQMLSRSYDGGEPIARIGMNNGGYEFGYSSATTMGGSAGAVSGGLGTLGISSPXFLKSGTXGGDEKPSGGY

SEQ ID NO: 257989 - protein, 140 aa, Zea mays
  unsure (1)..(140): unsure at all Xaa locations
  Clone ID: MRT4577_166874C.1.pep
MASSVRAPSGSVIAVASSSSSAAAAGVCGTGSPCAACKFLRRKCQPDCVFAPYFPPDNPQKFVRVHRVFGASNVTKLMNEIHPLQREDAMNSLAYEADMRIRDPVYXXCVGVISILQHNLRQLQQDLARAKYELXKYQAA

SEQ ID NO: 257990 - protein, 120 aa, Zea mays
  unsure (1)..(120): unsure at all Xaa locations
  Clone ID: MRT4577_166875C.1.pep
SPLQRLSCVRTTRNSFCVAVNGFPCKDPMGVTPDYFFNAEMIXSXRSDTNNKVASNGTNVNVDSFPELNTMLISLAHIDYAPLGKNPAHIHPRVTEMITEVEDTLYLXFITYNPNRLFLK

SEQ ID NO: 257991 - protein, 47 aa, Zea mays
  Clone ID: MRT4577_166876C.1.pep
KYQASYATGLKAHMHALKTSERKDKKKTADAEKAIETARKKQNEAAS

SEQ ID NO: 257992 - protein, 270 aa, Zea mays
  Clone ID: MRT4577_166877C.1.pep
MASSVRAPSGSVIAVASSSSSAALAGVCGTGSPCAACKFLRRKCQPDCVFAPYFPPDNPQKFVRVHRVFGASNVTKLMNEIHPLQREDAMNSLAYEADMRIRDPVYGCVGVISILQHNLRQLQQDLARAKYELSKYQAAAAAASASTAPTGPQAMAEFIGSAMPNGAAHNFINLGHSAALGSLGGSTAMFGQQEQFGSNAQMLSRSYDGGEPIARIGMNNGGYEFGYSSATTMGGSAGAVSGGLGTLGISSPPFLKSGTAGGDEKPSGGQ

SEQ ID NO: 257993 - protein, 57 aa, Zea mays
  unsure (1)..(57): unsure at all Xaa locations
  Clone ID: MRT4577_166878C.1.pep
TYWDVLWVQLVLLPYTLFLWIKFYARWWYKSSFCXEEYGEEEKIYLIRRNLXLSQGQ

SEQ ID NO: 257994 - protein, 87 aa, Zea mays
  unsure (1)..(87): unsure at all Xaa locations
  Clone ID: MRT4577_166879C.1.pep
VSRVSSRHPLHGSAVVDAAIDLYTNSSLHPQSQVKREEQLDYAQSIISGLKRNAKIVRGEWSCTPVRSTGLSIFTQXXXXXRRSTXX

SEQ ID NO: 257995 - protein, 63 aa, Zea mays
  Clone ID: MRT4577_16687C.1.pep
KEHASSSFSNQYRSGGLCPLNGWSPSFRQKMQSNRRLETKKQRAGGLRGIQGSYGTAGHGRRS

SEQ ID NO: 257996 - protein, 33 aa, Zea mays
  Clone ID: MRT4577_166880C.1.pep
VSTVGAPALHYPDALDGRQHQRLLHGQCVPIYH

SEQ ID NO: 257997 - protein, 67 aa, Zea mays
  Clone ID: MRT4577_166881C.1.pep
EPVTKLLESRYHQIGSGKCEIKVAQTKEVYRQQQQQQKGGIGAAAGGRGGTRGRGRGQGQNWNKDFI

SEQ ID NO: 257998 - protein, 155 aa, Zea mays
  Clone ID: MRT4577_166882C.1.pep
PLGMYAHTMSFFSYSAHIKSSVPDESSLEGIHSCHHSLRLLRFLLMILIATTLFLHKLPASSHLILLDLQSSVFTKILTVDVRGMTPCQHTSAKEMQLVELNILHDIIMMHMINADLSASGYRHQMGKHGTVSSVSSGSMLPTEQCHVFCSKQVM

SEQ ID NO: 257999 - protein, 72 aa, Zea mays
  unsure (1)..(72): unsure at all Xaa locations
  Clone ID: MRT4577_166883C.1.pep
GFIVGAXLIVGGAFCGRPMNTYVAXGPSVVSWSWTPRWISWAGPLMGGGVAGLVSEVVFISHTLEQLPTACY

SEQ ID NO: 258000 - protein, 98 aa, Zea mays
  Clone ID: MRT4577_166884C.1.pep
APKTYFLRGSTGRGPKKMCFPGSPFSGGGCPQGQNRTPPLLGPDPQGLFLVARGRCAKYPKKWGFSPMGSLFLRACNCRKAGVTTTRALGETRGPCPP

SEQ ID NO: 258001 - protein, 227 aa, Zea mays
  unsure (1)..(227): unsure at all Xaa locations
  Clone ID: MRT4577_166885C.1.pep
MAFRRPSCVILGALLAVSFLAATAAACDHGLTVFWGRNKDEGSLGEACDTGIYNTVIISFYSVFGHGKYWGDLSGHPLYGIGADIKQCRGKGIVVLLSIGGGGTQYSLPSSQSAADVADNLWNAHLGGGRRGVFRPFGDAVLDGIDFFIDQGAPDHYDELDTGLFERIHVRFYGEDRCSYNHVYKDXVXAQWSKWXTARYPREQXVYIGLPARTXAGEERQGRPAVD

SEQ ID NO: 258002 - protein, 87 aa, Zea mays
  Clone ID: MRT4577_166886C.1.pep
SFSFFKVLKQVPPAFGILSKAMSLMNSFINDIFEKLASKAPKFARFNKKPPIPSREIQILVGLVLPGELPKHPVSEGPKAVSKFSSS

SEQ ID NO: 258003 - protein, 255 aa, Zea mays
  unsure (1)..(255): unsure at all Xaa locations
  Clone ID: MRT4577_166887C.1.pep
MAFRRPSCVILGALLAVSFLAATAAACDHGLTVFWGRNKDEGSLGEACDTGIYNTVIISFYSVFGHGKYWGDLSGHPLYGIGADIKQCRGKGIVVLLSIGGGGTQYSLPSSQSAADVADNLWNAHLGGGRRGVFRPFGDAVLDGIDFFIDQGAPDHYDELARRLSGYNRYYRGAPGVRLTATARCVYPDWHVQRALDTGLFERIHVRFYGEDRCSYNHVYKERVMAQWSKWXTARYPRSKVYIGLPAANGAGRND

SEQ ID NO: 258004 - protein, 321 aa, Zea mays
  unsure (1)..(321): unsure at all Xaa locations
  Clone ID: MRT4577_166888C.1.pep
AGTKKSPLCFPSSLLPWRRAPALVSLTPAVSRHPHLLFCSPCPPPRHIRFAPPTATPASDGNGLGLGPGPGVFLSPRALSQLDELAAFRYEHAFPHGLLTVRALSRGPDDDAVAEALVRLLASSFSETVRWAPAQRYAQLLTFVIRRYLHDRRGLAPHAAVLVGFYRPADAGAGADNANAAPEDDEGEXGDEGXMACTAGGVRLTRVGAPGGPXPTPTPPLNFPYICNMTVKTPLRRRGIGKQLLKACEDLVFKMNAKRRVYLHCRIIDQVPFNMYTKAGYSIVQTDSILVWLSLQKRKYLMSKELPQASVVSETSTKNFE

SEQ ID NO: 258005 - protein, 220 aa, Zea mays
  Clone ID: MRT4577_166889C.1.pep
MAFRRPSCVLLGVLLAVSFLAATAAAGDHGLTVFWGRNKDEGSLGEACDTGIYNTVIISFYSVFGHGRYWGDLSGHPLYGIGADIKHCRGKGIVVLLSIGGGGTQYSLPTSQSAADVADNLWNAHLGGGRPGVFRPFGDAVVDGIDFFIDQGAPDHYDELARRLSGYNKYYRGAPGVRLTATPRCVYPDWHVQRALDTGLFERIHVRFYGDDRCSYNHVH

SEQ ID NO: 258006 - protein, 95 aa, Zea mays
  Clone ID: MRT4577_16688C.1.pep
PGEKKPLFSPNLWPIVLPLWAHNKKKDLWGLLGPWAPPPGEGLFDQVSKVSRHPFQGIVPPKKGGGFHSPPILGVRGEWFLYVKTPEFQGALTPP

SEQ ID NO: 258007 - protein, 639 aa, Zea mays
  unsure (1)..(639): unsure at all Xaa locations
  Clone ID: MRT4577_166890C.1.pep
ELKKKGSEFDPMAVAYWKPGEPVPFLFLARALDLISNESGRIVITEILSNVFRTVMATTPDDLLATVYLSANRIAPPHEGIELGIGDASVIRALAEAYGRKEEHVKKDLKELGDLGLVAKASRSSQKMMFKPKPLTIARVLSTFRTIAKESGKDSQDQKRNHMKGLLVAATDCEPQPMVYLLQSKMRIGLAEKTVQMALGQAAVYADKNPLPPKVQSPFEEAAKIIKQAYSVLPIYDKIVPAILEVGVWKLPETCKFSIGVPVGPMLAKATKSVSEIIDKFQGLEYTCEYKYDGERAQIHCMEDGSVEIYSRNXAEXNTXKXYPDVVDAVSRFRKATVKSFVLDCEIVAYDREKQKILPFQILSTRALRGVTINDIKVSVCTFGFDILYINGKPLLQEQLKIRREHLYNSFEEVPGVFKLATAITSNDLEEIQKFLDTAVNSSCEGLIIKTLDKDATYEPAKRSNNWLKLKKDYMDSIGDSLDLVPIAAFYGRGKRTGVFGSFLLACYDEQNEEYQTICNIGTGFSEQQLEERSASLRSKVIEKPKAYYRFGDTMNPDVWFEPSEVWEVKAADLSISPVHRAANGIVDPNKGISLRFPRLLRLRDDKSPEQATTSDQVADMYRSQKINHGYNQEDEDDD

SEQ ID NO: 258008 - protein, 229 aa, Zea mays
  Clone ID: MRT4577_166891C.1.pep
MAFRRPSCVVAGALLAVSFLAATATAGDHGLTVFWGRNKDEGSLREACDTGIYNTVIISFYSVFGHGRYWGDLSGHPLYGIGADIKHCRGKGIVVLLSIGGGGTQYSLPSSQSAADVADNLWNAHLGGGRPGVFRPFGDAVVDGIDFFIDQGAPDHYDELARRLSGYNRYYRGAPGVRLTATPRCVYPDWHVQRALDTGLFERIHVRFYRDDRCSYNHVHKDGLMAQWS

SEQ ID NO: 258009 - protein, 184 aa, Zea mays
  unsure (1)..(184): unsure at all Xaa locations
  Clone ID: MRT4577_166892C.1.pep
IAAFYGRGKRTGVFGSFLLACYDEQNEEYQTICNIGTGFSEQQLEERSASLRSKVIEKPKAYYRFGDTMNPDVWFEPSEVWEVKAADLSISPVHRAANGIVDPNKVCSSFLHCHSSPSRLYTSGIVCWKANAEIEXGISLKFPPLLRLRDDKSPEQAPTFDQVVDMYRSQKITPGYTQEDEADA

SEQ ID NO: 258010 - protein, 221 aa, Zea mays
  Clone ID: MRT4577_166893C.1.pep
MNALRSLTHSTRLAHTHLARRTFTSSAAAMSNLKPLQLYTAATPNGQKVSVFLEELKAAYGKNFPGVEVHAIDIGSKDEPQKQPEFLKINPNGRIPALVDPNHDDFAVFESAAILLWLEKNYDSDHLFSWPSSDAQADKYRSEVLQWIFWTHGGQGPMQGQANHFRMRATGDAKDVIPYALNRYINETKRLYSVLETRLEGRDWLVGEGKGKISLADFNAA

SEQ ID NO: 258011 - protein, 655 aa, Zea mays
  Clone ID: MRT4577_166894C.1.pep
MQNVVEVEPGRPAASSRPSVGPTYRSAFARDGFPPPVPGMDSCYDIFRMAVEKYPNNRMLGHREIVDGKAGAYTWKTYKEVFDIANKIGNSIRSCGLAKGSRCGIYGANCPEWIITMEACNAHGIYCVPLYDTLGAGAVEFILCHAEVEIAFAEEKKIDLLVKTLPKSNEFLKTIVSFGKVTQEQKGEVQKYGLSIYSWDEFLSLAADQEFDLPVKEKADICTIMYTSGTTGDPKGVLISNASIICLIAGVDRLLNYVNEELAESDVYMSYLPLAHIFDRVVEELFIFHGASIGFWQGDVKLLVEDIGVLKPTIMCAVPRVLDRIFSGLQAKISSGGFLKSTMFNLAYKFKQFRMMRGAKHNEAASICDKVVFSKVKEGLGGNVRVILSGAAPLATHVEEYLRVVTCAHVVQGYGLTETCAGSFVSLPNQMSMIGTVGPPVPNIDVRLESVPEMGYDALASKPRGEICIRGETLFSGYYKREDLTKEVLIDGWFHTGDIGEWQPDGSMKIIDRKKNIFKLSQGEYVAVENLENVYGLVSAIDSIWIYGNSFESFLVAVVNPNKEVLESWAAANGISGDFESLCNNPRTKEYILGELSRIGKEKRLKGFEFVKDVHLEPVPFDMDRDLITPTYKKKRPQLLKYYQGVIDNMYKSAK

SEQ ID NO: 258012 - protein, 93 aa, Zea mays
  unsure (1)..(93): unsure at all Xaa locations
  Clone ID: MRT4577_166895C.1.pep
KGSMNISFLIFFNLQTSALIPLKVEFQTFTFRCPPADPNMMRCGGGGAFIACXHSPFLVSHPLQIMSEVLVSDLCPGRTPKSPAWCRLIFCWF

SEQ ID NO: 258013 - protein, 82 aa, Zea mays
  unsure (1)..(82): unsure at all Xaa locations
  Clone ID: MRT4577_166896C.1.pep
SAAALPPFSPPPFFFFKQAKKKRAXAKIKPKTSIPHLKLSRDKTQSIYMKTNINTKILFDKGHTYSINQRNIQGPPNKKSPT

SEQ ID NO: 258014 - protein, 76 aa, Zea mays
  Clone ID: MRT4577_166897C.1.pep
QKTIFKYRILEVLDTPHDTFFLLRPSAREARIDCGESCFTKNKAKELDQVGDRSMLPIRLRMLPTPWCVKIPVQTS

SEQ ID NO: 258015 - protein, 67 aa, Zea mays
  Clone ID: MRT4577_166898C.1.pep
SYGDGSSRLWEGPLLVLMYSVVMLVDSMMSAVFYFTCRSSNLDFLDEQGGSVEELEMMRAGSLDAFR

SEQ ID NO: 258016 - protein, 550 aa, Zea mays
  Clone ID: MRT4577_166899C.1.pep
MAAPPPAPFLLLLLAVAAASLAGADDPYRYFTWTVTYGPISPLGTTQQGILINGQFPGPRIDCVTNDNLVVNVVNSLDEPFLLTWNGVKQRKNSWQDGVAGTNCGIPPGANYTYRFQAKDQIGTFFYFPSLALHRAAGGFGALNVYQRPAIPVPYPPPAGDFTLLVGDWYAAASPHADLRRALDDGGGGALPPPAALLINGAAASGAAPFVGAQGGTYLFRVSNIGLRASVNVRVQGHALRLVEVEGTHPVQSAYDSLDVHAGQSLAFLVTLDQAPLDYAVVASTRFAAAELTAVATLHYAGATARAPGPLPPAPPPGYGWSLGQARSFRWNLTASAARPNPQGSFHYGAIPTSRTLVLASSASLDGAGRRRCAVNAVSFVVPDTPLKLADRYDIAGVIDWDGLPARLDGAAAAAVLRAGTPVLRLGLHEFVEVVFQNTEEELQSWHLDGYDFWVVGYGDGQWNETQRQTYNLVDAQARHTVQVYPNGWSAILVSLDNQGMWNLRSAMWDRQYLGQQLYLRVWTPEQSLSNEYAIPANAILCGKAAALPH

SEQ ID NO: 258017 - protein, 81 aa, Zea mays
  Clone ID: MRT4577_16689C.1.pep
KPKSGASQSLVTSPKHNKPNIIPKLPSLLTKNAPHFYQSRTFNHTPHYHFCGQAHTSLRTFKLLNFPTTTILLTQRINQYL

SEQ ID NO: 258018 - protein, 162 aa, Zea mays
  unsure (1)..(162): unsure at all Xaa locations
  Clone ID: MRT4577_1668C.1.pep
IQHVAAFSGNASQGGTTYVHCKAGRGRSTTIVLCYLXMNCICSCNSVRMLLFNFLIILVLQIKYRNMTPEAALDHVRSIRPRVLLAPSQWHAVSSFGALTAGQLPVRSTNLXCFLEAIEAGCRNTGNDDYHVMEFDCEDSGLXLYQIMLXRXAAPXSGCTDA

SEQ ID NO: 258019 - protein, 113 aa, Zea mays
  unsure (1)..(113): unsure at all Xaa locations
  Clone ID: MRT4577_166900C.1.pep
AYARPFDDFKLLQLYSNTPSDFDLKLERSAQECDSLSDXGAHLPTNVGIGSPVIHGKLADHGGIYELLDKAHVPLAGTPSKECHRSCDKHNAWLELNAQGLLAGPNFVVEKDK

SEQ ID NO: 258020 - protein, 71 aa, Zea mays
  Clone ID: MRT4577_166901C.1.pep
TSWDTITYPYNTPAVAGKHRERTHSSDYKLNGRHGKQQMPGAQSYEKCYTRSSTGDRRMAAHKEASYKTTP

SEQ ID NO: 258021 - protein, 59 aa, Zea mays
  unsure (1)..(59): unsure at all Xaa locations
  Clone ID: MRT4577_166902C.1.pep
WLLVVAGGNNAGCRADRAASTADLAIPGPPPRFFINKWSXKPPPKHQDGVWLYILPLRI

SEQ ID NO: 258022 - protein, 88 aa, Zea mays
  Clone ID: MRT4577_166903C.1.pep
PQKRILLHPSPGGFLNPCGGNSVLKNLFPGGPLIGWPFGPQQFFNPNFPVKWGVCVELARGNLENSPVKNKAVVKAQRTVIGDPAKGY

SEQ ID NO: 258023 - protein, 76 aa, Zea mays
  Clone ID: MRT4577_166904C.1.pep
ANKMGSGGAILYRLMCTNRDRSILWSAFHQWEEANIIVVLRSLRAESPRHVYHDGHQHGGHHVILNVILPERAPCI

SEQ ID NO: 258024 - protein, 99 aa, Zea mays
  Clone ID: MRT4577_166905C.1.pep
PRVRPRVRTLVLPYYVPWARCAAIRLRETNVDRITQTSMVPDCIMPSQAINLLVCSNLYVITAPTCIKTVCKAVASILGVKPSLTSSTMPYIKSMAAGL

SEQ ID NO: 258025 - protein, 101 aa, Zea mays
  Clone ID: MRT4577_166906C.1.pep
PGGTTSTRRTQKNDPWEHLESPPPEQQDSDSDGSSEVPGPKRTPKYAPRPRGAVVEREPAKTQRKQQRAAGPGLKRRPVYLPPREADLPSPPAARKAKSRS

SEQ ID NO: 258026 - protein, 83 aa, Zea mays
  Clone ID: MRT4577_166907C.1.pep
NKISEAYINKIADKTNPILTKQARKFAGSVTTDNTSANSSVTSPVPVNSGTHTIFTTTTASRHRFPILCQPQPQGRKAPVPPN

SEQ ID NO: 258027 - protein, 88 aa, Zea mays
  unsure (1)..(88): unsure at all Xaa locations
  Clone ID: MRT4577_166908C.1.pep
RAPQKTRDPCPNTGARVWSKVPAGKAPRSAXRRLGAHEGRLQNYVCVSGHLHGNCWLARLTSSGGDRDPDSDDDASTEGGSDGAHVAP

SEQ ID NO: 258028 - protein, 66 aa, Zea mays
  Clone ID: MRT4577_166909C.1.pep
GVAAASQREIEERTKRVNWQKLRSRKRNRLIPSFPTFEEEESSPKKNKEDENDIDMLSRSDSEAEP

SEQ ID NO: 258029 - protein, 83 aa, Zea mays
  unsure (1)..(83): unsure at all Xaa locations
  Clone ID: MRT4577_16690C.1.pep
LFVSSLKKYLQNLPAVLEPEKADXFKKGVEGATQFFLSQLKAPPFFVGEPLKDYASVGFPHYKDGAPNPPFPYFFHGLKETQC

SEQ ID NO: 258030 - protein, 66 aa, Zea mays
  unsure (1)..(66): unsure at all Xaa locations
  Clone ID: MRT4577_166910C.1.pep
TLPGGPLRGGSINPARSLGPPVPGGDFPENWVYWVGPLVGGGLPGLVXGKVFIGGSSHQVGDQGYP

SEQ ID NO: 258031 - protein, 141 aa, Zea mays
  Clone ID: MRT4577_166911C.1.pep
GVFFFPGGGSPSRGSPFGGGFYPKSLKAFLRLKSQMAPPGFVPPIFQGWGLNWAPGSAPLWFFLLGGGFLGGVLRGPPPQEGFQFRGWVPPVVFSPIIPARVVFLFTRFWPSLPLFFFRGGPAPRPFPNPRRGPRPSFAPG

SEQ ID NO: 258032 - protein, 45 aa, Zea mays
  Clone ID: MRT4577_166912C.1.pep
CGRKQASRMVKGLTGHHVTLYFRCTNLAYMRYKSNQYKTTSIIKI

SEQ ID NO: 258033 - protein, 87 aa, Zea mays
  Clone ID: MRT4577_166913C.1.pep
LSDKSCLFCLEDESIYHLFFECYSLRFFLFVAANKKKRRKYIAKRMWNVINNLLNWNVGEDLEYVLLFYGLWKTRNALCFQGKMGDV

SEQ ID NO: 258034 - protein, 73 aa, Zea mays
  Clone ID: MRT4577_166914C.1.pep
NKTSCKTILSRSCTIFHSGIVLFCLVLTHLCWRLQLFVCYKHQHFERMTLKDSQRCQINCSPALKYFPLRANG

SEQ ID NO: 258035 - protein, 89 aa, Zea mays
  Clone ID: MRT4577_166915C.1.pep
QPPRFYCQQKNPKGNNPARTDTWEAKGDHPFKGGKPRSTIKNPKPTPNPPPQSWRWPHYYSPAGKNNKRVTLIKRARLFLRPFPQAQFC

SEQ ID NO: 258036 - protein, 60 aa, Zea mays
  Clone ID: MRT4577_166916C.1.pep
ARRWEVLAKFWTELVRFRAPWSNVGIRGEMVGAGGEFMTQLWALLCHAGVLERPPIMQRQ

SEQ ID NO: 258037 - protein, 46 aa, Zea mays
  Clone ID: MRT4577_166917C.1.pep
SWLPVNLWLRPFFGWLGPHSMGLVFNKICGANPFFWSRFTGAFCLS

SEQ ID NO: 258038 - protein, 45 aa, Zea mays
  Clone ID: MRT4577_166918C.1.pep
SYTIFLRRTAMPIIFASSKRHRITIRLDYLKEPVGNYRFVPGARP

SEQ ID NO: 258039 - protein, 203 aa, Zea mays
  unsure (1)..(203): unsure at all Xaa locations
  Clone ID: MRT4577_166919C.1.pep
MASLEAAETSPPSTPTTSASPCPTPRPLATAPPTMGAALLRAARSGDERQLVKALLADPAAPDLETAATAGGNTLLHVAAAGGHVDLALLLLRRAPRLLTARNAALDTPLHLAARAGAHKVVALLAASSSSSSSSPACSLRALTRATNRRGETALHDAVRXGHEAAARALATADPGLGGMCGGAGRRRFTCVGGWVLDAAHAL

SEQ ID NO: 258040 - protein, 128 aa, Zea mays
  Clone ID: MRT4577_16691C.1.pep
GRGGGNPPRGGFGNFGPSLGGIKKVPCLPPPGKFWAPPSLTKRKGFFGPKVGFSPARGAPLIPPQTPFFFNFRGPFCWAPQKVKKNSRLAKKKKKKKKKKKKKKKKKKKKKKKKKKKGKQARGGGPGT

SEQ ID NO: 258041 - protein, 66 aa, Zea mays
  Clone ID: MRT4577_166920C.1.pep
ESSFSGLCYKGTCLSIMGWQLGPLTSLAASACCPRGSSFSRRSLRGWSILAAYPRGLVLALGFASG

SEQ ID NO: 258042 - protein, 125 aa, Zea mays
  Clone ID: MRT4577_166921C.1.pep
DQEKTSENSSVIQSKLSTPFPKLSFHSFFLLPVAKGALICLAGEATGGLRSIGVSAGDSFLLPSLSLRRRPCCAGPARACSGVGTEGGGRSGCASKLCSLLRSRHRALVVVAGPRPQSQSSGALL

SEQ ID NO: 258043 - protein, 74 aa, Zea mays
  Clone ID: MRT4577_166922C.1.pep
ISWHHIVMSLDWSKKFPLHQSPLWNFQNRQGSNCSYIYKTNYLDLLGLLQRIGSTLDYIGITEVIKYLGITGRV

SEQ ID NO: 258044 - protein, 73 aa, Zea mays
  Clone ID: MRT4577_166923C.1.pep
LNSLSGSLSMNTEKRAFNYTRLFGLFLGRGPTTGAGSFSSTGTGGSFSFGSSSASLMASSSSPGPSSSAGNFS

SEQ ID NO: 258045 - protein, 127 aa, Zea mays
  Clone ID: MRT4577_166924C.1.pep
RALNVRRKLYSDDKTMNADHELTEQTGSCQHSDCDMLTRRVYELHPERNDHCKFCATRGRPEAINIVSALADTCDYPLQTKCMLCLLLGHNYNGYFVLNHYFDFFIDHLVDAEHSSTPRITTHRKLT

SEQ ID NO: 258046 - protein, 84 aa, Zea mays
  Clone ID: MRT4577_166925C.1.pep
GTELASKFLLPPLITPPVSTNHVNNLHHRQLNLTPRSSKRRTGTTTTKKKNERSLGQRRRAGAAPAHGAGVGSKPGPFLLASAG

SEQ ID NO: 258047 - protein, 100 aa, Zea mays
  unsure (1)..(100): unsure at all Xaa locations
  Clone ID: MRT4577_166926C.1.pep
MALSVAAAASTFLGTRLADPAPQNXGASVARFGFGLGGKAKPASFLRGEDXTSSDRPLWFPRAVAPDYLDGSLVGDYRLYPVSLWKPREYLHFEVDSLDQ

SEQ ID NO: 258048 - protein, 64 aa, Zea mays
  Clone ID: MRT4577_166927C.1.pep
RAKGRVVQSPAAETICVKGTGIPSRSFDLSSHQVVLGILTSGNLCSGLKYCLNWWVKYAGLSGL

SEQ ID NO: 258049 - protein, 79 aa, Zea mays
  Clone ID: MRT4577_166928C.1.pep
FMCLDALSFKRVRARKEPYRKKTPRHGRSHRRKRVTYPAVHSSQFIIILSQLGRGTLRLVYHRSCGEVAVVGDGPSHRT

SEQ ID NO: 258050 - protein, 49 aa, Zea mays
  Clone ID: MRT4577_166929C.1.pep
LLGLWCLEALRVSKGYLASCLCLVVLVRLKKIRLILYFGQNQAWASFWT

SEQ ID NO: 258051 - protein, 78 aa, Zea mays
  Clone ID: MRT4577_16692C.1.pep
TCNSRSYSQQQHVRPFSQPANMSPSAFLTQQELNPLDVPAMPKAGTLLQMQQLLPINPLVLPNPTVFDPQPIIGGALF

SEQ ID NO: 258052 - protein, 121 aa, Zea mays
  unsure (1)..(121): unsure at all Xaa locations
  Clone ID: MRT4577_166930C.1.pep
MVWTFDSKGIYSSQLADCTTTPICLETATTDMLEMITKAGNNSQMATDIDDLLRDHDDITVVFNESEMNILPIHDDHGSVDARSQDDLYFLLKIAXLIKLHMQRNQNHNDSRLRLVLRETY

SEQ ID NO: 258053 - protein, 96 aa, Zea mays
  Clone ID: MRT4577_166931C.1.pep
TAGSFHPLASKQASTGCQCLSPLPPPPAGTPDLLPFFTNWQQGLQLQLLEQHSASLPVPVLKERRGQLARDWDWERARAGAADERNATDEPSAVCL

SEQ ID NO: 258054 - protein, 57 aa, Zea mays
  Clone ID: MRT4577_166932C.1.pep
NRGNPSPWVLPEVPPKIEMSSSHEDGSSGKKIIGEMEVDMASLIMGNAFGFVFATFL

SEQ ID NO: 258055 - protein, 65 aa, Zea mays
  Clone ID: MRT4577_166933C.1.pep
IHYRSHHLKKWLPPQTKKKKKLLWEKKKPRPGGTKLPLGVCPFFLCPPSLKKKGKTIILTQIKQP

SEQ ID NO: 258056 - protein, 58 aa, Zea mays
  Clone ID: MRT4577_166934C.1.pep
HLYFFLHTFLLHSMLHMIYARFIISKKLLPTVGVFFSNRENTNPLTLSDVDGKNPLLF

SEQ ID NO: 258057 - protein, 168 aa, Zea mays
  unsure (1)..(168): unsure at all Xaa locations
  Clone ID: MRT4577_166935C.1.pep
SQYSSRLPLCSPPXKREQXEHALTAVGSGQTXLGQSAXGAEIATEKKQPGRGEEETPAQKNQAPTPXIGVDYRGKGPDLRVLARKMRKQAQQXYRVYKEHIPVTQLVRETXAEKQECTQSGGVRPLXSIAVRLLGXEXQGPQLYQVXDPSGSYGPWEASAMGKKAGKA

SEQ ID NO: 258058 - protein, 67 aa, Zea mays
  Clone ID: MRT4577_166936C.1.pep
PINTTLCAALHRGDCENPVATQLKLLVQHTPFARWGNIEKRPTPSAFQQMCTLYMESDTRCIGAFNA

SEQ ID NO: 258059 - protein, 101 aa, Zea mays
  Clone ID: MRT4577_166937C.1.pep
TMYRHRYGLLNGQIGKSLPKRPLGTAVNKGTTQKVANWIHNKAASLTLSATINREDLRKTIHSHSQRVAYGKRSRNITSLRHPLDHKRYLHCTTKKLPKLP

SEQ ID NO: 258060 - protein, 51 aa, Zea mays
  Clone ID: MRT4577_166938C.1.pep
MATSAGLSTAGNPTQLYRSRASLGKPVKALGLSMGRERAQRGIARQTYISL

SEQ ID NO: 258061 - protein, 58 aa, Zea mays
  Clone ID: MRT4577_166939C.1.pep
PNILFPYKLFLSIKRVHSGHGSHCHPGGGGTLRYSSPVNKGTSYRELARGSITLWLQA

SEQ ID NO: 258062 - protein, 475 aa, Zea mays
  unsure (1)..(475): unsure at all Xaa locations
  Clone ID: MRT4577_16693C.1.pep
MDAGECSTSKPPQPSAASPSSPTVWARLVPADSACPTVEVAEDDSVVCSLVAPPCGGEEVAWCEIRRNAGDASFATIRNLSLDAIIVDGRIVKQECVGIKPGSEIVSGPQKEGHLIYTFEITEAEDHEKKNVKIVLDIENAKCSICLNLWHDVVTVAPCLHNFCNGCFSEWLRRSSSNSRDKSQSAACPQCRTTVQSVARNHRMRGLLXAILQAFSSLQRSDEEIALLESYASVKSNMVLGQQKNQSRKRRFSRSSDDTDNSDLPCPQCRNEFGGFRCSPGSVHLQCSGCGGMMPARSNISISQKCLGCDKTFCGAYWYSQGVSSSHCNLICNQDTLKSISQRHISALPDTIHGGNPYEKDITERCIQQSGKTLQVVISEWISKFDNMEIDRSRLQLNNVDAITSRTYICNHCYSKFVDFLLYWFRVSLPQNLLPRDAAERESCWYGFMCRTQHHRPDHAKKLNHVCRPTRGNQP

SEQ ID NO: 258063 - protein, 118 aa, Zea mays
  unsure (1)..(118): unsure at all Xaa locations
  Clone ID: MRT4577_166940C.1.pep
RAAALFFFFFFFFFFFFFFFVFFFWRRRHHPTRCLYFILSYLTIFLTKKLKALKFKLFNGRSFQFDVCNVVMVARNTKXLGMIKNPEKPKGIFEVIHLLLGTFCMLCLAFSYLLYKKT

SEQ ID NO: 258064 - protein, 81 aa, Zea mays
  Clone ID: MRT4577_166941C.1.pep
TDDRIQNMRVWTNHDSHLNMIQHYAQHETALHSWPCQTTTITMGTETLRPSIADSSHGPSHYPASRLTPHLARALASGQPD

SEQ ID NO: 258065 - protein, 65 aa, Zea mays
  Clone ID: MRT4577_166942C.1.pep
MYPVTWVGGPTVSRNPCNPGALVTVKIVGLFPWPGFQATLVLPQQAFATIGNLGPGKVVFDSSQG

SEQ ID NO: 258066 - protein, 79 aa, Zea mays
  Clone ID: MRT4577_166943C.1.pep
GWPIKTQWNSSRVCFLALPSLCISCHEMFSGFHVYLSWGPPILFFLWELRDNSSKVQTSEKFVFSGQFAKFMLFGPPLI

SEQ ID NO: 258067 - protein, 150 aa, Zea mays
  unsure (1)..(150): unsure at all Xaa locations
  Clone ID: MRT4577_166944C.1.pep
MAPIAEKKPAPNKTKEEXPRCDNAPAGNNPNADNRFPAVKSAAKEGGADERMKIKVKKIVETXHIYIFWVLKQEHPYIGISSKAMSIMNSFINDIFEKLAAEAAKLARYNKKPTITSREIQTSVRLVLPGELAKHAVSEGTKAVTKFTSA

SEQ ID NO: 258068 - protein, 126 aa, Zea mays
  Clone ID: MRT4577_166945C.1.pep
MGNCTASQRAAESWADDGEWEEAASSSPLSSEGDHHHHHHHHHHRDERREEHHDSEVTIRITKRQLHELMEKNGGGGGHGLPLPGRRRSSAEQLLADIMDSGEVHHRDHHWHWKPALQSIPETVES

SEQ ID NO: 258069 - protein, 56 aa, Zea mays
  Clone ID: MRT4577_166946C.1.pep
SWIKASHVAPERKKSRSTDRFRLSSHSRRIPSQCCFPDRMSAAVHSIPTWGSSTFS

SEQ ID NO: 258070 - protein, 36 aa, Zea mays
  Clone ID: MRT4577_166947C.1.pep
SIDGFNLCFRLFMHLYNRFGTGMSYLFSLFQNVGCP

SEQ ID NO: 258071 - protein, 205 aa, Zea mays
  Clone ID: MRT4577_166948C.1.pep
MATSLGLNPEDLFTSYSSSYYSSPPFMSDYAASFTPAAGDSTAFSSELDDLHHFDYSPAPIVTAAGAGAGGGDRNEKMMWCEGGGDERRLRSNGRIGFRTRSEVEILDDGFKWRKYGKKAVKNSPNPRNYYRCSSEGCGVKKRVERDRDDPRYVITTYDGVHNHASPGAAAIIVPYGSGGGNSGFYSPPHSGSPSATSYSGSLAF

SEQ ID NO: 258072 - protein, 350 aa, Zea mays
  Clone ID: MRT4577_166949C.1.pep
MAMEDAASESSDWEVLSATSACGGGDDDEVLIVSGGGGDVVLDHFALTPDTAAACPGDGEGSWSDDRGAWQGLELLDGFDPIPEVRFNLAAGVWNQPLLISGVDDAREGARGATRSADGNQEEVVDAEIQQESNSVFSRGELRPVLQPAYHGVGETLDSDAATRTGASLQGEVSESSLVRLDGGIGTGVERSCLEDAVSSDEIHGEQEEQEQGSNVNAATGCDEPDGEVKDDALPLAHTAGTEEGEKQFVVWWKLPFKLLHYCAWKVKPVWSFSIAAALLGLVVLGRRMYRMKRKARGLPQIKIAFDDKRASQFADRAAYLKEAFLVARRVPMLRTSSGATLPWSMVQER

SEQ ID NO: 258073 - protein, 79 aa, Zea mays
  unsure (1)..(79): unsure at all Xaa locations
  Clone ID: MRT4577_16694C.1.pep
LSSRTNRLIHHLSMNSHKCNQSRDVCIRTISYEENPSTNYGFVNLLSTHLSSTITHPRTEPXKRGGVARTSEFRPGYRQ

SEQ ID NO: 258074 - protein, 62 aa, Zea mays
  Clone ID: MRT4577_166950C.1.pep
SAQGYRAPHGSSVSVSVGEAPAPYRVAGQAVTCSRQGRALHQGVHCRAGTARHAIPSVCRVP

SEQ ID NO: 258075 - protein, 421 aa, Zea mays
  unsure (1)..(421): unsure at all Xaa locations
  Clone ID: MRT4577_166951C.1.pep
MDCSSAATGDHYDCGAAWTTANYRLQPRVTRWKAKRRRWLHQNPGFPSRDARGGPRVLLVTASPQGPCGSPDGDRFLLRATKNRLDYCRLHGVDMVHATARLEDPELRSAGYGDGWAKLALLRRLMLAHPEVEWLWWLDVGALVTDMGFELPLARYEGAHLVVRGDSYQLFQRRAWDAASTASFLLRNXSALVHLLITEKERWMDRVYLENQYYLHGVWTALVXHEKAMEKHHLGYGDDRWPFVTNFAGCNPCDGGKNRSDEYPMDRCASGMERAFNFADNQNTKPPTTTCIASAKIVFASGARQIWVSLFVRYLHLHGPEAYCTSHYYNDNKMQLGAKAMVSKERCERRREEVASAGVGCERHQRLARILSMTLEHLVHSAGSGCEVVKSGMFRGEVRAKAAANGATEKTFLRPSVGSFP

SEQ ID NO: 258076 - protein, 355 aa, Zea mays
  Clone ID: MRT4577_166952C.1.pep
MVSAVLRTILVTGGAGYIGSHTVLQLLQQGFRVVVVDNLDNASEAALARVAELAGHDGANLVFHKVDLRDRHALVDIFSSHRFEAVIHFAGLKAVGESVHKPLLYYDNNLVGTITLLEVMAANGCKKLVFSSSATVYGWPKEVPCTEEFPLCATNPYGRTKLVIEDICRDVHRSDPDWKIILLRYFNPVGAHPSGYIGEDPCGVPNNLMPYVQQVAVGRLPHLTVYGTDYSTKDGTGVRDYIHVVDLADGHIAALRKLYEDSDKIGCEVYNLGTGKGTSVLEMVAAFEKASGKKIPLVFAGRRPGDAEIVYAATAKAEKELKWKAKYGIEEMCRDLWNWASKNPYGYAGSRDNSK

SEQ ID NO: 258077 - protein, 129 aa, Zea mays
  Clone ID: MRT4577_166953C.1.pep
MEIQHHRGLGNSKVVKVQSEEAWDLFTDQASNEGRPVVAHFGASWCVTSLSMNYKFEELAQTHPEVLFLYVDVDDVQSVSSRYGVKAMPTFFLIKSKEVVGKIVGANPDEVKKLVDASAEPLETQIVVE

SEQ ID NO: 258078 - protein, 145 aa, Zea mays
  unsure (1)..(145): unsure at all Xaa locations
  Clone ID: MRT4577_166954C.1.pep
MCKIKMPVPSLFRRRSSKPPXMSKRLPRTTFTTEVPLVILLRSEEEMTRVFRKLXSNVDGRISRLQLRTLFESLHHXATDDEGQSMMDERNEDDDGFINLTEFAGLNGMETGDYCYYEEILRHTFLFFDAHGSGLIIDLVLLRNS

SEQ ID NO: 258079 - protein, 89 aa, Zea mays
  unsure (1)..(89): unsure at all Xaa locations
  Clone ID: MRT4577_166955C.1.pep
VIRPNVXHGHQHVMQQRPQXSKQAQXXEDXXLAATAGPGLLMGMPVXGXAAIPVTXXLAXATVXLAGXIFLXXPPPSLLXAHTETVXXR

SEQ ID NO: 258080 - protein, 67 aa, Zea mays
  unsure (1)..(67): unsure at all Xaa locations
  Clone ID: MRT4577_166956C.1.pep
KKVPPWVGKVKSLFKELYLKAVFPEAENGSFQKLVPGIXPRPAFGFKKXLESFWAKIFKRRKWGGFG

SEQ ID NO: 258081 - protein, 55 aa, Zea mays
  Clone ID: MRT4577_166957C.1.pep
RCCSSRPVPTASAAASRAAARCRPRLVREFVQRIWPALSHTALTKARRAARQSGC

SEQ ID NO: 258082 - protein, 70 aa, Zea mays
  unsure (1)..(70): unsure at all Xaa locations
  Clone ID: MRT4577_166958C.1.pep
LESDGPNMTENGLEDESRPQRRNRSRRRRNRGNRTDGSISGDRQPVTVADYXSRAESQSRQRPTLERTKP

SEQ ID NO: 258083 - protein, 103 aa, Zea mays
  Clone ID: MRT4577_166959C.1.pep
LEGAERRSTLGTPARPPADLGRQPVGAGGMSSWTSVRPTLLGPANNYGEPLLYCKAAYATYTRFGWMASSALEMHALYRDVYLLALAHPHSHSGPPNDGVILL

SEQ ID NO: 258084 - protein, 90 aa, Zea mays
  unsure (1)..(90): unsure at all Xaa locations
  Clone ID: MRT4577_16695C.1.pep
LXRTXLXTYNIYNXYLIHWXLLTYKSLPSYNXNNXFPYNHFSLMNPALLCHQPIFLFSIFYITYYNYSIMVPSYPHLFPINNQFFSFIFY

SEQ ID NO: 258085 - protein, 77 aa, Zea mays
  Clone ID: MRT4577_166960C.1.pep
VSNWFHRAPALLFITWRRNRRRWREDRIRRPLIAEWGYLMARLVGKEKRRAWAAAINGVQEETLAAFQWGRRVTSSA

SEQ ID NO: 258086 - protein, 57 aa, Zea mays
  Clone ID: MRT4577_166962C.1.pep
HLIFVDPACIGAIWQDRALCTLVYKISAHIMLGMDPHPITKQQKYTMALSVNSKAWC

SEQ ID NO: 258087 - protein, 158 aa, Zea mays
  Clone ID: MRT4577_166963C.1.pep
LHRANGVQGRPYRSAVSIRSIFSWHSWGNPQLVASTRPQRRQYRRCRGVCLLRDLKLAMYTFRHDNFQLRYQQVVHIYFLGYLREWYHRTWQIAVKSSQSKSRLSGSASWDQRSQQQDCQSRSSWVTHRIPTPVPRPEGKRSYKRHGQFLYLFGQPLL

SEQ ID NO: 258088 - protein, 76 aa, Zea mays
  Clone ID: MRT4577_166964C.1.pep
CLHGLHSCQHDRVPRRRRWLESFHTDMTTGTRRSCLHLFFCTPHSEWPFLEGNIDRRWLLLLNKHKGGHAENKEVL

SEQ ID NO: 258089 - protein, 117 aa, Zea mays
  Clone ID: MRT4577_166965C.1.pep
ARRGKKEQTKTPTRVNPRKAKKAHRGPRKGRPGGQATQGRRRGPRGHMHTSRGSEDPGGPRGRYGAFVPRTPVNRSRISRPSPPPKGPKETKGHKDQKSTPTGPTGPPGPPWGPEST

SEQ ID NO: 258090 - protein, 68 aa, Zea mays
  Clone ID: MRT4577_166966C.1.pep
PCSLRSISKRIKHIYKLYVNTKHAHNHMQCNAFSCSNDNAAGSAGGVVASHRSSASALSALPRQGHRR

SEQ ID NO: 258091 - protein, 108 aa, Zea mays
  Clone ID: MRT4577_166967C.1.pep
MRLMSFIVQIALFVSASDAVQPGWLLKYLRGINAKRIREIQSNLVKYSRHFLYSSPAQPLGPEDLTWRMIAGKLVNIKLQIRRSQRLVKESRSICTCECRVGNTTRML

SEQ ID NO: 258092 - protein, 248 aa, Zea mays
  unsure (1)..(248): unsure at all Xaa locations
  Clone ID: MRT4577_166968C.1.pep
LPAQRCCASRSIAPHPITPTKTGLLRAAHNRRSTPIRGSCFFWRYDVVGAGGDVVQPGPAAASAXAEQEQICYVHCSYCDTILAVGVPCSSLFQTVTVRCGHCSNLLYVNLRALLLPAAAANNQLPPFGQPLLSPTSPHGLLDAEAMSFQAPSXRVLNRRALXSGVTSINNTCGGNTTTSSAMSSMAPPPAKHALQEAQQLPRTAASVNRTSEKRQRVPSAYNRFIKDEIQRIKASNXDITHREAFSA

SEQ ID NO: 258093 - protein, 283 aa, Zea mays
  Clone ID: MRT4577_166969C.1.pep
MAAVEGTTKKKVIIDTDPGIDDAMAIFVALRSPELEVLGLTTTFGNVHTALATRNALHLLEAVGRTDIPVAEGSHVTIKKATKLRIASFVHGSDGLGNQDFPPPATKPIDQSAAAFLVEQANLYPGQVTIVALGPLTNLALAVELDPSFPKKIGQIIILGGAYSVNGNVNPAAEANIFGDPDAADIVFTCGADILAVGLNVTHQVVLTDADREKLEQCDSKYARYICKRMNIYFANKWFYSILKGMCLNDLTTVIAAVCARLLTFILSITGAVTVENKQSLTV

SEQ ID NO: 258094 - protein, 74 aa, Zea mays
  Clone ID: MRT4577_16696C.1.pep
VKIWSKSLYLQIFVGACAPPTLDLASPLPARGGGGTRNGRRGEVEGREERKPDLYTILEENESIAYEPLGQECI

SEQ ID NO: 258095 - protein, 80 aa, Zea mays
  Clone ID: MRT4577_166970C.1.pep
KLNPTTPYPLSNNSYKHHKPHYNHPTYQKSTPTVANQITNNLARPHIGQTKTTSTHNNPPTNHIPIKLQIYLSKTTIHHV

SEQ ID NO: 258096 - protein, 242 aa, Zea mays
  unsure (1)..(242): unsure at all Xaa locations
  Clone ID: MRT4577_166971C.1.pep
TFVLRSFRPQTKFFGLISLVGRADIPVAEGSHVTIKKATKLRIASFVHGSDGLXXNQDFPPPATKPIDQSAAAFLVEQANLYPGQVTIVALGPLTNLALAVELDPAFPEKIGQIIILGGAYSVNGNVNPAAEANIFGDPDAADIEFTCGADILAVGLNVTHQVGLTDADREKLEQCDSKYARYLCKLMDVYFDYHRDAYFIKGVAGLYITTVIAAVNPSLLNSFDYVLDWTILMYPQIGANP

SEQ ID NO: 258097 - protein, 325 aa, Zea mays
  Clone ID: MRT4577_166972C.1.pep
MAAVEGTKKKVIIDTDPGIDDAMAIFLALRSPELEVLGLTTTFGNVHTALATRNALHLLEAVGRTDIPVAEGSHVTIKKATKLRIASFVHGSDGLGNQDFPPPATKPVDQSAAAFLVEQANLYPGQVSVVALGPLTNLALAVELDPAFPEKIGQIIILGGAYSVNGNVNPAAEANIFGDPDAADIVFTCGADILAVGLNVTHQVVLTDADREKLEQCDSKYARYLCKLMGVYFDYHRDAYFIKGAYLHDPTTVIAAVNPSLLTYTEGVVRVQTVGITKGLTVFDNTKKRYGEITAWSGMPTVKVAVTVDAPAVVELIVQRLMTDD

SEQ ID NO: 258098 - protein, 326 aa, Zea mays
  Clone ID: MRT4577_166973C.1.pep
MAAVEGTTKKKVIIDTDPGIDDAMAIFVALRSPELEVLGLTTTFGNVHTALATRNALHLLEAVGRTDIPVAEGSHVTIKKATKLRIASFVHGSDGLGNQDFPPPATKPVDQSAAAFLVEQANLYPGQVTIVALGPLTNLALAVELDPSFPKKIGQIIILGGAYSVNGNVNPAAEANIFGDPDAADIVFTCGADILAVGLNVTHQVVLTDADREKLEQCDSKYARYLCKIMGIYFDYHKDAYFIKGVYLHDPTTVIAAVNPSLLTYTEGVVRVQTVGITKGLTVFDNTKKRYGEITAWSGMPTVKVAVTVDAPAVVELMMQRLMTDD

SEQ ID NO: 258099 - protein, 69 aa, Zea mays
  Clone ID: MRT4577_166974C.1.pep
KNTGKLALEHALRTIENILPLSGQEPRAGLYRLPRKGASHYDFRGKFKICESHNTPLSDEEDGMGDTKT

SEQ ID NO: 258100 - protein, 42 aa, Zea mays
  Clone ID: MRT4577_166975C.1.pep
MILVIAVVEFRVYLVCHAVLVTSVCFCSLAIGTSVGAGLLVK

SEQ ID NO: 258101 - protein, 33 aa, Zea mays
  Clone ID: MRT4577_166976C.1.pep
TFGLIYVLVDVQVHLRLAYMCNIPVKKSGSLPK

SEQ ID NO: 258102 - protein, 92 aa, Zea mays
  Clone ID: MRT4577_166977C.1.pep
MFRAQCSLVVDCGFSFTHASPVLQNFTLNYGVRRMDLGGKALTNYLKELVSYRSLNVMDETLLIDDAKEKLCFVSLDVPGGLHVARLSFKDN

SEQ ID NO: 258103 - protein, 174 aa, Zea mays
  Clone ID: MRT4577_166978C.1.pep
MATRVALAPPMGAVASVAVLFVMCAVCISCAGKGILQVGYYNKTCPAAEQIVRNETTVAIGSSPDLAAALLRLHYHDCFVQGCDASVLLDSTPNNTAEKESLPNGSLRGFDVVARVKDQLEKACPGTVSCADILALMARDAVSLARGPSWPVALGRRDGRTSSAASCGDLPPLH

SEQ ID NO: 258104 - protein, 65 aa, Zea mays
  Clone ID: MRT4577_166979C.1.pep
HSASRGRVGSETRRVTISSQLRNEQLPSHPNTASNGYSSDYGLDPTTPTPPQIKEDGSCRHIPTS

SEQ ID NO: 258105 - protein, 44 aa, Zea mays
  Clone ID: MRT4577_16697C.1.pep
LRHVYEIAKLKQADPFCKHISLEALCKSIIGTANSMGIAIVKDL

SEQ ID NO: 258106 - protein, 34 aa, Zea mays
  Clone ID: MRT4577_166980C.1.pep
LDHVKCPTALVRGHLEGVEERHHGERRHRFALGV

SEQ ID NO: 258107 - protein, 170 aa, Zea mays
  Clone ID: MRT4577_166981C.1.pep
MAASSSALILLLAVGLVAGASATSFSITNRCSFTVWPAATPVGGGRQLNRGETWNLDIPGGTSSGRIWGRTGCSFNGNSGRCSTGDCGGALSCTLSGQSPLTLAEFTLGSQDFYDISVIDGYNLPMDFSCSTGVNIQCRDPSCPDAYHQPNDVRTKACSGNRRFNVVFCP

SEQ ID NO: 258108 - protein, 66 aa, Zea mays
  Clone ID: MRT4577_166982C.1.pep
RRELYGNIMTKNYNVFSNISYDICCHPIKFELKYLLVSFVSGWGKQKKGNLNKGLDWINWKIRRVN

SEQ ID NO: 258109 - protein, 478 aa, Zea mays
  unsure (1)..(478): unsure at all Xaa locations
  Clone ID: MRT4577_166983C.1.pep
MAGGGAAYQSSSASPDWLNKGDNAWQMTSATLVGLQSMPGLVILYGSIVKKKWAINSAFMALYAFAAVWLCWVVWAYNMSFGDRLLPFWGKARPALGQRFLVAQSQLTATAVRYRDGSLEAEMLHPFYPAATMVYFQCVFASITVIILAGSLLGRMDIKAWMAFVPLWITFSYTVSAFSLWGGGFLFQWGVIDYSGGYVIHLSSGIAGLTAAYWVGPRSAXNRERFPPNNILLVLAGAGLLWLGWTGFNGGDPYSANIDSSMAVLNTHICASTSLLMWTLLDVFFFGKPSVIGAVQGMITGLVCITPGAGLVQGWAAIVMGILSGSIPWYTMMVLHKKWSFMQRIDDTLGVFHTHAVAGLLGGATTGLFAEPVLCNLFLAIPDSRGAFYGGDGGSQFGKQIAGALFVIGWNIVITSIICVLIGLVLPLRIPDAQLLIGDDAVHGEEAYAIWAEGELNDVTRQDESRHGSVAVGVSQNV

SEQ ID NO: 258110 - protein, 40 aa, Zea mays
  Clone ID: MRT4577_166984C.1.pep
IVLVLSLKETNIILMTHSTNSHNYRIDNNFCLLRNLYYQY

SEQ ID NO: 258111 - protein, 286 aa, Zea mays
  Clone ID: MRT4577_166985C.1.pep
IISRRLNYTLTRTNRTQVVCDVHLAWAFCRTSGAQGSTSTTAARTTTMVRAAQNTGMMTGLDHVDHGHDARPHGAREDMAHTEASTVRCPQPWRRRIGRIRAEQLREIDNQRGRRFDEAAGWDEVDVRSPRRGRQRRLSRGARRGSPSDLGELGWRPGQRDELKARTYRRGSRKIDPTTARRARRPGLVEEHRARPKEKEAGASAWRRRADLGDLLVQTWPRTGAGTAAISREGWAWEEASTGCSAGHHGRWMSRRRCRARNRRWKMWWERGFPGRPRGSQSPIGV

SEQ ID NO: 258112 - protein, 427 aa, Zea mays
  unsure (1)..(427): unsure at all Xaa locations
  Clone ID: MRT4577_166986C.1.pep
MKRRATACGGSLFKRVRRCPSRVISXRLRGAQKGFLEKGFTXRAVVTLSHSLPIDCALSPSSSLRPFAFAXLLYTRSATDAMTSLGHPDRFQSEAALNLAAIFVHLCEMFVGVAPYTSPFRHFFVLVKSGKAKDHLGAYYFHTSAEANDGPALNRKQWRAKPSLSPELLPVLDRIKTLATGGMTSMHVVDDFLKRWVMPLQRRPRLCCWIQRGTGTDLSWEELELLVKGITGESFIPESLILPQDIPALCDDPGLRTAVLAMLPTLDDSSVAVAQRRVSPPPPPPSGPPPPPPPPPSVPPPPPPPGGDLPQGQQQQQQPQQQQQQHSIPPPTPEETEVVFGWRLRSGAEPEAALVPLLRVLSRAHQALHGTEAAILREWEALEAEHQRLSDRRTHLEERTKAVSRQFASERSELERDRKDYKRDLQK

SEQ ID NO: 258113 - protein, 212 aa, Zea mays
  Clone ID: MRT4577_166987C.1.pep
MDMESSVAVVAVPFPMQGHLNQLLHLSLQLASEPRGLDLDLHYAAPAAHVRQARARVHGWDESALRSVHFHELDIPAFAAPPPDPDAASPFPTHIMPMFEAYVAGAAAPLAALLRDLSASRRRVVVLHDVLNAFAGVEAERLPNGNGESFGLYCGAVSYMVGMVDAGHRLLRDCGLEYAPMDRYVSREFMECAKRQSSLARSVSRGGGMVAN

SEQ ID NO: 258114 - protein, 164 aa, Zea mays
  unsure (1)..(164): unsure at all Xaa locations
  Clone ID: MRT4577_166988C.1.pep
MERFFSNPSNAPRCDTDTGITLISGPPCCGKTSLLFQFAVNRAAESGRGVVFICSKGRESNPPFLSQGDPSMSLLQRIQIKYIEDGDEIRKYFAAFHLLDDFPAAVIVDDFADFFSDRXCQQRYGIARARDLAMVRALALCXNAIGHANAKLGTXGYCKLLLSD

SEQ ID NO: 258115 - protein, 96 aa, Zea mays
  Clone ID: MRT4577_166989C.1.pep
KVERFVHHISSWVGCLCSGVDRHGWFCNVITGMYMSLPLVDVHPQMSDHAGLAFKLRHRMGATPRFSDAPVSGFSWYIRAREYHRWPLHSSPAVLG

SEQ ID NO: 258116 - protein, 89 aa, Zea mays
  unsure (1)..(89): unsure at all Xaa locations
  Clone ID: MRT4577_16698C.1.pep
VKSAFLXGQCKEEVXLEXPPASKVNWSPTPFCKLFKALYELNQAQKPWIKGLKXFLXMAKASKVGKADPTLFTKTCDGDLVVCQIYVDD

SEQ ID NO: 258117 - protein, 167 aa, Zea mays
  unsure (1)..(167): unsure at all Xaa locations
  Clone ID: MRT4577_166990C.1.pep
MSLLQRIQIKYIEDGDEIRKYFAAFHLLDDFPAAVIVDDFADFFSXGSSDLAEXHRSCQQRYGIARARDLAMVRALALCHNAIGHANAKLGTLGYCNLLLSDVHQGDTPRLLFIYQRWVNSIYTIRGDGNGSYILQNLGSSETGSKEARKAKYSIALQYLVLEETST

SEQ ID NO: 258118 - protein, 106 aa, Zea mays
  Clone ID: MRT4577_166991C.1.pep
RCDCPARPASPTSVSTSSSRGSAPPNWSCPYVSSRAPCHPASPATSPPAPTAVVDPEPLSLLEPVESVVPILLHVCSIPSSAVMRIRRITLVTGISSARSRTGTAG

SEQ ID NO: 258119 - protein, 98 aa, Zea mays
  unsure (1)..(98): unsure at all Xaa locations
  Clone ID: MRT4577_166992C.1.pep
LRIKPDGGXSTHRSAVHAGLCMVLLEPXMNTGGGGGHIATFXQKHRWATTNTRRTKINTVGWGEQHGGEQGYLWRAGPTGQLLQFPWVLPWSASRLAP

SEQ ID NO: 258120 - protein, 64 aa, Zea mays
  Clone ID: MRT4577_166993C.1.pep
VRPPNTLVLSNSTEWGWTWHLSGQKQEPEKYEYTKVVCLASNLNYISQLIDTHMITFLFRYYIN

SEQ ID NO: 258121 - protein, 70 aa, Zea mays
  Clone ID: MRT4577_166994C.1.pep
NYPGKQLKRGSFTIQRNIPCENSKRTMQEWPTFSGICSQGWELRTGLQGGHKSPWKQFSKEPFFLKGILG

SEQ ID NO: 258122 - protein, 105 aa, Zea mays
  unsure (1)..(105): unsure at all Xaa locations
  Clone ID: MRT4577_166995C.1.pep
PTRSTTSVSAIEAPHKPLSWPWQPSRLQAPCRKCCHLPWPASSSPLPSSMALPGCTFCFIVRSLSALDLXFXSMFFMSFIYLDYFXIFNVXXFGTGVYEGDLLVL

SEQ ID NO: 258123 - protein, 36 aa, Zea mays
  Clone ID: MRT4577_166996C.1.pep
HEEESQAVAVRRHAPSPRFVSRGELDLGDVTVPWRP

SEQ ID NO: 258124 - protein, 93 aa, Zea mays
  Clone ID: MRT4577_166997C.1.pep
NEEAGGPKIPMKYGRVDVTAAEQCPPEGRLPDAGPRDPAEHLREVFYRMGLDDKEIVALSGAHTLGRARPDRSGWGKLETKYTVCFYGLFSSV

SEQ ID NO: 258125 - protein, 75 aa, Zea mays
  unsure (1)..(75): unsure at all Xaa locations
  Clone ID: MRT4577_166998C.1.pep
KSMNFDAYXRNSISWTMIFPDGEGNTHPEGVAGYNNLINYLLPQGMTPYINLYHYNLPVALEKKYLGWLSPNMAN

SEQ ID NO: 258126 - protein, 79 aa, Zea mays
  unsure (1)..(79): unsure at all Xaa locations
  Clone ID: MRT4577_166999C.1.pep
LXXXTRHREDNLRTNPPRHARTXQXGEXKTTHTXGHPQRTKKHXRTPQAAQPRPXTXKRXDPQNRPPKKKQPXKATRRP

SEQ ID NO: 258127 - protein, 154 aa, Zea mays
  Clone ID: MRT4577_16699C.1.pep
MATLKDAAARKSILATIRLVVPAGAARPAPPVGPALGFYRLNLMAFCKDFNARTQKYKAETPMQVTLTAYKDSTFEFVVKSPSVSWFLKKAAGIETASTRPSHVNVSSLTLRHVYEIAKLKQADPFCKHISLEALCKSIIGTANSMGIAIVKDL

SEQ ID NO: 258128 - protein, 153 aa, Zea mays
  Clone ID: MRT4577_1669C.1.pep
MHAYVSSEFGSRFQQEQQEEVQASGELVRLKAKHALVGAGARVLFYPTLLYNVLRNRFEADFRWWDRVDQFILLGAVPFPSDVPRLKQLGVQGVVTLNEPYETLVPTSLYQANEIEHLVIPTRDYLFAPSFEDMSQAIDFIHRNASQGGTTYV

SEQ ID NO: 258129 - protein, 57 aa, Zea mays
  Clone ID: MRT4577_166C.1.pep
TRLRTHCAYVEHVPLGTHTRPRLIFDIDKSAHYKAILAIYLRIDQSIIRCQNKENPS

SEQ ID NO: 258130 - protein, 87 aa, Zea mays
  Clone ID: MRT4577_167000C.1.pep
MWEDFDKGHVAGARNVPYYLSVTPHGKEKNPQFVEQVSALYAKDQNLIVGCRSGIRSKLATADLVNAGFTNVRNLQGGYLSLLRSAN

SEQ ID NO: 258131 - protein, 126 aa, Zea mays
  Clone ID: MRT4577_167001C.1.pep
INTIAVCPTTLKRICRQHGISRWPSRKINKVNRSLKKIEKVIKSVHGVDRSLQYDPATGSLVPATSLPDKMPTSSAGVKTVEEKSSPEPGQDFSSPDGWQRESSQLHASSIPTRVGDEVQMLAINN

SEQ ID NO: 258132 - protein, 216 aa, Zea mays
  Clone ID: MRT4577_167002C.1.pep
MPMEVDLDRARALRVLGRGAMGTVFLVEADPARPGCGCYALKVFDKRSAGPTKPNADRRARWEVTLLSRLAHPHLPSLLGSAETPDLLAWAVHYCPGGDLNELRYSLADRVFSPAAIRFYIAETVSALADLHASGIVYRDLKPENVLLRADGHVTLTDFDLSRLLPASTSSPSTSPPPQVKPVFHHGHRRARASAAGHHAKRKSSSAAASTPKLQQ

SEQ ID NO: 258133 - protein, 71 aa, Zea mays
  Clone ID: MRT4577_167003C.1.pep
MWEDFDKGHVAGARNVPYYLSVTPHGKEKNPQFVEQVSALYAKDQNLIVGCRSGIRSKLATADLVNAVSLP

SEQ ID NO: 258134 - protein, 60 aa, Zea mays
  Clone ID: MRT4577_167004C.1.pep
GREAQQGGRRNWLPRWASMEVVAMGTRGLSTDGSAIFYRFRVHCGCSYLKLHCVREFRMI

SEQ ID NO: 258135 - protein, 51 aa, Zea mays
  Clone ID: MRT4577_167005C.1.pep
DDQSVQYAAAEAVPARHSAAVQRDSVVGQMALAGMGSAGLVDGDLAPSEYA

SEQ ID NO: 258136 - protein, 53 aa, Zea mays
  Clone ID: MRT4577_167006C.1.pep
DVYLRYTDESSYSTFSSRVIDNYSTLDLPQQRFKHTKVPPQRFEAFRQIARKS

SEQ ID NO: 258137 - protein, 80 aa, Zea mays
  Clone ID: MRT4577_167007C.1.pep
KNPHKERGRGKPPPPPHIFFFLKKKKKKKKKKKKKKKKKIIFFIFFFFFFFFLVFFTFFFFFSPPRHAARRYEEGRIAST

SEQ ID NO: 258138 - protein, 50 aa, Zea mays
  Clone ID: MRT4577_167008C.1.pep
GRASSRSRFAATYKGTGRREKKYCNHTAMAPGEINSGYCITLRQRVTRST

SEQ ID NO: 258139 - protein, 142 aa, Zea mays
  unsure (1)..(142): unsure at all Xaa locations
  Clone ID: MRT4577_167009C.1.pep
MAAAPGAPEERLGVLTPQCLREKTGISEPRSEVHRDGNYHRAVNVWIYSESTXELLLQRRADCEELWPGQXDIISAGHISAGDSSHSRQRDLLEDPGIXISVDAFELMCVFLQERLVCLYRNPLYSATDDTIVVRICHITFT

SEQ ID NO: 258140 - protein, 238 aa, Zea mays
  Clone ID: MRT4577_16700C.1.pep
PTRPPTRPGFSQPPSSRSLISCEQGWVTLQLTREPGYGRGFFSPRSVTGFLSDVCSAAADEVGKIYITADENVQGAVFDLPEEIAKDLLTMEVPPGNTLTSGFQLPALQDDSPATDSYGRFSNDRGSRNRRSRGGGASRGRGGWDTDSEDRYRRGGRSLRSDNDSWSDDDWSGGGRKSNRSSSSFGGRSSSYGSRGSPSPSFGVRSSSLGGRESSRSFSGACFNCGESGHRASDCPNK

SEQ ID NO: 258141 - protein, 116 aa, Zea mays
  unsure (1)..(116): unsure at all Xaa locations
  Clone ID: MRT4577_167010C.1.pep
VIHTSTSTSHGFCTQTHQVSAPGAYYQEVDYCSEEVRSVAPAGFGRHGXVSSXHVAKEKFEEVDTVLRAGANYHHXHHGHHGGHRFMVRETRVDEDINTCTGXVHERRESFFARAI

SEQ ID NO: 258142 - protein, 108 aa, Zea mays
  Clone ID: MRT4577_167011C.1.pep
TNRVLPKIVAPKPSSSCLERRCTPTPPPLVRASLFRTQPHPNPGGAPNLLRLGRNPSCPQKLAPPREVKISHPIVMYPVTHSPPDQKRWPPPEHLVRFQKSGPCLFFS

SEQ ID NO: 258143 - protein, 73 aa, Zea mays
  Clone ID: MRT4577_167012C.1.pep
MLGVRFPYLHPIESAPPYGPRRPWGEQIVGCVFGLLSWGIWLPFDMMGGQLSSGRVARCFLVGFGNATAPPYV

SEQ ID NO: 258144 - protein, 165 aa, Zea mays
  Clone ID: MRT4577_167013C.1.pep
PFGYGAGHISPARAMNPGLVYDLGDADYLDFLCALKYNATVMAMFKGAPYTCPSEAPRRIADLNYPSITVVNVTAAGATALRKVKNVGKPGTYTAFVAEPAGVAVLVTPSVLKFSAKGEEKGFEVHFKVVNATLARDYSFGALVWTNGRQFVRSPLVVKAALAFD

SEQ ID NO: 258145 - protein, 45 aa, Zea mays
  Clone ID: MRT4577_167014C.1.pep
LYFFLVSSAHPIHYAHVKTLHMDTQIIESTHNNLILVLLCMRERS

SEQ ID NO: 258146 - protein, 380 aa, Zea mays
  unsure (1)..(380): unsure at all Xaa locations
  Clone ID: MRT4577_167015C.1.pep
HWVPRGRPCAEFWMGXHPAAPSSLAPDVSLRDWVARNPAALGRAVAARWGGDLPFLFKVLSVAKALSIQAHPDRELAAALHALRPATYRDANHKPEMAVAVTEFHALCGFAATQELKEVLRTVPEVQELVGKEESRKLLSVKEQDGGIGVRSYLKSAFTKLMTACDEAVSEAITNLKSRLKSESKARSLTKKEQLVLSLEKQYPGDVGVLAAFFLNFVKLNPGEALYVSANEPHAYLSGECIECMATSDNVVRAGLTPKYRDVQTLCSMLTYNQAFPEILQGMPVQPYVTRYTPSTDEFEVDRYLLPPGKSVTMSPVPGPSIFIVLTGEGEIQAGFMTGSAKAKEGDVFFVPANTKVKLYTSCPRSMQLYRAGVNSSFLS

SEQ ID NO: 258147 - protein, 68 aa, Zea mays
  Clone ID: MRT4577_167016C.1.pep
SRLLQVGDSSNRSHVLLLIVPVSCYSWSISDSFCFFFFSRCTLISYTFMIKFRTKKVTCHPTHLIFEI

SEQ ID NO: 258148 - protein, 93 aa, Zea mays
  Clone ID: MRT4577_167017C.1.pep
QESALTQLLKAGGSLKKFLFHPGDTVPSTARIGYEQLALGVTQILLGVVCCVLGVCLSLGPWTVLSASGCAFWAGSVVIAAGAGALVHEKHPG

SEQ ID NO: 258149 - protein, 60 aa, Zea mays
  Clone ID: MRT4577_167018C.1.pep
SSQVLVYENTYSISYVKKGSYCVLIFYMVEFSFEDIKTAPVSFLADFTYMEVQFVIIRKI

SEQ ID NO: 258150 - protein, 67 aa, Zea mays
  Clone ID: MRT4577_167019C.1.pep
QGTTDEPPHPPLMKLGELTTWCLLPFGPPRTRPHLTFSVHHRANRHVCMLVHSSSAPLTRIHGHTAA

SEQ ID NO: 258151 - protein, 762 aa, Zea mays
  Clone ID: MRT4577_16701C.1.pep
NSAPGHFLSPLLRSSPLPPMASLTLPALALALSNPGAVRLRAAAFRCWALRRRGWAAAGALASPNSVLSEHAFKRLQLGSDDEDGEGPYGSDADEGFEAGEGDNEELAIARLGLPDELVATLEKRGITHLFPIQRAVLIPALEGRDLIARAKTGTGKTLAFGIPMIKQLIEQDDGRITRRGRTPRVLVLAPTRELAKQVEKEIKESAPKLGTVCVYGGVSYNVQQNALSRGVDVVVGTPGRIIDLINGGSLQLGEVQYLVLDEADQMLAVGFEEDVETILQQLPAGRQSMLFSATMPSWVKKLSRRYLNNPLTIDLVGDQDEKLAEGIKLHAIPLTATSKRTILSDLITVYAKGGKTIVFTRTKKDADEVSLALTNSIASEALHGDISQHQRERTLNGFRQGKFTVLVATDVAARGLDIPNVDLIIHYELPNDPETFVHRSGRTGRAGKAGTAILMFTSSQKRTVKSLERDVGCNFEFISPPSIEEVLESSAEHVIATLRGVHPESTKYFLGAAEKLTEELGPHALASALAHLSGFSQPPSSRSLISHEQGWVTLQLTREQGFGRGFFSPRSVTGFLSDVCSAAADEVGKIYLTADENVQGAVFDLPEEIAKDLLTMELPPGNTLTKISKLPALQDDGPATDSYGRFSNDRGSRNNRRSRGGGASRGRGGWDTDGEDRFRRGGRSLRSDNDSWSDDDWSGGGRKSNRSSSFGSRSSSYSSRGSPSFGGRSSSFGGRESNRSFSGACFNCGESGHRATDCPNK

SEQ ID NO: 258152 - protein, 265 aa, Zea mays
  Clone ID: MRT4577_167020C.1.pep
LGTSRPAGTRRRSLKPYLPRTQLSSAQAQSRRPSAHSPDRHLHGRAHPCFSLPPLPPCVICQAATQPLGFIFPLLLYVGAFSAPQIHGTAASQLGLCRSLISGGRRLPLCRQLAGLSPSSTALDFFLKHRAPGRAPPWRLPPGAPVLASLWPRLSLWSQGCARPIPNGDWSPSSLLLALVRPRVPCARSSARRFSLPQHHQSSIRLQPHRRSLVRHGAEFFPRVIPAPRVLGTGRLSLLGLAWAVAAGQACPYFLCRRSSTPTLP

SEQ ID NO: 258153 - protein, 60 aa, Zea mays
  unsure (1)..(60): unsure at all Xaa locations
  Clone ID: MRT4577_167021C.1.pep
VQSPNSFFMDVKCQEYSSIPTVEXLSHTNHVCTGCQALLSQPTGGKDRLTEGCSFRRQGD

SEQ ID NO: 258154 - protein, 91 aa, Zea mays
  unsure (1)..(91): unsure at all Xaa locations
  Clone ID: MRT4577_167022C.1.pep
KRFGARFSQIKKRVEAINKDPRFKKRXGXGQFPYTLFFPNTSEKGDKTGVPPKGIPNSISILFDQVLASVSPKKKKQTVIPVCHPFHFLQK

SEQ ID NO: 258155 - protein, 109 aa, Zea mays
  Clone ID: MRT4577_167023C.1.pep
FGWVGYRWYRYNNLLAGRVSVAQAHAFLYRNLFTAPAKIFIFLVAPALDMQATTAPFRFRLSTTVSVASPPASRPRLRSFAHRPMTLRACLSLLPAPVDRQRSPALAAT

SEQ ID NO: 258156 - protein, 152 aa, Zea mays
  Clone ID: MRT4577_167024C.1.pep
FSSFFFFFFFFFFFFFFFFFFFFFFFFFLGKPLAWAQYFHIFFGKPTGKIPGAPGKKGFPPAPVPQGIPGGHPNKNFFFTPLFIYGKKETGDIRESPLVFFFWGKRWPGLDRKKRKCCGGCPWGGPRGFPPFRRGWGKPGCRETGPPFNGFL

SEQ ID NO: 258157 - protein, 51 aa, Zea mays
  Clone ID: MRT4577_167025C.1.pep
RKCVIRSRTCRVTARYYSCFLMFRCCNHISKSSNKSGVSPSNISCIADVWV

SEQ ID NO: 258158 - protein, 70 aa, Zea mays
  Clone ID: MRT4577_167026C.1.pep
KRMFQNPEFSARSRERKQAYIPQLKSLVTPPQEENPQLFKEQEKRPPKRLKKLLERGTPVLFRKNPPGVF

SEQ ID NO: 258159 - protein, 219 aa, Zea mays
  unsure (1)..(219): unsure at all Xaa locations
  Clone ID: MRT4577_167027C.1.pep
MAHVLGLALRSSTGTVVMGIIYPVSAARSRELLHQHLVRAQDRMKRQADKKCSERTFAVGDWVYLRLQPYVQASVMPRAHHKLSFKFFXGPYQILARVGQVAYRLSLPPTSRIHXVVYVSQKLARGFKGLDPLPLPVALPEFSVXPKLFIGRHCXAHTAGSGGQALVAWSGPSPELATWEDREARGQCFPFAPAAYMQVLVTRRVSAMPQCWTSNRISL

SEQ ID NO: 258160 - protein, 45 aa, Zea mays
  Clone ID: MRT4577_167028C.1.pep
SSSNLLDQGFGNQELKKLLGFTPLCFKVIIVQSLGLCFWSLNISG

SEQ ID NO: 258161 - protein, 61 aa, Zea mays
  Clone ID: MRT4577_167029C.1.pep
SYRTSPSSSSSGYCAAPSRSSRMHVLLLNSLSSYHALALPLNCPRPMVPGTPCRALACRGF

SEQ ID NO: 258162 - protein, 66 aa, Zea mays
  Clone ID: MRT4577_16702C.1.pep
FQNYYNSVLEYKLSTYCTSTLKHAKMRDEEHCGQADHLKHELMYLFPFEDASSAAKHNIVEVVIIT

SEQ ID NO: 258163 - protein, 51 aa, Zea mays
  Clone ID: MRT4577_167030C.1.pep
PAGNLGPPVIFNQPHGWGDPWIFWVGPFIGVGLVAIYPQVFIRGIPFKSRF

SEQ ID NO: 258164 - protein, 177 aa, Zea mays
  Clone ID: MRT4577_167031C.1.pep
SRPAGARFAPRAAPKPAAAFPLSLLLSCHAAVGAGRRHGRPAGREGGGEALFFALVTRSAAGRQAIPRAAAWFCLGGCCGCGGAGWCPRSCRGRWLGSLARGPDGRIQCSWARSSADRICLNSWQLVRWRQVVVAVAAVGWGLCRCCGVALSPLPPLPSRPYASLTPRVTRAATPPP

SEQ ID NO: 258165 - protein, 99 aa, Zea mays
  Clone ID: MRT4577_167032C.1.pep
GKVVRCSVPLHNSLAQGPRHHHDATCSQRTSPWPKEWRPSVRARNPGSGYLRLPSPLSRVNIIFSVSAPLSRGSPPTSCSIRFRSSPRRSSLAPFRSCC

SEQ ID NO: 258166 - protein, 105 aa, Zea mays
  Clone ID: MRT4577_167033C.1.pep
LFNGSQPTAAFFIAHNNFFHRPNRPIDLFVTSRSCMAGPGRFMTARFLRQRSSAAIVFFKKNVLPRPLPVSHHVCCDFYPADVVYYNILQYFVSIYYSCSSSNSS

SEQ ID NO: 258167 - protein, 93 aa, Zea mays
  unsure (1)..(93): unsure at all Xaa locations
  Clone ID: MRT4577_167034C.1.pep
PLLPSGSHRPTRILSIVRGPALPSRLDKGSFGPQSQLPVGTLLGWRAGTGPCRQRGFPSPPPKAARCPGRASKFRAERRGLAPIRQALLLFFX

SEQ ID NO: 258168 - protein, 96 aa, Zea mays
  Clone ID: MRT4577_167035C.1.pep
MASRQGVAASMFATALLLGVFASIPQSAEAIGVCYGMSANNLPAASTVVSMYKANGISAMRLYAPDQGALQAVGGTGISVAVGAPNDVLSNIAASP

SEQ ID NO: 258169 - protein, 106 aa, Zea mays
  Clone ID: MRT4577_167036C.1.pep
WGLPRTRARARRLATGPPPPHPSPRALADTRAAGRAGTARAGRGRWCFATAPARAIAGPAAPGTAPHIATVPRPRPPEEPGSGPAARPGLQRRTVGDHAHAAGGWG

SEQ ID NO: 258170 - protein, 78 aa, Zea mays
  Clone ID: MRT4577_167037C.1.pep
SIFSQDACMDERGDIDRERERWKGNHFVGWMQRRRGAMPWRTWRRLHLACLPFSLSKPLYLCCLERTHARCCWLVSYS

SEQ ID NO: 258171 - protein, 99 aa, Zea mays
  Clone ID: MRT4577_167038C.1.pep
LLCLAPIFFIYSFMPWQGLLLCMNSAYINLPSQTFFFQDACMHEREIERKAITLWDGCKDAEEQCRGEHGGGYTLPACHSLSQKPLYLCCLQRTHAAAG

SEQ ID NO: 258172 - protein, 114 aa, Zea mays
  unsure (1)..(114): unsure at all Xaa locations
  Clone ID: MRT4577_167039C.1.pep
GGGGRTQEPARRRRRSERPSRQPGRPRARRRSDRRKRGGGRAEEGXXGXEXRXTPXRTEXXXRATRTQNXHGEKGRRTRERTTGDQKRGNDXEKGAEPDAEKDGNRGTRANAQA

SEQ ID NO: 258173 - protein, 154 aa, Zea mays
  unsure (1)..(154): unsure at all Xaa locations
  Clone ID: MRT4577_16703C.1.pep
SDQSVDLIIXHYEIAKXIAETFVHRXGRTXGGAGKAGTAILMFTSSQKRTVMSLERDVGCKFEFISPPSIEEVLESSAEHVIATLRGVHPESTQYFLGAAEKLTEELGPHALASALAHLSGFSQPPSSRSLISYEQVRSDTTKLHMHCSILYLA

SEQ ID NO: 258174 - protein, 114 aa, Zea mays
  unsure (1)..(114): unsure at all Xaa locations
  Clone ID: MRT4577_167040C.1.pep
PRVREGSGKKSXXSDEYERWVGGGGEDEVQARGGRDDDILPVAGDIYCAASLLSDRKYWSYRDSSAQRSECQYELYICCISPCLGSACNRTEGKLLQDLNGMLKFLXXKKKKKN

SEQ ID NO: 258175 - protein, 106 aa, Zea mays
  Clone ID: MRT4577_167041C.1.pep
LGPGGNPGISGPCPGGIPSFLNGSIIKGWGKLWQILFLWKNCYPLKISQKKKSVKKKLKARGAKLREPNQFNWGGLNSLFQKRKNCVPFYKKNSPTPGKRLFFFWP

SEQ ID NO: 258176 - protein, 109 aa, Zea mays
  Clone ID: MRT4577_167042C.1.pep
MSLIKVYNNDSNIYGLNGHSIFKSAKRVFIRAIEWPGLADSDKEEEEEDEDDYDEDDDGKDGNGDGGEGRNGDNNSKGCSGDNNNKGGNNDGSDMGGSDVGKGDSGDEG

SEQ ID NO: 258177 - protein, 336 aa, Zea mays
  unsure (1)..(336): unsure at all Xaa locations
  Clone ID: MRT4577_167043C.1.pep
MEAWRSLLASFVLAVLAAQALVAVVESRTGPVEQASQGDDVKKPDCVPGMDPRSFPGTGGGHGITPVTPSHGGSSSPTPSHGGGGGYVPTPSHGGTLPFPSHGGSGSGSSPTSPSTGGGSYGGSPSTPGGGAYGGSPPSTPSGGGAYGGSPSTPSGGGAYGGGSPSPAHGAGGAYGSSPTPAYGDSPLHGGIGTSSPTTFVPMDPHSFGTCDYWRSHPMEIWSAVGGRFPSTSSSMGHFFGAAAGSVGGADVMSIQDAVGNTRADGTGALLREGAAALLNSMTRAGFPYTTEQVRDAFAAAAAAGSDGAAAXAAAGSDGAAAAQAAAFRKANEGKA

SEQ ID NO: 258178 - protein, 80 aa, Zea mays
  Clone ID: MRT4577_167044C.1.pep
KWFTPLGKPPGFFFLKFWAGGFFGVPFGSKKKPPFLGPPAPFFGFKKKKKKKKKKKKKKKKKKKKKKKKKKKKKKNSREG

SEQ ID NO: 258179 - protein, 273 aa, Zea mays
  unsure (1)..(273): unsure at all Xaa locations
  Clone ID: MRT4577_167045C.1.pep
YIASSFLRRVHSDAVCSNVDDLCARAWYRCTAAAGDDVKKPDCVPGMDPRSFPGTGGGHGITPVTPSHGGSSSPTPSHGGGGGYVPTPSHGGTLPSPSHGGSSSGSSPTSPSTGGGSYGGSPSTPGGGAYGGSPPSTPSGGGAYGGSPSTPSGGGAYGGGSPSPAHGAGGAYGSSPTPAYGDSPLHGGIGTSSPTTFVPMDPHSFGAAAGSVGGAKIMSTPHAVGNTRADGTGALLREGAAALLNSMTRAGFPYTTEQVRDXFAAAAPPPPPG

SEQ ID NO: 258180 - protein, 179 aa, Zea mays
  unsure (1)..(179): unsure at all Xaa locations
  Clone ID: MRT4577_167046C.1.pep
GGDGGGDPPHQKEPALGPDPLCGPLEPPQKSPLKKTPSWVGAPPENFFGGFFFGQGILRPPELFISPPPVFPCPQGGGRGPXLGPPVFFPNGPLLPPPPRXGCLKPPPSGKLRGGGPLPPXPPDQVSPPXIEPPFFRGGGSPTPRVDVFLKNPFFLFLGIGRFGVFFSPFFQKKFFFGF

SEQ ID NO: 258181 - protein, 58 aa, Zea mays
  Clone ID: MRT4577_167047C.1.pep
QHGWRASARSPPRPCRAFITALVHVPSRPRASSRTARSTPASAGAPCVPRVDAIASGQ

SEQ ID NO: 258182 - protein, 499 aa, Zea mays
  Clone ID: MRT4577_167048C.1.pep
YGLMGRFSQLLYLDAEEPRSQPTEEQLAAQRNALETVKKCQIGTIFTESKFLQADSLSNLARALIQAAGRPQKISSSLDDEGIAVFCLELLITVTLNNRDRIVLLWQDVFEHITHIVQSTVMPCNLVEKAVFGLLHICQRLLPYKANLVDDLLRSLQLILKLDARVADAYCENITLEVTLLVKANATHIKSQMGWRTIISLLCITARHPDASDAGFEALVFIMSEGAHLSPANFILSVEASRQFAESRLGSAERSIHALNLMADSVNCLVRWSQEVREAGGEADRILEGIAEMWLRLVQALRKVCMDQREEVRNHALLSLHRCLVVDGISVKSSTWLMAFDIIFQLLDELLEIAQSYSPKDFRNMEVSLLHAVKLLCKVFLQSLKDLSGQHSFDKLWLEVLDMIEKFMKVKVRGRRTEKLKEAIPELVKNILMVMKASGVLSKTGASENSFWEATWLQVNKIAPSLQSEFFPDNEDGSTTQIEENKLDTQAQSDQNNDQ

SEQ ID NO: 258183 - protein, 37 aa, Zea mays
  Clone ID: MRT4577_167049C.1.pep
WDVSRGRSCDGNSISMQCRPAVNISRQTARACLASGY

SEQ ID NO: 258184 - protein, 67 aa, Zea mays
  unsure (1)..(67): unsure at all Xaa locations
  Clone ID: MRT4577_16704C.1.pep
SPPGPARPQPQCHERKYRSGIENLLVLSIGGILIVMPTVLSVXTMVIGSDKLAQQGAITQRMSAIEE

SEQ ID NO: 258185 - protein, 43 aa, Zea mays
  Clone ID: MRT4577_167050C.1.pep
ESTGEAGTLQIWRMRDLIDRPEEEVRTELENFKAHGASCAPRT

SEQ ID NO: 258186 - protein, 98 aa, Zea mays
  unsure (1)..(98): unsure at all Xaa locations
  Clone ID: MRT4577_167051C.1.pep
SEIDLATIYSXVGEWHQDRVEIIFNDQGRRTXTPSHVAFTDYERLIEDDCKNQDAVNPXSTAFDAKRLSDTRLIDASDQNDIELXWTFKDVPVASEKL

SEQ ID NO: 258187 - protein, 67 aa, Zea mays
  Clone ID: MRT4577_167052C.1.pep
GTPCTSDRSTMPVRQVAPPVRAMPLGQLVADVCSRVSIRLGAWAPGQASGFIGISIFLAPSVGSPVS

SEQ ID NO: 258188 - protein, 111 aa, Zea mays
  unsure (1)..(111): unsure at all Xaa locations
  Clone ID: MRT4577_167053C.1.pep
IRLEGCYILFCSGFVQTTNKIAIGAAVTPKSVYMGRQHDITLMLWKDPQHWHWLLELCPGLVSMYWPSHLISHXLIRHANIAQLXGEEHNTLSSGSHTATQMGTSHLPREG

SEQ ID NO: 258189 - protein, 59 aa, Zea mays
  Clone ID: MRT4577_167054C.1.pep
VFGSKKKKITSAALGLVYFLSSTPTRLKKRHCLGPPFKCNGLLGCFPPMRPFLIVPIPR

SEQ ID NO: 258190 - protein, 76 aa, Zea mays
  Clone ID: MRT4577_167055C.1.pep
KADPRFPPSKKPWTVFSMGEPGKNTVMGPDRNQGSLKAPGALKINPHRNRGGFKEGTKRRLPNHSLGATVHSLMGG

SEQ ID NO: 258191 - protein, 179 aa, Zea mays
  unsure (1)..(179): unsure at all Xaa locations
  Clone ID: MRT4577_167056C.1.pep
SPEYISPTQAAGSLTILPVSLHSPVIAGELNREHGIYVTETLAKACEGCLNGEFSALVTGPVHKGVINEAGVPFTGHTQFFADHSQCSRVVMMLAPEELRVALATTHLPIMHVPKAITFDSLREVVTILNHDLKTKFGIRRPHIYVCGLNPHAGEGGHMGHEDTPVIIXPHWTRLRAEG

SEQ ID NO: 258192 - protein, 567 aa, Zea mays
  Clone ID: MRT4577_167057C.1.pep
ADLTKFACDDLTIGFFFPPPPPPPPSSGYTLLRDPRHNKGLAFSEAERDAHYLRGLLPPALASQELQEKKLMQNLRQYERPLHRYIAMMDLQERNERLFYKLLIDNVEELLPVVYTPTVGEACQKYGSIYRRPQGLYISLKDKGKILEVLKNWPERSIQVIVVTDGERILGLGDLGCQGMGIPVGKLSLYTALGGVRPSACLPITIDVGTNNEALLNDDFYIGLRQRRATGEEYHELVEEFMAAVKQNYGEKVLTQFEDFANHNAFDLLEKYRESHLVFNDDIQGTASVVLAGLLAALKVVGGTLADHTYLFLGAGEAGTGIAELIALEMSKHTGSPIEECRPKIWLMDSRGLIVASRKESLQAFKKPWAHEHGAVETLLEAVRSLKPTVLIGTSGKGGTFTKDVVEAMASQNERPVVFALSNPTSHSECTAEQAYTWTEGRAVFASGSPFPAVELDGRALVPGQSNNAYIFPGFGLGVVISGAIRVRDDMLLAASEALAEQVTEAHYAKGLIFPPFTNIRAISARIAAKVAAKAYELGLASRLPRPDDLVSYAESCMYTPTYRSYR

SEQ ID NO: 258193 - protein, 570 aa, Zea mays
  Clone ID: MRT4577_167058C.1.pep
MAGGGVEDVYGEDRATEEQLITPWAFSVASGYTLLRDPRHNKGLAFSEAERDAHYLRGLLPPALASQELQEKKLMQNLRRYEQPLHRYIAMMDLQERNERLFYKLLIDNVEELLPVVYTPTVGEACQKYGSIYRRPQGLYISLRDKGKILEVLKNWPERSIQVIVVTDGERILGLGDLGCQGMGIPVGKLSLYTALGGVRPSACLPITIDVGTNNEALLKDEFYIGLRQRRATGEEYHELLEEFMTAVKQNYGEKVLTQFEDFANHNAFDLLEKYRESHLVFNDDIQGTASVVLAGLLAALKVVGGTLADHTYLFLGAGEAGTGIAELIALEMSKHTGSPIEECRPKIWLMDSKGLIVASRKDSLQAFKKPWAHEHEPVATLLEAVQSLKPTVLIGTSGKGGTFTKEVVEAMASQNEKPVIFALSNPTSHSECTAEQAYTWTKGRAVFASGSPFDSVELDGKVLVPGQSNNAYIFPGFGLGVVISGAIRVRDDMLLAASEALAEQVTEEHFAKGLIFPPFTNIRAISARIAAKVAAKAYELGLASRLPRPDDLVKYAESCMYTPIYRSYR

SEQ ID NO: 258194 - protein, 289 aa, Zea mays
  Clone ID: MRT4577_167059C.1.pep
MGEDKKEKPGKADGADHNKDAAAPPEPIVLKVDLHCAGCATKVKRAIKNAPGVESVKTDTAANKVVVTGAVDAAEIKQRIEARTKKPVQIVSAGAASPNKDNKEKGKDNKADAGDKPEKEKSKAAEKEKGGAGAGAEKKEKKVETADKPKEEEKKPKEPKEETVTLKIRLHCDGCIDRIKRRVNKIKGVKEVTVDAAKDLVKVTGTMDAAALPGYLRDKLSRPVEVVTPGKKDGDKKDDGEKKKDKGAGEGGEKKKDGGGGGEDKKDKSAASVAPMPMADPSMYQMPPQ

SEQ ID NO: 258195 - protein, 195 aa, Zea mays
  Clone ID: MRT4577_16705C.1.pep
MASLVTLPAIAFSNPATASGAVRLRAAAFRCWALRRRGWAVAAAVASPNSVLSEHAFKRLQLGSDDEDEEGPYGSDADEGFQGDEEELAIARLGLPDELVATLEKRGITHLFPIQRAVLIPALGGRDLIARAKTGTGKTLAFGIPMIKKLMEQDDGRSTRRGRTPRVLVLAPTRELAKQVEKEIKESAPKLGNVC

SEQ ID NO: 258196 - protein, 49 aa, Zea mays
  Clone ID: MRT4577_167060C.1.pep
SSGGRETNIGPTLWNQQGVKIILGPRGFVFKAFQGPKKKNKKKKKKKPK

SEQ ID NO: 258197 - protein, 233 aa, Zea mays
  unsure (1)..(233): unsure at all Xaa locations
  Clone ID: MRT4577_167061C.1.pep
MGEDKKEKPGKADGGDQKKDAAAAAQPIVLKVDLHCAGCATKVKRAIKNAPGVESVKTDTAANKVVVTGAADAAEIKERIEARTKKPVQIVSAGAASPNKDNKEKDKDKKPDAGDKPEKEKSKAADKEKGGAGAGAEKKEKKVETADKPKEEEKKPKEPKEETVTLKIRLHCDGCIDRIKRRVNKIKGVKEVTVDAAKDLVKVTGTMDAAALPGYLRDQLSRPVVVXTPGKKD

SEQ ID NO: 258198 - protein, 116 aa, Zea mays
  unsure (1)..(116): unsure at all Xaa locations
  Clone ID: MRT4577_167062C.1.pep
PGCDRRXPMXVAAARSKLRFCCSKLQXXRQEGTLTLEGRLGYRRAGPTCRPSGVASGERRAALRVLSRAAAESRLRLAHVLAACGGNCKCDPLSTADHIRSTTMDMIIIYLACGGG

SEQ ID NO: 258199 - protein, 204 aa, Zea mays
  unsure (1)..(204): unsure at all Xaa locations
  Clone ID: MRT4577_167063C.1.pep
MDVGAELREAHRLTGHADRVWALAWNPAPGPGSGPVLASCSGDKTVRIWKRAPDGAWQCSDVLEDTHNRTVRSCAWSPNGKLLATASFDATTAVWEYNGADFECVATLEGHDNEVKSVSWSPSGSLLATCSRDKMVWIWGGAAREXEFECVSVLPGHTQDVKMVQWHPILDILVSVSYDNSIRVWAGDGDXEWRCVQTLTEANN

SEQ ID NO: 258200 - protein, 112 aa, Zea mays
  Clone ID: MRT4577_167064C.1.pep
MTSVWKTKVLPGLNRSFDKDDKVAEAYEASPPEVKALFKDKKPVKVSKKNSAAVTKFLDELAKIDFPGAKVVSEAVAKSGTSPLLTAITFILDKVAPFIPKEEPKAEPAAEA

SEQ ID NO: 258201 - protein, 264 aa, Zea mays
  Clone ID: MRT4577_167065C.1.pep
MRLCLVSCLFIHHRPAGGFPFIIDLPASLNFFCCVCWPGAEVATRIYSEEEIEMTSVWKTKVLPGLNKIFDKDGKKAAAAGFLKSFNKEEIDKEIEDKKTELEPKVVEAYEASPPEVKALFKDKKPVKVSKKNSAAVTKFLDELAKIDFPGAKVVSEAVAKSGTSPLLPAITFILDKVAPFIPKEEPKAEPAAEATSREVAVEEKKEEAEPAAATEAAPAPAETPSEAAVVEEKKEEEKKEEEDKPAAEEAAPPAAAAAAAEEK

SEQ ID NO: 258202 - protein, 209 aa, Zea mays
  unsure (1)..(209): unsure at all Xaa locations
  Clone ID: MRT4577_167066C.1.pep
MTSVWKTKVLPGLNKIFDKDGKKAAAAGFLKSFNKEEIDKEIEDKKTELEPKVVEAYEASPPEVKALFKDKKPVKVSKKNSAAVTKFLDELAKIDFPGAKVVSEAVAKSGTSPLLPAITFILDKVAPFIPXEEPKVEPAAEVEATSREVAVEEKKEEAEPAAAEEAAPAPAETPAAEEKKEEEEEKKEEEAKPAAEEAAPPAAAATEEK

SEQ ID NO: 258203 - protein, 210 aa, Zea mays
  Clone ID: MRT4577_167067C.1.pep
MTSVWKTKVLPGLNKIFDKDGKKAAAAGFLKSFNKEEIDKEIEDKKTELEPKVVEAYEASPPEVKALFKDKKPVKVSKKNSAAVTKFLDELAKIDFPGAKVVSEAVAKSGTSPLLPAITFILDKVAPFIPKEEPKAEPAAEATSREVAVEEKKEEAEPAAATEAAPAPAETPSEAAVVEEKKEEEKKEEEDKPAAEEAAPPAAAAAAEEK

SEQ ID NO: 258204 - protein, 58 aa, Zea mays
  Clone ID: MRT4577_167068C.1.pep
GDLPDTKGEVFPFFQSKMGGGHPSKNPLAGVLNYFLNLRVTPHPQIKRTFFKGVFPAF

SEQ ID NO: 258205 - protein, 43 aa, Zea mays
  Clone ID: MRT4577_167069C.1.pep
IGRPIFFFFNFFFFIFFFFFFFFHKLSWYYIIPLQRTGTYLVI

SEQ ID NO: 258206 - protein, 397 aa, Zea mays
  Clone ID: MRT4577_16706C.1.pep
MEYKARSTGTSGTSSKSFRDLYNMKYSSYLNDEPMPDATSEKEQGNEYFKQKKFTDAIECYSRSIGLSPTAVTFANRAMAYLKLRRFKEAEDDCTEALNLDDRYIKAYSRRITARKELGKLKEAMDDAEFAISLDPNNSELRKQYSEIKALHMEKMAKKVPVPAKRAVSGIDKTADVTSHPPTISQKDTIMEVDLPVRDAMKIKESASVKSNGGPGVIINGNNVQQLQGRDANQKTGPEVSVQDLAARAASRYMAGTVKSIKTPKTAYDFEVSWRALSDDTAQQIQLLKSIPPASLPEIFKNALSAPFLIDIVKCAASIFRDAEALAVSILDNLARVPRFDLIIMCLSSMHKFELRKIWDQVFLAEKALADDQMEALRQLRGRYIPGGWQDSMLTSS

SEQ ID NO: 258207 - protein, 194 aa, Zea mays
  Clone ID: MRT4577_167070C.1.pep
MASLWKTKVLPGLNKIFDKDGKKAAAAGFFKSFNKEEIGKEIEEKKAELEPKVAEAYEASPPEVKALFKDKKPVKISKKNSTAVTKFLDELAKIDFPGAKVVSEAVAKSGASPLSPAITFILDKVAPYIPKEEPKAEDAVAEATSREVAVEVEDAEPAIADAAAETPSEAKKGEEEKPAAEEAAPPAAAATEEK

SEQ ID NO: 258208 - protein, 339 aa, Zea mays
  Clone ID: MRT4577_167071C.1.pep
MAGGGATVCVTGAGGFIASWVVKLLLSRGYTVHGTVRHLSDEKTGHLKRLENAAGNLRIFKADLLDYDAMAAAVVGCQGVFHVATPVPSEDLTDPELQMLGPAVTGTTNVLKAASSANVQRVVVVSSMVAVEISPKDWPEGKVRDERCWSDREFCRSIESWYPVAKIISEEAALAYGQQTGLDVVTINPGLVFGPMLQPTVNTTIQFLIYFLKGGPDPVKNKLWHIVDVRDVADAMLLLYEVPEATGRHICAPHVISARDLLDLLKSMYPDYPCIANESILDRDHPAPMTSDKLKKIGWSCRPLEETIVDTVECCLRAGFLDHVGGETSCRFPPLLNQI

SEQ ID NO: 258209 - protein, 97 aa, Zea mays
  unsure (1)..(97): unsure at all Xaa locations
  Clone ID: MRT4577_167072C.1.pep
IGFFCNQDSRILTVVGSHKCCNHSWXGESADACYATDRNHEQDKIERISMSRLKLVPAHKLVRTQRXTNHGLLIFXQMDMMLDILAEYLCTSRIGVS

SEQ ID NO: 258210 - protein, 60 aa, Zea mays
  Clone ID: MRT4577_167073C.1.pep
NVKRLVAFANFFRASVLSFQIHCQAGSSDCLSPMLFIPFCTPVMFQQLCHFFLLKKHPQN

SEQ ID NO: 258211 - protein, 77 aa, Zea mays
  unsure (1)..(77): unsure at all Xaa locations
  Clone ID: MRT4577_167074C.1.pep
MATKILSLLALLALLASATNANIIPQCSLAPSPIITQXLPPVTSMGFKNPAVQAYRLHQTIAVSVLQQPISKLHQHS

SEQ ID NO: 258212 - protein, 71 aa, Zea mays
  Clone ID: MRT4577_167075C.1.pep
LLKAHSPFIRIGGKQASKQASKKERIEVSQPSASIATIIVVATIPAFLSRKRKLHAALSLFREGKQKVPKV

SEQ ID NO: 258213 - protein, 502 aa, Zea mays
  Clone ID: MRT4577_167076C.1.pep
MATGRPVRLVLDASLLLDPSSTREAAAVALRPGVEELLRRLRYSNLSVAICYAEGMPTNESDFLEKVASSHLFGSIVLLAKSGNLSPIELMIEWSRTSFCFYATSRVDKGLISELQNQNWRVLSVANECSIEVPGVLNVQRLQELLLTLATLMKKELCGSSVLVIGYIMKKSREEDFAKRGAFPIYPSKGSLIFVPLSFEIPLSLQLQEVDMVLHKITDEIVKIDPNCSIDFPKGISFSAGMSEIIRFVEEHPDFCIMDPFKNIYPLLDRLQIQKILVRLQELGTEGKPKLRAPYSCKVDSFHNGELDKHLVEANLSFPLIVKPQVACGVADAHNMALVFQIEEFSNLSVPLPAVLQEYVDHGSKIFKFYVIGDKVFYAVRDSMPNARFLKPSSGGEALTFNSLKTLPVATNEQRPQTGAEDGKLLDADLVEEAAKFLKGLLGLTVFGFDVVVQEGTGDHVIVDLNYLPSFKEVPDSEAVPAFWDAVRQAYESTRGNANAQG

SEQ ID NO: 258214 - protein, 110 aa, Zea mays
  unsure (1)..(110): unsure at all Xaa locations
  Clone ID: MRT4577_167077C.1.pep
MMAPWPHARVRQLIVRLEEHMTNFYNQYKSIEPWLKRKNPPVPXKEILQSKKEREKLDGMYECILCACCSTSCPSYWWNPESYLGPAALLHANRWISDSRDEYTKEDWMP

SEQ ID NO: 258215 - protein, 169 aa, Zea mays
  unsure (1)..(169): unsure at all Xaa locations
  Clone ID: MRT4577_167078C.1.pep
MVRGSLGKLASRALSVAGRWQHQQLRRLNIHEYQGAXLMGKYGINVPRGAAAGSVHEVKDALKNMFPSEKEIVVKSQILAGGRGLGTFKSGLXSGVHIVKAEEAELIVSKMLGQILITKQTGPEGKIVSKVYLCEKLSLTNEMYFAITLDRKTAGPLIIACSRGGKHYS

SEQ ID NO: 258216 - protein, 47 aa, Zea mays
  Clone ID: MRT4577_167079C.1.pep
DAERHRQGAAQVRSRSGRRRRPGWASTPAKVLELANFMKAFGRVPTK

SEQ ID NO: 258217 - protein, 76 aa, Zea mays
  unsure (1)..(76): unsure at all Xaa locations
  Clone ID: MRT4577_16707C.1.pep
GVRKDPGALGEFYAPWCGHCKTLAPEYDRLGAALNKAKYVLIAKVDCDELNSLSRMXGVCGYXTMQWFTGGSLDRQ

SEQ ID NO: 258218 - protein, 90 aa, Zea mays
  unsure (1)..(90): unsure at all Xaa locations
  Clone ID: MRT4577_167080C.1.pep
EKAAGSVSKSTQXEYAWCLVRXKYNDDIRKGIVLLEELLPKGSKEEQRDYVFYLAVGNSRLKEYEKALKYVRGLLQTEPQNNQAKELERL

SEQ ID NO: 258219 - protein, 37 aa, Zea mays
  Clone ID: MRT4577_167081C.1.pep
FKSPGFLSFYKLAFAISLGILINLLKLVKFWAHQILI

SEQ ID NO: 258220 - protein, 118 aa, Zea mays
  unsure (1)..(118): unsure at all Xaa locations
  Clone ID: MRT4577_167082C.1.pep
CHRLKNDDYLHRACSCLPSIAYIRCRLPWTPTHTVCSPLRHLLASRACPNXQCLHTTSPGQLATKIGTYRSQAATPTDIARATNGLRQHEATITGDKLHVGPPELPMPLDQLLLQHPR

SEQ ID NO: 258221 - protein, 139 aa, Zea mays
  Clone ID: MRT4577_167083C.1.pep
HVVLRGLSAHVNNRQLVFYAWGRRDMGQYPVVSGDGDSASGEGSFEDGSASVGTRRPHPLAPLPERRQPVEVWCGSEYTLVADDEGGLWSSGWNEHGNLGAGTTTEMRSPGTAAGWHRVMQYVEDGQEAAPVRLEHVWE

SEQ ID NO: 258222 - protein, 65 aa, Zea mays
  Clone ID: MRT4577_167084C.1.pep
YTCHTRLLNSAQKYILTQTQCSLHLEFNRIDRLIAYTFSKVAVTSRARYSTKCLNILISKSLIYY

SEQ ID NO: 258223 - protein, 982 aa, Zea mays
  unsure (1)..(982): unsure at all Xaa locations
  Clone ID: MRT4577_167085C.1.pep
MKHSRARTNNVASSSVEHVVICNRCKDFDACNEHASTILKLNNDVASLNAQLKTCKDNYEKLKFARDAYTIGRHPSIKDGLGFQKETKNLTIQRTSNLNKEKGKAPMASSSKKNHDYLYDKRITSIAHHDRRSDGSLAFKVVLDGKLYLVDFSKENADLDACLIAKTNMGWLWHRRLAHVGMKNLHKLLKGEHMLGLIDIXVWRKTDLLQRAKQGSRXKYSSKQERDDNIKTTRTSTYGSLRARXYLSIGGKRKNRTLINMASTMLGEYKTPERFWSEGVNTACHAINRLYLYRLLKKTSYELLTGNKPNVSYFRVFGRKCYILVKKGRHSKFAPKVVEGILLGYDSNTKAYRVFNKSSGLVEVSSDVVFDETNGSPREQVDLDDVDEDEVSTAAMRTMAIGNVRPHEPQEQDQPFLSTLVHPSTQDEEQVAQDDGLDQEGAHEEHDKEEDVLQVPPTQEELNNFKRNEVWSLVPRPKQNVAGTKWVLRNKQDEHGVVTRNKSRLVAKGYAQVAGLDFEENFAPIARLESIRILLAYAAYHSFKLFQMDEEVYVEQPPGFEDDRYPNHVYKLSKALYGLKQAPRAWYECLRDFLISNAFKVGKADPTLFTKTCNGDLFVCQIYVDYIIFGSTNQKSYEEFSRVMMQKFEMSMMGELNYFLGFQVKQLKEGIFISQTKYTQDLLKRFGMKEAKPAKTLMGTDGHLDLNKGGKSVDQKAYRSMIGSLLYVCASRPDIMLIVCMCARFQSDPKECHLVVVKRILRYLVSTPCFGIWYPKGSTFDLIGYSDSHYAGCKVDRKITSGTCQFLRRSLVSWSSKKQTFVALSTAEAEYVDAGQCCVQLLWMRRTLRDFGYNLSKVPLLCDNESAIRLADNPVEHSRRVPPTLLNTAGNHPQHKPQRLMGTIQVKASSTQGTRSCLARAQPRVGTIVPDEVMSRPRASSGSGRTLSTPEAQLGQASSRSNLGQIASPIDRIAGAFNARIV

SEQ ID NO: 258224 - protein, 116 aa, Zea mays
  Clone ID: MRT4577_167086C.1.pep
EKVHDDIKFKCTLIPFTGAKLDLPLIRPPNETRGLLLVSIDLTTAATLTATAGSKRSSRRAGAGSASANAAVAVAVAVVAVVALVGDDEHGRVVGGALHELPRARHPWRCCTGSNR

SEQ ID NO: 258225 - protein, 65 aa, Zea mays
  Clone ID: MRT4577_167087C.1.pep
ILVFWGHFLNETKTLDLHGDVNSYSKDSHTGSDEVALKFFGTQLFMPTFRPLWHLRFRHRRKQLT

SEQ ID NO: 258226 - protein, 801 aa, Zea mays
  unsure (1)..(801): unsure at all Xaa locations
  Clone ID: MRT4577_167088C.1.pep
EPQVHQDDARRNSWKIRXGRMMVKETRYVDDALNRPLLLHESQPVALKATGSKEALPSKVAQVEAVGLNEDEMTLIIKCFKTALKGRKEYPNKNKSRRKCSCFKCGKYGHFIAQCPDNNNDQAREKYGKKERKKNYRKAKGEAHIGKEWDSDCSSSDSDDEGLAASAFNKSSLFPNERHTCLMAKENKIDLRCKDFNIDACNEHVSTILKLNNDVASLNAKLKTCKDDYEKLKFTRDAYTIGRHPSIKDGLGFQKETKNFTSHRTSNLNKEKGKAPMANSSQKNHAYLYKKIPNVTHHDKCHNHSVFXRHDDVFSSHAMFATSSSYAHXVYAFGGSSWIIDSGCTNHMMGEKKMFTSYVKNRDSQDTNIFGDGNQGKVKGLGKIAITTEHSISNVFFVESLGYNLLSDKTETQGTLKRFLRRAQNEFELKVEKIRSDNGSEFKNLQVKDYLEDEGIKHEFSAPYTPQQNGVVERKNRTLIDMARTMLGEYKTPERFWSEAVNTACHDINRLYLHCLLEKTSYELLTGNKPKVSYFRVFGSKCYVLIKKGRHSKFAPKAVEGFLLGYDSNTKAYRVFSKSSELVEVSSDVVFDETNGSPREQVDLDDVDEDEVPTAAMRTMAIGEEELNNFKRNEVWSLVPRPKQNVVGTKWVFRNKQDEHGVVTRNKARLVAKGYAQVTGLDFEETFAPVARLESIRILLACAAHHSFKIFQMDVKSAFLNGPIKEKVYVEQPPSFEDDRYPDHVYKLSKALYGLKQAPRAWYECLRDFFITNAFKVGKADPTLFTKTCNGDLFVCQIVTP

SEQ ID NO: 258227 - protein, 103 aa, Zea mays
  Clone ID: MRT4577_167089C.1.pep
VRGSSGNGPCKYADQRLAFLWIGLWRACGTVVLSSGKPPNELCWREGVPQCKHSLGNTENSGRGYHLELTTSIQMMIISKHLRTTTRAFVQTTGWASSETTTV

SEQ ID NO: 258228 - protein, 1204 aa, Zea mays
  Clone ID: MRT4577_16708C.1.pep
MARVRSTARVEREGDETEGAETVPISEAMKRSGLMTSEDIPAAEAEQADIEEAGTDDDYNIAVPSKPSHLDFGKSTISKADFPKMVKELKKEKASLQESLEIAEGEEANTREAYRTLKMDYDKKLKKLAPMKKIRKKTKSQGCQTERKKEAPLALPPSRIENLSDVEDMSLASLDDLLKEFGDTLEKEFGNLAQVLANQTRLIEVLTRSLENQCPNGGRPHDRITDFLRLKPPTFAGSSNPLDADDWLRTIKRKLEAIGCPENQRVQLAAHQLSGMALTWWDTFSTAVRDATWAEFEIAFREHHVPQGIVQLKEDEFRELTQGGRSVKAKKMARFLKGLRPELKTILASQDFLSFSHLSNKAIQVERAREEEKGHLRGNSKSSELSSKTGTSHFKNNCPQLKASGPTYSNSVNGPKNAPTSASKAPSSISQQSKNQYHGRARVNHVDAQEAQQAPGVVLVEEFIDVFPEELPGMLPEREVEFYIDLIPGTAPTAKGPYRMAPTELAELKLQIAELQQKGYIRPSSSPWGAPVLFVTKKDGSMRMRIDYRSLNEVTIKNKYPLPRIDDLFDQLQGAKYLSKIDLRLGYHQLRIKEADIHKTAFVTRYGQYEFTVMPFGLTNAPAFFMYLMNKVFMEELDNFVVVFIDDILIYSKSRENHEHHLRIVLERLRAHQLYAKLSKCEFWLEKIAFLGHILTAEEIEVEPSKVEAVSKWKQPSNVSEVRSFLGMAGYYHRFIKGFSSIARPMTELLKKDNKFVWTPKCEESFQIIKKKLTTAPVLTLLDIHHDFVVFCDASRQGLGWLELIKDYDLEIHYHPGKANVVADALSRKPFGKKGTNFLEDWKKESAQLNAYLGDNGSLEVKPMLEDLICKAQRLDTETAGLTEKARKEPLLDFRKDEEGVLWLKNRLDHKMYLDLKIRYSWRGMKKEIAQYVARCDTCQRTKAEHQKPAGLLQPLPVPEWKWEEIDMDFVTGLPRTQKGNDSIWVIIDRLTKVAHFIPVKTTFGGATLARIYLKEIVRLHGISRKIVNWESSLPYAEFSYNNSYKASIKMSPFEALYGRKCQTPLMWSNVGGRTLEGPAFVKEAEEKVALIRKRLLEAQSRQKSYADNRRRELRFEEGDFVYLKVSPMRGVKRLQVKGKLAPRFVGPYPIIDRVGPAAYRLELPESMSNIHNVFHVSQLRKCLQVPENHIEEETIKIQKDLQY

SEQ ID NO: 258229 - protein, 85 aa, Zea mays
  Clone ID: MRT4577_167090C.1.pep
ARILYSRRPWFVFLPKEDITPILVAFFPLPKTSTTHDLPLVFISRAVLSTEMTDAYLSLSLHGVGHSHSRYNPRTKSNPKRLPSF

SEQ ID NO: 258230 - protein, 521 aa, Zea mays
  unsure (1)..(521): unsure at all Xaa locations
  Clone ID: MRT4577_167091C.1.pep
MGTKASVSSKEAGGKYSSKQECDDNIKTTGTPTYGSLWARCLSQHRGKGKYETQGTLKRYLRRAQNEFELKVKKIWSDNGSEFKNLQVEEYLEEEGIKHELSAPYTPQQNDEDEVPTAAVRTMAIGDIRPQEQQEQDQPSSSTLVHPPTQDEEQVAQDEGLDQGRAREEHDKEEDVLQVPPTQVRSTIQRNHLVDQILGDISKGITTRSRLANFCEHSSFVSSIKPFSVEEALQDPDWVLAMQEELNNLKRNEVWSLVPRSKQNVVGTKWMFCNKQEEHGVVTRNKARLVAKGYAQVAGLDFEETFAPVDRLESIQILLAYAAHHSFKLFQMDVKSAFLNGLIKEEVYVEQPXGFEDDRYPDHVYKLSKALYGLKQASRAWLGXADPTLFTKTCNGDLFVCQIYVYDIIFGSTNQKSCEEFRRVMMQKFEISMMGELNYFLGFQVKQLKEGTFISQAKYTQDLLKRFGMKDAKPAKTPMGTDGHLDLNKGGKSVDQKAYRSMIGSFEREMCPWAISKYFGD

SEQ ID NO: 258231 - protein, 150 aa, Zea mays
  unsure (1)..(150): unsure at all Xaa locations
  Clone ID: MRT4577_167092C.1.pep
SFYFLFYFLLPVINQLSLANLSPYSQQQQFLPFNQQSTLNPAVYWGAQLLPQNQLAAAYSQKQQQRGPPQMGVLDPGAYFLQKKLVPXKQLAEXNKGCGFKQKQLVKXYHHFGVKKETLLQLQQWLTFVQLALTDPAACYQQHIIGGAKY

SEQ ID NO: 258232 - protein, 104 aa, Zea mays
  Clone ID: MRT4577_167093C.1.pep
MLWRRVDMRHMSYGYEGERLQTEKVEDMARAAIDPSAGTMEPFFADTIVNDDLLRCLSQRSVKRLQTDKVEVMARAAIDRSAGTMEAFFGDIFVYDDLLRYLSQ

SEQ ID NO: 258233 - protein, 91 aa, Zea mays
  Clone ID: MRT4577_167094C.1.pep
NDGLLEMFRNEYIGDTPYISCTPTLCHHKLSIRDQFLVLSSDGLYQYLSNEEVVLHVENFMERFPEGDPAQSLIEELLSRAAKKAGMNFYE

SEQ ID NO: 258234 - protein, 54 aa, Zea mays
  Clone ID: MRT4577_167095C.1.pep
THSYCNNSHDNNPYLSEQGHHRRTDSFYTDHHRQHNDPSSTKITPHANEHTNAS

SEQ ID NO: 258235 - protein, 51 aa, Zea mays
  Clone ID: MRT4577_167096C.1.pep
QQVSLVGRLLEPSTQQSWVTTAHSASKDYYGGNTQVTISAFSQLFSSACPK

SEQ ID NO: 258236 - protein, 109 aa, Zea mays
  Clone ID: MRT4577_167097C.1.pep
DPPPKGPLAKKSPGPAPKSGRAHNPACGAQGGGPRGPPPGKRPQKRGGPARFLTRMEIPSRVHKPPLNPCVMSAKPRIYREWKIQEPFLFLPRVKFWVFFLDPQKIFFP

SEQ ID NO: 258237 - protein, 155 aa, Zea mays
  Clone ID: MRT4577_167098C.1.pep
LPIKGGNHPKPPPSRALTRGAHSPPIPPPPSTIYAGRTVGSFSHLGQAAVGEGDPRGPRRGFPRFSQVNRRPTDCNGFPQGSPWAPFGPPRPVPMWPALFIGISRSLPLPGARPPPSLMFFFFFFPFRSFPPVLVLSFFFFFFFFFFLRGNLFYC

SEQ ID NO: 258238 - protein, 87 aa, Zea mays
  Clone ID: MRT4577_167099C.1.pep
PRTFFLQSWGNNLVWCNPEAGAQFFSPPPKNIPPWRAGRSKKNCMLAKQNNILLRGVPLNGELDFPFLNKLKSRGPSPEKKAQKATT

SEQ ID NO: 258239 - protein, 82 aa, Zea mays
  Clone ID: MRT4577_16709C.1.pep
RPIPLFWASSIWLGYRIWSPKQRRTWEGVFWGATFIYPGKLLFMGELFGGSQKHHSRAHLPFYKRLGLPSMGFWASKILTCL

SEQ ID NO: 258240 - protein, 98 aa, Zea mays
  Clone ID: MRT4577_1670C.1.pep
RGSFLPILLLSSPFSPQCLPSSKPPLLVPQLFFYLNDLLYFVFAFNFIFFSFSFVPFLLLVLNIFYYFFIASIFFFYSIFKIMVYLLYYIFFIIFIFF

SEQ ID NO: 258241 - protein, 51 aa, Zea mays
  Clone ID: MRT4577_167100C.1.pep
KKKHEKLKSHFQQKEVCMNKLLRDAYTFFINYNGHLNYIFERKKVGLKRIR

SEQ ID NO: 258242 - protein, 55 aa, Zea mays
  Clone ID: MRT4577_167101C.1.pep
SARHADAGCAIRCLVVHHPAHLPGRQWIQVWSADRHSSVVTYPSWRQEHGVVTSP

SEQ ID NO: 258243 - protein, 76 aa, Zea mays
  Clone ID: MRT4577_167102C.1.pep
QFQEELRRRASNPLVTNLELGASDGSVSPPPHGSPKNESKRTNTISLRISRFWTRWWWGTNGVSLMLNKQMRRPGR

SEQ ID NO: 258244 - protein, 104 aa, Zea mays
  Clone ID: MRT4577_167103C.1.pep
MVRKAKVEFDEQPPDNFDPKNPYADPVAMLEYREHLVREKWIQIETAKIIRERLRWCYRIEGINHHQKCRHLVDQYLEATRGVGWGKDARPPELHEPKKIIEAE

SEQ ID NO: 258245 - protein, 106 aa, Zea mays
  Clone ID: MRT4577_167104C.1.pep
MVRKAKVEFDEQPPDNFDPKNPYADPVAMLEYREHLVREKWIQIETAKIIRERLRWCYRIEGINHHQKCRHLVDQYLEATRGVGWGKDARPPELHGPNPFMPRLTL

SEQ ID NO: 258246 - protein, 55 aa, Zea mays
  unsure (1)..(55): unsure at all Xaa locations
  Clone ID: MRT4577_167105C.1.pep
NITVCFVYMFGVMLISLYTXCLFVLWRVEEPVTEDPGEQQVEVAEQELIKGKLCP

SEQ ID NO: 258247 - protein, 197 aa, Zea mays
  Clone ID: MRT4577_167106C.1.pep
QKWIKGTTCLALEIPGIRMILQILVTSRLSRSRIGCPRRRAVGSGFGTPMSNSGQSRPSPHQTTPSQAPTRNHEASTLIFLTRTAVDTKLGRRLPAVPMANYRTPEGRASQRDGMTCTRASVARPRGPLQVTRRGGTGESVRGLRSVRRRQRGRVGQRGRVRDLGSRKSSVTGKGHGLKLIHRDGSNPQNPSMWARS

SEQ ID NO: 258248 - protein, 110 aa, Zea mays
  Clone ID: MRT4577_167107C.1.pep
QRQWGQGETADAVPQLRHRSESARRPGLGTPMLGEKLRSTDVDLPQARDVGMDGLGHGVPLPVRISPRCRNPDVDRSRLNLVADEQATKDSGVQLEETAEQELVEGKLCP

SEQ ID NO: 258249 - protein, 70 aa, Zea mays
  Clone ID: MRT4577_167108C.1.pep
HHPWERKALGVKSIIWRMRSMDAVCRSSAIHQGLSGASLVRYMYVDVVRSSLPGGISPLVNGASLATRSG

SEQ ID NO: 258250 - protein, 183 aa, Zea mays
  unsure (1)..(183): unsure at all Xaa locations
  Clone ID: MRT4577_167109C.1.pep
EHHXYKSKADAGASNTYPQHAGTVRKNGFIDINNRPCKVXVRYSTSXTGKHDHAKCHFVAIHIFDGKKLEDIDPSSHXCDIPXVNRTEYQLIDISEDGFERLLTSDDSTKDDLILPTDETLVVHIKDTCSIADKDLVCTXVHSAMGEEHICTLNDVGPNELPWLYRLNPTVSQLISEHNCITE

SEQ ID NO: 258251 - protein, 943 aa, Zea mays
  unsure (1)..(943): unsure at all Xaa locations
  Clone ID: MRT4577_16710C.1.pep
MGDFLRLKPPTFTGSSNPLDADDWLRTIKRKLEAIGCPENQRVQLASHQLFGMALSWDQATTSQLDPLLHVSVSRVRAPFRPPPVASNQPPANACWHCGDPSHFKNNFPQLKASGPTYSNSVNAPKNAPAPASKAPSSISQQSKNQYHGRARVNHVDAQEAQQAPGVVLDLTVLPSQGIDVILGMDWLTKHKGIISCASKTVFLTDHQGKSVSCQAQPPAKDLMVFNLTTESISVVEEFMDVFPEELPGMLPERELEFYIDLIPGTAPIAKRPYRMDPTELVELKLQIAELQQKGYIRPSSSPWGAPVLFVTKKDGSMRMCIDYRSLNEVTIKNKYPLPWIDDLFDQLQGAKYFSKIXPKVRISPAENQGSRYSEDCICHPSREDHEHHLRIVLERLRAHQLYAKLSKCEFWXYYRRFIKGFSSIERPMTELLKKDNKFVWTPKCEESFQIIKKKLTTAPVLTLPHIHQDFVVFGDASRQGLGHYLIGNKCHIFTNHKSLKYIFTQPYLNLRQRRWLESIKDYDLEIHYHPGKANVVADTLSRXTFWEERNQFLRRLEERISSTECMSGXNGSLEVKPMLEDLICKAQRLDTETSGLMEKARKEPLPDFRTDKEGVLWFKNRLCVPKGEAREVLLDEAHNSAYSIHPGTTKMYLDLKTRYWWRGMKKEIAQYVAWCDTCQQTKSEHQKPAGLLQPLPVSKWKWEEIGMDFVTGLPWTQKENDSIWVIIDRLTKVAHFIPVKTTFGGATLARIYLKEIIRLHGVPRKIVLDRGTQFTSKFWMSLQQAMGTKLDFSTAYHPQVRWSDRKGQQDNRQRELRFEEGDFVYLKVSPMRGVKRFQMKGKLAPRFVGSYPIIGRVGPAAYRLELPESMSDIHNVFHVSQLRKCLQVLENHIEEETIQIQKDLQYREKPVKILDSAVRKTRNSEVRLCKVHWSREGEEEAT

SEQ ID NO: 258252 - protein, 68 aa, Zea mays
  Clone ID: MRT4577_167110C.1.pep
NSPTFGIRTACQPQKMNSRLSGSGNLSAWCSSPILVDYDSHLQVETHKGPLHGEFCVGTLGNPYCQRL

SEQ ID NO: 258253 - protein, 39 aa, Zea mays
  Clone ID: MRT4577_167111C.1.pep
KLNRYLQILRGFIAFSILGWGRRYFLHPTYAQSLIKTCP

SEQ ID NO: 258254 - protein, 133 aa, Zea mays
  Clone ID: MRT4577_167112C.1.pep
SMSSVARNWARPSPLLPLLISCWSSIPLDRPTRWQGGRPGHTINHILKRTEGYAEPSTACGSPSTATDLDAPANNFSGVQSLPRSRSRVCVILARRQTRRGPSHSLTAGNTGIQVRRTHPSSRLPANFTPTPG

SEQ ID NO: 258255 - protein, 41 aa, Zea mays
  Clone ID: MRT4577_167113C.1.pep
FLFYYAKKMGGLRWGGWASKLDFFRSISRCKKRGAQGGESN

SEQ ID NO: 258256 - protein, 155 aa, Zea mays
  Clone ID: MRT4577_167114C.1.pep
MAHDLCEDLELVADDGGFDDYYWDDDFHFHDDDGFSASPTTPASVGAPGQQQQQQQMGDISASDYKEGEDMQGIPWERLNYTRDQYRRMRLKEYKSYQNLTRSHSGLQQHERKQVERKDTFYDFHLNTRAVKSTIVHFQVNNKQWQDVWVCAICS

SEQ ID NO: 258257 - protein, 77 aa, Zea mays
  Clone ID: MRT4577_167115C.1.pep
GDMLLLKLLKQCVAKHKILKKKSYILPFGLRTKKKKKEYKQHEHIQFTALHQDDWLHIIFILQNISQKLDYNNRNSA

SEQ ID NO: 258258 - protein, 164 aa, Zea mays
  unsure (1)..(164): unsure at all Xaa locations
  Clone ID: MRT4577_167116C.1.pep
PGDGHGCSXVATMCQGGMREGVADEHTKAASGEETAWKGVMERSFXAVVSPSHVVVANAGDSRAVLSGGGVPVPLSVDHKVCITLLPCIRLHGARNLSELDVLNFLVRXPDRPDELARIEAAGGRVIYWDGARVLGVLAMSRAIGELKFVPPVSFWGASPLTGF

SEQ ID NO: 258259 - protein, 85 aa, Zea mays
  Clone ID: MRT4577_167117C.1.pep
FFSVAKAAKDPRCAALFFPTRFQALHYVTRFRTIERSPLTLCKTHRTCTPPTIADERAPPDPPLCLKRPIEPSLVTAKTSESGMF

SEQ ID NO: 258260 - protein, 103 aa, Zea mays
  Clone ID: MRT4577_167118C.1.pep
LHYTTPHPPDDYHTRIRSRSFDRDRDARCYNLAKTGIIMCGVDCGQPLCPRDYDIPSQQAGGGDMLIVVPRRAGAKRIIWFPAADRHDVVRVGRHASQLPGHA

SEQ ID NO: 258261 - protein, 502 aa, Zea mays
  unsure (1)..(502): unsure at all Xaa locations
  Clone ID: MRT4577_167119C.1.pep
SSEGWERARNSYHEDLVDCVRHCVWYRATLFSQWKQXGMYATCMWVVELLLVLRDSNSMFHYVPEFYVESLVDCFHALRRSDPPFVSPALFLMQGLASFVTLVVKHFDDTRIVNPDLKDLLLQSISVLVQYKEFMLVFENNREAINKMPRSLLSAFDNRSWIPVTNILSRFCKGSGFASYKNGESPSSATFQVLLRETCIHEQELFFSFLNRLFNTLSWTMTEFSMSIREMQDKNQVADLQQRKCSVIFDISCSLARILEFCTREIPCAFLMGPDMNLRRLTELVVFILNHIISAADAEFFDMTLRRPGQHQEKTNRTMILAPLVGIILSLMECSSTSERRELNDVIAVFASMDCPATIHFGLQYLLSYNWSNVLRGDSSLAKLAQLKEFSHYFRRITASVDGEEEDHSLNTGDEDDDHTCCICYNCDSDAPFPRCHHRSCFGCISRHLLNNQRCFFCNAVVTSVTRXADSRAMRCSTHCLFRYRDPKEDGATDLSYLFCLT

SEQ ID NO: 258262 - protein, 329 aa, Zea mays
  unsure (1)..(329): unsure at all Xaa locations
  Clone ID: MRT4577_16711C.1.pep
AAHAXAEGLGCGGAGRCYCVVPAEGHSGGGQRRQEMNRVGKEDFEEHMRRLGRLSHPNLLALVGYYYRKEESRLIHVREPNRSSVGAQDGHREDRGAQGEGAPRAAASDGDRRXTTALSYLYDELCMLTVPHGHLKSSNILLDGHYEPLLTDYALVPVMNQSHAAQLMVAFKSPERKQFGRSSKKSDVWCLGLLILEMLTGKPPTYDLPKAAGAVPSAESLSSPQKPGPAAGNGTDLVTVVGSTPEGEWLDTVVDPDLRGEEEEDKEEMVKLIRVGMACCESNVDSRWELKTAIDKIEELKAKERPAPDEEQAFYSTVNNEDFNDVAIN

SEQ ID NO: 258263 - protein, 172 aa, Zea mays
  unsure (1)..(172): unsure at all Xaa locations
  Clone ID: MRT4577_167120C.1.pep
GRVGGGGGGGGKKAGSAAAPALGLQKQNSWSPDIERDEAWERRRRGMRRGGTALRRVRSVTDDDLDELRGCIDLGFGFEPAXPSPGPXAACGCAGRNRLLETLPALDLYYAVHAGGAEGPTCSCGAASEVSSEESPLGSPMSILSPGDPPETVKMRLKQWAQVVALSMLSRH

SEQ ID NO: 258264 - protein, 66 aa, Zea mays
  Clone ID: MRT4577_167121C.1.pep
LQLLRQHEGLAKCRLWSIKLQLQLSGCIRQEERRRGNGRRRELLRGRAGMTRPPCRRGESATIPET

SEQ ID NO: 258265 - protein, 85 aa, Zea mays
  unsure (1)..(85): unsure at all Xaa locations
  Clone ID: MRT4577_167122C.1.pep
GRWDIQXQQKGSFSPEVEFDVLKASESDRKSDALTVQRAFITSTKGNASMKPKKHSYSTEVIASSPSMEIEHTVQSSIVTQLQCS

SEQ ID NO: 258266 - protein, 74 aa, Zea mays
  Clone ID: MRT4577_167123C.1.pep
QSLCSGYLFFQPQKKNVLGPEKKSAQILTGKGQKGCSRPWHNQPNPGGAWAKMGHPTMIDSGGMKAFKTKKPPC

SEQ ID NO: 258267 - protein, 110 aa, Zea mays
  Clone ID: MRT4577_167124C.1.pep
CALFIHICRCKGFGDRSLKKLMSSVPYVFKRAMDQTASLLILLSDGVCEAAVQPDCCPRNQRFLARTSCWQAPGRSGGEALYLSPHSCYCSPGRILAPRRVVWSPHSTVC

SEQ ID NO: 258268 - protein, 159 aa, Zea mays
  unsure (1)..(159): unsure at all Xaa locations
  Clone ID: MRT4577_167125C.1.pep
MAEAPEPLMERLHRIFGASVMGQTTTDSTLLQSYEEXYISSLALLNMVEHGRDGEPMQAMRLMLGDVLDDYTVRGPHGFAMPHSVTDLXLEAVHHLFQTNMLDMLKQNGRAHMEVEXHHSHPVSGRWLSGDDIDTQRXLEALKPRAHAVEIHHIQNAND

SEQ ID NO: 258269 - protein, 226 aa, Zea mays
  unsure (1)..(226): unsure at all Xaa locations
  Clone ID: MRT4577_167126C.1.pep
MKCAVVVASLAAVMSVLVLHAGAHRPLVEPSHANATTPQMTDTWPPTPQANRANLTAILVLDGPFRTFLGYLQQTNLVEVFQNQAYLTDQGITIFVPVDRAFAAVKPPVLSRLSTQQLKNLMMYHSLPKHYELADFERLSQTRPVTTLAGSLYTVNMTYDAGTVHVHSSWADAKIVGSVSVDAPMAIYELDRVLLPDSIFRAQPPVAXLPDVPAAPXPXTXTPLSP

SEQ ID NO: 258270 - protein, 139 aa, Zea mays
  unsure (1)..(139): unsure at all Xaa locations
  Clone ID: MRT4577_167127C.1.pep
MEAATMAWTAAVVGAGLAYWIIWVMGAAXVKGKRSEDLKMGSITRDTVHDKCTRYWSFFRRPMETATTAASAEKVPAFIXTFYNLLTDIYKWWWGQSLHFYQYILRRFYRDITRXHEERVGDLLGTRLGQRLLYISCGV

SEQ ID NO: 258271 - protein, 130 aa, Zea mays
  unsure (1)..(130): unsure at all Xaa locations
  Clone ID: MRT4577_167128C.1.pep
MGGRGEGARGLGLAGVLRIAGFLVGFFQQPTGGGGGGAAQRSNFPPWFFLGRATSWTKMKGASLGGKKSLSNGDVLSHVPGKIENGSPGNVGDNNYNGSGDDIELMHFLGTNAYKFFIXGAKFFPRGRFG

SEQ ID NO: 258272 - protein, 60 aa, Zea mays
  Clone ID: MRT4577_167129C.1.pep
FQLLNHLYGLDSRGHLKVILSTNLIYSLDPSLLLPSLIDRKIEFPLPHVNTIPLIFHIHT

SEQ ID NO: 258273 - protein, 1320 aa, Zea mays
  Clone ID: MRT4577_16712C.1.pep
MEGSLVIRTSYCSEVEGFPHLLRSCALCMGIRKKPEYVWKEYRENGTEKCSMAVYLGESRSYPNPPDTASQTLTKMLPEKPSGSYAKTTAESNKNTPAWRKRLQALSGRDPTEDDPTIVYMAGYLHTLDNHYNDLSSHCTHLNSRVESLEQQMASDKTTPTASGIGAGFPLGAEGEADGEGKVANQTRLIEVLTRSLENQRPNGGRPQDRMGDFLRLKPPTFAGSSNPLDADDWLRTIKRKLEAIGCPKNQRIHLAAHQLFGMALSWWDTFSAAVRDATWTEFETDFREHHVPQGIVQLKEDEFRELTQGGRSVNEYVHKFTELARYSPDDVSTEAKKMACFLKGLRPKLKTILASQDFLSFSHLSNKAIQVERAREEEKCHLKRKFQVLRAQQQDRHQRTRSFGFPPKGPSYNKPAGPTPSRFSQQSKSSFQAPSVASNQPPANACWHYGDPSHFKNNCPQLKALGPTYSNSVNGASHSFIATSFVEKHGIPSTCLEIPLVTRTPRSDLLCQLKCSQVRILLSGVVFLADLTILPSQGIDVILGMDWLTKNKGIISCASKTILLIDHQGKSVSCQAQPPAKDPMVFNLAAESISMVEEFMDVFPEELPGMPLEREVEFYIDLIPSTALIAKRPYRMAPTELAELKLQIAELQRKGYIRPSSSPWGAPVLFVTKKDGSMRMCIDYRSLNEVTIKNKYPLPRIDDLFDQLQGAKYFSKIDLRCGYHQLRIKEADIQKTTFVTRYGQYEFTIMPFGLTNAPAFFMNLMNKVFMEELDKFVVVFIDDILIYSKSREDHEHHLWIVLERLRAHQLYAKLSKCEFWLEKIAFLGHILTIEGIEVDPSKVEAVSKWKQPSNVSEFRSFLGMAGYYRRFIKGFSSIARPMTKLLKKDNKFMWTPKCEESFQIIKKKLTTAPVLTLPDIHQDFVIFCYASRQGLGCVLMQNEKVIAYASRLLKPHEQNYPTHDLELAAIVHALKIWRHYLIGNKCHIFTDHKNLKYIFTQRDLNLRQRRWLELIKDYDLEIHYHPGKANVVADALSRKPFGKKGTNFLEDWKKESAQLNACLGDNGCLEVKPMLEDLICKAQRLDTETTGLMEKACKEPPPDFRIDEEGVLWFKNRLNWESSLPYVEFSYNNSYQASIKMSSFEALYGRKCQTPLMWSNVGEKTLEGPTFVKEAEEKVALIRKRLLEAQSRQKSYVDNRRRELRFEEGDFIYLKVSPMHGVKRFQVKGKLAPRFIGPNPIIGRVGPATYRLELSESMSDIHNVFHVSQLRKCLQVLENHIEEEAIQIQKDLQYREKPVKILDSVVRKTRNSEVRLCKV

SEQ ID NO: 258274 - protein, 58 aa, Zea mays
  Clone ID: MRT4577_167130C.1.pep
ERERGVIEVETVSQQDSVCSAQCLQHGRDWLLPPGWPLSDYLLFQLLITRPECKAKSN

SEQ ID NO: 258275 - protein, 77 aa, Zea mays
  Clone ID: MRT4577_167131C.1.pep
VSHFLRDNSIKGYIDDLIGTMHSRWDRICHTFATGRVTNADYTEPNGSCGDLLRAHTSSVRERLRRIEHLRLEPEPG

SEQ ID NO: 258276 - protein, 63 aa, Zea mays
  Clone ID: MRT4577_167132C.1.pep
MPIHIPSLGHNPGADVRKVPLSDGYYLQELKESHEQAAATSVKGHYLQNDHYGPNCTGSMDSR

SEQ ID NO: 258277 - protein, 84 aa, Zea mays
  unsure (1)..(84): unsure at all Xaa locations
  Clone ID: MRT4577_167133C.1.pep
MAAEPPTELESAIETVVTTFSTFAGREGRKXSLSTNECKVIVTQQLPHVLKDVGSLDDKMKSLDVNQDSELKFNEYWRLIGELA

SEQ ID NO: 258278 - protein, 95 aa, Zea mays
  Clone ID: MRT4577_167134C.1.pep
MRLPSCNDERRLNGHEATLHQAAREAEAGTTFRMTLDMDGCQRRKQEWLACAEAVEAQRRGEERKGLAAVGAVWKHRVSRTERPQIVRRRRFSHR

SEQ ID NO: 258279 - protein, 387 aa, Zea mays
  Clone ID: MRT4577_167135C.1.pep
MAAVAAHHHLHPSSVAARTPTLGRRHRFSSLPLAARPSSQGRFSFRAATRVLTRAGSTGASSAASPAATTASSLSLEELRGGCTTWTWRGMRVNYLAIRQGPPVLLVHGFGASVAHWRRNIGVLSESYTVYAIDLLGFGASDKPPGFSYTMETWAELILDFLEEVVRRPTVLVGNSVGSLACVIAASESSREAVRGLVLLNCAGGMNNKAIVDDWRIKLLLPLLWLIDFLLKQRPIASALFNRVKNRDNLKDILLSVYGNKDAVDDELVEIIRGPADTEGALDAFVSTVTGPPGPSPIALMPRLADLPVLVLWGDRDPFTPIDGPVGKFFSKLPSELPNVTLYMLEGVGHCPHDDRPDLVHDRLLPWLEALLPPAAGAVTTTTTTVV

SEQ ID NO: 258280 - protein, 62 aa, Zea mays
  unsure (1)..(62): unsure at all Xaa locations
  Clone ID: MRT4577_167136C.1.pep
LDGVSTAAFLRQRQLXPLGQHVAPNAGTLXQLQLLLPLNVLALTNPAVFYQQPXIIGXGALF

SEQ ID NO: 258281 - protein, 54 aa, Zea mays
  Clone ID: MRT4577_167137C.1.pep
RQNWLQDTENDLPLLVDTKNSDIRWRTLCFLSNLKVDTSPKKICFYFRGEREEL

SEQ ID NO: 258282 - protein, 162 aa, Zea mays
  unsure (1)..(162): unsure at all Xaa locations
  Clone ID: MRT4577_167138C.1.pep
MEGKEEDVRLGANKYSERQPIGTAAQGTDDKDYKEAPPAPLFQPGELKSWSFYRAGIAEVDATFLFLYISILTVMGVSKSTSECATVGIQGIAWTFGGMIFALVYCNDGISGGHINPEETFGLFRXXRKLCLTXRAVLYIIMQCLGATCGARVSKEIQQGMD

SEQ ID NO: 258283 - protein, 50 aa, Zea mays
  Clone ID: MRT4577_167139C.1.pep
VYSYYQEVLKALKPLITHTYFSSSSFPYHDYLALAARSLGTLKVACFCLN

SEQ ID NO: 258284 - protein, 148 aa, Zea mays
  unsure (1)..(148): unsure at all Xaa locations
  Clone ID: MRT4577_16713C.1.pep
MHALNAITMILGLVVLATIALVSTVSWTQTXGCRCGXHQSHEQFHHPQQHHTKKQQHRPSPHHHQLHQHRHQHCHMQSQKHHEQHEVHXVEHQLQQRAXHQHHQHHLHQLHHQCEGHQQHDLHSQGHVQQHEQSHEQHQGQSHEQQHG

SEQ ID NO: 258285 - protein, 50 aa, Zea mays
  Clone ID: MRT4577_167140C.1.pep
WWLRTKPLDPSIARPGVVGIVSKAHTSSECRVELIVSRCNCISSSFRHRV

SEQ ID NO: 258286 - protein, 77 aa, Zea mays
  unsure (1)..(77): unsure at all Xaa locations
  Clone ID: MRT4577_167141C.1.pep
SARGAINPKLGVSANNYGRECXECTRXGIDFTKDHETVNSQPFMRWRGRFVFCAKAIYKAPADTGEIKGHYLDAAAG

SEQ ID NO: 258287 - protein, 210 aa, Zea mays
  unsure (1)..(210): unsure at all Xaa locations
  Clone ID: MRT4577_167142C.1.pep
GKEEDVRLCDNKFSERQPIGTAVQVTDDKDYXEPPPAPLFQPGELKSWSFYRAGISEFVFTFLFLYISILTVMGVSKSTSKCATVCIQGICWSFSDMIFALVYCTGGISGVHINPAXTFILVLERKLSLTSAVFYIIMQCLIAICGAVVVKVFQQGLXMVNGGLANVVTPGYTKGDMLGGXIVCTFILFYTVFSVTDIDRNVRDSHVPIL

SEQ ID NO: 258288 - protein, 290 aa, Zea mays
  unsure (1)..(290): unsure at all Xaa locations
  Clone ID: MRT4577_167143C.1.pep
MEGKEEDVRLGANKFSERQPIGTAAQGTDDKDYKEPPPAPLFEPGEAKAWSFYRAGIGEFVGTFLFLYIFILTGMGGFKSTFKCATGGIQGIAWSFGGMNFALVYCXTAGIFGGHITPAVTFGLFLXRKLSLXRAVFYIIMQCLGAICGAGVVKGFQQGLYMGNGGGANVVAPGYTKGDGLGAEIVGTFILVYTVFSAXTDAKRNARDSHVPILAPLPIGFAVFLVHLATIPITGTGINPARSLGAAVIYNQHHAWADHWIFWVGPFIGAALAAIYHQVIIRAIPFKSRS

SEQ ID NO: 258289 - protein, 294 aa, Zea mays
  unsure (1)..(294): unsure at all Xaa locations
  Clone ID: MRT4577_167144C.1.pep
MEGKEEDVRLGANKFSERQPIGTAAQGAGAGDDDKDYKEPPPAPLFEPGELKSWSFYRAGIAEFVATFLFLYITVLTVMGVSXKSTSKCATVGIQGIAXWSFGGMIFALVYCTAGISGGHINPAVTFGLFLARKLSLTRAIFYIIMQCLGAICGAGVVKGFQQGLYMGNGGGANVVAPGYTKGDGLGAEIVGTFILVYTVFSATDAKRNARDSHVPILAPLPIGFAVFLVHLATIPITGTGINPARSLGAAIIYNRDHAWSDHWIFWVGPFIGAALAAIYHQVIIRAIPFKSRS

SEQ ID NO: 258290 - protein, 259 aa, Zea mays
  Clone ID: MRT4577_167146C.1.pep
MEGKEEDVRLGANKFSERQPIGTAAQGASAGDDDKDYKEPPPAPMFEPGELKSWSFYRAGIAEFVDTFLFLYITVLTVMGVFKCTSKCTTVGIQGIAWSFGGMIFALVYCTAGISGGHINPAVTFGLFLARKLSLTRAVFYIIMQCLGAICGAGVVKGFQQGLYMGNGGGANVVAPGYTKGSGLGAEIIGTFVLVYTVFSATDAKRNARDSHVPILAPLPIGFAVFLVHLATIPITGTGINPARSLGAAIIYNREHAWS

SEQ ID NO: 258291 - protein, 168 aa, Zea mays
  unsure (1)..(168): unsure at all Xaa locations
  Clone ID: MRT4577_167147C.1.pep
RRQRSSPPPLLPPPLLPPPPPLLPPTPLPHXTAPPPSPAPLXPPSLXSEPPPPKGDRAVPRPRSXDPSPPSAPTRAQTHPRRISPPPXPIPAWAPPAPVRGDDGWRRRLLLARRGDALCGGRPKSPSSPLHANTQPLDLRRPPAGRRGRIHTSNLRIGRGPALPRHPA

SEQ ID NO: 258292 - protein, 303 aa, Zea mays
  unsure (1)..(303): unsure at all Xaa locations
  Clone ID: MRT4577_167148C.1.pep
MLLLALARLAGCKKVTRAGMEGKEEDVRLGANKFSERQPIGTAAQDTDDKDYKEPPPEPLFEPXELKSXSFYRAGIAEIDGTFLFLYISILTDMGVSKSXTSKCATXIGIQGIAWTFSGMIFALVYCTAGISGGHINPAVTFGLFLARKLSLTRAVFYIIMQCLGAICGAGVVKGFQQGLYMGNGGGANVVAPGYTKGDGLGAEIVGTFILVYTVFSATDAKRNARDSHVPILAPLPIGFAVFLVHLATIPITGTGINPARSLGAAVIYNQHHAWADHVSGKQLSSTFVLLTSFTALAKKKIV

SEQ ID NO: 258293 - protein, 269 aa, Zea mays
  Clone ID: MRT4577_167149C.1.pep
MEGKEEDVRLGANKFSERQPIGTAAQGTDDKDYKEPPPAPLFEPGELKSWSFYRAGIAEFVATFLFLYISILTVMGVSKSTSKCATVGIQGIAWSFGGMIFALVYCTAGISGGHINPAVTFGLFLARKLSLTRAVFYIIMQCLGAICGAGVVKGFQQGLYMGNGGGANVVAPGYTKGDGLGAEIVGTFILVYTVFSATDAKRNARDSHVPILAPLPIGFAVFLVHLATIPITGTGINPARSLGAAVIYNQHHAWADHVIIRAIPFKSRS

SEQ ID NO: 258294 - protein, 201 aa, Zea mays
  Clone ID: MRT4577_16714C.1.pep
MEGSLVIRTSYCSEVEGFPHLLWSCMLRMGIHKKPEYVWKEYHENGTEKCSMAVYLGESRNYLNHPPFQVTFTGHRFSETCQNVARKALRQLCQNYNRERKRLQALSGRDPTEDDPTIVYMAGYLHTLDNHYVDLSSHCTHLNSRVESLEQQVKELKKEKVSLQESLEIAEGEEANTREAYRTLKMDYDKKLKKLAPTKKI

SEQ ID NO: 258295 - protein, 94 aa, Zea mays
  unsure (1)..(94): unsure at all Xaa locations
  Clone ID: MRT4577_167150C.1.pep
GAKAAXGXEXXXXDGGPARATSNEAXEKAXTXNXEEPGGXXXTXRETGKXKEXRKETXNXENXKXDAXENXNGKEXDGXNKTGNQAQTXSGGGG

SEQ ID NO: 258296 - protein, 49 aa, Zea mays
  Clone ID: MRT4577_167151C.1.pep
NARVMDTLCNCCVQQCECERIRHHMFPSTTRALISSSVNNEHHTRTGCA

SEQ ID NO: 258297 - protein, 193 aa, Zea mays
  Clone ID: MRT4577_167153C.1.pep
SYALRLPAQRRHSSGEAQYNPDGDTSGCCLARKLSLTRAVFYIIMQCLGAICGAGVVKGFQQGLYMGNGGGANVVAPGYTKGDGLGAEIVGTFILVYTVFSAADAKRNARDSHVPILAPLPIGFAVFLVHLATIPITGTGINPARSLGAAIIYNGDHAWNDHWIFWVGPFIGAALAAIYHQVIIRAIPFKSRS

SEQ ID NO: 258298 - protein, 132 aa, Zea mays
  unsure (1)..(132): unsure at all Xaa locations
  Clone ID: MRT4577_167154C.1.pep
AVQTYRLQRAIAASVLTARXSQLRQXSLAQLEVQAVATHQQTQXFLSALSTLTMVNYGDYLQRQLLXSKPLTLAIVVXNQPQQQLLQVLPALSHLDMINADECQRQLHVVIIELAGFEQVTIRVSESVVRQS

SEQ ID NO: 258299 - protein, 52 aa, Zea mays
  Clone ID: MRT4577_167155C.1.pep
KRLFVPHFFNKSSHINHLGHLNPKKGSPQVNQFHTKLQSNSHTTSAPNLTCF

SEQ ID NO: 258300 - protein, 57 aa, Zea mays
  unsure (1)..(57): unsure at all Xaa locations
  Clone ID: MRT4577_167156C.1.pep
RYNVXGASASWLLGVQNDMXNFCRLVLVEPWLVLVTKGWLVVSTTYPTKNKKKFIFI

SEQ ID NO: 258301 - protein, 314 aa, Zea mays
  unsure (1)..(314): unsure at all Xaa locations
  Clone ID: MRT4577_167157C.1.pep
HWVPRGRPGPSSHSVTRTGHGDEFLLAHYHPFIRRIPPPHPPPVCHRPLRVLPPQAPPLPSSSQTSALLPNPHPLHLLLEDPHREHSLFRGLHLEDPSFCARRRPPLPLRRSLTPCPRLRSGADAEPSELEWRLMVAQLHELKGDLAEAERHFRELLAEEPLLVRALHGLALCMQKKPEGPAVFEMLENALHVVMGQLDVASEXSERRVPEERNIKLLIAQMHVVMGQLDVASEKLQSLINEDPRDFRSHLCQGIVYALLDRKEDADMQFDVYRSLVPDEFPDKSFISDVILAARTESHDRLQKEFDSEFQAKK

SEQ ID NO: 258302 - protein, 112 aa, Zea mays
  Clone ID: MRT4577_167158C.1.pep
GQDYPGRPTRPPKVSGFAKVDLEAGTVDKFIYGDGRYGGEPCFVPRPDAPAGAAEDDGYVLCYVHDEARGASEMLVVNARDMRAEAAVKLPGRVPYGLHGTFIAGKELQRQA

SEQ ID NO: 258303 - protein, 282 aa, Zea mays
  unsure (1)..(282): unsure at all Xaa locations
  Clone ID: MRT4577_167159C.1.pep
MAMSFFSPTTTPSSSASLLPTRRQCATGPSVSFPLKPHRFRVHLKPLRSSRIRTLSTSSLKIPTESILSSVVSTSRTLLFVLVAGLLSLSGVRSLPALACAPAPTQQPQETEEQESKEKKQQEEAGERKEDVLPQLDEEDEEDDEVRMYSAILSRNSGDVDALKCALYAKMRRADWGGALRYARRLRDAEPSELEWRLMVAQLHELKGDLAEAERHFRELLAEEPLLVRALHGLALCMQKKPEGPAVFEMLENALQLATQLQRXLPEERNIKLLIAQMHGVM

SEQ ID NO: 258304 - protein, 86 aa, Zea mays
  Clone ID: MRT4577_16715C.1.pep
HAPGVTSPGSNSYGVNPGSGSGGPPFPSGAYSGARELEVLVCGEGNPASALDEFTPGSGGETGVSARQRGRGPRRGPTSRKGGHAD

SEQ ID NO: 258305 - protein, 78 aa, Zea mays
  Clone ID: MRT4577_167160C.1.pep
FWHKKKKKKKKKKTKKKKKKKKKKKKKKKKKKKKKKKKKRKKKKKGKKKKKDYKLKTRSCPQFLGAIPGGGYGAVDLT

SEQ ID NO: 258306 - protein, 154 aa, Zea mays
  unsure (1)..(154): unsure at all Xaa locations
  Clone ID: MRT4577_167161C.1.pep
MARCSTCDRFSRFMETDEFAVPPSRPALVHPDADGVRTPSALGLLSPEDPPPAFMERDWRHGGDNTAAYPGCSPFQPSAAGRPVSISLPASPTGGFDISSRTEAELQRDAAAVTDAPPXRMMMLPPFAPATAMALEQPGRXVFRSQPIPLRRGR

SEQ ID NO: 258307 - protein, 100 aa, Zea mays
  unsure (1)..(100): unsure at all Xaa locations
  Clone ID: MRT4577_167162C.1.pep
WTSAAESLDLKVNTDLLIRWYGKEGAEGLGALVTLGLXLLCAXAGPAANCGCQPNVCCSKFGYCGXTDEYCXDGCQXGPCRSGGGGGGANVASVVTGSFF

SEQ ID NO: 258308 - protein, 290 aa, Zea mays
  Clone ID: MRT4577_167163C.1.pep
AGSRITPRPNSAIRYTYTHCPPPTSSCRLNDIHIHPSPTTPTVHPLIPAPPPATASPPMDCPQLNSPLPVNWDALDALVLDFARSDRLVAPPTASASPSPPSSPSSTTTVTSSAPSSSSLSSSSSYRSRLLIRCARRAIELGDVDAALALLRARAPAALADHRLLFHLHKQRFVELVRRGTEADRDAALDCLRTALAPCALDAYPEAYEEFKHIMLVLIYDKEDQSSPVVNEWSIKRRFELAGLLSSILRAHLEAYDPVLSLTLRYLISIHKAFCTRPGIQSPISDLTER

SEQ ID NO: 258309 - protein, 112 aa, Zea mays
  Clone ID: MRT4577_167164C.1.pep
NMTSSGVLQEAFNFMGAFTDVFSRGYTTKEGFVRGAINTTKNWLLERNGGLNALGLFVLFLRGSSCKHYCLFCGPGKKKNKALVFLQIKVGFPVFVKWQGMAMLVALDWPNP

SEQ ID NO: 258310 - protein, 130 aa, Zea mays
  Clone ID: MRT4577_167165C.1.pep
GRALPYADLPDTVASRCRSAIAAAASGAGYGFRRGAEASTRRGFPFSAREGGGGHGSTSVCGLLLVKAFSLAPPFSCSVFMQMSLRVVLLHRELPSWFRVHELSGAGDSYVRFFICTRVPNCGCLIDTGN

SEQ ID NO: 258311 - protein, 152 aa, Zea mays
  unsure (1)..(152): unsure at all Xaa locations
  Clone ID: MRT4577_167166C.1.pep
MAGSTTTTAVCSMCGDVGFPDKLFRCARCRRRFQHSYCTNYYGDAAPAQLAGAGVCNWCXSATTSAAGRRSGSTLRRRRRRRRHAAASXPHRQAEEEEEAAAAAGWRRSAQHQPASSSSFPPSXGAARSPAAASTPRAAXPRRYKLLKDVLC

SEQ ID NO: 258312 - protein, 69 aa, Zea mays
  unsure (1)..(69): unsure at all Xaa locations
  Clone ID: MRT4577_167167C.1.pep
EMTDYSNLRWYVHQLCSCTHTHTANLLRAYHVWWYKGGGGGLPNXFTRVATVCVXTSXHXXXSAPGASP

SEQ ID NO: 258313 - protein, 62 aa, Zea mays
  Clone ID: MRT4577_167168C.1.pep
ISLMVLRRSSARRAAKLVTHVGYYLCTIIISKTKVVLDELKSKGFASYKKKNPKKKKKGGQE

SEQ ID NO: 258314 - protein, 119 aa, Zea mays
  Clone ID: MRT4577_167169C.1.pep
FYSKGFPPAYTVAREEYFFSLGPPLNGAPSFPSKPLRMEPFPKGLFGTESPKFPPKTDTTPLCPLPKGSPRFFFQTRLPPQFLCIKLFYSGLPKTPQRILFARHPRNWWAPGPVCVLFL

SEQ ID NO: 258315 - protein, 54 aa, Zea mays
  Clone ID: MRT4577_16716C.1.pep
SVSVSSVTESSLVSLFWLASALLLHSSPCDILTYTDIIIVQSSLFSSSYVVQVS

SEQ ID NO: 258316 - protein, 100 aa, Zea mays
  unsure (1)..(100): unsure at all Xaa locations
  Clone ID: MRT4577_167170C.1.pep
RALWSIRTTSTEHMEEDVVCHNPEIVQLLPKRXARPEFRSSQITRMLNRTGGFLSXQRDRELEQELTXRLSSKSDRQCKPTTVVSPPPSLRGATDEYKAA

SEQ ID NO: 258317 - protein, 180 aa, Zea mays
  unsure (1)..(180): unsure at all Xaa locations
  Clone ID: MRT4577_167171C.1.pep
MDLPQPSSLGRGGHPPGGKGPPRTQGPPGEPRGKPPSXPPKFEQGQETREPFFPGGTALGPTPSPTQKAGSPPPAGPYGGLFSPPPGGPPPKGGAREKAKGFPTPPPPPEGGGRPQWPAPPGGRRRAKTHHMGEGAWPTQPLKPGGQRPPRGRPRGGGRKQKGGWPPQGPPRGTGQNPPP

SEQ ID NO: 258318 - protein, 424 aa, Zea mays
  Clone ID: MRT4577_167172C.1.pep
MMSGRLNAATPASPGDDFSFAPMQMPPPPPYVGFEHGGGGQRGAGAMQAQQHHLYDGLDFASALQFQQEASSHSHHHQLLTLPSSLGPMAPSMPMPMPMPLPMQMPVPGDHVYHPALGTMVKREGGGADGGRIGLNLGRRTYFSPGDMLAVDRLLMRSRLGGVFGLGFGGAHQHQVPRCQAEGCKADLSGAKHYHRRHKVCEYHAKASVVAANGKQQRFCQQCSRFHVLSEFDEVKRSCRKRLAEHNRRRRKPATTASSKDAASPPAANKKTNGGSITCSYSTENKNDDLSCRAKSTMSSNTSSVISCQLDQPGNKHQLARPTLTLGASQDNKDHQQQLSTMLHVQAAGGYHHQEQQHFITSLQVHNNGGSGNNNNNNIILSCSSVCSSLPPPPSAPNGEVSDQNTAANNGNGNMHNLFEVDFM

SEQ ID NO: 258319 - protein, 69 aa, Zea mays
  unsure (1)..(69): unsure at all Xaa locations
  Clone ID: MRT4577_167173C.1.pep
SKHERXCHAVTAQTLXGGVGCLVCLIYATLPADEFIHEXVLXLMNHHNILXXKFDNHSDVLYAKFEVNR

SEQ ID NO: 258320 - protein, 292 aa, Zea mays
  Clone ID: MRT4577_167174C.1.pep
MEGKEEDVRLGANKFSERQPIGTAAQGAGAGDDDKDYKEPPPAPLFEPGELKSWSFYRAGIAEFVATFLFLYITVLTVMGVSKSTSKCATVGIQGIAWSFGGMIFALVYCTAGISGGHINPAVTFGLFLARKLSLTRAIFYIIMQCLGAICGAGVVKGFQQGLYMGNGGGANVVAPGYTKGDGLGAEIVGTFILVYTVFSATDAKRNARDSHVPILAPLPIGFAVFLVHLATIPITGTGINPARSLGAAIIYNRDHAWSDHWIFWVGPFIGAALAAIYHQVIIRAIPFKSRS

SEQ ID NO: 258321 - protein, 192 aa, Zea mays
  unsure (1)..(192): unsure at all Xaa locations
  Clone ID: MRT4577_167175C.1.pep
MRSGRGKMATPPPPIRPAAALLLLVLAGVLASAASADLVISKADRRVDLTSHIVRVLASLKAENVGPDPVSQVLLAFPNIQSKNLAAIRAFGSEGKVKGQSTVLPIEVVQPSGAPPELTFFSALLPKPLEKGKTLYLDVLTVFTHSLQPFPEEITQAEAQLGVYQDSAHYLSPYPVTAQTLAIXCPVGRVES

SEQ ID NO: 258322 - protein, 289 aa, Zea mays
  unsure (1)..(289): unsure at all Xaa locations
  Clone ID: MRT4577_167176C.1.pep
MEGKEEDVRLGANKFSERQPIGTAAQGTDDKDYKEPPPAPLFEPGELKSWSFYRAGIAEFVATFLFLYISILTVMGVSKSTSKCATVGIQGIAWSFGGMIFALVYCTAGISGGHINPAVTFGLFLARKLSLTRAVFYIIMQCLGAICGAGVVKGFQQGLYMGNGGXGANVVAPGYTKGDGLGAEIVGTFILVYTVFSATDAKRNARDSHVPILAPLPIGFAVFLVHLATIPITGTGINPARSLGAAVIYNQHHAWADHWIFWVGPFIGAALAAIYHQVIIRAIPFKSRS

SEQ ID NO: 258323 - protein, 298 aa, Zea mays
  unsure (1)..(298): unsure at all Xaa locations
  Clone ID: MRT4577_167177C.1.pep
MIIIKCIYYSKKKIKSQTHTAASRNHREPNRTGRRESREPGTVAWGRGATMEGKEEDVRLGANKFSERQPIGTAAPLFEPGELKSWSFYRAGIAEFVATFLFLYITVLTVMGVSKSTSKCATVGIQGIAWSFGRMIFALVYCTAGISGGHINPAVTFGLFLARKLSLTRATFYIIMQCLGAICGAGVVKGFQQGLYMGNGGGANVVAPGYTKGDGLGAEIVGTFILVYTVFSXHLATIPITGTGINPARSLGAAIIYNRDHAWSDHWIFXWVGPFIGAALAAIYHQVIIRAIPFKSRS

SEQ ID NO: 258324 - protein, 289 aa, Zea mays
  Clone ID: MRT4577_167178C.1.pep
MEGKEEDVRLGANKFSERQPIGTAAQGAADDKDYKEPPPAPLFEPGELKSWSFYRAGIAEFVATFLFLYITILTVMGVSKSTSKCATVGIQGIAWSFGGMIFALVYCTAGISGGHINPAVTFGLFLARKLSLTRALFYIIMQCLGAICGAGVVKGFQQGLYMGNGGGANVVAPGYTKGDGLGAEIVGTFILVYTVFSATDAKRNARDSHVPILAPLPIGFAVFLVHLATIPITGTGINPARSLGAAIIYNRDHAWNDHWIFWVGPFIGAALAAIYHQVIIRAIPFKSRS

SEQ ID NO: 258325 - protein, 289 aa, Zea mays
  unsure (1)..(289): unsure at all Xaa locations
  Clone ID: MRT4577_167179C.1.pep
MEGKEEDVRLGANKFSERQPIGTAAQGTDDKDYKEPPPAPLFEPGELKSWSFYRAGIAEFVATFLFLYISILTVMGVSKSTSKCATVGIQGIAWSFGGMIFALVYCTAGISGGHINPAVTFGLFLARKLSLTRAVFYIIMQCLGAICGAGVVKGFQQGLYXATGGGANVVAPGYTKGDGLGAXEIVGTFILVYTVFSATDAKRNARDSHVPILAPLPIGFAVFLVHLATIPITGTGINPARSLGAAVIYNQHHAWADHWIFWVGPFIGAALAAIYHQVIIRAIPFKSRS

SEQ ID NO: 258326 - protein, 68 aa, Zea mays
  Clone ID: MRT4577_16717C.1.pep
MGGKSSFFCPIFSFLRKSRRYDDDMSDWDGGYARKVRSSDEDYGGWWVGEPDVDSKASDFINNFHQKN

SEQ ID NO: 258327 - protein, 64 aa, Zea mays
  Clone ID: MRT4577_167180C.1.pep
ASLIFHPPNHPNFEFSMKYFSILIRFVFIFMKIFLSIHKYIIYRKFIRNCILSKVTSLWIGIKC

SEQ ID NO: 258328 - protein, 291 aa, Zea mays
  unsure (1)..(291): unsure at all Xaa locations
  Clone ID: MRT4577_167181C.1.pep
MEGKEEDVRLGANKFSERQPIGTAAQGTDDKDYKEPPPAPLFEPGELKSWSFYRAGIAEFVATFLFLYISILTVMGVSKSTSKCATVGIQGIAWSFGGMIFALVYCTAGISGGHINPAVTFGLFLARKLSLTRAVFYIIMQCLGAIXGAGVVKGFQQGLYMGNXGGGANVVAPGYTKGDGLGAEIVGTFILVYTVFSATDAKRNARDSXHVPILAPLPIGXFAVFLVHLATIPITGTGINPARSLGAAVIYNQHHAWADHWIFWVGPFIGAALAAIYHQVIIRAIPFKSRS

SEQ ID NO: 258329 - protein, 290 aa, Zea mays
  unsure (1)..(290): unsure at all Xaa locations
  Clone ID: MRT4577_167182C.1.pep
MEGKEEDVRLGANKFSERQPIGTAAQGTDDKDYKEPPPAPLFEPGELKSWSFYRAGIAEFVATFLFLYISILTVMGVSKSTSKCATVGIQGIAWSFGGMIFALVYCTAGISGGHINPAVTFGLFLARKLSLTRAVFYIIMQCLGAICGAGVVKGFQQGLYMGNGGGAXNVVAPGYTKGDGLXGAEIVGTFILVYTVFSATDAKRNARDSHVPILAPLPIGFAVFLVHLATIPITGTGINPARSLGAAVIYNQHHAWADHWIFWVGPFIGAALAAIYHQVIIRAIPFKSRS

SEQ ID NO: 258330 - protein, 130 aa, Zea mays
  Clone ID: MRT4577_167183C.1.pep
VRRSRRPVPIDNRNDYFSSADSPSIPSTHESHPEAWPERGPSPCAAISARSPPPPPWPMAAQRPAVSAGAMNAEGAAAHKGRMARLRRQPDNRRGRTDHHNLEQLLLHRTTCTFDEYEEPSDVDCIQISQ

SEQ ID NO: 258331 - protein, 124 aa, Zea mays
  unsure (1)..(124): unsure at all Xaa locations
  Clone ID: MRT4577_167184C.1.pep
MMKPSCVLLLSSLLVATLAATSSSSXSVFRRQAPRVAXVLGRKGRELGQSSGYHYYQHQSKQPELQGVAMEVKKPEEEATARRTADQSGDAETGLIYSADYSSVAMHAASPPTAKPKHRHPTRP

SEQ ID NO: 258332 - protein, 434 aa, Zea mays
  unsure (1)..(434): unsure at all Xaa locations
  Clone ID: MRT4577_167185C.1.pep
IDSHGEEASGGSAPRSGGXHEEENLSVREELKKQLWLAGPMIAGALLQNVIQMISVMYVGHLGELPLAGASMANSFATVTGLSLLLGMASALDTLCGQAFGARQYYLLGIYKQRAMFLLTLCHVRFLQTQNIVVPVMASAGAAAACHVVVCWALVYALGMGSKGAALSNAISYWVNVAVLSVYVRVSSACKETWTGFSTEAFRDALGFFRLAVPSALMVCLEMWSFELIVLLSGLLPNPKLETSVLSISLNTAAFVWMIPFGLSSAISTRVSNELGAGRPRAARLAVRVVVLLSVAEGLGVGLILVCVRYVWGHAYSNVEEVVTYVANMMLVIAVSNFFDGIQCVLSGVARGCGWQKIGACINLGAYYIVGIPSAYLIAFVLRVGGTGLWLGIICGLIVQLLLLAIITLCTNWDSEATKAKNRVFNSSSPASGT

SEQ ID NO: 258333 - protein, 163 aa, Zea mays
  Clone ID: MRT4577_167186C.1.pep
QNEDTEDTSASFGKNDAFQSCLDLTSQIDDGDSGNELFSPGSDSQRDAEHNLGNCSVAETDLEEGESKTAYCGQYGPLQEGVNVSLFTLEVDKTQNKESSPAGGSHDRDKEIASEIEAAASDGLQSSMATSGKDKLGSIPEHSEVEDEQNKEEHSQSQNGLGG

SEQ ID NO: 258334 - protein, 263 aa, Zea mays
  unsure (1)..(263): unsure at all Xaa locations
  Clone ID: MRT4577_167187C.1.pep
IDSHGEEASGGSAPRSGGXHEEENLSVREELKKQLWLAGPMIAGALLQNVIQMISVMYVGHLGELPLAGASMANSFATVTGLSLLLGMASALDTLCGQAFGARQYYLLGIYKQRAMFLLTLVSVPLSVVWFYTGEILLLFGQDPDIAAEAGTYARWMIPLLFAYGLLQCHVRFLQTQNIVVPVMASAGAAAACHVVVCWALVYALGMGSKGAALSNAISYWVNVAVLSVYVRVSSACKETWTGFSTEAFRDALGFFSLAGPVR

SEQ ID NO: 258335 - protein, 539 aa, Zea mays
  unsure (1)..(539): unsure at all Xaa locations
  Clone ID: MRT4577_167188C.1.pep
RCDCFKGFHEVLXDAEFFNDSKLREMEDGAKEFNVPAFRENRKLVATENGGLHNPSVLLFKSSWSSGSMTSETRSFEYPRASSVHRPTNDEDIAFMSVIELGELIRTKQITSRELTDIFLRRLKRYNPVLEAVITYTEDLAYKQAKEADDLLAQGKYLGPLHGIPYGLKDIIAVPHYKTTWGSRTFKNQVLDSEAYVYRRLKSAGAVLVAKLVTGSLAYDDIWFGGRTRNPWNIEEFSTGSSAGPAASTSAGMVPFAIGSETAGSIAYPAARCGVTALRPTFGTVARTDVMSISESLDKLGPFCRSAVDCAVVLDTIRGTDAGDPSSREVALGDPFHVDITKLTVGYLDDAEMEVVDVLSSKGVKLVPFKLNYTVESVQSILNITMDTDMLAHFDNWQREGHDDDYEAQDQWPVELRRARLIPAVDYIQAQRARGKLIREIKDSFTVDAFVGNVTDWERVCLGNLVGMPVVVVPTGLKSIENPPKGGTKRRTTVTTGIYAPPDHDHIALALAMAYQSVTDHNKQRPPIDDLGPNDVIQR

SEQ ID NO: 258336 - protein, 58 aa, Zea mays
  Clone ID: MRT4577_167189C.1.pep
KQYTFVRDGVLPPESVIIIILYALIVPWYCNNNTLSILNECKLSYCNLLPLILSSDVM

SEQ ID NO: 258337 - protein, 37 aa, Zea mays
  Clone ID: MRT4577_16718C.1.pep
YHQIHPFVSPSVESTVWSYVYLTCTDRRRVVVAPSSE

SEQ ID NO: 258338 - protein, 65 aa, Zea mays
  Clone ID: MRT4577_167190C.1.pep
QLPVVVGVVLYVQQLMASSMSSQSHVCAQCPTLVRVESVLNDQLPLQVDVLPRSRRYVLVFDIMQ

SEQ ID NO: 258339 - protein, 207 aa, Zea mays
  unsure (1)..(207): unsure at all Xaa locations
  Clone ID: MRT4577_167191C.1.pep
RCDCFKGFHEVLXDAEFFNDSKLREMEDGAKEFNVPAFRENRKLVATENGGLHNPSVLLFKSSWSSGSMTSETRSFEYPRASSVHRPTNDEDIAFMSVIELGELIRTKQITSRELTDIFLRRLKRYNPVLEAVITYTEDLAYKQAKEADDLLAQGKYLGKYIASQADPLRHYRHYWQYLHLFPQLHLELCLVYIASHYKLILIWGAI

SEQ ID NO: 258340 - protein, 200 aa, Zea mays
  unsure (1)..(200): unsure at all Xaa locations
  Clone ID: MRT4577_167192C.1.pep
FILKFPPPSLISLLLRLLLSPVKTGICHVRTLEEHHLRTPRHDAGXSNIYPRQGGPVRKNGFIVFKNRPCQVVWVSTSETDEHGHAKCHFVAIDIFKGEKLEYTAASSHNCDIAHVNRTEDHLIDISHDGSVSLLXTSDVLTNDDLILPADDTLVGQIXRGTRTVKDLVVTVQSVYAXECICALIDAGPKLLTCLEILYL

SEQ ID NO: 258341 - protein, 720 aa, Zea mays
  Clone ID: MRT4577_167193C.1.pep
MKNPDFAADKALAKDFLSNFTGPHGDPKYLNILQDVANRKIRAVQIELDDLFHHKDVDEEFLQRVTENTRRYVGIFAEAMDEIMPEPTEAYTVDEDRDILMTQRVDEGADGGADGTDPLQRMPPDIKRFFEVYIKTFSKATPLTIRQVKASNIGQLVKISGIVTRCSDVKPLMQVAVYTCEECGFEIYQEVTARVFMPLIECPSQRCKLNKAKGNLILQLRASKFLKFQEVKLQELAEHVPKGHIPRALTVHLRGELTRKVAPGDVVEMSGIFLPMPYYGFRAMRAGLVADTYLEAMSVTHFKKKYEEYDLKGDEQEQIDRLAEDGDIYSKLARSLAPEIFGHEDVKKALLLLLVGAPHRKLADGMKIRGDLHICMMGDPGVAKSQLLKHIINVAPRGVYTTGRGSSGVGLTAAVQKDPVTNEFVLEGGALVLADMGICAIDEFDKMEESDRTAIHEVMEQQTVSIAKAGITTSLNARTAILAAANPAWGRYDMRRTPAENINLPPALLSRFDLLWLILDRADMETDLEMARHIVHVHQNLESPALGFTPLEPSVLRAYISAARRVIPSVPRELEEYIATAYSSIRQEEAKSNAPTSYTTIRTLLSILRISIALARLRFSETVAQSDVDEALRLMQMSKYSLYSDDRQRSGLDAISDIYSILRDEAARTSSMDVRYAHALNLISRKGYSEAQLKECLEEYASLNVWQIHPSTFDIHFIDA

SEQ ID NO: 258342 - protein, 41 aa, Zea mays
  Clone ID: MRT4577_167194C.1.pep
SPMIKQGNIISHFLIIPFSSGLRNHGFNFRSFRPNVFQSQL

SEQ ID NO: 258343 - protein, 51 aa, Zea mays
  Clone ID: MRT4577_167195C.1.pep
YRGCAALCDAVIGSGCFAVCHFVHIGSVRSADRVLTSHYNHTDATLLHNGL

SEQ ID NO: 258344 - protein, 84 aa, Zea mays
  Clone ID: MRT4577_167196C.1.pep
GSLLNSSILAAISSILEIRCLHIAWIQLFVGITRCTTAGVMTALRLCRSIRIAFSRDQYTALPLSFGTGSPRRCRATRRRRFPR

SEQ ID NO: 258345 - protein, 32 aa, Zea mays
  Clone ID: MRT4577_167197C.1.pep
KIGDLDLNQPNISFNTGLDTKAMGSAWLANAL

SEQ ID NO: 258346 - protein, 67 aa, Zea mays
  Clone ID: MRT4577_167198C.1.pep
SSTRADTTSIMWSVPRSTKHKFAKSSLAIHRRAKHTRLRPCLAQLIFSFFTNLSRSFAKQLASPAAY

SEQ ID NO: 258347 - protein, 64 aa, Zea mays
  unsure (1)..(64): unsure at all Xaa locations
  Clone ID: MRT4577_167199C.1.pep
KCDKRTDSSPAPNRQKKTYKRIKFKDPPYKRMTKIPMCKLGNHGTTSNLPCVTKWAKKXKRSFN

SEQ ID NO: 258348 - protein, 69 aa, Zea mays
  Clone ID: MRT4577_16719C.1.pep
MGGGKSFFCPSIFSFLRKWRRYDDDMADWDGGYARKVRSSDEDYGGWWVGEPDVDRKASDFINNFHQKN

SEQ ID NO: 258349 - protein, 46 aa, Zea mays
  Clone ID: MRT4577_1671C.1.pep
RKDAVSLEVATRSPIMRRLSCLFGSLKLSNSNCEPASSRFTEVRAC

SEQ ID NO: 258350 - protein, 117 aa, Zea mays
  Clone ID: MRT4577_167200C.1.pep
TATPITPIKLNKSFFLHQGNKKNSFRRAGGLPFPVTYHHPPTFVPSLVKLPEVAVTLKQSMLHSLTDFIMPSNRAMLFLAWSTLARGLLGWGWLTFLFALFRFRRSGLLPRGGFFRR

SEQ ID NO: 258351 - protein, 100 aa, Zea mays
  Clone ID: MRT4577_167201C.1.pep
KVTSPVVLPSTSVVCSGEDDVEAECAGPSSKFKPGIMQSCLWTNYFSCIARQLRGSSESAQANKQKTSQSTRSCSEIDWKTVSGKLNCYINTCLVYNYKA

SEQ ID NO: 258352 - protein, 78 aa, Zea mays
  Clone ID: MRT4577_167202C.1.pep
GQMLLYLHHVISNAEPLVNNRSNIKAMHWNSGIVCCGSSDIKFPLRPLMQGYFGRIKVFQSIFWILVSLMTNIILKLL

SEQ ID NO: 258353 - protein, 104 aa, Zea mays
  Clone ID: MRT4577_167203C.1.pep
MPTPESELFLAKKPKVAPTFDGVDYEDNKALKAAQDAIIREQWVRSMMARLVREEMGKCYRREGVNHLEKCGHLRERYFELLKDAKVKGYLFAQQNYVDEALKR

SEQ ID NO: 258354 - protein, 88 aa, Zea mays
  Clone ID: MRT4577_167204C.1.pep
CCRWRLGKVVALAAAGRGWSGWVRIDETVIPGCQGRQIPDWPDPGYVTRSRCPSRRRGYTPQPSVCREEREIKTELLLIPNDVSYMLI

SEQ ID NO: 258355 - protein, 50 aa, Zea mays
  Clone ID: MRT4577_167205C.1.pep
MKRKKKKKKKKKKKKKKKKKKKKKKNKKKKKKKKKNLGGGGGSLLKGQIF

SEQ ID NO: 258356 - protein, 46 aa, Zea mays
  Clone ID: MRT4577_167206C.1.pep
PRFTNASFHSLYGIDTLTPIQYNMYSCYAKRCTLNPNNICKSNRIG

SEQ ID NO: 258357 - protein, 59 aa, Zea mays
  Clone ID: MRT4577_167207C.1.pep
GCDEWHLLQVVINFPYSVNLCSGGFTKKKKKKKKKKKKEKKKKKKKKRAPAKKKKNSIG

SEQ ID NO: 258358 - protein, 101 aa, Zea mays
  unsure (1)..(101): unsure at all Xaa locations
  Clone ID: MRT4577_167208C.1.pep
MKRSPHXLGLILCLXAALVMGVLSALGKENALAESKGIYINPXQIKCCTNCNFSFSGLYNCYDGXKDCDSVXKKCXVAAHSSYSAKNKLTRCDTFIXMCGP

SEQ ID NO: 258359 - protein, 34 aa, Zea mays
  Clone ID: MRT4577_167209C.1.pep
SPRRARTTLSLINVWAAMPELSSCRRPPLILGPL

SEQ ID NO: 258360 - protein, 109 aa, Zea mays
  Clone ID: MRT4577_16720C.1.pep
HPPQGYGDISYNLSLEPTARGRLPPAGCCPPSVSADFCRPPPRLLGSTFSGGSWVGVHPFGTCWALAGVDCPNHAMGGATSAPALDCERHGPFPSGQTFNPAGLLAFPL

SEQ ID NO: 258361 - protein, 57 aa, Zea mays
  Clone ID: MRT4577_167210C.1.pep
SFFVWQLHAMNHPFLHRKFVLANDCTTEIMGLNDYMGHQTIASFNPKQSQEDTWELH

SEQ ID NO: 258362 - protein, 82 aa, Zea mays
  unsure (1)..(82): unsure at all Xaa locations
  Clone ID: MRT4577_167211C.1.pep
ALTGCTPAWAGQLRCATGDCGGRLQCGGLGGAVPATLAQVSLHHGGDDQSTHGESVVDGVNVGLXVTPHEGRNICPVLDCRK

SEQ ID NO: 258363 - protein, 65 aa, Zea mays
  Clone ID: MRT4577_167212C.1.pep
SVSASLILSIYDLIWTVAVSLEANDNMDSCTDDGNLGVTFCSVLPMMMSSTGACFDRSGLSLKNN

SEQ ID NO: 258364 - protein, 103 aa, Zea mays
  unsure (1)..(103): unsure at all Xaa locations
  Clone ID: MRT4577_167213C.1.pep
GRRGGKRRKGGGESKGGGAKTARGAIEGTYRDKKGRRSGTVCIGGGVIAGTCDSGKMKRTIMVGRNXVRAVERYQRDEKRHTNIAGHIAQCFGVKEGEHVIIG

SEQ ID NO: 258365 - protein, 81 aa, Zea mays
  Clone ID: MRT4577_167214C.1.pep
LIGGLFKIFFFRFDHPVQNLMFAARLNKFLGVGLPSIPLFWGGTPPLPFDLPRLLLYSSPSPFEFPRASTFKRARSSLFSP

SEQ ID NO: 258366 - protein, 96 aa, Zea mays
  Clone ID: MRT4577_167215C.1.pep
RSSVLRRLQEEARKEEGQRLARRLQELERDKNLMLATLQQEGLLSRYKQQRLLTVLPSLLDLKKSVVSSPRPPECSASAPVAAAVPTRESIKGVLS

SEQ ID NO: 258367 - protein, 106 aa, Zea mays
  Clone ID: MRT4577_167216C.1.pep
ARERPVDGHGIGERERKGQREREAPPLGSVMAITVALCLGCCPAPTDGSGPLAGACGCSLGLRRARSARWGWWNSSPERELRRDTVCYRGHDNLLHNPRLANHCLF

SEQ ID NO: 258368 - protein, 58 aa, Zea mays
  Clone ID: MRT4577_167217C.1.pep
CLAGRRPWLSWMDLQGINRRLRAARSALDRFIDKIIDEHVRRGKNPDNADADMVDDML

SEQ ID NO: 258369 - protein, 211 aa, Zea mays
  unsure (1)..(211): unsure at all Xaa locations
  Clone ID: MRT4577_167218C.1.pep
MDDTQAANNTDTTVPTFGSPLFSFSNLGGAYFESGFDCKTTDPLPPDIEVQVCEESPVSLQLRQNPLPINDSLTIYEGRESTSDEIGVKDSELVPGKYKGDMKMRXGSLHLVKALNSDXSEDKFHLKRKLLLQVGCGHGLPGTXALIKGADLIHCQDLNAKALTSLTIPNVXKSISFKDSPKGTCTCPIDGYFAGDCSEMDQILLCGDADR

SEQ ID NO: 258370 - protein, 72 aa, Zea mays
  Clone ID: MRT4577_167219C.1.pep
VNPVGFKVRRCWFNYCLSLVVSKLVFVLCCHNGCKYFGSNFASCSSRVRYYVVNGRFLTYYHTSTSFVALRG

SEQ ID NO: 258371 - protein, 102 aa, Zea mays
  Clone ID: MRT4577_16721C.1.pep
DKGPPDPKLEEAHDRTKTKKNDDESRTTTSHSPSRRNTTVCVHQIAIEVHNIYACNSTHTCANLWHAALKRCADHCSKDAWCLTPYCSTKPALHQRGIMHLQ

SEQ ID NO: 258372 - protein, 96 aa, Zea mays
  Clone ID: MRT4577_167220C.1.pep
LGWLSSRGRRGRGRGRGRGGRTRRRAFSSKMLQLLMALAFSAAPLTLYVPPVRSLSLFVEAMEAVCRDCGPYSHGAVARFRLGFSRVLAGLARALR

SEQ ID NO: 258373 - protein, 106 aa, Zea mays
  Clone ID: MRT4577_167221C.1.pep
PEFPGRPTRPREICERGEQQSPLQQRADAVDSAGLARLQNAYNLAACTRARCHDRARPPSVRPSASLGIIFQSSRLVAMAMYCNPREGLGGAEYRSTSASAPTCYL

SEQ ID NO: 258374 - protein, 113 aa, Zea mays
  Clone ID: MRT4577_167222C.1.pep
MRKLELEPWGREGSSLGHLLRHGRKQDAMAGEARGAGSLLLACSKGTELGWKQPRRELARAVKESSAAWVPGGRSSPQGRLAPWEQLGGELLCAMNRRGEGCACGREGRREWR

SEQ ID NO: 258375 - protein, 143 aa, Zea mays
  unsure (1)..(143): unsure at all Xaa locations
  Clone ID: MRT4577_167223C.1.pep
PLRALTTDILGLVKMVEGHVRAVLAFNVDXTWGEPDTSRAIVAGSLVYRVVEPVLLVLRMKAVMDLLNPLNGSALAGVTTSLSAPNDRVAECDDLAILHFFTSQTSDSILGTFLVCTQKGKVSITAITKENADSVSNVGPSPT

SEQ ID NO: 258376 - protein, 259 aa, Zea mays
  Clone ID: MRT4577_167224C.1.pep
PELQHALEVQKMSEQAATNSFKELTYIRQELRNPLNGIQFTYNLLKPSELTEDQRQLVSSNVLCQDQLKKILHDTDLESIEQCYMETNTVEFNLEEALNTVLMQGIPLGKEKRISIERDWPVEVSHMYIYGDNIRLQQVLADYLACALQFTQPAEGHIVLQVIPKKENIGSGMQIAHLEFRIVHPAPGVPEALIQEMFQHNPGVSREGLGLYISQKLVKTMSGTLQYLREADTSSFIILIEFPVAQLSSKRSKPSPSKF

SEQ ID NO: 258377 - protein, 131 aa, Zea mays
  Clone ID: MRT4577_167225C.1.pep
EKARQREHDGGGQGDPGNGRPRGPPQHPRGQRGGPPGGGKRRGRAPRTQRRPKPLGHRHRRGLPPKTIVPSIRCLIILHQNRPQWQAWPLVACLLPPTQNKCGSAWASGHIGPLLAANKPSYKPLCPIFPE

SEQ ID NO: 258378 - protein, 116 aa, Zea mays
  unsure (1)..(116): unsure at all Xaa locations
  Clone ID: MRT4577_167227C.1.pep
IGYLXAGRAGTLYTMPKGIQFKVRPRQAAHVVPRYGTFVPSRLLRLYSGHESGGHVRYGRAEPASLHGDDEKGREAAQAIDQLPVTEDQIEGDPNIPSHPLHFPSTPVHPCILCNA

SEQ ID NO: 258379 - protein, 76 aa, Zea mays
  Clone ID: MRT4577_167228C.1.pep
LLALCVFTLWVFALVRRLWCLRCGQGRRSWCLRCIPALSVCCRCPCFRPPVACVALGFWRPLLAVYKTVFVAARAE

SEQ ID NO: 258380 - protein, 64 aa, Zea mays
  Clone ID: MRT4577_167229C.1.pep
ISYKINYINELCKGLTKRHHNVLLNIIHDIMNPNIITLTNRHDMKHIYNLIYYQTHYLLNIFLK

SEQ ID NO: 258381 - protein, 92 aa, Zea mays
  unsure (1)..(92): unsure at all Xaa locations
  Clone ID: MRT4577_16722C.1.pep
MSANVTEVNLNPKVLKREYADRGEMVIHAQSLQQHLQTQPGAVTLDEMLSXMLCMPNFLNNXPVTLVRAVHALRDHTRPSENEGTISVFSAE

SEQ ID NO: 258382 - protein, 155 aa, Zea mays
  unsure (1)..(155): unsure at all Xaa locations
  Clone ID: MRT4577_167230C.1.pep
LPIPPPSPPGLSPXSGXGTGSFPLSPAPCPIPXLLQRPLSPPPGRPPNPPPAXLGVFLFPPPFPPPGFSLVNWAVWAPQRXSPLTPPSGPEIPPLWPPPRPPKTTPPQKQKPPPTTPPPQNTKKKKKKKKKKKKKKKKKKKKKKKEIKKVKKKKK

SEQ ID NO: 258383 - protein, 269 aa, Zea mays
  unsure (1)..(269): unsure at all Xaa locations
  Clone ID: MRT4577_167231C.1.pep
MARRRLHHGLQLVCLVAVVLTAAPAAHAIFHFDIRFDAGSPFFGGGHSRHDMWRRAALESNARLSRRLARALGNKQSGAAAXHRGARRDPLPVHPXQGHSLTVGVGTPPQPSKVILDLGSDLLWTQCSLVGPTAKQLEPVFDAARSSSFSVLPCSSKPCQEGTFTNKTCTDSRCAYENDYGIMTSTGVLATETFTFGAHQNFSANLTFGCGKLTNGTIAGASGIMGVSPGPLSVLKQLSITKFSYCLTPFTDHKTSPVMFGAMVDLGKY

SEQ ID NO: 258384 - protein, 47 aa, Zea mays
  Clone ID: MRT4577_167232C.1.pep
LGLKQVYKVLKKSPFLSHCTFLFLIGLGPSFPQFLVGIPPFFFKKPK

SEQ ID NO: 258385 - protein, 73 aa, Zea mays
  unsure (1)..(73): unsure at all Xaa locations
  Clone ID: MRT4577_167233C.1.pep
KKKRKXRKKKKLKKKKKKKKKKKKKKKKKKKKKKKKKKKKNPRATGGIGGQPGTGGPGERQGGKKEGEPAQWP

SEQ ID NO: 258386 - protein, 51 aa, Zea mays
  Clone ID: MRT4577_167234C.1.pep
KVMEENNIVHQARFFRRQTDSSGKEWWVTNNTYWRLRAEPGYGNMDGAVLW

SEQ ID NO: 258387 - protein, 176 aa, Zea mays
  unsure (1)..(176): unsure at all Xaa locations
  Clone ID: MRT4577_167235C.1.pep
ATRAEHVWERVLRNLLHVDPTNLALLXMVEPMLNPPAIHDATDELVVXEFVYDSLYAALGPFLDHLYQARLQPMMCSAQCNRGVDCSYSFTDAYTVLHNYTVNYGDLGMDLVRNDLTDYVKELVLYRILNAMDETLLIDDAXEKLFDVSVDVHGDLHLARVSSKDNPYRCSDVLTD

SEQ ID NO: 258388 - protein, 72 aa, Zea mays
  Clone ID: MRT4577_167236C.1.pep
PLPLYHKSYFQSTCLSISNSPLLNAYIPQPTLTASQLNTIQSHIFHYLQHHHTHISPTTTPVTLPYFNTLHH

SEQ ID NO: 258389 - protein, 128 aa, Zea mays
  unsure (1)..(128): unsure at all Xaa locations
  Clone ID: MRT4577_167237C.1.pep
MRVLLVALALLDLAASATCTHTSGGCGCHPSPPVHLPSTVHLPPPAHLPPSVHVPPTVHLSPSVHLPPAVHVPSPVDLSSPPCHYPTXPPRPXSDPQTHPCPCQQPHASPCQLQGTCGVGSTAILRQR

SEQ ID NO: 258390 - protein, 78 aa, Zea mays
  unsure (1)..(78): unsure at all Xaa locations
  Clone ID: MRT4577_167238C.1.pep
MTTSLKKNRKKRGHVSAGHGRIGKHRKHPGGRGNAGGMHHHRMLFDKYHPGYFGKGGVRYLLXFRNKFHCPWVNEERL

SEQ ID NO: 258391 - protein, 198 aa, Zea mays
  unsure (1)..(198): unsure at all Xaa locations
  Clone ID: MRT4577_167239C.1.pep
KYRTLTTLINETIVNDGSYNMSLSKEDVLSAIDGGKSEGGPSGRHWILDPIDGTKGFIRGDQYAVALGLLDEGKVVLGVLGCPNLPLKSTNKNNSSSFGDRIGSLFFATIGCGAQVEALEGSEPQKXSHSKRDLTSSIAEKLGVRAPPVRMDSQAKYGALARGDGAIFLRIPHKSYIENIWXDHAAGSIIVTEAGGMV

SEQ ID NO: 258392 - protein, 48 aa, Zea mays
  Clone ID: MRT4577_16723C.1.pep
FCCCLVDIYPIDYDEIELTLNKIVYMEKLKANSFKIIEQIVCFLKTVS

SEQ ID NO: 258393 - protein, 153 aa, Zea mays
  unsure (1)..(153): unsure at all Xaa locations
  Clone ID: MRT4577_167240C.1.pep
MSASLPRRAEISPTEIFPGARITWPLHMIIQTDVLIYILTELAADYRYCSCDLFSKPDHFADDIAYDLIRVILLMLGDPRGCTCPETXKDASTEXGPEAVCHQTGALLLHADXLKYFRDRIPIQLERDDIRYVILDNADEYYRITIILDLVDD

SEQ ID NO: 258394 - protein, 354 aa, Zea mays
  Clone ID: MRT4577_167241C.1.pep
MSQATEVVGNPYAAELAAAKKAVALAARLCQRVQRSILHSDIQSKADKTPVTVADYGSQVLVCLVLKKELPSHSFSIIAEEDSKDLREDGAQEIIEHITTLINETIVNDGSYNMSLSKEDVLSAIDGGKSEGGPSGRHWILDPIDGTKGFIRGDQYAVALGLLDEGKVVLGVLGCPNLPLKSTNKNNSSSFGDRIGSLFFATIGCGAQVEALEGSEPQKISVCSTNNPVDASFFESFEASHSKRDLTSSIAEKLGVRAPPVRMDSQAKYGALARGDGAIFLRIPHKSYIETVWDHAAGSIIVTEAGGMVKDAAGNDLDFCKGRYLDRDRGIIATNKHLMPLVLKAVQEAMKEEQ

SEQ ID NO: 258395 - protein, 57 aa, Zea mays
  unsure (1)..(57): unsure at all Xaa locations
  Clone ID: MRT4577_167242C.1.pep
KGCKGATQFFLXKLRAPHFFVGEPKKKKGFVVFPYYKDGAPNPTFLYFSQGFKEIKC

SEQ ID NO: 258396 - protein, 91 aa, Zea mays
  Clone ID: MRT4577_167243C.1.pep
PSCPSRLPTAYERNGRYQGSSRNVSSEQKDENREARPRTLRFTWSMKTTSSMDPSDMMRDIRKVLQATTRDYEQMERFLLFCVHGDGHAES

SEQ ID NO: 258397 - protein, 44 aa, Zea mays
  Clone ID: MRT4577_167244C.1.pep
TLGPFEGAPPFADLFVDQFEPVEVCTIALLPFCQLRVIHLSEVS

SEQ ID NO: 258398 - protein, 153 aa, Zea mays
  Clone ID: MRT4577_167245C.1.pep
RWSVEGRFFPFFFLFFGYVFGDYVVPIFTHLRWQKKKKKNQCRCCCSRDDNDTELDQTREQEEKTSASPADEPTRRWPKANPRLSWCCCQLPSPRLPRDSKRNKRRSCFFFPYPQPKTKGTGLVLGSVPLHLPGLPLPLQLHGRTRATPSAKP

SEQ ID NO: 258399 - protein, 58 aa, Zea mays
  Clone ID: MRT4577_167246C.1.pep
QYYKPIFALTSNSYPIDYAHSTLSWFKSTRYSSNNASHLHLKYWIFTLISISNIITAS

SEQ ID NO: 258400 - protein, 51 aa, Zea mays
  Clone ID: MRT4577_167247C.1.pep
FLNLGQLIGQKWPIPFFQEGRKEKDRGPYIPCQARANGIIRWGAIYTGGLG

SEQ ID NO: 258401 - protein, 100 aa, Zea mays
  Clone ID: MRT4577_167248C.1.pep
MIRMIATARIVMPRAMVRLSAGRVRFSMPEQALCFLAGANSIFAGEKLLTTANNDFDADQAMFNILGLIPKAPSFGEEEAAAAAVAAPVCTERSEQAASM

SEQ ID NO: 258402 - protein, 111 aa, Zea mays
  Clone ID: MRT4577_167249C.1.pep
CVVGISSLGLSPASWTEGANCCSCKSVAGLAATCWYTGSYCCCVKKQPFRPPATRIRASFLSQHQLLPFFQQFPVSPTTLFVVHQLWPFVPLSLANPAASNQQQGSVGTLV

SEQ ID NO: 258403 - protein, 46 aa, Zea mays
  Clone ID: MRT4577_16724C.1.pep
PEGAVRGRLAAGIPPRAAVAGHEEAPLRRALDAAAAAAAGARPHLA

SEQ ID NO: 258404 - protein, 736 aa, Zea mays
  Clone ID: MRT4577_167250C.1.pep
MSSGGPPRKRNFKIEAFKNRVDLDPKYAERTWKVLEHAIHEIYNRNASGLSFEELYRSAYNMVLHKYGEKLYDGLQSTMTWRLKEISKSIEAAQGGLFLEELNAKWMDHNKALQMIRDILMDMDRTYVPTSHRTPVHELGLNLWRDHIIHSPMIHSRLVNTLLDLIKRERMGEVINRGLMRSITKMLMDLGPAVYQDDFEKPFLDVSARFYSVESQEFIVCCDCGNYLKKAERRLNEEMERVSHYLDAGSEAKITSVVEKEMIANHMHRLVHMENSGLVNMLVDDQYKDLGRMYSLFRRVPDGLSTIRDVMTSYLRETGKQLVIDPESLKDPVEFVQRLLNEKDKHDKIISVAFGNDKTFQNALNSSFEYFLNLNSRSPEFISLYVDDKLRKGLKGATEEDVEVILDKVMMLFRYLQEKDVFEKYYKQHLAKRLLSSKTVSDDAERSMIVKLKTECGYQFTSKLEGMFTDMKTSQDTMQDFYAKKSEELGDGPTLDVHILTTGSWPTQPSPPCNLPTEILTVCEKFRAYYLGTHNGRRLTWQTNMGTADIKATFGKGQKHELNVSTYQMCVLMLFNNADGLTYKDIERDTEIPASDLKRCLQSLACVKGKNVLRKEPMSKDISEDDTFYFNDKFTSKLVKVKIGTVVAQKESEPEKQETRQRVEEDRKPQIEAAIVRIMKSRRVLDHNSIVAEVTKQLQARFLPNPVVIKKRIESLIEREFLERDKVDRKLYRYLA

SEQ ID NO: 258405 - protein, 89 aa, Zea mays
  Clone ID: MRT4577_167252C.1.pep
NKGTTSWGGFQGIEGPRYYWSGISGPYGGALFLLLGHGPLLPNIGGLNTFMTSLFGLDRESRKSPTGGSLTGERPKFFFGHLGYFYGIG

SEQ ID NO: 258406 - protein, 355 aa, Zea mays
  Clone ID: MRT4577_167253C.1.pep
MKGKKPVKELKLTVPAQETPVDKFLTASGTFKDGELRLNQSGLRLISEENGDEDESTKLKVEDVQLSMDDLEMIQVIGKGSGGVVQLVRHKWVGTLFALKGIQMNIQESVRKQIVQELKINQATQSPHIVMCHQSFYHNGVIYLVLEYMDRGSLADIVKQVKTILEPYLAVLCKQVLEGLLYLHHQRHVIHRDIKPSNLLVNRKGEVKITDFGVSAVLASSIGQRDTFVGTYNYMAPERISGSTYDYKSDIWSLGLVILECAIGRFPYIPSEGEGWLSFYELLEAIVDQPPPSAPADQFSPEFCSFISSCIQKDPAQRMSASELLNHPFLKKFEDKDLNLGILVENLEPPMNIPE

SEQ ID NO: 258407 - protein, 77 aa, Zea mays
  Clone ID: MRT4577_167254C.1.pep
VAVRSPQEYTTPAGPHLCYIYESCVNVYITPRDVCKLARCWRPHPKIMHNVAVCKFGACGSYGPVMFPYQRWLICLP

SEQ ID NO: 258408 - protein, 80 aa, Zea mays
  Clone ID: MRT4577_167255C.1.pep
KGPGLAPEKGGGGVSFLGPKERDFVFSRHPQNFGPEKFLKRGIKNPNKVGGFPLHPDPFRRQKARSRGLRGGGDNYGINI

SEQ ID NO: 258409 - protein, 141 aa, Zea mays
  Clone ID: MRT4577_167256C.1.pep
GSVYGDTWPSDDRRQARPIKFGEASQTDKTRPKEICRRSRTDLLRILHQRRPRRTGGAGGPGPLRRRARWPPKTVPSCASPVRCGLGCAHVRTYGYGSGVDIPAGLSGSCSSSSRRPSAYGWHGSTGHVRPIRRKLSISKY

SEQ ID NO: 258410 - protein, 193 aa, Zea mays
  unsure (1)..(193): unsure at all Xaa locations
  Clone ID: MRT4577_167257C.1.pep
MPDEPTRLVRPEASEGRLLLVSNRLPITIKRSDEGKYDMSMSSGGLVSGLSGLAKTTTFQWYGWPGLEVPEDEAKGLNDQLKEKYNAVPVMLDDELADRHYNGFSNEIMWPLFHYHPGEITFDESAWDAYTEANRLFAKAVAKDVQDNDMVXVHDYHLMLMPSMLREELGDTKKNGQIGFFLHTPFPQLEIYR

SEQ ID NO: 258411 - protein, 144 aa, Zea mays
  Clone ID: MRT4577_167258C.1.pep
MRGTGKEDKAGKIEIRADWNEGRTWFFLKDREQMLKKDYNAVKIIVSNSGFGWDNDLKMATTVGKIAKGKNCRRSLEKECKVANKTGQEDYVQISTPSPTINGMQSSFFDLLEDGADLNNENGFNMDINTSQYRALEEEQFGTE

SEQ ID NO: 258412 - protein, 132 aa, Zea mays
  unsure (1)..(132): unsure at all Xaa locations
  Clone ID: MRT4577_167259C.1.pep
DRADWNEGRTWFFVSILKEYNSPRYRAQNGWTKEAWNSMTQRINEWFTSANFVVSQLKDREQXAKKDYNAVKIIVSNSGFGXDNYLKMATTMGGVWADLPKNLQRWDGRSFPFYDDLHEIYNGMSLYLCLLP

SEQ ID NO: 258413 - protein, 91 aa, Zea mays
  unsure (1)..(91): unsure at all Xaa locations
  Clone ID: MRT4577_16725C.1.pep
WANPPVMIVTAGVVLGGGRXQYLLRRVVFFVHLLFINKPEVCVQSHQQPYKFDGDGNVDDAKIRERLKIVLLSLQSFTIRQQEEGCISSVS

SEQ ID NO: 258414 - protein, 71 aa, Zea mays
  Clone ID: MRT4577_167260C.1.pep
ALRIDSPSKQTVHREWRGTVRSRGIGSWLTFVYSDTAHGRGCRGTLRAAQRDWMRLASLQYQPFNFHTCDH

SEQ ID NO: 258415 - protein, 26 aa, Zea mays
  Clone ID: MRT4577_167261C.1.pep
LGLGALNRAKRQMHEKIKGRRRHSEL

SEQ ID NO: 258416 - protein, 63 aa, Zea mays
  Clone ID: MRT4577_167262C.1.pep
IWLREVFICSLDQIDVQMDNFQDPMASNRCSLQNEANGILTVSHGRCIGITTEAWVWIQHIID

SEQ ID NO: 258417 - protein, 156 aa, Zea mays
  Clone ID: MRT4577_167263C.1.pep
TFSRHELQLNVSTLHNPASGPSSQIYMSAVAYTCIADIESWSVPSSYLISKIISAATSNLKDSQLASSLLYLYTARFRRHTVCYGSPSAGFSSSSVLQGCPLLRLSIDSLICLYLFSSCSASAAVLDLRRAEGTTAELDAPLPCSSVTTLWSEEGS

SEQ ID NO: 258418 - protein, 69 aa, Zea mays
  Clone ID: MRT4577_167264C.1.pep
PHPLATAGTTSRRSSCPLRPAPTGARAAAPPPPAPGLVIIISTTSPHHLVICGRLIPNHKYMCSEPIIK

SEQ ID NO: 258419 - protein, 155 aa, Zea mays
  unsure (1)..(155): unsure at all Xaa locations
  Clone ID: MRT4577_167265C.1.pep
MAATISQARXCYQTHLRDLANNPVDGXTQGFVNDSNTLHWQVIIMGQTNTLYDGGYFNAVXMTLPQNYPNSPASVTVTYEHXDTNVYPDGLDYLIILDTPGEESTGFYLMGXHGTPEHTGYRIALSMMCMLSSANDESXTNIDSVKDCQEKRDEV

SEQ ID NO: 258420 - protein, 138 aa, Zea mays
  unsure (1)..(138): unsure at all Xaa locations
  Clone ID: MRT4577_167266C.1.pep
GLDRTSTALKCLALGYEQRVDAGMLLLLTLSALDGXREGWPPEERSALKPMTTITPISLVLLMDSYRKYXRGPPCHNKNACTPSKQLRHHKCGMKPNSCALLMTVALLMYWNHDSRSQIIRRVDHMYESAKKLNKRDE

SEQ ID NO: 258421 - protein, 74 aa, Zea mays
  Clone ID: MRT4577_167267C.1.pep
VEVYGLRRPGRSRYRASTTSRIPPDPFPQPNLLVSPPMRSMLQNSPNARGLAARNGDGKVKADVVCRGVEDFTN

SEQ ID NO: 258422 - protein, 28 aa, Zea mays
  Clone ID: MRT4577_167268C.1.pep
AVIKCSVQRLVTWLTTLRVSTMYLLVGS

SEQ ID NO: 258423 - protein, 64 aa, Zea mays
  Clone ID: MRT4577_167269C.1.pep
QWRLRTASDMGSIKRSSSGLVAVVVLVAPCVPLKIVSMIGFIYYDYLLSCIAEWVLVYQACYSL

SEQ ID NO: 258424 - protein, 50 aa, Zea mays
  Clone ID: MRT4577_16726C.1.pep
HCEDDRIYRQNLRKQVRIESLALYFSIPPAQGFPPSFKLTVVRQDQEGTH

SEQ ID NO: 258425 - protein, 106 aa, Zea mays
  Clone ID: MRT4577_167270C.1.pep
MEHGSLTDSTSSTFSIMDEDHTLANSARFVLNQDPRVAFCGYTIPHPSEKKVNIRLQTTGDAAKDVLKDALQNLMIMCQHVRGTMDTAVVNHRAKNAAEEMDVDQN

SEQ ID NO: 258426 - protein, 115 aa, Zea mays
  Clone ID: MRT4577_167271C.1.pep
KGQGRAPPRSAPTPPGDRTRHATGAEKEGGGPTGGERPAEKKEEEEPSTGPPPDQRRRDKNNTEGHSKRRNNKKRHGRARAQDRHRNRKPENARETRTEIPKTGKGGEKAPPANK

SEQ ID NO: 258427 - protein, 74 aa, Zea mays
  unsure (1)..(74): unsure at all Xaa locations
  Clone ID: MRT4577_167272C.1.pep
MAVSAIGFEGYEKRLEITFSEAPVFTDPNGRGLRALSRAQIDSVLDLGKCTIVSELSNDQIDSYGLSXSSLFIY

SEQ ID NO: 258428 - protein, 124 aa, Zea mays
  Clone ID: MRT4577_167273C.1.pep
LQMDPKATLFLGLCLVFGGVGHDMIILLLCSKRYNAASHAEAICAQMTRRLTDILALTQGARQRARPRKSPSAPTPEMMATAGKICWTLNSRIYDSAAPSKETSLSIYLQLVPYPSPYPQQLHK

SEQ ID NO: 258429 - protein, 80 aa, Zea mays
  Clone ID: MRT4577_167274C.1.pep
PFLSSKVQSSPNRNLPNQPRFSKITTPDPPTWPLAKGGTNKGGTHSFGPSNNFSSHDLAVQNFPQAKVLSRSLSYVSLRS

SEQ ID NO: 258430 - protein, 135 aa, Zea mays
  unsure (1)..(135): unsure at all Xaa locations
  Clone ID: MRT4577_167275C.1.pep
MESKGGKKSSSSRSSLMYEAPLGYSIEDVRPAGGIEKFRSAAYSNCSRKPSXIPLASHPNCLEFPPFSIHLPKISLASCLSLTSKAFSPSTXSETMAGSAIGFEGYEKRLEITFSAAPVFTDPNGRGLGASLSGP

SEQ ID NO: 258431 - protein, 242 aa, Zea mays
  unsure (1)..(242): unsure at all Xaa locations
  Clone ID: MRT4577_167276C.1.pep
MAVSAIGFEGYEKRLEITFSEAPVFTDPNGRGLRALSRAQIDSVLDLAKCTIVSELSNDKIDSYVLSESXLFIYPVQXVIKTCGYTXPCGEFMNAVHCPALSTIHVTPEDGFSYASYEVMGFNPGSFFYGDLVKRVLRCFGPTEFSVPVTIFGDRDNAKTWGTKLDAEAYACSNMVEQVLPFGGLLIYQSFPVTAETTHGSPRSVLHDFAGDIVKNRSKSDAPWEADAVDESEEKDVKKMKC

SEQ ID NO: 258432 - protein, 39 aa, Zea mays
  Clone ID: MRT4577_167277C.1.pep
VSTSIVLSINDHVEFFCDVTILVLLLNLNFYCTSVPGGK

SEQ ID NO: 258433 - protein, 54 aa, Zea mays
  Clone ID: MRT4577_167278C.1.pep
SEKTQGVGFRLSNFSNLPNQGKLNYWPEPKRLRHWNWFPFIIVDPSCVETFLTA

SEQ ID NO: 258434 - protein, 109 aa, Zea mays
  Clone ID: MRT4577_167279C.1.pep
DDGWSRMVQIVSRGLLDFMVVSRFINMSVAFRWAVFAFLRPSPVLEISARLVSASPHGWGVKNSVGFPVRHYAFDSLPGSILILSLVVLAAFATKSPQETEGRPPTMSS

SEQ ID NO: 258435 - protein, 57 aa, Zea mays
  Clone ID: MRT4577_16727C.1.pep
NPPRCHLCFLNRCTFFPQKPKTLLVNSTQKKNKQKGRVNNVPKKEQQQHKPTPRRAK

SEQ ID NO: 258436 - protein, 62 aa, Zea mays
  Clone ID: MRT4577_167280C.1.pep
TSLSDCNLGLRKFAALLGYFAVAWSWHLVSSLAFIQGAVVVWQQANLYVVACISQAYRSSSG

SEQ ID NO: 258437 - protein, 42 aa, Zea mays
  Clone ID: MRT4577_167281C.1.pep
SHTHHFQIIRPSSERLGANSKASCTQATQQRFPRPQKNDDVA

SEQ ID NO: 258438 - protein, 53 aa, Zea mays
  Clone ID: MRT4577_167282C.1.pep
GILTCCPSTTPFGLILGPDSPSVDEPCEGNLGFSGQWILSNVFVTQDGILASG

SEQ ID NO: 258439 - protein, 140 aa, Zea mays
  Clone ID: MRT4577_167283C.1.pep
GRRLSPTRPHPLAIVEPSLVLTSPWIQPSQSMVLLVWLQRRPPCPCAFLSMVVPLSSLPMADGLISHGGSLSLSGLHYRVASSVLLAHFPWPCPGICRSSARPAVAPLARLSFSLYARSRPSSSCGARLAREVPCASWIA

SEQ ID NO: 258440 - protein, 72 aa, Zea mays
  Clone ID: MRT4577_167284C.1.pep
KVSWDTLGFQNLFTRGRVGSGSFDLTPSFGGRLAMVSPKWEWVLATPWGRTHPLPMLSLVVQWVKKGPKRQF

SEQ ID NO: 258441 - protein, 83 aa, Zea mays
  Clone ID: MRT4577_167285C.1.pep
HASATPNPQEPIRPFVRPPKATRRFVALRRCAAVPWVERCQRPHVEAGAQARAVPGLLGSSRPGGQQHDQNGPSRHRRVYYDP

SEQ ID NO: 258442 - protein, 89 aa, Zea mays
  unsure (1)..(89): unsure at all Xaa locations
  Clone ID: MRT4577_167286C.1.pep
STLAFENTSADLGVPDPVSQPMKLYSSLWNADDWATTXGRXKTEWSNAPFEDYYRGLHVDRWEAFAEGRFFSSHGARSWDQPEFKDLHP

SEQ ID NO: 258443 - protein, 48 aa, Zea mays
  Clone ID: MRT4577_167287C.1.pep
LIGSSSGFVRYTVGGQVTYEVRRRPYTVVLFVDIEKAHPDVFNMMLYI

SEQ ID NO: 258444 - protein, 85 aa, Zea mays
  unsure (1)..(85): unsure at all Xaa locations
  Clone ID: MRT4577_167288C.1.pep
PPGTQRQGVPNVLFXKYGFSGKLPPPWFKFFGPLPLNVGGPQGGPPSPFGLGLMXNSPFPGFLGFAIWGIRNQKGFGGGFSRPWV

SEQ ID NO: 258445 - protein, 55 aa, Zea mays
  Clone ID: MRT4577_167289C.1.pep
APFGPMLETHLLMDIGIIAMTKGRQRDQKDWSEFFTKAGFSEFKFLKEFGARVAL

SEQ ID NO: 258446 - protein, 117 aa, Zea mays
  Clone ID: MRT4577_16728C.1.pep
DAWAVHFKRPKTFKPPRNPKYPRKSVPRRNRMDAYNIIKFPLTTEAAMKKIEDNNTLVFIVHLGANKHHIRTAVKKLYDIDVAKVNTLIRPDGKKKAYVRLARDYDALDVANKIGII

SEQ ID NO: 258447 - protein, 95 aa, Zea mays
  Clone ID: MRT4577_167290C.1.pep
GMFLVIGDESGACHGSDHGQVICRSSPVIGGAVNLRVTVDLVEDGGECLPVGYAASDLSDVVSFVQSVIVLARDVHLKHQKQTSALVFFLERLLV

SEQ ID NO: 258448 - protein, 86 aa, Zea mays
  Clone ID: MRT4577_167291C.1.pep
GITTGLQNPGLTPKRGSFFSPRPLALGFSYFPGLEIRPPLFPVRKKRGFFPKWWLIKGGPTAPYFVFFSNLELFHAKKEPGPRFLF

SEQ ID NO: 258449 - protein, 296 aa, Zea mays
  Clone ID: MRT4577_167292C.1.pep
MAGGTLQDRSEAEDVRVGVDRFPERQPIGTAADDLGRDYSEPPAAPLFEASELSSWSFYRAGIAEFVATFLFLYVTVLTVMGVSKSPSKCGTVGIQGIAWAFGGMIFALVYCTAGVSGGHINPAVTFGLLLARKLSLTRAVYYVVMQCLGAVCGAGVVKAFGSALYESAGGGANAVSPGYTKGDGLGAEVVGTFVLVYTVFSATDAKRTARDSHVPALAPLPIGFAVFLVHLATIPITGTGINPARSLGAAIIYDNPHGWHGHWIFWVGPFAGAALAAVYHQVVLRAIPFKSSAHY

SEQ ID NO: 258450 - protein, 985 aa, Zea mays
  unsure (1)..(985): unsure at all Xaa locations
  Clone ID: MRT4577_167293C.1.pep
VPSPRRRGCAGGERSGRTEIRPPRAPLRRLKMIAMVSAVEELSWLTSKELGEMLRESDNFVLQSKIEDGGPKQVLVDMEKVVPSLPLHLLAVCLELGQGPDLTYVLRGIRFLHSLSDLASRHTRVXTFLLDDLKLCQQVLDLLVCLLXLSLKSDEFTSRLLGIHDMMMSINKKEDLHXLAPVXYLLYSETNSLLQIELNTIPXILSWPWXSLVSELQRLYKMIFHQKAWMPCALCITTCQHGQASSLQNELPSKGCTEHGSVYPDXPTERHFICQQCEASLQFLLLLCQQKLFRDRILKNKELSRNGGILSLSHTILKLVVPECLKQSTDLVASISRLKAKILSILLQLCEAESVSYLDEVATNPNNMRLGQTLALEVLNLLKISFGRKINITSDSHDKGKIYPMGSVLISALRLVDVFSDDSNFRSFFLTNTVPFLIQILAAPHDEFVSSWCAVNLPTIEEDASLDYDPFGASEVALLASDNMLTEAKANYSCPFRPSVPSMAYAQTRTSCVVKIIANLHVFIPNICEEQERDLFLQNFQKYLASGSPKLSADLPASSDFKATKVCRNLGFLSDYAKTLVPNLLNGEDLVLLSDFADKLQSWCKSQVAVKVVQNDXFHQKAWMPCARCSSSCQHXTSTPASKMNNLXKGCTEHGSVYTSTPNKSGRKXEDETPKNTVSRNGGFLQNAVGQDLVHLGVARTTSGGPSAVASGVSTGHQHNRMDLDPASSSXIISKHQNLQKKTVSRRMGKERVVCMMRXPKRRKRTLMNNEQIDELEKALVDEPEMHKNPVLLQSWSEKLSLQGPEITASQLKNWLNNRKAKLARIAKERAENADKPSTSHPGESSESAGEDNYLPPAGVMTVLSKGGSLLSPDCTEQTSQAELSPNTXDGPSIHEILLVGXGRLVSLVDSDGKEVGRGKIFQAPGKSTTESRVCVVDVTELRTEKWRELPHPSEAFGWTFQEAEARNGGIIRVSWDAVRLFPVA

SEQ ID NO: 258451 - protein, 104 aa, Zea mays
  Clone ID: MRT4577_167294C.1.pep
MDFDPASSSVDNFKTPDLTNKNPLEEDGKGESSMYDERQPKRRKRTLMNNEQIDELEKALVDEPEMHKNPVLLQSWSEKLSLQGPEITTSQLKNWLKKSVVCKF

SEQ ID NO: 258452 - protein, 516 aa, Zea mays
  unsure (1)..(516): unsure at all Xaa locations
  Clone ID: MRT4577_167295C.1.pep
MIAMVSAVEELSWLTSKELGEMLRESDNFVLQSKIEDGGPKQVLVDMEKVVPSLPLHLLAVCLELGQGPDLTYVLRGIRFLHSLSDLASRHTRLEQVLLDDVKLSEQVMDLIFFLLSILXTEGLNGLNQXFLFIDVWSTLNYHLILILVTAVVFKXENNNVGASPLVHASLVAGSLHLLTNYFSSQWHELVHILLAHPKVDIFMDVAFDSLHEDVRLLSIRLSSMGFGFFPVGSLESRLAHFICQQCEASLQFLLLLCQQKLFRDRILKNKELSRNGGILSLSHTILKLVVPECLKQSTDLVASISRLKAKILSILLQLCEAESVSYLDEVATNPNNMRLGQTLALEVLNLLKISFGRKINITSDSHDKGKIYPMGSVLISALRLVDVFSDDSNFRSFFLTNTVPFLIQILAAPHDEFVSSWCAVNLPTIEEDASLDYDPFGASEVALLASDNMLTEAKANYSCPFRPSVPSMAYAQTRTSCVVKIIANLHVFIPNICEGRLFLHVMSLNLFTTHC

SEQ ID NO: 258453 - protein, 99 aa, Zea mays
  unsure (1)..(99): unsure at all Xaa locations
  Clone ID: MRT4577_167296C.1.pep
SRLIQASCDYASTLAANDWTYCPNRPDVSYAYHVPNKGNDDTLWCHSYSSWISDTRVWKRLIIHPRRXVPDSFPKLHANDAGVLTHGGIRDPIRELRDP

SEQ ID NO: 258454 - protein, 107 aa, Zea mays
  unsure (1)..(107): unsure at all Xaa locations
  Clone ID: MRT4577_167297C.1.pep
PPPPHHTKQQYLIIPPLTFNSQSSTTFPKINNNTSPTYFSHKHPPYTILNSSXFFLPLFLLSHFSLFPSPPQKKSLPKKKNTHTFXTLTLHFFTYQILNPLFIPTLY

SEQ ID NO: 258455 - protein, 60 aa, Zea mays
  Clone ID: MRT4577_167298C.1.pep
MDLTLLLFHVMQSLELWDIREKNTMTFNNAHDGLVAALASSSATGKVASVSHDRTLKLWK

SEQ ID NO: 258456 - protein, 197 aa, Zea mays
  Clone ID: MRT4577_167299C.1.pep
MSPPENPSPAAPAEPSQPPPPAAAAKGKGKKDEKKDDDLSEEDLALKEQLELYVVRAQDADPGVQKLALESMRQEIRSATSSMTSVPKPLKFLRPHFGTLKSYFETMPESELKKYMADILSVLALTMSVEGERESLKYRLLGSEGDIGSWGHEYVRNLAGEIAQEFQKRQDDDLHALMGLVQQIVSFHMKHNAEPEA

SEQ ID NO: 258457 - protein, 90 aa, Zea mays
  unsure (1)..(90): unsure at all Xaa locations
  Clone ID: MRT4577_16729C.1.pep
KGGTLPGTLLPNQNKLFSSPPPTGKKKPGGYPPRGEKKKPPEKXPRKFPPEKKPPPGFXPPTPPWGKKKPGRGIWGFFPSQPWGGGPPRG

SEQ ID NO: 258458 - protein, 121 aa, Zea mays
  unsure (1)..(121): unsure at all Xaa locations
  Clone ID: MRT4577_1672C.1.pep
SSSHARWASPEFLAESSCSWPPLCSDCGYIALSKGGGSAFCASPRAFMSFSLRGQPGLLLCPFFVVPPALFLFFLWSGVXFXIRPXGLSVFLPRGFGPPLFFSLGLYKTRMGDALETXXXX

SEQ ID NO: 258459 - protein, 161 aa, Zea mays
  unsure (1)..(161): unsure at all Xaa locations
  Clone ID: MRT4577_167300C.1.pep
AKKKHTKRKRPSSGRAARATREPARQAQPAQEESATKATRRPQSTQGPKATSPQSRPPTTARAPEERAGQAXRRQQAKAGRRKQQPKAQAEQQPXAERTTQTKATQPEQHGRPAREHQARGNPEADRQQQXRAAKPPAPANEPANQQQQQPQQQRTAPSKQ

SEQ ID NO: 258460 - protein, 88 aa, Zea mays
  unsure (1)..(88): unsure at all Xaa locations
  Clone ID: MRT4577_167301C.1.pep
ARTRVGRDELGRTLCEGTFTXVKFANNVETAENVAIKILNKENCLXHKMIAQIKREISIMKLIKNPNVILMYEVMASTDKIYIVHASR

SEQ ID NO: 258461 - protein, 62 aa, Zea mays
  Clone ID: MRT4577_167302C.1.pep
HASAHASAHASADAWADAWAYTSPDAWLYLFIFVPLLEGVPVINIVSQIKHIIIMYDIFFEC

SEQ ID NO: 258462 - protein, 109 aa, Zea mays
  unsure (1)..(109): unsure at all Xaa locations
  Clone ID: MRT4577_167303C.1.pep
DCSPTTPRPLCALSLSRWKLATTAAYDXAVRXVIRSPSDSSTGLLRRRSSPGVHPIFFTGSSALLVTHLDPELPAFACCARTQHTIMQASDRFNINSQLEHLQATYVGT

SEQ ID NO: 258463 - protein, 63 aa, Zea mays
  Clone ID: MRT4577_167304C.1.pep
AFCPPVLWVSVPRLAGYRQFVCLVFKPGIMFSAWRAAWALVFFFFCIRQKDSATNDLVGKMIL

SEQ ID NO: 258464 - protein, 151 aa, Zea mays
  unsure (1)..(151): unsure at all Xaa locations
  Clone ID: MRT4577_167307C.1.pep
RSWYERYVLLADPCDVYGVRNLSFAIADFSVTGHLRPSAELVIHPHPHQDLGHFPSLPQLESRLQSDGYYAGVRVMMLMCIVFYNXSEXNNITIKADDFTVSYDTNIPHQFGLSASSAIVXAALNXLLDFYNVXRHLIEVEMRPNLMLNAE

SEQ ID NO: 258465 - protein, 50 aa, Zea mays
  Clone ID: MRT4577_167308C.1.pep
FHAAVSLTNQLPRDGGDFFSGCGRLQPRTVSVRTRWPSLSPRSHPRLTRP

SEQ ID NO: 258466 - protein, 88 aa, Zea mays
  unsure (1)..(88): unsure at all Xaa locations
  Clone ID: MRT4577_167309C.1.pep
PASCXHASHAQASSHDALPLISAQQPALTPSPRLTVLPAISHSXGLRTQPPLAPAAALAHPQPPSAARPPQXRTLPHALTLIAVATPT

SEQ ID NO: 258467 - protein, 106 aa, Zea mays
  Clone ID: MRT4577_16730C.1.pep
MAQRKRNAQPKRGQGGPKTTTGGFDKTTAVRVVETPVASGGVFSLPEDVTRAERVWVEWIPSAVLEGKKRRMFLSKQGVNDPQLILTDSGVQVPRRGMSVCLESRL

SEQ ID NO: 258468 - protein, 389 aa, Zea mays
  unsure (1)..(389): unsure at all Xaa locations
  Clone ID: MRT4577_167310C.1.pep
MLSSSPAPSQEGAAVPSSWAEAASSAALRHYRSLAKKGKPQGRESTVLAAILLSAPQDSHSLTVLSMGTGTKCLGASMLSARGDLVHDAHAEVIARRALLRLVYSEIGRGAPPDWLVASGDAGRWRLRDGHCLHLYITQLPCGVMPVPPSQSDLPRKQLNSMNVEIGFVQRKPGRGDTTSSMSCFDKITRWSVVGIQGALLSHILEPLYLSTITIGQLPDGTPERFSIKNNIKKALDARLSSLPTELPPPFKMQKPKVFEAPVPPTEFQQIPGDVRLLTCGXIWYSICWNKSGLHEVVLGTTGRKQGTSSKAAHLPSTESLVCKRRLLEAFLSLEHPLVRQLKCEELSYRALKDTAHEYHHALELLRKAPFFGCWRAKPTFVDSFAVSR

SEQ ID NO: 258469 - protein, 56 aa, Zea mays
  Clone ID: MRT4577_167311C.1.pep
MSTGLSNCHGLCPNLWPNSRIMTGIMTRYIKTLINKLRHYAVHWPHDSAYYGSFEG

SEQ ID NO: 258470 - protein, 87 aa, Zea mays
  unsure (1)..(87): unsure at all Xaa locations
  Clone ID: MRT4577_167312C.1.pep
VHLXVSAGXHHHHAGGVQTELTPLLTQSSIPHGGASYLARAPSPPCGAPSTPGPCPTIWKHAVLGEGSHDDSQRPVLELTGIGRTAS

SEQ ID NO: 258471 - protein, 67 aa, Zea mays
  unsure (1)..(67): unsure at all Xaa locations
  Clone ID: MRT4577_167313C.1.pep
MRKEQSHINIVVIGHIDSGKSLTTGHLIYKLXGIDNRVIETFDNDAAVMDNRSFKYASVIDKLKAER

SEQ ID NO: 258472 - protein, 109 aa, Zea mays
  Clone ID: MRT4577_167314C.1.pep
PAGLTTPRLAGADKAAAPSLSPAVLPWNRRRLGRSPRSPSPPTSGICSCHIYGVKKIQYPAVSNARVAREEHDSGQECVGPATRQMGCDVRQGPAVAMGWLPGRRRSTS

SEQ ID NO: 258473 - protein, 54 aa, Zea mays
  Clone ID: MRT4577_167315C.1.pep
NQNFLIKTKSFPINAIHKKKHIFTFISWTPLKISSGPEDHNVHYTQFNLLIYKK

SEQ ID NO: 258474 - protein, 189 aa, Zea mays
  Clone ID: MRT4577_167316C.1.pep
LRVRMSQASFSGFGDQKQQVLLTEHDISKAELRNLPLVNCPFCIDHPQLAAHVSGQPKSMGAHFVACRRCDKMVEKKMRCPFFKWLSVYAEFLLEKDTYDDNSLLRKIQALQREKENAKLLENQVTSPWNVNYQQGSKVPTMNSASEVMIGASELREVKEVLLKVLKVLRQLRVMFALALAALVLIALK

SEQ ID NO: 258475 - protein, 65 aa, Zea mays
  Clone ID: MRT4577_167317C.1.pep
DAPIHQRSFLLRSVMLPLTWSLTTTHHQRCLLHYPSNLTLKSSNCRKNHPSSSQVHSTDGAGSTR

SEQ ID NO: 258476 - protein, 138 aa, Zea mays
  Clone ID: MRT4577_167318C.1.pep
KKKKKKKKKKKKKKKKKKKKKKKKKKKKKLKKKKKKKKGWSLGRAPPRGDFGDFPSPGGPFGLPFRGPISPFGGGFSIPRAGVFHRGAGETPGVPHLNPLGAHPLLAGGGNTKGAPPVPPSQRWPTLMGKGPPPVPAL

SEQ ID NO: 258477 - protein, 97 aa, Zea mays
  Clone ID: MRT4577_167319C.1.pep
LLFCLGKFFTLCTLKGTEHWTATLMITVVYDARSESEAEFHHGRDPLIWQPMDEGRPTHKDDYSMAAHALPDTYKPINEQKGTLGSVSSKEGEHLWK

SEQ ID NO: 258478 - protein, 57 aa, Zea mays
  Clone ID: MRT4577_16731C.1.pep
MGSDPFVEILLAILLPPVGVVFPLGSGVQFWICPMLPFLGVIPGILSAVFVLLARKH

SEQ ID NO: 258479 - protein, 88 aa, Zea mays
  unsure (1)..(88): unsure at all Xaa locations
  Clone ID: MRT4577_167320C.1.pep
FGXXXLXXLXFPXXPAXXRXAGLPLXFXVVPLLWVXXFLXXLXXXXXVLXXLPXXLXWXXXSSXLXSCLPXXSWCXGXXXAXPFLGGL

SEQ ID NO: 258480 - protein, 61 aa, Zea mays
  Clone ID: MRT4577_167321C.1.pep
CLCSGTKPGSIVLRVKLRNQASASVKHMTQKAGTVAPKIKAERKDLRSRLDTKALSSIYMY

SEQ ID NO: 258481 - protein, 102 aa, Zea mays
  Clone ID: MRT4577_167322C.1.pep
ITVAQASVGHSRAAPWFLGAPSAINSTVGISVLGQLLAGSGNLQLRRASPWTTVLGATITSVRPRGSEESSWYLESQVPGQEQVPQDEALGGCCDEFVSGLG

SEQ ID NO: 258482 - protein, 86 aa, Zea mays
  unsure (1)..(86): unsure at all Xaa locations
  Clone ID: MRT4577_167323C.1.pep
MAANILALLALLALFVSATNAFIIPHCSLATSAIIPQFLRPVTTMGFEHLAVQAYMLQQALAVSVXDASNNQLQHQXMVLLTIQYY

SEQ ID NO: 258483 - protein, 44 aa, Zea mays
  Clone ID: MRT4577_167324C.1.pep
LHRTHQWAGTYKINTANKFVLNEPLNMLHLTREHSIEQLKKHID

SEQ ID NO: 258484 - protein, 74 aa, Zea mays
  Clone ID: MRT4577_167325C.1.pep
SIGYLEPGGDLSYPATPTSPAIFVASVASSIDHVGLLRNVQGMSPSRMLPTLVPPARSILAADEPTVPTAKRLS

SEQ ID NO: 258485 - protein, 76 aa, Zea mays
  Clone ID: MRT4577_167326C.1.pep
CYRDCYNDMKLHVTKKHTHPPPPSQLRDLAPCKKTLTKTTTTVPPCRREARSPMSRPETRPHRQSLLTRPWLPAST

SEQ ID NO: 258486 - protein, 186 aa, Zea mays
  Clone ID: MRT4577_167327C.1.pep
MNQLLDLLPLDPYIEAALSPISSIVQLVVLAEEEVITNSPNRCLMICFNLLQRCFSWDAAPHRQLWPPPHIHVEFWCGSAALRSIPWPPPTSLDSLYTKEFYCRVQFPGFGRTFVFNAEILKRVGRTSEAKDSSRVALKSSWGTLGCSHEEAAELASLVDGYQLMRAASASDRVSSLKNITHTGVM

SEQ ID NO: 258487 - protein, 115 aa, Zea mays
  Clone ID: MRT4577_167328C.1.pep
RADSARGPASTPCSLKFGSRRFLARHQGTHAAFVSLTGGRASGVLPAWPDVYRSASRRCVYSLVARARTGRTLIFSIAGPLPHHVLTARCAARIPAPHSGGHACSCHWYQPVERL

SEQ ID NO: 258488 - protein, 224 aa, Zea mays
  Clone ID: MRT4577_167329C.1.pep
MSFIFGKKKTPAELLRENKRMLDKSIREIERERQGLQAQEKKLINEIKKVAKQGQMGAVKIMAKDLIRTRHQITKFYALKSQLQGVSLRIQTLKSTQAMGEAMKGVTKAMGQMNRQMNLPALQKIMREFEMQNEKMEMVSEVMNDAIDDALEGDEEEEETEELVSQVLDEIGIDINSELVKAPATAVAKPVAARKVPAQAEAAGGPDGGIDDDLQARLDNLRMM

SEQ ID NO: 258489 - protein, 79 aa, Zea mays
  Clone ID: MRT4577_16732C.1.pep
WTANSSGPGTYNLVSANTVELEDAPVAVPCPVLEDGRWNRTGRAFRCHLPFRFLCALCCCDIGLQHGPQPLFPCVRLNK

SEQ ID NO: 258490 - protein, 224 aa, Zea mays
  Clone ID: MRT4577_167330C.1.pep
MSFIFGKKKTPAELLRENKRMLDKSIREIERERQGLQAQEKKLINEIKKVAKQGQMGAVKIMAKDLIRTRHQITKFYALKSQLQGVSLRIQTLKSTQAMGEAMKGVTKAMGQMNRQMNLPALQKIMREFEMQNEKMEMVSEVMNDAIDDALEGDEEEEETEELVSQVLDEIGIDINSELVKAPATAVAKPVAAGKVPAQAEAAGGPDGGIDDDLQARLDNLRKM

SEQ ID NO: 258491 - protein, 268 aa, Zea mays
  Clone ID: MRT4577_167331C.1.pep
MGTKPQQEEQQAPQTTPPSLQQQQPHKKQVRRRLHTSRPYQERLLNMAEARREIVTALKIHRASMREAKEQQQHQQLVQEFQHQQEVQVVQDHRLACSAPSMSSYGSFSDYPFAHSTANNSSCSFYSYPLLPYHTPPAAPMVPMVDALDHLLPLPTQPLGLNLSFHGFVGGVAGEDAKNNADSFDPPPLLQQPSPASSYSVYSSPPATTMASQDVASATAENTSPSLHRVLDEEEMAAIYSVGERHDIEWSDTLNLATSAWWSTLLDD

SEQ ID NO: 258492 - protein, 61 aa, Zea mays
  Clone ID: MRT4577_167332C.1.pep
SLIFLSYPPTHISKDKCLSTKTTYLALIDPPIITLPSSLLSTPTTCIQPNSLTQYHYSFTI

SEQ ID NO: 258493 - protein, 96 aa, Zea mays
  Clone ID: MRT4577_167333C.1.pep
APPGNPKPPNNSPPPFGPVVPPKCFSQRQSCPLGAHSQKIPVCGGPHKKNLFKFAPHLFFPPWKGLWIPEGPARPKGAPRFFRARTNVLNLVFKFF

SEQ ID NO: 258494 - protein, 246 aa, Zea mays
  Clone ID: MRT4577_167334C.1.pep
MRNQRLAPITCSSSKTNNTKREEPHLSGAYIRSLVKHLSSSSTARSKDHHHITMGSKSHQEEQQAPQTTPSSLQQQQPHKKQVRRRLHTSRPYQERLLNMAEARREIVTALKIHRASMREAKEQQQHQQLVQQLQHQQEVQVVQDHRVAFSAPNMSSYGSFSDYLHNSYPFEHSTTKQQWLLILFISSTPPLPHTSRCTHGSHGRCFRSVAVAAYAATRAQPDIRWLSMGGVAAEDAKNCTATSPF

SEQ ID NO: 258495 - protein, 91 aa, Zea mays
  Clone ID: MRT4577_167335C.1.pep
GGGGAPPPDQGIFFWPPPGGLGSFFFSGDPFRGLTNQRQGKYRVIQRKGGALPSWGAERTPFFFVTPFPRGNGPQLRFLASKGGGGGFFFF

SEQ ID NO: 258496 - protein, 235 aa, Zea mays
  unsure (1)..(235): unsure at all Xaa locations
  Clone ID: MRT4577_167336C.1.pep
MPVTRRRAAVAAVAQEEGRDAAIYISSDSDAGSDPEDSESEEEEDTSDEDFIDVSDSEADDGESSDEEGEEDSESEAEAEAEQLGADRSEVACNKIAGLLSSGRSLEGLKLAEYKVYLKKNGLSQTGGMDTCVDRIVLHWRFKDADPRRIYPRSSFCINCKGDVCRGDAVLFKQRVYEKXGNRIVASNVIKDSNGSQKQQHTFTIQVFWSKGPGELPTLHLXLVXGRNLYRMMTF

SEQ ID NO: 258497 - protein, 62 aa, Zea mays
  Clone ID: MRT4577_167337C.1.pep
NQPIIIRAFMSIGKWPLALILLFFSFIFPVLAGTLTSLLPHFLVNCVWTGSCKALYRYRRNI

SEQ ID NO: 258498 - protein, 94 aa, Zea mays
  Clone ID: MRT4577_167338C.1.pep
ERWIQGRKEKYVYEYVAGRPEKMHFLCTAKSISSPSQNRTGNIPPVQFDSSNKLFCTKKIYNLPTGFEDDISAIYTGKHFALRRFFLQTDENIG

SEQ ID NO: 258499 - protein, 152 aa, Zea mays
  Clone ID: MRT4577_167339C.1.pep
SLHAPSTDKHHTRHGHTDKEHKETENHLAALSLLLLLPPRNMTTRVKNGSFFAFFVFAGTGTGRAASLGLLLPVPVPDASDTGWTDAAGQLLSPLPVHVNVMSTLPAISAALRGPVTGFGASLAMRRRFPFSSSLRCLSSCSMASLPSLAPP

SEQ ID NO: 258500 - protein, 83 aa, Zea mays
  Clone ID: MRT4577_16733C.1.pep
GLLKTFGTPVSPFEKLSVWCTPSMGSTSLFMGCRLKSGVVNPRRGCPVCGTTMSPRMRVYPSFCQKRKKCPPVMELLRERKIR

SEQ ID NO: 258501 - protein, 91 aa, Zea mays
  Clone ID: MRT4577_167340C.1.pep
NLILKMCAPSSARLLEGGSYINCVALPDGHAKKTTIGKGFVRILDSISAHQAFAGDFPAYHRKSLARISEPRPNTLHVYAEVIHITSLAVP

SEQ ID NO: 258502 - protein, 89 aa, Zea mays
  Clone ID: MRT4577_167341C.1.pep
QPKGNKSASSRGKRRRTDHHQQPCTHAPFHLGRRRKPNRWPGTPSVPSQGEPSRPGREEGEEKVASGLPIAHGGSRSGVEEGAGGGAMQ

SEQ ID NO: 258503 - protein, 70 aa, Zea mays
  Clone ID: MRT4577_167342C.1.pep
THSLPHINLFILTLFEVEPPQDPLEVFNPLTLDHFQVNHISLNHFPAFNSAKHPKILAQFPGRFFQKPFP

SEQ ID NO: 258504 - protein, 569 aa, Zea mays
  unsure (1)..(569): unsure at all Xaa locations
  Clone ID: MRT4577_167343C.1.pep
QMAGRAGRRGLDNIGTVIIMCRDEIPEESDLKNLIVGKPTXRLESQFRLTYXMILHLPRVEGVKVEDMLKRSFAEFHAQKNLPEKEKLLLQMLRQPTRTIECIKGEPSIEEYYEMTLDAEAHREYITEAIMQLPNSQQFLTPGRLVVVKSDSDDDHLLGVILKNPSALLKKYVVLVLTGDCSSSALAPEFNKNEKGPVDFQGGQFIVLKGKRGMDDEYFSSVSSRKASPRFRINLPYKGDASGMGFEVRAIENKEIISICSSKIQIDQVRLLEEPNKTAYSRTVQQLIKEQPDGTKYPPALDAIQDLKMKDMYLAESYRAYHILLQKMSENKCHGCIKLKEHISLMREQKMYKDQLNELKFQMSDEALQQMPEFQGRIDVLKVIHYIDSDLVVQLKGRVACEMNSGEELISTECLFENQLDDLEPEEAVAIMSAFVFQQRNASEPSLTPKLAEAKKRLYDTAIKLGKLQSEFKVPVDPEEYARDNLKFGLVEVVYEWAKGTPFADICELTDVSEGIIVRTIVRLDETCREFRNAASIMGNSALFKKMEVASNAIKRDIVFAASLYVTGI

SEQ ID NO: 258505 - protein, 98 aa, Zea mays
  Clone ID: MRT4577_167344C.1.pep
PCQTFRFRLEAKKNIPFGFSSGPPPGEFTWPPRNPRWCHPSLCPPLRPKVSPPGDPPKMVGNFSSPPGPPLKGPFGNSSRPPRIFSPPPLLLKIFGGS

SEQ ID NO: 258506 - protein, 69 aa, Zea mays
  unsure (1)..(69): unsure at all Xaa locations
  Clone ID: MRT4577_167345C.1.pep
KTGVVKSSSHLSTFYPSILPNNSLNCSDLTIHVCGTREADDFNQQIHSLKLFNYNYFYDALNIYYXVQC

SEQ ID NO: 258507 - protein, 122 aa, Zea mays
  unsure (1)..(122): unsure at all Xaa locations
  Clone ID: MRT4577_167346C.1.pep
WRDPAAPNPGRTWQSAAVYYVGGTIGWTVMGNPYYAAWASYKHIVFDDTVAFTYNKHFHNVLAVNKADYNNLIVTKPTATWYTGNDSVVLNTTDQHYFLXGYPGHCAVGQNVDIRIASSADP

SEQ ID NO: 258508 - protein, 69 aa, Zea mays
  Clone ID: MRT4577_167347C.1.pep
FGGPKKKIITWKQREEKLGPPKGAPPFFFCLFFFFIIFFFFFYFFFFIFFFFFFFFFFFFKINKLLHKM

SEQ ID NO: 258509 - protein, 88 aa, Zea mays
  Clone ID: MRT4577_167348C.1.pep
AHAAAVIVDGDSSDLTTTKLDELRAYLQHLQLEKESRTKKVAELVAQLHSSSLALGMDPTEANSVIHVSAERSHVQPGDIYHRSISVL

SEQ ID NO: 258510 - protein, 96 aa, Zea mays
  unsure (1)..(96): unsure at all Xaa locations
  Clone ID: MRT4577_167349C.1.pep
RFRGNGLNKAGXSWTLVTQQXILESKXSEIKAAVKFNFRKVLCMGVAGGXLSRWEERFHRDSQISGRFADSSLKNACQNVRGVYVQSSLGRPSRVL

SEQ ID NO: 258511 - protein, 66 aa, Zea mays
  Clone ID: MRT4577_16734C.1.pep
MGAARCPGGHSRWRGKRPGSVVHGPASSTGAQPRRPAQRDFDVSHAQPCGLSGAGAWPRRRAGTAR

SEQ ID NO: 258512 - protein, 47 aa, Zea mays
  Clone ID: MRT4577_167350C.1.pep
SFFYLCHATGRVRRDYIHTQDLLTTGLNSICMRNEQLRGADKTKILQ

SEQ ID NO: 258513 - protein, 204 aa, Zea mays
  unsure (1)..(204): unsure at all Xaa locations
  Clone ID: MRT4577_167351C.1.pep
VPRGRPGSAKLSPPDGDLDWPPPHRTLPWRSRPRAQRRPPGTPPPRRPPGSSSPRRPRGWPRPRRSPGSAXGDGRGRTERRSSQGLVRRAXPPPRRMPGSPPRRHWLGWTPPRPRRPPRSXRGGGSXSRRTPSVXRRRPPRSPPSCRTSGSPPPRXLPXWPPRGWLRTRWPGPRRPPRSREEVLAEASSAAIAPAAYAGAPFRR

SEQ ID NO: 258514 - protein, 72 aa, Zea mays
  Clone ID: MRT4577_167352C.1.pep
LGGFIWSFLANFIVSLLKVSSVKLFGWASCFSWRIGRFRCGCSFSETVSRCCCIVQGLVGYVVMGWSLASGS

SEQ ID NO: 258515 - protein, 102 aa, Zea mays
  Clone ID: MRT4577_167353C.1.pep
RVIRGNKLVALCCVSSSVANYSVLLFGQLNIYVLNVLQCFGRVGENHIIVGELLEQKSTSEVDNVNTPHIANGDASWNPDSESFQATGGFSVAFSLSVVQSE

SEQ ID NO: 258516 - protein, 249 aa, Zea mays
  unsure (1)..(249): unsure at all Xaa locations
  Clone ID: MRT4577_167354C.1.pep
WWPVLLLLPAVALLLFEASRLRASSPGPSPPVSSLGRLDPTXRLVHGVREPCLKLLSPKSLANVVFPEGTRLDSVVSRITYKTDDDDYDIYHSEANSTYLLQHAEATRFDLFTGFQTLAEREDSFKVNETVSVHCGFYSDNGGFKISEEDRRYMRACKVVVSTCAFGGGXDDLYQPIGMANSSIGRVCYVAFWDEVTLAAQEAEGKVLXDDSMIGRWRIIXVVRSXPFVDQRFNGKIQKMLTHRLFTEA

SEQ ID NO: 258517 - protein, 37 aa, Zea mays
  Clone ID: MRT4577_167355C.1.pep
KKKKKKKKKKKKKKKKKKKKKKKKKKKKKKGGRHRGG

SEQ ID NO: 258518 - protein, 121 aa, Zea mays
  Clone ID: MRT4577_167356C.1.pep
GLFFPPQGEHLRLGWIWSPPLPLVHGWGDPTSHNVSGDEGSLKIPVRLGLLFLPLAPQGCASPHQPCRVPAVVVALSTGPSQTVVLLFGPPGVREPPCASSLGFRFVFTLRLASPRSLVSG

SEQ ID NO: 258519 - protein, 100 aa, Zea mays
  Clone ID: MRT4577_167357C.1.pep
GLLGNTGIIVVVWEINKQKRNMNKNRLCDMHGPRRNGGDGYRITTTTCPHNTARTDWRCFVLLLLIITHRESELMNRCLVQSSEAAAAMPTGFRQKQVLR

SEQ ID NO: 258520 - protein, 78 aa, Zea mays
  Clone ID: MRT4577_167358C.1.pep
DALNGWNCHKSFLWKLYQEKRTQDLVIRTLYVVILLTRHGLFHTETGRRSRHEPYCLRLLVLLIKHRIWGGQGVHCGD

SEQ ID NO: 258521 - protein, 93 aa, Zea mays
  unsure (1)..(93): unsure at all Xaa locations
  Clone ID: MRT4577_167359C.1.pep
MMSNERHASSNPTSPQENDAMFLDILHEAPLFGHRKPRSIVGGVXLIGFNNWPGFXNAILAAAAPWIFQPLGHLVLPLLCSCDVVLLIVTCIF

SEQ ID NO: 258522 - protein, 652 aa, Zea mays
  Clone ID: MRT4577_16735C.1.pep
MAATASNPFPFPSRRSPEDSLFYAVYPILLPSHLPAPALHASLQSLHLSLLSHHAPFLSSHLFHRDPFTLTLPADPAAPCALCASPPVPHLHGALRFGDSLPDEWIAVSLLFALTRAFPDIAARAWDSDGEFLLIEAAFALPRWLDPESAPNRVFIFRGELHILPPSLFPETPSLEAALAAVYDDSIDTRAAGAIQAAIQRRIAGLPERAAENLHTARVIVPAPVAKLLREEPCLIARAIEGFYDRDIDTMKHAARMEKFLKGPGGEGIEIVRTTVRMTRAMYAQLVQQNFQAPRGYPMPRREEGPEKWMEAELGMKIACGFEMMYQERKRQGDKRPCRTWDVYRKSLEATGCFDGLYPGSIEYKRVIEDAMQYYKSSNLYSRTREILSEPVRRIDEILSMLYSTDEFKGTDLPPSDNDSWLYGGDDELNAELCERQKELEEHEAAKKQRSQKQSVPSSSKSQTDKFKLGEITESMQEFIRKMSSFEGAEIPADRRDTESVDLDVNQFFKAIKSVLGGGSQEQADSDDGFDRKSSLSDMDFDDSDEDDDFAEELGDKDADDSFMESYSDALNKELSSTTLEKSFAHAPRPETNNEGPSDDAATDAEMTPVDVDLNLVESILNSYSSQQGLPGPASSLLGLMGIKVPPDVKKM

SEQ ID NO: 258523 - protein, 132 aa, Zea mays
  unsure (1)..(132): unsure at all Xaa locations
  Clone ID: MRT4577_167360C.1.pep
QGNXAKXTQGSSXRTKTPXRSTXXRAGGGGERASPKPQRHGXSGPQPENSRRXXTSRANPPQEXTTRPHTXHGXGNEQAXXXXAKAARSGXAAGARATRAXXKAXTXAGSXGXAXRANARXAPAXEQXGHSA

SEQ ID NO: 258524 - protein, 53 aa, Zea mays
  Clone ID: MRT4577_167361C.1.pep
KKKKKYQLIDNNVHKIDMLFACTTLNTRGRGGVKGQKGQVYKNAYHQKASWKV

SEQ ID NO: 258525 - protein, 46 aa, Zea mays
  Clone ID: MRT4577_167362C.1.pep
NIFGKILLETVLFSIFEINRVKYPNIQFYSPTFQTKHTFSDRGKTF

SEQ ID NO: 258526 - protein, 74 aa, Zea mays
  unsure (1)..(74): unsure at all Xaa locations
  Clone ID: MRT4577_167363C.1.pep
RQGGTPNSIILQHSEYPCNPNIHYQTTRPQILNATIXKMLTLLSSIXQRRTITXTRRYLRXLNPNIKLYCMDPV

SEQ ID NO: 258527 - protein, 61 aa, Zea mays
  Clone ID: MRT4577_167364C.1.pep
GKKLFFMGFKRLVVTGGSVPGYNKYRVEGCASNIKYVGNWFFFKTAFKTIYHVLTFIRLAW

SEQ ID NO: 258528 - protein, 159 aa, Zea mays
  Clone ID: MRT4577_167365C.1.pep
ARPRHRRFDFFLSARPGSKQPDHGTPSDPRSDHLHRLSSSSQVKMIPQSQSSSLQRLQHVEKRIVRVLELAGAVMEELGNSHGPRTDAVSAHCREFMIAMKEIQTTLREEIKSACEYRPFEKCDYSARIANEICCKKLEYVIEKLDTMQQSLEHITDDV

SEQ ID NO: 258529 - protein, 63 aa, Zea mays
  Clone ID: MRT4577_167366C.1.pep
GDFGVFRRDFPFLHAKKLGNDGASTRAMLTIWIYLAPFFFLGAFCPRFFNRGMIPGKGNTPSP

SEQ ID NO: 258530 - protein, 37 aa, Zea mays
  Clone ID: MRT4577_167367C.1.pep
FNTNTLMIWCHSHCFADSIVCHSTPSIGKPVYSPDSR

SEQ ID NO: 258531 - protein, 119 aa, Zea mays
  unsure (1)..(119): unsure at all Xaa locations
  Clone ID: MRT4577_167368C.1.pep
VSGRSPGPWRSSPACGAAFVXXWGGASLSGCVLRAGLVRRLRVLLLRVARVAPSLRVCLLPSGRFLFFGAPSAFVGFLLCGGPVGSPLFGXXXXFFXXGXRGRPLWGLPASSAACSLAL

SEQ ID NO: 258532 - protein, 64 aa, Zea mays
  Clone ID: MRT4577_167369C.1.pep
LRAFPSKVPFAHFSAPTLAVIPIQCPLDSLKPKWEFAHAHLFGHTKGKNAVWSTPIIMCGMTNK

SEQ ID NO: 258533 - protein, 64 aa, Zea mays
  Clone ID: MRT4577_16736C.1.pep
VKIENYDKMLIPNYFLILCLSVVYGFAQLTRQQHNVAMVTGPTIQGVNNMGLCLYRTSFTYLLG

SEQ ID NO: 258534 - protein, 59 aa, Zea mays
  Clone ID: MRT4577_167370C.1.pep
KLFRAWVIVTALGNYLEKYYAYPFRQIKSSTLCRWTNNSHFILNCKCGIMSIVMLSNDA

SEQ ID NO: 258535 - protein, 90 aa, Zea mays
  Clone ID: MRT4577_167371C.1.pep
YTVPLHIPELDHGVAAVGYGVTADGTKYWLVKNSWGPEWGEKGYIRMARDVAAKEGHCGIAMEASYPVKTSPNPKVHAVVDEDGSSHDEL

SEQ ID NO: 258536 - protein, 141 aa, Zea mays
  Clone ID: MRT4577_167372C.1.pep
CPSLLLPACPRGRFLWFPSVPPSRVSGFPSGLLWCPVLGPPCGPASGSAPSLLCGAPVCPAWCSGLCWSLSGLCPVWFFLPSVLWPLALAVLLSVVPLPSLLVVFVLSRRGVWGGVFFHPPPVPVGCPFVRKPAWVVPVLP

SEQ ID NO: 258537 - protein, 377 aa, Zea mays
  Clone ID: MRT4577_167373C.1.pep
MARALPLVLAASVLLAAAALLLAAAPAPAAAVDFGAEDLASEEALWALYERWRGRHALARDLGDKARRFNVFKANVRLIHEFNRRDEPYKLRLNRFGDMTADEFRRHYAGSRVAHHRMFRGDRQGSSASASSFMYADARDVPASVDWRQKGAVTDVKDQGQCGSCWAFSTIAAVEGINAIKTKNLTSLSEQQLVDCDTKANAGCNGGLMDYAFQYIAKHGGVAAEDAYPYRARQASCKKSPAPVVTIDGYEDVPANDESALKKAVAHQPVSVAIEASGSHFQFYSEGVFSGRCGTELDHGVAAVGYGVTADGTKYWLVKNSWGPEWGEKGYIRMARDVAAKEGHCGIAMEASYPVKTSPNPKVHAVVDEDGSSHDEL

SEQ ID NO: 258538 - protein, 377 aa, Zea mays
  Clone ID: MRT4577_167374C.1.pep
MARALPLVLAASVLLAAALLLAAAPAPAAAVDFGAEDLASEEALWALYERWRGRHALARDLGDKARRFNVFKANVRLIHEFNRRDEPYKLRLNRFGDMTADEFRRHYAGSRVAHHRMFRGDRQGSSASASSFMYADARDVPASVDWRQKGAVTDVKDQGQCGSCWAFSTIAAVEGINAIKTKNLTSLSEQQLVDCDTKANAGCNGGLMDYAAFQYIAKHGGVAAEDAYPYRARQASCKKSPAPVVTIDGYEDVPANDESALKKAVAHQPVSVAIEASGSHFQFYSEGVFSGRCGTELDHGVAAVGYGVTADGTKYWLVKNSWGPEWGEKGYIRMARDVPAKEGHCGIAMEASYPVKTSPNPKVHAVVDEDGSSHDEL

SEQ ID NO: 258539 - protein, 95 aa, Zea mays
  Clone ID: MRT4577_167375C.1.pep
APRCYPNSCLRSSGYGTSVSTSSGRWVPSSRAQAIFGLVLQSFLEHQPQMWPGSWSVGGSNISTSSAYLRPTPTASLPLSSSRGCSPLKNLCGVV

SEQ ID NO: 258540 - protein, 407 aa, Zea mays
  unsure (1)..(407): unsure at all Xaa locations
  Clone ID: MRT4577_167376C.1.pep
MARALPLVLAASVLLAAALLLAAAPAPAAAVDFGAEDLASEEALWALYERWRGRHALARDLGDKARRFNVFKANVRLIHEFNRRDEPYKLRLNRFGDMTADEFRRHYAGSRVAHHRMFRGDRQGSSASASFMYADARDVPASVDWRQKGAVTDVKDQGQCGXVYIYVCMYIYTTYRDACGQEYIMPTPMSSTXSCWAFSTIAAVEGINAIKTKNLTSLSEQQLVDCDTKANAGCNGGLMDYAFQYIAKHGGVAAEDAYPYRARQASCKKSPAPVVTIDGYEDVPANDESALKKAVAHQPVSVAIEASGSHFQFYSEGVFSGRCGTELDHGVAAVGYGVTADGTKYWLVKNSWGPEWGEKGYIRMARDVAAKEGHCGIAMEASYPVKTSPNPKVHAVVDEDGSSHDEL

SEQ ID NO: 258541 - protein, 58 aa, Zea mays
  Clone ID: MRT4577_167377C.1.pep
ASSKACIIFCIIATRRSIPFFSPYYSGCYIYWSLYSTGVTYGIGSKILDNPRWCAVLY

SEQ ID NO: 258542 - protein, 116 aa, Zea mays
  Clone ID: MRT4577_167378C.1.pep
YVHNGKQTEKHTSHMNISISDNRRVLIIRKCNRRQTMHRWRGTKPKKERERRKGKRLNQQQSPRVAKTSHNNHREKKKKEKMPGFPACQILTIRTYRRGHVFAPILLRQPGCGWLS

SEQ ID NO: 258543 - protein, 463 aa, Zea mays
  unsure (1)..(463): unsure at all Xaa locations
  Clone ID: MRT4577_167379C.1.pep
EKVLPFCTGFAVWCFIWXLCKKXLEQYGEVSMLDIKGADASKVILVVGIMTLHSFGEGSGVGVSFAGSKGFSQGLLVTIAIAVHNIPEGLAVSMVLASRGVSPQKAMMWSIITSLPQPIVAVPAFLCADAFQKVLPFCTGFAAGCMIWIVIAEVLPDAFKEATPSQVASAGTLAVAFMETLSTVLLGFTDGNNVEDASGFLVSLVFGLGPLIGGIILVTFSLGFSMPHPLLTGVASGIAFRLAAWRPVQLLMTSKMGLFTTLFLLIGGSLAYHAATSSILRLFNRKRSSVNVIASSSGLSLSALTVQSLLACGAVFLHAYAEGLALGVAARKAYGLGRYMVLPASLHGLPRGAAAASCVYGATDSWRGALAAAALTGLAAPSAAISAILAKIDYDGLDYWMVIACGALIPSFGRVFRRSLRLDVRKSVVGLLVGVAFASVCLMSTRFICLHTPYCNSAPEAVT

SEQ ID NO: 258544 - protein, 132 aa, Zea mays
  Clone ID: MRT4577_16737C.1.pep
QTGWALNNVVLASFKKNCPQKGRFRVSLVDLATKLEPFWFCSPKPEGGFPQLWLMRKNSNVNQPRPWSIGEGIKRGFSWKRWSKRAPFYFLNQGPGVFFFLVKKKSWVFGMLRPKNPVNGRFVNLVKDWLLH

SEQ ID NO: 258545 - protein, 104 aa, Zea mays
  unsure (1)..(104): unsure at all Xaa locations
  Clone ID: MRT4577_167380C.1.pep
RRTAEAERRYGKARGGSTRRGGGTRRGRRGAFGPPTRATRKRNRRRRAEADTGPREXFRRPRTRTSPVASSSSETEMEMPSISDGEHGMAGARSCGEWARHGGL

SEQ ID NO: 258546 - protein, 79 aa, Zea mays
  unsure (1)..(79): unsure at all Xaa locations
  Clone ID: MRT4577_167381C.1.pep
KGRIAVIDPMKKRAARSGQGVXLGGIGAGSIGRSYKGDFQRWQLFPGSCEDNAVLANQLSAFISRQDGRKYSTVLHPGK

SEQ ID NO: 258547 - protein, 193 aa, Zea mays
  Clone ID: MRT4577_167382C.1.pep
ALKPKNIDFAQAAGLPLAIETADEGLVRTEFSAGKSILVLNGAGGVGSLVIQLAKHVYGASKVAATASTEKLELVRSLGADLAIDYTKENIEDLPDKYDVVFDAIGMCDKAVKVIKEGGKVVALTGAVTPPGFRFVVTSNGDVLKKLNPYIESGKVKPVVDPKGPFPFSRVADAFSYLETNHATGKVVVYPIP

SEQ ID NO: 258548 - protein, 50 aa, Zea mays
  Clone ID: MRT4577_167383C.1.pep
HTKQTNFPWLLFLTEKKIALFIPDWDPNCYVLYSRIIFGFKGFYLFADAG

SEQ ID NO: 258549 - protein, 92 aa, Zea mays
  Clone ID: MRT4577_167384C.1.pep
LHPQPRSLAGRRRVHLPINHVAPVAALAIYGRVASPRPRLCLLPRQSVALARIRDGNGEFSVGFWLPIPVPATKKLPRGDPHEHLQGTFLPH

SEQ ID NO: 258550 - protein, 56 aa, Zea mays
  Clone ID: MRT4577_167385C.1.pep
ARSRYNLVIVPRVIKNPKNRVKTKLAARYSPSARQLPGSENHYRSRGFESAIETVS

SEQ ID NO: 258551 - protein, 101 aa, Zea mays
  Clone ID: MRT4577_167386C.1.pep
VASYNRYSNNHLPSNSSLCKYMLKDPVYYLYVYNSTQVLGICQLLAGRIIGPDQKLHDSSHCAVVSSEPHTRSFVANSEKRCVHNWVQEKSTQGLHSEILP

SEQ ID NO: 258552 - protein, 44 aa, Zea mays
  Clone ID: MRT4577_167387C.1.pep
TLLFICLPSQRKRSKVESACLYIATYKHKYLMIRNQAFELTPAC

SEQ ID NO: 258553 - protein, 120 aa, Zea mays
  unsure (1)..(120): unsure at all Xaa locations
  Clone ID: MRT4577_167388C.1.pep
ASQNNYSVYFSFIIVFFIIVFLLFIYSFCIKLXFNITFIFIFMIFKFFYFLLYYILFFFIXLFLLFLFILFFYLLIFFFXIFSIYYFFFYXYLFFYFYYLFIFYLYIFNINCNLIFFYIF

SEQ ID NO: 258554 - protein, 134 aa, Zea mays
  unsure (1)..(134): unsure at all Xaa locations
  Clone ID: MRT4577_167389C.1.pep
AEPPGQSPSAGPLRDIKDPEHPYSLEQLNVVTEDSIELNDESNYVRXYLLCIRVTFTPTVEHCSMATIIGLCIRVKLVRSLPPRYKVDIRVAPGSHATEAAVNKQLNDKERVAAALENPNLLDMVEECLSPTFD

SEQ ID NO: 258555 - protein, 51 aa, Zea mays
  Clone ID: MRT4577_16738C.1.pep
RIFHKSLTVRPSFQLCFLTANWHPHFSLSLIPMLFLAIGILYPFLFKPPIS

SEQ ID NO: 258556 - protein, 82 aa, Zea mays
  Clone ID: MRT4577_167390C.1.pep
RTRGKKKKKKKKKKKKKKKKKKKKKGERKKKKKKKKKNKKKKKKKKKKKGGGRFKGPKFTSPALEEITFFFGAPKLNYRAPF

SEQ ID NO: 258557 - protein, 108 aa, Zea mays
  unsure (1)..(108): unsure at all Xaa locations
  Clone ID: MRT4577_167391C.1.pep
HPYSLEQLNVVTXENSIELNDESNHVRVTFTPTVEHCSMATIIGLCIRVKLVRSLPPRYKVDIRVAPGSHATEAAVNKQLNDKERVAAALENPNLLDMVEECLSPTFD

SEQ ID NO: 258558 - protein, 78 aa, Zea mays
  Clone ID: MRT4577_167392C.1.pep
LVQRPPADFYFEKEPPRGGMASGACVSPKPKQPHPQRPRRSQSTMRLDHGTTTSETEPKLPAEPAVPATIQVQQAPEG

SEQ ID NO: 258559 - protein, 56 aa, Zea mays
  unsure (1)..(56): unsure at all Xaa locations
  Clone ID: MRT4577_167393C.1.pep
RIQSTRTHWNSXNVVTEDSIELNDESNYVRFIFALHQGYIHPNRGALEYGNLFIGP

SEQ ID NO: 258560 - protein, 158 aa, Zea mays
  Clone ID: MRT4577_167394C.1.pep
MAMGLINANPIIHEKKERRIRQAPETTDENAAESIDQLEIFDHIRDIKDPEHPYSLEQLNVVTEDSIELNDESNHVRVIFTPTVEHCSMATIIGLCIRVKLVRSLPPYYKVDIRVAPGSHATEAAVNKQLNDKERVAAALENPNLLDMVEECLSPTFD

SEQ ID NO: 258561 - protein, 150 aa, Zea mays
  unsure (1)..(150): unsure at all Xaa locations
  Clone ID: MRT4577_167395C.1.pep
KEYPSPKKLERVLRVEDLPTSPSMTPQFYTCSVVPIGALYAMSLWVCNCAYIYLSVTFIHMLKALKPGAAYCISVLFKKETFRSSSMLNMLSIXFGEDIVGYGEAXVDARGVSLXLRRHLTRPTRLVLIQILVTSKGIXLNPVTXLYYGR

SEQ ID NO: 258562 - protein, 191 aa, Zea mays
  unsure (1)..(191): unsure at all Xaa locations
  Clone ID: MRT4577_167396C.1.pep
MAMGLINANPIIHEKKERRARQAPETTDENAAEPIDQLEIFDILLNDFFKCSEDCCSIYLSSXPSHLIVVLIVLTSHXDIKDPEHPYSLEQLNVVTEDSIELNDESNYVRVTFTPTVEHCSMATIIGLCIRVKLVRSLPPRYKVDIRVAPGSHATEAAVNKQLNDKERVAAALENPNLLDMVEECLSPTFD

SEQ ID NO: 258563 - protein, 123 aa, Zea mays
  Clone ID: MRT4577_167397C.1.pep
MSSTKKPSGKTQRSAIADVVAREYTIHMHKRLHGVTFKKRAPKAIKEIKAFATKSMGTSDVRIDPQLNKKVWEQGIKGVDYRIRVRISRRRNDEEGAKEKLYSYVQAVNVKDPKGLPTVVVEE

SEQ ID NO: 258564 - protein, 156 aa, Zea mays
  Clone ID: MRT4577_167398C.1.pep
SIQHSSAGAWVAANVAPYYPSTDISLVSVGNEIMDTADKALISNLVPAMRALKAALVAAGYPKIRVSTPHSLGILSVSEPPSASRFRDGFDRAVFAPMLAFHRQSRSPFMVNPYPYFGYNGVTLPYALARPNPGVPDPGTGITYTSMFEAQLDSVY

SEQ ID NO: 258565 - protein, 461 aa, Zea mays
  Clone ID: MRT4577_167399C.1.pep
KDTLMMYDRACGNLAHASKKIQLFSSDCCEDVNKVQDALKREEVLKQTVPDEKNKHLEAIGAVEMAKNAFTHETYSKHQAENAKAVDALLSTGKSCRRYSKHEIELATDYFSDAKKIGEGGYGNVYRCTLDHTEVAVKVVEQDSINKIDEFLREVEILGQLHHPNLVLLLGFCPEIGCLVYEYMENGSLEDLLINDKGQPLHWFLRFQIIFDVACGLAFLHGTKPEPIVHRDLKPGNILLDKNYVSKIGDVGFAKPISDLVPEGLTEYRDTVIAGTLYYMDPEYQLTGTVRPKSDLYALGIIILQLLTGKRPPGLVNSVEEGIKRGILSDILDKSQPDWPIAEAEMLAKLGLWCTALKCRDRPNLESVVLPELENILSRVTVSLKLENILAPSHFFCPILQEVMENPYVAADGHTYEHRAIKAWLEKHKISPMTNQRLPHLSIIPNHSLHAAIQQWKLRAS

SEQ ID NO: 258566 - protein, 53 aa, Zea mays
  Clone ID: MRT4577_16739C.1.pep
LCKVGFRPQVCVASGWSAQKKSDLVDPWFFFSKSNRVFCLKLFGSYLLFKGVR

SEQ ID NO: 258567 - protein, 94 aa, Zea mays
  Clone ID: MRT4577_1673C.1.pep
GGVGLLGLGPRGFPPNQNKPKLFGAPGTWKGKPSFPRLLKGATFKGLFAPRPMGWGGKKNCFPGGPNKYFFPPTGNPFSLGFSPLFRCCWAHKI

SEQ ID NO: 258568 - protein, 115 aa, Zea mays
  Clone ID: MRT4577_167400C.1.pep
LSLSFLPSACWLPMSAAPLLGWELLLQRKGCCALTHHRSTVAQPERSVRQLGSELLGGCDRKHGGAQDTKRQSIALLACVLRPARVGRSCHAWMTRNLSYSLTCTHSTISISSTT

SEQ ID NO: 258569 - protein, 75 aa, Zea mays
  Clone ID: MRT4577_167401C.1.pep
SRMYQTEKQLYGLGDMDPTDLKVTASSQLQELTVPNAIGSTHTINDAICVVPESHAHIALPIKSAVCLKNGTRPI

SEQ ID NO: 258570 - protein, 68 aa, Zea mays
  Clone ID: MRT4577_167402C.1.pep
KTGRLPSPRSDLGSVASSRSKPPAPPLLKACVSLHSQSQTSQLACTSRISRTRLQVLSVSLVLLRSKS

SEQ ID NO: 258571 - protein, 71 aa, Zea mays
  Clone ID: MRT4577_167403C.1.pep
VVPDGEMHRGQNGIQLLNGHAPAAGPNLAGLPQASRHHGLLGGALANLFVIVGFAAFAYAVKYVLRSIAQE

SEQ ID NO: 258572 - protein, 65 aa, Zea mays
  Clone ID: MRT4577_167404C.1.pep
DSARGAGTHTPSAVLCRAVDPAQHLLPSRARKAPIRITHLSAICGTCDLPIGRALPFSTVIGLVY

SEQ ID NO: 258573 - protein, 110 aa, Zea mays
  Clone ID: MRT4577_167405C.1.pep
KLCSLFLSYHENRVLFHSIVPAFRNVIDVPLVVRGLRKSRSEVRKELGIEENAKVLVFNFGGQPAGWKLKQECLPDGWICLVCGASDSQDVPPNFIKLAKDAYTPDVMAA

SEQ ID NO: 258574 - protein, 38 aa, Zea mays
  Clone ID: MRT4577_167406C.1.pep
MEVAGNGMGVDRDYDYDSMEVSYICSEQEQIQYECMGE

SEQ ID NO: 258575 - protein, 153 aa, Zea mays
  unsure (1)..(153): unsure at all Xaa locations
  Clone ID: MRT4577_167407C.1.pep
QPFAVLPLSSLSRLNDSTDAATSLPLSPRAASPYVRQAAEAQRQRPAVRHFGHAAVRVGGPVQSAPGPPHVQRRLPVLPPRPPRAPXPPPPPPRRPPPPGAPPPPLPRRPHPRAPPAARPRRATAPRSPRTSARSTLSPAPPSPTPPPPSRSR

SEQ ID NO: 258576 - protein, 201 aa, Zea mays
  unsure (1)..(201): unsure at all Xaa locations
  Clone ID: MRT4577_167408C.1.pep
TEAQRQRPAVRHFGHAAIRVGGPVQSAPGPPHVQRRLPVLPPRPPRAPXPPPPRRPPPPGAPPHPLPRRPHPRAPPADRPXAAPPXPRSPRTSARSTLSPAPPSPTPPPPPSPTPPPXSQPLMPTSASKKPPPTAAAAAAGRRDEAAQPARGRAEVRRKKIGRFLSRLVGAEKRRHTGDGGGELVHSKTMKEKTAFKWVFF

SEQ ID NO: 258577 - protein, 89 aa, Zea mays
  Clone ID: MRT4577_167409C.1.pep
RTRGRTRGRTRGRTRGQVWDCLFLVQHGGRSCSVCYCSSRLQKQLRSVPCACKGQNKCYNGAEYANKDSYSWWLPRAASDKLFGYEVCN

SEQ ID NO: 258578 - protein, 161 aa, Zea mays
  Clone ID: MRT4577_16740C.1.pep
MMMAEVANHSKRNHTDSYFSGKPVAVPAAAATSSEEFGSMSSKKPRNASPRLAPVSPKEKKDKIGERVAALQQLVSPFGKTDTASVLQEASGYIKFLHQQLEVLSSPYMRAPPAAGAAPEDPQRYSLRSRGLCLVPVDLTLQLTQSNGADLWAPAHTARRR

SEQ ID NO: 258579 - protein, 739 aa, Zea mays
  unsure (1)..(739): unsure at all Xaa locations
  Clone ID: MRT4577_167410C.1.pep
MGSCAGEEWPGGVTGPDAEVGALVWVRRRNGSWWPGRILGMGELPENIVIPPRSAGTPIKLLGRPHGSIDWYNLEKSKRVKSFRCGEYDECIEKAKALVRRQKKTHTEGRYVRREDAIMHALEIERSHFPNNCDDLEEDADNDICASQNICSAKSININGLSKKSRGARSLYDIEINSAQELSQTLTLYKQPQNLSSSSTRYASSKRKKWKGHKDHEDDSVHGFQRMRDLREIGTKNVFKQKSGSGIVSDVPLLESGSSFGYDLSSADGIKLGEQSQSSIKKKRSNIGQSYDSLSKKDKHHPLSLLCEDSEVSGTYYHWDPSGQSCSQYPGGQIPNLVESSRRAKTIFPTDVNNCSYSSGTSSLDTLLDTSHIKHKRSVNAVTLKNADPCTTRILNDDCPDCDEFLDADTLEEDVLEEGKGHLDTYGSCASIKDQISKLGNQSTGCAIGGTPSTWHNRNSXKKSITAVNFLIPKGSHKRDTNSLLQHEGIIKSEGTVFRPAELEDNAHVTPEHDESSETISNLSNYEKNTTSFPNYVPLQLLPPPGQRPDPKPPGCPVTNPTRRARADYRLYDVEVTVQRSYKGHHAPLISLMSKWTGKPIVGYPVTLEVLKDSRHTTSRDEHRPVMGSLDSLLKSRVSEPRQARSSHASRSKFKSSGRKKATEHDLDRSWWPHTKKPASSPRKMRRLSSFAGSRRESADQKPVVAKTGGPAVACVPLRLVFSRINEALSFPLRQEKPT

SEQ ID NO: 258580 - protein, 106 aa, Zea mays
  unsure (1)..(106): unsure at all Xaa locations
  Clone ID: MRT4577_167411C.1.pep
TPDGKHSLRYNISIKTTPQPLKIHAHIEMKCLQFNRLLHIKQAMNKAEAPDNDNCPVKIKLLASTLYVYTTHTLDNDQGISLLTTALNACTAXIEKYKGKLVLNEP

SEQ ID NO: 258581 - protein, 1184 aa, Zea mays
  unsure (1)..(1184): unsure at all Xaa locations
  Clone ID: MRT4577_167412C.1.pep
MSEPTIADLAKLIEGLTGKINTLQTDIDTMKKDKTSSSGAQVPSGGFDGQHHTDRPPRFQKLDFPRYDGKSDPLVFINRCESYFHQQRIMEEEKVWMASYNLEDKAQLWYMQVQQDEGIPTWRRFKDLLNLRYGPPLRSAPLFELAECRRTGTVEEYQDRFQALLPRAGPLGEAQRVQLFTGGXLLPPISNQVRLHNPQTLAMAMSLAREVELXPPPALPVPPARPALPAPPIGAAPARLETQPIRRLSTEEQAERRRLGLCYNCNEKYSRGHNRVCRCLFFVDGVIITDEEDTAAAEPNDETAAPVFSLQAVAGVPICNTMQVRVDLGTATLVALLDTGSTHNFIGEEAARRTGLVIQPRPRLTATVANGERILCPGVIRQAPIVIATERFLVDLFVMPLAGYDLVLGTQWLVTLGRIMWDFTARTMSFTRHGREVCWTDVATVRAPRLAATAAGDSLIEGLLGTFADVFAAPTGLPPVRARDHAIVLKPDATPVAVRPYRYPAAHKDELERQCEEMMGQGIVRRSNSDFSSPVILIKKPDGSWRFCVDYRALNALTIKDAFPIPVVDELLDELNGARFFTKLDLRSGYHQVRMRTADIHKTAFRTHDGLYEFLVMPFGLCNAPATFQALMNDVLRPFLRRFVLVFFDDILIYSSSWADHLRHIRAVLTMLQQHQLFVKQSKCAFAVPSVAYLGHVISASGVAMDPAKVEAVRDWPQPRSARAVRGFLGLAGYYRKFVHDYGVIAAPLTALLKKEGFSWTEEATTAFTALKTAATSAPVLALPDFTKPFIVECDASSHGFGAVLIQDSHPIAFFSRPVAPRHRSLAAYERELIGLVHAVRHWRPYLWGRRFIVRTDHYSLKFLLDQRLATIPQHHWVGKLLGFDFSVEYKPGAQNGVADALSRRDTPEGAVLAVSAPRFDYIAQLRHEQASHPAVVALKEELTAGLRGAPWAIVDGLLTYDGRIFIPSASPLLQEILVAVHGDGHEGIQRTLHRLRRDFHFPDMRRVVQDFVRACSTCQRNKSEHLRPAGLLLPLPIPTDVWSDIGLDFIEALPRVRGKSVILTVVDRFSKYAHFIPLAHPYSAETVAQAFFSDIVRLHGMPQSIVSDRDAVFTSMFWQELMRLMGAKLNMSSAFHPQSDGQTEAANKVIAMYLRCFTGDRPREWLKWLPWAEYTYNTAYRAG

SEQ ID NO: 258582 - protein, 111 aa, Zea mays
  unsure (1)..(111): unsure at all Xaa locations
  Clone ID: MRT4577_167413C.1.pep
RRQRGLFFFFLPRHILGGGGGXXXXXXXIDXTXTRCPPCRXLAPIFADMAKKSPNVVFLKVDVDEMKTIXEQFIVEAMPTXLFMREGDVKDRFVGAVKEELARKFELYMGL

SEQ ID NO: 258583 - protein, 93 aa, Zea mays
  Clone ID: MRT4577_167414C.1.pep
TRPEGHQLVKSIVYQFRNNMAPVAAVNLALPAPIAFSIHTPSPLRDATMLTPVLSLFLTTMIVAYPTIQPYMLPEAIATRISRCISTNTPTTI

SEQ ID NO: 258584 - protein, 359 aa, Zea mays
  unsure (1)..(359): unsure at all Xaa locations
  Clone ID: MRT4577_167415C.1.pep
MEATEAPNYDSIVNRDEITEVAAAAFANPEQVPEKYVRTEKVLDGVVVGADESXRPVVDMARLLDPELAPSDVAKLGDACRNWGFFQLTNHGVDEAVVXRMKDTTMQFSAXPLDNKAKVAVRGNGFEGFGHHYSRASNGKLDWAESMILITQPVKDRNMEMWPTNPPTFRDALDVYSIEMTGLAMRLLGFMAADLGVEPEALQDAYTGKRQSMAVHXYPPCRQREKVNGXTPHTDGLGLTLLLHVDDTPGLQIRRGGRWFPVRPLPGAFVVNVADILDVLTNGAYASVEHRVLPDAERARTTVVVFQEASVGGLVAPLPGLLEQQGARARYRSIEIEEYIKGNFNALEQGTRFIQSLRI

SEQ ID NO: 258585 - protein, 360 aa, Zea mays
  Clone ID: MRT4577_167416C.1.pep
MEAAEALNYDSIVNRDEITDAAAAAFANPEQVPEKYVRTEEVLDGVVVGADESYELPVVDMARLLDPELAPSEVAKLGDACRNWGFFQLTNHGVDEAVVQRMKDATVQFFSSPLDSKAKVAVRGNGFEGFGHHYSRASSGKLDWAESMILITQPVKDRNMEMWPTNPPTFRDALDVYSVEMIGLAMRLLGFMAADLGVEPEALQDAFTGKRQSMAVHHYPPCRQREKVMGITPHTDGLGLTLLLHVDDTPGLQIRRGGRWFPVRPLPGAFVVNVADILDVLTNGAYASVEHRVLPDAERARTTVVVFQEASVGGLVAPLPGLLDQQGARARYRSIEIEEYIKGNFNALEQGTRFIQSLRI

SEQ ID NO: 258586 - protein, 102 aa, Zea mays
  Clone ID: MRT4577_167417C.1.pep
WKIPAHWRPLRGNPTSGPSLAWGWPPLPAVGKGNALTVPQRKLGPQLKVQTLGGPKSEKTHIGGAEPTAHLPGGKPGQPPVLKNGPTRGERLFANRPPLRGA

SEQ ID NO: 258587 - protein, 178 aa, Zea mays
  unsure (1)..(178): unsure at all Xaa locations
  Clone ID: MRT4577_167418C.1.pep
ETKLFPPGPPPGGPKGQIPPPGGPFLGDPAPXPQPGGKQGQSGSRGEMGSPPHFPPNSDPEPKRENPGGPKGGPTXINGGGPPAPFPGGKPGGPVXNEPPPPRGKGVGVWGPFPLPGXGPLGPGRSGXGGVSPPPRGGIRFPPKSGDTPGKNXEQRAPKGPKPQKRPGGGGFSLGPPP

SEQ ID NO: 258588 - protein, 114 aa, Zea mays
  Clone ID: MRT4577_167419C.1.pep
PPGARGHFAPTEHPTSQGLGPNLHSQSSLTGSLIYLFPASASSHILLSYTPDRHSFDACSYLLQVKEYSLSPDLPTHLFLHHRLLFWFINTPRPPALLSDMPESKNVPWAGLKL

SEQ ID NO: 258589 - protein, 156 aa, Zea mays
  Clone ID: MRT4577_16741C.1.pep
MMMAEVANHSKRNHTDSYFSGKAVAATSSEEFGSMSSKKPRNASPRLAPVSPKEKKDKIGERVAALQQLVSPFGKTDTASVLHGRAGYIKFLHQQLEVLSSPYMRAPPAAGAAPEDPQRYSLRSRGLCLVPVDLTLQLTQSNGADLWAPAHTARRR

SEQ ID NO: 258590 - protein, 643 aa, Zea mays
  Clone ID: MRT4577_167420C.1.pep
MEDQSPDHISVGSAQKKSSTSSRGRHRNFSSSTCKDFLRKFVDSELLTSSLEDWFSGHSEDCGFRKPSFDVPFDLTELQSFDYALESVTFQQLVRMPNALYASTSDVFEATAYLALEDFLHASIKGLWQTFWGPDESMPFSVACIHSTSSKFYPAEKAISSGKLDGVCATAILLKNLKHSQGRWDHIVVLALLRPDIGMVSAHGDQEPSPAVLGEALFFALRVLLSRSLGRSSTVLRNSDCVYVLLFDSQFGGVVKVQGDLNKLDFDLNNVYDCAAEWIKKHANISVSSIDRVWNKLGNANWGDIGTLQVLIAMFHSMIQFYGEPKYSLDELATEHSSRLQSRRSERHLVDRQANGNGLFRFQQRSRSPEIVEVQEEAAVDVKPHETLRIEIGSVVLMDDAYMQKGFQINDILTDSDPPIYTSTPVEEPTRTYLLYVGSSPSHLEPAWEDMNSWYQVQRQTKVLTVMKQRCISSRYIPQMVSSGRLVHPGPCNKPNSNGSCGHPWCSTPMLVTSPVGETISNLIRNGLFGVEEALRCCHDCLSALAAAAAAGIRHGDIRPENVIRVNNGSRHPYFVLIGWGHAILEDRDRPVMNLFFSSTFALQEGKLCGASDAESLIYLLYFSWGGVCPELDSVERALKGRK

SEQ ID NO: 258591 - protein, 308 aa, Zea mays
  Clone ID: MRT4577_167421C.1.pep
MDDAYTQKGFQISDILTGSDPPIYTSAPVEEPTKTCLLYVGSSPSHLDPAWEDMDSWYQVQRQTKVLTVMKQRCISSRYIPHMESSGRVIHPGPCNNPNSNASCGHPWCSTPMLVTSPVGETISNLIRNGLFGAEEALRCCHDCLSALAAAAAAGIRHGDIRPENVIRVNNGSRHPYFVLIGWGHAILEDRDRPVMNLFFSSTFALQEGKLCGASDAESLIYLLYFSCGGVCPELDSVESALQWRETSWSRRVIQQKLGDISAVLKAFADYVDSLCGTPYPMDYEIWLKRLRRTMNEDHGKEVDTSSS

SEQ ID NO: 258592 - protein, 128 aa, Zea mays
  Clone ID: MRT4577_167422C.1.pep
GHNTRQRHGSRGPGPAPHKKKQKGALPAQRDEPVVNPKEVPPAAGVYGGGGHPSKIARPPRAPAWLVVHGCVACVTWRHARSPPVGKPLGFKWAVITGGQTCSVRINGCACIPCQPNGTKQTRSFQAP

SEQ ID NO: 258593 - protein, 59 aa, Zea mays
  unsure (1)..(59): unsure at all Xaa locations
  Clone ID: MRT4577_167423C.1.pep
YATCCAIELWVFHYSSLIXNPKFYFYDKMLGYINGYIRTFNLACIDHRGTPXHPARTCT

SEQ ID NO: 258594 - protein, 58 aa, Zea mays
  Clone ID: MRT4577_167424C.1.pep
MIPSKPMCVEAFTDYPPLGRFAVRDMRQTVAVGVIKSVDKSAGGAGKVTKAAQKAGKK

SEQ ID NO: 258595 - protein, 190 aa, Zea mays
  unsure (1)..(190): unsure at all Xaa locations
  Clone ID: MRT4577_167425C.1.pep
PIKKENFLNKKGPQNKRVKKFQKPPNSPFQSKKGGPQKPQVPKKTGGPKGPQVPNLPRGPPLXGQLKGKKNKGPQFKPFFGPXPNFGGNPGFSPGGGQGGPKGXGPPPPPFLGETAGPLKFSLKPREKPFKPNXPRGPKKLKPGNYNQAGFWGPPPXKGGGGQPTFGGPPKGXKPQXPPPRGGGGGPLFL

SEQ ID NO: 258596 - protein, 75 aa, Zea mays
  unsure (1)..(75): unsure at all Xaa locations
  Clone ID: MRT4577_167426C.1.pep
MVKFLKPXGRAVILLQGRLAGKKAVIRHVFXDGTHDRPYCHCLCNGLSNYPNKVVRKDSGKNTAYKSRVKCFIKL

SEQ ID NO: 258597 - protein, 194 aa, Zea mays
  unsure (1)..(194): unsure at all Xaa locations
  Clone ID: MRT4577_167428C.1.pep
AVVTTAGFFFFFFFCFFFFFFFFFFFFFFFFINSKNKERKGTNKTKKPKNKNKRGGGATHSPNSPLNKPTLGEICQTMKGKAHNEGKKSNGAKNPWQPQTKKPRGNLRNPPNPKXQRQKEPKAPLSRAEPVPENKKKRALTLLTHTRILVSRGQFKXHLGNLLTKGPPQPNPPPDKVFPPDPPGGARPGSPKGG

SEQ ID NO: 258598 - protein, 81 aa, Zea mays
  Clone ID: MRT4577_167429C.1.pep
KQLKPLQYPQHFPPYRSPHPPPLRKPPNRAYVHSSHKIPILKQAQRVHRGTIETHQKPHPNVMPREQNFFKSSAEADNVPS

SEQ ID NO: 258599 - protein, 298 aa, Zea mays
  unsure (1)..(298): unsure at all Xaa locations
  Clone ID: MRT4577_16742C.1.pep
MMMAEVANHSKRNHTDSYFSGKAVAVPAAAATSXSEEFGSMSSKKPRNASPRLAPVSPKXYARTHRTMPVSTVPRTYVRTSPVSMAICLAQVFFLGGAAAAAATTEQEKKDKIGERVAALQQLVSPFGKTDTASVLQEASGYIKFLHQQLEVSTIFGDHRTATLILRFFPASXMSMGILLLQVLSSPYMRAPPAAGAAPEXELSPSLVFVSTDEFLTQACRTLNLVSIHIYIHHLLLGARKKPTSSTRSLCNTCMXQDPQRYSLRSRGLCLVPVDLTLQLTQSNGADLWAPAHTXRRR

SEQ ID NO: 258600 - protein, 290 aa, Zea mays
  Clone ID: MRT4577_167430C.1.pep
MAAPPLVFVAAAIAALAIFVLVLVVFAFRRWWWRRRQRRPLQAAAAASTPVAVQEEDIDRPLLSENRDDHSRQSNYFLGSSVGEPSKIQTNRSNTSPRSHAIADTGRIYPDECCATQGETHVINIENDTSEEFQLGSTLRRTPPPKWPTPDQKHRRRVSGDDNHNGSVPLKDNTYHSRLDLEVIAGPSHGISCSRQSSRPSMLPITLGRVPPSDLVLKDSEVSGKHAQINWNGKTLKWELVDMGSLNGTFLNSQAVHHPNAGSRHWGEPAELAHGDIITLGTSSKLSVSS

SEQ ID NO: 258601 - protein, 149 aa, Zea mays
  Clone ID: MRT4577_167431C.1.pep
LSPSPSPAAFSQLVRSRALLLSRFFLRSPPLLLPLFFPLWARRFCFLVSGLFGAPLSFPFTPFFCFPAFPFSFCVLFFVCAFGGTGFPFGNRPFPWSPPPPLGSRPPYAGPPPLCNRPLYWANPKRKKKKKKKKKKKTKKKKKKKKSLS

SEQ ID NO: 258602 - protein, 79 aa, Zea mays
  Clone ID: MRT4577_167432C.1.pep
IALADGLIQGLPGTQNRLGDAIHGCYDKVHAHPMLCSDTKTRLVATGQAGQPTVHRGDLVWRAQASPAHIRAQKSCSFY

SEQ ID NO: 258603 - protein, 103 aa, Zea mays
  Clone ID: MRT4577_167433C.1.pep
KKGTPGGAFPPGPEGPGKKKAFMHKNKKKLPGTDGGPKKTGGVWGGQTRKVQCSLKKKKNPEKGVPPLYHVPGRGTVSCICGGNLSVKKGNWGRDLFKQSFPS

SEQ ID NO: 258604 - protein, 147 aa, Zea mays
  Clone ID: MRT4577_167434C.1.pep
APWRPPPLRGRAPPPVGGTNSSGTLAPPPCLGCSPSFFFSIFGPTPRVFPRGGPPSASSGKGTRFFGTPVGHQNQARSLVVESKNRASFCLLSPVLVETTFFPGGDKKRGSCKRSPSRGAFFYLLFQQPRRAKFLVWATKKKFFFGP

SEQ ID NO: 258605 - protein, 96 aa, Zea mays
  Clone ID: MRT4577_167435C.1.pep
VVEKSLNQVTHVFDSDANERLLVRQPNSKPIDFFSPGTRLGMGQTGQNERGRGAKGYCQQDGTFDHITGESGFEPFRVYINTYSGVGYCRIMCIHY

SEQ ID NO: 258606 - protein, 108 aa, Zea mays
  unsure (1)..(108): unsure at all Xaa locations
  Clone ID: MRT4577_167436C.1.pep
MAAKIFCLLRLVGLSASAATATIFPHCSQAPIASLLPPYLXPAVSSVCXENPIFKPSRTQQALPAGIXTLXPWFLHHYSPFYLXLPLAPLMAPNIKAQPPPQPGLSKL

SEQ ID NO: 258607 - protein, 153 aa, Zea mays
  Clone ID: MRT4577_167437C.1.pep
MSRHPSTKWAQRLDKVYLTIELPDAKDVKLNLRPDGHFNFSAKAPADDMQYELDLELFDAVSVEESQAAVAPRAICYLVKKAEGKWWPRLLKKEGRPPVFLKVDWDKWQDEDDEDAGFGDFGDMDFSKLDMGGGDDDDDEIEEEDEDNVVDSA

SEQ ID NO: 258608 - protein, 62 aa, Zea mays
  Clone ID: MRT4577_167438C.1.pep
SSRSRAPALFFFFFFFLDTGTQRVGAFYEDHPCRVSIHTITTTRPPRDKHALLTSHYQIRLA

SEQ ID NO: 258609 - protein, 76 aa, Zea mays
  Clone ID: MRT4577_167439C.1.pep
YEAVVMEVGDELPVGRVDELGVKYVKSNLVVREGQAKSLMWEVLRVGGEESDHQRDSSGSWRAWEQAEEYWRERDW

SEQ ID NO: 258610 - protein, 43 aa, Zea mays
  Clone ID: MRT4577_16743C.1.pep
HVMASSDSDDIVNGFGMCVMINRDLYYPQLFIIRGYKLGFMKD

SEQ ID NO: 258611 - protein, 69 aa, Zea mays
  Clone ID: MRT4577_167440C.1.pep
SDQNNVHLLANQSLQYLLNNHLVGREPRSSLHLLNIAFCRRNASLLKGFQLDHRKSLALASDRLNNECN

SEQ ID NO: 258612 - protein, 221 aa, Zea mays
  Clone ID: MRT4577_167441C.1.pep
SVLGGSANLMLSITLRIVSGAAEVVNFLSQLMVFLWVLYYLITVEGGGATEQIIDLLPVSKQVKDRCVEVMDHAISSVLLATAKIAIFQGGLTWLLFKFFKVHFVYTSTVLGFISALVPILPFWLSSIFATGQLLMEGRYVLALVVTVIHLMLMDYGTTTILEDIPGYNGYLTGLSIIGGMTLFPNALEGAILGPLIMTVVIALKNLYTEFVLADGEETSS

SEQ ID NO: 258613 - protein, 134 aa, Zea mays
  Clone ID: MRT4577_167442C.1.pep
MAGIGRNMVAPLLVLNLIMYIIVIGFASWNLNHFINGQTNYPGVAGNGATFYFLVFAILAGVVGAASKLAGVHHVRAWRHDSLATNAASSLIAFTQLLYVLMLHTGLFGGSGGYRDHDYGVGGAAGEPKGVTRV

SEQ ID NO: 258614 - protein, 86 aa, Zea mays
  unsure (1)..(86): unsure at all Xaa locations
  Clone ID: MRT4577_167443C.1.pep
AHASDLIMVTTTTLLLIAGRFGLARVANRKATAALKLEARXSGLQTGDPCRFTLADTLAFGGRGHILSRRILLWLKNHRPLDQNIG

SEQ ID NO: 258615 - protein, 192 aa, Zea mays
  unsure (1)..(192): unsure at all Xaa locations
  Clone ID: MRT4577_167444C.1.pep
MAGIGRNMVAPLLVLNLIMYIIVIGFASWNLNHFINGQTNYPGXRKASSNHASCIYSCIDMHGAPLMRIALHCTXVAGNGATFYFLVFAILAGVVGAASKLAGVHHVRAWRHDSLATNAASSLIAWAITALAFGLACKEIHIGGHRGWRLRVLEAFVIILAFTQLLYVLMLHTGLFGGSGGYRDHDYGVGRR

SEQ ID NO: 258616 - protein, 175 aa, Zea mays
  Clone ID: MRT4577_167445C.1.pep
EAEAQQNSDLRKLLTNLQEKCLEFSNKCIQRLRKIFYSVGASSEKFTPSAEDLPKTFEHIEGEIDELDEVIAGHGDFCAWVASRGTAAAFLKAGCEHGKIVNRPNFTLSPSILDDMPDLARSISNRFIKMIWTKGGREKAGDEARSHLEPVRNDTSELPFPLLLIFTHKLLIYVG

SEQ ID NO: 258617 - protein, 74 aa, Zea mays
  unsure (1)..(74): unsure at all Xaa locations
  Clone ID: MRT4577_167446C.1.pep
PGRPRVRDNRXTMDMASQIFEILXKPGCTYLTQDXFKPVLKELXLATYPDLKLLQGTPELXERCAETVMYGMFY

SEQ ID NO: 258618 - protein, 53 aa, Zea mays
  Clone ID: MRT4577_167447C.1.pep
GFKNAPPRKITARQAKERGHPRRGRPPFFYSLFLFYIIIFFIFFFFFFYGRVV

SEQ ID NO: 258619 - protein, 91 aa, Zea mays
  Clone ID: MRT4577_167448C.1.pep
RPGSYIRLSLYAYDQGFGRSLYGCTSIHNTTTTNKVFFGPKQVGWARVEKQQKPQIFGYISFLPSLLLLHLSIVNFGLSLSLYYYHTLEFH

SEQ ID NO: 258620 - protein, 117 aa, Zea mays
  Clone ID: MRT4577_167449C.1.pep
HCSIFTTDVAALPRNGHQQTSSSLFSYSYSSSFLVGKTLLRHAEAARTSFAVRASADSDRPIWFPCNTPTTRLDCSLSHNFRFDPCGLRSDPESLRWNVHADLVHCRWAMLCAAGIF

SEQ ID NO: 258621 - protein, 492 aa, Zea mays
  unsure (1)..(492): unsure at all Xaa locations
  Clone ID: MRT4577_16744C.1.pep
MDNSQNQPPPPGVGTWPQAPPSHPPQCXMLIHSLIIHNLLLDLTMLVPIIVVVQQTLSQLSRRLFFTXDIETQQVIQNQRHANTTSEPTKYGEDLLSNRRDPNALKEHLLKMTADHRAEMASKRGKPLHPNNGNCEIGNGYGVPGGGAYYAANLPSPQMNKPRDETDKAKCANDLPDFLKQRLRARGILKDETTNKNYTSTQTVDSQEIENKSAQELPPGWIEVKDPTTGAPYFYNQSTGVSQWDRPDSVVNIMQHQVSPSLPENWEEAIDKSTGHKYYYNTKTQTTQWEPPTSVNTSVTPPASTNTAVEPVAQAADIWNSQMQRCLGCGGWGVGLVQPWGYCNHCTRVQNRPFQQYPSYTNNTMHASGNNAPKTQGNVSAKNRSSSKPPLGKPNRKDHRKRNRPEDDELDPMDPSSYSDAPRGGWVVGLKGVQPRAADTTAAGPLFQQRPYPSPGAVLRKNAEVATHGKKRGGMAPITKRGDGSDGLGEAD

SEQ ID NO: 258622 - protein, 72 aa, Zea mays
  Clone ID: MRT4577_167450C.1.pep
ESASKKSKRLAKLESNVNTWRSLNQDNDHMTESIPRLDAPPRTAQLLVSKVHKQHSVCYGEAANMISPDQES

SEQ ID NO: 258623 - protein, 210 aa, Zea mays
  Clone ID: MRT4577_167451C.1.pep
MASRQALHIFTPSRRAMHILTSSRGIASTPHLSSFGWFDKIKSTITGKKPEEASEASSFTLIQFADTMEKARKLGTFKNFVAGRASEATVVNVFEKHSAVLRYLGAIDPTGENLRNTDKINATKHCNCTIADVEHILAKYTWAKEAQKKIAKLKEEGKPLPKSFNEVQNLMGSTPVDVGRSNLAKSGQISRNAFCPCGSKKRYKRCCGAS

SEQ ID NO: 258624 - protein, 101 aa, Zea mays
  unsure (1)..(101): unsure at all Xaa locations
  Clone ID: MRT4577_167452C.1.pep
DVEYRCFIGGLVWATDDHCLHNTLSTYGEVLESKIILDRETTYVPALXFVTFSKDDAMLNAIEGINGKEPDRRHITVNEANSRGGRVSGCGGYGGGLGSSR

SEQ ID NO: 258625 - protein, 82 aa, Zea mays
  unsure (1)..(82): unsure at all Xaa locations
  Clone ID: MRT4577_167453C.1.pep
CSPLLCTTSSTMMGKQTASSGIRRALLHPHSLVQRLYSRHQNVGHLPQPYIHPLHTXLDTGGTIITSSRSIGCPSSISPPSS

SEQ ID NO: 258626 - protein, 61 aa, Zea mays
  Clone ID: MRT4577_167454C.1.pep
SRSLKYFRTRWVWLWFAKSLEEQCVYNSLALIPAQARGLGTPEEHHHARALSLPGDDSARS

SEQ ID NO: 258627 - protein, 155 aa, Zea mays
  Clone ID: MRT4577_167455C.1.pep
GLTLSEARSSDACRGQVPQLLAVSSCSYPCCVSSRLSKGNFPRRGRRGERRPGLRGEGRRREAAGGGGGVVPGRRAGVRASGAPGAKLLAGAERNHGGKRGLERGSGLTTAAPGQGPALRLNRRRDAAAARLHSALRGADAWVDPGIPDRILQAY

SEQ ID NO: 258628 - protein, 51 aa, Zea mays
  Clone ID: MRT4577_167456C.1.pep
VVLGKGRSKRDVTGAEHSLAWNLHCRPSPSRRPASGKKNQSAPIPNPSAPK

SEQ ID NO: 258629 - protein, 232 aa, Zea mays
  Clone ID: MRT4577_167457C.1.pep
MAFHQRSTSLPSRPHVSETEVEQELHSLEASISSSNSISTMCDGLRSLANIYDALEDIICLPSNQVCSSQQRNILDGEMEGSLELLDLCGAMQEIFVEMKAIIQELQVALRKGDVAAAQAKIQSYTHLAKKARNHFKKATKKAPADCRMVMLLAKAREVSASLLESTLHLVSKQIEMPKQSLVSKAFHKKKAVVCKEEQLSQLECSIGDLESGAGHLFRRLVQSRVSLLNIL

SEQ ID NO: 258630 - protein, 89 aa, Zea mays
  unsure (1)..(89): unsure at all Xaa locations
  Clone ID: MRT4577_167458C.1.pep
VLRFEDCXLHFCLXNPSTHPPIFKRFTHSKLRTRTXNSXFXXXPVRVGAIALXXEXGPRVLGAYDPAGFCVRQTMGLPXLTHFALASWA

SEQ ID NO: 258631 - protein, 203 aa, Zea mays
  Clone ID: MRT4577_167459C.1.pep
NKKKKKKKKKKKKKKKKKKKKKKKNGKLVPGHLFNARKGGPKRPPRKKKGRGPFKRGPRPPPGGKALNMREFLHSFVKNLVCRAVSGKFSREKGPNRLFRKFTDFNGGLLGGSHIQNYFPTRGRIKFVRKGGGAKTRGVRKRWNNLLKKFINNHGARMAPLRDEDDDKPFIYVLLSLQKEYGLTKNHIRVILINLFKAETNPS

SEQ ID NO: 258632 - protein, 53 aa, Zea mays
  Clone ID: MRT4577_16745C.1.pep
VTVTSRKLPVPQLIKPTGKDNTDLTTRAAVTLQYVGKQQSLLLHSHLLYFKYL

SEQ ID NO: 258633 - protein, 68 aa, Zea mays
  Clone ID: MRT4577_167460C.1.pep
WCRTPASAARANGEDLSTNSTRPEVSCFQLTRLGEPILTGELPRRLFNHQSVLWVGGNGGGLDPFPPH

SEQ ID NO: 258634 - protein, 147 aa, Zea mays
  Clone ID: MRT4577_167461C.1.pep
RERGPRAPPIFIKGAPPPPEKKGGPPPGGTHPTPTKVPFKPAHRKLQTAHQTTKKAPPGQRGEQNLARGGKLNFGSKKQKQPPPAKKKQTFFFPPGKGKKKKKGRGKKPHPPGALPFPTKTGKVLGPPPPHNWGEGFPSTARGTGLP

SEQ ID NO: 258635 - protein, 76 aa, Zea mays
  Clone ID: MRT4577_167462C.1.pep
PPAPTYLDRAGWPSTAAAPLVASLMCTSSTHIALLETHMQRPLRLSPTTLSLILTKMEEEVRQLALLHEEQERTRT

SEQ ID NO: 258636 - protein, 128 aa, Zea mays
  Clone ID: MRT4577_167463C.1.pep
YGGLYITIFTLLSAGITVTLSTLFLHEQVHVGSVLGAVTIIEVLYVALWGKADDANGGQVGSKQTADADGITVTVDTHTNFSEPLLPTVAEPALRTSVSLFGNTNADRENFFPNAYHYRICYSCLEFK

SEQ ID NO: 258637 - protein, 202 aa, Zea mays
  unsure (1)..(202): unsure at all Xaa locations
  Clone ID: MRT4577_167464C.1.pep
LSFIIPKWARGPGAIIPQHLPPVTPMGFKHPAVQAYKLQQALAASVLQQPXIAQLQQQSWAQVTIQTIATQQQQQFVPALSQLATTNPVAYLQQXLIASNPLALTNIVAYQQQQQLQQILPSLSQLSMANPAAYLQQKQLISSSPITGGNAPTYLQQPLLQHIAPPLTQLATRNPAAYLQQLLSFNQLTVSNSAEYLQQRQQ

SEQ ID NO: 258638 - protein, 386 aa, Zea mays
  Clone ID: MRT4577_167465C.1.pep
MAGGGRRSLISLGVGDASSHACFRRGGEFAAEAVAHAALSGAFDCYAPSFGFPDARRAVAAHLSTGAVHRTHEADVFMTAGGTGAITAIATVLGGAPGANVLLPRPGFAPYEAACEVAGAEPRFYDLLPRRGWEADLAGVRALADAATAALVVINPNNPCGAVYSAHHLRQLAETARELGIPIVADEVYAHMVFGGSRFVPMASLAHIAPVVSIGALSKRFMLPGWRLGWLAFCDPNGALKHVRAATEMLLNVTSGPASIVQAAVPKILSAEHHEFHRNVVHLLESAADALYRRVNQIEALRCYSKPEGSMFMMVEINTSILHGVANDMDFARELIKEECVLVLPGSVIGLKNWVRIFFGAPVSLILEACDRIEMFCRRRTLKQNN

SEQ ID NO: 258639 - protein, 83 aa, Zea mays
  Clone ID: MRT4577_167466C.1.pep
SVLCNAQNTTETIDLLDRGPEKGITTDVGMYNMIFFALGKLKQLSFMSSLYDTMRDNEDVSDFFIYIFMILSFGRFCFYLCVG

SEQ ID NO: 258640 - protein, 62 aa, Zea mays
  Clone ID: MRT4577_167467C.1.pep
STLKLICSNRSNIFSVSCYFTGSVIGLKNWVRIFFGAPVSLILEACDRIEMFCRRRTLKQNN

SEQ ID NO: 258641 - protein, 272 aa, Zea mays
  unsure (1)..(272): unsure at all Xaa locations
  Clone ID: MRT4577_167468C.1.pep
RPGTAQFPALVCRAEPTDQTNSAVAAHLSTGAVHRTHEADVFMTAGGTGAITAIATVLGGAPGANVLLPRPGFAPYEAACEVAGAEPRFYDLLPRRGWEADLAGVRALADAATAALVVINPNNPCGAVYSAHHLRQLAETARELGIPIVADEVYAHMVFGGSRFVPMASLAHIAPVVSIGALSKRFMLPGWRLGWLAFCDPNGALKXMAATEMLLNVTSGPASIVXQAAVPKILSXNTMSSHREWLFTLLESAADALYRRVNXSKPCGATPS

SEQ ID NO: 258642 - protein, 56 aa, Zea mays
  Clone ID: MRT4577_167469C.1.pep
QAKIVTQTFTDQFLHMVKIPYLPHEVQKTALLFQHRSLIIILEEKQHSKLSIRVQR

SEQ ID NO: 258643 - protein, 87 aa, Zea mays
  unsure (1)..(87): unsure at all Xaa locations
  Clone ID: MRT4577_16746C.1.pep
SEFSPKIPIRLPGSRRWLRVTXQNFLQFRSKPAETLIPMAAAMGNPILTLPAPFRVGPPPKVLVPPKGLAVHRAAARGYHKGGAGHY

SEQ ID NO: 258644 - protein, 61 aa, Zea mays
  unsure (1)..(61): unsure at all Xaa locations
  Clone ID: MRT4577_167470C.1.pep
WCYCSYCFCWYRQMKRLWLCPKVQYAMSTDEIXCLXVCCCARYLFMCAGFXGAGALKTLEQ

SEQ ID NO: 258645 - protein, 65 aa, Zea mays
  Clone ID: MRT4577_167471C.1.pep
LGIRLEGHSYPPFLLPRTEDPKPRVHLPQSSVSMQVPNLRPLLKPDQTTGVLRRHDQLIVRAPLE

SEQ ID NO: 258646 - protein, 45 aa, Zea mays
  Clone ID: MRT4577_167472C.1.pep
FCLVGTNRSWDFSWEVEVNLGVEGFPCGGRGIFQRLGGGGLGKAC

SEQ ID NO: 258647 - protein, 215 aa, Zea mays
  Clone ID: MRT4577_167473C.1.pep
MAAGTGGGGSLLLRGFLSLFFLLFLHIGHGGSCCFSPGAAARAQQEEDEAAEADGKVVGGGGGSNKRRKISPLIFSPAASSTAVTASDDSAGAPRRHVSSLAASLRLYLHRIFRSGSTGTKNGGTVVAGRDGEEEAVATTVSSPIAQSLPHQPSSTSVVLSTPSSPCAWSSPLMMSPLSVRSLSATPFPSSPQQKLLQASRQSFRSFAARGDVFP

SEQ ID NO: 258648 - protein, 88 aa, Zea mays
  unsure (1)..(88): unsure at all Xaa locations
  Clone ID: MRT4577_167474C.1.pep
KSLDTDGIRISSRAIXQVLXLIHXVQDGYSTAAESTLTTWGMGGPGYFTLQRKKLFPLVGKAHSHRAGVIIRLGLFDRSKIAWENANF

SEQ ID NO: 258649 - protein, 125 aa, Zea mays
  unsure (1)..(125): unsure at all Xaa locations
  Clone ID: MRT4577_167475C.1.pep
SWKVVENAGGHGRXPNGILDLLXRERFPRLVEYAGVMGPAYIFDHYVVTPDAVDRDDREFNNKVERVKQEWDFFRCEAXYEAKADVVFTTSCKKLIMDIHYEMRIQAIATYHGYVLGEKVSKQDA

SEQ ID NO: 258650 - protein, 86 aa, Zea mays
  Clone ID: MRT4577_167476C.1.pep
KLKNPYPRGKSSLDLIQRLEPVIIELKPQRAPVVVISHQVVLRALYAYFAARPFKKVPKIKMPLPPIIEIQMGVPGVEKKRYKLMG

SEQ ID NO: 258651 - protein, 117 aa, Zea mays
  Clone ID: MRT4577_167477C.1.pep
ANTNIKSKQTLSQRHRQSRQHIASKRSKGPAGLYIYISCMGVLIIVVVDQPRIWLCCAVYTRTASMLTVPCHATTPTMASGRHGGTRSIFVYFRGLFYDTANDPEGGYSQGARANPT

SEQ ID NO: 258652 - protein, 484 aa, Zea mays
  unsure (1)..(484): unsure at all Xaa locations
  Clone ID: MRT4577_167478C.1.pep
MTKEQKLKADRLRRAKMFAAIIKSGDNKMNDLGAASNPNKDINYSMESSASDRSSSGPSEKQLYDKQGKGIFHPVCGVKTRKVTADEAAAIVMAATRGLGAANDSLNTMKGTKDNVRTHVSKDPSDQSKDVHSHKNKSAPKDRESRHHRHPCSSSEDEHEREGFGIIDDDWIANTIAKAAAAAASKDADSSEASRREHHSXLKGSSRKTDSRFAGSVXGLDQVPSLNQTSYPTSEAAKAIPDMNASGLDLQSVAKEREGSSSVLFDHEGPNLTKHSKDSDDEQNRVRKYRKKHQESDEEKYESEDSYKHSRKKHRLEHSRDQSKDVHKHKNKSHSKDRESRHHRHHCSSSEDEHEHERWSSKSRHRHRDDHRYSDEEHSDEEHRRSHKHRREHHSSSKRKHEEDXTRFAGSVCLDQVPSXSDKLSDDTAQXSTQGTTEAPSKLRAKIRATYCNILYHSSNIMSLGLCFVANCSFDFCICFERSN

SEQ ID NO: 258653 - protein, 125 aa, Zea mays
  unsure (1)..(125): unsure at all Xaa locations
  Clone ID: MRT4577_167479C.1.pep
NPGERADRSSCERSDRSSRERADRRCSMERKDINYSMESSASDRSSSGPSEKQLYDKQGKGIFHPVCGVKTRTVTADEAAAIVMAATRGLCAANDSLNTMKGTKDNVRTHVSNDPSXQFGSFSSL

SEQ ID NO: 258654 - protein, 656 aa, Zea mays
  Clone ID: MRT4577_16747C.1.pep
MGGFPEATGNLLDAAAQEFHPTVCAPYPLQPLPQQLYCPHPYPAMPVPPPPQIAMLQPVPPMAMAMAPQPGYTLPTTTPVVNGPSSRVVVLGLVPPHAQEADVAQAMAPFGAIRSVDACAVASEGVATVHFFDIRAAELALTCVREQHMRQQSRLGQLYAAAAVAPAWAPAPTPQAWDWPHPNDDGRGLVLGHAVWAHFATGADDGDNRGSLVVLSPLPGVSVADLRQVFQAFGDLKDVRESAQRPSHKFVDFFDTRDAARALAELNGQELFGRRLVVEFTRPSGPGPRRRGYAPHQHRPTAPTPPRLQATWRPSQPTSSQPPASSSSSGSVRAREGVVLLRRSSCKSSAGSDQSSKGGNAGTSHERKTKGGKIVVAAAAASSSTPTASGKQTQKGVGSSGGGSWKGRKSGWEARFLFKEPEAGGGADTQATPASEMDTRTTVMIRNIPNKYSQKLLLNMLDNHCIQSNEWIVASGEEQPFSAYDFVYLPIDFNNKCNVGYGFVNLTSPEARVRLYKAFHKQPWEVYNSRKICQVTYARVQGLEALKEHFKNSKFPCDSDEYLPVAFSPARDGKELTDPVPIVGRSPAASSASSPPKSRAASVDRLGQELMPAPSSSADGASSTTTSTHAPSEHDEEEEEGDIRLAGELRRLGYDD

SEQ ID NO: 258655 - protein, 334 aa, Zea mays
  unsure (1)..(334): unsure at all Xaa locations
  Clone ID: MRT4577_167480C.1.pep
RTPGIRHEQREGFGIIDDDWIANTIAKXXXXXXSKEAGSSEATMTKEQKLKADRLRRAKMFAAIIKSGDNKMNDLAAASNPTSEAAKAIPDMNASGLDLQSVAKEREGSSSVLFDHEGPNLTKHSKDSDDEQNRVRKYRKKHQESDEEKDESEDSYKHSRKKHRPEHSRDQSKDVHKHKNKSHSKDRESRHHRHHCSSSEDEHEHDRWSSKSRHRHRDDHRYSDEEHSDEEHRRSHKHRREHHSSSKRKHEEDXDTRXRKCLCLDQVPSXSDKLSDDTAQXSTQGTTEAPSKLRXXXRATYCNILYHSSNIMSLGLCFVANCSFDFCICFERSN

SEQ ID NO: 258656 - protein, 334 aa, Zea mays
  Clone ID: MRT4577_167481C.1.pep
MPRYDDRYGGTRLYVGRLAPRTRSRDLEYLFGKYGRIREVELKRDYAFIEFSEHRDADEARYQLDGRDVDGSRIVVEFAKGVPRGPGGSREYMGRGPPPGTGRCFNCGMDGHWARDCKAGDWKNKCYRCGERGHIERNCQNSPRSVRRERSYSRSPSPRRGRGRSPSYSRSRSRSRSRSYSRSRSLSGSPRGGRRDRDDRRSRSLSYSRSPMRSPPAKEKERSPTPGGSRSPRSRSPQDQVMSPPPKDNGDRNGSDRGDSPRGRENSRSRSRSRSPSGGNRSPAANGRSPRSPRGDRTPSPMADRSPSPKGNGNNDGGDDDTGRGGSPTGSKSP

SEQ ID NO: 258657 - protein, 137 aa, Zea mays
  unsure (1)..(137): unsure at all Xaa locations
  Clone ID: MRT4577_167482C.1.pep
ACLSARNMRDVSRYVNLVGWVRGSGDLRQAVVVPTQIHLVIRVSMAEVLMPPRGTGWPSELRSRLKERERMQLLLSPVTFFSITRYGVDLSWSRSPMYTPHYSDICRLPHVRCRVVEEARYVSRWMSDADNPEPGXA

SEQ ID NO: 258658 - protein, 45 aa, Zea mays
  Clone ID: MRT4577_167483C.1.pep
FLGPTMTWNVRRLNSPAERIIKGREPNKYGLLHLDALLALRREHF

SEQ ID NO: 258659 - protein, 364 aa, Zea mays
  Clone ID: MRT4577_167484C.1.pep
MPRYDDRYGGTRLYVGRLAPRTRSRDLEYLFGKYGRIREVELKRDYAFIEFSEHRDADEARYQLDGRDVDGSRIVVEFAKGVPRGPGGSREYMGRGPPPGTGRCFNCGMDGHWARDCKAGDWKNKCYRCGERGHIERNCQNSPRSVRRERSYSRSPSPRRGRGRSPSYSRSRSRSRSRSYSRSRSLSGSPRGGRRDRDDRRSRSLSYSRSPVRSPPAKEKERSPTPGGSRSPRSRSPQDQVMSPPPKDNGDRNGSDRGDSPRGREDSRSRSRSPSGGNRSPAANGRSPSPEGAPEVTVPRAPWLTVARAPWLTVARAQRAMVTTMVVMMILAVVVPPQEASHPERCTVSVLRCFVMQWANIPKT

SEQ ID NO: 258660 - protein, 93 aa, Zea mays
  Clone ID: MRT4577_167485C.1.pep
IAYCDFPIQPFSKWVKCAMGKKASPSLTKFKIQSPALKGFPMQKRASTPTFAEWAPKTLYIPGWEKQSKLCLVEYVVAGNNFFFGERRPCMYL

SEQ ID NO: 258661 - protein, 338 aa, Zea mays
  unsure (1)..(338): unsure at all Xaa locations
  Clone ID: MRT4577_167486C.1.pep
MPRYDDRYGGTRLYVGRLAPRTRSRDLEYLFGKYGRLTVCGNPFRRIREVELKRDYAFIEFSEHRDADEARYQLDGRDVDGSRIVVEFAKGVPRGPGGSREYMGRGPPPGTGRCFNCGMDGHWARDCKAGDWKNKCYRCGERGHIERNCQNSPRSVRRERSYSRSPSPRRGRGRSPSYSRSRSRSRSYSRSRSLSGSPRGGRRDRXIGDRXLSYSRSPVRSPPAKEKERSPTPGGSRSPRSRSPQDQVMSPPPKDNGDRNGSDRGDSPRGREDSRSRSRSPSGGNRSPAANGRSPSPRGDRGPSPMADRSPSPKGNGNNDGGDDDTGRGGSPTGSKSP

SEQ ID NO: 258662 - protein, 88 aa, Zea mays
  unsure (1)..(88): unsure at all Xaa locations
  Clone ID: MRT4577_167487C.1.pep
ASNATTCELLKXITGLNVQPVEMVASKLFVQCSRQKDLLKIYKHLLNQHSNVLIFCHDIYEKTISILVHFRAKLCYPGLSRLIFFAIL

SEQ ID NO: 258663 - protein, 231 aa, Zea mays
  Clone ID: MRT4577_167488C.1.pep
MSMHYLAALSAVALGAILLLRSAFKWMNGARTGKDEGRMLPPGSRGLPLLGETLEFFAASPTLELVPFFKRRLERFGPIFRTNIVGEDLIVSLDPELNARVLQQEERGFQIWYPSSFMRVFGDDNIISALGPLHRHIRNLVLRLFGPEALRLVLLRDVQRSARDELRSWLDHPDVEVRTATSRMIFAVTAKKLISHDDAASGGSLWKCFDAWTKGLLSFPLCVPGTAFYQC

SEQ ID NO: 258664 - protein, 165 aa, Zea mays
  Clone ID: MRT4577_167489C.1.pep
RNTYIKCDKYLPLGSERRTYGDYDIKITKTRTDSHHLQLRDVKVQNIETGKVHSVLHIEYPDWPDHGVATNTDAVREIWKRLHHIPTEHPIVIHCSAGIGRTGTYITIHTTIERILLGDKSSYDLAKTVKNFRSQRPGMVQTEEQYKFCYRAIADELKDLLNSDH

SEQ ID NO: 258665 - protein, 213 aa, Zea mays
  unsure (1)..(213): unsure at all Xaa locations
  Clone ID: MRT4577_16748C.1.pep
MRKFQDSIKALQADIDHANAMASEFLRDYDGWVIQMRVAYSAVAHFLLQWTDCKLAGALGLLKVMLYKXVIFPSLLQLPSGITELDDRKQRKLCLKKFRSRDEQLSEVDTERELECGICLEVSPKVVLPDCAHMLCMRCFEDWNEKSKSCPFCRACLEEVKPGSLWIYTDDSDVVDTDTLTRENIRRLFMYINKLPLVVLHVVDLDVYKYRIK

SEQ ID NO: 258666 - protein, 69 aa, Zea mays
  Clone ID: MRT4577_167490C.1.pep
RTIMCYHHMPTELTHPMHEEGVHDYYMHCFEAYDIKPLRDSSMGQCITSKMVNRKKVTMANLRIHNMHL

SEQ ID NO: 258667 - protein, 47 aa, Zea mays
  Clone ID: MRT4577_167491C.1.pep
ARSAPIVWGRQLRPALLLPAALLPSLQPARRHTLQPTAADRESKGEA

SEQ ID NO: 258668 - protein, 112 aa, Zea mays
  unsure (1)..(112): unsure at all Xaa locations
  Clone ID: MRT4577_167492C.1.pep
ASYQLSWSXWVPFLPQAXVILSMLVXPCIRSIVSKKVXPFEQGMVQGCMXGISSTASVVSPLIFTPLTAWCLSEATPFYLKGFSVACAGFATLVALATSISMRPAEVQPDRK

SEQ ID NO: 258669 - protein, 92 aa, Zea mays
  Clone ID: MRT4577_167493C.1.pep
SLLYPLFLQPKTDFSPIHFPPTRHPRLAGLLLLLLPFLPLPSPTSIPPLLSILSPSYLDHLPLSPSISSLSILKLPIPLSSLQSFYFILSSP

SEQ ID NO: 258670 - protein, 47 aa, Zea mays
  Clone ID: MRT4577_167494C.1.pep
EHLKKTLNTGHSEDLCFSPRLGRGIPVPLILYEAQFDSLCPGQAHPP

SEQ ID NO: 258671 - protein, 702 aa, Zea mays
  unsure (1)..(702): unsure at all Xaa locations
  Clone ID: MRT4577_167495C.1.pep
MAPSWWGRDARANGVVGGGTPVVVRMENPNWCISEVAAAASEVDAPPPAAAGGGKAGRRGKNARQITWVLLLRAHRAAGRLTGAASAALSVAAAARRRVAAGRTDSDADADAAPGESAALRARSYGCIRLFLALSLLLLAVEVAAYLRGWHLEVDVGAGILAVDGLFAAAYAAWMRARLDYLAPPLQFLTNACVLLFLVQSVDRLVLCLGCFWIKLKGVRPVPPLPADKEDVEAGPDGVPMVLVQMPMCNEREVYQQSIGAVCSLDWPRSNFLVQVLDDSDDATTSALIKEEVEKWQREGVRIVYRHRVIRDGYKAGNLKSAMNCSYVKDYEFVVIFDADFQPQADFLKRTVPHFKGKDDVGLVQARWSFVNKDENLLTRLQNINLCFHFEVEQQVNGAFLNFFGFNGTAGVWRIKALEESGGWMERTTVEDMDIAVRAHLKGWKFLFLNDVECQCELPESYEAYRKQQHRWHSGPMQLFRLCFVDIIKSKIGFWKKFNLIFLFFLLRKLILPFYSFTLFCVILPMTMFVPEAELPAWVVCYIPATMSILNILPSPKSFPFIVPYLLFENTMSVTKFNAMVSGLFQLGSAYEWVVTKKSGRSSEGDLVALVEKHSKQQRVGSAPNLDALTKESKGTEEEKNKKKRKKKHNRIYRKELALSFLLLTAAARSLLSVQGIHFYFLLFQGXSFLVVGLDLIGEQVE

SEQ ID NO: 258672 - protein, 58 aa, Zea mays
  unsure (1)..(58): unsure at all Xaa locations
  Clone ID: MRT4577_167496C.1.pep
QYGFRAGCSKGLGTGRCHLFKNRAALSSLAAGHSGRAPELTVPRSSGGPXQADGGDGR

SEQ ID NO: 258673 - protein, 81 aa, Zea mays
  unsure (1)..(81): unsure at all Xaa locations
  Clone ID: MRT4577_167497C.1.pep
GAXXGQGTTXXSAXXGLSLXGFSLLXAXLQRSAXDQPQGHXTSWRXXAAAAAXPWSSWCXRTAGPVDDMIDGQVNLACCSC

SEQ ID NO: 258674 - protein, 152 aa, Zea mays
  Clone ID: MRT4577_167498C.1.pep
MAYPSANSWRHFAAAHGSGLRGSAAVPGRDPAAAGGHGLGACPPGSVAPPTARARPTGAWPAMAAPGGAVPRGCVPRRPGRGRPSAQTALGQGGRARPARAGGLLRPRRRVCGPGLGAQARRPGRCVHCQRGRAAPARLPSGVACGLCLGAG

SEQ ID NO: 258675 - protein, 68 aa, Zea mays
  Clone ID: MRT4577_167499C.1.pep
MDPKGKGKVIDKKEKEIPSNEIPKGEIVDSGSSKKKKDMDEYNKVSVLDNAKRIWNALKISHEGHEGM

SEQ ID NO: 258676 - protein, 95 aa, Zea mays
  Clone ID: MRT4577_16749C.1.pep
SQLRTHFPTTTFILLSVSQRLGHCRRARSPRQLLLLTRVQDAQQTSQSSCRQGDEVPDGDNFPLHNRILQQHMDPLKRRVTMPPKSSNKQAQSLR

SEQ ID NO: 258677 - protein, 57 aa, Zea mays
  Clone ID: MRT4577_1674C.1.pep
VRLFTSCCPYLMNQPRATWDQQERHPQCYYNGRLTGPPFITKSPTLDTNARTVVDTD

SEQ ID NO: 258678 - protein, 273 aa, Zea mays
  Clone ID: MRT4577_167500C.1.pep
PCHPTLTLLPLLFAAAIAGVRCAPVYRPEYLVDGNQLVDMQYHMGPVVSGAPTNLFLIWYGRWEAPAQAVLRDFLASLSAPAPFPAVSDWWARTPRLYTDQSGANVTATFAIAGEHSDAGYSHGASLRRIDMQSVIRSAVVAYPDPLPLDPYSGVYLVLSSPDVQVDEFCRAVCGFHYFTFASVVGVTVPYAWVGNSATQCPGKCAYPFAAAAEYGAGGAQPQAVLRPPNGDAGVDGMVIVLGHELAEMSTNPLVNAWYAGDTPTAPTEIADL

SEQ ID NO: 258679 - protein, 73 aa, Zea mays
  Clone ID: MRT4577_167501C.1.pep
DIGPLTISFGQSAFSTMRAAVASHKIKRSEKANNHYLSFSHASLDEGQADMFSHCLEASQTPLHMMHVLSDQG

SEQ ID NO: 258680 - protein, 72 aa, Zea mays
  Clone ID: MRT4577_167502C.1.pep
KKKKKKKKKKKKKKKKKKKKKKKKKKKKKKKKKKKKKKKKKKKKKRGGGFWGFPGFPFPFLANFLSFFFFFP

SEQ ID NO: 258681 - protein, 94 aa, Zea mays
  Clone ID: MRT4577_167503C.1.pep
GCLPSEPCQTALFKSSPFHTPYPPLCLSFPVERIPWNILLTCHSPSLLFVPHVEEWCLTLARLLVCLSVCTSAGPCAWSIACLRGAYNDECLNS

SEQ ID NO: 258682 - protein, 50 aa, Zea mays
  unsure (1)..(50): unsure at all Xaa locations
  Clone ID: MRT4577_167504C.1.pep
MQPDPQGSGRGKAGGANAHARLPPPVTAASAGXPASVLPHKTDNVRDHYR

SEQ ID NO: 258683 - protein, 72 aa, Zea mays
  Clone ID: MRT4577_167505C.1.pep
GVSLLVGELSRQDHMACFQGFADESVISSLLICFAYSIVRFARMFSCSFMDTCPDFRNSKPSLHWMSGTTVI

SEQ ID NO: 258684 - protein, 150 aa, Zea mays
  Clone ID: MRT4577_167506C.1.pep
LGAPPPDPGTGGAFCLPNSFGAVGRPWEFCSFVPKEPFFRPPRGGCNHVVGKCPPPSQKFKEFPAGDGFFFRDWVFNLLEPPVCPPRPWGFLDFPVCPRGYIPFCQWGDVVESCPPNCKGGKLVEWDPPPPRCLNVFPGYSGPKGPPWVR

SEQ ID NO: 258685 - protein, 135 aa, Zea mays
  Clone ID: MRT4577_167507C.1.pep
PELGPKPEKVFVGPFPSQFRALVGILLLGILSPPPPPEGFLGRGAPKEWTLDPKAQGGFNRFGGGLPKIKKRVVPMNGGPPLKNPNGPAGFPYPVFFPPPSPPKGGPPGFPPKGFSNSISLWVLFVLTEEGRFSP

SEQ ID NO: 258686 - protein, 37 aa, Zea mays
  Clone ID: MRT4577_167508C.1.pep
YYQMSYAKKKKMQISLIQSTIFKTYRQNELHLSKVLK

SEQ ID NO: 258687 - protein, 50 aa, Zea mays
  Clone ID: MRT4577_167509C.1.pep
TLRELLRSQHLHLLLSLKGMYNLSMTLSNSTTQILYTHNLSYIIYRLYIS

SEQ ID NO: 258688 - protein, 69 aa, Zea mays
  Clone ID: MRT4577_167510C.1.pep
KICVFPHLSLNVMLLKVTVKIYIGGPLWNQGIIRFDVFFFVKIKWGRGVFYLINDSFRFLCLWEKKKIL

SEQ ID NO: 258689 - protein, 78 aa, Zea mays
  unsure (1)..(78): unsure at all Xaa locations
  Clone ID: MRT4577_167511C.1.pep
PTTHPTPKHNPXTAVTRHQRDSXQQAARVVVXYPXXHHHLSHPDREAWSITLEHXXKMPPTPTPPAXPRXLVTSAQLV

SEQ ID NO: 258690 - protein, 242 aa, Zea mays
  Clone ID: MRT4577_167512C.1.pep
MMLSRAARPALKAGMAAAVARPAALTATNAAGYATLREIEGRLKSIRNIEKITKTMKVVASTKLTRAQKAMFESRKYGQTSNEVFENAETKPIESEGKKNLIIVCSSDKGLCGGIHSGMSRKVRRMLAETPDADLAVIGEKCKAQLGRSNGKNMVLSFAGAGKDVPTFADSLCIADQISLLPTDYASVKIVYNKFINASSYEPIIQEAYSEEAIAQSANFSAFEIEDEVLPQLREYALANSL

SEQ ID NO: 258691 - protein, 141 aa, Zea mays
  unsure (1)..(141): unsure at all Xaa locations
  Clone ID: MRT4577_167513C.1.pep
ALPKGLKNAEKALELDPPFSKGSPRKGAIPFFMKKYDKAVETFQGGLKHGPKNPGFLYGVRRCVXQITKGSKGELSGGGLKKSQNKPLQAPGIQNILIDPIIHQVFPVLQENPRGGQGPPKNPGVMQKIPKLVSPGIVQIK

SEQ ID NO: 258692 - protein, 43 aa, Zea mays
  Clone ID: MRT4577_167514C.1.pep
YLSFNSLGPRIIVYIYTWQQTGGTTARSTSMAGELLKLTLSIY

SEQ ID NO: 258693 - protein, 186 aa, Zea mays
  Clone ID: MRT4577_167515C.1.pep
MREIISIHIGQAGIQVGNACWELYCLEHGIEPDGTMPSDTTVGVAHDAFNTFFSETGSGKHVPRAIFVDLEPTVIDEVRTGSYRQLFHPEQLISGKEDAANNFARGHYTVGKEIVDLCLDRVRKLADNCTGLQGFLVFNAVGGGTGSGLGSLLLERLSVDYGKKSKLGFTIYPSPQVSTAVVEPYN

SEQ ID NO: 258694 - protein, 56 aa, Zea mays
  Clone ID: MRT4577_167516C.1.pep
KPCQGLRNPLCATYEEQDREGVSGTLLPRGLRSEQHGAFSAHSSRPIGNLLPEDKL

SEQ ID NO: 258695 - protein, 450 aa, Zea mays
  Clone ID: MRT4577_167517C.1.pep
MREIISIHIGQAGIQVGNACWELYCLEHGIEPDGTMPSDTSVGVAHDAFNTFFSETGSGKHVPRAIFVDLEPTVIDEVRTGSYRQLFHPEQLISGKEDAANNFARGHYTVGKEIVDLCLDRVRKLADNCTGLQGFLVFNAVGGGTGSGLGSLLLERLSVDYGKKSKLGFTIYPSPQVSTAVVEPYNSVLSTHSLLEHTDVAVLLDNEAIYDICRRSLDIERPTYTNLNRLISQIISSLTTSLRFDGAINVDVTEFQTNLVPYPRIHFMLSSYAPVISAEKAYHEQLSVPEITNAVFEPSSMMAKCDPRHGKYMACCLMYRGDVVPKDVNAAVATIKTKRTVQFVDWCPTGFKCGINYQPPSVVPGGDLAKVQRAVCMISNNTAVAEVFSRIDHKFDLMYAKRAFVHWYVGEGMEEGEFSEAREDLAALEKDYEEVGAEGADDEGDEGDDY

SEQ ID NO: 258696 - protein, 65 aa, Zea mays
  Clone ID: MRT4577_167518C.1.pep
TTCSTPPSCVMQGSLRMRYLINNLFIIAVHLTMQLLLESLLLEPRVVTNKGIHNHHVLPPLSRSN

SEQ ID NO: 258697 - protein, 450 aa, Zea mays
  Clone ID: MRT4577_167519C.1.pep
MREIISIHIGQAGIQVGNACWELYCLEHGIEHDGTMPSDSSVGVAHDAFNTFFSETGSGKHVPRAIFVDLEPTVIDEVRTGSYRQLFHPEQLISGKEDAANNFARGHYTVGKEIVDLCLDRVRKLADNCTGLQGFLVFNAVGGGTGSGLGSLLLERLSVDYGKKSKLGFTIYPSPQVSTAVVEPYNSVLSTHSLLEHTDVAVLLDNEAIYDICRRSLDIERPTYTNLNRLISQIISSLTTSLRFDGAINVDVTEFQTNLVPYPRIHFMLSSYAPVISAEKAYHEQLSVPEITNAVFEPSSMMAKCDPRHGKYMACCLMYRGDVVPKDVNAAVATIKTKRTVQFVDWCPTGFKCGINYQPPSVVPGGDLAKVQRAVCMISNNTAVAEVFSRIDHKFDLMYAKRAFVHWYVGEGMEEGEFSEAREDLAALEKDYEEVGAEGADDEGDEGDDY

SEQ ID NO: 258698 - protein, 71 aa, Zea mays
  unsure (1)..(71): unsure at all Xaa locations
  Clone ID: MRT4577_16751C.1.pep
KWNPPCRGALSAGGGWFTHSVTVTFARSLAPVFFVFFLFFLARFEGFPRXGLNGGLLLGPRFRVLGPXDPK

SEQ ID NO: 258699 - protein, 454 aa, Zea mays
  unsure (1)..(454): unsure at all Xaa locations
  Clone ID: MRT4577_167520C.1.pep
MREIISIHIGQAGIQVGNACWELYCLEHGIEPDGTMPSDTSVGVAHDAFNTFFSETGSGKHVPRAIFVDLEPTVIDEVRTGSYRQLFHPEQLISGKEDAANNFARGHYTXFTMFGKEIVDLCLDRVRKLADNCTGLQGFLVFNAVGGGTGSGLGSLLLERLSVDYGKKSKLGFTIYPSPQVSTAVVEPYNSVLSTHSLLEHTDVAVLLDNEAIYDICRRSLDIERPTYTNLNRLISQIISSLTTSLRFDGAINVDVTEFQTNLVPYPRIHFMLSSYAPVISAEKAYHEQLSVPEITNAVFEPSSMMAKCDPRHGKYMACCLMYRGDVVPKDVNAAVATIKTKRTVQFVDWCPTGFKCGINYQPPSVVPGGDLAKVQRAVCMISNNTAVAEVFSRIDHKFDLMYAKRAFVHWYVGEGMEEGEFSEAREDLAALEKDYEEVGAEGADDEGDEGDDY

SEQ ID NO: 258700 - protein, 450 aa, Zea mays; identical to SEQ ID NO: 258697
  Clone ID: MRT4577_167521C.1.pep

SEQ ID NO: 258701 - protein, 40 aa, Zea mays
  Clone ID: MRT4577_167522C.1.pep
REITLGEGRSILIDRKALTPMRRISIQFTIVRAEYSWTYS

SEQ ID NO: 258702 - protein, 128 aa, Zea mays
  Clone ID: MRT4577_167523C.1.pep
AELQKCSNASLLSIHAHRCSPRRRGSRRTPGSGPWGGGGSCSSSRVIACSSLPCPCECEDEYSRRAAGAEDARVEAAARRSSAVRGMTCKRHWRLWWILDGHLGTCSPPNFHGSKACDWLYREDRTRG

SEQ ID NO: 258703 - protein, 384 aa, Zea mays
  unsure (1)..(384): unsure at all Xaa locations
  Clone ID: MRT4577_167524C.1.pep
MAEDRSPKPIHCKAAVCRAAGEPLTIEEIVVDPPKAYEIRIRVICTSLCHTDITFWKAKVAPVFPRILGHEAYGVVESVGEHVEGFAAGDTVVPTFLGQCERCASCASEHSNVCDAVPFVIGPGMRRDGTTRFRDARGSPLHDLLAVSSFSEYXTVVDVNQVVKVDPAVPPKLACLLSCGAGTGVGAAWRSAKVEPGSTVAIFGLGSVGLAVVQGAKMCGASKIIGVDLNPDKEEVGRSFGVTDFVNPSQLDKRSVVEVIVEMTGGGVDYSFECIGVPSVMTDAFRCTKMGKGKTIVLGLGRDSDEVCLPSLELLFGRCVMGSLFGGLKPKTHIPVLAKKCMDKELQLDALVTHELGLQDINKAFDLLLQGKSLRCILWMDKDK

SEQ ID NO: 258704 - protein, 44 aa, Zea mays
  Clone ID: MRT4577_167525C.1.pep
GEGGRRRCARCHHRYPTNMAALTVPFCSTLLTSDSTSDLPRDQT

SEQ ID NO: 258705 - protein, 39 aa, Zea mays
  Clone ID: MRT4577_167526C.1.pep
LGTNMIHLIMRCSGIGSELGKISLNSTSVISGSYVELRA

SEQ ID NO: 258706 - protein, 164 aa, Zea mays
  unsure (1)..(164): unsure at all Xaa locations
  Clone ID: MRT4577_167527C.1.pep
MAAKIWCLLMLIRITASAATGTLLPKSSQAPIACIFAPYLXSADIQVCENAXVQPYRIQQAIAGGILPLSPLVLQQSSDLLQQLPLLHLLEQNIKAQQLQQLVLANLGGYSQQQQDVSFNQLAASNSAYYLEQQQPPIHPLPGXTPQNFIHYNQLATLNSTAYL

SEQ ID NO: 258707 - protein, 67 aa, Zea mays
  Clone ID: MRT4577_167528C.1.pep
LLFFFFFFCMFHSFFSSRNDDDALLLLCTHARFNPIHLQRQGLARGHTLLVAELIKSLLASLLMKNS

SEQ ID NO: 258708 - protein, 47 aa, Zea mays
  Clone ID: MRT4577_167529C.1.pep
LSRHYFYHHNIVLTLLSRDHLLYYSHSLHQYQQLLILLHPIYRFPNP

SEQ ID NO: 258709 - protein, 321 aa, Zea mays
  unsure (1)..(321): unsure at all Xaa locations
  Clone ID: MRT4577_16752C.1.pep
MSPPSVIPSPPSSPRPHPSCRRPRPAALKSKKGYEYESQSRAGGRANSKASCSSPIRPSPNLIAGFRQKGWDAARFRRGLFCPFRAILLSAREASTDGSEDQGGGGGPRRWKWNAPMRKFQDSIKALQADIDHANAIAXSEFLRDYDGSVIQMRVAYSAVAHFLLQWTDCKLAGALGLLKVMLYKVCADGSSALPDWDMEASIREFYGVIFPLLLQLPSGITELDDRKQRKLCLKKFRSRDEQLWEVDTERELECGICLEEMTPTLLRSLKPQDMSVIKQVQVSRKWEFHGNTDIGSILHIDMILADKERCLRCVVKSRRR

SEQ ID NO: 258710 - protein, 73 aa, Zea mays
  Clone ID: MRT4577_167530C.1.pep
TNTIGPLQLHLEKRDSLICYPATSHTRFDFFIFNEMKEKEVKSGMGCSWITDLTSFSFISLNIIFASCIFPPL

SEQ ID NO: 258711 - protein, 68 aa, Zea mays
  Clone ID: MRT4577_167531C.1.pep
MVLFQELKSTTVFGANIFKEGSDPKIQPDSEYPDWLWHLLDKRPVLSELRRKDPKTLSYEDLKRFVKV

SEQ ID NO: 258712 - protein, 68 aa, Zea mays
  unsure (1)..(68): unsure at all Xaa locations
  Clone ID: MRT4577_167532C.1.pep
LGGHKLVTVQHIXVRQHWATYGRHYYTRYRHENADARAAKDLXANLVTVQSSLSDANKLVKEIRSDVF

SEQ ID NO: 258713 - protein, 80 aa, Zea mays
  unsure (1)..(80): unsure at all Xaa locations
  Clone ID: MRT4577_167533C.1.pep
MDYGQHRHIGHCSTVHVDQYGNPLGGVXLNTSXITHNTESTIRMGHLSEHCGAVIGVMQLQPSRNDHKIGCILHRSGSYS

SEQ ID NO: 258714 - protein, 128 aa, Zea mays
  Clone ID: MRT4577_167534C.1.pep
MAMSWTRGLKHGVVPRHAAQLVESRSLAIASKAKKGGKGDAGKTPALSQELKSTTVFGANIFKEGSDPKIQPDSEYPDWLWHLLDKRPVLSELRRKDPKTLSYEDLKRFVKLDNRSRIKIRNDLNAKN

SEQ ID NO: 258715 - protein, 119 aa, Zea mays
  Clone ID: MRT4577_167535C.1.pep
GPRFGFWQRTLVNFGTLPGQVASQWGGHSVTPFPHWKLHKGTHKGGFGWFQTTWGTRWPQLSFTSGRRGLNPTKTNDIWKSFGNLQNQRTSLAVLGKIPFKGFLFWLFPQPFPPPFNLK

SEQ ID NO: 258716 - protein, 54 aa, Zea mays
  Clone ID: MRT4577_167536C.1.pep
VGKKFWNLFHLQPMRDQKGDVQYFIGVQLDGTERVREAAAKDGAILVCFYLNGD

SEQ ID NO: 258717 - protein, 52 aa, Zea mays
  Clone ID: MRT4577_167537C.1.pep
STSVMHKFPFRKFKVSFSSAFKEPLSYPLCKTKGMFVIVCYIARSEIISVEA

SEQ ID NO: 258718 - protein, 119 aa, Zea mays
  unsure (1)..(119): unsure at all Xaa locations
  Clone ID: MRT4577_167538C.1.pep
MEEQNSWLRTKFSNTVYARVDPRRVPVAPLSKDVERKLHKFFKMKKTVSMPVDRDDGDTGTAFKHCASLPLVRSQPQLDRDKVNKPERASLEIPSAPXMNSESCKTPKAXALVKTPSSM

SEQ ID NO: 258719 - protein, 84 aa, Zea mays
  Clone ID: MRT4577_167539C.1.pep
VVPSLCSTCLLCFAVSPLVGSHPLRVLFILPFASEPCASASPMNRAKFIAQFPNGSRSFCFIQPKDEREGLTYYRTGRTLRIPS

SEQ ID NO: 258720 - protein, 219 aa, Zea mays
  unsure (1)..(219): unsure at all Xaa locations
  Clone ID: MRT4577_16753C.1.pep
XDISDEAVTGKXYRTDYFDKIGRSILVMRPGCQNTKNANGQVKYLVYCMENAILNLPHDXTADVLQGHYPXRLGVAILFNAPKFFEPFWKMASPLLEKKTRNKVKFVYSDRPDTMKIMEDLFNMDELECAFGGKNPATFNINDYAARMREDDKKMPSFWSPENSALASEPYQMSSQKALSVSGAKTEDAGSGKMDDMETAPKSEESGTESGEGVQTRTE

SEQ ID NO: 258721 - protein, 89 aa, Zea mays
  Clone ID: MRT4577_167540C.1.pep
AISIKYRLTSARRLSFRTRNTTMQYDAIKVAKVWDSGGDETGDHMISDISQRTFSLVGCLQLRPHTNGISQNQITFFYNSLTYCLNLED

SEQ ID NO: 258722 - protein, 50 aa, Zea mays
  unsure (1)..(50): unsure at all Xaa locations
  Clone ID: MRT4577_167541C.1.pep
SHVIRYPMPDQLRPRLSSSSGSCLAPHCKQAPLHHXQLNPPGGGGAIPXL

SEQ ID NO: 258723 - protein, 65 aa, Zea mays
  Clone ID: MRT4577_167542C.1.pep
CSRFLTSATARTVLAEQLSAVLGYREPNDFLVATMPPAHHRGHVDQQPCRLLHASCKHIQSFAQA

SEQ ID NO: 258724 - protein, 105 aa, Zea mays
  unsure (1)..(105): unsure at all Xaa locations
  Clone ID: MRT4577_167543C.1.pep
TSQXXXAGVPDIWHPTELSFPFLASYLLQLVIREEEGEVPSTLPTQCLMNWFSCSCASVLYDVTKLIKPLPTLAMGVSSIPPPAPLGIQLVLDAMPRGPLLGRCA

SEQ ID NO: 258725 - protein, 129 aa, Zea mays
  unsure (1)..(129): unsure at all Xaa locations
  Clone ID: MRT4577_167544C.1.pep
QRFFFPQIEKKGVKXSFSLKNIFVWGPPILFPPQCLGFPPSVLPRGGPLKRGVHPGPLPPPPFKRVKPRANSPKRFFKNPPSFFFRPFRKFQVFPPWVFLGFAPLWARPRFLFCFGFPFLNFSPFCGLV

SEQ ID NO: 258726 - protein, 60 aa, Zea mays
  Clone ID: MRT4577_167545C.1.pep
AIWGPLGGQGTPKTAQEFWFKGPGIKSPGGFFLRGAQKTVKPEGVSTAGKKPGPHFWVGG

SEQ ID NO: 258727 - protein, 126 aa, Zea mays
  Clone ID: MRT4577_167546C.1.pep
NPPSIFFPFENKNPRFFCPKIPGPWKTFNIFFYTKFQTLPTLEGRVFGRAPPNKRLLPLRGSLWHPGKPKPLWWSRGPQFPLLGFWRGPPKINRALPRGVLLAPPGEPPCPLFWFLGGEPLGPNSW

SEQ ID NO: 258728 - protein, 60 aa, Zea mays
  Clone ID: MRT4577_167547C.1.pep
LKILTFHSFPSHLSALWDSVRSCSKNTCKAVLPNGSPKQLYLHRESCAREALPTPPPDAW

SEQ ID NO: 258729 - protein, 87 aa, Zea mays
  Clone ID: MRT4577_167548C.1.pep
TLFVPAPPDAGIWTYSLSMKQDSNEAVRRQWVAASAQKCARAAGHGGWGSFPASVGRQPTRRRPLLRGRGGTRCYYCTRLPSTCPST

SEQ ID NO: 258730 - protein, 180 aa, Zea mays
  Clone ID: MRT4577_167549C.1.pep
MKASIKFRDDDRPLLRAKVPIGVLGLPFLSGVSAGGDAEDLRFDLSTAFPSGPGLRLSYRPNDPLQPFALSIRTGLGALGSPVRAPLALSAEFNLLSSNPPAFSLLFKPRLGDFSLANSVRSPPFPDTPALPPPHKLGDLANGDDHDHEGHKEFSLNGNGFAADVTAAGTTGGGVGMLLS

SEQ ID NO: 258731 - protein, 95 aa, Zea mays
  unsure (1)..(95): unsure at all Xaa locations
  Clone ID: MRT4577_16754C.1.pep
FGFPLAAAFDFLVVSGFSCFESSEVCLPLFGRALLGNVLGYGLSSSGCCAGCLTFGAVFCRTGLFFVLEDIMDELILRLCGLSSLXEWXVFXXCV

SEQ ID NO: 258732 - protein, 50 aa, Zea mays
  Clone ID: MRT4577_167550C.1.pep
RLAEKQWLSWSTSSDRSSAIGYGVVVSPVIRLSSAWEPIRLRFGKAPEKP

SEQ ID NO: 258733 - protein, 79 aa, Zea mays
  unsure (1)..(79): unsure at all Xaa locations
  Clone ID: MRT4577_167551C.1.pep
KPRAKRFIGVKXXGSGKKRPKCKKCGQFGPQMGPCNDPVYDSKAPPPNVPKPKRVTQKKKKVVVVKNDLLSLPAPSSPV

SEQ ID NO: 258734 - protein, 85 aa, Zea mays
  unsure (1)..(85): unsure at all Xaa locations
  Clone ID: MRT4577_167552C.1.pep
XXGLFFNFWVGLYXYYQILFTTPAPKKAKGKKTSIGSPLILYIFISLGIFGPLTLAVASHLILTPGSFPLSRTSCCAFGGARRRR

SEQ ID NO: 258735 - protein, 295 aa, Zea mays
  Clone ID: MRT4577_167553C.1.pep
GGGGGRGTGGVVRRTVAASTTMAPRGTQGFAHVDKQQRHVHGVLSDFRCNSGSTDHLSLYVEEFKHKSSHRSSVRCLPRQQGNVTEISRMQPVARKVQVDMTFNDKGLCRASRTVSGMRIQPKYYISSPNNNLKNSPTVKSYSGMSDFNYQLVRSAKRSALPKMGLTSTNCSLSEKMSFLRRPRHGDNHQNQSRISALNRRNKIVNPRGAAHLLSKDKVHEHLNSSLERHSQALLSNALIRESNCAVQIYSIKKNLNSYGALLTVNLRRCYAFPPVTAFDDLQYRLQVTLVIAST

SEQ ID NO: 258736 - protein, 69 aa, Zea mays
  Clone ID: MRT4577_167554C.1.pep
PPFNAKMLHPKKGPKNQKKKPLQKILANPITHQIKPCTPLEPFQQTKKTPCGKSTTTPQKTQLKNGKPL

SEQ ID NO: 258737 - protein, 67 aa, Zea mays
  Clone ID: MRT4577_167555C.1.pep
PWSMTCAAYHYWPKLDDNGHQHGHHAGAQKVVLDELDVHAYPAEKKHGPEPHAHQAEHEPGITDRKT

SEQ ID NO: 258738 - protein, 368 aa, Zea mays
  unsure (1)..(368): unsure at all Xaa locations
  Clone ID: MRT4577_167556C.1.pep
MEAQWLAEYPHQGADKRPRKRARLAWDVAPTLFQPPKAIPMLYCGQELINGNFTTAFLPPPSIYYTGPPRNISPPWRPDGKDGHYVFAVGENLTPRYRILNKMGEGTFGQVLECWDLENQEAVAIKIVRSLQKYREAAMIEIDVLQRLGKHDFTGSRCVQIRNWFDYRNHICIVFEKLGPSLYDFLRKNSYRSFPIDLVREFARQILESVAFMHDLRLIHTDLKPENILLVSSESIRVPDYKVSIRPPKDGSFFKNLPKSSAIKLIDFGSTTFESSIHNYVVSTRHXVPPEVSKGLGWNYPCXSRGGMNAVWKLPRLQNLVMQHVDHSAGDLIDLLQGLLRYDPNERLKAHEALQHPFFTRCIRRCGF

SEQ ID NO: 258739 - protein, 593 aa, Zea mays
  unsure (1)..(593): unsure at all Xaa locations
  Clone ID: MRT4577_167557C.1.pep
MEAQWLAEYPHQGADKRPRKRARLAWDVAPTLFQPSKXTLELIKAFFSRLEYAIPMLYCGQELINGNFTTAFLPPPSIYYTGPPRNISPPWRPDDKDGHYVFAVGENLTPRYRILNKMGEGTFGQVLECWDLENQEAVAIKIVRSLQKYREAAMIEIDVLQRLGKHDFTGSRCVQIRNWFDYRNHICIVFEKLGPSLYDFLRKNSYRSFPIDLVREFARQILESVAFMHDLRLIHTDLKPENILLVSSESIRVPDYKVXWIPKLLHTSVLYLLIKVLFRTYTHYXFFSNPLFAINVALSCGDHLCDSDKXGLWKTATAGIPLILMWTGIXTXLITDYAELQLHKCTFFSKLYFNLQXVSIRPPKDGSFFKNLPKSSAIKLIDFGSTTFESQDHNYVVSTRHYRAPEVILGIXHPLTHTQSGQFTFIFYFFLNDTSFFVLYLFFKSLINDNSCLGLGWNYPCDLWSVGCILVELCSGEALFQTHENLEHLAMMEKVLGPLPKHMIVRADRRAEKYFKRGVRLDWPEGAASRESMKAVWKLPRLQNLVMQHVDHSAGDLIDLLQGLLRYDPNERLKAHEALQHPFFTRCXQRCGF

SEQ ID NO: 258740 - protein, 91 aa, Zea mays
  Clone ID: MRT4577_167558C.1.pep
RGVVFVATVAIVVVLFILVVVSCLCLCRGCPRVPHPGYPGCLGLVHLGGGGHWIVPCRRRIPRPRSCSRNARRVKGSKLWLSKLEENLMRG

SEQ ID NO: 258741 - protein, 88 aa, Zea mays
  Clone ID: MRT4577_167559C.1.pep
QGKGLVSLYYMPSSGLSLPSWDFWIPSGRSPQFAAQNRPFLDIAKAPLGVRFICCCTPTFSLQRAQGSTESVVRVDLGSSSLMVTPLG

SEQ ID NO: 258742 - protein, 350 aa, Zea mays
  unsure (1)..(350): unsure at all Xaa locations
  Clone ID: MRT4577_16755C.1.pep
MSSANGTTNVHGKEAAPYEEQLFKIGKVRTDLGQLSGKSALYCSDASIARYLIARNWDIRKATKMLKKTLKWRSEYKPDEIRWDDISDEAVTGKTYRTDYFDKIGRSILVMRPGCQNTKNANGQVKYLVYCMENAILNLPHGQDQMVWLIDFAGFNLGNLSIQVTKMTADVLQGHYPERLGVAILFNAPKFFEPFWKMASPLLEKKTXNKVKFVYSDRPDTMKIMEDLFNMDELECAFGGKNPATFNINDYAARMREDDKKMPSFWSPENSALASEPYQMSSQKALGSVSGAKTEDAGSGKMDDMETAPEKSEESGTESGEEVQTRTESSTVEQKNLPGEDNAPADKSGL

SEQ ID NO: 258743 - protein, 162 aa, Zea mays
  Clone ID: MRT4577_167560C.1.pep
LSCFPASGRKLSLFSSSQSLLREQAPALFPAPSPGAAAKQHAGDGACDGPCRKRKASGTSSKQSKAKEAVTTAPPESRETAETRAKKRKLSTDEERKPAAGEGWRGSGKGKELVAADAEPPKDYIHVRARRGQATDSHSLAERVRREKIGERMKLLQDLVPG

SEQ ID NO: 258744 - protein, 95 aa, Zea mays
  Clone ID: MRT4577_167561C.1.pep
ASPPFLHLRVKHTECQDIALNNYLEGQLCPGFSLVFLRLSHKTKLSLALTFFQISRYVHLIQKKRDLFMTKTGFGSHYLVPAHMLIRKALYPQCF

SEQ ID NO: 258745 - protein, 43 aa, Zea mays
  Clone ID: MRT4577_167562C.1.pep
NAHFFNTPAALAQYIMQIRSLVRQLISWRRVLDIAADLSRTRG

SEQ ID NO: 258746 - protein, 36 aa, Zea mays
  Clone ID: MRT4577_167563C.1.pep
STNMRLCRADPKRGGLFVASVKEEERVLGVPPRGPR

SEQ ID NO: 258747 - protein, 157 aa, Zea mays
  unsure (1)..(157): unsure at all Xaa locations
  Clone ID: MRT4577_167564C.1.pep
ISPPPPPRRPTPTTSPSXSSAVISSMDPEESLSDPSPPPPAAXPNLRPPQPPPTAAARAPSSQPAFPRPXRDRHAHMRPXPSSPPPTTPKXPSXKTPAPRSHPRRPNPATRSSIRSARGSELYSARQIALVPNCSAETRRIGAHALGAGRRQHARFG

SEQ ID NO: 258748 - protein, 125 aa, Zea mays
  unsure (1)..(125): unsure at all Xaa locations
  Clone ID: MRT4577_167565C.1.pep
GRGGRSGVVRPPGCPFPWRXLSCARGLPVRCCSSSPWSRAPXRGRRGAWWWWWLAPARXPCRPLXFPCAVCGAAPCGXPAGPALPPRXFPLVVVALVPRWPVCGGARCVFILYXCAALVXPVSGR

SEQ ID NO: 258749 - protein, 293 aa, Zea mays
  unsure (1)..(293): unsure at all Xaa locations
  Clone ID: MRT4577_167566C.1.pep
MSTMRAPQVPSMLPFNNLAFGATFGGPASLKPMTMAPMPMAMPMSPAPLTKKPTPAAATPLCGKSDTDNLKMAKQVLNEDISKLQSQVNKLKQKCDAQEEQLQKAERRAEHSASTAAEESSRRNGVLEFIRFLDNELKSIADRVPSDAADGLKALQNHSERFLTEQGVRPLEATGMHRKCASIGNLVMSQDGSAGNASSSAASLASESPCHRIMENSSRANGDXTEARCTHGEVQLIEQFEPGVYVTLIQLRDGTKVFKRVRFSKRRFAEQQAEEWWRENQERVFRKYNHPAN

SEQ ID NO: 258750 - protein, 217 aa, Zea mays
  unsure (1)..(217): unsure at all Xaa locations
  Clone ID: MRT4577_167567C.1.pep
MGNGKANTEDLKGSKLFDVSHVTALVTGGGTGIGLMITQALVANGAKVYITSRRDEVLKKTEELYGGGGPGQIIPLQADVSEKDDVKRLYDEMCQKEPKGIQILVNNAGIAXMTTPSFPQTASQTWRTPKPSXPFSQXQPENWADTMKTNVGSIFWMSMTFLPLLAKGGQVTPGYTSQVINVSSISGYMKGSSNGQFSYASSKAAATHLSRMLCTTF

SEQ ID NO: 258751 - protein, 61 aa, Zea mays
  Clone ID: MRT4577_167568C.1.pep
FVFGQGYVEKVIVSVPENTDEEALVLTIMRHPSRYARLRPRTVEVLTEPIPNRTCRTSQLA

SEQ ID NO: 258752 - protein, 139 aa, Zea mays
  Clone ID: MRT4577_167569C.1.pep
CRLPGTKETSGKKGEKPGTRPGKPPMPPPRGPGPGGRGRGRTKEPREARPGNHAFYPVVGPARDGTDRAQGGQGGGAGGGPGTRGTLARPTQQSTTTRKLTQGNPGESRRHNKAIKRRRGWRWSPSLGGQLRGPRPRQP

SEQ ID NO: 258753 - protein, 211 aa, Zea mays
  Clone ID: MRT4577_16756C.1.pep
AGARCLILTPTISSSSAALRLPRIARRRPLSCSASPLAVFATMDSPPEGYRTNVGICLADPSLTKIFSASRIDIPTAWQMPQGGIDPGEEPRAAAVRELREETGVRSAEIVAEAPNWLTYDFPADVKDKLNARWGTNWKGQAQKWFLFRLTGGDEEINLMGDGSEKPEFSEWAWMTPQQVIEKAVDFKKPVYEETLKHFAPYLQSDPTASS

SEQ ID NO: 258754 - protein, 181 aa, Zea mays
  Clone ID: MRT4577_167570C.1.pep
MGLTFTKLFSRLFSKKEMRILMVGLDAAGKTTILYKLKLGEIVTTIPTIGFNVETVEYKNISFTVWDVGGQDKIRPLWRHYFQNTQGLIFVVDSNDRDRVVEAKDELHRMLNEDELRDAVLLVFANKQDLPNAMNAAEITDKLGLHSLRQRHWYIQSTCATTGEGLYEGLDWLSNNIANKA

SEQ ID NO: 258755 - protein, 181 aa, Zea mays; identical to SEQ ID NO: 258754
  Clone ID: MRT4577_167571C.1.pep

SEQ ID NO: 258756 - protein, 174 aa, Zea mays
  unsure (1)..(174): unsure at all Xaa locations
  Clone ID: MRT4577_167572C.1.pep
MARMAVSVLAILLASCAVAAASFDKEFDVTWGXDKISGSGFQSKHEYLYGKIDMQLKLVPGNSAGTVTAYYLSSQGPTHDEIDFEFLGNVTGEPYTLHTNVFTQGQGQREQQFHLWFDPTNDFHTYSILWNPKHIIFMVDDMPIRDFKNLEGKGIAFPKNQPMRLYSSLWNADD

SEQ ID NO: 258757 - protein, 48 aa, Zea mays
  Clone ID: MRT4577_167573C.1.pep
SSSSFMISVAPSLSSLDSLNSISSRIPAKNLFQSLDVFSLSEIEQPWM

SEQ ID NO: 258758 - protein, 82 aa, Zea mays
  Clone ID: MRT4577_167574C.1.pep
SSAVIEMSMRICMAFQTSRSARRPKGSCKRYYLRERCGDHCRHQVAFQPIAGNAATSLIDQNYEHRHRVGCLPSAPQESSRR

SEQ ID NO: 258759 - protein, 148 aa, Zea mays
  Clone ID: MRT4577_167575C.1.pep
PGRTNEIKNPLFTPPGRQTLFSLKTGKPWLEIHHYRLTKGGPKKKNGPILFSSWGPRIQKRATERGGKNKRLIPKPPTDLAGVPVLFPGGGGGVSRKKPGGGGGGFVGVKTAPLVVAGPLVAPRDAPPGPMNNGAHRPQIGGGAPPPG

SEQ ID NO: 258760 - protein, 111 aa, Zea mays
  Clone ID: MRT4577_167576C.1.pep
ERGVVALASYSSIHRKKLNHTSTNLSVVSRRCVNLHHPREAGGAIDMIRRHRRLRNAVMCESSMFLMSPSPSPSPPQPSRPPPEYKHFCRVCNKGFTCGSALGGHMRAHGA

SEQ ID NO: 258761 - protein, 128 aa, Zea mays
  Clone ID: MRT4577_167577C.1.pep
GVTALARPKLSTCVTPECSLESNPQTASVLRWYASEPRSKLSVSTVPDAGPALSWTADAVAAAEEERYATSVDCSSCRLAAASRLIIARLMGRFSDFVGLGVFRFGGATAVVLLELGYSVAACNTTHY

SEQ ID NO: 258762 - protein, 72 aa, Zea mays
  Clone ID: MRT4577_167578C.1.pep
THYSYIEIFCSLSISSISIYSFSNLVSGMIITNSSKLCSKGSPIHCIPPNTVYYSYDVFIAAWDVALSPGFA

SEQ ID NO: 258763 - protein, 105 aa, Zea mays
  Clone ID: MRT4577_167579C.1.pep
SCIHPHLVPSLLCQHRPSLSSAGELCVFSPFLGRRATRVLPRLPPHEGPSVVSLAPLCQRTPASPPTGATDPGGARGSKRGNTTLLCAAIAVRGCPSSGHLSAKV

SEQ ID NO: 258764 - protein, 85 aa, Zea mays
  Clone ID: MRT4577_16757C.1.pep
RAEPPRELITSRASFYSLFSRQGELITSRASFCSLLSRQAEPIQATAPSQTELGSFPALGVSRHKENVTFLRLCTASHETCLDFS

SEQ ID NO: 258765 - protein, 101 aa, Zea mays
  Clone ID: MRT4577_167580C.1.pep
ASWRTPVWRPQCTPWRYSGARALPALQAQSSSLSATCASLASKTDLGGSCSVRRPIFEDTSDSGDELIDDLKWKWDADDDKPTVLLNGGGAAVVLWLTSVA

SEQ ID NO: 258766 - protein, 100 aa, Zea mays
  Clone ID: MRT4577_167581C.1.pep
MEHSSAEDSDISDSDIAEHKEEICAQLRAGKLNVKRGEAFRCPFCPGKKRQDYNLKDLLQHATGIGAASKRSAKVKASHLGLAMFLEKDIASTLEQPLQI

SEQ ID NO: 258767 - protein, 228 aa, Zea mays
  unsure (1)..(228): unsure at all Xaa locations
  Clone ID: MRT4577_167582C.1.pep
GFRHLHAPQRYDSRRRRSRRIHRSLDLNQDVRCEHEHDTPNVFNRWTFDDVQVNDISLNDYLTENANKHPMYLPHTVGRYSKKRLLKEQWPIVERLTNSLMMHSSNNGNNVMAVRIIKHTLEIIHLLTDDNPIQDAVNAIINSGPREDDTRIGSTDDVRRQDVHIXPLRRENHAIXLLTTGANQRAVQNIKTIAECLADELINTAKGSSNRYAIKKNDEIERGAKDKR

SEQ ID NO: 258768 - protein, 61 aa, Zea mays
  Clone ID: MRT4577_167583C.1.pep
KPRPPQQKMFSQSEKLGGSGTSCTKPRMGRANVWGPLGTGPPPPLSIFFQGTGLKGVTPPK

SEQ ID NO: 258769 - protein, 187 aa, Zea mays
  unsure (1)..(187): unsure at all Xaa locations
  Clone ID: MRT4577_167584C.1.pep
GCQFFLPYRIXQQGVAAGILPLXSPCVLEQSSXLLQHIPLVHLLAQNIRAQQLQQLVLANLAVYSHQHQVPLEHLLAHNIRAHHLLQLVLANLAGYFQQHQXLPINQLDVLNSAAYLQQHQLLLFSQLAVAYPQQYXIPFNQLAALNSHAYVQQQQLLPFSQLDDESLDGLLXQSHLYXFYLXHTGP

SEQ ID NO: 258770 - protein, 50 aa, Zea mays
  Clone ID: MRT4577_167585C.1.pep
SLVNLKNQFKHTLTFFTTQNKRKSFELPFEQVTHQLNLCLLIFRAGTGAY

SEQ ID NO: 258771 - protein, 70 aa, Zea mays
  Clone ID: MRT4577_167586C.1.pep
ARKVWNSLNVKTEHPEFQNIQNFHNIVNLYIIDTHFRALLIRSSGKPISTNFSTFSSIPVDALFVNACVH

SEQ ID NO: 258772 - protein, 115 aa, Zea mays
  Clone ID: MRT4577_167587C.1.pep
LLFFFFPFYFYFFGGFYLNFSGGNKGKPPNSTEYISDRAISPYRPIISLPMSPARTEQPPPKWETKPYLGPVGCGPNVGVLLGRKAIEDQPPMHLYLNLGEGDGTHLQLHGDPYK

SEQ ID NO: 258773 - protein, 114 aa, Zea mays
  Clone ID: MRT4577_167588C.1.pep
LVIGRRNPCNCSRWQQTALSSSFRFSLHARGHDTLTLFSTRLPATAAATAPGSNHYLGFSYSFSLLGAWKPAPNPFIFRFSTIHLPLETSGGRKVSNLVTTRSTPSIWTTYVRR

SEQ ID NO: 258774 - protein, 157 aa, Zea mays
  unsure (1)..(157): unsure at all Xaa locations
  Clone ID: MRT4577_167589C.1.pep
AARRRQKGSKTHVKNGTSCEINYGTGSISGFFSQDNVKVGSAVVKHQDFIEATHXGSLTFLSAKFDGILGLGFQEISVENAEPVWFKMVEQKLINEKVFSFXLNGDPNAKKGGELAFGGVDPEHLKGNHTYDPITEKRYXHIEMGDFLAGGVSTGVC

SEQ ID NO: 258775 - protein, 134 aa, Zea mays
  Clone ID: MRT4577_16758C.1.pep
AGPRLSSPSDPGSQQKWRAPDLRSCFRSSPLLPSARARPRQSHRNQWSAANAPEAAKRTAAPAEGPGAASTPVADAAPAASSRKSGPGTATASTSTPPSSTDEELRPSPPRYTDSGGPCALQEPAADDSAGAAT

SEQ ID NO: 258776 - protein, 67 aa, Zea mays
  Clone ID: MRT4577_167590C.1.pep
SSILFFFFFFVIFSGLRPNDQTTGATSPTLLKAGRGQKQPQNWIVFFKKKPEERTLRQTETLLSPNQ

SEQ ID NO: 258777 - protein, 48 aa, Zea mays
  unsure (1)..(48): unsure at all Xaa locations
  Clone ID: MRT4577_167591C.1.pep
SLGKINSKTXLNHTKSLIQVSIRISYLGELSKLVQFNHNYFLYLTFLK

SEQ ID NO: 258778 - protein, 58 aa, Zea mays
  unsure (1)..(58): unsure at all Xaa locations
  Clone ID: MRT4577_167592C.1.pep
DTQVRDRLEDLLAHLISDDDAVETSWEADNQSLQGGHKSGQCERRXEDRTWNLRPRCQ

SEQ ID NO: 258779 - protein, 38 aa, Zea mays
  Clone ID: MRT4577_167593C.1.pep
WIQRIFFSKPMEKAPRSSLAEGYPPIQENAACSRVKIY

SEQ ID NO: 258780 - protein, 37 aa, Zea mays
  Clone ID: MRT4577_167594C.1.pep
RIWHADTGQDTSNFIWIHHLHRTLLEEQMKTDDEYNT

SEQ ID NO: 258781 - protein, 111 aa, Zea mays
  Clone ID: MRT4577_167595C.1.pep
RPYKARRLGFKAKQGYVVYRVRVRRGGRKRPVPKGIVYGKPKHQGITQLKFQRNKRSVAEEQSGRKLGGLRVVNYYCANEDGTFADSEIILCDEGDTEIIDDPTLTGACNA

SEQ ID NO: 258782 - protein, 138 aa, Zea mays
  Clone ID: MRT4577_167596C.1.pep
MRRLALLFLLPLLLATGVTTASAEPATPPASPPPPPPPPPPPTPAEHQKKHEELLTKYGMTTGIFSTTDNGIRIDNNGRRSDEHEEHCYEYYENITKVERHIKGEHRYDYHDDLQGIQISRIIIKDNVIRMKDDQHED

SEQ ID NO: 258783 - protein, 592 aa, Zea mays
  Clone ID: MRT4577_167597C.1.pep
IADRCDKKGVSVDERLIRVAEMLEKMVESYSPKDLPNAAVSPDVAKVSSSSINEESDGPSPKLSDWSRRGSADMLDYLQETDNTISLDDIKNLPSMTCKTRFGPKSDHGMATSSAGSMTPRSPLTPRSNHIDMLLAGKNAINESGDLPQIVELADIARCIANTPLDEESALSQMVTCIEDLQEIVNRRKHEALTVQTFGTRIEKLHREKYLQLCDSVDMDKVDSASTIMDEEDDVVRSLRASPVHPVKDRTSIDDFEIMKPISRGAFGRVFLAKKRTTGDLFAIKVLRKADMIRKNAVESILAERDILITVRNPFVVRFFYSFTSRENLYLVMEYLNGGDLYSLLRNLGCLDEDVARVYLAEVVLALEYLHSMHIVHRDLKPDNLLIAHDGHIKLTDFGLSKVGLINSTDLSGPAVSGASLYGDDEPQMNELEQMDHRARRQNRSAVGTPDYLAPEILLGTGHGCSADWWSVGVILFELIVGIPPFNAEHPEAIFENIMNRKIPWPHVPEEMSFDAQDLIDRLLTEDPHQRLGANGASEGEDSTGLNEFESSANVNYSFSNFSFKNLSQLASINYDLLTKGLKDDPPPRTEM

SEQ ID NO: 258784 - protein, 234 aa, Zea mays
  Clone ID: MRT4577_167598C.1.pep
MAEKLSIILQILVVELIPAWTIINSVHHHFLGPGDLRNMLSAQTGHPSTSAELLRRISRLLTEDPHQRLGANGASEVKQHPFFKDISWDTLARQKAAFVPSSDSAFDTSYFTSRYSWNQSDENIYEAYELEDSSDNGSLSGSSSCVSNQDDMGEDSTGLNEFESSANVNYSFSNFSFKNLSQLASINYDLLTKGLKDDPPPRTEISKCEAWSVPIEAVPTSRGSEYSFGVALFS

SEQ ID NO: 258785 - protein, 1142 aa, Zea mays
  Clone ID: MRT4577_167599C.1.pep
MEYSAKTSLPLYTFGIIFPCRCQRFNTNQQKEQVRLQKKGAKRKPKCSLVWCTRLSSVPPDSVRCTTRQCPVHQGESAQTPQLRVSEAQLRYNSPDCPVCHWTVRCTSGATTIYAQRSTLTDEQCSTVSRQKSEQQRMIEMAADVGLLGRVLPNKAKQRYSLYADDVGVFIRADKEDLKVLKKILEVFEGFSRLKINFDKTEIFPIRYPQTLWPDLMDVFPGKYSKFPREYLGLPLHFRNVRRIDVQPLIGKINKRLAGWKGRLLSKADLFNASTIVTIGNGKMADFWGSSWIEGHAPKNIAPKLYKKARRKNISVFKALRNNYWMQFCAPFSREEEPASLSLGDWVLQSLQFPPALPVLPHAPLCLSVSLASLLQTPARRPGRGGVMVFKGRFFSSRHKSSESSSSPDGSNSPRTPTSAPASASAASPASSSSSRSDKKKTKSETPKKRDKLFGSAATAPKSAASSASSSPAGDGRKGSVPHHRDAGVGGGGGASAAALSPILASSLGLNRIKTRSGPLPQEGQRMAAVIGSSNLSRGQGQAEPSAASAGVGGRKGVTSWADTSSSSRGKGKTTELPMRSTAGTSLGPVGKSAVKAKPSAQRNHSGDLRTPTHIPEAACAYDPCETPKESESPRFKAIMQATSAPRKRLPADIKSFSHELNSKGVRPFPFLKPRGIYNLKEVIKVIHVRFEKAKEEVNSDLAVFAGDLVSVMEKYADSHPEWKDALEDLLILARTCCVMTPGEFWLQCEGIVQDLDDHRQELSMGVLKKLYTRMLFILTRCTRLLQFHKESGFAEDEVVIDQRDKIIQSADRQILTQSGVGDTTSRASKSEARKSYSQEQHNLKWKRSQEIKPVNLLPPLDTDVKKVADSPTKERISSWKPFPSPVTKVPKESTPTKLESPNKKTDAHSTVSSHVELSSPVESLPQQQLPVKHQHKTSWGHWSDQPNISEEGSIMCRICEEYVPTQYVEDHSRVCAIADRCDKKGVSVDERLIRVAEMLEKMVESYSPKDLPNAAVSPDVAKVSSSSINEESDGPSPKLSDWSRRGSADMLDYLQETDNTISLDDIKNLPSMTCKTRFGPKSDHGMATSSAGSMTPRSPLTPRSNHIDMLLAGKNAINESGDLPQQRFGIVLSSCCPSIVL

SEQ ID NO: 258786 - protein, 39 aa, Zea mays
  Clone ID: MRT4577_16759C.1.pep
TDSRFKITEHELNIQTLLTTSLLHMMHTCRLTTYYVVAK

SEQ ID NO: 258787 - protein, 56 aa, Zea mays
  Clone ID: MRT4577_1675C.1.pep
PPFTCYNDIIKWPYKVLFMSCSLHFQTKSILNACLTKESYTVYTMHLFDQTSSIFL

SEQ ID NO: 258788 - protein, 308 aa, Zea mays
  Clone ID: MRT4577_167600C.1.pep
TRPALEYLHSMHIVHRDLKPDNLLIAHDGHIKLTGFGLSKVGLINNTYDLSRPVVSGASLYGDDEPQMNEFEQMDHRARRQNRSAVGTPDYLAPEIILGTGHGCSADWWSVGVILFELIVGIPPFNAEHPQTIFDNILNYKIPWPHVPEEMSFDAQDLIDKLLTEDPHQRLGANGASEVKQHPFFKDISWDTLARQKAAFVPSSDNAFDTSYFTSRYSWNPSDGNIYEAYEFEDSSDNGSLSGSSSCVSNRQDDMGEDSDGLNEFESSANVNYSFSNFSFKNLSQLASINYDMLTKGLKDDPPPRTET

SEQ ID NO: 258789 - protein, 170 aa, Zea mays
  Clone ID: MRT4577_167601C.1.pep
MQGGGGVDQPPMQMVLRVRHPSSLGGSGADEDDGEGSSRSALSVFKAKEEQIERRKMEVREKVFAHLGRVEEESKRLAFIRQELEGMADPTRKEVESIRKRIDTVNRQLKPLSKSCVKKEKEYKEVLEAYNEKSKEKALLVNRLIELVSESERMRMKKLEELNKTVDSLY

SEQ ID NO: 258790 - protein, 117 aa, Zea mays
  Clone ID: MRT4577_167602C.1.pep
GGPSQYMGCFPPACSSPLRVRLCHNPLSLLAWAPPRTPTLFLASFARSPFSPLLSFCLKYSIPPGFHARLGDPVRGGFFFRALVPGQKRGGFFLVFWRPNKRVPINRKSKKHKPPPP

SEQ ID NO: 258791 - protein, 115 aa, Zea mays
  unsure (1)..(115): unsure at all Xaa locations
  Clone ID: MRT4577_167603C.1.pep
IVPARQSGRASGKNKWGDHGFMVTSQDGNEGDPDKLCYQGADAELNACLVHDPDSKEYCETCSKTNMVMVXGEITTKARVEYQKIVRDSWRWIDVASYQGGFHADRWKALIDIEQ

SEQ ID NO: 258792 - protein, 177 aa, Zea mays
  Clone ID: MRT4577_167604C.1.pep
MEHIACIWFCVVISHVLYRYKEYRLQDYSSWFVKQLNDTDKWTHLRSCLVKSDDCNSLSKRYKTLKQYKLAELTPIESGCCRPPAECGYPALNASNFDLSYHPVSTNVDCKLYKNDRFLRCYDCNSCKAGVAQYMKTEWRVVAIFNVILFIILSFVYFVGCCARRHAGGSDSKVPRR

SEQ ID NO: 258793 - protein, 290 aa, Zea mays
  unsure (1)..(290): unsure at all Xaa locations
  Clone ID: MRT4577_167605C.1.pep
EVVLALEYLHSMHIVHRDLKPDNLLIAHDGHIKXGASLYGDDEPQMNEFEQMDHRARRQNRSAVGTPDYLAPEIILGTGHGCSADWWSVGVILFELIVGIPPFNAEHPQTIFDNILNYKIPWPHVPEEMSFDAQDLIDKLLTEDPHQRLGANXAPKVNQHPFFKDISWDTLARQKAGFVPXSDNAFDTSYFTSRYSWNPSDWNIYEAYEFEESSDNGSLSGSSSCLSNRQDDMTEDSDGLNEFESSANVNYSFSNFSFKRAAVGSPSKSSECLLARLHLRPACTIFVPYL

SEQ ID NO: 258794 - protein, 1616 aa, Zea mays
  unsure (1)..(1616): unsure at all Xaa locations
  Clone ID: MRT4577_167606C.1.pep
MIEMAADVGLLGRVLPNKAKQRYSLYADDVGVFIRADKEDLKVLKKILEVFEGFSRLKINFDKTEIFPIRYPQTLWPDLMDVFPGKYSKFPREYLGLPLHFRNVRRIDVQPLIGKINKRLAGWKGRLLSKADLFNASTIVTIGNGKMADFWGSSWIEGHAPKNIAPKLYKKARRKNISVFKALRNNYWMQFCAPFSREEEPASLSLGDWVLQSLQFPPALPVLPHNSLCRSVSLASLLQTPARRPGRGGVMVFKGRFFSSRHKSSESSSSPDGSNSPRTPTSAPASASAASPASSSSSRSDKKKTKSETPKKRDKLFGSAATAPKSAASSASSSPTGDGRKGSGPDYRDAGIWCGGSXPAIISESPSTVLGRALSFCSEMLSFLAKSVHXMSAGIAGSSLGRCXSENNPVRCXGGFDEIANLAILVDDGLXAGSPLDLPAARHXPSKAGTRLGPVGKSAVKAKPSAQRNHSGDLRTPTHIPEAACAYDPCETPKESESPRFKAIMQATSAPRKRLPADIKSFSHELNSKGVRPFPFLKPRGIYNLKEVIKVIHVRFEKAKEEVNSDLAVFAGDLVSVMEKYADSHPEWKDALEDLLILARTCCVMTPGEFWLQCEGIVQDLDDHRQELSMGVLKKLYTRMLFILTRCTRLLQFHKESGFAEDEVVIDQRDKIIQSADRQILTQSGVGDTTSRASKSEARKSYSQEQHNLKWKRSQEIKPVNLLPPLDTDVKKVADSPTKERISSWKPFPSPVTKVPKESTPTKLESPNKKTDAHSTVSSHVELSSPVESLPQQQLPVKHQHKTSWGHWSDQPNISEEGSIMCRICEEYVPTQYVEDHSRVCAIADRCDKKGVSVDERLIRVAEMLEKMVESYSPKDLPNAAVSPDVAKVSSSSINEESDGPSPKLSDWSRRGSADMLDYLQETDNTISLDDIKNLPSMTCKTRFGPKSDHGMATSSAGSMTPRSPLTPRSNHIDMLLAGKNAINESGDLPQEARLPTSGIRAMVIVGDVPRRERFRRSASTHMTFLNAQGCDGAHADLLQGLTRLSVQEAEGQGAAAGARGRAGVGWREERAGLAAPERKIVELADIARCIANTPLDEESALSQMVTCIEDLQEIVNRRKHEALTVQTFGTRIEKLHREKYLQLCDSVDMDKVDSASTIMDEEDDVVRSLRASPVHPVKDRTSIDDFEIMKPISRGAFGRVFLAKKRTTGDLFAIKFYVLVSPSDPQYVYSKQVLRKADMIRKNAVESILAERDILITVRNPFVVRFFYSFTSRENLYLVMEYLNGGDLYSLLRNLGCLDEDVARVYLAEVVLALEYLHSMHIVHRDLKPDNLLIAHDGHIKLTDFGLSKVGLINSTDLSGPAVSGASLYGDDEPQMNELEQMDHRARRQNRSAVGTPDYLAPEILLGTGHGCSADWWSVGVILFELIVGIPPFNAEHPEAIFENIMNRKIPWPHVPEEMSFDAQDLIDRLLTEDPHQRLGANGASEVKQHPFFKDISWDTLARQKAAFVPSSDSAFDTSYFTSRYSWNQSDENIYEAYELEDSSDNGSLSGSSSCVSNQDDMGEDSTGLNEFESSANVNYSFSNFSFKNLSQLASINYDLLTKGLKDDPPPRTEM

SEQ ID NO: 258795 - protein, 83 aa, Zea mays
  unsure (1)..(83): unsure at all Xaa locations
  Clone ID: MRT4577_167608C.1.pep
LAIATPIDNWPFIVSSSRDKSMLVWDLTNPVHSTPESGVTADYGVPFRRLTGHSHFVQDVVLSXDCQFXLCGSXDGELTLWDL

SEQ ID NO: 258796 - protein, 53 aa, Zea mays
  Clone ID: MRT4577_167609C.1.pep
SIGDALRALAMHPNKIANKLISIDDETQLKNSIVSMHHAYSDPKCVMILYEHL

SEQ ID NO: 258797 - protein, 133 aa, Zea mays
  Clone ID: MRT4577_16760C.1.pep
AQRAISLPFSAYNYYHMLRRHVARTTFSMSDEMIHAPCMDIKKGLCSYLGGSSWCTYSAGLGRIRGALRGAHLNCLCCRLGLADSCRSSTRPARRPGAFEIVTRLITSLRDDARGVHAADESGRETSYHKFAG

SEQ ID NO: 258798 - protein, 46 aa, Zea mays
  Clone ID: MRT4577_167610C.1.pep
LNDVAQGRYTDSIQCRKKPIRVAKINGAWNMSHQRADVEFQWFENV

SEQ ID NO: 258799 - protein, 76 aa, Zea mays
  Clone ID: MRT4577_167611C.1.pep
PPPFGTSLPYKSTIEGSVFFANSKPLEKGHKRGGGESPNKGMAAPLYNRKRVKLGHGLAQLVFLRIGDIFCPDQGQ

SEQ ID NO: 258800 - protein, 100 aa, Zea mays
  unsure (1)..(100): unsure at all Xaa locations
  Clone ID: MRT4577_167612C.1.pep
GGCEVVRSHISHNGASRIELPSRDIKIEPSKWRVNVRHVDRCCGNXNTLLEDGIAYHESRLXRGTXPWEGGEAIERVRSSQGGRPQKHIGHSCSASYDAG

SEQ ID NO: 258801 - protein, 133 aa, Zea mays
  Clone ID: MRT4577_167613C.1.pep
TPNTALGAKIKGGCPSPPTLENCGLPPPERPQKKSPQMPPPGGPPPPRGRGPPMFFLSGGSRRLSHKKSPRPPFYSPVLETKKRGPRNMAGEPKGAPQAGYIRGAPERSFGQKSVDHWFRMKRKKKENNTHPP

SEQ ID NO: 258802 - protein, 58 aa, Zea mays
  Clone ID: MRT4577_167614C.1.pep
STHDFAQKAWGTTIYLTTRRTPYLYQLVAPELEFTKHSQTGRYYSRDTLPTCGDTLTL

SEQ ID NO: 258803 - protein, 167 aa, Zea mays
  unsure (1)..(167): unsure at all Xaa locations
  Clone ID: MRT4577_167615C.1.pep
MAIGQGDEKKGSLARSLSCSNCGSGAIIFGRKRVAVSPTPGSRSPHSPTRTLRKQRSVRFHMEDDGVNLFNQLSLDVLVMIFCKVNHSDLRNLLLISKSVNEATIVAREQHFKFSTPPAKSGFRDEETAGGDDDDXRPPGAPKHTGVRGRAWGTRTCRASSNLSASF

SEQ ID NO: 258804 - protein, 73 aa, Zea mays
  Clone ID: MRT4577_167616C.1.pep
LTSASKGWQGATSVSEIRSMVQMLSRDQLSLLKNRGVIQLALAAEMSLQMSHLIFSRHLLSPPRENYVAPAHG

SEQ ID NO: 258805 - protein, 207 aa, Zea mays
  Clone ID: MRT4577_167617C.1.pep
MATAPVVVLVLHVLLGAAAAACAAAAGSSSKVPAMYVFGDSTADVGTNNYLPGGAEVPRANFPHNGVDFPTARPTGRFSNGFNGVDFLAVNMGFKRSPPPFLAVANKTNRQVFRGLLGVNFASAGSGILDTTGSSIIPLSKQVEQFASVRRNISSRVGNGSAAAADALLSRSLFLVSTGGNDLFAFFARNSTPSEPTSGGSSPTSSR

SEQ ID NO: 258806 - protein, 178 aa, Zea mays
  unsure (1)..(178): unsure at all Xaa locations
  Clone ID: MRT4577_167618C.1.pep
PEPPPPXPPPPPPPPPLPXPPPXAPPCPYPSPDPYPEPEPXPDPPWPPPPPPPCPPPPPAAPPPKPDPEPYPSPPPWPYPEPPPWPPPPPPPPPLPYPPAAPLPAPXPDPCPDPYPEPPAPAPSPPPPPPPPPCPYPPAAPPLPPPSPYPDPDPXPGPPXPPPPPPPLPPPPPPPPGP

SEQ ID NO: 258807 - protein, 98 aa, Zea mays
  unsure (1)..(98): unsure at all Xaa locations
  Clone ID: MRT4577_167619C.1.pep
AHQVRNIRNPITAGSEDVGIELDGDERNKKTKSTASXNDDEYLKLLVKIYRLLDKRTKNNLNAVILKRLFMSKMNNLSIFMRRLVXFMEGKEKNMDRI

SEQ ID NO: 258808 - protein, 50 aa, Zea mays
  Clone ID: MRT4577_16761C.1.pep
SLQTEFFLESIEYHVHSQRIDQLCADSVASWLIYEPSIVAGAAAMTTVSS

SEQ ID NO: 258809 - protein, 371 aa, Zea mays
  Clone ID: MRT4577_167620C.1.pep
MATVPVLVVLHVLLLAAAAACAAAGGSSSKVPALYVFGDSTADVGTNNYLPGGAEVPRANFPHNGVDFPTARPTGRFSNGYNGVDFLAVNMGFKRSPPPFLAVANKTNRQVFRGLLGVNFASAGSGILDTTGSSIIPLSKQVEQFASVRRNISSRVGNGSAAADALLSRSLFLVSTGGNDLFAFFARNSTPSDADKRRFVANLVALYQNHVKALYVLGARKFAVIDVPPVGCCPYPRSLHPLGACIDVLNELARGFNEGVRAAMHGLGVSFQGLRYSVGSSHAVVQSIMKHPQRLGFKDVTNACCGSGRFNGKSGCTPNATLCDNRHGSGRFNGKSGCTPNATLCDNRHQYLFWDLPAPMNARQLAEDDRC

SEQ ID NO: 258810 - protein, 88 aa, Zea mays
  unsure (1)..(88): unsure at all Xaa locations
  Clone ID: MRT4577_167621C.1.pep
LTVGRIGGHPSQLTPTPKPPIHPYPPHPLRSAMACSFAAATVVSSAPTPAASPSPLPRSPSLFPAPLSSPPPVRSXSSPPDPRGSSDS

SEQ ID NO: 258811 - protein, 66 aa, Zea mays
  Clone ID: MRT4577_167622C.1.pep
ATTAPRLAAHLSSACGASNADPGNHCSSRMLSVANKANVNSTVRSNCILMHNYSLQTLLTSLWRAI

SEQ ID NO: 258812 - protein, 98 aa, Zea mays
  unsure (1)..(98): unsure at all Xaa locations
  Clone ID: MRT4577_167623C.1.pep
QKPXKTAGGQENIWGHTTXITRIIFLIYWVCLVTFHCIHVYSKPRPRTIQLTTASALCKHFFRWEHIECKPRSGVKKKKQNARVEHIKKVLYSQFLFL

SEQ ID NO: 258813 - protein, 81 aa, Zea mays
  unsure (1)..(81): unsure at all Xaa locations
  Clone ID: MRT4577_167624C.1.pep
AHACSQLMGFLLYAERVQGVGPAGMGANPTLPSQGKHGGGAAQPXXHVYXHVXSTTVNPLVVDDPSRLLLQDFTQGPYMDA

SEQ ID NO: 258814 - protein, 42 aa, Zea mays
  Clone ID: MRT4577_167625C.1.pep
SELHLGAWIGYVAGQMLVVRQADSFRVLGHVLWIIELKFVSI

SEQ ID NO: 258815 - protein, 175 aa, Zea mays
  Clone ID: MRT4577_167626C.1.pep
AMRILAYGLPSDAVDEYVQIGESTARESLHHFCRAIIAYFSAWYLRTPNEADITCIMHSSESRGFPGMLSSIDCMHWEWQNCPISWHGQFCGRNGRASMILEVVATYDLWIWHAFFGMPGTNNDVNVLHRSPVFDPLTTGRMPPVNYTVNGHAYNFRYYLADGIYPNWPTFVKAI

SEQ ID NO: 258816 - protein, 58 aa, Zea mays
  unsure (1)..(58): unsure at all Xaa locations
  Clone ID: MRT4577_167627C.1.pep
AINIRSPPXRGTSMCQPPRLVDRRPGTNDHLEHRTIWFSSTTHRTVWCPSERGHHNVE

SEQ ID NO: 258817 - protein, 52 aa, Zea mays
  Clone ID: MRT4577_167628C.1.pep
IVMKTIGSTVDQQVYGGDLIGATQQVLLHSVHVARGKSRSELRLRSRSSRDR

SEQ ID NO: 258818 - protein, 76 aa, Zea mays
  Clone ID: MRT4577_167629C.1.pep
PGRSYTILQIQYSTNLRGPAVLRIQARFLFPATSGFFYRGTLVQLLTEHFTPQELAKHCRCLCYWPFLPFSFASLY

SEQ ID NO: 258819 - protein, 82 aa, Zea mays
  Clone ID: MRT4577_16762C.1.pep
VEHYYNTNASRLPTAASLGPPAITPESIYAIGLRPFTRQVYDITSPTTTSARTTNKSSPLPTPSPPLTVTSDPVSNPIRNSS

SEQ ID NO: 258820 - protein, 75 aa, Zea mays
  Clone ID: MRT4577_167630C.1.pep
PHSTGKFFTILGAVKKTTFLALYCGHKKPWGNFLPAGNGIWYKTKPPKGPSPSEEEKDKGFQRVPPTRWGNFYNP

SEQ ID NO: 258821 - protein, 181 aa, Zea mays
  unsure (1)..(181): unsure at all Xaa locations
  Clone ID: MRT4577_167631C.1.pep
MVILKLDFEKAFDKWEHATIIKVLRHKGFGDKWIHWVSMILDSGTLEALLNGVPGKRFHCKRGVRQGDPLSPLLFVLATDLLQSIVNKACDCGILRLPLPSNCGPDFPIIQYADDTILIMEACPRQLFFLKAMLNSFAESTGLHVNYHKSNIFPINVTDQKXEILANTFRCKIGSMSFTYL

SEQ ID NO: 258822 - protein, 82 aa, Zea mays
  unsure (1)..(82): unsure at all Xaa locations
  Clone ID: MRT4577_167632C.1.pep
LLKNKTATADDDCKVGKAVVKGNGKPLCLIQPEGRRYEVYIPILRQGVPTTAGAELRARRYGGGYTSAVXANRQGIARSISV

SEQ ID NO: 258823 - protein, 80 aa, Zea mays
  unsure (1)..(80): unsure at all Xaa locations
  Clone ID: MRT4577_167633C.1.pep
KYPHSKNSPNTFFPSNYQPNWVPDNLHNLKKLTQIFHSQVPGPQTPAQHHHHVPDLVQKHTFXXPPKKQPQLHVXXXKQS

SEQ ID NO: 258824 - protein, 97 aa, Zea mays
  Clone ID: MRT4577_167634C.1.pep
PRVRSAFPSASLAESIWGSAGGAMLMARFAVVAGIVALLAVVAAAQAPTTAPKAAPRMAPLSPPFVLAPSTYAPASDTHTFWPIVYVPLSSLGPFRS

SEQ ID NO: 258825 - protein, 130 aa, Zea mays
  unsure (1)..(130): unsure at all Xaa locations
  Clone ID: MRT4577_167635C.1.pep
MARFQETKPDLLNSGSDTRMMAEARAPKARKPYMITKQREKWTEEEHKLFLEAMQLHGRAWRRIQEHIGTKTAVQIRSHAQKFFSKVTRDSSGDSGGSSSGGAGPPIQIPPPRPKXRKSVHPYPWHQRSA

SEQ ID NO: 258826 - protein, 40 aa, Zea mays
  Clone ID: MRT4577_167636C.1.pep
DAERGVSRHMHRTHTRTRVLNSPLQADHPHGNQCWSKETN

SEQ ID NO: 258827 - protein, 44 aa, Zea mays
  Clone ID: MRT4577_167637C.1.pep
DRSHLLMYSQLHEWMLKCHSKGNALMNDLVDTLDLYSSMFARLL

SEQ ID NO: 258828 - protein, 186 aa, Zea mays
  unsure (1)..(186): unsure at all Xaa locations
  Clone ID: MRT4577_167638C.1.pep
MTTKLDQSSAEHRPAKFAAPSSLTPKISMFGAKAGFIIPKNKLAGSLVIRSTSDKNETPTASNEDSSRHVHRKTKWGPDLALDPVVCKGRALAYQTRVEQISKQLKSGALDTSEIDGSVSAGNELNSIGPDILKENELXNVELLELERRELIGEILRLNPGYKTPENYKPVLRETXIPVPAEHTQE

SEQ ID NO: 258829 - protein, 48 aa, Zea mays
  Clone ID: MRT4577_167639C.1.pep
AGTTTTTTTQTLIMGVAPSKGGVEAAAGAENGGCKCGANCTCDPCTCK

SEQ ID NO: 258830 - protein, 168 aa, Zea mays
  Clone ID: MRT4577_16763C.1.pep
KKNLKKKKGGKKKKKKKKKGEGRKKRSGAFFYEAPSFPPLSFRLTLIFFAWPRVIKTLPPCFRGGGGGETTLLSPQFSFSLRLPPFLHRRWATYRFAPTHAPSLNSNCGTPPCTGAIPPCRGFFIPPSGGVLLTLGHYPPCPFFLPPFLFFLSSLFFAPARRRFPALP

SEQ ID NO: 258831 - protein, 47 aa, Zea mays
  Clone ID: MRT4577_167640C.1.pep
MAAKGDGPAIGIDLGTTYSCVGVCVSLPVRDFFIDQSKWIAPSDAPF

SEQ ID NO: 258832 - protein, 78 aa, Zea mays
  unsure (1)..(78): unsure at all Xaa locations
  Clone ID: MRT4577_167641C.1.pep
MSCCGGNCGCGAGCKCGSGCGGSKMYPDMAEQVNTTTTTQTLIMGVAPSKGGFEAAAGAENGGCKCGANCTCDPXTCK

SEQ ID NO: 258833 - protein, 148 aa, Zea mays
  Clone ID: MRT4577_167642C.1.pep
WNRGHGLILFCTLGPHSTTQHSLSAILAPGRTGQDPFFFFFFFFLMEQGAWPDAVLHTRPTQHNTTQSDCYMSPRKDRTGHDTTRHGANISVQLFVPPSVPPLEQGDGADRARHAMPWPMARAADCLTDSNKTQKTTLLQYYILELIN

SEQ ID NO: 258834 - protein, 402 aa, Zea mays
  unsure (1)..(402): unsure at all Xaa locations
  Clone ID: MRT4577_167643C.1.pep
MGKGDVATRSKSQKSPAIQNEQSTPANPPTAYPDWSQFQAYYNAAGTAPVTPPFFHPSVAPSHQGHPYMWGPQMMSPYGTPPPYAAMYAQGTPYQQAPMPPGSHPYSPYPMQLPNGTVQTPTSGAGGTATDKSNKNKRKASLKRSKGSLGSLDVVAVKNNKSPAKPSTSSSNEGSSQXNFFIFFVILTDKLLNPLSIXSESGSGSSSEGSSTNSKSGSRVKDNSEQGQGNDARSKCTQSSVVEPTQPSSGSVVLNPMMPFWPVPPPMAGPATTLNMGVDYWGTPASVPMHGKVIAAPTSAPSSNSRDIVLSDPTIQDGRELKRQKRKQSNRESARRSRLRKQAEWEEVANRAVLLKQENSSLKEELKQLQEKCDGLTSENTSLHEKLKALEDEKSNGNWYKD

SEQ ID NO: 258835 - protein, 75 aa, Zea mays
  Clone ID: MRT4577_167644C.1.pep
MSCCGGNCGCGAGCKCGSGCGGCKMYPDMAEQVATTQTLIMGVAPSKGGFEAAAGAENGGCKCGANCTCDPCTCK

SEQ ID NO: 258836 - protein, 70 aa, Zea mays
  Clone ID: MRT4577_167645C.1.pep
SARRSRLRKQAEWEEVANRADLLKQENSSLKEELKQLQEKCDGLTSENTSLHEKLKALEDEKSNGNWYKD

SEQ ID NO: 258837 - protein, 75 aa, Zea mays
  Clone ID: MRT4577_167646C.1.pep
MSCCGGNCGCGAGCKCGSGCGGCKMYPDMAEQVTTTQTLIMGVAPSKGGFEAAAGAENGGCKCGANCTCDPCTCK

SEQ ID NO: 258838 - protein, 59 aa, Zea mays
  unsure (1)..(59): unsure at all Xaa locations
  Clone ID: MRT4577_167647C.1.pep
PEKKQILFINKMGSQIFFHTYMLNGGDPTCHLKVDTYLFRXXQHVGTLGGYMVTNHKIS

SEQ ID NO: 258839 - protein, 76 aa, Zea mays
  Clone ID: MRT4577_167648C.1.pep
MSCCGGNFGCGAGSKCGNGFGGCKMYPDMAEQVAPPTQTFIMGVAPSKGGFKAAPGADNGGCKCGANCTCDPCTCK

SEQ ID NO: 258840 - protein, 295 aa, Zea mays
  Clone ID: MRT4577_167649C.1.pep
MAPLSPRLVVPVDVKKLPREQKVPLHNRWHPDIPPVADVTEGELFRVEMVDWSGGRVRDDNSADDLKFMDFTIAHYLSGPLRIVDSEGVPASPGDLLAVEICNLGPLPGDEWGYTAILERENGGGFLTDHFPSARKAIWYFEGIYACSPQIPGVRFPGLTHPGVVGTAPSLELLNIWNEREKSLSETSPETIKLCEVLHQRPLAHLPTPENCLLGKVQEGTAEWHIIANEAARTIAGRENGGNCDIKNLSRGSRIYLPVFVEGANLSTGDMHFSQGDGEISLCGAIEMSGFLELK

SEQ ID NO: 258841 - protein, 176 aa, Zea mays
  Clone ID: MRT4577_16764C.1.pep
MAKGGGAPRLRVIDQCLRQHRAYQTGVVLESQPWRPQRGLPERAVSILRAWMFERWGGPYPSDVDKHILARQTGLSRSQVSNWFINARVRLWKPMVEEMYSEEMKDPKEGACSNANSSVNTGAGYASEELGQPLGHGGACGGVDEQKPTRAQLVHDAGSLASVVSIGSSRDQQQIS

SEQ ID NO: 258842 - protein, 85 aa, Zea mays
  Clone ID: MRT4577_167650C.1.pep
ASACIVNCPCCRSSFHYTQLPNPLQAYTSTYQLRRLLRLIIVSKQWLWPQPLCQCCSLILRRMPLITTTSSTFTSSSSSSMSSSP

SEQ ID NO: 258843 - protein, 75 aa, Zea mays
  Clone ID: MRT4577_167651C.1.pep
MSCCGGNCGCGAGCKCGSGCGGCKMYPDMAEQVTTTQTVIMGVAPSKGGFEAAAGAENGGCKCGANCTCDPCTCK

SEQ ID NO: 258844 - protein, 221 aa, Zea mays
  unsure (1)..(221): unsure at all Xaa locations
  Clone ID: MRT4577_167652C.1.pep
FVCAVSSIYLIHLCEKKKKKKKKNQIKNDEPKGLQREYFLYFVPRRTVACEKILEEEKVHQKLTFGEYSLYLVPLDDDVLSLELDHSLQECLIEGDTSSIWHVAKAIHKLEFAFGVIPNVRAKGVASTKAAELLNSMQLEDPVNMDDMGIPEINTVILLDREVDMVTPMCSQLTYEGLLDEMLQINNGSVXEVDASIIGAQQDGKKVKVPLNSSDKLYKEI

SEQ ID NO: 258845 - protein, 133 aa, Zea mays
  unsure (1)..(133): unsure at all Xaa locations
  Clone ID: MRT4577_167653C.1.pep
NKSTYVSSPRWRVVKELVFDYCGVRWLXCCIENLXGFGGGGXFLGGXXXFXKMVMGWEWXLFFLGGGKTTKRGPGGVGIPKILKIIFSPRGAPKGGEILGGVNPPPQKKXFFFFFFFKKKKNXTLFFFFGGVG

SEQ ID NO: 258846 - protein, 44 aa, Zea mays
  Clone ID: MRT4577_167654C.1.pep
PLVYFIYKRGYVVMPYANLKILPSIGDQQKKMLFSNIKNGTLVF

SEQ ID NO: 258847 - protein, 77 aa, Zea mays
  Clone ID: MRT4577_167655C.1.pep
QPSEGPHQEHNVHTLYPTEGHCHHGLPIPERRHRLLRETYPPAILGSQRATRCYPSCANPNLPATWPSNLHSPWHDT

SEQ ID NO: 258848 - protein, 228 aa, Zea mays
  unsure (1)..(228): unsure at all Xaa locations
  Clone ID: MRT4577_167656C.1.pep
MVQPPGRRSLPDWRSGLPEDLLESIGKRLASGHDAAAFRSACSPWRAAVPFAIFGPLLLLPFDADSDRVGFYCVSEKKVFSKTLPDVRGKVPCGSSCGWLALMDEAAAVTLLNPFAGAGAGAGAGARRIELPPAGEHVAAASSSEPVYKVHGRWVLRSTDDYGGDIDAGRVIELQDMRDVFFREIVLSAPXDAGSECVAMAMLGCSTEVAFCRVGXDNAWTLLDTKLD

SEQ ID NO: 258849 - protein, 106 aa, Zea mays
  Clone ID: MRT4577_167657C.1.pep
KPPWRSIFKPPLPAFWSVHLSRGPARFFSVKARLAPPAIYLRLLPPLAPQALPFRLPCLLWCVELLPDSPFSQETPFSMVWPRPDSAPYMERWAPPPPRSKINKTN

SEQ ID NO: 258850 - protein, 77 aa, Zea mays
  Clone ID: MRT4577_167658C.1.pep
TGRLPYSFKAEITVKATQDPFNKHHKHQFIALHLKNPDQGNTLASPTLTCCQKTPLSQPGITHTWPTRFPLPKACTP

SEQ ID NO: 258851 - protein, 196 aa, Zea mays
  unsure (1)..(196): unsure at all Xaa locations
  Clone ID: MRT4577_167659C.1.pep
FHSNNXYIASCSLDKTVRVWEISKGTCIRVVYGVSSQLCICFHPVNNNLLLVGNANKEINAINFSTGRVISKLNFDDAVTALDIDHTGQFIFAGDAQGYIYTVSVNSHTGSLSRTHKNKSSKSKSPITTIQYRTFSLMARCPVLLSCAQDGNLSFFSITTDAKGYLTLICSLKLASRVQTIRASFCPLLSLEKESS

SEQ ID NO: 258852 - protein, 74 aa, Zea mays
  Clone ID: MRT4577_16765C.1.pep
VPHIFLFKVASGIRKTVKGLDALTNFVSIQAASWRASLQEELCLGSQNACPEHRTSTPPRKNVSSFHATAAFAR

SEQ ID NO: 258853 - protein, 96 aa, Zea mays
  Clone ID: MRT4577_167660C.1.pep
THASAHASAETNGRASSLLVRCVRLHSFCRFIQHLMTIFSSSVAQTSIYDFPVYRSSRPSMSPSSSLFSLTQMIGSQPVPEAGSSNTLLLPFLLPQ

SEQ ID NO: 258854 - protein, 395 aa, Zea mays
  unsure (1)..(395): unsure at all Xaa locations
  Clone ID: MRT4577_167661C.1.pep
MAAADSATASSSSPPECPAAPSIPTDPDFLSCVLQPPTSSSSRPDADYAALRRLLLRRKPPSALQHRMEWRCNDNGYVAYRNFLLRRIDGGSAQSTPSNSGRWAPSPVHAILSEADSWNYMRDLRSNSGVLNQAISIGSKQSDTERHVRFAEPAYSFVGMHCIFDNCKASVTILKFGRANSDLLAYGAADGSLMVCQVSEPPSVLQKMIGHSKNITDFDFSSNNQYIASCSLDKTVRVWEISMCTCIRVVYGVSSLLCICNVTVAMTDHALHLIPLPFSTSXAFFILRTRSLSTTMSIQYLGLLTLPAXPWPPAAPACWWAATLCSPTGSASSTPITSASTCTAPITTIQYRTFSLMARCPVLLSCAQDGNLSFFSITTDAKGYLTLICSLKLAS

SEQ ID NO: 258855 - protein, 40 aa, Zea mays
  Clone ID: MRT4577_167662C.1.pep
LVAKSSILLDVKPWDDETDMAQLETCVRSIQLDGLVWGAS

SEQ ID NO: 258856 - protein, 77 aa, Zea mays
  Clone ID: MRT4577_167663C.1.pep
EQASKYLIIQFGGRRSKTQHTRVSYAEKAEASIKNGMWICGNTGLKKNTLLAPMAGALAKNRNKAQKGFHQISIRIL

SEQ ID NO: 258857 - protein, 136 aa, Zea mays
  Clone ID: MRT4577_167664C.1.pep
ETPPRLARTRCRPPPGLPALHLQRAPAQYYPSAEYWVRSCLLVRDCAASGPGRGGWIPQRREQVPRAIPHALATLDTRFCFADAQPRPILPQFSSLERYAIEHRILWMRLLPHSWFLSKARLFGGLVGWVRPKWIP

SEQ ID NO: 258858 - protein, 53 aa, Zea mays
  Clone ID: MRT4577_167665C.1.pep
RRRRHESPLELYPVLSMLLHLDTLYLSNLNLNHETKTIIRDTLITTYIVTYES

SEQ ID NO: 258859 - protein, 97 aa, Zea mays
  Clone ID: MRT4577_167666C.1.pep
QDSRGSPPPLPRNTRALGACPCPFLRSLVRRLPRAPALASFPGLTAVSRLRSHMAHDATSLWGFRYLQTHITCYLYVQFQVLELIPGHLDSLIEAQV

SEQ ID NO: 258860 - protein, 67 aa, Zea mays
  Clone ID: MRT4577_167667C.1.pep
GKDPGIVLRNPHPPEPEAIDMNNDAANGQTPQHFRSARSKNVARHYPRISTRAARARANSSFDGRCV

SEQ ID NO: 258861 - protein, 51 aa, Zea mays
  Clone ID: MRT4577_167668C.1.pep
QHKEFTSYNCPSLIIHTSFQWDNTTTIKRRRVVTRHDNQRGVTVSYNHSLS

SEQ ID NO: 258862 - protein, 95 aa, Zea mays
  unsure (1)..(95): unsure at all Xaa locations
  Clone ID: MRT4577_167669C.1.pep
PGPHFDFRFLRRLKSSFSCLFDLPDPRPLLCEDGWPSTFWPVVFGSLRDGGVSISSPGSFLFNSFRDMLSELSTLKLLNLDADISSTLLXIALSW

SEQ ID NO: 258863 - protein, 55 aa, Zea mays
  Clone ID: MRT4577_16766C.1.pep
TVLSSNLHDISLAARTHASYNPSFYRVQTVYTGHTDTYTTGTLSQSIGPQIFSTH

SEQ ID NO: 258864 - protein, 65 aa, Zea mays
  Clone ID: MRT4577_167670C.1.pep
LPRPGYLAPPNGAAPVEIVPIYPPTKPYSRDSIPGPCPRYADGQHVCPWACARYRWPDGLPSAAS

SEQ ID NO: 258865 - protein, 51 aa, Zea mays
  unsure (1)..(51): unsure at all Xaa locations
  Clone ID: MRT4577_167671C.1.pep
KAIDNFDIRETPEPRRDILXYKLLPGFKPSNIKPFLNYLDPKSNYVTSSNH

SEQ ID NO: 258866 - protein, 78 aa, Zea mays
  Clone ID: MRT4577_167672C.1.pep
MLSVAGSPRFRVYDLDFGFGRPEKVDMVSVAKTGAISVADARVGGGGVEVGISLPVASGDMDRFRQSVADGMEWLRLL

SEQ ID NO: 258867 - protein, 32 aa, Zea mays
  Clone ID: MRT4577_167673C.1.pep
YQQGLGIGCTYGIAYMSWTLVFWYAFFFIRNG

SEQ ID NO: 258868 - protein, 121 aa, Zea mays
  unsure (1)..(121): unsure at all Xaa locations
  Clone ID: MRT4577_167674C.1.pep
RPGQALNLNLMVDPVLVAIDPXVSFKTVFCFLITPHSPNPFFHAVITFYWRPFFTDRSLLRLLGFVLTTNIINGGLKCXSSTSPPSSXSFIDRVFFYNRYCFLLKLLYFDNFVCMIHNPFG

SEQ ID NO: 258869 - protein, 223 aa, Zea mays
  unsure (1)..(223): unsure at all Xaa locations
  Clone ID: MRT4577_167675C.1.pep
MTSYMLSATTVPVQQEGGLXSYISGLRSSAALPMRRNVTSDHFMSAVYFRTHAVGTSGGPRRAPTQAKVKAAINGLGRIERNFLRCCDGRGDASPLDVIAINDTAGVKQACQLFKHDSTLGIFYADVXPVCDNAISVNGKDIKVVCERNPSNLTWGEISIDLVIXGTGVFFXRYGAAKHIQWAAKKVIITAAGKADIPTYVVSANADQYNXDVAIISNAFCNI

SEQ ID NO: 258870 - protein, 156 aa, Zea mays
  Clone ID: MRT4577_167676C.1.pep
WACQRRSPSHRAGPGGAAGRQRRRGQGRCVALQERCRQRERGSAGGWGGEWRKRSKSQTCAPGDVAACRPEAAAAAAGRARVLPALAPPSSALPDGGRCCGQVPRPRGRGLEVAAAALPRWWPRPGQAPSHRHRVIWSGICGRNLGSCSLFRVRVG

SEQ ID NO: 258871 - protein, 119 aa, Zea mays
  Clone ID: MRT4577_167677C.1.pep
RRHLSWLFARGRGQLIGPLNLLNTLNGCNKYSNIQVLDTSTVSYRVLAVSYTWSTVVVHALMKIKNTVPELISHFCLNLNYLFCMINDQPFSSYFFSTLFPILNNLFTFLVALCKSSLK

SEQ ID NO: 258872 - protein, 171 aa, Zea mays
  Clone ID: MRT4577_167678C.1.pep
GSTANARGEFSYVMAPNRVLSTRKHGHGEISSPGDRFAPAQRQSPTRDTADTFHYHQRFTNSRFWRPNDGGEAPAWWRIGRARTALSQRATANAAPPVAMHTPSGPQRTIPHGTQWQHRFLPPIRLLGARKGEKRHWRYWRSTADRRRAQSSGRVRQGRARPGRPRGTQLP

SEQ ID NO: 258873 - protein, 62 aa, Zea mays
  Clone ID: MRT4577_167679C.1.pep
GFFFFMGPEALLTLGPKLLGLGRLNGPPRSFFVKTFNFSPFSPPFGGVKGAKTRAPARILFF

SEQ ID NO: 258874 - protein, 29 aa, Zea mays
  Clone ID: MRT4577_16767C.1.pep
LVTVNYPCGSPLKKNGLWPFNNYLSGGSN

SEQ ID NO: 258875 - protein, 110 aa, Zea mays
  unsure (1)..(110): unsure at all Xaa locations
  Clone ID: MRT4577_167680C.1.pep
EGDGTQRRRGTLHREWLAGHGVCWARRTYERRLEGFAXXISTEISLSRLLAAASLRLELGTSAPRETAAEASSFRGTSVCLSSEVQSSDEKPILLVEDILEEFEDDEKRD

SEQ ID NO: 258876 - protein, 70 aa, Zea mays
  Clone ID: MRT4577_167681C.1.pep
AHGTQIRIGISASARAGTPATPSRQRFRNRRRRTIRFHLHGSRSSTVRSPSPPNPTKPSQVSSFAIPRRP

SEQ ID NO: 258877 - protein, 287 aa, Zea mays
  Clone ID: MRT4577_167682C.1.pep
MSCSLGVIDGHLWMTIFKRVYYPHAACLDSTSVIYAKEIDQASPISVLQPLSEDCSDSENIRREPADPYDLQLRLELGTSAPRETAAEASSFRGTSVCLSSEVQSSDEKPIQLVEDILEEFEDDEERDFSYLLDILIASGIHGTAEDQMYKVCQSLDHPAGDDVFEKLEKKYNKVVQWSRSDRKLLFDMVNTILSQILAPCLNMQPWVYTTRNLAPLWGADGLLEKVLQMLVQRREHLAPSETKPEKKGFDPKWPGLADCIDRAGRDIERMVKDDLLEELVVELLSS

SEQ ID NO: 258878 - protein, 438 aa, Zea mays
  Clone ID: MRT4577_167683C.1.pep
LCIGRIRQTATFFRISSNNSRAAAAALRRLLLGSVPPPGSRPPPQSLSSFRDAEGAAQMGCLLLDHLSRLPGTSPVPARSLARLQKPLGLTVPVLRFLRRHPTLFSEQPHPRFPTLLSFSLTAASHTLLSRLADAYAHDAHLRLARLLLLTRSRSLPLASVLPLRFDLGLPFNFAAAFPASHPGVFAVANNRISLRSTSGLPEDIAVSSLQRRHAAAIDSATYRALSRPPSSSSAPLAFPMRFPRGYGGMKKVKAWMDEFHRLPYISPYDDASGIDPESDIYEKRNIGLLHELLGLTVHKMVRRNAIRLLREELGLPHKFTRLFTRYPGVFYLSLKCKTTTVVLREGYERGKLVEQHPLAAVRDKVHYVMRTGVLYRGKGLSKLVLDEDVTEEEGALNGEEFEGEGMDGDADVECFRMEIVDDDGSADDVDDEGYSDG

SEQ ID NO: 258879 - protein, 78 aa, Zea mays
  Clone ID: MRT4577_167684C.1.pep
SLTQLGLQFSLIYRFEGSQPTKLDKIFYILTNLTSKGTFFGEVEKNFSLQRSSNPMEFTSIMPPEARRLDQKNCHPLL

SEQ ID NO: 258880 - protein, 226 aa, Zea mays
  unsure (1)..(226): unsure at all Xaa locations
  Clone ID: MRT4577_167685C.1.pep
MQKVRLKWVKNRGLDHLIERTTSIRASCLLLDHLSRLPGTSPVPARSLARLQKPLGLTVPVLRFLRRHPTLFSEQPHPRFPTLLSFSLTAASHTLLSRLADAYAHDAHLRLARLLLLTRSRSLPLASVLPLRFDLGLPFNFAAAFPASHPGVFAVANNRISLRSTSGLPEDIGVFSLQRRHARGXDSATYRALSRAPSSSSTPLAFPMRIPXGXYGGMKKGKAWMG

SEQ ID NO: 258881 - protein, 90 aa, Zea mays
  Clone ID: MRT4577_167686C.1.pep
QDETVLKNFQDEGEYIIHKRGVKFQLYKTSSSSFFKYNRPLPFLPPTPKAMFPTYDDCPTRHLYCCCCCVRRGAGELIGRDQAGCRELSL

SEQ ID NO: 258882 - protein, 259 aa, Zea mays
  Clone ID: MRT4577_167687C.1.pep
AALEAAVSKKSRHPACSLPISSPAPRRTQQQQRHWGEFVTPGLLFLYIAGWIGWVGRSYLIASSTAAFAAKPRLPRARLTVACSATGGDGNGSSSSVSLASSVKTFSAALALSSVLLSSAATSPPPAAADIAGLTPCKESKAFAKREKNSIKKLTASLKKYAPDSAPALAINATIEKTKRRFENYGKFGLLCGADGLPHLIVSGDQRHWGEFVTAMREIIIDVELATRLLPRGFIWPVAAYRELINGDLVVDDKDIGYY

SEQ ID NO: 258883 - protein, 203 aa, Zea mays
  Clone ID: MRT4577_167688C.1.pep
APQLHAGRSSSVSLASSVKTFSAALALSSVLLSSAATSPPPAAADIAGLTPCKESKAFAKREKNSIKKLTASLKKYAPDSAPALAINATIEKTKRRFENYGKFGLLCGADGLPHLIVSGDQRHWGEFVTPGLLFLYIAGWIGWVGRSYLIAISGEKKPAMREIIIDVELATRLLPRGFIWPVAAYRELINGDLVVDDKDIGYY

SEQ ID NO: 258884 - protein, 262 aa, Zea mays
  Clone ID: MRT4577_167689C.1.pep
MAISPRLLLPLLLAAAAASAFAGANDLVGELQSLRSRSPAGVIHLTDTSVTRFLSSPAPRPYSVLVFFDATSLHSKTDLHLPQLRREFALLSASFHANNPDSSDLFFADIEFSESQHSFSQFGVNSLPHVRLIRPEHSRLADSEQMDQSHFSRLADSMVEFVEARTGLEVGPIVRPPLVSRNQMILLGLLFLISIPFGIKRIMEGDTLLHDRKLWMAGALFVYFFSVSGGMYGIIRHTPMFITDREDPNKLVFFYQGSGMQL

SEQ ID NO: 258885 - protein, 150 aa, Zea mays
  unsure (1)..(150): unsure at all Xaa locations
  Clone ID: MRT4577_16768C.1.pep
SRRPGPGSPIYPHSSPPSCSLYSLRYRADPPSEHHLLPTTDSIRWPSYLDKNLMILASSDGWEPEWSEAVVTKPPTMPHMIEDDCADYAIPLLNVNSEILCEVTQHCNTNAHGARLPVAASNGXSTPDCRSAPASPXSVEDHLNWDVNFD

SEQ ID NO: 258886 - protein, 80 aa, Zea mays
  Clone ID: MRT4577_167690C.1.pep
KNRVQQTRRTARDRPRRNSRDLIHWRHLPLAMVPDQWYDTNGGGAGSATTLPDGRLAMLYTGSTNASVQVQCLAVPADDA

SEQ ID NO: 258887 - protein, 232 aa, Zea mays
  Clone ID: MRT4577_167691C.1.pep
MAALAASSTAAFAAKPRLPRARLTVACSATGGDGNGSSSSVSLASSVKTFSAALALSSVLLSSAASSPPPAAADIAGLTPCKESKAFAKREKNSIKKLTASLKKYAPDSAPALAINATIEKTKRRFENYGKFGLLCGADGLPHLIVSGDQRHWGEFVTPGLLFLYIAGWIGWVGRSYLIAISGEKKPAMREIIIDVELATRLLPRGFIWPVAAYRELINGDLVVDDKDIGYY

SEQ ID NO: 258888 - protein, 136 aa, Zea mays
  unsure (1)..(136): unsure at all Xaa locations
  Clone ID: MRT4577_167693C.1.pep
METSSRLVPLLLLCLHVLVSCSFAAHMLHHQLDITRRDGRGKVLDNRRLMTLSLDHTSGSGIHPRQEYLFGKIHMQLRLVTGNSVGTVTDYYLXPHGGAHYEIDLELLLKAYGEPYTLHTKVLTRRQGQKQQQLRI

SEQ ID NO: 258889 - protein, 68 aa, Zea mays
  Clone ID: MRT4577_167694C.1.pep
RAGGVVLVGVPLFGVPAGAVAVGGALAPVGLLGLSVGLARWFVVGLLACGVTPLGFFYLPRFFLAAAG

SEQ ID NO: 258890 - protein, 141 aa, Zea mays
  Clone ID: MRT4577_167695C.1.pep
VYGRKRIVKYGGDAAGFRASISTNEPGTESKAPADVYMSAPAAPAYAPAPAPAYAPAPAPAYAPAPAPAYAPARSYAPAQSYGPAPPMPPMPPMPKLSAPAYAPAAPAYAPAPARSYAPAASYAPAPSYAPGRSYASAPSY

SEQ ID NO: 258891 - protein, 125 aa, Zea mays
  unsure (1)..(125): unsure at all Xaa locations
  Clone ID: MRT4577_167696C.1.pep
TWGRHTVSTADSTDVLAWPTQDHSLHNGFXPTGEELEYKIILYRQTQRTQGFGFGTFSTEDQLLHDIEVMNHKELDRRLFFLNYAPLSLGRGGDTPANDCRPWRIPATALLLAQIPPEFTMQLYV

SEQ ID NO: 258892 - protein, 60 aa, Zea mays
  Clone ID: MRT4577_167697C.1.pep
RFRQAAPAAPPSSRSSPDPPTDTENAPLGSQHDTTTILCREHRPLQAPTLLPQLDRSTTL

SEQ ID NO: 258893 - protein, 67 aa, Zea mays
  Clone ID: MRT4577_167698C.1.pep
RPQATATGQTPLLDDPPCSPIVLHIGDSEEADGVVDEPNSFKDDLQDTFEQEGDAGDFDGDFIDDEF

SEQ ID NO: 258894 - protein, 327 aa, Zea mays
  unsure (1)..(327): unsure at all Xaa locations
  Clone ID: MRT4577_167699C.1.pep
MADASPRTETSTDDTDDNNGLEPGRGGLVASDSSDRSKDKHGDQKTLRRLAQNREAARKSRLRKKAYVQQLENSRLKLTQLEQELQRARQQXFLSQGIFISSSVDQSHSMSGNGALAFDMEYARWLEEHNRQISELRAGVSAHASDTDLRSVVDKIMSHYDEIFRLKGNAAKADVFHVLSGMWKTPAERCFLWLGGFRPSEVLKLLSTQLEPLTEQQLSGISNLQQSSQQAEDALSQGMEALQQSLAETLAGSLSSSGSTGNVANYMGQMAMAMGKLGTLENFLRQTLQQMQRILTTRQSARALLVISDYSSRLRALSSLWLARPKE

SEQ ID NO: 258895 - protein, 159 aa, Zea mays
  unsure (1)..(159): unsure at all Xaa locations
  Clone ID: MRT4577_16769C.1.pep
LASSFDRVRRSTPTTGGDERGGLRQTARRRPEGRRRHGQRRRRASGRQEAGGGXRWGFVQFFFVLAVVFCVLLYAPRVLVLSPYGYSIDVGLFAPTPTTATASSVPQRVAGGNAVALDLDNQVRSPCSSMRDHTICXDXSSVHTXDVGFMXAGDVRTDA

SEQ ID NO: 258896 - protein, 164 aa, Zea mays
  Clone ID: MRT4577_1676C.1.pep
MASLRLVATLAPSGPPPPPRRKQRRPSSAVRLTGGMGLAAAAAVAAAAAASPPALAALSEPANALSLPTWAVHVSSVAEWVTAMWLVWDYGEKTGLKGWKGLSWGMVPLLGGAMCACTWHFFYNSESLEVLVALQGALTVVGNITMCIAAYRIFKASQEGSKTS

SEQ ID NO: 258897 - protein, 67 aa, Zea mays
  Clone ID: MRT4577_167700C.1.pep
NFEKPFLVSLHEQSRLENPISSQSSISEFVKSCPLLRGSPCSNWRSGHCLRSDRGNTGWLHGRKLLK

SEQ ID NO: 258898 - protein, 329 aa, Zea mays
  Clone ID: MRT4577_167701C.1.pep
MADASPRTETSTDDTDDNNGLEPARGGLVASDSSDRSKDKHGDQKTLRRLAQNREAARKSRLRKKAYVQQLENSRLKLTQLEQELQRARQQGIFISSSVDQSHSMSGNGALAFDMEYARWLEEHNRQISELRAGVSAHASDTDLRSVVDKIMSHYDEIFRLKGNAAKADVFHVLSGMWKTPAERCFLWLGGFRPSEVLKLLSTQLEPLTEQQLSGISNLQQSSQQAEDALSQGMEALQQSLAETLAGSLSSSGSTGNVANYMGQMAMAMGKLGTLENFLRQADNLRLQTLQQMQRILTTRQSARALLVISDYSSRLRALSSLWLARPKE

SEQ ID NO: 258899 - protein, 84 aa, Zea mays
  unsure (1)..(84): unsure at all Xaa locations
  Clone ID: MRT4577_167702C.1.pep
LQQDTSKLLNRWTFDDVQVNGISLNHYLAESATKTAMYLPHTGGRYSNXRFRXAQCPIGDRLXTSLTVCTGRNNSQKVMAVRNI

SEQ ID NO: 258900 - protein, 97 aa, Zea mays
  Clone ID: MRT4577_167703C.1.pep
PRLHSRRKVFVPSDNHNTTGSQNENPGPHVAHGNGFPSPIALRPHRLLRHAIAGLIAVRVECSSGHRLRSEELCRATDNCGLCAAWLCRNTYDNCGL

SEQ ID NO: 258901 - protein, 55 aa, Zea mays
  Clone ID: MRT4577_167704C.1.pep
LVRHHLRIPVGDKPLVCCHVQHLHHKLELIRQISIMAWANASYSYISYTHNLQPC

SEQ ID NO: 258902 - protein, 54 aa, Zea mays
  unsure (1)..(54): unsure at all Xaa locations
  Clone ID: MRT4577_167705C.1.pep
ALLVQVHCNRSSLRSITCERVQTVXRSYIHSTHSPRGIVIQHSCLLLNCFSTRR

SEQ ID NO: 258903 - protein, 54 aa, Zea mays
  Clone ID: MRT4577_167706C.1.pep
QNAEPVALITPNPGSSGRPPIPVTSLKAGNEVLVRKQGPPRPPGIEIQGFIVEK

SEQ ID NO: 258904 - protein, 68 aa, Zea mays
  Clone ID: MRT4577_167707C.1.pep
FFFFFFFFFFFGFFFFFFPFFFFFWEGNLHAIQAEKDCFCLPLFKRKPSICLNKQINFGKTPNAWVSQ

SEQ ID NO: 258905 - protein, 59 aa, Zea mays
  Clone ID: MRT4577_167708C.1.pep
DIYLTLLFYNFDHHSFHGVLGLIDRVIITFNRHRNSEIIHHWINKKVVIYNINVIRMYE

SEQ ID NO: 258906 - protein, 39 aa, Zea mays
  Clone ID: MRT4577_167709C.1.pep
PYKSIPRVLTTQDGQNCTPGHLSTSLTPAKLPYENSTDV

SEQ ID NO: 258907 - protein, 97 aa, Zea mays
  unsure (1)..(97): unsure at all Xaa locations
  Clone ID: MRT4577_16770C.1.pep
TYVLKGKFFFKGLLITDRAGIDRIWEPQXXGYDYRYCIAQSVNAXMDMNMICHRSEKSLDDIAYLMEADHIPTPRIDDAVERILTVKYISGVYEHPF

SEQ ID NO: 258908 - protein, 104 aa, Zea mays
  Clone ID: MRT4577_167710C.1.pep
MERRSGGAGSCLGLLAVAAVSTSIILVSYRLHRRLEADLRAMILGEGDDDGAADHDRRRPRGTTTTRRKKKVRFAADVAEPSSNSEEYRRRRARPSTTATSARR

SEQ ID NO: 258909 - protein, 73 aa, Zea mays
  unsure (1)..(73): unsure at all Xaa locations
  Clone ID: MRT4577_167711C.1.pep
FNFFFNFSFIFIFIFYFFFFYFYKFINFFFFLEVITIHRLVQVLLFSLLALNSKHTTEYIXPPAXXPXXPXRL

SEQ ID NO: 258910 - protein, 36 aa, Zea mays
  Clone ID: MRT4577_167712C.1.pep
LSWSVVINICTLFERGLVFGWKGKSVVFLRGPKNPE

SEQ ID NO: 258911 - protein, 164 aa, Zea mays
  Clone ID: MRT4577_167713C.1.pep
GIKGPFGKGGAFGKKFGVLGGGQSLETCFLKKPRGKNGGIKAGVPGCCPGPVLSFPGGPQNLIKSGLTFGAFFYLFGKVKKQQPGGGVPPGKGVRDPKGGKRVFSPLKLPPLEARGEFCKFQNFLSSKFWGKGVIPGEGRPVIYFGKGPWKRAKGQTGFFFPCF

SEQ ID NO: 258912 - protein, 255 aa, Zea mays
  Clone ID: MRT4577_167714C.1.pep
GRVDDTCVAMGEWVQHPQARTALDDILPCVDTAAAKEALNRSKEVNYQLVAVLNAALTNVSNRDFPPQVPPPLNYNQSGPPVPLLCSPYAADLRDRACAPGEVPLDAATPRQAWQRYVCRGVSADAASGAEVCTSPGRVTPSMYAQLTGAADVSYGLYHYGPALVALADCTFVRETFRSIGDDHCPGLSRYSGQVFRGLLAAAVAVLLAVLLWVVHSRERRRRSEAMEILRLASSPYKILLEERAFLKSPARPYM

SEQ ID NO: 258913 - protein, 54 aa, Zea mays
  Clone ID: MRT4577_167715C.1.pep
CNVPRSVHLISRFGVTLRVLIQSSRLLGQGRQCDGYSWHNDAAWSTPSGCRGCS

SEQ ID NO: 258914 - protein, 37 aa, Zea mays
  Clone ID: MRT4577_167716C.1.pep
PQKIIMGVLKKKKKKKKKKKKKKKKKKKKKKKKKKKK

SEQ ID NO: 258915 - protein, 202 aa, Zea mays
  Clone ID: MRT4577_167717C.1.pep
RPGDSYLRYPTFAISNHHSSFQLFNFSLFQSLKRETVTVMSLTARERRNPPTRRKSCAACTKAKRRCDFAIPACLRCSQRRIHCQYPSRVMREQFSSSEASVAVSPDYLTTDDSSPQLAESLPSDTPIIEDFNAVISGLDACSEDLGVLEFPLEDNTLKFVEQPWTLTAPSTQDFSHVPQRILNRLQWATDEIKRAPEKMVL

SEQ ID NO: 258916 - protein, 106 aa, Zea mays
  Clone ID: MRT4577_167718C.1.pep
HVGAVLCLRGHSRSISPSLSKDNSSTMHMGFLSVTRWRGCVMAVNQFLRLPLLRDYWSSIGGAGGDLCGDGVTFQLSNLTCARSIPGREGRAERGGGEQRRGMYRR

SEQ ID NO: 258917 - protein, 100 aa, Zea mays
  unsure (1)..(100): unsure at all Xaa locations
  Clone ID: MRT4577_167719C.1.pep
PLLALLDLLVCSTNAFIIPHSSLAPNATIPHVLPPATRIGCEHAAMQAYTLQLALAGSVLQQPIAQLQQHSLAHLNLQTISSQHLQLXLLPSLIHLAVVY

SEQ ID NO: 258918 - protein, 72 aa, Zea mays
  unsure (1)..(72): unsure at all Xaa locations
  Clone ID: MRT4577_16771C.1.pep
GWGQTSLGDMPESCIAAVLLYLGPTEICQVACLNRTFRDAASADCIWAAKLPSNYRYLAXXXXXXXXXXXXK

SEQ ID NO: 258919 - protein, 46 aa, Zea mays
  Clone ID: MRT4577_167720C.1.pep
NLKLAFPMHDTSLQTSFKPRHGYPSGGLRTIRSPKTCCDPACVLRR

SEQ ID NO: 258920 - protein, 180 aa, Zea mays
  Clone ID: MRT4577_167721C.1.pep
MTISDTTTSEVPVHEIPPAVLDVQEEEEIVSAAVPVSVHDVAPLQQAEIGKDVPKHVEKEVEVPQWLKSLAGEEAQDWRAFVRTRINGHTDRTYTHKQYRHQFRSKAEVKLFVDSNGMTTGIFKGRKLQKKKIAGMDAQGAGTSESAGRRASAYHARQKRRRSLGHQLSRSDEKMPPGFI

SEQ ID NO: 258921 - protein, 61 aa, Zea mays
  unsure (1)..(61): unsure at all Xaa locations
  Clone ID: MRT4577_167722C.1.pep
ARQWVMDXSAENLAPLAXXXXAPRYLRXRXXGLFRLVFSSLDRSFTRGRFGLCIPKQXPTR

SEQ ID NO: 258922 - protein, 90 aa, Zea mays
  Clone ID: MRT4577_167723C.1.pep
IFRPPQCFSFFFPPLRLGLRFPKLGPLVGSKVFNPFFPLISFSFQPPLGHVMARANQVPQSGNLNDPSTKNPMSWSRPMGPMFELGGLTL

SEQ ID NO: 258923 - protein, 71 aa, Zea mays
  unsure (1)..(71): unsure at all Xaa locations
  Clone ID: MRT4577_167724C.1.pep
MMDPALLDDVIRRLLEVKNLKPGKNAQLSESEIKQLCAAAKEIFLHQPNLLELEAPIKICGDVHGQXSDLL

SEQ ID NO: 258924 - protein, 91 aa, Zea mays
  Clone ID: MRT4577_167725C.1.pep
TQVQSTRRIGHQILPAAWISASGERGRSCNGRKGLAELVFRGCTQPGMCVAVGQGCYRLCCCSSCRHRIILPRDDGSFGLYMQKQSHYLPP

SEQ ID NO: 258925 - protein, 178 aa, Zea mays
  Clone ID: MRT4577_167726C.1.pep
MDPALLDDVIRRLLEVKNLKPGKNAQLSESEIKQLCAAAKEIFLQQPNLLELEAPIKICGDVHGQYSDLLRLFDYGGYPPQANYLFLGDYVDRGKQSLETICLLLAYKVVEDGYEFFASRQLVTIFSAPNYCGEFDNAGAMMSVDDTLMCSFQILKPARKMMGGSTNNKSGFKSFRGW

SEQ ID NO: 258926 - protein, 174 aa, Zea mays
  Clone ID: MRT4577_167727C.1.pep
RRRHDEDLPLVARRAAAAHRAAPPRPSPPAIRRADAQAGRQVQDLPVPAHPASPGRRGRQVLLRHPLPPGPPGAQELQRRGGGRAYGGGREAGDEAGYIVGMSTCYPRPGAVTVRDGEPLTVVSRYSSDRRHTGVMGLFYILVADHARQLPQQEGLCFSFPVQWCLPSWLSSNL

SEQ ID NO: 258927 - protein, 316 aa, Zea mays
  Clone ID: MRT4577_167728C.1.pep
MDPALLDDVIRRLLEVKNLKPGKNAQLSESEIKQLCAAAKEIFLQQPNLLELEAPIKICGDVHGQYSDLLRLFDYGGYPPQANYLFLGDYVDRGKQSLETICLLLAYKVKYPENFFLLRGNHECASVNRIYGFYDECKRRFSVKLWKTFTDCFNCLPVSALIDEKILCMHGGLSPELNKLEQILNLNRPTDVPDTGLLCDLLWSDPSNEATGWAINDRGVSFTFGPDKVSEFLEKHDLDLICRAHQVVEDGYEFFASRQLVTIFSAPNYCGEFDNAGAMMSVDDTLMCSFQILKPARKMMGGSTNNKSGFKSFRGW

SEQ ID NO: 258928 - protein, 157 aa, Zea mays
  Clone ID: MRT4577_167729C.1.pep
VAGCGVEFDVEEQSTVGAGGECVHVKTATQALPRGGDVVFGVAHQHAGGAGASLHGADGRLLCESAATYGGGREAGDEAGYIVGMSTCYPRPGAVTVRDGEPLTVVSRYSSDRRHTGVMGLFYILVADHARQLPQQEGLCFSFPVQWCLPSWLSSNL

SEQ ID NO: 258929 - protein, 55 aa, Zea mays
  Clone ID: MRT4577_16772C.1.pep
PWRRPSCSWPRQCRRSRRARGPSSFLLTMQLGYHCLIFSMLKRVSLVSKQCQCCH

SEQ ID NO: 258930 - protein, 316 aa, Zea mays; identical to SEQ ID NO: 258927
  Clone ID: MRT4577_167730C.1.pep

SEQ ID NO: 258931 - protein, 431 aa, Zea mays
  Clone ID: MRT4577_167731C.1.pep
MTKISRSLLVVIALVLLGPHLPPSEALTPKQGVRSKTFLSPPILLRPGDVADKFYYDIPFPRGHLALKSFNGEVVDERGAPVPLHETYLHHWVVQPYYALVVSAEGGSSRPRTIPARNAGVCSGHTLGQYYGLGSETRRTATWVPDPYGIEIGDPAAAPAEGYEQRWLLNVHAIDTRGAADRTMACTECRCDVYNVTADWRGHAIEPGYAGGLRCCYDGTRCGAAAEGAEGKARTVFLRYTVMWRDWSPAAVLPVRIYIFDVAGCGVEYDVEEQCSGGAGGECVHVKTATQALPRGGDVVFGVAHQHAGGAGASLHGADGRLLCESAATYGGGREAGDEAGYIVGMSTCYPRPGAVTVRDGEPLTVVSRYSSDRRHTGVMGLFYILVADHARQLPPQEVMVGQSKEACASASRSHGAYRHGCRATCEIFWC

SEQ ID NO: 258932 - protein, 146 aa, Zea mays
  unsure (1)..(146): unsure at all Xaa locations
  Clone ID: MRT4577_167732C.1.pep
MMDPALLDDVIRRLLEVKNLKPGKNAQLSESEIKQLCAAAKEIFLHQPNLLELEAPIKICGDVHGQYSDLLRLFDYGGYPPQANYLFLGDYVXDRGKQSLETICLLLAYKVKYPENFFLLRXXHECASVNRIYGFYDEXKRRFSVK

SEQ ID NO: 258933 - protein, 59 aa, Zea mays
  Clone ID: MRT4577_167733C.1.pep
FQSAEERQPMHNSVQRTLLPATTLCSSIISQVLNNTHCHDINITNMSVVCSTNPRVTTL

SEQ ID NO: 258934 - protein, 317 aa, Zea mays
  Clone ID: MRT4577_167734C.1.pep
MMDPALLDDVIRRLLEVKNLKPGKNAQLSESEIKQLCAAAKEIFLHQPNLLELEAPIKICGDVHGQYSDLLRLFDYGGYPPQANYLFLGDYVDRGKQSLETICLLLAYKVKYPENFFLLRGNHECASVNRIYGFYDECKRRFSVKLWKTFTDCFNCLPVSALIDEKILCMHGGLSPELNKLEQILNLSRPTDVPDTGLLCDLLWSDPSNEATGWAINDRGVSYTFGPDKVSEFLEKHDLDLICRAHQVVEDGYEFFASRQLVTMFSAPNYCGEFDNAGAMMSVDETLMCSFQILKPARKVLGGSTNNKSGFKSSRGW

SEQ ID NO: 258935 - protein, 68 aa, Zea mays
  Clone ID: MRT4577_167735C.1.pep
SILASRPFRRTQEFDKRYGVGWQCVVGANFGCFFTHSSGTFIYFSMERLSFLLFKAAVVAAAAAAVAS

SEQ ID NO: 258936 - protein, 260 aa, Zea mays
  unsure (1)..(260): unsure at all Xaa locations
  Clone ID: MRT4577_167736C.1.pep
STMQWLRGFDQRVRESIDYAICLNSVGSWSNDLWMHVSKPPENPYIKQIFEEFSDVSKEMGVSVGIKHKKINVSNPRVAWEHEQFSRFRVTALTLSEMSTPPEFLESTGGLHDTRESTDVESVIRTVRLVSESLARXSSLAINPRYVRSWLDLLSRTPRVAPFLQKNDPFIAALKKELSEHTSDVHVQSDALEGMFTFYDTTKATLNVYQVASVTFDLLFLLVLGSYLIVLFCFLVISTRGVDDLINIFRRPPSRKLKGA

SEQ ID NO: 258937 - protein, 92 aa, Zea mays
  Clone ID: MRT4577_167737C.1.pep
REKISKIKNGKTNVVYNVLKGAPPPPQLFMGYTWNKPFFREFLGFPPGRVRGAKFWPKNGCVGKVFGGRNLFLTFQQGTQVGEETPAPNSNG

SEQ ID NO: 258938 - protein, 98 aa, Zea mays
  Clone ID: MRT4577_167738C.1.pep
VVFLCSTRRDRHEDHRQASFPQHIDLYLQNFTVPPPAPAKLKATHIWPERGEGTVKCEWPSICSHFFFLCTRNFECNLAVFWLQFWLNYSGGLVKFFS

SEQ ID NO: 258939 - protein, 64 aa, Zea mays
  Clone ID: MRT4577_167739C.1.pep
PSTHAVLLKKKKKKKKKKKKKKKKKKKKKKKKKKKKKKGREPPPRARGPRHKQRRARKAPPPSG

SEQ ID NO: 258940 - protein, 40 aa, Zea mays
  unsure (1)..(40): unsure at all Xaa locations
  Clone ID: MRT4577_16773C.1.pep
VXLLPSIIGVVNTSTPTVYNXRLRPNTSVFNLIVLLYNNK

SEQ ID NO: 258941 - protein, 171 aa, Zea mays
  unsure (1)..(171): unsure at all Xaa locations
  Clone ID: MRT4577_167740C.1.pep
PWRRTSGAARAFFPLVLDIDLRRCRYGVWVQNNXGLEIKANEHGNRTTGSCAPLTVRQRXTADNRPSSXVVMNRIYTGLRDQRIIGRSARATATHCDIKRWAFTVICAHGDKSMNVVQHKGXEDKHFAAEEISSMVLIKMRXEIAEAYLDSTIKNAEITGTAYCNDSQRQA

SEQ ID NO: 258942 - protein, 67 aa, Zea mays
  Clone ID: MRT4577_167741C.1.pep
MAPIKLYGAVMSLNVTRCATALDEAGSDYEILPINFATAEHKSPVLLVRNPFGQVPHLLLCDLFLLL

SEQ ID NO: 258943 - protein, 256 aa, Zea mays
  unsure (1)..(256): unsure at all Xaa locations
  Clone ID: MRT4577_167742C.1.pep
RTRGGFPRDSGRYVHFAEQLTACGFGVYAMDWIGHGGSDGLHGYVPSLDYVIEDIEVLVDRILMENPGVPCFLLGHSTGGAVVLKASLYPHIREKLEGIVLTSPALRVKPAHPIVGAVAPIFSLVAPRFQFKGANKRGIPVSRDPAALLAKYSDPLVYTGPIRVRTGHEILRISSHLLHRLEKVTVPFLVLHGTADRVTDPLASRELYGAAASAHKDLRLYDGFLHDLLFEPXRDEVGAEIVAWMDGMLRLRRQAG

SEQ ID NO: 258944 - protein, 413 aa, Zea mays
  Clone ID: MRT4577_167743C.1.pep
GPTARPRLHAIANNSQALSSAVCFMLDQRDGDNTAFVQFPQRFDNVDPTDRYGNHNRVFFDGTMLALNGLQGPSYLGTGCMFRRLALYGIDPPHCRAENITAEASRFGNSTIFLDSVSKALKNDRTITPPPIDDTFLAELERVVTCSYDKGTDWGKGVGYIYDIATEDIVTGFRIHGQGWRSMYCTMEHDAFCGVAPINLTERLHQIVRWSGGSLEMFFSHNNPFIGGRRIQPLQRVSYLNMTVYPVTSVFILIYALSPVMWLIPDEVYIQRPFTRYVVYLLVIIVMIHMIGWLEIKWAGVTWLDYWRNEQFFMIGSTSAYPMAVLHMAVNLLTKKGIHFRVTSKQTAADDNDKFADLYDFRWVPMLIPTMAVLICNVGAIGVALGKTVVYIGTWTAAKKMHAALGLLFNIWI

SEQ ID NO: 258945 - protein, 72 aa, Zea mays
  Clone ID: MRT4577_167744C.1.pep
RFLGPHIHLEICRSIGNKTPTKIVRVRPQNKYTRLLLFNLRTLRTLVIYYYQSCFIGEVVWALSLPKRLNKQ

SEQ ID NO: 258946 - protein, 103 aa, Zea mays
  Clone ID: MRT4577_167745C.1.pep
FGTRVASPMSVRVTKERRGQAVVAMPIASVNMRLVGIASSICINFQSISTHLPSIKRSLPCRSLTGQYHGIGSSSASSVPTYNSSSRRRVLRPEKEAARICSQ

SEQ ID NO: 258947 - protein, 164 aa, Zea mays
  unsure (1)..(164): unsure at all Xaa locations
  Clone ID: MRT4577_167746C.1.pep
MDPVTASIHGHHLPPPFNTRDFHHHLQQQQLHLKSEDDHGGGSPFGGHGTKHGHEDDENSGNGNGSGGELALISPSGGGLQDGGENGSRRPRGRPAGSKNKPKPPIIITRDSANTLRTHVMEVAGGCDISESITAFARRRQRGVCVXSGAXTXTNXTLRQPASQ

SEQ ID NO: 258948 - protein, 108 aa, Zea mays
  Clone ID: MRT4577_167747C.1.pep
FPKFFRYITTPEYHKPSTGPGQPGSTKTEPHTHNHPRVTKKTQKRDNSAPRRAHTWSSRAGENSATPLKQVAGTPRGPNEDRRQPPRPKPRQSKRRPPAQMGGMRPPP

SEQ ID NO: 258949 - protein, 60 aa, Zea mays
  Clone ID: MRT4577_167748C.1.pep
RRRGHLAYKALWTAMVLACRQDVWWVACKRWRQELEKVNDLYVLHVWSLPWLDKHTEVKV

SEQ ID NO: 258950 - protein, 91 aa, Zea mays
  Clone ID: MRT4577_167749C.1.pep
IRLENGSILFFLLLCPWQDEPFIICSWADDTQMFHDRNRTNSSKYKSSTLTPRWGTGHQMQNLFTVPWCRTGPRSNKDANCSGDSRHPWVA

SEQ ID NO: 258951 - protein, 50 aa, Zea mays
  Clone ID: MRT4577_16774C.1.pep
NSPKVNIIRFLIFRNLIGRMHRFLLSSLFQAWELFEEIMCLRMGLFSVAT

SEQ ID NO: 258952 - protein, 44 aa, Zea mays
  unsure (1)..(44): unsure at all Xaa locations
  Clone ID: MRT4577_167750C.1.pep
IQCQHLLQLESGADIVKGHTEWRXGRPKRARGEGSFGGFPAENA

SEQ ID NO: 258953 - protein, 43 aa, Zea mays
  unsure (1)..(43): unsure at all Xaa locations
  Clone ID: MRT4577_167751C.1.pep
MERLQRIFGASGMVQPPTDSPLLDSSEQXYMSCVAXLMMLKHG

SEQ ID NO: 258954 - protein, 125 aa, Zea mays
  Clone ID: MRT4577_167752C.1.pep
MRATSSPVPAAVVLVAPSSPSAAAVAVKPRAAASGGGGSTAGRRDVLAAGTGLGAALLLALGPARAADEEYVSETGSLLITVSLFPPLQLCSTARNYAAAFCCGHVNGVFDEMLSRAASRGEHIQ

SEQ ID NO: 258955 - protein, 93 aa, Zea mays
  Clone ID: MRT4577_167753C.1.pep
VWTNDHIISGFCKINLSDEGMAWLAGMLKDNIRPQRQTFDYLVESLSTSGRLDDVLLVLNIMFKVGFEIGTFACTVLAEKPCTSNVSLLPPTG

SEQ ID NO: 258956 - protein, 81 aa, Zea mays
  Clone ID: MRT4577_167754C.1.pep
MAPRSAYVPVCLVALLLLASLRPSSARLLRPPMGRDGAIDVAMEVKDAVVDKYAPLLLAMLPRGPAPPSAPSGGTNDIPRN

SEQ ID NO: 258957 - protein, 84 aa, Zea mays
  Clone ID: MRT4577_167755C.1.pep
FDLLSMMNITMCYIQLASATYAQLCLHTRLPVETSFQLQPPPTCFSRAASHHGRKTFMEAYALVDDGGGLPLSSLSLLFVVLRS

SEQ ID NO: 258958 - protein, 78 aa, Zea mays
  Clone ID: MRT4577_167756C.1.pep
LNSKLIPRFINYTTLLTKNYFNFILHLTYFTCPQLIKHFRFDHQNILQNQRRQPYQIIVWITKSILHAINSPHSSAKS

SEQ ID NO: 258959 - protein, 217 aa, Zea mays
  unsure (1)..(217): unsure at all Xaa locations
  Clone ID: MRT4577_167757C.1.pep
MKRKTRNKIVVTVLLLGAAAVLIGGTLALILTAGTWKVKLKESQEKVCNKGWECSGTKYCCNQTITDFFKVYQFENLFAKRNFPVAKAVGFWDYQAFITAASLFENQGFCTTGGIDMQMMELCAFLGHVGAKTSCGYGVATGGPTAWGLCYNHEMSPDQGYCDDSYTQWPCVKGAEYYGRGAIPVYWNFTTGXXXNXLKVDLLHHPELLXXNATLAS

SEQ ID NO: 258960 - protein, 51 aa, Zea mays
  Clone ID: MRT4577_167758C.1.pep
SPLSLFSSVKFAAQDPLMQLRAFIRHVRKCHLTRIRMRDRTRRRTRARTRL

SEQ ID NO: 258961 - protein, 299 aa, Zea mays
  unsure (1)..(299): unsure at all Xaa locations
  Clone ID: MRT4577_167759C.1.pep
GFRIRFLEPSTAASPCTRRRWSRSQGAPAPPXSASPSPWLASPRDAIFAAPARPLRSRRGTLRLEAKAAWRAAGGGRGPRVPAKGAVLASYMGAEEVVGPSSLLDEEEFISHIRKELDNGKLPADVASNLEELYYNYRNAVLQNGDPNAYEVMLSNMMTWFDRVLLDVQNPFTFPPYHKALREPFDYYMFGQNYIRPLVDFRNSYVGNISLFHDMEEKLHQGHNVVLMSNHQTEADPAIIASLLEKTHPWTSQNTVYAAGDPAVTDPLXKPFTIAXNLICVYSTKHMNDSPQLIEIPRR

SEQ ID NO: 258962 - protein, 60 aa, Zea mays
  Clone ID: MRT4577_16775C.1.pep
PISRLTLRRHQLKSHPGASLISQLQIQTEQWVLDDTGLTHFSAKIASKADFLGDSPEYYT

SEQ ID NO: 258963 - protein, 166 aa, Zea mays
  Clone ID: MRT4577_167760C.1.pep
MAASLGLNPEAVFTSYTSSPPFMSDYVAASFLPPAVVDSTDFSAELDDLHHHLDYSSPAPTLAGARSDRSEKQMIRWCEGGGGEKRLGRIGFRTRSEVEILDDGFKWRKYGKKAVKSSPNPRNYYRCSSEGCGVKKRVERDRDDPRYVITTYDGVHNHASPAAAAI

SEQ ID NO: 258964 - protein, 88 aa, Zea mays
  Clone ID: MRT4577_167761C.1.pep
MAPRLARLLALAMAAIVVAPCTDQNSPQDYGDPHYSARADVFLGAASWDDTAAAYAQRYTEGRQDDCKVIPSGGPYGENLFWSSPRAY

SEQ ID NO: 258965 - protein, 129 aa, Zea mays
  Clone ID: MRT4577_167762C.1.pep
TSLHRATVLRYYSYGKTKGGGILRTPARGSIALILWRDKKKGQAYPFLKKKAAHIFCFGQRWGAPPETSALAMARLKNRRASLRCPATGITGRGICHVSIPKIGGLEKPPLGTKRICRGMAPPMGVRVF

SEQ ID NO: 258966 - protein, 149 aa, Zea mays
  Clone ID: MRT4577_167763C.1.pep
GTPAGSGPEFPGRPTRPEEEVDILSLSEPLKTNIKKEQEEKQEEMRFYLPPTPGSGFVGDITQKIGITLQPVALHRNMYASVVEDMILKATEQLVSDILRQALAVGYQTASPNRIPKEITVSNIHQAICNIPFLDFLTNKHMGRLNEDQ

SEQ ID NO: 258967 - protein, 70 aa, Zea mays
  Clone ID: MRT4577_167764C.1.pep
RSTIFFVGKSIPHHTSIVIAFTRMVHLKRHSSISLMVLRRSSARRAAKLVTHVGYYNMSCYYIQHYSCPG

SEQ ID NO: 258968 - protein, 78 aa, Zea mays
  Clone ID: MRT4577_167765C.1.pep
GVQDDWVCYAKMTEEIGEQLHIVGDDLVTNPTSVCQTMTGWFELFAIGCLRAVASSCWENASPPSTASEGLKEMDKLV

SEQ ID NO: 258969 - protein, 118 aa, Zea mays
  Clone ID: MRT4577_167766C.1.pep
LVGSSSSPSAASELWLLPAGKMPLRHRPPLRCGFFLARKMPPNPSWLHFVTYILLMCFIVLVMSNSQGDFEWTLVWAGAKGDGQTGVILAFVVHVLGDVGGHYIWSIFLAKFSSAHGA

SEQ ID NO: 258970 - protein, 85 aa, Zea mays
  Clone ID: MRT4577_167767C.1.pep
GTEVCERLAYYGISKSLVTYLSTRLHEGNVSAARNFTTWQGTCYLTPLIGATLADSYWGKYRTIAVFSTIYFLVRHECAFTSRYL

SEQ ID NO: 258971 - protein, 103 aa, Zea mays
  unsure (1)..(103): unsure at all Xaa locations
  Clone ID: MRT4577_167768C.1.pep
HESKRAMHSYQLGXQLSFHWSTGAGPXIGCVRDYPSELQFRALEDVSLSPRGGGRSVRFPSPRPGALTPNSIPAAKCGSLTADGDGVHASLKPRQRSATWTAF

SEQ ID NO: 258972 - protein, 291 aa, Zea mays
  Clone ID: MRT4577_167769C.1.pep
MREDSHAVPADTCSFLNSFLDKAAVILWNECDGPRNSWRLCTVTQVEELKILLRMFPIWATGIVFFTVCAQNSSMFIEQGMTLDNQIGPFKIPAATLSSLDVISVVVWVPIYERLVVPIARRFSGKERGFSELQRMGIGLFVSTVAVAVAALVEINRLQVAVAEDLVHQKVPVPMSILWQAPQYLLVGVGEVFTSIGQAEFFYNQSPDAMRSLCSAFALVTVSLGSYLSSFILSLVSYFTTRNGQLGWIPDNLNEGHLDRFFWLIAGLSSLNFLVFIYYAQQYKCKIASVA

SEQ ID NO: 258973 - protein, 497 aa, Zea mays
  unsure (1)..(497): unsure at all Xaa locations
  Clone ID: MRT4577_16776C.1.pep
MLLSGRHHXATTNSPLLHRRPPFRSTHLRCLRPLRSLALASANPPPPPSPLPSLFPSPRRPWRWRHSASDVIEDLPPVEADGNDAVKVKKSFWAAVSLIIGTAVGPGMLGLPSATIRSGQAPSAVCILLSWAYVVSSIVLVAELSFAAMARDGVDEVSFTGLASSTLGAGPGAVVAVVYAALSFSLLVACVAGIGSLVSQLFPGVSPVLANALFPCFAGVLIAFFPFKAVDGANRALCGLMLVSITALVVTGVSVGRTSLLGSLSYACWSPGAILPAIPVTVLTLGFHVITPFICKIVGDSVYDARKAILIGGAVPLAMVLSWNAVILGLASAGGNAGFDDPIKLLLSVNPAALPAVRGFAFAALATSLIGYAVSFPKQLADTVELILQRFSQKQGSMHQANGSGGYGRNGAILTWMVLIIPIFIASFFSAVFSKALDFAGVYANCFLFGILPPVMAWIHRSQKKRRSPDSCEDVLPGGNAALLILFAVAVVLAIWH

SEQ ID NO: 258974 - protein, 115 aa, Zea mays
  unsure (1)..(115): unsure at all Xaa locations
  Clone ID: MRT4577_167770C.1.pep
HDFIDDSVIGLLWDRITVGTDTTVIYVEWAMAELLRDPKVHEKLHEELDRVDGRDRVLSETDLPNLSYLKAFRKEFLSLHPSTPVMHPXHRDCSSEKIAVYWMSKGANMEINIWA

SEQ ID NO: 258975 - protein, 62 aa, Zea mays
  Clone ID: MRT4577_167771C.1.pep
KHRGCRALQGEPARVFWSKSGPPCCFSKKIMIYFGSLWISKIIFPERHLFQKQRRDLSLNGL

SEQ ID NO: 258976 - protein, 73 aa, Zea mays
  unsure (1)..(73): unsure at all Xaa locations
  Clone ID: MRT4577_167772C.1.pep
MAASDVEYQCFVGGLAWATXDHSLHNVFSTYGEVLESKIILDRETQRSRGLGFATFTTEEAMRNVIXGMNGKE

SEQ ID NO: 258977 - protein, 232 aa, Zea mays
  Clone ID: MRT4577_167773C.1.pep
MAGAADAGVCGVCFNHCKYESKGSGFSMLAWEEFKNAGVVPCNERDRFNNATREKVTFVANQRAYTVKCYKGRRKSAMYGRGWRKFYEDNNLGKGQMVVFYLDEPLPTASILWFQVGNGSKPLKIQISGNEDGEASSDDSEGIVCTRGLLLNETEDAQLQGLLPLSDGFIGFAFVHRLTRTDIRLGMMKIPKKVAAATPFEEQGVVGISVDGRRFKKISYKTADDGRIVFGR

SEQ ID NO: 258978 - protein, 322 aa, Zea mays
  Clone ID: MRT4577_167774C.1.pep
MTTSAAASATAALSTPSSVNPHRSSSALRLPASLRRSHPNRFLSSSPSRSPLVPVSAMASPAAAGETSSRKKLIIFDAEDDLAASLAKYTSELSAKFAAERGAFTVVLSGGSLVKALRKLAEPPYLEAVDWSKWHVFWVDERVVPKDHADSNYRLASDQFLSKVPIPADQVHAINDELSSEGAAGDYETRLKQLVKNGVIELSPVSGFPKFDLMLMGMGPDGHVASLFPGHPVVNENQKWVTFVKDSPKPPPERITFTFPVINSSAHIALVITGAGKAGAVHKALSEGQSTSDLLPVEMVSLQNGELVWFTDKPAVSMLSSI

SEQ ID NO: 258979 - protein, 64 aa, Zea mays
  Clone ID: MRT4577_167775C.1.pep
AGHLVPNRLTTINRRATNKSTSPLTYSGIYQRVCSPHTSAVIYSHQRRANRVSYWETLSLLYKE

SEQ ID NO: 258980 - protein, 121 aa, Zea mays
  Clone ID: MRT4577_167776C.1.pep
EICKHQYHVFLMESFQVLLGRCASQSQIRALHGAISPKNLSGLLFLEQVGPVYDVFLYPVASLINSMIRISPALVYMATEYRYKLLPSQYLAMLASQHMTCAHNRRPWHRTTHTPIISRYI

SEQ ID NO: 258981 - protein, 62 aa, Zea mays
  Clone ID: MRT4577_167777C.1.pep
LIIKKICKVSFIRKYFSSKTNIEIIISASRKEHTCVRTDCHLDKSHLFKSFLCSSVYVNRVH

SEQ ID NO: 258982 - protein, 149 aa, Zea mays
  unsure (1)..(149): unsure at all Xaa locations
  Clone ID: MRT4577_167778C.1.pep
RLMSTVVLTSDHVKIMDDCAPFMDTSYVTYMVYYYTEHGLWDHHEVKVNDSKTLLFAEKEVAAFACQNPEEIPRSSDDAEDYSDTTHATTDHYDCAMRIECLAKSCALSAPKKNALMFXIGGSXXMLDAVIYIDSDAIWTTNCLAPLVK

SEQ ID NO: 258983 - protein, 88 aa, Zea mays
  Clone ID: MRT4577_167779C.1.pep
WVFIRGGLGRPFVRFQSQRRGWGAWKKKFFCFSIGLGGGGPSPPLGWVSGFLGPPPPLSMVFSPVYCFVVCWGPLWWVLLWVGRTVLV

SEQ ID NO: 258984 - protein, 120 aa, Zea mays
  Clone ID: MRT4577_16777C.1.pep
NTVKVHKSLYDIAKLLLMTPIILSARFATAPVREETHRGRRRVEQAAQRGLGFSGGGGDGPGAAWRGLLGFHGVGLVLSRGLLRLLWGQKGDLRWIRAREAVAGGGGGTGTLGNTRLLAS

SEQ ID NO: 258985 - protein, 192 aa, Zea mays
  Clone ID: MRT4577_167780C.1.pep
SPLLRLLRQSADISAVAGRYARWCVPQLFAYAVNFPIQKFYQAQSRVWAMTAISGAALAVHALLSWLVVARLGRGLAGAAVVGDVSWWLVNVAQFVYLVGGSFPDAWTGFSRKAFDSLGGFVRLSVASAVMLCLEMWYYTAVLILVGCLKNPEIQVDAISICMNYQLWTLMVAVGFNAAVSVRVSNELGANH

SEQ ID NO: 258986 - protein, 104 aa, Zea mays
  Clone ID: MRT4577_167781C.1.pep
FGSSRIHTHNLWQAGQTGPIWGPWAPETPQETAPHCCIGHELTGSYPRTSSAKTDPSDTSHMETLFAATRSPSRQTPINHGRITHVSIGYMPRQGDQGSSGTTP

SEQ ID NO: 258987 - protein, 407 aa, Zea mays
  Clone ID: MRT4577_167782C.1.pep
MLSLSCSCPGVSSMSKTALDSGHLVASCRSRWHGARAPPRRRRTPCVCLVASPTTTQPGPAAVDVPSRTVPAVTTSSAPERISVSALLEVVSDDLLNLNNNLKSLVGAENPVLVSAAEQIFSAGGKRLRPALVFLVSRATAELAALPELTTEHRRLAEIIEMIHTASLIHDDVIDDSGMRRGKETIHQLYGTRVAVLAGDFMFAQSSWFLANLENIEVIKLISQVIKDFASGEIKQASTLFDCDVTLDDYLLKSYYKTASLIAASTRSAAIFSGVGSGVCEQMYEYGRNLGLAFQVVDDILDLTQSAEQLGKPAAGSDLAKGNLTAPVILALREEPRLRGIIESEFCEPGSLAAAVELVHRGGGIRSARELAEEKGGLALRSLQCLPRSEFRSALERVVHYNLQRVR

SEQ ID NO: 258988 - protein, 56 aa, Zea mays
  Clone ID: MRT4577_167783C.1.pep
EFNSMSAYSTIVCPYIVTVFVLPDISLEQVINRWQQPFASVWACHKVTNRDKHMTR

SEQ ID NO: 258989 - protein, 174 aa, Zea mays
  unsure (1)..(174): unsure at all Xaa locations
  Clone ID: MRT4577_167784C.1.pep
TLTDKXTITLQVETSDTIDCVDDRIHYLEXIPPDXLPVFFAGKQLEHVRTLVDHHIQKXESTLHLVLLLFLGLXIFAITLTGETITLKSHSSDTIDIHKVKIQHKEELPPDQXQRLIFDGXQVEDVRTLPNYHTXNENTLHLLLRLRCGMPIFLVTFTGXTIALYVESSDTTDH

SEQ ID NO: 258990 - protein, 234 aa, Zea mays
  unsure (1)..(234): unsure at all Xaa locations
  Clone ID: MRT4577_167785C.1.pep
MLMYHLQALFVQYHSCYSQRGYNSSSMQIAKTFRGHFHLPESINKLVNLVHVDVEKAYVLMLSSTLKLPFVECAGEFHVNDEGSLLGLKDLNMIRGHLTLLSLDKVQNKEEASKAHLHHKEHIMKLELQWGSLNXLVLPNRGVEVLDVLKPHSDLEELTISGYPGARSPSWLESGWLSRLQFICLRDCNRWEVLPPLGDLPLLKTVEIRRMQGLRTLGQKFFGRAGFHLWRDCY

SEQ ID NO: 258991 - protein, 99 aa, Zea mays
  Clone ID: MRT4577_167786C.1.pep
MIHGTTVLQHSGAYYIVCNIYTRRHNNLHTVVVLCMRLMCTVVVFFFLLLLMRCSFLLPFLFYHLLPKKKNNNNNNNNNNNNNNNNNNNNNNNNNNNNN

SEQ ID NO: 258992 - protein, 91 aa, Zea mays
  Clone ID: MRT4577_167787C.1.pep
SPTTTPCLLPCSCRCRLHHGARVFLRPLSIYNHHQLDSLPTQSQPLSLNQLAVSPSEIQLGIALSATYTFSSLMSPYILSLATYFSEPAST

SEQ ID NO: 258993 - protein, 74 aa, Zea mays
  Clone ID: MRT4577_167788C.1.pep
ATQFDHSYRLVLTKYAPCVLFFSFVGLTFKLVTLVVCTQVLGRVLSLCTVSQISFLNVVRWKNKHNKHTTKKTK

SEQ ID NO: 258994 - protein, 101 aa, Zea mays
  Clone ID: MRT4577_167789C.1.pep
HTCQTLFLVMWTKICRVRCIYNLRNNLSLCNVYHTTTIGGHQKDRHSCFTQVSNKSYMDYCLVTHIFYGCCMNYYLILTPNCVPRFSIISTNLSSLDFRVI

SEQ ID NO: 258995 - protein, 128 aa, Zea mays
  unsure (1)..(128): unsure at all Xaa locations
  Clone ID: MRT4577_16778C.1.pep
MHVFFMIRRRKTSIFADAKESSTVFELKRIVEGILYWRLDGXWLYKHDQLLEDGSTLAEXGLTSQTARPQAPATVGLAFRADDTFEALCIEPFSSPPELPDVMQPQESVSSANELAVQSDPQEAHFPL

SEQ ID NO: 258996 - protein, 89 aa, Zea mays
  unsure (1)..(89): unsure at all Xaa locations
  Clone ID: MRT4577_167790C.1.pep
VENDVVDQLTKFNQKLAALFAVPTDRLIEGILLTKFDTIDKKVEPALSSGXILGAPVMLVGCGQSNRALKKLNVKSIVKPLLKVIAPRC

SEQ ID NO: 258997 - protein, 46 aa, Zea mays
  Clone ID: MRT4577_167791C.1.pep
SPRFFLKFFFLIHHHLEVFLIVIFYNTNIHIIKKKSSLFSTILFHV

SEQ ID NO: 258998 - protein, 187 aa, Zea mays
  Clone ID: MRT4577_167792C.1.pep
MEDGAAAAVLIRAAASSAPYRHSAFLSALWAPSSQFPSPATTISDSVSIGRDFSSGELKPPHPLRTSTVVQPSLGGLADSTGCVDRAQDYWTGESCVPWMELLTGSGSPAAAPHHTMVGVVIAKSLVSATFPVLISLTRSIEPIELDDRSPEPLEFLVGVVDGRGAAVPRGQTASIASNLQVNAPPC

SEQ ID NO: 258999 - protein, 120 aa, Zea mays
  Clone ID: MRT4577_167793C.1.pep
IRVPQDFHCFIRENLNTAHHAHQSVHSACCMNLSIIYHYFSSSSLSHGSLQQPGLRSNSHVLPFLHLSHTTPERQSVMAGLPPAARPIEQGARTQQRATLNLREKSKQGRGSGEVKEPRN

SEQ ID NO: 259000 - protein, 61 aa, Zea mays
  Clone ID: MRT4577_167794C.1.pep
PKGGVPSGIKGGKMLEKANGRGLLVIKAADKRGMSPKTNKGGEREGLPRRYVGKSRAVNWT

SEQ ID NO: 259001 - protein, 160 aa, Zea mays
  Clone ID: MRT4577_167795C.1.pep
MAASSSLSLPATPAALRHEACHGRPALPRRSPVAATTTTRCAALRRDASGGRDQYGGALVDEGMSVLRRRIREVRMAETNYEAPAEWAPWEKRYYPAYVSDVSSLVGALQLILMGTRPGVAVAVVALVLASVPVSAFAALHQLTLVVEAVLQSVSVHHIS

SEQ ID NO: 259002 - protein, 195 aa, Zea mays
  Clone ID: MRT4577_167796C.1.pep
MEGDATGADGGGGGGSGERSSFVIGLIENRAKEVGVAAFDLRSASLHLSQYIETSCSYHNTNTLLHFYDPMVVIVPPNKTAADGMVGVSELIDKHYPANKKVTMARGCFDDTKGAVIVRSLSARDPSALGLDTYCKQYYLCLAAATATIKWLGLVSNCSNGYWSIKVIKWVKEESHLWCRAGASGLDSILSAPAH

SEQ ID NO: 259003 - protein, 146 aa, Zea mays
  Clone ID: MRT4577_167797C.1.pep
MLISKENRKAIYSALFKDGALCAPKDYNAPKHPEIEVPNLEVIKAMQSLTSKGLVKTQFSWQWYYYTLTDEGIDYLREYLHLPTEIVPATMKKTARPASSAPRRNFGGDREGRAPRGDRDNYRRKEGASGDFKPEFRGGLGRAQRE

SEQ ID NO: 259004 - protein, 66 aa, Zea mays
  unsure (1)..(66): unsure at all Xaa locations
  Clone ID: MRT4577_167798C.1.pep
NXXVDCECFRGWGXYVLIVIXXEVREYVIKRRMDYIMXNRIIXWSTTFKKNDVFVLRSNIVSSQLV

SEQ ID NO: 259005 - protein, 103 aa, Zea mays
  Clone ID: MRT4577_167799C.1.pep
MWGRGKKRFGGGGSGEPAAKRQAARDDGPSESAEDGTVVAEISKNKKVSVRSWKGRVFVDLREFYFKDGKTLPTRKGISLQLDQWKILKDNIKAINEAIEENT

SEQ ID NO: 259006 - protein, 57 aa, Zea mays
  Clone ID: MRT4577_16779C.1.pep
KILYHLLIILPPIINIYFHTPYKSKKKSKQKFYPSPKNLQKKILLFSPPNPFPLNIH

SEQ ID NO: 259007 - protein, 134 aa, Zea mays
  Clone ID: MRT4577_1677C.1.pep
DLSRKKKKKKKKKKKKKKKKKKKKKKKKKNKRKKKKKPGAKKKKNPPSGPTLKGVKSQTRGRGKRGTRLDSKLGRNRRKKVYRGKRLMSEIPKKKTRGGTKTGNPGGNLGGHPHKLMGQRKGRGFWGKNRSPPS

SEQ ID NO: 259008 - protein, 81 aa, Zea mays
  Clone ID: MRT4577_167800C.1.pep
MGAGPVILNALPPPIVLLHGVFGFGKGRLGGLFYFPGAEKKDHRVLVPDLGALTSFHDRAPELFYFLKGGQVDYRQEHNKG

SEQ ID NO: 259009 - protein, 93 aa, Zea mays
  unsure (1)..(93): unsure at all Xaa locations
  Clone ID: MRT4577_167801C.1.pep
GAGPQRSAEQASGPVPALKFLIYGRTGWIGGLLGGLCSFCGIPFXYGGGGGVFFFQXAADIDAVAPTHVFIAVGVTGRPIRRWCATHRAGSMR

SEQ ID NO: 259010 - protein, 100 aa, Zea mays
  Clone ID: MRT4577_167802C.1.pep
ACWYLAHQGSSICYSCLVRHRFPISRWCLARQVPSMGYWSMVSHGCNRCMAHSGYLWCLVHLGPFISIDWQMVHQGPSIGCAALVCWHLDCINHTVERSN

SEQ ID NO: 259011 - protein, 76 aa, Zea mays
  Clone ID: MRT4577_167803C.1.pep
MSLTEAPSPSPSSSSRSDDFAAFLASELELASGVDSAFPGDPSSVFPATDDEGEDEDPEELEVEAIEQNGRYSFFI

SEQ ID NO: 259012 - protein, 137 aa, Zea mays
  Clone ID: MRT4577_167804C.1.pep
PIVQFLRWRTFTLVQGCSPCGHGLGLYPSIPFFRWGAMNRVNNGEGTLFWKDTWLGMCRYVSNIIRFLRSVGRRTPWWLIALRREIGWLTLPGPLLHSCFATLKFGCLLLCHPVSMTGGTVCVYDLWVRWHTGEAHK

SEQ ID NO: 259013 - protein, 93 aa, Zea mays
  Clone ID: MRT4577_167805C.1.pep
EGKRKRADSTSEGEPTEAKRQRGVTEVVSEPATTSTSRRELITLVGKATEEQLQKVFMQIVSDHSLQDVAVELLREVTKKPTIFIDISIDGKP

SEQ ID NO: 259014 - protein, 44 aa, Zea mays
  Clone ID: MRT4577_167806C.1.pep
FSHATRSSDPCRPRWEQRTIGRQRERVKTVRIRRRSTRGLTARM

SEQ ID NO: 259015 - protein, 233 aa, Zea mays
  Clone ID: MRT4577_167807C.1.pep
MAAPTPPPAAAPAAAPGPTPPAQVVGNAFVQQYYNILHQSPELVFRFYQEASRIGRPATTGADMDTVTTMEAINEKIMSMDIARAEIRGVDAQESLCGGVTVLVTGHLTGKDDVCREFAQSFFLAPQEKGYFVLNDILRYVGQGEADPSLPPPQQQQPAPELDAVVAPAAALANGTVAPVESVPREQEASPQPEPDLSESVPHTNEEEDPKEEVYNPPNDTVPVVEEHRFLRS

SEQ ID NO: 259016 - protein, 85 aa, Zea mays
  unsure (1)..(85): unsure at all Xaa locations
  Clone ID: MRT4577_167808C.1.pep
CGSVLFSSSPAPNASLLRHTTQHSAAEPFALTHYRSVRKQHTGRGRSYSXSKVSKVDPSDIKHKNIYPTNYXQQITAARGHTLIH

SEQ ID NO: 259017 - protein, 103 aa, Zea mays
  Clone ID: MRT4577_167809C.1.pep
HMQDGSVQGSPESHEFVVLVAAEGRYTVGFLRQTNRARLLEMGFPVVQCRARGGSLLWIMVALFCVEGKVVRYGCPLTWAMRLVQLRLEERTVSGSGISSDLR

SEQ ID NO: 259018 - protein, 147 aa, Zea mays
  Clone ID: MRT4577_16780C.1.pep
MASSVASVRPVALGDEPMEIPRLTGRAETSHLLRILLALWRWSRATWRRRAAMVAVVCVLLFMSATLAHRVVDVSAFTTGRLQLHRPRSYTTVYDLQRFATSSDSPSLRLRRGGGRRRRRHGVSTPCLHRFVAFTATPPPEDLDSDT

SEQ ID NO: 259019 - protein, 136 aa, Zea mays
  Clone ID: MRT4577_167810C.1.pep
LSLLLPMSDIKTPGFASSEVFATLDSSLKSLSDDEKAKLMKKVNGIFEFVVKNSEGKEETFTVELKKNGTVLKGKGSTKADAIISIKDADFVQLASGKLNGQKAYMSGKLKIKGQIMLATKLDTVFKELPGDKSKL

SEQ ID NO: 259020 - protein, 117 aa, Zea mays
  unsure (1)..(117): unsure at all Xaa locations
  Clone ID: MRT4577_167811C.1.pep
MTPQYQKQDKGPFGYTRKDELLIRLGVTAFGVGLKYGLELLGVDTLQDGNDEHLLVELXKTMGRIRCSMVRSARSVRSGSRRMSSYTETKLQRITKQKTIRKIGKSNTRKQLQVIPD

SEQ ID NO: 259021 - protein, 497 aa, Zea mays
  unsure (1)..(497): unsure at all Xaa locations
  Clone ID: MRT4577_167812C.1.pep
MLPLSLFVSLLVLHLPHASADGDICIIGGGISGASTAFFLTSYTSTLGGAQLRVFERRQKVGGRLGTVTLAGDSFEAGGSIIHPRNLHARRFADLLGLAVKTGGDDWLGIWDGKSFVFQTARPPPVGSSWWRRKLHSLVNSLLLLRRYGLSLLKMDKFVQVRRMLRRFPQXDAQIWNNGMESRPVFATVEEMLQWTGLYGLTRRTLEEELLDAGLNTRTIAELVTVITRINYGQSTHISGLAGAVSLAGSESGLWAVKGGNWQLAAGLLKTSNATLHLQEGMGSITDAGDHYVLRSNSGSEYECMVTVVATPLDELNITFSPPISIPPRKMQHTHATFVRGILNPGYFGLNSASDIPELIGTLELPDIPFSCISVLKRYSEGDMAAYKMFSRAKLDDGLLDQIFRARIETIRINWAAYPHYQAPEEFAPIVLDGKQLYYVNTFESAASAIETGAVAAENVARLIISRLSLLPQAQQQQPHIIKSFAEQESQRRHVDL

SEQ ID NO: 259022 - protein, 107 aa, Zea mays
  Clone ID: MRT4577_167813C.1.pep
AGMAYGLSWDLVQWIATSDVARNHSVGTEDMLTGLWLRIGGKGKNRFNAKPAIHDYLNPVPVDQCEHEFMPTTIGVHRLKSNPRWAEALKYFNFTAGLQPSKFYKID

SEQ ID NO: 259023 - protein, 50 aa, Zea mays
  Clone ID: MRT4577_167814C.1.pep
LVRQSILRQHPQSGQVLRLLAAHIVQQLTLLCGLQQWPPCPYGAPGGVPL

SEQ ID NO: 259024 - protein, 104 aa, Zea mays
  unsure (1)..(104): unsure at all Xaa locations
  Clone ID: MRT4577_167815C.1.pep
RRVALDPNLTHYMYSEKTETVXKILVRQFHAHKEVTSTLLDDSLYTGLSALVYLLTSXTPCRICTNXDELPAPMVHVDIDMSVLADDVIALLERAVLEPLTPKP

SEQ ID NO: 259025 - protein, 138 aa, Zea mays
  unsure (1)..(138): unsure at all Xaa locations
  Clone ID: MRT4577_167816C.1.pep
FQHLRXMVDLDPYPCSCNGSVTTTTVSSVSAAAADKHQERRGNDVERKKRRLASNRESARRSRVRKQRRLYELSLQVAELLGTNQRLLVELNHVTAKHALLARENAKLREEAAGLQRRLSEMELMGEAEAAALSPEVA

SEQ ID NO: 259026 - protein, 133 aa, Zea mays
  Clone ID: MRT4577_167817C.1.pep
SRLRVPGPYYTVDLSVRFQNGVPCVHTWVPCAFGLYCCKTVSLMFWCGSTSFQPVKRIWKSWASPQVNSFLASLSKSAMVSLHIVPARIWSLMTNAFFAINRQKQSHILLFCAFYTNILWRVWSKAGDASSGT

SEQ ID NO: 259027 - protein, 64 aa, Zea mays
  Clone ID: MRT4577_167818C.1.pep
KLLISKFIIYLHHRDSNNCISLINKYSLCTHRTFKIYNIHRIENRISFRMINFEKMKKTNKLYT

SEQ ID NO: 259028 - protein, 167 aa, Zea mays
  Clone ID: MRT4577_167819C.1.pep
PPRLAGIPAHIRFLFQSFDRTAPPALSPLSPMARTKQTARKSTGGKAPRKQLATKAARKSAPATGGVKKPHRFRPGTVALREIRKYQKSTELLIRKLPFQRLVREIAQDFKTDLRFQSSAVAALQEAAEAYLVGLFEDTNLCAIHAKRVTIMPKDIQLARRIRGERA

SEQ ID NO: 259029 - protein, 45 aa, Zea mays
  Clone ID: MRT4577_16781C.1.pep
PSLRGQRRSSRPLFFFFFPDEPSAIIESSNILLAQIRRYMRISYY

SEQ ID NO: 259030 - protein, 202 aa, Zea mays
  Clone ID: MRT4577_167820C.1.pep
GKKKKKKKKKKKKIKKKKKKKKKKKKKKKTSFFVPLSFFNLIGGRGPPCWSFGRARIRGHDLRGKSKTVLQAQLRELKWELSFLRVAKVTGGAPNRLSKIKMGPTSIVGVLTVISKNKKSALGGAYKKKKFFPLDLRPKKTRAFRRRLTKSQVYTYVPCVYLNAFFFIVEALILLFYQGWEVTWVKNLFCPETLTHYLELAN

SEQ ID NO: 259031 - protein, 165 aa, Zea mays
  Clone ID: MRT4577_167821C.1.pep
PAGIHSSHPISYFKSFDRAAPPALSQLSPMARTKQTARKSTGGKAPRKQLATKAARKSAPATGGVKKPHRFRPGTVALREIRKYQKSTELLIRKLPFQRLVREIAQDFKTDLRFQSSAVAALQEAAEAYLVGLFEDTNLCAIHAKRVTIMPKDIQLARRIRGERA

SEQ ID NO: 259032 - protein, 157 aa, Zea mays
  Clone ID: MRT4577_167822C.1.pep
ARAHFESFDRAAPPALSQFSPMARTKQTARKSTGGKAPRKQLATKAARKSAPATGGVKKPHRFRPGTVALREIRKYQKSTELLIRKLPFQRLVREIAQDFKTDLRFQSSAVAALQEAAEAYLVGLFEDTNLCAIHAKRVTIMPKDIQLARRIRGERA

SEQ ID NO: 259033 - protein, 69 aa, Zea mays
  Clone ID: MRT4577_167823C.1.pep
SQRRLAHCIHRRPQAESLDQGQCQDRCNTQCGVLNVKVIVNVKVMVKPIAPASSSSMPRLRNLNVANIS

SEQ ID NO: 259034 - protein, 43 aa, Zea mays
  unsure (1)..(43): unsure at all Xaa locations
  Clone ID: MRT4577_167824C.1.pep
KRNKQTELKKKGGIFRRGDXSYSSKCHLLVFCRVTIINLVLYG

SEQ ID NO: 259035 - protein, 159 aa, Zea mays
  unsure (1)..(159): unsure at all Xaa locations
  Clone ID: MRT4577_167825C.1.pep
MDGAEVGVLEETHQVRLTQLSPMARTKQTARKSTGGKAPRKQLATKAARKSAPATGGVKKPHRFRPGTVALREIRKYQKSTELLIRKLPFXQRLVREIAQDFKTDLRFQSSAVAALQEAAEAYLVGLFEDTNLCAIHAKRVTIMPKDIQLARRIRGERA

SEQ ID NO: 259036 - protein, 58 aa, Zea mays
  Clone ID: MRT4577_167826C.1.pep
SRSRAAALYFFFLASTCTETTASFKNNIKIFTSLQLAENQMNLRARIRKLIKRNQGNL

SEQ ID NO: 259037 - protein, 111 aa, Zea mays
  Clone ID: MRT4577_167827C.1.pep
MAVDGRLPEVLLVRKVQLLEQQDRPVEALADRRLDGKFDRRELVRLARLGMACTRSDPAARPSMRKIASILDGNEDVLDKLEQRKESTEDWQRRNATNLALVRRFQALGIH

SEQ ID NO: 259038 - protein, 164 aa, Zea mays
  Clone ID: MRT4577_167828C.1.pep
GRIHSSHPISNFKSFDRAAPPALSQLSPMARTKQTARKSTGGKAPRKQLATKAARKSAPATGGVKKPHRFRPGTVALREIRKYQKSTELLIRKLPFQRLVREIAQDFKTDLRFQSSAVAALQEAAEAYLVGLFEDTNLCAIHAKRVTIMPKDIQLARRIRGERA

SEQ ID NO: 259039 - protein, 191 aa, Zea mays
  Clone ID: MRT4577_167829C.1.pep
MASPAGGESPAKPVLLHGDLDLWILEARLLPNMDMFSEHVRRCFAACRPPSSCGTKHPPPAAAGRRHHHRNIITSDPYVTLSVSGAVVARTAVIPNSQDPVWEERFAVPLAHRAADLEFQVKDNDTFGAQLIGTVAVPADRVVSGDEVEDWFPVIGTNGKPYKPDTALRLRFKFQPIADNPAYRHGIPGDP

SEQ ID NO: 259040 - protein, 169 aa, Zea mays
  Clone ID: MRT4577_16782C.1.pep
MGSQAIEAHRAGAEVYRGAALCAEKSTELLAEAHLPLGLLPLADMEEVGYNRATGFVWLRQRKSLTHTFRPIARQVSYAAEVTAFVEDRRMRRMTGVKTKELLIWVTLSDMFVDRDDPSKITFKTPTGLGRTYPVSAFAKEGAGDDGAAAKHKDDAPAPTAAGKAAASK

SEQ ID NO: 259041 - protein, 72 aa, Zea mays
  Clone ID: MRT4577_167830C.1.pep
HAQSALLSDVLVTEHPFRFLEHLAAARHDASGLLLDGVVASRLVSVLDIHVSLIASRIRKRGPRKCQQTHAS

SEQ ID NO: 259042 - protein, 47 aa, Zea mays
  Clone ID: MRT4577_167831C.1.pep
GDFVHIIWDSHVYKNHLPGLEGHIYYIPKPLSILKINPSKYDIYSFM

SEQ ID NO: 259043 - protein, 32 aa, Zea mays
  Clone ID: MRT4577_167832C.1.pep
LIELLGHLSVYCRRGVKKGRLLAGNYSTNFFQ

SEQ ID NO: 259044 - protein, 238 aa, Zea mays
  unsure (1)..(238): unsure at all Xaa locations
  Clone ID: MRT4577_167833C.1.pep
HASEERPSAIPGPIPDEFVVPTTNSIGVTLLMKMGWRQGRSIRDSHADSLYESRRNARKAFLALSGAKDGEDQDQSAEKPSLDKAVVGSVGEIPVSGNTPDFHGLGYDPFKHAPEFRDRKTLQKSRERGRKRNDVSMRGNLLISNSGHYAPGFGIGALEELDVEDEDIYASGFAYEQTEVDIEPSKTANDSNYKLDDRKRGFYLSFKIASNSEYKLERXLPPEIPDDLMLILFFILME

SEQ ID NO: 259045 - protein, 98 aa, Zea mays
  Clone ID: MRT4577_167834C.1.pep
PPPLDAGFSSKQKKYFTFLKPKGLVQKRGGGGGDNSWCWPQPLGGGAHNTKQKFSRCAWVLKKQASYRGTGLTPKVPRENPWEGDSSSSHGNHTRGGR

SEQ ID NO: 259046 - protein, 46 aa, Zea mays
  Clone ID: MRT4577_167835C.1.pep
IVCFVVVIKFKRYSNHYVWTFFYLNVNFIINVYLFSYSLKYRILWE

SEQ ID NO: 259047 - protein, 912 aa, Zea mays
  unsure (1)..(912): unsure at all Xaa locations
  Clone ID: MRT4577_167836C.1.pep
MDLDPAYPTSACADAWPFDSLTTSLFFSPQLTPIPANSSSSWLTPHSPLWLFEDRHLLPFDAPAVFEEVQRPRSGNSHTSSKPAEQISHRWQFHLSLDEDGTDNSSLFKEKLTHALRYFKESTDQHLLVQVWAPVKNGDRYVLTTSGQPFVLDHQSIGLLQYRAVSMTYMFSVDAENVGDLGLPGRVYKQKVPEWTPNVQYYSSGEYQRLNHAISYNVHGTVALPVFDPSAQSCIAVASQXLVPMKHSGSVTIKASFKEDIVRFRFSXRQCYCIVQICNEGRQAALVEILEILTVVCEEHKLPLAQTRVPCKYRSVLALGCGLQKNXLSDIETHFGSSCGSSGXICLSAFCSDQWVLESACTMSSVPXGQGVSGKAFISHKPCFSKDIRKFCKLAYPLVHYARMFGLSGCFAICLQSSYTGNDDYILEFFLPLDCIDEDDQNALLESILTLMKRCLRSLKLVDDNDLSGVSLHLSNVLKLENEESKTDAQFDGSLRESPEDDRHGGSHKFDNENQKVLDITEGQLLTDDYSQDNGTSVGRPNGSGASDSSLLHKTNKPPERRRGKAEKTISLEVLQQYFSGSLKNAAKSLGVCPTTMKRICRQHGISRWPSRKINKVNRSLSKLKQVIESVQGSDAAFNLTSITGPLPIPVGPSPESLNVEKLTQSKVAELSNLAVGVDRDSLQKSLENDDHFDIVMAQQGFIDNNNDVQLEADKASHSRSSSGEGSINSRTSEGSCQGSPANQTFVCKPIASMFAEPQLNQEEFNKEPFQEPQLPLSRMLIEDSGSSKDLKNLFTSTSDQPFLAPPNNLVSMKHSGTVTIKASFKEDIVRFRFPCSGGVIVLKEEVAKRLRMDVGTFDIKYLDDDHEWVKLACNADLEECMEISRLSGSHVIRLLVSDIAAHFGSSCGSSG

SEQ ID NO: 259048 - protein, 81 aa, Zea mays
  Clone ID: MRT4577_167837C.1.pep
RRQHVLFFFEGEPWNCIDFHCQILEKEQGSLWVGLNTNRMLSGTRSQALACRNVKLFDFTGPMVRANIRDRCSDLNTLPFG

SEQ ID NO: 259049 - protein, 69 aa, Zea mays
  unsure (1)..(69): unsure at all Xaa locations
  Clone ID: MRT4577_167839C.1.pep
GGGGHGVFCTKAGDTCVLLLFFMAYLNSXLCLCTTIKAKALSISLMLPIFILLLVNECGMHISFNFQCS

SEQ ID NO: 259050 - protein, 142 aa, Zea mays
  unsure (1)..(142): unsure at all Xaa locations
  Clone ID: MRT4577_16783C.1.pep
KNKKKKKKEKKKKNKKKRNKKKKKXKTKIKKSKKIKKKKKKKKKKIKKKKNIKKKNNKIKSKNKYKENKRQQKKKXKQKKENRQSRSSRRARPEGDTAPQTERSRNRTSNRPSLALATAPTNPGSMLCLLRCERFFELLLCD

SEQ ID NO: 259051 - protein, 136 aa, Zea mays
  unsure (1)..(136): unsure at all Xaa locations
  Clone ID: MRT4577_167840C.1.pep
TVRDRQRPVSCTRHRNASKAPSRSASATERCRWSCSHPADRRPPAEPPHEGYDIQCDLINKAXSYGELECFQSYXMPLDLQKLFKGVTGGLSGLSKXSRAMKHCQEILGAGLRKAQRNSNWEQQPLTQNQVGHCHW

SEQ ID NO: 259052 - protein, 85 aa, Zea mays
  Clone ID: MRT4577_167841C.1.pep
SSLFGGRPFFFFLLSGISIYDYDCVWAHMNRFLITKRTEGDTNRPGVFGASCCQHNHTGDIHARGHGDDDLNGYDNQPTNLVVMD

SEQ ID NO: 259053 - protein, 120 aa, Zea mays
  unsure (1)..(120): unsure at all Xaa locations
  Clone ID: MRT4577_167842C.1.pep
VQASVMHRAHHKLSSKFFXPYQILARVGQVAYRLSMPATSRIHALVAWSGPSPELATWKDREALRQCFPFAPAWGQAGSPEVGSVRDAKVLDKQQEDIVTEGRGRRIRRKNPRVCGPEWM

SEQ ID NO: 259054 - protein, 215 aa, Zea mays
  unsure (1)..(215): unsure at all Xaa locations
  Clone ID: MRT4577_167843C.1.pep
RIVLKVRASPRRRGRWQSPGSAPPAIIRHPPCSSSSNDGTATCRGSPKPXRARRPRLQVAAAAGSGAIRAATDAEFFQPSDTRPIMLFDGVCNLCNGGVRFVREHDPNRFFRWVRNSNRSIRYVPLQSESGRKLLQRSGRSPDDISSVVLVEKDRSFIKSEAVLRIMEYLNLPFPQLAVFLKFVPLFLRDFAYDNVANNRYAMFGRAEAEACEIL

SEQ ID NO: 259055 - protein, 46 aa, Zea mays
  Clone ID: MRT4577_167844C.1.pep
TIKLEVVNVHRFKLLVCISLKIRIVTNCSENMSSLVTNNSIEQYMP

SEQ ID NO: 259056 - protein, 191 aa, Zea mays
  Clone ID: MRT4577_167845C.1.pep
MAIAGQCSSCYYTSPTLQLQLHRRHSHLPRQPLAARRARRPRLQVAAAAGSGPIRAATDAEFFQPSDTRPIMLFDGVCNLCNGGVRFVREHDPNRSIRYVPLQSESGRKLLQRSGRSPDDISSVVLVEKDRSFIKSEAVLRIMEYLNLPFPQLAVFLKFVPLFLRDFAYDNVANNRYAMFGRSEAEACEIL

SEQ ID NO: 259057 - protein, 232 aa, Zea mays
  Clone ID: MRT4577_167846C.1.pep
MGSPLRTVHLRRSSPSSPADTVAITVDGGSGVDLARVGLALGLDPASVRPNGYFLSRGPGHVCSAVTWRALLAFFAKRGLPTGADAAAPVVVHGRPAAPTAPSSDSATPPCPKRKSGVEVERCPKKSKPQENKSVLPKRRHDVLSDEIILGLKRRLRLDDPIPAKKITQVQCSSETQRPVKFSCGFVNANGKRLWDVETQQPVKFSCSFVNANGKRLRDEEMITSLSCKKAR

SEQ ID NO: 259058 - protein, 63 aa, Zea mays
  Clone ID: MRT4577_167847C.1.pep
ETTIYYHVGDGSSHQGNVSSMEENTDAYLLHYPQELKDSTEPMHNIADPGNANLRPKLDEVLP

SEQ ID NO: 259059 - protein, 128 aa, Zea mays
  Clone ID: MRT4577_167848C.1.pep
RETASEESNVLCLSKSPNKHGRLYMKARPFPDGLADDIDKGEVFARQELKQRARYLAEKYEWDVAEARKIWCFGPDGTGPNILTDITKGVQYLNEINDSVVAGFQWATKEGALCEENMLGVRFDIHDV

SEQ ID NO: 259060 - protein, 47 aa, Zea mays
  Clone ID: MRT4577_167849C.1.pep
REYIAWAMGETGRRRSTNLTAKGGEGGEQPSSASDNHVHVKKKKKMH

SEQ ID NO: 259061 - protein, 213 aa, Zea mays
  unsure (1)..(213): unsure at all Xaa locations
  Clone ID: MRT4577_16784C.1.pep
MAWGQGARRPILGLLSRAQRQAARGYTSATFETHLSSNHFAQNGMIRRRFSSEVPASEQMNLIKQLRERTCAPIKDVKASLVSCNWDIEDAQKDLRKRGVISAAKKSSRTAAEGLLAIAQDEKRAVVVELNCETDFVARNDVFQYLASSLAKMALSAQDPGKLVFPFAPAYLENMSINLDHPKLSGETTVQNAVTEXAAMVXGDVKLRRGFML

SEQ ID NO: 259062 - protein, 75 aa, Zea mays
  Clone ID: MRT4577_167850C.1.pep
EAPAVALDTQEGGCISRMRVLFVFFPRPACCDARSVIVVATLWNGERCVSKMWGFWVTLISAPCCQACFSYIKDV

SEQ ID NO: 259063 - protein, 30 aa, Zea mays
  Clone ID: MRT4577_167851C.1.pep
LYPICVVNHEINFRLIHLKLLASVVSPLMG

SEQ ID NO: 259064 - protein, 115 aa, Zea mays
  unsure (1)..(115): unsure at all Xaa locations
  Clone ID: MRT4577_167852C.1.pep
YWDPVSFGALNKGGGFLQRKGLVPKDAFGKKLVIGFXPPFQVKGPWVFRGPDGSQFGKGQVFYKELFEWAQGGLFXRAQKRGAIPIIRARSPFRGXALLYPKRFKGRGLAGNKTG

SEQ ID NO: 259065 - protein, 38 aa, Zea mays
  Clone ID: MRT4577_167853C.1.pep
IPSQSVFPHTEMKKCGDLSMGPSSSVGPLYVCILLGWQ

SEQ ID NO: 259066 - protein, 82 aa, Zea mays
  Clone ID: MRT4577_167854C.1.pep
AVPGVPNIWCLEFYGKHMKMTCLGNSGLLMLSLKAKRMNRLVTYNLLKREWQKVPDCVLPYSRKKQWIACGTAFDPVPCALT

SEQ ID NO: 259067 - protein, 222 aa, Zea mays
  Clone ID: MRT4577_167855C.1.pep
IRHEADDGAGQDALLAALTELCEALSFCTEDVGGYFPTEAAARALVRRAGGGDGAGTTPDVILLSVRAITYLCDAMPRAADAVVRHGLLPVLCSRLLTIEYVDVAEQCLQAFEKISRRQPTQCLQAGMINAVLAFIDFFAASIQRVAVSAVANACKKVPSDCSQFGLDAFPTLCNLLQSEDKVIVEYFAAGSESIAYSFSTSHDLGDYDQKKKKKKNSRGGP

SEQ ID NO: 259068 - protein, 158 aa, Zea mays
  Clone ID: MRT4577_167856C.1.pep
MELSLAMIPSPAGYWEEHVAVVEAPDGKLGVFAHGFHHPDGKANLHYYTIVHDKEAAGDTKRWQLEKTIQLPWPSDHRSFCLRGTANGCLNVGLIIEVGEKKSVFMGSHRIRDAELFKIDVKSFQLQKICRARCAGSAAGECCWPYFGFPPSLSLPTV

SEQ ID NO: 259069 - protein, 48 aa, Zea mays
  Clone ID: MRT4577_167857C.1.pep
GHDATRSNVHRNLSFFFRIYTQFFEPEGIANAQRSLRLGQEEKALGVR

SEQ ID NO: 259070 - protein, 187 aa, Zea mays
  Clone ID: MRT4577_167858C.1.pep
TASQDNNTTARPVHRAGAPDASRGSSHPTDLSFAKEDPWTNNVKQRELLLDEVVGSITGGALRTSSSVLGISLVSNTKGKRSEREGKGHNRDSLRSGRPSPSNAKGERKNKTKLRQKAANISAPSGGLQLPAKTTPPSSGNGKEESAAAAAAAAARHGGDPAANASNDAEMPDLANLELPGLDADFG

SEQ ID NO: 259071 - protein, 116 aa, Zea mays
  Clone ID: MRT4577_167859C.1.pep
SCVFFFLFFFFFSFAYGNFFGENLDACICSGKTRNMEQQRETSVQQHAVAYRHTTRPSIERLNTRRGDTIWDHKPHTLCFHAWSHGLVATRAIYGNTSRPLGELISGIAGSKNNGG

SEQ ID NO: 259072 - protein, 119 aa, Zea mays
  unsure (1)..(119): unsure at all Xaa locations
  Clone ID: MRT4577_16785C.1.pep
SPPLPFXGGXPRGRRRAXWRGXXXXXAXLXXXXXXXLGCWXCXLVAPXXPFFSXAVFRRRLNPRCRFXFXLGPDKKKCFLAPSXVWSXXXGXCPSARRLPPPAPPWRWXXALSXFSFFP

SEQ ID NO: 259073 - protein, 84 aa, Zea mays
  Clone ID: MRT4577_167860C.1.pep
ADPFWSNNRQSSMCNSCVCALDMYKRQSCSKNRFAIQKCQSDHSLSICQACDVNFCPQNVVQSQCHKCRHMYCKRCPHSTASLT

SEQ ID NO: 259074 - protein, 112 aa, Zea mays
  Clone ID: MRT4577_167861C.1.pep
PPPHFFPFPPLAALNSGAFFRGPQLFPFTQLVFVGPAPFLTQQRWLPFPRPALPNGGPPFQRPQLGPFPPLVFATPPGFSPPPPLGGAPFLFAFGLRSPNKVFWMRFGGPPK

SEQ ID NO: 259075 - protein, 76 aa, Zea mays
  Clone ID: MRT4577_167862C.1.pep
QLWFKGYTFGLVFAWSNILDPPPFPDYFFGNGFLTTGFSPLMGGGFCVVKIQPRGSFLGFWGNPGETSSPQKFIFF

SEQ ID NO: 259076 - protein, 73 aa, Zea mays
  Clone ID: MRT4577_167863C.1.pep
ESLASILVRDLTWSRTIQDSTRISSMVCLLPTFKCLETMSFGISAPKDVTIKVSVISKHPDFSSKIRGNVSND

SEQ ID NO: 259077 - protein, 49 aa, Zea mays
  Clone ID: MRT4577_167864C.1.pep
SHPFCPKRSMSVTSLVTHRTIIVISQVDLCNTVTRLIIHILVWYSPTLL

SEQ ID NO: 259078 - protein, 64 aa, Zea mays
  Clone ID: MRT4577_167865C.1.pep
LLAVTKRVGNHISLNFLRLEALHKYCMIVEVAKEVKWNYPDIIMHTEDTRKEKAKAGYDRRKQL

SEQ ID NO: 259079 - protein, 67 aa, Zea mays
  Clone ID: MRT4577_167866C.1.pep
EAYNSKGAVVSGDKSKEVLVKNIWVFERSLFPPGAYWGVCGKIPLYPYLFWCPRSISPPGAEQELVQ

SEQ ID NO: 259080 - protein, 104 aa, Zea mays
  Clone ID: MRT4577_167867C.1.pep
NCILSKTKGIKTNTKTFRVNFMLHSKLSWYEMDTTTISPTKVFTRQCTIEGLALQFQNIPCSVKAKQPTRETDKHILPAKTSVRTNAFHYKTLTAQCKIKRIKL

SEQ ID NO: 259081 - protein, 151 aa, Zea mays
  Clone ID: MRT4577_167868C.1.pep
CTDVETGSKVSEDTQRQPLGEDVGEPQRGGDAVNPNVTIGDPLADKVQVASATATFVMMFSSSLSVVEFYFLHRFPLPFAGYLIFISILAGFWGQCLVRKIVHVLKRASLIVFILSSVIFVSALTMGVVGTQKSISIINNHEYMGFLNFCE

SEQ ID NO: 259082 - protein, 479 aa, Zea mays
  Clone ID: MRT4577_167869C.1.pep
MVMEGRTGSLYGRLNKSSTRGFLAYTAAGAACAAVLACFVLSAADSPASAARNDGERLRLSSRSPRVWPDLAFNWRVVVATVVGFLGSAFGTVGGVGGGGIFVPMLNLVVGFDTKSAAALSKCMIMGASASSVWYNLQVSHPTKEAPVIDYKLALLFQPMLMLGITIGVELSVIFPYWLITVLIIILFVGTSSRSFYKGILMWREETRILTETRGREEQSKSTCAASDVVIDPSYGEPLLTQPQPKKSAWETFMFNLRWKNILVLMSVWSLFLVLQVLKNNSKSCSSFYWVINVLQVPVAVSVFLWEAMQLCRESHARRMNGNLECVCEASIEWSPAQLIFCAFCGLLGGTVGGLLGSGGGFILGPLLLELGCIPQVASATATFVMMFSSSLSVVEFYFLHRFPLPFAGYLIFISILAGFWGQCLVRKIVHVLKRASLIVFILSSVIFVSALTMGVVGTQKSISMINNHEYMGFLNFCE

SEQ ID NO: 259083 - protein, 86 aa, Zea mays
  Clone ID: MRT4577_16786C.1.pep
IVVLLPHVQLQVVYVLQVVMPKPLPPSARSAPLATSSDLSSMVRILYVCLIAMIPCAHRAAYLPELKDTVRVSRLQHLLYSAATIR

SEQ ID NO: 259084 - protein, 250 aa, Zea mays
  Clone ID: MRT4577_167870C.1.pep
MAAPPPSYPAALKPEIGPDGLARDSPVIAYTEKVILEEQLQLKKYIQENYSKIRDVEKELESLTLEMKLTAGPKKAALEHLRKKIEISTEKIRLAKVKEEHAKKTWEVAAQVVKDEEDAKQKLCDDLNHLVQESAASQYARLEELKKRLESLNPIRDSVNVSGVYTAQHATLNSVPQQPTAQNPADVTGRQNIATKPASMQQQPIPAEAEKKRRPSNSARGRGGVMILPKGREGSGSGWTGAGFDVDSRT

SEQ ID NO: 259085 - protein, 55 aa, Zea mays
  Clone ID: MRT4577_167871C.1.pep
PSCLLFAMNVAYFATLCETESSCSSGTHCGSSAHSSPRVMLIRRSLYCARARYEG

SEQ ID NO: 259086 - protein, 100 aa, Zea mays
  unsure (1)..(100): unsure at all Xaa locations
  Clone ID: MRT4577_167872C.1.pep
EMKLTAGPKKAALEHLRKKIEIXTEKIRLAKVKEEHAKKTWEVAAQVVKDEEDAKQKLCDDLNHLVQESAASQYARLEELKKRLESLNPIRDSVNVSVSE

SEQ ID NO: 259087 - protein, 74 aa, Zea mays
  Clone ID: MRT4577_167873C.1.pep
VDLFYREEHGYVASLLFMVAAMATACCSVDPSPPPPCVWREDRFPSSVGDGSAPPMAPVAEAQIPSRWRDREDR

SEQ ID NO: 259088 - protein, 179 aa, Zea mays
  Clone ID: MRT4577_167874C.1.pep
PTPRLHLEETSEFVRSSFPMAAMARSNSSNGHGYHHEASTTSSSSSSTSLARGRRSLEQQVPGTPGRPLLFLTSSSSSPAHPQLVSSRRSVPSKWEDAEKWLTQSSDHRGHHHGKAASKQHHIGGPAPATARRTSLDANALALYTLPAEVLLKDKYTDNVEPSKESFVFRSSYCEPVKN

SEQ ID NO: 259089 - protein, 114 aa, Zea mays
  Clone ID: MRT4577_167875C.1.pep
RARSTRSLLQRAQEPDRHHEGVARCPTLYCGLAGSATSTHTSGMLRLDNHRRQLIYRRRTHISPPDHLTPPVMCTRWHLPPPAHLPPPVHVLAARVIMPRDTMPLPYSTARGSG

SEQ ID NO: 259090 - protein, 284 aa, Zea mays
  Clone ID: MRT4577_167876C.1.pep
MSSGKRSFFAPKKKATNPFDSDSDDDKPQQRPARASSVPPPDEQRGSSSLFGAGDRGGLFSSAANHHYRNDFRDAGGLEGQSVQELEGYAAYKAEETTRRTRGCVRIAEEMRDTASKTLVTVHQQGQQIHRTHMMAVDIDQDLSRSEKLLGDLGGLFSKKWKPKKNGAIRGPMLTRDDSFIRKGSHLEQRQKLGLADHPPPSNARQFRSEPSSALEKVEIEKAKQDDDLSDLSNILTELKGMAVDMGSEIERQTKAMGDAEKDYDELNFRVKGANTRARRLLGR

SEQ ID NO: 259091 - protein, 41 aa, Zea mays
  Clone ID: MRT4577_167877C.1.pep
PAAFPTSLTTDETRLQLPMLLDCPQADRLDMFNYSYNVILV

SEQ ID NO: 259092 - protein, 128 aa, Zea mays
  Clone ID: MRT4577_167878C.1.pep
MFTSVLSPTVVSRTLLDPELGAGLLQTLFLDTTERPPLSMGRLVQDLLRKENNVAVSVAPAPHDKRNREVSAPKATALRCCETARCSIVKAGSGGLTFDHLGLRGPLGENTGLLRAPKNGPEAVKHFG

SEQ ID NO: 259093 - protein, 82 aa, Zea mays
  unsure (1)..(82): unsure at all Xaa locations
  Clone ID: MRT4577_167879C.1.pep
KQRNGRGQAATYLPTSVAHCKLTQMNMDGLYLAPHTRSXCLPHHDSRVDRCRHCVLRHRRLANTLCATLLLATATTVTVYAT

SEQ ID NO: 259094 - protein, 77 aa, Zea mays
  Clone ID: MRT4577_16787C.1.pep
NSNIQHLRHPRHTICPVNLQEHRSFFRSLGHQPLSSFLFWQHMNLYLIFLDLSLSKKDNHYSHHTSILLEEQNGWAC

SEQ ID NO: 259095 - protein, 213 aa, Zea mays
  unsure (1)..(213): unsure at all Xaa locations
  Clone ID: MRT4577_167880C.1.pep
MGHSPSSLSKSGPSSPPRRSRSFSPMAPPQQLRLTAPLQVAAGGSGSDSSSSFVPPARDYTQDLPDEILALVFASLSPTDRNACSLTCSRWMEVDATTRHRLSLDARAALGNAATALFSRFTAVTKLALRCARDSGLDSLSDHGAAALAAALPSERLARLKLRGLRKLSDAGLASLAAGAPAIRKLSIASCTFGPRAFVAVLQSCXLLEDLSV

SEQ ID NO: 259096 - protein, 169 aa, Zea mays
  Clone ID: MRT4577_167881C.1.pep
FFLAATFFSPWLLPPRAATPFFPNSMEQRLPSPSSASPSRREEQTPSSPSPSRPHPWRPSPSFFLLLISPWCSSPFFTTPSSGSSFHGGRPDFFSPLLGLPCTGAAASMADLSSSAQGAPVPLLLLPRTTAARPTFPRCAAPQQNAAVPAATASKSLRPALRSKNSSPA

SEQ ID NO: 259097 - protein, 169 aa, Zea mays
  unsure (1)..(169): unsure at all Xaa locations
  Clone ID: MRT4577_167882C.1.pep
MKEGFPLVSGVNYPPTKNPSVLSSWFSTGTSLARPSLAAALGRGRFRGKPTGRRIFSTPKEIAAGPXGRPRPFKKKEEEEEEEDEGEEPEEEDSEDESEDKPNLKGTEGFIQMENPTLVKGKILKAKEVDLGKTTELSRREREELEKQKAHERYMILQEQGKTDQARKD

SEQ ID NO: 259098 - protein, 97 aa, Zea mays
  unsure (1)..(97): unsure at all Xaa locations
  Clone ID: MRT4577_167883C.1.pep
VSVELSFMEAVQGCRKTITYEADTFCGTCNGSGVPPGTVPKTWXTCPGFCVIYIPKGIFTVQCTCSLCHGSGKNVKNFCKTCQREHVVKGKTSVKLD

SEQ ID NO: 259099 - protein, 124 aa, Zea mays
  Clone ID: MRT4577_167884C.1.pep
SPSPYHVRRYVSSVADEGMDCALAAAVYGGKGGVLSQLRELKAWFEEQTLFHFYSASILLGYDAAAVAAGGDGGGVTVKLVDFAHVAEGDGVIDHNFLGGLCSLIKFVSDIVPETPHTQPLGPS

SEQ ID NO: 259100 - protein, 164 aa, Zea mays
  unsure (1)..(164): unsure at all Xaa locations
  Clone ID: MRT4577_167885C.1.pep
FFFLFFFFFFFFFFFFFFFFFFFIFLFCPREGEPGKAGAAPEGEPSRTRGGGKKGRGNHRKKRPPREQGHTTKNPKKKKGKPKKEKAGGQKKEGKKQKRPRPKSQTKKPKNRKEKAKKKADNPRGKAPSKXNKEEPYSHKGKEKNRQALKKLGQKEQKEGAHEG

SEQ ID NO: 259101 - protein, 288 aa, Zea mays
  unsure (1)..(288): unsure at all Xaa locations
  Clone ID: MRT4577_167886C.1.pep
MSDLHPPEHQVAGHRASASKLGPLIDGSGLFYKPLQAGDRGEHEVAFYEAFSAHAAVPARIRDTFFPRFHGTRLLPTEAQPGEPHPHLVLDDLLAGFQAPCVADIKIGAITWPPSSPEPYIAKCLAKDRGTTSVLLGFRVSGVRVVGPEGAVWRTERPEVKAMDTAGVRRVLRRYVSSVADEGMDCALAAAVYGGKGGVLSQLRELKAWFEEQTLFHFYSASILLGYDAVAVQQXDGGGVTVKLVDFAHVAEGDGVIDHNFLGGLCSLIKFVSDIVPETPHTQPLGPS

SEQ ID NO: 259102 - protein, 50 aa, Zea mays
  Clone ID: MRT4577_167887C.1.pep
DLIRAAEAARPSQREQKIDSVVLVNNGQLSDGSVVSNVHAPILGYAFLVL

SEQ ID NO: 259103 - protein, 108 aa, Zea mays
  Clone ID: MRT4577_167888C.1.pep
PPREPGIRFFRVFFSPKSFKPLFPIILGGNWAPLLVSQPPPWGGKICLFSRANPKTGMGPHFKSPLNPVKFFGPPFKSPLTPVKFFGPPLKGPPETGPFNSPKFFGPP

SEQ ID NO: 259104 - protein, 88 aa, Zea mays
  Clone ID: MRT4577_167889C.1.pep
MARSLVLVATLTAVLLAAAPPPTRAAWVESDYPSSVPCGVTIPVEQCDPAVTAANAACRDMCHYGGRRGGRCVSPGRLALVQGCHCRC

SEQ ID NO: 259105 - protein, 70 aa, Zea mays
  Clone ID: MRT4577_16788C.1.pep
ERLVAKAPEKGHVFLKVDWTNGRMRMAKMLNVSISLLVDYVFSYALDKSRYATRHALFLFLFCFPYVLIP

SEQ ID NO: 259106 - protein, 70 aa, Zea mays
  Clone ID: MRT4577_167890C.1.pep
LRSSRRANSLEGHCDTVDDHTLSGESCFSLRRNPWKRVSVATTRTATVESSSRTKGEVDRTTNASEAGVK

SEQ ID NO: 259107 - protein, 98 aa, Zea mays
  Clone ID: MRT4577_167891C.1.pep
TPTKWSLIAGKPVAGRGGPLKGPACMEAKRGPLQQAGSFHYTRWFVKKNWRHGSNSASWWKAATMGIGPGCGTKPAGPGRLAQSDLRQSVAARVIAGR

SEQ ID NO: 259108 - protein, 156 aa, Zea mays
  Clone ID: MRT4577_167892C.1.pep
PAAAANSSTLNDGASALVLGSKAIAQQYGSGSRVLAKICGYADAATAPIDFPVAPAKAVPIALERAGITKDQVAIWEFNEAFASVILANSKILGLEGAKVNPLGGAISLGHALGSSGSRILTTLLHQLKPGEYGVAAICNGGGAATALVVQRVEPV

SEQ ID NO: 259109 - protein, 72 aa, Zea mays
  Clone ID: MRT4577_167893C.1.pep
CLELHQYPRSPLPRRVPASLTARLVRCLAVLKVTTSDTTRRRSSSPPSEATDARARVGDGGVSGSRYAWSCC

SEQ ID NO: 259110 - protein, 46 aa, Zea mays
  Clone ID: MRT4577_167894C.1.pep
GHLHTYRFCDNVWTFILTDASFKNEEATEQVGKVKIVACDSKLLGQ

SEQ ID NO: 259111 - protein, 38 aa, Zea mays
  Clone ID: MRT4577_167895C.1.pep
FGSIVSVITGSTMSGSHVLSVSCGMACRRFCRHTQKQH

SEQ ID NO: 259112 - protein, 119 aa, Zea mays
  Clone ID: MRT4577_167896C.1.pep
KTLYMQLHADCTPTVSSEFGSRRLPRVRAGGALPPCPKCFATASSRLPFVVATALSVVVATVPSSRPLVDDFFPFLSSLSSSPAPVGGIAGAGAYGRRRPTSRAPELQFRLTTSQRRSA

SEQ ID NO: 259113 - protein, 89 aa, Zea mays
  Clone ID: MRT4577_167897C.1.pep
MATFELYRRSTIGMCLTETLDEMVSNGTLSPELAIQVLVQFDKGHLHTYRFCDNVWTFILTDASFKNEEATEQVGKVKIVACDSKLLGQ

SEQ ID NO: 259114 - protein, 106 aa, Zea mays
  Clone ID: MRT4577_167898C.1.pep
MATFELYRRSTIGMCLTETLDEMVSNGTLSPELAIQVLVQFDKSMTDALENQVKSKVTVKGHLHTYRFCDNVWTFILTDASFKNEEATEQVGKVKIVACDSKLLGQ

SEQ ID NO: 259115 - protein, 229 aa, Zea mays
  Clone ID: MRT4577_167899C.1.pep
KIQKKKKKKKKNKKKKKKKKKKKKKKKKKKKKKKKKKKKKKRVFWGPTGKKKGALGWPKKLFGRVFFCEGGKKGPCFPNGEPFHWVGPRGGLLPGGGGPKEGGPPVLALFQKKPPPKKPLKLGGGGQPQKTLCQPQGGFQTGRAKNEKPGPTKGPLFQGGNPKKEIPRRGVAPKGAKGPPNGPRKAPREGPLVGRGPRPFHREGTRGSPQGAPQLALIQKGVGGNPKTP

SEQ ID NO: 259116 - protein, 248 aa, Zea mays
  Clone ID: MRT4577_16789C.1.pep
MEFWGLEVKPNQSVKVSPDDEHFLHLSQGALGEVKKDDKATMFVKIGDQKLAIGTLSTDKFPQIQFDLVFEKEFELSHNSKTSSVFFSGYKVFQPAEGDEMDFDSEDESEEEEEEKIIPALTKENGKPEAKEQKKQVKIDTAAHSKSKAAAKDVGKSKKDDDSDDDDDSDEDDSEDDSGDDGALIPMEDDSDDSEDGDDSSDDSEDSSDEEEEETPKKQETGKKRVAGSVLKTPVTDKKAKIATPSGQ

SEQ ID NO: 259117 - protein, 121 aa, Zea mays
  unsure (1)..(121): unsure at all Xaa locations
  Clone ID: MRT4577_1678C.1.pep
LVWQSSRNSLCAEAQDCELRSQVTCSPVVAKTRGKSAQAGSVEVGAVVPLRRSRRNSLRAAESEEVEVAVFVDRKRKCKNQENDRLLFSALRLELRPELQEDQAXAVAAAVLPPLVEPKRG

SEQ ID NO: 259118 - protein, 116 aa, Zea mays
  unsure (1)..(116): unsure at all Xaa locations
  Clone ID: MRT4577_167900C.1.pep
RKREKHRQRTKPTRSEQDPKRTKPGQKTPHTRRKAGRAQRPHAGSPQRDQAPEQDKTQQQNSPHAATEDQEKTHRGANKPPSPTRGREPEKDTEPRAAQARAKGAGPAGDAPGRXR

SEQ ID NO: 259119 - protein, 51 aa, Zea mays
  unsure (1)..(51): unsure at all Xaa locations
  Clone ID: MRT4577_167901C.1.pep
XXHQXICLLLATIMIHIMQESSQQXCLLCCRXMNRNXPYDKLCCVLGTTXF

SEQ ID NO: 259120 - protein, 72 aa, Zea mays
  unsure (1)..(72): unsure at all Xaa locations
  Clone ID: MRT4577_167902C.1.pep
ISVAILAVYAEVSCWTMTGERQATRIRSLYLKSVLRQEIAFFDVEMTTGQIVSRMSGDTXLVQDAIGEKGIA

SEQ ID NO: 259121 - protein, 37 aa, Zea mays
  Clone ID: MRT4577_167903C.1.pep
PLCTTLSLYVFVSYFSIFDSCKAGHILVSRINSNPFP

SEQ ID NO: 259122 - protein, 61 aa, Zea mays
  unsure (1)..(61): unsure at all Xaa locations
  Clone ID: MRT4577_167904C.1.pep
QTLQGIHPKNIQSVNVKSPGPHCAQTEVIATLKNGRKACLNPASPIVKKXIEKMLNSDKSN

SEQ ID NO: 259123 - protein, 84 aa, Zea mays
  Clone ID: MRT4577_167905C.1.pep
SQHPRELSPPGPHRRGACPTSPPPGISLAAVAEMGSVSFPGRVLFGAAFLLSAYHKSNEFRADGGPTPNALHPKFNVDPPKSYL

SEQ ID NO: 259124 - protein, 41 aa, Zea mays
  Clone ID: MRT4577_167906C.1.pep
PMTTSRVSIALHDKRAIAQFSSNTRYVIIRTARPPGDSLFA

SEQ ID NO: 259125 - protein, 369 aa, Zea mays
  unsure (1)..(369): unsure at all Xaa locations
  Clone ID: MRT4577_167907C.1.pep
MVTPASTAPASTASAAAATGSGREVVRLLRYPARCLLPLAAAPRTGTRLTTVLRARTQPAEPELVEQSVNTIRFLAVDAVEKAHSGHPGLPMGCAPLGHVLFDEFLRFNPKNPAWFDRDRFVLSAGHGCMLQYALLHLAGYNGVKMDDLKTFRQWRSRTPGHPENFETPGVEVTTGPLGQGFANAVGLALAEKHLASRFNKTDMKVVDHYTYVILGDGCQMEGVSNEAASLAGHWGLGKLIAFYDDNHISIDGNTDIAFTEDVLARYEALGWHTIWVKNGNTGYDDIRTAINEAKGVKDKPTLIKVTTTIGFGSPNKANTYSVHGNALGSKEVEATRSNLGWFHEPFHVPDXVKEHWSXHIDXGASLEA

SEQ ID NO: 259126 - protein, 70 aa, Zea mays
  Clone ID: MRT4577_167908C.1.pep
HGNCRWRQSRLMGRHHCSPASGPRRSSPSRLGSRRHHAYEFGNRRRNSESRSHRTPWGSPPRALGHHRTC

SEQ ID NO: 259127 - protein, 74 aa, Zea mays
  Clone ID: MRT4577_167909C.1.pep
SVAVEGEDGGQMGSGRCFFECLLRLLNFILTVAGLAMVGYGIYLLVQWIKISQDRIGWASTVEVLDFCRPLLGA

SEQ ID NO: 259128 - protein, 90 aa, Zea mays
  unsure (1)..(90): unsure at all Xaa locations
  Clone ID: MRT4577_16790C.1.pep
ALDKGPMAGAGATFIVFGXXXSKGPGSSSSPVTTAIFLFFFVVVVGVLVSARWITTTTHLSTTNLDQWSSKLVGKLRPFISKQKFLQSLR

SEQ ID NO: 259129 - protein, 99 aa, Zea mays
  unsure (1)..(99): unsure at all Xaa locations
  Clone ID: MRT4577_167910C.1.pep
RKYGDHLYGKQEYDEAMSQYIHTIGHLEPSYVIQKFLDAXRIYNLTNYLEKLHDRGLASKDHTTLLLNCYTKLKDVEKLNHFIKYNSCLPAFFATIACS

SEQ ID NO: 259130 - protein, 255 aa, Zea mays
  unsure (1)..(255): unsure at all Xaa locations
  Clone ID: MRT4577_167911C.1.pep
GRAGAPASVPPAAGSLLENTPATNVPVTMPANSNAATGAPAPVPPAVGSLPENTPATNVPVTMPANAXTPTPTTTPTXTGSPALVPPAAESLPENTPATNVPVTMPANANASTGAPAPVPPVIGSLPENTSAINIPVTMPTGAPVPVPPAAGSLPENTPATNVPVTMPAXTPTPTQRXGSPVPVPPAIGSLPENTPATNVPVTMPTNANAATGAPAPVPPAXGXLPEKHPSTSVPVDMPANANQPGHVVPPAVIV

SEQ ID NO: 259131 - protein, 59 aa, Zea mays
  Clone ID: MRT4577_167912C.1.pep
LKESKRYSSFKIIKGMACGAICLDSSGSEVINESYRPLLSEIFHNPSLFSFMVLNDVQH

SEQ ID NO: 259132 - protein, 55 aa, Zea mays
  Clone ID: MRT4577_167913C.1.pep
LTFIDSPARMMFYWMMCWSWLAQNSVGHFHWCYTSFMTINENKLGLWKISESKGL

SEQ ID NO: 259133 - protein, 395 aa, Zea mays
  Clone ID: MRT4577_167914C.1.pep
DEAEKLFQAALLEAKEGFGLRDPHVASALNNLAEFYRLKKEHVKAEPLYLEAIEILEESFGPDDIRVGRTVHSLGICYHLQLKLAQAQTCYERALKIEGRVLGVGHPEYSSTMYSLAKVLSLQGKRKNAECLIEESIRILEEAGLGDSLTCLRRMVSLSRELIKSRRFAEAEIWQRKILHVLELSEGWDSLVTARAAELLSLNLETMEKLKESEELLERCLAVKKKILPEDHLQVAYTLVHLARLTLHRVVKDRDVNSDVTAYYLAKAKQFSNDSIRITEGQLNSSRKDQNKINNTSTADTDKSAAIILFQALHVFGLIDIAAKQLLGQGEQDYNSVQDALQKCVSLYKEPHTRRLVKNAAKQDYMICLTSLIDMVQSLFPIPHIPGLQELLCEA

SEQ ID NO: 259134 - protein, 103 aa, Zea mays
  Clone ID: MRT4577_167915C.1.pep
YRPTHYIKNRTSPKPTTHTKNTGHDQILNGQILPTEQGDTELCHPLPAKEHKKKKRSQKRTGKGLVKRKKKNFYHEHAKNRCVKTAPHLKRGLKKIRKGPLYG

SEQ ID NO: 259135 - protein, 139 aa, Zea mays
  unsure (1)..(139): unsure at all Xaa locations
  Clone ID: MRT4577_167916C.1.pep
MTHEARAPIGGGRRTARPFQRAQDCTALQAVISPTTPCIEGCNDTDYSWKTKXLTXQATTACDPAITTAGIYPALCNVPAAEPTHAARSENXSXPKRLMYXAEXPTVLATSSLLYEEDVIAYHTGVEDPLKPYNGALNI

SEQ ID NO: 259136 - protein, 41 aa, Zea mays
  unsure (1)..(41): unsure at all Xaa locations
  Clone ID: MRT4577_167917C.1.pep
RDHRHRPVGGVVGHLVRRCFRVRGFGGFRPRPNSAXWRPPX

SEQ ID NO: 259137 - protein, 140 aa, Zea mays
  unsure (1)..(140): unsure at all Xaa locations
  Clone ID: MRT4577_167918C.1.pep
LINAVDYCHRRRVYQREIQGENDMVDAIGKFNGLYCGLSALSKTVAEDTVLRTTCGTSNYVAAXVINNNGSHVPNADLVECGLILYALLAGYLAFEHSNLMLLYKKIFKADLRCTSXLSTSAENIITNILEPNANNRITI

SEQ ID NO: 259138 - protein, 110 aa, Zea mays
  unsure (1)..(110): unsure at all Xaa locations
  Clone ID: MRT4577_167919C.1.pep
LVAVPPPRVXPSPGAAPWTSPRAPPARPCSRGPRSSARSRGRGAPPAPDPPPPRPPPPRAGTPAPXHPPXASRSRPAAPTPRRESAQTPPRAPSRATRPPPLLAVTRRGP

SEQ ID NO: 259139 - protein, 95 aa, Zea mays
  Clone ID: MRT4577_16791C.1.pep
WDVVVVDGPSGAAPEEPGRMGTIYTAAALARAMAGGEAVDVAVHDVDRTVERWYAWEYLCEDNLVAAKGRLWHFRIAAGAGPTDAFCSIGPVHIL

SEQ ID NO: 259140 - protein, 28 aa, Zea mays
  Clone ID: MRT4577_167920C.1.pep
CILLKHQSPQVQLQGKCTLFNALKDKFR

SEQ ID NO: 259141 - protein, 87 aa, Zea mays
  Clone ID: MRT4577_167921C.1.pep
ITPLTTSDSNPNAPVESPPHQSLFYRHTDSPHSNSPIPKLDDNLCMLNFQTEFRMAHCQSHLSENDGVNAREINKDKEEKNKDDLKR

SEQ ID NO: 259142 - protein, 61 aa, Zea mays
  unsure (1)..(61): unsure at all Xaa locations
  Clone ID: MRT4577_167922C.1.pep
MTPISKEGRGSRYRRHFLQVALSWRERGQRHRSKRQALLGAPPLXCWRVRTRRRESSSVWR

SEQ ID NO: 259143 - protein, 88 aa, Zea mays
  Clone ID: MRT4577_167923C.1.pep
SARGCSDFSPADAKVATDCPLNDMLLVISYLASDALALQDQESLRAHHTELGPPLHAHYVVRTEQGVRLMHGSPGRRHQLLDASLWPI

SEQ ID NO: 259144 - protein, 89 aa, Zea mays
  Clone ID: MRT4577_167924C.1.pep
LCTQGVPTSTHYGSTMVERLQRAIRRTMVTLFARLTVEDARWAQPITSPHTPRARGRYNTKSTVAVALTTLSLDATVSTGMILGGVGSR

SEQ ID NO: 259145 - protein, 123 aa, Zea mays
  unsure (1)..(123): unsure at all Xaa locations
  Clone ID: MRT4577_167925C.1.pep
AEHAAAFPDIGPVITKSFQVRRKGVLYRLSDSMTVMSSFTKIEGGCFLHVNMAEATEATYCCQDAPAIDDKRLSDVSLGIHVKNHIEELPVMASDVACDLLPRDLEXCNDDATLNNXQAHDAL

SEQ ID NO: 259146 - protein, 80 aa, Zea mays
  Clone ID: MRT4577_167926C.1.pep
RYATRRTRRTICYSTLHMYLISCPFQFSSRYLFPIPTIVVHHIMLCNICPLCCTFLRAKKKKKKPNKINSRRRQDERKTT

SEQ ID NO: 259147 - protein, 180 aa, Zea mays
  Clone ID: MRT4577_167927C.1.pep
TPMRTRCLCSHWLAARWGPRASDRDAVLCFFPPARRARVQPNAALLSTNSDYVTNQLQSFMPPTRGYIRDPSYRLLHCLLRISPWGIRNSVSRATWRTRRCESSTPCAWFEPRSSPRHAVDTGGSANDVGCPRRLGFRSNVRQRDLHRTPTLSWSGITSPRLVTSEFPSCLSSFPPHHAP

SEQ ID NO: 259148 - protein, 89 aa, Zea mays
  unsure (1)..(89): unsure at all Xaa locations
  Clone ID: MRT4577_167928C.1.pep
PGSSSGGDTMKQLVRKGLTPRWWGDLDVNQHVNNIXFICWIXDSAPIAILDXHDLASMTLDYRKECGRYSMLQSFTIVVGECLDSDTDS

SEQ ID NO: 259149 - protein, 77 aa, Zea mays
  Clone ID: MRT4577_167929C.1.pep
RSGSTGTVSVSICRGGVACHCGVVLMISESSRIESNLEFTQCSQVSGPDSCKLGMVFMHVVDSVRALSITSYSFYPP

SEQ ID NO: 259150 - protein, 56 aa, Zea mays
  Clone ID: MRT4577_16792C.1.pep
VTPGFNSKKVTTEAIADYPNLRSIKMAIAAHLHNSRRPLLHASTRPNPPYTELDVN

SEQ ID NO: 259151 - protein, 50 aa, Zea mays
  Clone ID: MRT4577_167930C.1.pep
LYIRYPSTDPLGAIALQKQALSVASVSATCTNCGDGRSARGERTHGRQFR

SEQ ID NO: 259152 - protein, 120 aa, Zea mays
  unsure (1)..(120): unsure at all Xaa locations
  Clone ID: MRT4577_167931C.1.pep
RQFLIPCLCVLAXLGLGVSVCLCFXISVSLFFCVCVCVHVCICVYSPVVPVVCVCVCVCXCVCVCFVVSALFLFFYLFIFLVFSPSLSLTVTLSLSQTVFVSLSFSPPPPPTPSPCLKSL

SEQ ID NO: 259153 - protein, 54 aa, Zea mays
  Clone ID: MRT4577_167932C.1.pep
HASGHVLGDPRVLPTFNELEQRRLSLVQLTRSQRNNLWMISRVWNFVESDLVGF

SEQ ID NO: 259154 - protein, 57 aa, Zea mays
  Clone ID: MRT4577_167933C.1.pep
PTRPPTRSRFRGLLLAQNGGMARGPVDNPAESEMCKFQVLLTSNYLHYKYHFFPNIT

SEQ ID NO: 259155 - protein, 43 aa, Zea mays
  Clone ID: MRT4577_167934C.1.pep
SRAASCQALKLFQGQRNKITSHCRLQAKEYNNYYISLKFKVLK

SEQ ID NO: 259156 - protein, 126 aa, Zea mays
  Clone ID: MRT4577_167935C.1.pep
LTRGDPPGAPGGTPPPGKSRFGGPGESQLALPPPFFPFFFPFQALPIPFCRPPPVKGWFPRGCGTGSPPLTGPVPFGENPVEGFIVSPKKKKKKKKKKKKKKKKKKKKPKKKKKKKKKSTLRCYHC

SEQ ID NO: 259157 - protein, 123 aa, Zea mays
  Clone ID: MRT4577_167936C.1.pep
VFATVVANREQHQLEQFLPGLSQLALVNPAAYLQRQQLLSFSPLAVANAPTSLQQEFLQQFVPALTQLAVANPVAFLQQLVPFTQLTLSNFVGSLQRGQRFLNPLAVGTPLVAAFLQRQKLLP

SEQ ID NO: 259158 - protein, 92 aa, Zea mays
  Clone ID: MRT4577_167937C.1.pep
NSLGDDHSSRRPPIHRLVDVKKSYRFIAEERTPGHCRTLTNLLMQWTPGDRRLLHRGATPPSHLYVTARAGPTLEVAAVITIYQGVFSVRAK

SEQ ID NO: 259159 - protein, 50 aa, Zea mays
  Clone ID: MRT4577_167938C.1.pep
GRPFVFYVGTFFFLCFQHRKPRVFPANDPLHLNPRTFNTPNTKLFCGRLR

SEQ ID NO: 259160 - protein, 90 aa, Zea mays
  Clone ID: MRT4577_167939C.1.pep
AQPRGRTSDSRALPTTHLNAPLTPISFLERTTLVYHDRPAIVAAGHAAAPPPRTWRQTRDRCLRLAAALAGLGVARRDMVSLCPTVALPR

SEQ ID NO: 259161 - protein, 31 aa, Zea mays
  Clone ID: MRT4577_16793C.1.pep
PCLVCSLAYYGLMLASSAPLPNGHAALEYKK

SEQ ID NO: 259162 - protein, 67 aa, Zea mays
  Clone ID: MRT4577_167940C.1.pep
SGVGGGRKLGNCGCECGGRRAISFGQAEHEHRHPEGAGDECRRARGVGFGSEDGQGGHDANVAACRG

SEQ ID NO: 259163 - protein, 59 aa, Zea mays
  unsure (1)..(59): unsure at all Xaa locations
  Clone ID: MRT4577_167941C.1.pep
PWTLFGPKKVGPKNLTGEKTRSPAKELNKVLVATNQGKHIDPXLLECPKEWNGEPLPLC

SEQ ID NO: 259164 - protein, 61 aa, Zea mays
  Clone ID: MRT4577_167942C.1.pep
ELLLGLVLCMWAGLAVPTKFLSVLPHSDENRIVSLPANLDFMIFNHRGRVLPSDSDLKLRT

SEQ ID NO: 259165 - protein, 447 aa, Zea mays
  Clone ID: MRT4577_167943C.1.pep
MGKEKTHINIVVIGHVDSGKSTTTGHLIYKLGGIDKRVIERFEKEAAEMNKRSFKYAWVLDKLKAERERGITIDIALWKFETTKYYCTVIDAPGHRDFIKNMITGTSQADCAVLIIDSTTGGFEAGISKDGQTREHALLAFTLGVKQMICCCNKMDATTPKYSKARYDEIVKEVSSYLKKVGYNPDKIHFVPISGFEGDNMIERSTNLDWYKGPTLLEALDLINEPKRPSDKPLRLPLQDVYKIGGIGTVPVGRVETGVIKPGMVVTFGPTGLTTEVKSVEMHHEALQEALPGDNVGFNVKNVAVKDLKRGYVASNSKDDPAKEAASFTSQVIIMNHPGQIGNGYAPVLDCHTSHIAVKFAELVTKIDRRSGKELEKEPKFLKNGDAGMVKMVPTKPMVVETFSQYPPLGRFAVRDMRQTVAVGVIKSVEKKDPTGAKVTKAAAKKK

SEQ ID NO: 259166 - protein, 83 aa, Zea mays
  Clone ID: MRT4577_167944C.1.pep
GTSNKKEIVIVKKKKKKKKKKKKKKKKKKKKKKKKKKKKKKKKKKKKKKKKKKKKKRGGRFLEGPKFTSPAFQSKTFFLGPPK

SEQ ID NO: 259167 - protein, 243 aa, Zea mays
  Clone ID: MRT4577_167945C.1.pep
AVYKIGGIGTVPVGRVETGVIKPGMVVTFGPTGLTTEVKSVEMHHEALQEALPGDNVGFNVKNVAVKDLKRGYVASNSKDDPAKEAASFTSQVIIMNHPGQIGNGYAPVLDCHTLDDSDSHRLPHVTDSKSTKRRILRKGLHHHGLSGNHLHPNIYSDKPESDSGTEMAEFRVVLDSSTMLKAECSELEAAGKQLASKADKLRIELDVWQRMYQGLSDKLRSYDGLQRLRCSRHCSSSSIGFI

SEQ ID NO: 259168 - protein, 447 aa, Zea mays
  Clone ID: MRT4577_167946C.1.pep
MGKEKTHINIVVIGHVDSGKSTTTGHLIYKLGGIDKRVIERFEKEAAEMNKRSFKYAWVLDKLKAERERGITIDIALWKFETTKYYCTVIDAPGHRDFIKNMITGTSQADCAVLIIDSTTGGFEAGISKDGQTREHALLAFTLGVKQMICCCNKMDATTPKYSKARYDEIVKEVSSYLKKVGYNPDKIYFVPISGFEGDNMIERSTNLDWYKGPTLLEALDLINEPKRPSDKPLRLPLQDVYKIGGIGTVPVGRVETGVIKPGMVVTFGPTGLTTEVKSVEMHHEALQEALPGDNVGFNVKNVAVKDLKRGYVASNSKDDPAKEAASFTSQVIIMNHPGQIGNGYAPVLDCHTSHIAVKFAELVTKIDRRSGKELEKEPKFLKNGDAGMVKMVPTKPMVVETFSQYPPLGRFAVRDMRQTVAVGVIKSVEKKDPTGAKVTKAAAKKK

SEQ ID NO: 259169 - protein, 95 aa, Zea mays
  Clone ID: MRT4577_167947C.1.pep
PPKVRDSHYGPIIQRNLALFFSGGSRKELKLRVPGGVWKKQPNPHGAGIPNLFSLAREPFLKKKKERKFCVFWRAFFKNCPAMFSLKSAVKKLAP

SEQ ID NO: 259170 - protein, 45 aa, Zea mays
  Clone ID: MRT4577_167948C.1.pep
MISTLQKRKNLKFPFMHVKKVKYLIPPKKWKNVRLPPTKIPWRIC

SEQ ID NO: 259171 - protein, 447 aa, Zea mays; identical to SEQ ID NO: 259165
  Clone ID: MRT4577_167949C.1.pep

SEQ ID NO: 259172 - protein, 38 aa, Zea mays
  Clone ID: MRT4577_16794C.1.pep
ILNFNFVEQSKILFYRRKGRKRGLRVENTPPYLVLFLT

SEQ ID NO: 259173 - protein, 65 aa, Zea mays
  Clone ID: MRT4577_167950C.1.pep
YSGNLQTTNPLRMRIQKIIIVIQNVLLYLHNIITIIQFYKPSTQHQVRKSTVTFIWCLRVHKMLT

SEQ ID NO: 259174 - protein, 84 aa, Zea mays
  Clone ID: MRT4577_167951C.1.pep
TLIMLQRKVASLSISIWQNMSTTISVVQFRHCSSYLQIHPHPDPKDNNPKQVCSCYMSYHKKYVVCLRIIDTSRLKRRRTNPKP

SEQ ID NO: 259175 - protein, 460 aa, Zea mays
  Clone ID: MRT4577_167952C.1.pep
MEVFYYLVFGALAAIVAALELAKSGKDRVATSPAFNSFKNNYILVYSLMMSGDWLQGPYVYYLYSQYGFDKGDIGRLFIAGFGSSMLFGTIVGSLADKQGRKRACVTYCITYILSCITKHSPQYKVLMIGRVLGGIATSLLFSAFESWLVAEHNKKGFDPQWLSITFSKAIFLGNGLVAIVAGLFANFLADNMGFGPVAPFDAAACFLAIGMAIILSSWGENYGDSSDSKDLITQFKGAAKAIASIASDEKIALLGAIQSLFEGSMYTFVFLWTPALSPNEEDIPHGFIFATFMLSSMLGSSVASRLLARKLKVEGYMQIVFSISAVTLVLPVVTNILVPTSSVKGGSISIGGSLQLLGFCTFEACVGIFWPSIMKMRSQYIPEEARSTIMNFFRIPLNLFVCVVLYNVNAFPITVMFGMCSIFLFMAAILQRRLMVVSDLHKSSTKAQEMIGEDEPLNP

SEQ ID NO: 259176 - protein, 227 aa, Zea mays
  Clone ID: MRT4577_167953C.1.pep
NDKAIDGFVFSFPFVLADNGQFYTDIVQKGFDPQWLSITFSKAIFLGNGLVAIVAGLFANFLADNMGFGPVAPFDAAACFLAIGMAIIMSSWSENYGDPSEIKDLMAQFKVAAKAIASDEKIALLGAIQSLFEGSMYTFAFLWTPALSTNEEDIPHCFIFATFMVSSMLGSSIASRLLARKLKVEGYMQIVFSISAVTLVLPVTTNVRARQSLDDRQDVYMLRAPFL

SEQ ID NO: 259177 - protein, 539 aa, Zea mays
  Clone ID: MRT4577_167954C.1.pep
MHTHSLTPVPTVRRGSFTILTPINRRREGERRAIPVINLCQPAGSSASSRPAGTAPHRTATRHRSTPRPRPPSLRRAAARAAMEVFYYVVFGALAAVVAGLELGKSGKDRVATTSAFNSFKNNYVLVYSLMMSGDWLQGPYVYYLYSQYGFDKGDIGRLFIAGFGSSMLFGTIVGSLADKQGRKRACITYCISYILSCITKHSPEYRVLMIGRILGGIATSLLFSAFESWLVAEHNKRGFDPQWLSITFSKAIFLGNGLIAIVSGLFANLLAENLGFGPVAPFDAAACFLAIGMAVIMSSWSENYGDPSDSKDLMAQFKVAAKAIASDEKIALLGAIQSLFEGSMYTFVFLWTPALSPNEEDIPHGFIFATFMLSSMLGSSVASRLLARKLKVEGYMQIVFSISAVTLVLPVVTNILVPTSSVKGGSISIGGSLQLLGFCTFEACVGIFWPSIMKMRSQYIPEEARSTIMNFFRIPLNLFVCVVLYNVNAFPITVMFGMCSIFLFMAAILQRRLMVVSDLHKSSTKAQEMIGEDEPLNP

SEQ ID NO: 259178 - protein, 458 aa, Zea mays
  Clone ID: MRT4577_167955C.1.pep
MEVFYYVVFGALAAVVAGLELGKSGKDRVATTSAFNSFKNNYVLVYSLMMSGDWLQGPYVYYLYSQYGFDKGDIGRLFIAGFGSSMLFGTIVGSLADKQGRKRACVTYCISYILSCITKHSPEYRVLMIGRILGGIATSLLFSAFESWLVAEHNKRGFDPQWLSITFSKAIFLGNGLIAIVSGLFANLLAENLGFGPVAPFDAAACFLAIGMAIIMSSWSENYGDPSESKDLMAQFKVAAKAIASDEKIALLGAIQSLFEGSMYTFVFLWTPALSPNEEDIPHGFIFATFMLSSMLGSSIASRLLARKLKVEGYMQIVFSISAVTLVLPVATNILVPTSSVKGGSLSIGGSLQLLGFCTFEACVGIFWPSIMKMRSQYIPEEARSTIMNFFRIPLNLFVCVVLYNVNAFPITVMFGMCSIFLFMAAILQRRLMVVSDLVHKSSTKAQEMIGEDEPLNP

SEQ ID NO: 259179 - protein, 68 aa, Zea mays
  Clone ID: MRT4577_167957C.1.pep
DTIQGDHHPNNTNSEQGNLKKRPFFPPLPFSTSFFSGTKSQKGTKMGLHNMRRGKIHFTSRGKSVTCR

SEQ ID NO: 259180 - protein, 85 aa, Zea mays
  Clone ID: MRT4577_167958C.1.pep
YTMAHYRRLLWGIDLPLPCLTVPPPVSPIWRRLSALTNPAQEQQCKLTCVFNITLKSEDHIIKVMNHTVFAYINDLDTSYLYGDP

SEQ ID NO: 259181 - protein, 63 aa, Zea mays
  Clone ID: MRT4577_167959C.1.pep
NDMIIYLENLHGMHEKLLEVINEVNKVADISPIYKNQLYFYVPPVKKLVIEIKKIPFYNSIKI

SEQ ID NO: 259182 - protein, 57 aa, Zea mays
  Clone ID: MRT4577_16795C.1.pep
RIKVEKKIVFGQYEGVIENQKIEQVQAFNKMDSMRQVRVHIRHISNTRSLVLAYPFS

SEQ ID NO: 259183 - protein, 85 aa, Zea mays
  Clone ID: MRT4577_167960C.1.pep
SCSICLPLRPVVVASSVRLVQRGGSLFVARGGGVLSIASVLLGVLLAREDLLLGGLEQCQSHSARPACWSSSSGASYRIASLSCF

SEQ ID NO: 259184 - protein, 138 aa, Zea mays
  unsure (1)..(138): unsure at all Xaa locations
  Clone ID: MRT4577_167961C.1.pep
VIGIKWDHGNHKHGSRRSPPEVDHETIGSEDALEATESEVVIVIGCPXRTESKEVVAIGCCHGTVIVVVANRASSGHDHRRGRSLPQSPLAPLAATAAARXSXRRTPSSTSGSRSPPLVPQAVIATNTRALRDRSYRH

SEQ ID NO: 259185 - protein, 158 aa, Zea mays
  Clone ID: MRT4577_167962C.1.pep
MEMKVAASRPGCKKRPPSRLQKHAPASLQLEQAVASAGTGAPPAVWGDGRAPIPLLSPLVVSPMVPVWEADQTGGARKEGGGDQAEGRSGAEQQQRGAAARHGSSGEHQVHDVTPRPSAPALGMGWRHPAMSTPVAEPASLVPLFQSQCALEVRNSQQ

SEQ ID NO: 259186 - protein, 81 aa, Zea mays
  Clone ID: MRT4577_167963C.1.pep
MDPSSYGTYDYCSSHQMKIWSLVVGRFPSTSWSMGHFYGTALDNVDGSHVISIQDTVGNTAGDLARRAACCPERLPACACI

SEQ ID NO: 259187 - protein, 78 aa, Zea mays
  Clone ID: MRT4577_167964C.1.pep
PRPTKPLRGKTGNHARPPRNAGRGSTTPGRLRVYSPSPHPQGPLPFPQRTLPRGPGQDHPEGTTLPESPLHGGRARVG

SEQ ID NO: 259188 - protein, 65 aa, Zea mays
  Clone ID: MRT4577_167965C.1.pep
SLCTPKHFRYRTTTQKKNKGRLQQNQTLAGGGIRTLITKKTALHNCRTLQKLACKTLIQPPSPGV

SEQ ID NO: 259189 - protein, 48 aa, Zea mays
  Clone ID: MRT4577_167966C.1.pep
NSPATALASCGGKIRSQALGISMSGPSHKKYHKTAPPVPAPVTNTDTS

SEQ ID NO: 259190 - protein, 115 aa, Zea mays
  Clone ID: MRT4577_167967C.1.pep
EGSSVIEKRCSVPHLVAGTVVPCPDSRRQERCKKVVCVGFVHVVSWCSRLCGWNSGRKAFWCVPMCIHSRLSDHEGEGFPPTPICVNICFIKPHLSNQPPLIMQLRKKKKKKGRP

SEQ ID NO: 259191 - protein, 72 aa, Zea mays
  unsure (1)..(72): unsure at all Xaa locations
  Clone ID: MRT4577_167968C.1.pep
VEKRVRASSGGSQDILSTLGGPFRGKFVVLKRAYKKNLGTSLRLLAXNTXTQSHTRIQTDVVALGLSGESLM

SEQ ID NO: 259192 - protein, 94 aa, Zea mays
  Clone ID: MRT4577_167969C.1.pep
GQGASTVHGSKQYVARAGKARAQYTEASSMWHEHRRGDHTVFSSRLSSVPGSATDIASCTARRFFEAYRKNTVKKEKKKKKYRKNTVKKEKKKK

SEQ ID NO: 259193 - protein, 48 aa, Zea mays
  Clone ID: MRT4577_16796C.1.pep
YYSPLINHNKLQPPQQPIKSHFNVLKYSDLQHIISPKPTMLSAAFYHS

SEQ ID NO: 259194 - protein, 40 aa, Zea mays
  Clone ID: MRT4577_167970C.1.pep
FFSLIIPHLRSVSITGKEASSYPIRLQPAYIMFELINIFS

SEQ ID NO: 259195 - protein, 83 aa, Zea mays
  Clone ID: MRT4577_167971C.1.pep
HLTQSGLTIKFIFGAQQTLYATNSTLRDRVTITGAEPENSAARATQIRSTSSRGTCRSLPKVNTPVDFYNTTIAPIDEICWNT

SEQ ID NO: 259196 - protein, 44 aa, Zea mays
  Clone ID: MRT4577_167972C.1.pep
LKIATCSIISYVVLDVEYRSCCLSELTSNFCRPAFKELGVIRAA

SEQ ID NO: 259197 - protein, 47 aa, Zea mays
  Clone ID: MRT4577_167973C.1.pep
RSERAFSHRSITILDALHTLHRPGPTNTQPGARKTPWRAKDANQRRH

SEQ ID NO: 259198 - protein, 74 aa, Zea mays
  Clone ID: MRT4577_167974C.1.pep
NLGDNYHNIVKRHWHILNWVSAAVHDLLNKILQPNARKDQGHADQTGLVDQEGLLTCMFPTIMTKTYFTVQIPR

SEQ ID NO: 259199 - protein, 135 aa, Zea mays
  unsure (1)..(135): unsure at all Xaa locations
  Clone ID: MRT4577_167975C.1.pep
APAPATTTPCVLLCLCVLLSCAADDNPNLPDYVIQGRVYCHTCPTWFVTNVIXYISYSKVRLECRHFCTCTLDRAIDGVTHTTGTYTIXLEDNHEEDICQLLLVAKPHKDCDXVHALKDRAGALLTRNVGVSYSL

SEQ ID NO: 259200 - protein, 43 aa, Zea mays
  Clone ID: MRT4577_167976C.1.pep
AQCLINVSGDAVVFVRESDLEVVSSQQPTTNCQSSCTEGEVTT

SEQ ID NO: 259201 - protein, 143 aa, Zea mays
  unsure (1)..(143): unsure at all Xaa locations
  Clone ID: MRT4577_167977C.1.pep
MARYFDDEKPPTSDAENNVGIGLVRMKRPAYGKKEVALTADSVAVMVELNATSSAMAREGLDLVVVLDIQLSWEGRXVKFSKVKEAIEFLIMKLTPMDRLSMVFGKDTAGVERRLCPLRCMTRAXQGDLKDLISGSGQDNLSL

SEQ ID NO: 259202 - protein, 117 aa, Zea mays
  Clone ID: MRT4577_167978C.1.pep
RVGGAAARRGGGCSLVGVVVLIRSIIDQLLDARTDHVARMFTFFFFCSRSTSTIVLPYMGVFGWLQADTVAAVCTAAAAIHREKNTVEAAAAAGLQPQQAAANKLLSLQYSDTHTHL

SEQ ID NO: 259203 - protein, 73 aa, Zea mays
  unsure (1)..(73): unsure at all Xaa locations
  Clone ID: MRT4577_167979C.1.pep
NQKGHPSERRXDASAELQNGAAPVNGPLESGQKEVKKSPLAKDSLDKMLKDLFSTRAPPATDGRKTGHELTMG

SEQ ID NO: 259204 - protein, 125 aa, Zea mays
  unsure (1)..(125): unsure at all Xaa locations
  Clone ID: MRT4577_16797C.1.pep
LVVALRPSWFAVRGSRCFRLPRGSGXSPPFAAFVRARSRSRGAGCSGRPASPRLXXPPPPSGFRRRRAPWPPPSXRXRRRRPXRXXXWXGSASXCSGRAPWPXAXXCXPAARAXGXSXGLGLGRV

SEQ ID NO: 259205 - protein, 74 aa, Zea mays
  Clone ID: MRT4577_167980C.1.pep
VPPPKVSPFIMLMEMMMIFFLILSVFCIQSVSPLFYPWCVGDDAWGRKLCRMAAIPQGASSQGGEKGGGGRRAR

SEQ ID NO: 259206 - protein, 150 aa, Zea mays
  Clone ID: MRT4577_167981C.1.pep
GIPPGAAERPVGVGPDKLPGDDAPGDVHQEGAVSALHKAVGEVEAGEAGVDTNRRHHAPSSAPAARPGARRGASGHSPRWTAAPRRPGRRTQARWRRKQGRQVEDSRSCCPGTPCDLSSPRARKQELAIAAGAPVGSRRWYPFPKAWVEP

SEQ ID NO: 259207 - protein, 219 aa, Zea mays
  unsure (1)..(219): unsure at all Xaa locations
  Clone ID: MRT4577_167982C.1.pep
LRCGARGTAGPPARPRARGPPGRRAGAPAGPGSRPAGARAPAPPPPGRPAPRRPPPPARPPAPPRPAAPPRRPAGPPPRPPGREAVGGPARTVAPAGGAAAGRGRARPRALRAAVRALALPGAPCAPAPPXPGPPPPRAAPPRRLAPAPRRPGPPAPRRGVPXARTPASRPAPRRQQLRRSTHTGTQRERTGSSSRSRWHRAARMPTRSLRDFLFSRRV

SEQ ID NO: 259208 - protein, 184 aa, Zea mays
  Clone ID: MRT4577_167983C.1.pep
MAAHRPNAAAPLLAKLDATATPPAKRNKYPFFCAVLASMTSVLMGYNVAVTSGAQIFMAEDLGMSDAQIEVLSGVINIYSLVGALLAGWTSDRLGRRLTIVLANAFFLVGPLAMALAGGYTLLMVGRFIAGVGVGYALVIAPVYAAEIAPASSRGLLSSLPEVTSAVWLGALFCAVHQILRRLN

SEQ ID NO: 259209 - protein, 478 aa, Zea mays
  Clone ID: MRT4577_167984C.1.pep
MAAHRPNAAAPLLAKLDATATPPAKRNKYPFFCAVLASMTSVLMGYNVAVTSGAQIFMAEDLGMSDAQIEVLSGVINIYSLVGALLAGWTSDRLGRRLTIVLANAFFLVGPLAMALAGGYTLLMVGRFIAGVGVGYALVIAPVYAAEIAPASSRGLLSSLPEIFINTGVMLSYVSNLAFSGLPVHLSWRVMFAAGVVPTVFMAAGVFTMPESPRWLVMKGRVAEAKAVLDKTSDTPAEAEQRLLEIEDVVMDSSGDRGAWKEVATKAGVQRVLATVVTLQFFQQASGIDSVVLYGPRVLAMAGVTSNSLLLSLNILFGVAKVGSILIAMALADRVGRRPLLLVSTSGMTVALLVLGSLFAVFAGAKDDAAVAAVSVVAVMAFVMAFSVGLGPLAWVYSSEILPLRLRGQGAGLGTAMNRIMSGVITMTFISLYQGITMAGAFYLYAAIAAASFVFVYACLPETRGRSLEDMEELFHTK

SEQ ID NO: 259210 - protein, 121 aa, Zea mays
  Clone ID: MRT4577_167985C.1.pep
MYKNQLQELAQRSCFSLPSYVCTREGPDHAPRFRAAVTFNGETFEGPSGCTTLRQAEHAAAEVALARLSLRGPSTTLAARVLDETGVYKNLLQESVQKLCTRSTTMHLPRSLCVFDQDLDG

SEQ ID NO: 259211 - protein, 89 aa, Zea mays
  Clone ID: MRT4577_167986C.1.pep
HLYLVLLSSASDPGEHHTPANNKVTSLQAATGTVLQSNTLLLPLPGFRHSIVFGIIEQCISRTIRLISFLRFITGFNYNLAREILKEGM

SEQ ID NO: 259212 - protein, 85 aa, Zea mays
  unsure (1)..(85): unsure at all Xaa locations
  Clone ID: MRT4577_167987C.1.pep
PKQGGRRKXKPYKSHKLRLSMSIVVFHLLPVKVKSSFTTSLYINFSLLLSLFPLTLRRRIPLHTGTLEASWTRPNHLNQCGIGFI

SEQ ID NO: 259213 - protein, 102 aa, Zea mays
  Clone ID: MRT4577_167988C.1.pep
ASPKWLPDIFFYRFLFLSLTLSLSFPFFFFFLFLFFFFFFWFCPPPRPQKRKKKKKKKKKKKKKKFINIYKKNLKKNKKKKKKKKKKKKKKKKKKKKKKKGR

SEQ ID NO: 259214 - protein, 176 aa, Zea mays
  unsure (1)..(176): unsure at all Xaa locations
  Clone ID: MRT4577_167989C.1.pep
RITALQSAMVMDTTDPGYWLNWRFMLCATWVYSCMALAFYLIWKYEGPSSPAGNDEGGDREEARPRIGPGVVYLEDCWKPCLEEIHPAWLLAFRLVSFLFMASVLVSDVIVDGWTVFLYYTQWTFLLVTLYFGLGSVLSFYGCYQYACKTAKSDGDHGSYIIAPTXESTYDDSIKS

SEQ ID NO: 259215 - protein, 69 aa, Zea mays
  Clone ID: MRT4577_16798C.1.pep
LLNAFIRKNPGLLLKSFSLMLKIPRLIDFDNQRAYFRSKIKHQYDHHHHSPARISVHRPYILEDSYNQL

SEQ ID NO: 259216 - protein, 234 aa, Zea mays
  unsure (1)..(234): unsure at all Xaa locations
  Clone ID: MRT4577_167990C.1.pep
MPFSIFCYQELVAKSIESSDLNFSRYGDTFFEVVFVGGRTQPGTVKPEEGDRHPYSMLDCVAQRETILPFVLYIQKTLRRRPFLIKNLENVMRKFLQSLEFFEENERKKLAIFTALAFSQKLSGLPPETVFQPLLKDNLVAKGIVLSFITEFFKEYLKENTLDDLIALLKKGKMEDNLLDFFPSAKRSSEALSEHFIKEGLTSLVEYNEXKXMFEVKLKEIKSTLTTMINDEAA

SEQ ID NO: 259217 - protein, 54 aa, Zea mays
  Clone ID: MRT4577_167991C.1.pep
RARAQTCDIDVPDTHLSYRARQIYMLSLLEGTISILVFRHNTLLPSAAKATDEC

SEQ ID NO: 259218 - protein, 102 aa, Zea mays
  Clone ID: MRT4577_167992C.1.pep
RVFDDTPVVSSAFCSRCYPSFVISHSAPTSPGALISAWGPKLPCAPTDARTHVINYSPVLLRDPHKTHYASQHHSNRQTSFRSHVHHRQIYCHNRQPTHLKS

SEQ ID NO: 259219 - protein, 138 aa, Zea mays
  unsure (1)..(138): unsure at all Xaa locations
  Clone ID: MRT4577_167993C.1.pep
PPPTHATAPTAAAKATPDQXHKQRNQPNLGAHQTTXREEGTPDRDADAAAERDASDSRANNARGAHQXENSESDTTAATPXQAAKQXAPDPXEDKEXATPXPKEXQRETAXGSXPXXRXXAGTXTKQEQDHKEARKHT

SEQ ID NO: 259220 - protein, 75 aa, Zea mays
  Clone ID: MRT4577_167994C.1.pep
PAGKPHSIHASTAPVFPYQARGRRISSAKGSPTLLTANEDYDLPHLKPRLRGRPGTGTKTSCSPRRTPRRGPTGA

SEQ ID NO: 259221 - protein, 102 aa, Zea mays
  Clone ID: MRT4577_167995C.1.pep
GKKKWGGNYYFWRGAFKKKRGPKLKLATKTIFWGERRGITLSAGTNQGGKCKTPETKKKNGETKHGGGFSGGLKFQLFQVTHWVKNGLLGGFWELPKENKFI

SEQ ID NO: 259222 - protein, 80 aa, Zea mays
  Clone ID: MRT4577_167996C.1.pep
KSFPGKFFKAPLKVFSSSSPSNAGNFNFFPENFYVNFFFVSNSRVNFGSLTRNSFIFPCFPLECYKFTFFAPKKKKKNPP

SEQ ID NO: 259223 - protein, 61 aa, Zea mays
  Clone ID: MRT4577_167997C.1.pep
CTCSRQNMVYEGDSLWRELHEQANLNPGLEHNGIIRPPEKHKKIKVKATKKNGDKEKKRVA

SEQ ID NO: 259224 - protein, 82 aa, Zea mays
  Clone ID: MRT4577_167998C.1.pep
VLRFSFLFYFLLYLVLYLSKYAWHAFNFFKKKCMGITIQVFNTLCRIIRKHGNLTAAKLSEFPCYFSSCCLSQPLWNNAMWE

SEQ ID NO: 259225 - protein, 99 aa, Zea mays
  unsure (1)..(99): unsure at all Xaa locations
  Clone ID: MRT4577_167999C.1.pep
EFPGRPTRSPTRTPTRPRFVGEXSRSAAWDVEYRCFVSCLACATDDHSLHNAFSTYSEVLXSKIILDRDTQRSRRFGFVTLSTEDAMLNAIDGMNELEL

SEQ ID NO: 259226 - protein, 78 aa, Zea mays
  Clone ID: MRT4577_16799C.1.pep
MTKANNCLMDKLAFWLGWIAILQGCMVKSSLPYEYDYSASIECLPEPLEPQYGGGVLRNADFSAGLRGWSAFGYGSIA

SEQ ID NO: 259227 - protein, 82 aa, Zea mays
  Clone ID: MRT4577_1679C.1.pep
CKPVAKRTQKRMLMLHIRYALLPSNIAIHNHSLTVTAKNNLQDTEDLVSTDPQLLTNTVQSPTKRPKKILETAGTSTSETPP

SEQ ID NO: 259228 - protein, 70 aa, Zea mays
  Clone ID: MRT4577_167C.1.pep
KILNPFFATKGKNQTLQKPITPPPIWELNISHGSLRVTPPSYQIFPKREQSHLAFKKKPLHKPRGATFFF

SEQ ID NO: 259229 - protein, 240 aa, Zea mays
  unsure (1)..(240): unsure at all Xaa locations
  Clone ID: MRT4577_168000C.1.pep
MAHVNGNAPKITLYTNHGCPYAHRAHIVLKELGLPYEEVIIDLDTPREPWYLEINPRGLVPAINFNGEIVTESAIVSTFLADAYPSHLFPATGSPEAAXPVLKSIFLSIPGLPRLAAIGSXLMQDSEEEKAKLSQEFIGTVSKELEPLLKDAKPFFGGSEKLTLAEALTAPFIIRIYAFSRHGVLPKSIAADLDALPNFSKAAAVIKQESVTYVFSEDTIISSTLKRLEKMKEKNPAASK

SEQ ID NO: 259230 - protein, 163 aa, Zea mays
  Clone ID: MRT4577_168001C.1.pep
MALEDGFTATCLAAGVRADRGWATGGRATCPAWDLDLDAECWTAGGWAAGSSSLGYAWARWPAPALECSDARALECSDARARSQVLGTQDPRVARRLGLMPAAGGWRLGGWGSTAGGRDTGWDLKSLGLAQSVTSWACNWATIDYLARWLLFTYFRISAGTRG

SEQ ID NO: 259231 - protein, 63 aa, Zea mays
  Clone ID: MRT4577_168002C.1.pep
QRLSPYIDLLKKRKENERRSHVVLASSFVVSLFLRSHQRSDFFPQVGQPLSIYYSLVTPSQSL

SEQ ID NO: 259232 - protein, 125 aa, Zea mays
  unsure (1)..(125): unsure at all Xaa locations
  Clone ID: MRT4577_168003C.1.pep
PINQFXEPCFFPKEIPLPKEFIWIGDLWVKLYPSLAEGXTPFFNLDWAXFAEFLSFGGGLDPIPGGLWWTIFAHHNXPMAFLFRTAGHMFRTNWGLGNGLKDIWEANKGPLTGQGLKGFYETLTP

SEQ ID NO: 259233 - protein, 47 aa, Zea mays
  Clone ID: MRT4577_168004C.1.pep
VVWTRLISGQHVALHDPKLEPGVICLINIRLSPIQVAQAACEDACSV

SEQ ID NO: 259234 - protein, 84 aa, Zea mays
  Clone ID: MRT4577_168005C.1.pep
LSILFGNAAQLPTRVGRVLGALLKLELYLHCISPIRTDTFTSCVHPRDAVIVDFVWFSDRPPHTSSSILLQYFRPRPHPCLTLL

SEQ ID NO: 259235 - protein, 77 aa, Zea mays
  unsure (1)..(77): unsure at all Xaa locations
  Clone ID: MRT4577_168006C.1.pep
MALTQSEAWGATAAWIIILSSLATTYEATITCNQQNSDIAPCLSYSLXRGSAPPCTGEPGXKNLKSAVSTNYVRCPC

SEQ ID NO: 259236 - protein, 157 aa, Zea mays
  unsure (1)..(157): unsure at all Xaa locations
  Clone ID: MRT4577_168007C.1.pep
MGTKILXALLAIFGLLESAADAVIIAQXDLVXKAIIGQRLTPGRSXGXDHHSRQDYKVRLALAESAXRRPVGRLQRQSLGHVTLRTIGAQQRRHLAAPXVNHLTVXNPDDYLQQQLLGSYPLALTNVAAYQQQQQLGQVMPPLRKLAMXNPAVYLQL

SEQ ID NO: 259237 - protein, 59 aa, Zea mays
  Clone ID: MRT4577_168008C.1.pep
GPRSSDRSGSPGCLRLASTSQEWLSLPYDPVVLSMQSVLDLEARAVSVHGEKAMHVRVG

SEQ ID NO: 259238 - protein, 325 aa, Zea mays
  unsure (1)..(325): unsure at all Xaa locations
  Clone ID: MRT4577_168009C.1.pep
AWXTMIAGYSHIWETHESLELFEGMKATNCKPNEVTLVGVLSACAQLGSDELGEQIGSYIESQTLPLTSYLGSALIDMYTKCGHVARARDVFHRMEQKVVIAWNSMIRGLALNGFAEDAIALYGEMVGDGVQPNEITFLALLTACTHAGLVDKGMAFFQEMKKNKQHASPQVEHCACIVDLLCKSGRLWEAYKFICDMEVEPNAVIWTTLLSACRAHADVELAKLAAGKLVVLEPNSSSIYVLLSNIYADAGLWGDVREIRDLMRSKNLQKLSAYSWIELDGEVHRFLVQDTYHPRSAEIYNVVDGLGLQLERTSPDHELISEVC

SEQ ID NO: 259239 - protein, 120 aa, Zea mays
  unsure (1)..(120): unsure at all Xaa locations
  Clone ID: MRT4577_16800C.1.pep
SHQPQQQPTRHTGRQQRSAPGDHEEDERQEPQRPRAHHPPAPAPEHDGNDAQXHKGSNSHRATXKGPARTENKNAXSPAEQTARQTKGHEXTNTTGANTSNGTEQQXRDHPRNXNPSHHN

SEQ ID NO: 259240 - protein, 192 aa, Zea mays
  Clone ID: MRT4577_168010C.1.pep
ALETAVGRHSAALLLPPAVRRAVEAETKTPSDHAPTPMPLCLPPLPSTLPQFRSSRSGSTRTRRRAVASAAQRPDRRRQRQQPRREEHPAGLVTSECRPPGPSPARRAEFRLSARRPPDCVPTSTGFHPAGHGSRHTVDAHAATPIIVSKIRGTTVTYFIAIYSHFRQCSISLYISLIVLQLDYLYAKYYTV

SEQ ID NO: 259241 - protein, 113 aa, Zea mays
  unsure (1)..(113): unsure at all Xaa locations
  Clone ID: MRT4577_168011C.1.pep
RGTGGFGFGNQRRIGLGXKGDPSTGXPRMGFYVVLERAXYRVAGRRRCKCRVGIRHRVAKEDSIKWFQVKRNGVILPRPRFSCCEQIKGPPSWLEQSSSPNCRQLVLYGLHRV

SEQ ID NO: 259242 - protein, 145 aa, Zea mays
  unsure (1)..(145): unsure at all Xaa locations
  Clone ID: MRT4577_168012C.1.pep
SNRPRFCNRIPFTLLFGSCVSLSSKICRSILICLDFAIVLSQTMVGSFTRLLWCKSKFVHXMLGMFPIWTKAYVCTKGSCYPSFLIVIYFLXXSKGSTAKECYTLGFMLIAISRYGAIEYRIPCVPCHCDIKVHNSLAQKEKEKG

SEQ ID NO: 259243 - protein, 83 aa, Zea mays
  Clone ID: MRT4577_168013C.1.pep
PALALGSCAGRRRAGGSSAGVATVASTDVGGIVVAGSRSMHGLRCLLFIYRLHLVHVRASRSSRPRIQFGNKTLLKFKKIYII

SEQ ID NO: 259244 - protein, 176 aa, Zea mays
  unsure (1)..(176): unsure at all Xaa locations
  Clone ID: MRT4577_168014C.1.pep
SLLMLLAXNTCVANATILPQCSQASYELPLFPGYLPSIINKVCXENPPLKXYRLKQAHPASNIPXWPLVFQQSPALSLXHALVQTMMAQQLQXLVLTEIEQVGLEKISTHCKXNNIXPFNQLFTINPGGYWEQQLXPKNQLATAYSQQQQLIAFNQLAELNPAAYLHQRILLTNSE

SEQ ID NO: 259245 - protein, 122 aa, Zea mays
  unsure (1)..(122): unsure at all Xaa locations
  Clone ID: MRT4577_168015C.1.pep
EVLESKITHVRETHRYGDLGFVTVPAEKSRGNPIEGMNEKTLFDRNITVIEAQCRDVSGDDDGAGFGGGGEDVGYDGXGGRDAAGGGAPVGAPGGDGGGNGGGGDANDGGNSGGACGNTNGN

SEQ ID NO: 259246 - protein, 195 aa, Zea mays
  Clone ID: MRT4577_168016C.1.pep
MGSKDQDLAASSGGGGGFFSSIAAGVRSWGTAVHKSVNGLVGYEGLEVINPDGGTDDAEAEAMKGRWKQEDRDSYWKMMNKYIGSDVTSLVTLPVIILEPMSMLQKMAELMEYCDLLDKADECEDPHMRMVYASTWALSAYLAYHRTWKPFNPILGETYEMVNHQGITFIAEQVSHHPPMGVAHCENDHFTYDIT

SEQ ID NO: 259247 - protein, 71 aa, Zea mays
  Clone ID: MRT4577_168017C.1.pep
MVVAPGVKYLSQEYDPMLTWAASTYRSPSCPSFRGGWDHGWRRRGEPGRCRPQESGRAGVQGHEEVFTGGG

SEQ ID NO: 259248 - protein, 88 aa, Zea mays
  unsure (1)..(88): unsure at all Xaa locations
  Clone ID: MRT4577_168018C.1.pep
MASAAAXEWEAAARKGLVARKPCFGLPTGWPTWLPGLLYLRMGQGPFDIHVDTFFPDAEHIPYGEIGDWVGFNNEKRGVNEYLKGEKN

SEQ ID NO: 259249 - protein, 66 aa, Zea mays
  Clone ID: MRT4577_168019C.1.pep
KMADVPLLEGADARNGGRGGSDPGGPKRQNGGCHYMNNKGRRGAGHREQENRLPQKEGKKPSKPEP

SEQ ID NO: 259250 - protein, 70 aa, Zea mays
  Clone ID: MRT4577_16801C.1.pep
FIFFFFFFFFCFFGDFFRFFFSTLYLFRAQHQTLLEKKGPGGKPKWASFLATIGPAWHAQGTRKRFVHSN

SEQ ID NO: 259251 - protein, 189 aa, Zea mays
  unsure (1)..(189): unsure at all Xaa locations
  Clone ID: MRT4577_168020C.1.pep
RPGAAVLNRRFINNMFTGTSQVDCALXLIIDSTTGGFDDGISQDAHTRRTALLAVTLATNYMICCCNKMDATTPKYSKERYDEIEKEVSSYLKKAGHNRXRFAFDHISDFDGDNMIDRTTNLDCYKGPTLLEALDQITEPKTSSDKPLRLPLHDAYKIEGIGTVHDGRVKTDVIKPGMIDTFAPTGLTT

SEQ ID NO: 259252 - protein, 38 aa, Zea mays
  Clone ID: MRT4577_168021C.1.pep
INYSIVSKTSLLFNIVWFISMYTANIGSLISEERLTAV

SEQ ID NO: 259253 - protein, 411 aa, Zea mays
  unsure (1)..(411): unsure at all Xaa locations
  Clone ID: MRT4577_168022C.1.pep
LKKKKKKKNTRPVQSPGSSSSSTGAIAGGVAAGAALLFAIPAISFAYWRRRKPQEHFFDVPAEEDPEVHLGQLKRFSLRELQVATDGFSNKNILGRGGFGKVYKGRLADGSLVAVKRLKEERTPGGELQFQTEVEMISMAVHRNLLRLRGFCMTPTERLLVYPYMANGSVASRLRDRPPAEPPLDWQTRQRIALGSARGLSYLHDHCDPKIIHRDVKAANILLDEDFEAVVGDFGLAKLMDYKDTHVTTAVRGTIGHIAPEYLSTGKSSEKTDVFGYGITLLELITGQRAFDLARLANDDDVMLLDWVKGLLKEKKLESLVDEDLDHNYIDVEVESLIQVALLCTQSNPMERPKMSEVVRMLEGDGLAERWEEWQKVEVVRQXVELGPHRTSEWILDSTDNLHAEQLSGPR

SEQ ID NO: 259254 - protein, 39 aa, Zea mays
  Clone ID: MRT4577_168023C.1.pep
CGTSPYPWLNVKLNLAREKDLIEKVYSRGAHLDGEPKRP

SEQ ID NO: 259255 - protein, 31 aa, Zea mays
  Clone ID: MRT4577_168024C.1.pep
TCDDISFGTDERSGIVSRIPSSQHEGWQLLA

SEQ ID NO: 259256 - protein, 44 aa, Zea mays
  Clone ID: MRT4577_168025C.1.pep
TQVLRYILDCQFVFFDRLQTVCRTIFFCVVTTIYSSRVSFSYNN

SEQ ID NO: 259257 - protein, 83 aa, Zea mays
  Clone ID: MRT4577_168026C.1.pep
EGAPFLWSVLEESSSLAGTSAHASVASKKANAFQSSYPHEITSCWIKKTPGSAKVLVDFFFAEWKLPVCPIESLQSVYIAHNL

SEQ ID NO: 259258 - protein, 65 aa, Zea mays
  Clone ID: MRT4577_168027C.1.pep
MSAAAASETAGEDVPPGPNVRGGEFVLGVAHIFASFNDTFIHVTDLSGRETLGRITGGMKVKADR

SEQ ID NO: 259259 - protein, 109 aa, Zea mays
  unsure (1)..(109): unsure at all Xaa locations
  Clone ID: MRT4577_168028C.1.pep
SSPPRRRRRRRRHHGPPPGSAAPXTWAGGPLLDDMFLPELLGDVSEFPPGDFFGTGGLAPLLQDRAAAASLQELSAFYFPNAQAEMWAAADHHVHANNKPAAGLCHSLT

SEQ ID NO: 259260 - protein, 87 aa, Zea mays
  Clone ID: MRT4577_168029C.1.pep
VQISGNATRMATLWRGAISARKWRKSYALPHIHKQQTNTTITFLIIITYNNIFTRVFPLFRPFFMLQRPPPPGDDGDDHQQCSFLSF

SEQ ID NO: 259261 - protein, 75 aa, Zea mays
  Clone ID: MRT4577_16802C.1.pep
ANHISTGADPPLLEFWGGEKKNRFFLVLGPPPQKHLGGFWANTTLHFLGPAKHFNKREQRAFFAPQENILILFLF

SEQ ID NO: 259262 - protein, 109 aa, Zea mays
  Clone ID: MRT4577_168030C.1.pep
ASSGIGAGRWTAPTRARVCAGGGFASLSCIAVGKEPLSTLRARINMNGSYTLTRTSTHTYSANANGGETLFKFLSSDRDPRGSSNTGLAYGLVVPTFKPILMHRAMISN

SEQ ID NO: 259263 - protein, 118 aa, Zea mays
  unsure (1)..(118): unsure at all Xaa locations
  Clone ID: MRT4577_168031C.1.pep
HDMVFAKASPAGLAVKAGGWSEATXRFLKRSADAGNLEACYILGMIRFYCLGSRSGGAALLAKAAVGGHAAALYSLAVIQFNGSGGAKSDRDLRAGAALCARAAAXGHVDALXELGHC

SEQ ID NO: 259264 - protein, 78 aa, Zea mays
  unsure (1)..(78): unsure at all Xaa locations
  Clone ID: MRT4577_168032C.1.pep
IASPVAPHRMFGTTVIDGXTDAXTVSSQVVTNSESVXGDCCIGTVRQFIFTTVIRFNITNERLDYPDSDTCECQNTLI

SEQ ID NO: 259265 - protein, 477 aa, Zea mays
  Clone ID: MRT4577_168033C.1.pep
MVHIVEHHDFMPEDFMVEEASASSTPRATNLPTPGAVAVVHSARQHAPAQTSRASKAAPGALSAARELLRHPPSSMASPGAMKQWRDDVDRLLGMAHSGSTRPRPQSSRRKHEASALVRSPSVRATPTEDLRVELNRRRVGEDAPVSLERSNDLRTELNRRRAGEDVRISLERVRERRQNVEGRNLDYDFAAVAPQTPTGARIQAGVSLAGVGCAALVDHLRATTWPSKFRPHLLEKYDDTSNPSEFLQVYVTAITAAGGDTAVMATYFHVALSGPVQTWLMNLTPRSIYSWEDLCARFIANFASAYQQHGMEAHLHAVRQEPGETLRTFISRFTKTGVAQTGGSGAVAQDNKKKKKKNRDHEKSSSAALVVAAATGGRSERNKRPRPQRGNNDSCPVHPNSHHSAMECREIIKLAKRVSERREQTSRDGSPPRRRPGKERVDSGEVAAGERDLGYQSPEGVLKDVFTGDSDSGDDS

SEQ ID NO: 259266 - protein, 33 aa, Zea mays
  Clone ID: MRT4577_168034C.1.pep
SQTKCTSVPQCVSDLSIVTFLRAWRINSRPLVI

SEQ ID NO: 259267 - protein, 77 aa, Zea mays
  Clone ID: MRT4577_168035C.1.pep
MAPPGSRRWAYVRVMAGTILGGVLGFYVMHRVETSYKARMEERLRRYEAHLLAKAKESQQLQDEAQREDKAQFLPDS

SEQ ID NO: 259268 - protein, 84 aa, Zea mays
  Clone ID: MRT4577_168036C.1.pep
QKSLITCAEKWRAQTMDQSFIRWVRVYLTARAHDTRSGHRKKHVLLELGHRPQRFTKQSLGDTQVRQSPQALARQASRPAFQCP

SEQ ID NO: 259269 - protein, 107 aa, Zea mays
  Clone ID: MRT4577_168037C.1.pep
HNRRPTIAPTISCLLMLLVIPASVATTTISPHFSQPPIHSLIAPYLSPYLSPMSDNPIEQPYMIHHANQTTILPLSPSLLQQPPHLLQHLPLDHLVAHNMTAHQLQQ

SEQ ID NO: 259270 - protein, 204 aa, Zea mays
  Clone ID: MRT4577_168038C.1.pep
MAGSTELPTKGGFSFDLCRRNAMLEKNGLKMPGFRKTGTTIVGLVFADGVVLGADTRATEGPIVADKNCEKIHFMAPNIYCCGAGTAADTEAVTDMVSSQLQLHRYATSRESRVVTALTLLKTHLFNYQGHVSAALVLGGVDVTGPHLHTVYPHGSTDTLPFATMGSGSLAAMSVFESKYREGLTREEGIALVAEAIRAGIFND

SEQ ID NO: 259271 - protein, 52 aa, Zea mays
  unsure (1)..(52): unsure at all Xaa locations
  Clone ID: MRT4577_168039C.1.pep
FGTPAAASCSGENVEAMETDAHTYIRARLRVKETTAGYSXGFIVRIVFGLSR

SEQ ID NO: 259272 - protein, 47 aa, Zea mays
  Clone ID: MRT4577_16803C.1.pep
IAVHGALLCSPPQNFLPLHLVSSDMFRILDIFSQLLSWWSLFKGYLT

SEQ ID NO: 259273 - protein, 115 aa, Zea mays
  Clone ID: MRT4577_168040C.1.pep
KFASNVVEKCLAFGSQEDRRLIADEIVAGGGGGQQQHLDHLVDMMINPYANFVIQKMVVTAEERQVRLLLEVASSNAASLARYAHGRHVIDAMERFLGGAKAVVHADPAALPCRR

SEQ ID NO: 259274 - protein, 459 aa, Zea mays
  Clone ID: MRT4577_168041C.1.pep
MASAAADPLLPGEGSGRRLGFLPSSIRLKTSVWSELGGAVGDLGTYIPIVLALSLASHLDLGTTLIFTALYNFATGLLFGIPMPVQPMKSIAAVALSSAHLTVPQIMSAGLAVAAVLLFLGATGLMTCIYRLLPLPVVRGVQLSQGLSFAFTAVKYVRYVQDFSRSSSASTAVARPLLGLDGLVLALAALLFIILATGSGDDEDVSSDGMARRRRSCSRVPAALIVFALGLVLCFVRDPSILQGLRFGPSPLRLVGITWDDFKIGFWEGAVPQLPLSVLNSVIAVCKLSSDLFPERAELSPARVSVSVGLMNFVGCWFGAMPCCHGAGGLAGQYRFGGRSGASVVFLAIGKLALGLVFGNSFVTILGQFPIGILGVMLLFSGIELAMASRDMGTKEESFVMLICAGVSLTGSSAALGFISGIVLYLLLRLRDVDYQALAGRWGSDRRRTGNKVGDDEDA

SEQ ID NO: 259275 - protein, 151 aa, Zea mays
  Clone ID: MRT4577_168042C.1.pep
LSSPSGGGGGLNPLGSGPPKSPLTGKKKTRVKKRSELKLVLMVVKTLPKWVRFPIPKAPIPIPSPTNAPSFLPLKMISASLVVWAMKQTFVRLLFQVPGRIWCCFCKRFFFFYQRWLPLDNLLLGFLLQKSALGPSLLFRFFFFHPPFWLP

SEQ ID NO: 259276 - protein, 149 aa, Zea mays
  unsure (1)..(149): unsure at all Xaa locations
  Clone ID: MRT4577_168043C.1.pep
NSARGQSPPPRSSHRSLPRSDHSAASPFSFGSGGSSSGSVGVRSVDAFVAYLPHDEAAAAGLGGLDAHESQVVVDHLNDALAALLRTKPRELWLRVAQNTSLHELLDSYLLFTXRWYDLPHRGPKGTVPRLVAGELELCRGVFMVLYRI

SEQ ID NO: 259277 - protein, 49 aa, Zea mays
  Clone ID: MRT4577_168044C.1.pep
PCSTLYHQRCVVFIPLAALSSIEPWVGAEPSCVFGGAAYPLQFAGFSLL

SEQ ID NO: 259278 - protein, 81 aa, Zea mays
  Clone ID: MRT4577_168045C.1.pep
PCASSEFVSCPFDNHTFRLPPFTSILGGGYKNLQGGDTTHYTMTLLYPYYQQSAATFIATQSYSAVASISIKPQTHTGLFN

SEQ ID NO: 259279 - protein, 145 aa, Zea mays
  unsure (1)..(145): unsure at all Xaa locations
  Clone ID: MRT4577_168046C.1.pep
GWSQGTATFYGDADGSGTMGGACGYXGNLYQRGLPASTTPALSQTLVNDGASCGQCYLITCDASRPGGQYCRPGSNSVTVSATNLCPPNYVVPGGGWCGFGFFPLFFLPRAWGRGGLNRRLRRGLSPGIFKEGEGFARVFLRLLI

SEQ ID NO: 259280 - protein, 62 aa, Zea mays
  unsure (1)..(62): unsure at all Xaa locations
  Clone ID: MRT4577_168047C.1.pep
LQYRSLIPLSTGASSHSFFLPCNHKASCPSSHTNKRAEDYWSYEXYLPELHWRQCPPQASLH

SEQ ID NO: 259281 - protein, 97 aa, Zea mays
  Clone ID: MRT4577_168048C.1.pep
RYPDSVLFRVAHCGQPYQKATVLYYITDTIEFFSVTSSALLTRSILHKAVLSTYVHIFGSTLRSCRSMHQSDSCRPASTDRANEQPGGSRREHPRDD

SEQ ID NO: 259282 - protein, 232 aa, Zea mays
  Clone ID: MRT4577_168049C.1.pep
PAGPEDLRLKLDDEEPGNKDVGGSTAHAASSGSIVDVFRSPTTRVRLVLSVLINLLSSVVYYGLSLNVVNLKTNLYVTVVVNSLAEMPAYLLTALLLDHFGRKPLAIGTMLLSGVFCTAGSLVPGAGIMRVACGVVGIFGMAATYNLLFIYTAELFPTVVRNAALGCTAHAAQMGAIVAPLVVMLGERLPFAVFGASGIVGGLLVLYLPETMNKPLYDTMAGLEEGEKNVVK

SEQ ID NO: 259283 - protein, 64 aa, Zea mays
  Clone ID: MRT4577_16804C.1.pep
EPDLAAPGVQETLPKKIPTAVGVLTAAAQAYSFRLHHTRMNVGIDRGELARIHYSKMKKTHSGQ

SEQ ID NO: 259284 - protein, 65 aa, Zea mays
  Clone ID: MRT4577_168050C.1.pep
ITNPITLQTNTTLTTSILYSAINVSFTTQIGQFTIANQSASRHRGITDEDPGLMSPAPYQNIHIL

SEQ ID NO: 259285 - protein, 90 aa, Zea mays
  unsure (1)..(90): unsure at all Xaa locations
  Clone ID: MRT4577_168051C.1.pep
MGLVLHSXAENKNAFPALIAAEYSXAKYELXKDFEMGVSNNTPDFLQMNPLGKDPVLQTPDGPAFDSNAIERYVARLKDDNPLFWTSRIE

SEQ ID NO: 259286 - protein, 110 aa, Zea mays
  Clone ID: MRT4577_168052C.1.pep
MAAGRRLTDTAPADRPRPRPNIRLGDYGAAKDDLPIDVTPLGVSDLVADLRQVVLGYTVAPAPDVRLRLRRHFAVDDEQGQSRAYVGAFFRRRSSKQKHFRKDSKQACVT

SEQ ID NO: 259287 - protein, 80 aa, Zea mays
  Clone ID: MRT4577_168053C.1.pep
KKAPPSFFFFYKEGHLLAFQYGPLMFWQVSRFISPNNNENAGHLLYLEAKNTTILHLRPIELEPTHQGRSCFVTIYRVSR

SEQ ID NO: 259288 - protein, 979 aa, Zea mays
  unsure (1)..(979): unsure at all Xaa locations
  Clone ID: MRT4577_168054C.1.pep
TIPNRIRPTASKPPSTGPPSEPPPNTLGASASSCTPIVHEGLGPSTADGRHKGHSFWPSLLKVPSCLVELITPNIKATRGQTTKSFYTMPEYDEWRKNLGASASSWTIKYYKGLGTSTAKEGRKYFEDIIDHKKDFVWVDDQDGNHIELAFSKKRIADRKQWLTNFQPGTYIDQREKQVKYSDFINKELILFSMADLQRSIPSMVDGLKPGQRKILFCSFKRNFVKEAKVAQFSGYVSEHSAYHHGEQSLAGTIIGMAQNFVGSNNINLMYPSGQFGTRAQGGKDAASPRYIFTKLSNITRSIFPKDDDILLNYLNEDGQSIEPTWYMPILPMVLVNGSEGIGTGWSTYIPNYNPRDIVANVRRLLNEESTVPMHPWYRGFKGSIEKTVNTKVAGSTYTVTGIIEVVDNTTLRITELPIRRWTQDYKDFLESLAPDPKNKDKVTFIEDVTSQGDNEDVYIQLKLSEANVNVAKEEGLVKKFKLTTTIGTTNMHLFDSDGKIRKYDTPEQILEEFFQLRLEFYCKRKEALLKNIKLDLKKLENKVRFIRCVVDNEIIVNNRKRADLFLELRQKNFDPFPKKKKKAEPAAVGALEXEENEESPEAAGAEPSDYEYLLSMSIGTLTLEKIQELNAEKQKLVDDVEELENMSPKSLWLKDLDAFEKELDVLDQMDLAEELQREKRINAGKKGGSKAAPKKPRKKAASKKLDSDTEDDDXTSGCKAWSSTEENIQQXANDSASEDGDYVAAENQKKQSKKASAHVDEEVXAFVKRPSGCXNISDSSPDHSAMETEVTELTEQQNENKATEGASKRGGRKKASSSLATIPSDVDEEVLEVQAQKKGRGRKPAAVVKPKAPAAARKRAPAQGKVTQKKIDEMLKATEDNNTSASSPEKKVRKMRSSPFNKKSGSILQRGSTASASSGTTVEASPPSGSSAEPVGAAQPRRTARATKKPIYISDSDPEDEVELIDDSDFDADGDSDE

SEQ ID NO: 259289 - protein, 102 aa, Zea mays
  unsure (1)..(102): unsure at all Xaa locations
  Clone ID: MRT4577_168055C.1.pep
SGXTFFFQGSAQYWEGNGELCFLGAGAGGTHGVLELVEAINWVCLFVCVLLDAPRRFVLGRIPAFPFFCVRINPFGYSFMCFGDSTCKDKKERMKGTLLSWL

SEQ ID NO: 259290 - protein, 121 aa, Zea mays
  unsure (1)..(121): unsure at all Xaa locations
  Clone ID: MRT4577_168056C.1.pep
MLQYSKLAGLQYPIVYRXGVENATADVLSRQPQVSATCASLSHCTPTWLHSVVEGYAQYSPTKELLAKLSLHSGVFGPFSLTSGVIRYKGRIWLDGNLELQQQVLQAMHDSAXGGHSGIPV

SEQ ID NO: 259291 - protein, 56 aa, Zea mays
  unsure (1)..(56): unsure at all Xaa locations
  Clone ID: MRT4577_168057C.1.pep
ARXARXPTXTVXGVSTTPRXXRAHWLXXRPGQTAPRXGPAXERSPSRTGGRAESPX

SEQ ID NO: 259292 - protein, 99 aa, Zea mays
  Clone ID: MRT4577_168058C.1.pep
QRMFTRVPTKKQALEDRRPLSRPGWPRRPQSKPPGGGLFRVGEKGGTPTRLTRPACTTPPDELAPPQMSTLKNLALNAGNGLLWPRALLKNHEYGRAPF

SEQ ID NO: 259293 - protein, 78 aa, Zea mays
  unsure (1)..(78): unsure at all Xaa locations
  Clone ID: MRT4577_168059C.1.pep
GLAFDCIDTDVRLVFVGLDTAVCLLAKSNGRXGGEDFENFPPALQAERALSRDRQNIGRSYAQAFRCRKHESYCAIEN

SEQ ID NO: 259294 - protein, 78 aa, Zea mays
  unsure (1)..(78): unsure at all Xaa locations
  Clone ID: MRT4577_16805C.1.pep
QCRPAHAFHPRSRDSVAARSRRXRXXPFXXRRRXLFFFFFFFFFFIFFFFFFFFLDYPWTTLTLKIDSPVLDGSSISL

SEQ ID NO: 259295 - protein, 153 aa, Zea mays
  unsure (1)..(153): unsure at all Xaa locations
  Clone ID: MRT4577_168060C.1.pep
ALPVLLHDKIQECKEDLNLLNKDADKWINTIELETEMRSLGXNPTEEDFVDMICDDDXADVNASIDFTKIPHLMTRKMTYIANSKKEIREAFRVFDKDQNVILSVAELXRHGMTNLKEKMTDEEVHEMIRETNVDTDGHINYDEVVQDMMNKR

SEQ ID NO: 259296 - protein, 40 aa, Zea mays
  Clone ID: MRT4577_168061C.1.pep
AVHSGRQPPLPLLFLEMTITSDEDASAAPGHRFSHVSRCG

SEQ ID NO: 259297 - protein, 142 aa, Zea mays
  unsure (1)..(142): unsure at all Xaa locations
  Clone ID: MRT4577_168062C.1.pep
ILYVFFFFSFFPFYFLLNPSFSLGWGVNKKKFFFFFVFYSFYYFHFCSLSLLLYHLVSVFSSFCSGRISLFGYYCFFLLSSLLFFFYFFFSYASQXQVTLRRESRTVKDLLLTTARAGAGAAKEGAVTAAEERRSMRARQSR

SEQ ID NO: 259298 - protein, 138 aa, Zea mays
  Clone ID: MRT4577_168063C.1.pep
NNNQWIVTTTLASIDGDSTEVRSDVIMPASAGVGSPRCCNSRAYSINYHNDALLSVPIAANVLLLQTTYSATQCMVITNYISTLTVTHPTEAHSEPIMITRYLMLRTNYLRSKETITGAATPFPPRRPKLIPQLESGG

SEQ ID NO: 259299 - protein, 161 aa, Zea mays
  Clone ID: MRT4577_168064C.1.pep
MAGGFFMAINGVSFMEESNGRENDRCEAPLTRVGEQTRGKRLLGFDEVAASGAGLLGRGALGGRCRGSDPGRVFWRGRVIGHGHPPGAGVTRSWAALGSAPGGRAWKQGREERQMAGWGPLAREKRGKGKWRVAAAGLGARGRRGCSNHGPLVGFRCYTYG

SEQ ID NO: 259300 - protein, 80 aa, Zea mays
  Clone ID: MRT4577_168065C.1.pep
DLRVLVLVDLVIPSPSPSTPTTVVENYLTRGSHRTAQGGGTRVGEARPCHDLGDSGARRADRVSKLPYGQGRRAGVVSAS

SEQ ID NO: 259301 - protein, 119 aa, Zea mays
  Clone ID: MRT4577_168066C.1.pep
GEQGGLHLGGIHRPRGAPPPGGFNIYLRVFSHAPENRLGGLFFPQSANGSPGCLFFDPRVGQPTGWQNTAVCPKRPVCDRIFYKYCPLAGPEFFFLFAKRQEKKNPPPKKKKKKKKKKK

SEQ ID NO: 259302 - protein, 83 aa, Zea mays
  Clone ID: MRT4577_168067C.1.pep
NLSGGFVIPGTHKSRRGRTHTGTKGGGSTRPPQKKLKTKRYTKQTTCGEEGGTTAAKTTNRAATSDRKNHDPPPPQKKTPPPG

SEQ ID NO: 259303 - protein, 48 aa, Zea mays
  Clone ID: MRT4577_168068C.1.pep
RLFYLTKTPHGRAPIFLNSSTPLNQLHTSITNTHCLTNKQKGLMFSPN

SEQ ID NO: 259304 - protein, 108 aa, Zea mays
  unsure (1)..(108): unsure at all Xaa locations
  Clone ID: MRT4577_168069C.1.pep
MASSVADAASRVLGARLAHQAPQNGLIVARLGSDLSGKAKPAPKKVAKTSTCFDRPLWIHGAVTPDYLDGSLVGDYGVDPFSLGKPAEYLXQIEYDSMDQNLCMNDAG

SEQ ID NO: 259305 - protein, 72 aa, Zea mays
  Clone ID: MRT4577_16806C.1.pep
TTPQDTTVLLFQMLSVNYLNRIFYLHKQHSQHHTHPTYYHRHRSYIETLPTHYCTTPTSTLLHYQQQSISYP

SEQ ID NO: 259306 - protein, 71 aa, Zea mays
  Clone ID: MRT4577_168070C.1.pep
LVNDGPACESYSKRNRVYEYRGSSSRHVLLVSRDAGRRPGLPPMADVRGCSQLSPVTSGCRGKPMQVPTSP

SEQ ID NO: 259307 - protein, 72 aa, Zea mays
  unsure (1)..(72): unsure at all Xaa locations
  Clone ID: MRT4577_168071C.1.pep
MVKVFSGQRDRLYVRGTILGYKTFKSNQYETTLLVQMLGVNTNDDLAWYTGKRIVYIYKVXTNIMVTRYRCI

SEQ ID NO: 259308 - protein, 44 aa, Zea mays
  Clone ID: MRT4577_168072C.1.pep
IYSSSSDKLLVKSYNVHVLAIWDLLNWAREHIQYNIMTQIITGH

SEQ ID NO: 259309 - protein, 77 aa, Zea mays
  Clone ID: MRT4577_168073C.1.pep
WGRGLINSTMGNSSFAIECLLLYLFFYMLALFMKYAERENLCVTEPYGLGCWTSFFNLKRRILVPASSPFQNSCFLD

SEQ ID NO: 259310 - protein, 196 aa, Zea mays
  Clone ID: MRT4577_168074C.1.pep
MVVYTQEHVYRHPWDRVTAAAWRKFTDPASCTALSHVADVHTLHRRLDSDTGRLQAARSITVRSPPLPFVLRRLLPSAAASPNGAALCHCVETSLVDAQRRAMDVVVRNVSLRGLIEVEERASYRPHPDRPDDWTQFRQETTIRCRPLAALAAVAEKVETRCAERFLQNSAKGREVVERICRYLEAESAGAAPSVT

SEQ ID NO: 259311 - protein, 98 aa, Zea mays
  unsure (1)..(98): unsure at all Xaa locations
  Clone ID: MRT4577_168075C.1.pep
LRPFVPGVXFGPSGVLEIFNPGGALXEFNVFNNFGGKAMAFKVFGGGWFGAFFFREPGRGLLDLGEMEFNFNIDPGLVSVNFLGPEQEINLWGVEIMI

SEQ ID NO: 259312 - protein, 194 aa, Zea mays
  Clone ID: MRT4577_168076C.1.pep
MAGGQHQLVGSASLELHRGRKVEYLDIPIKDSIKGWRLEWFIMENHFKSLPPRSGRQPDVRTPSWVESPTFLEITEAKVLLAEICLLKDGGLTAEVVVADFVFKNIQPLKDIIYPAYLYSDVNDSIRVTNRRIPIEDLLSRLDMILRGIVSNAGARVAYSAWNLPPNRPFSEFVSNPPACDGSPGHRVSNTQNV

SEQ ID NO: 259313 - protein, 98 aa, Zea mays
  Clone ID: MRT4577_168077C.1.pep
KIGLEFIYLCLQSGASIRSHDVDASRRCSFWQRTLSHFGCTGTSRYPAPPPSACRLPRPSIPASFPLRPKNVPPPLDPSESQPSDRRTHQTQRNKQGR

SEQ ID NO: 259314 - protein, 54 aa, Zea mays
  Clone ID: MRT4577_168078C.1.pep
MKRNDVQLEGRKAWKRRSTHPFLIFFPLFFVNFPFFFFFFFFFKNFFFFFFFFS

SEQ ID NO: 259315 - protein, 95 aa, Zea mays
  unsure (1)..(95): unsure at all Xaa locations
  Clone ID: MRT4577_168079C.1.pep
GPAAEDKNVPSAPGFGGARETTRKTAAKAKPATPSGSPGYGADRMLFLGPLSGEPPSXLTSEMPPPXPWDTAGLSASPETCSKKKKKEAIHSRRA

SEQ ID NO: 259316 - protein, 72 aa, Zea mays
  unsure (1)..(72): unsure at all Xaa locations
  Clone ID: MRT4577_16807C.1.pep
GGTHACECTIMLXNKKYLGHLFYRVRAYTLKDTNRHLFTAETPLRILSLLLHLQDLHKPGLHHPNQLLHHPQ

SEQ ID NO: 259317 - protein, 50 aa, Zea mays
  unsure (1)..(50): unsure at all Xaa locations
  Clone ID: MRT4577_168080C.1.pep
WDIYFLSVIYMLDXRGLVIKLKFLIFVFIYYNSGKKYSGHKGGKILSTGG

SEQ ID NO: 259318 - protein, 75 aa, Zea mays
  Clone ID: MRT4577_168081C.1.pep
SRCAALSLRESRPAALQCFVHALVVSYSGSSGRSVLVNSRSSMQCNGSSTPRWGSRRVRWQVVESTAYIDGERET

SEQ ID NO: 259319 - protein, 122 aa, Zea mays
  unsure (1)..(122): unsure at all Xaa locations
  Clone ID: MRT4577_168082C.1.pep
INTKRTIQFVDWCQTGFKXGINYQHHSVVPGGVLPKVQCAVCIISSXTSVVKVFSRIAPKFDLMYAKGAFVHWYVGQGMQKGEFSKARXYLAALEKHYEQVAAEFYQGEHDHEGPRVLVEVC

SEQ ID NO: 259320 - protein, 133 aa, Zea mays
  unsure (1)..(133): unsure at all Xaa locations
  Clone ID: MRT4577_168083C.1.pep
PGRPSVLSATPASASPTWSRASAQQFSLESKSTIGVEFATRSIHVRGTSGAQGPQXSGXTRPGQXKVCKLGGGGESWIETITIDPCSAVRSTTHCCWFLCVIQECHYSCGQRVPACFILFKSTSLLIHVVLCR

SEQ ID NO: 259321 - protein, 658 aa, Zea mays
  Clone ID: MRT4577_168084C.1.pep
MAGGQHQLVGGASLEMRHGRKTEYLDIPLKDNIKGWRLECFVPNPPASDSGLGLRVRPSPEEVEALVASLGDLPNDERQVHFEMPINPSDAEISAMLDMLAEDSSDSVPAETIAIATVLEPEKTLTAQKSDGARPKRLRPASHPTIPAEGKKKKKRRLRLVSCLNQDAGPSAPATKEMPVELFTRADPNGCDPIDADPNGCDLDDAEPNGCNPGDADPNGCVVRIVDEDEEEEEEIPLIRKNSRRYLVSGGSSDIPSPALSALVGLQELSIANFDRALEDMVPEDLLSEPTDGGMMDVCTDIPDVELELSRARTRSPRMALAITQPPRVLPAMIRLEWVARASYNPAPEGAAGGDPAPMGDAGCDLAPEGVRAGSPSHTSMDVHVGSSPPHFDCMAATRASNQEVALETGIPNTRVLISAGDVELIPNDALQIASTDIPSSSHQLVSHDLGLPSFFSNLQLYSKLEGKYSQGQMDLARVSASLDDTNLLNSSLSAQLVSERVANEEEKRALAASRDKLDRLYRDANNSLTILERSHRFTMADLDNHRYKLQESQDELIRVRQLVSSKDSVIKDMRASKRLVVQELETARLAVKAAEDTSTTLKAQRDKAMDKAIRAGWILMRRSGVIVPDDIIADVNAAPDSSSRPSSSVAPEKNITK

SEQ ID NO: 259322 - protein, 246 aa, Zea mays
  Clone ID: MRT4577_168085C.1.pep
VPTCSGESSVYDERQPKRRKRNIMNSEQIDELEKALVDEPEMHRNPVLLQGWSEKLSLQGPEITSSQLKNWLNNRKAKLARIAKERGTFEGDNADKPSTPHPGESSESAGEDNYIPPARVMTAPSKGRLVSPDGNEKTSQAELSPNTMLIRPFTRSFSLEPGRLVSLVDSDGKEVGRGKIFQAPGKSPAPVESRICTVDVTELRTEKWRELPHPSEASGRTFQEAEARNGGIMRVSWDSGRLLPVV

SEQ ID NO: 259323 - protein, 61 aa, Zea mays
  Clone ID: MRT4577_168086C.1.pep
QCYLGPQESHDPVSRPKPKAPSAHLVPSGIQQPDEKFLPCYTTGNSLPESQETLMIPPRAE

SEQ ID NO: 259324 - protein, 166 aa, Zea mays
  unsure (1)..(166): unsure at all Xaa locations
  Clone ID: MRT4577_168087C.1.pep
HTRSAPIKWRISTTARCSCAYTRAPPGHYHQRWHGLRLLVYGVCTCSSARGVSCHLIXSPPLLDPNKRNRAKPGADASLXTWAVCTXTTLLTSVIQFRVTFDWEVEKQGIPGAIIGKXNHASEFLLKTITLNDGPGHGTIVLVNNSWIYPXSKYRYNRVFFSNDTY

SEQ ID NO: 259325 - protein, 59 aa, Zea mays
  unsure (1)..(59): unsure at all Xaa locations
  Clone ID: MRT4577_168088C.1.pep
IPFFSLPFLFSYLSYLYYPTNPPSYTLFLLXLILLXXTHSHXXXHLSHLXNNFHSLLLH

SEQ ID NO: 259326 - protein, 81 aa, Zea mays
  Clone ID: MRT4577_168089C.1.pep
WEFVPELNPSGNQFPSCVFHPTYQSLLVIGCYESLELWDIREKNTMTFNNAHDGLVAALAASSATGKVASVSHDRTLKLWK

SEQ ID NO: 259327 - protein, 49 aa, Zea mays
  Clone ID: MRT4577_16808C.1.pep
MSSRHRHRRKAEEKRASAEAKRGLKLAKVLELANFMKAVGRVPTKRSFF

SEQ ID NO: 259328 - protein, 132 aa, Zea mays
  unsure (1)..(132): unsure at all Xaa locations
  Clone ID: MRT4577_168090C.1.pep
SLGTQRYGSXSRRSIRSLVVKAATVVTPKYTSLKPLGDRVLVKLGAAEEKTVGGILLPSTAQTKPQXXGEVVAVXSXGRTIXXQENSXDIETGAQVVYSKYAGXTEXEIHDSXHLILQXDDIIGILETDDVK

SEQ ID NO: 259329 - protein, 60 aa, Zea mays
  Clone ID: MRT4577_168091C.1.pep
VYHHHSQTLSINSSLHYHAHEQCGARPTKDGFCTSGVILFRGQGPNVLTMGRQSLLTPGA

SEQ ID NO: 259330 - protein, 194 aa, Zea mays
  unsure (1)..(194): unsure at all Xaa locations
  Clone ID: MRT4577_168092C.1.pep
MSFVQLSGAGVAAVAFTNKSLVSRHAALRVCSSRRSIRSLVVKAATVVTPKYTSLKPLGDRVLVKLGAAEEKTVGGILLPSTAQTKPQXGEVVAVGAGRTIGDKKIAVDIEVAEAEDKTPGGLILTETTKEKPSIGTVVAVGPGPLDEEGKRQPLSVSAGSTVLYSKYAGSEFKGADGTAYIVLRASDVMAVLS

SEQ ID NO: 259331 - protein, 244 aa, Zea mays
  Clone ID: MRT4577_168093C.1.pep
MCDFFLPRMEGDQAGGGDLTDIVRSGGAVPSSAAEATARDEWQLHQGEPPMLFPPLPSSTATASEAGCAAGSTGANVFGADDPFSGLVDPFCTDYYSSCADFLDATMPDAMPKVGFDAAICGGSGSGCGGGGGQGQLIDVRRKQPLLPRGVQMLPVGALAPREIQPYPAFASDMVKLGITAGQVAGCAIDAAVVGMQMPSPRAAGGIKRRKNQARRWCASRRRQQHGGEQLVRRFLLISGPGGR

SEQ ID NO: 259332 - protein, 246 aa, Zea mays
  Clone ID: MRT4577_168094C.1.pep
MSFVQLSGAGVAAVAFTNKSLVSRHAALRVCSSRRSIRSLVVKAATVVTPKYTSLKPLGDRVLVKLGAAEEKTVGGILLPSTAQTKPQGGEVVAVGAGRTIGDKKIAVDIETGAQVVYSKYAGTEVEFNDSKHLILKEDDIIGILETDDVKDMKPLNDRVLIKVAEAEDKTPGGLILTETTKEKPSIGTVVAVGPGPLDEEGKRQPLSVSAGSTVLYSKYAGSEFKGADGTAYIVLRASDVMAVLS

SEQ ID NO: 259333 - protein, 63 aa, Zea mays
  Clone ID: MRT4577_168095C.1.pep
LYVSPLHNTIIITSFCSTELLVRFSLVPAQFSKVLSLYPLLVLLPPQLGIQLREPLAAAKCKT

SEQ ID NO: 259334 - protein, 64 aa, Zea mays
  Clone ID: MRT4577_168096C.1.pep
LERSSLRIKSFTLFLLNSAIRVAMFLLSLLKRSFLNSFTILYKDYIKTGTIRIRPLRTLLIISC

SEQ ID NO: 259335 - protein, 77 aa, Zea mays
  unsure (1)..(77): unsure at all Xaa locations
  Clone ID: MRT4577_168097C.1.pep
TLTTTTTYTQPRSLTFSNSSKTTTSTSTTNSXKPTKTKTKTSNSSTTDSSKTTTSTSTAKSTTTNSQAHKQAHKQAQ

SEQ ID NO: 259336 - protein, 158 aa, Zea mays
  Clone ID: MRT4577_168098C.1.pep
GPWRRRGGRHVPSFWEWNYYYSSSSSTSPDSAPAAAEPCWWYAPEPEARSEAWFRFFPPPRRRPAPVPASKKARRPETAGGGGGAVAAAVAAERKRAAPPKGSGRRVVVVRPVDEDLYRVPPPDDNDGAAAVSRLPRRRKRAARRSLWMGCLGLNCVA

SEQ ID NO: 259337 - protein, 146 aa, Zea mays
  Clone ID: MRT4577_168099C.1.pep
LVALGLLLFRPSPRTQLRHRAGAPRRRGRPWPSPPRAASPPRLAPRRPRARAGRAPAPRRWPRPRGTTRAPEKPRPRTPRRTWARGPAPRTSAPAHTSGTARFPAAAACGATPGRATAPPPARRQRGGPAPRPRRAGRTRGRRARA

SEQ ID NO: 259338 - protein, 222 aa, Zea mays
  Clone ID: MRT4577_16809C.1.pep
MAPIDLGRGGRASGTGSGAAPGTPRLVMVVVDPVRESTAALEWALSHAIVEGDDILLLHVNMPYPHNGAAGRSGPSRSSSGGSTGSPIAALLGGGGGGGSGAGADPADFMEEMCAACKARYPRARVNAERVEPATEGREAKAQTILAESQRRGVELLVIGLRRASSFFGLRSPSGSSSRGHDSTAEFLIEHSKCLCVSVQKKGQNAGYLLNTKTHKNFWLLA

SEQ ID NO: 259339 - protein, 105 aa, Zea mays
  unsure (1)..(105): unsure at all Xaa locations
  Clone ID: MRT4577_1680C.1.pep
RATDASGTRGLNFKHCLLASPSHLTPGVDHKTLGSITLYPIYQDXRPCTITICSLSDDNYVYYCTATAYTIPXENEPTKARILLLSIEDGSMXLIAQKEPIDHLF

SEQ ID NO: 259340 - protein, 64 aa, Zea mays
  Clone ID: MRT4577_168100C.1.pep
RSGGHMDDQHAFVTTGGAYGEQGHTGRAYGQQGHTGGAYATGTEGTGEKKGIMDKIKEKLPGQH

SEQ ID NO: 259341 - protein, 104 aa, Zea mays
  Clone ID: MRT4577_168101C.1.pep
PSTRNLRVVYIRQACMVNRFQEQRNMMTQLHLIISYSPLSLGNITISHNYSEIVRNHNEMGIKNIMMPLQMHVPLTFDFLAGDAAVASCLLTPLAIKNWVWSQE

SEQ ID NO: 259342 - protein, 434 aa, Zea mays
  Clone ID: MRT4577_168102C.1.pep
MMVLSGQSFPANAGESVRNAHVLAVFKEGRDCTSSLTLREYHNRPVSMIDNGANMKLDLENIDNSHMLMSSPDFNATVCHSYKDQTFLTLETNTSVMTEKDSSQARNASQQFVSTALRTQNVSQEPLCTAIAPKQLIDPQVQKKSYGGFGSGSAHLGHLTVGNQQLNERWHQRQSDSLSSVEVRARGHSAMIVQPALENHSRNGVAQKGPRIANVVHRFKCSVEPIEIGAVLSGKLWSSSQAIFPKGFKSRVKYFSVVDPVQMTYYISEILDAGQQGPLFMVTVENCPGEIFINISPTKCWNMVRERLNMEIRRQLNMGRANLPTLQPPGSVDGHEMFGLLTPAIVQAIEARDRDYICTEYWRSRPHATIENRDNQNMSPQDPPLVALRGLFQRANCDELRALRSLLMSNRILGDNSRQQACQILDEEIAKQWH

SEQ ID NO: 259343 - protein, 68 aa, Zea mays
  unsure (1)..(68): unsure at all Xaa locations
  Clone ID: MRT4577_168103C.1.pep
GGATCYLGIRDGFFSSGAVFGPLVAGVVFFQGGVRQDCLLGFCSFGQCXFFFVXXFXGLITFCKNFLX

SEQ ID NO: 259344 - protein, 89 aa, Zea mays
  unsure (1)..(89): unsure at all Xaa locations
  Clone ID: MRT4577_168104C.1.pep
HENKPNTYYLLEVNDKLMXDEEEHFHERLCEKLRNYDERXKEQDFWIVEEPKFLDRXPHITKCLECPADAIVSTDGNWITFLKLRLDRD

SEQ ID NO: 259345 - protein, 52 aa, Zea mays
  unsure (1)..(52): unsure at all Xaa locations
  Clone ID: MRT4577_168105C.1.pep
MSWQVYVDDHLLCDIEGQHLSAAAIVGHDGSVWAQSXNFPELMPEEVSGMIK

SEQ ID NO: 259346 - protein, 54 aa, Zea mays
  Clone ID: MRT4577_168106C.1.pep
YVLIRHSILYMSKGLNVLLPVPINNVYKAKIDETSASYKEMQCTSKSSLQIHLS

SEQ ID NO: 259347 - protein, 68 aa, Zea mays
  unsure (1)..(68): unsure at all Xaa locations
  Clone ID: MRT4577_168107C.1.pep
ANVKXIQEKKLIXKYFEEXSXDTGKYVFFVFXXXKVFEMGXXEKMIVWENXXFNRFVIKXSXXGEIXL

SEQ ID NO: 259348 - protein, 121 aa, Zea mays
  unsure (1)..(121): unsure at all Xaa locations
  Clone ID: MRT4577_168109C.1.pep
GALWYELRNDXHFDKKDKLVXSELHTRDSMLETLTTIMWITSGHHSVVNFGQYQFCRYFLNRPTTIRKNMPLXGRPSXQETEKFIMXSETTLLDMLPTQMQTIKVVTTLDILKSHSTDKVY

SEQ ID NO: 259349 - protein, 29 aa, Zea mays
  Clone ID: MRT4577_16810C.1.pep
SELTMIYIQTNFLHIKVLCNADTYIICLL

SEQ ID NO: 259350 - protein, 86 aa, Zea mays
  unsure (1)..(86): unsure at all Xaa locations
  Clone ID: MRT4577_168110C.1.pep
IFFLXYLIKQGCIYIQKGSQTLQGHKLTHWRKKIKKAWCVTMPYDYMHQHKPNMNRHQTCNGGKPESNQTMAPSFIFDTPQAQSKQ

SEQ ID NO: 259351 - protein, 94 aa, Zea mays
  unsure (1)..(94): unsure at all Xaa locations
  Clone ID: MRT4577_168111C.1.pep
VPPNPXTTXTPFLNCQRMHLVSFPHHLCCHHAQMHPLLVKHYPGLQFQIFPAGGFFFSAFGPVLFPGLTKFGLTFPGFPIGILFGPSFLTGPFY

SEQ ID NO: 259352 - protein, 77 aa, Zea mays
  Clone ID: MRT4577_168112C.1.pep
GRCIYFEIAFFISFLYFIIKRYNHGTDFIFVFLIFVRTKLDHTCYIIFEDLFVHSSLSTRCNTYNQIRVVSDLNVLI

SEQ ID NO: 259353 - protein, 51 aa, Zea mays
  Clone ID: MRT4577_168113C.1.pep
RCNIGDVKFVPLKRPPPDKFPYLYLFFFFFFFFFFFFFFFFFFFFFFFFFW

SEQ ID NO: 259354 - protein, 57 aa, Zea mays
  unsure (1)..(57): unsure at all Xaa locations
  Clone ID: MRT4577_168114C.1.pep
TRAVGRLKXGLQTRXFLGNLSAARDWGFAGDYVEAMWLMLQQNTGDYVVATEESHTV

SEQ ID NO: 259355 - protein, 247 aa, Zea mays
  unsure (1)..(247): unsure at all Xaa locations
  Clone ID: MRT4577_168115C.1.pep
MGNCCTAGSAKCANASTPFESKVTSKSTASNNYSSSTATTTTTTIASAQLQLGGDSSEGAALKSFSMSELRAATKNFGSTSYLGEGGFGCVYKGWIDEATLAPTRPGVGRVVAIKRLKEESVQGHREWLAEVTYPGQLHHANLVTLVGYCADSGANKLLVYEYMMRGSLENHLFRRATHPLPWPTRVSVAADVARGLAFLHARPVIFRDLKSSNVLLAPDYRAKLSDFGLXRNGXTGDRTHVSTRVV

SEQ ID NO: 259356 - protein, 110 aa, Zea mays
  Clone ID: MRT4577_168116C.1.pep
IKMKKVALSAARLFWLALTPICAPLISEAKKKRVCGAAAREKKGQDNFCSTLCEGPKGMDLVVCRSPATSYSASTLGWSARFIARASAPLRRASPAPPMKGSPEAVHKDY

SEQ ID NO: 259357 - protein, 82 aa, Zea mays
  Clone ID: MRT4577_168117C.1.pep
PRVRSVLLACMAGLVDSNNLAYHGQHILSDWVVPSEGDSRKRGPASLLSHIFIWTSQTWTTTLHAQIHFEVKLEQSLIWPIG

SEQ ID NO: 259358 - protein, 44 aa, Zea mays
  Clone ID: MRT4577_168118C.1.pep
CVERCNVFRPLYCLSSCCYPNIHREEYQSVSGLIFQMLKMRPLP

SEQ ID NO: 259359 - protein, 59 aa, Zea mays
  Clone ID: MRT4577_168119C.1.pep
MPVFFCVQVQQWESDQLVESSYIRELGDDLSIIHLKFVMIIAKLRRIAQATVPAAAAEV

SEQ ID NO: 259360 - protein, 255 aa, Zea mays
  unsure (1)..(255): unsure at all Xaa locations
  Clone ID: MRT4577_16811C.1.pep
QRHRHPSTPTTTAPAMSRSPRSATSTLXPDAPPPASASWDTASHRSLSSSDDQQYMTMSREFTAMVAAGATMQPGGYDGAADQLTSIGEDELEETNPLAIVPDSHPIATPARSRASGLEXARGPGAAAAAAAARAPGXASQVKKEEVETKVTAWQTAEVAKINNRFKREDVVINGWETEQVEKASAWLKKIERKLDEQRAKALEKTQNDIAKARRKAEEKRASAEAKRGLKLAKVLELANFMKAVGRVPTKRSFF

SEQ ID NO: 259361 - protein, 143 aa, Zea mays
  unsure (1)..(143): unsure at all Xaa locations
  Clone ID: MRT4577_168120C.1.pep
SGRGSRANPRGGTRGAXQRQPRKPARRRTGQGGQESRGRXGRRRRPTPQASRPPRSRGGHRRRQPPXGHRKQGTGGARHRTGPGARPKQAKTARAPRGGGRASTGRTERDERSNDGATRREQGRHGPSTRTDNQEDNRQGDTG

SEQ ID NO: 259362 - protein, 143 aa, Zea mays
  unsure (1)..(143): unsure at all Xaa locations
  Clone ID: MRT4577_168121C.1.pep
VCSLHSSRLRPQTSLLLLSGEASRNTISDPSAQPGLPAGGGRHGVLFRAASLAVARRMLASRVWSRSAPQSSRALASAAASAARSLLLRSGMQLSQAPPXLAERPCAGIAEADAPPLRSSSGDSRGQHACLRRPYPIHPASNP

SEQ ID NO: 259363 - protein, 258 aa, Zea mays
  Clone ID: MRT4577_168122C.1.pep
VRLLPEELLPERSSPWALLSSPRALLLSSTTLELSSTTLGKLAMCCVVFDFADPTKDVREKEVKRQTLLELVDYITSATSKFPEPVVQEVVRMVSVNLFRVPNPAPRENKALKSFDMEEEESVMDPAWSHLQIVYELFLRFIQSPETNAKLAKRYIDHGFIIRLLDLFDSEDPREREYLKTILHRIYGKFIRKAINNIFYRFIFETEKHNGIAELLEILGSIINGFALPLKEEHKLFLVCHFHMSSRIDHSRLPLPFT

SEQ ID NO: 259364 - protein, 160 aa, Zea mays
  unsure (1)..(160): unsure at all Xaa locations
  Clone ID: MRT4577_168123C.1.pep
EKKGALPGGGPPRTKPPTGPPXPTRPYLKGDRPNLETKGGRDPXPSPPRKHPPPEPFLGGPHWGPEPXAPAQTGGSPNPSPPPXAGGPWPGXPKPPGGXTLKGPPNRPPPXGPPXGAPGPPPPGVAPTPQPAXPGHPDRLKTPGSRPRWGPPQQGNPGGV

SEQ ID NO: 259365 - protein, 71 aa, Zea mays
  Clone ID: MRT4577_168124C.1.pep
VHMFIFFFLFFFSPALLITSSVPTVVRAPRAGTMHTGTRNVMWGTSPDFPDDQDPYFASFLDGVRAHNQFS

SEQ ID NO: 259366 - protein, 516 aa, Zea mays
  unsure (1)..(516): unsure at all Xaa locations
  Clone ID: MRT4577_168125C.1.pep
MIKQILGRLPKKQAKSGEKELAGAGPSLPSPTADTRTTTDLTTSSRLVSPSNYASTATNQGQSFVAVRVAGVSNGFPASAGYEALPSFRDVPAPEKPGLFLGKLAMCCVVFDFADPTKDAREKEVKRQTLLELVDYITSATGKFPEPVVQEVVRMVSVNLFRVPTPAPRENKALESFDMEEEEPVMDPAWSHLQIVYELFLRFIQSPETDAKLAKRYIDHGFIIRLLDLFDSEDPREREYLKTILHRIYGKFMVHRPFIRKAINNIFYRFIFETEKHNGIAELLEILGSIINGFALPLKEEHKLFLVRALIPLHKPKCVAMYHQQLSYCVTQFVEKDCKLADTVIRGLLKYWPITNSSKEVMFLGELEEVLEATQPAEFQRCMVPLFRQISRCLSSSHFQVAERALFLWNNDHIEGLIKQNNKVILPIIFPALERNTKGHWNQAVQSLSLNVRKIFMDHDPALFEECHKKFEEEEAQEAGVRSXREARWRRLEEIASSNXLLSEVARPPEAVVLHQ

SEQ ID NO: 259367 - protein, 204 aa, Zea mays
  unsure (1)..(204): unsure at all Xaa locations
  Clone ID: MRT4577_168126C.1.pep
MSHRKLEQPRNVSLGFLLRKRSSRHRAEGKXFPRDDPQKPCHLTALXGYNAGMTXIVREAEKPPSXLHKKETXEAATIIEDPPLDIDGLEEYVKTPRGLRTLNSGWRPHLNKXVMRRVYENWSKSKNNAFTKYALKYENDACNNEIQLQLEKMNKYASGIRVIAHTHNKKMKGLKHKKAHLMEIRAYGGTIADNVDYGYKFFEK

SEQ ID NO: 259368 - protein, 91 aa, Zea mays
  unsure (1)..(91): unsure at all Xaa locations
  Clone ID: MRT4577_168127C.1.pep
TEEPTTPINSKAKIDKIIGILNNYLNEDADKRNCTHRGWRILTEKNVQHRRRRSLSXIIISXHKTGGHTTIRDRKIIGGVGPQITFPVNSP

SEQ ID NO: 259369 - protein, 130 aa, Zea mays
  unsure (1)..(130): unsure at all Xaa locations
  Clone ID: MRT4577_168128C.1.pep
MAPRLACLLALAMAAIVVSPCTGQNSPQDYGHPHNVARADIGVGTVPWDDTVALYAQSYAAHRQGDXQLIHSGGPYGENLFWGSARVDLAPSVLRGVXVPETHDYAHETNTCAKGQVCPHHTQLXWRRLH

SEQ ID NO: 259370 - protein, 395 aa, Zea mays
  Clone ID: MRT4577_168129C.1.pep
MEDFGGWNMQYAAELCLPSRRDDDDDGLLGDFLGGGGLDIRSDHGGLNLPSSHPAVQNLVPCHGGVSLSVSDAFMGLDTADMLASVTGALDCSLLDTFACGSDAVVVAEEPAAQPTASSNAFSGYSSTTGGNYGNISSGESNTYGGSGGGHDTEVASPTCASKRKLAGKYPAIAASASATATTTTAEGQVAAPRRGTKRDSATSSSSTSATVAGHGGGNHAAGGGGSSSVGDGNGYEPDSEAIAQVKEMIYRAAAMRPVHQLVCGAAGGEPPSSSQNKPRRRNVRISSDPQTVAARLRRERVSERLRVLQRLVPGGSRMDTASMLDEAAGYLKFLKSQVKALERANPSSNGGYNDSSFLPQNYTGCLCVDGGTSVAFGSDGAIGGYVKPGRNMHR

SEQ ID NO: 259371 - protein, 46 aa, Zea mays
  Clone ID: MRT4577_16812C.1.pep
TNCRCLLKKKKKKKKKKKKKKKKKKKKKKKKKKKKKKKKKKKGGPF

SEQ ID NO: 259372 - protein, 75 aa, Zea mays
  Clone ID: MRT4577_168130C.1.pep
FSFSHTANTDGDDYNVCWDLTTDPTFFATYSYDSFCHVGHKEIYTYLRTYCYNILYFYLLAREHIYDKYNRLSFM

SEQ ID NO: 259373 - protein, 95 aa, Zea mays
  Clone ID: MRT4577_168131C.1.pep
TCTKSSCLRAEAGSVSHAGGVQIMEDFGGWNMQYAADLCLPNRRDDDDDDGLLGDFLGGGGLDLRSDHGGLNLPSSHPAVQNLVPCHGGASLSVS

SEQ ID NO: 259374 - protein, 88 aa, Zea mays
  unsure (1)..(88): unsure at all Xaa locations
  Clone ID: MRT4577_168132C.1.pep
QQASYNVQSIFNTRAAVATKIVAVLMLHAVSTCDAHATIXPXCSHAPIATVITPYLPSLIASVCDNPSLQPYRRXHAFSASNIPLSPL

SEQ ID NO: 259375 - protein, 81 aa, Zea mays
  unsure (1)..(81): unsure at all Xaa locations
  Clone ID: MRT4577_168133C.1.pep
GGFPYGVLVVGGPSXFGRGFPPCRGGGMPWADSPGAKNIPGKLGGWTKRYGGFFKPWSXPAEKGAKGIPLGAPTKKGQGRV

SEQ ID NO: 259376 - protein, 240 aa, Zea mays
  unsure (1)..(240): unsure at all Xaa locations
  Clone ID: MRT4577_168135C.1.pep
MLPSSRGGGRRRLVLLLALTAVFAFASPLRASASESDHKYKAGDSVKLWVNKVGPYNNPQETYNYHSLPFCQPSENPGHKWGGLGEVLGGNELIDSQLDIKFLRNVERGSICTLELDSKKVQQFADAIESSYWFEFFIDDLPLWGFVGETDKNSENKHYLYTHKNILVKCNDNRIIHVNLTQESPKLLDAGKKLDLTYSVKWVPTDVSFARRFXFTLDYXFLXHQIHWXSIFNSFMMVIF

SEQ ID NO: 259377 - protein, 195 aa, Zea mays
  Clone ID: MRT4577_168136C.1.pep
MARGLRENTSPRRKNQPCGWTRRCREDGRTESPRTYRLFISRSRLATTAPPARAAIKTRPISKSTAMKKTSSPLLIVLFLTAAAMAAEPEKQAAPAAQETAVHIVYVDRPEDADPEEFHIRTLTPVLGSEQKARDAVLYHYKNAASGFSAKLTPQQVKDLKEQPGVLQVVPSQTYQLHGPGSGTHQGTTHTLGLM

SEQ ID NO: 259378 - protein, 152 aa, Zea mays
  Clone ID: MRT4577_168137C.1.pep
KKKPKKPGNQARKQRKGAQGRGPRDRAHLAEPPRQTPPTPRVKGPPQGRPQCATSAKHKRQGTGKGGPARKIKGVAKGGPINQAKTRGYPQAYSRDTRAKTPAHEGQERAPLKNPKTSSHNIVFFIFVPLFFFFFFFFFFFFFFFFFFFFFK

SEQ ID NO: 259379 - protein, 58 aa, Zea mays
  Clone ID: MRT4577_168138C.1.pep
KGIPERIFDHAVCGMLPKERLGKNLFPPPKVYKGTEHPQGAKKLVPLPFGDKRIQKAG

SEQ ID NO: 259380 - protein, 71 aa, Zea mays
  Clone ID: MRT4577_168139C.1.pep
SSPLSPTFGLPAAAPSALRRRASDLVANVGRRRPCRKPVRRPASVQTWTARGRYLILHCNEYVRVIISLII

SEQ ID NO: 259381 - protein, 48 aa, Zea mays
  Clone ID: MRT4577_16813C.1.pep
DVTVQLITVKVEHNEKGYAHQQMTGLLPSMSLTKASTFTAHETTCWNA

SEQ ID NO: 259382 - protein, 86 aa, Zea mays
  Clone ID: MRT4577_168140C.1.pep
MWCRSPKDHATAPVRLSHRSTNAPKKANKLKRWSSSWRTCLGAPLLFWCYRPKLSNICKNILSGFTGGTRKQSCLVAKCIWREFYT

SEQ ID NO: 259383 - protein, 71 aa, Zea mays
  Clone ID: MRT4577_168141C.1.pep
FRGNKKKIISWKEGGGKFGSLKRGAPFFFFFFFNPFPFFYFSPFLFFFFFFLKLNFFFFFFFFWKGVARPG

SEQ ID NO: 259384 - protein, 100 aa, Zea mays
  unsure (1)..(100): unsure at all Xaa locations
  Clone ID: MRT4577_168142C.1.pep
THNKRDNGSTQTSQGTKKRKKTADAGPPPPPPKRRXGKKKTPPRRPXAKKKRGAGKRTGQPREQQASPTQRPNKGRQDTAREQGAPPGGFXKGNPPNAGR

SEQ ID NO: 259385 - protein, 73 aa, Zea mays
  Clone ID: MRT4577_168143C.1.pep
GRTQFRITHIPFMGDIQRLGVLSILDVVLTMVAEHREELNLLNDYIQRRYYYDLCSDYPLRFRQLVKSSFEIQ

SEQ ID NO: 259386 - protein, 112 aa, Zea mays
  Clone ID: MRT4577_168144C.1.pep
HTGRRCLGRTDCRARNASECQPQWVGYRENDKRHGQDQGAQHHSRSAEGGTRRGLSLRDHGAMLLLRQRQTVRSASGFKFPVDPRTCTRARMMNSHAARAKGPGRPTWARSP

SEQ ID NO: 259387 - protein, 79 aa, Zea mays
  Clone ID: MRT4577_168145C.1.pep
TEGPQTKACPHKAKQKNDWLELWGEPKLYGRVRKKSHRLKGPNPPPPEGVKGGPPPGPLKGGFFIKTPAPGKSGAGLKP

SEQ ID NO: 259388 - protein, 303 aa, Zea mays
  Clone ID: MRT4577_168146C.1.pep
MALARLGRSLAGRLHRSIYRPPAPTDYHASVSRPFAPTHTGVCVRGFASLTYNASSMIGHNLEGPLPVHIVKVLDLVVHMNHARPMSTAAASKVPVGARKVGLKVAMMSPGFVYEPYSPRERIPFWKRWFTLSGWRRTKEDIILEMKNAYAVSRLRKKTGYTKNQFYDQALKIYKEVNTLMAHGDTSSLRKILTERMHSTIKNELKRRQSMWNSVHWELVEPAVSIRTLRARMIGLDKNDLDKAFIQLTLEFVTKQKFEAYNSKGAVVSGDKSKEVLVKDIWVFERSLFHPGAYWRVCGRITL

SEQ ID NO: 259389 - protein, 96 aa, Zea mays
  Clone ID: MRT4577_168147C.1.pep
KNNFLKKKDKKFGSKLGALQIPQKGFQARKNLLGSPPPVFPSANGGDENPFTTPPKVFPVKKVFKNFPKQKKVPGAPLPLKWLDFPPGQSKLLTEI

SEQ ID NO: 259390 - protein, 163 aa, Zea mays
  Clone ID: MRT4577_168148C.1.pep
SSRPLRRCPAHPSSSHTSRGDPRPPRPDRRASVKPLLDVRQLHRTPSSRPGEPPSLPPEFGPPPPRRGPTYHATTADRTRSRQRAPLTKSSSSGPSSLRGNWWAPFSSRVRTWLTWSHEEQNLLARPSFNGALSKATLIEKSWEAPNFPIYSCSHGLVQCLAR

SEQ ID NO: 259391 - protein, 64 aa, Zea mays
  Clone ID: MRT4577_168149C.1.pep
HATLSTRNTAMELTTNTAHQTTEAKTEDMHYKTHQDAALVNILVLMLSNPIPTDLRLLLACVRS

SEQ ID NO: 259392 - protein, 116 aa, Zea mays
  Clone ID: MRT4577_16814C.1.pep
AAGTATGSSSATAIHQPRRRRRPRCRGHHARCCIREPNCKEKNCKLYTYYCLLWSPVMSVIHHRVPVVLFSFSSLLFSWLVYRIHMLVVLERTVVVCLTVQTYTVVYSIYTTFNTA

SEQ ID NO: 259393 - protein, 88 aa, Zea mays
  Clone ID: MRT4577_168150C.1.pep
HKEAGCLSPEGPMLCITNCDLKKSAATMNMCSKCHTDIISKHNHAKKAASSMDSIVNGSNAVMEPFDAGINTVVAVAQVEPQTMNVQQ

SEQ ID NO: 259394 - protein, 44 aa, Zea mays
  Clone ID: MRT4577_168151C.1.pep
VPPVDFIDFCVEIFIVISYFSIVIVNFVPLSSQNLIPKTCCSGD

SEQ ID NO: 259395 - protein, 96 aa, Zea mays
  Clone ID: MRT4577_168152C.1.pep
MAKRTKKVGIVGKYGTRYGASLRKMVKKIEISQHAKYTCSFCGKTKMKRRAVGIWHCGSCMKTVAGGAWTYNTTSAVTVKSAIRRLKEPVDPPPLL

SEQ ID NO: 259396 - protein, 97 aa, Zea mays
  unsure (1)..(97): unsure at all Xaa locations
  Clone ID: MRT4577_168153C.1.pep
RMEKLSGGVAVIKDVSLSGAXLKYRKLRIKXSKNATLVALEEGIDPRSGAQCVYLWTLVPAIKETSDHPQERLGADIIHKALVRPAGFIAHNAGTEG

SEQ ID NO: 259397 - protein, 46 aa, Zea mays
  Clone ID: MRT4577_168154C.1.pep
QRYRPFVIFDFVYGQKVWCFSNDTAITIVSIKSLRSWDIFPTRGSP

SEQ ID NO: 259398 - protein, 86 aa, Zea mays
  Clone ID: MRT4577_168155C.1.pep
HDHQPNLYCWLTAKTHTLHILNLSSSPQTRYILRRNLSQTVTFSYLWNAPHFSPQHNTPTNIYQIILGFTEDTIFNIPFSTSHLLQ

SEQ ID NO: 259399 - protein, 106 aa, Zea mays
  unsure (1)..(106): unsure at all Xaa locations
  Clone ID: MRT4577_168156C.1.pep
MLRRKTRDPKEENVNLGPTVREGEYVFDVDHIFAYYNDTYIDMTDLSGKETLVRITGGMKVKADRDXTEPYATMLTAQDVSHSCKELGITALHIKLRATGGIKTNT

SEQ ID NO: 259400 - protein, 524 aa, Zea mays
  Clone ID: MRT4577_168157C.1.pep
MEMELDPFLGVVLATAVLLVAVLRRKRGSSRKYKMPPGPRPWPVIGNLNLIGALPHRSIHALSARHGAFMSLRFGSVPVVVGSSVEAARFFLRTSDTSFIDRPRMAAGKYTAYDYSDIVWSPCGAYWRQARKLWKAHLFSDRQLRSQEHVRSEELRVLLHALSSSSSAGVAGRGRRAVALKEHLLMYSLNVISRMALGGKYVGEGGTAGSPISPAEFSWMVDELFLLNGVFCVGDFIPWLGWLDLQGYVGRMKRLGKMFDRFLEHVVDEHDQRRRREGGGFVPADMVDLLLELADDPKLEVPIERDGVKGFALDLIAGGTDSSAVTIEWAMSELLRKPEVLAKVTEELDGVIGHGRLVTEQDIPDLPYLEAVVKETLRLHPVTPLLAPRLCREDACTGTYDIPRGTLVFVNVWAIGRDPAVWGHDAEEFRPERFVGSAVDVKGHDLELLPFGSGRRMCPGYVLGLKMVQVTLANLLHAFSWRLPDSVAPEKLNMQEKFGLAVPRLVPLEAVAVPRLPPHLYAGP

SEQ ID NO: 259401 - protein, 122 aa, Zea mays
  Clone ID: MRT4577_168158C.1.pep
MASLPATMSCVDGFMAELEVEAVNRKSKELNEQMRQVAMEVQSWQSAAMYNQSVVNTLKNKLMQVVAQNTNLAREGMGDSEDVAFSQSPDAGRDALGGLRGTATVGLGACRCCGKKGAPVLV

SEQ ID NO: 259402 - protein, 168 aa, Zea mays
  unsure (1)..(168): unsure at all Xaa locations
  Clone ID: MRT4577_168159C.1.pep
RSSTQPAAYETAVDGEDQGIATSLSLQAQPSAQQESAAAVEGSRAYPDGSNRRAPXSPTTSSSSCSCAWPRPSPSSAPRPRASAGAASSSRTTPRPRTTGSAAPSARPASPATTTSTGTTTSSYRTPWRPTASTDANSPSTFSRXSLTARCPGSSPTAAVASSSSIGG

SEQ ID NO: 259403 - protein, 44 aa, Zea mays
  Clone ID: MRT4577_16815C.1.pep
GLTVRYFFKNQEGREKKIIPFDHIVGNNVHGHGFKKNKSSGITI

SEQ ID NO: 259404 - protein, 187 aa, Zea mays
  Clone ID: MRT4577_168160C.1.pep
GGLRLSYEDDERNSSITSGSGSMASLPATMSCVDGFMAELDKESKEINFYLRLQADQICKRMKETNQRWMVSFLASVNQAVGKKLRDKELEVEAVNRKSKELNEQMRQVAMEVQSWQSAAMYNQSVVNTLKNKLMQVVAQNTNLAREGMGDSEDVASSQSPDAGGDALGGLRGTATLGLGACRCCGR

SEQ ID NO: 259405 - protein, 107 aa, Zea mays
  Clone ID: MRT4577_168161C.1.pep
RPPLSRPAFFRLGTPPGTKGQRMFFKPPVLQRKPKFFDRAMGGPLIFLLGPPPPSVFSGGFLVLPPRFSPLCMISPLQWPLLFFLSPHLGFGSFLPPKQIRRSFFAP

SEQ ID NO: 259406 - protein, 45 aa, Zea mays
  Clone ID: MRT4577_168162C.1.pep
LMLLIYLSSLPNRITWGSLGVEKRPSVISYVFLFIHHAEGCGQAL

SEQ ID NO: 259407 - protein, 64 aa, Zea mays
  Clone ID: MRT4577_168163C.1.pep
LLLDKQKTEFHNLFCIKLQQPISFPWHLHQAHKEKGSDIKIPPEHTDAGPSHRIRRVICTPRIC

SEQ ID NO: 259408 - protein, 49 aa, Zea mays
  Clone ID: MRT4577_168164C.1.pep
KNPGVTKLNRFEKNPLFASWINKKKARTNRLSKNLPTLNGKWNPPFSGP

SEQ ID NO: 259409 - protein, 248 aa, Zea mays
  Clone ID: MRT4577_168165C.1.pep
IRCRFFSSVTMAAQGSLVMWRAVFAALGLLMVATLVYTLATDGSPFRLELFTPWMVATLADFYVNVIAISAWVIYKEANWVSSAVWVVLLFCFGSAVTCAYIVKKLLEVTSAGSSQDPLDLLFIRQGNLSQRKCSYVVIGRVIFSILGIFMAAVVTYTVITDGLPFRKELLTPWMAATLIDFYINVFAISVWVAHKESSWISTTIWIVLLICFGSITTCGYIVIQLFKVSYQDPIYHVLLNSHSKYHN

SEQ ID NO: 259410 - protein, 51 aa, Zea mays
  Clone ID: MRT4577_168166C.1.pep
EGTTCTHISKPHSAKFLKVSMGNLILLQNKTFFNGKVYIFHAWFLFTGMDD

SEQ ID NO: 259411 - protein, 196 aa, Zea mays
  unsure (1)..(196): unsure at all Xaa locations
  Clone ID: MRT4577_168167C.1.pep
HASALVYTLATDGSPFRLELFTPWMVATLADFYVNVIAISAWVIYKEANWVSSAVWVVLLFCFGXDPLDLLFIRQGNLSQRKCSYVVIGRVIFSILGIFMAAVVTYTVITDGLPFRKELLTPWMAATLIDFYINVFAISVWVAHKESSWISTTIWIVLLICFGSITTCGYIVIQLFKVSYQDPIYHVLLNSHSKKI

SEQ ID NO: 259412 - protein, 102 aa, Zea mays
  Clone ID: MRT4577_168168C.1.pep
MAAVVTYTVITDGLPFRKELLTPWMAATLIDFYINVFAISVWVAHKESSWISTTIWIVLLICFGSITTCGYIVIQLFKVSYQDPIYHVLLNSHSKYGIPTSL

SEQ ID NO: 259413 - protein, 85 aa, Zea mays
  unsure (1)..(85): unsure at all Xaa locations
  Clone ID: MRT4577_168169C.1.pep
GLAWRSAFARFLFLLLGLAFSCGFVRPSRLGPALGCFGFLWVCFCVVXSSWLSFXLACLALSCLSLFSAXCVWAXALCCSVLLPP

SEQ ID NO: 259414 - protein, 217 aa, Zea mays
  unsure (1)..(217): unsure at all Xaa locations
  Clone ID: MRT4577_16816C.1.pep
HEATTPPQLTSIGEDELEETNPLAIVPDSHPIATPARSRASGLEVVPAGPAPAPQPPAHLEASQVKKEEVETKVTAWQTAEVAKINNRFKREDVVINGWETEQVEKASAWLKKIEVPTTPTPSSLLPLRQFIYILLNSNHELRICVLVCSXRKLDEQRAKALXEKTQNDIAKARRKAEEKRASAEAKRGLKLGQVLELANFMKAXGKXPXKRSSSKP

SEQ ID NO: 259415 - protein, 48 aa, Zea mays
  Clone ID: MRT4577_168170C.1.pep
VPRESAFRNIKTIAECLADELINAAKGSSNSYAIKKKDEIERVAKANR

SEQ ID NO: 259416 - protein, 61 aa, Zea mays
  unsure (1)..(61): unsure at all Xaa locations
  Clone ID: MRT4577_168171C.1.pep
RADECKKSLDLSNPHIEHVRRRCQYXILLGLLTLLARFVDFTVSWLPYYSVAQVMFFVYLW

SEQ ID NO: 259417 - protein, 51 aa, Zea mays
  Clone ID: MRT4577_168172C.1.pep
GRPFLLGKSYRFLTRCVFLSFHVFREKRQNKLKFERSTAYNRSCLSDHEVL

SEQ ID NO: 259418 - protein, 143 aa, Zea mays
  Clone ID: MRT4577_168173C.1.pep
MEYIGKDDSNIRIGAILGLGIAYAGSQKEEDSVEATAEVSKTFDEKIGKYCDVTLMSLAYAGTGNVLKVQKLLGICSQHLEKGETHQGPAVLGIALIAMAEELGAEMAVRSLERLLQYGEQNIRRAVPLALGILCISNPKVCE

SEQ ID NO: 259419 - protein, 91 aa, Zea mays
  unsure (1)..(91): unsure at all Xaa locations
  Clone ID: MRT4577_168174C.1.pep
AQYTSLVDAGMSTDICVRIFTVAHLEXIWKDNWGGEMVPWAVLLXNIERVLVLXISAVGDGKSLTCLLNASTGELNDRKNVTLERQHHHLR

SEQ ID NO: 259420 - protein, 574 aa, Zea mays
  unsure (1)..(574): unsure at all Xaa locations
  Clone ID: MRT4577_168175C.1.pep
ATKLSEGYLTLARDIEVMEPKSPEDIYKVHLIDGRGASSSLDSARQNLAATFVNAFVNAGFGKDKLMTAPSDSPSSGSSGNWLFKNKEHGKASAAASLGMILLWDTDSGLAQLDKYLHSNDTHVVAGALLGIGIVTCGVKSDCDPAFAILMEYIGKDDSNIRIGAILGLGIAYAGSQKEELKMHLSAVLGDSQSPLEVLVFSAIAMGLVFVGSCNEEIAQSIIFAALERSEAELAEPIIRLLPVALGLLXLGKQDSVEATGRAXSKHFDENTRXKYCDVTLMSLAYAGTGNVLKVQKLLGICSQHLEKGETHQGPAVLGIALITMAEELGAEMAVRSLERLLQYGEQNIRRAVPLALGILCISNPKVNVMDTLSRLSHDADAXVSMAAIISLGLIVAGTNNARIAGMLPYLSSYYYXKKLLILFCVRIAQALVHLSRCLVHTFRIPLLDXIQLPSKALGGLVTVLHACLDMKSTILGKYHYILYIIVLAMQPRMLLTVDEDLKPLSVPVRVGQAVDVVGQAGRPKTITGFQTHSTPVLLAAGERAELATEKYIPLTPVLEGFVILKKNPEYHEE

SEQ ID NO: 259421 - protein, 479 aa, Zea mays
  Clone ID: MRT4577_168176C.1.pep
HFRHLGVNAVLLEPVFPFHQVKGPYFPYHFFSPMSLYSSECSSVSAIKSMKDMVKTMHRNGIEVLLEVVFTHTAEGGAECQMISLRGIDGSSYYIADGIAGCKASVLNCNHPVTQKLILDSLRHWVLDFHVDGFCFINAPFLVRGPRGEGLSRPPLLEAIAFDPVLSKTKIIADPWSPLDISNVQFPFPHWKRWAEMNTRFSMDVRKFLKGEALISDLATRLCGSGDLFSSRAPAFSFNYVSRNSGLTLVDLVSFSSDELASEFSWNCGEEGPSENNAVLQTRLRQIRNFLFILFISLGIPVLNMGDECGNSAAGSTSYKDRGPLNWKALKTAFVKEVTGFISFLSALRSRRADIFQRCEFLKLENIHWYGSDLSEPCWEDPTSNFLCLHINAELDEKLPDSTGGDLYICFNANEESASATLPAIAEGSMWLRLVDTSLAFPGFFSRGSSHETHQVLGFSSYQVKAHSCVLFESKRVLS

SEQ ID NO: 259422 - protein, 59 aa, Zea mays
  Clone ID: MRT4577_168177C.1.pep
PLEKCYISDPIYPPKYDIVLICLRLTTYSMMVYCSGDERRKVLSFWLDRSVFMHPFLGG

SEQ ID NO: 259423 - protein, 35 aa, Zea mays
  Clone ID: MRT4577_168178C.1.pep
CFCFGYTQVTHADFKKAKEKVMYKKKEGVPDGLYM

SEQ ID NO: 259424 - protein, 77 aa, Zea mays
  unsure (1)..(77): unsure at all Xaa locations
  Clone ID: MRT4577_168179C.1.pep
MVLNIIHFNTLTYQAAERPTCTVCHIITXYSLIKHQLVDLYYLLVSKKFENPAQCEQALVGKFKILYYDLTTAFLNL

SEQ ID NO: 259425 - protein, 54 aa, Zea mays
  Clone ID: MRT4577_16817C.1.pep
TLQMVLPHCIRCICKEQYTQYQATGSVCRSCDSSKNICTSELRISQMSVTQLYL

SEQ ID NO: 259426 - protein, 46 aa, Zea mays
  Clone ID: MRT4577_168180C.1.pep
RIRKKKKRRPLRFKKFSPSGVKGFVYLGLFALPSVLISLKGGLPVS

SEQ ID NO: 259427 - protein, 41 aa, Zea mays
  Clone ID: MRT4577_168181C.1.pep
SVFGMCRCPIGWASCWKLRVVGKPRWILLNMDVLLCVFGPP

SEQ ID NO: 259428 - protein, 70 aa, Zea mays
  Clone ID: MRT4577_168182C.1.pep
RPALVALVRETPFFPLTFFRPPRRFSKLSKPPCSRSFGPLGLSPEISFPPGFPPLWNLTNEGAPPRFSIC

SEQ ID NO: 259429 - protein, 60 aa, Zea mays
  Clone ID: MRT4577_168183C.1.pep
PLSSLFSCVHALECRPLASSWSSYASATLFRCSWFLETLAVVPAGLVPRKASFGPSPWPC

SEQ ID NO: 259430 - protein, 61 aa, Zea mays
  Clone ID: MRT4577_168184C.1.pep
MRGGLVALVLLVLASSATCTHTSCGCDRQPPHLPHLPYMAHLPYLVHQPHPEHLPQPNQLP

SEQ ID NO: 259431 - protein, 205 aa, Zea mays
  unsure (1)..(205): unsure at all Xaa locations
  Clone ID: MRT4577_168185C.1.pep
RCESIKDAFSHTEGVDDDKNMHVTETDPLWMVPQRSDPQXTKSCSASATMXHIPRPXMLLRMLDDAQIGDDADNMXLDYMIVEGLQIMNKNEQLVKRIAKKYLVVLXASEAMINQIPRLLVTGLKKAIQFPTLCTHQESLVSKVNETNATVEVQLKKVLCMTVDDGSWRVDDKQIPLCIEMSVNFVVSLLNKNWLKVRWLYVKST

SEQ ID NO: 259432 - protein, 94 aa, Zea mays
  Clone ID: MRT4577_168186C.1.pep
LQRPQGPRQGPSVTRRRNHRRLQVMNHRSRPPRRRPPRLLLQVLPALVQVVAVPPRPPRRRRRQGRRKKDPRQARDKCRSSTYHHLPILIPPPS

SEQ ID NO: 259433 - protein, 72 aa, Zea mays
  Clone ID: MRT4577_168187C.1.pep
YDSLVHTIRAIVTDVFYDRKTFAQSWVYRAHLHPTFSYRMCLGMIMSILLMSYMCDGCQIIYPTRIMASTEC

SEQ ID NO: 259434 - protein, 65 aa, Zea mays
  Clone ID: MRT4577_168188C.1.pep
ASHDIFRPRILSYTRHIYYRALVKVILANTRGCTDAIPRSVHGVGRARRDERGSLLPEPVIPDAP

SEQ ID NO: 259435 - protein, 51 aa, Zea mays
  Clone ID: MRT4577_168189C.1.pep
PPPFFFFFFFVFCQRPMPPAGMTVTHLQYSDLPYSTHTQRHLPYNEDTQTS

SEQ ID NO: 259436 - protein, 44 aa, Zea mays
  Clone ID: MRT4577_16818C.1.pep
IIHLLTLRHQPNTHRRPRSAMSIPAREIYGKHDSWYGPVNDGAR

SEQ ID NO: 259437 - protein, 115 aa, Zea mays
  Clone ID: MRT4577_168190C.1.pep
MLDKLWDDVVAGPRPETGLEKLRKATTARPLVINKDADGGSYKRAQSTPSTPTTPVTPSSSTTPRGAGNVWRSVFHPGSNLATKGMGANLFDRPQPNSPTVYDWLYSDETRSNHR

SEQ ID NO: 259438 - protein, 120 aa, Zea mays
  Clone ID: MRT4577_168191C.1.pep
MLDKLWDDVVAGPRPETGLEKLRKATTARPLVINKDADGGSYKRAQSMPSTPTTPVTPSSSSSSSSTTPRGAGNVWRSVFHPGSNLATKGMGANLFDRPQPNSPTVYDWLYSDETRSNHR

SEQ ID NO: 259439 - protein, 117 aa, Zea mays
  Clone ID: MRT4577_168192C.1.pep
PQIFFFFANFFFFFLGTVCVLLTTICECTMQHPYFMMYALYLLQDEDYTQYNASCDRSTCKSQQYTSYCICTAPAGRFMFWYIYDDHLAELLQKRKKTHGRTYAVRTDRKIAVTSHQ

SEQ ID NO: 259440 - protein, 53 aa, Zea mays
  Clone ID: MRT4577_168193C.1.pep
KRNMVGPFWYLTTLKKGEFLQRELIWGNQGFYNKAVVKTGAGDLILGPPKKKY

SEQ ID NO: 259441 - protein, 62 aa, Zea mays
  Clone ID: MRT4577_168194C.1.pep
LTNTCAYHELAVVIECCFSEQREVSSGYGLHASFAGKSGLSDPELSNKLLIGYYPYQGGEQD

SEQ ID NO: 259442 - protein, 77 aa, Zea mays
  Clone ID: MRT4577_168195C.1.pep
IIQVLRGLRCKCKNKPSNPRNENIAATTPRAHTAVKHWRATIPTQQAEKRCLIIRHEQQLQQILSSTTTSPPDSSYA

SEQ ID NO: 259443 - protein, 94 aa, Zea mays
  Clone ID: MRT4577_168196C.1.pep
HCCVLRITLGLLRKIITTNRVLRKTRGVRTFSQRHFSRGYPRKSSPPCSANLVLLHSPTAKEKRTPNDAWVAYFMAFQKRIHFPMARLIQYAFS

SEQ ID NO: 259444 - protein, 27 aa, Zea mays
  Clone ID: MRT4577_168197C.1.pep
AGAIQVIKVLVTNSQKRLGLDCVHRNP

SEQ ID NO: 259445 - protein, 107 aa, Zea mays
  Clone ID: MRT4577_168198C.1.pep
FPPFFFFFLLLGVFFKFLRCKSPDIKVLGGPRGWGKDTFHTKQMLGRRSVTSQIWPPPKKRGGRAPPTKRGGGGATRDPSSGELGGAKGTRLFRRKKLEGKREKKGG

SEQ ID NO: 259446 - protein, 573 aa, Zea mays
  unsure (1)..(573): unsure at all Xaa locations
  Clone ID: MRT4577_168199C.1.pep
PTRPRTRGEEKKRYIXHIEKIXLARTCSFLTAASDIFSAKVSGTFKRAQITQGRKVLSTLDSLSKLVEKEQSVSVIISSAGDMLPQKYLLEKRAVVDVDNGKLLNEDSDIRSVLQFLMDDVSDFLSTHFSSSMERSKTDEKGCASTLKAFIDYISLRETENFRSRKEENKNSITLTTIHQSKGLEWDVVFIVQVFLHSSGRACIYKYSAIYVVLGRQCGSVWHLIADXQLVLCDLAEETIQYCLATCVFAREAWTILLFIKLRWPTLSPHPNDRILHWWSQSVKANDSEIPLLHEYNGSVKEAGSTLEEERRLLYVAMTRARKKLYILHVTIDSNRQLLQPSRFLREIPDHLLEVQGEEPLRKMPERPSGDVPFDDSEVDTSIGKPIMGPNEASSYPEQAQACLANDFLRRFDIDDRSVVSHIFHHWGKKQAFQNPKRLLEKISFVIDERLRGKGYKRKDVLRKLKSFLSGDEALGYAQYVIKWEQIPIEKRNHLIRERNISKSRGLRTLWVRQNPQPSRYRTFEAWGAPSLRLLAYTHHILSKSTNRSNLVEESTNHNILLFFMYMPSILQM

SEQ ID NO: 259447 - protein, 34 aa, Zea mays
  Clone ID: MRT4577_16819C.1.pep
VLGRKMGVLLVDYIRFRQGFISCNVVKLGPVNFF

SEQ ID NO: 259448 - protein, 80 aa, Zea mays
  Clone ID: MRT4577_1681C.1.pep
MACTNNAMRALFILVLFCIVHGEKEESKGIDAKASGPGRSFDIHKLGVSGNGTTDSTKAVPDAWASAYGDTGKQTILIPK

SEQ ID NO: 259449 - protein, 218 aa, Zea mays
  unsure (1)..(218): unsure at all Xaa locations
  Clone ID: MRT4577_168200C.1.pep
MAARPSALLAVLVLLAVSFLAGAKADFDDQFEAIGDRDHIGYRDDGKDKGQEFSLELDQESGSGFKSKAKYLFGEFEVKMKLVDGNSAGTVTSFYLTSGESATHDEIDIEFMGNSSGDPYVMNTNVWASGDGKKEHQFYLWFDPSADFHTYKITWNPKNIXIFEVDGVPVRTFKKYDGLPFPSSRPMTVHATLWDGSYWATQHGTVKIHWRHHPFVVP

SEQ ID NO: 259450 - protein, 52 aa, Zea mays
  Clone ID: MRT4577_168201C.1.pep
GWEIILKLLHLFFGTKNKLNFKRGLSCLKEDQILRFFGLNITPLKCDQLNGF

SEQ ID NO: 259451 - protein, 61 aa, Zea mays
  Clone ID: MRT4577_168202C.1.pep
AATQSILANILHALPWRVFGLTVTWPFNIGPFPQKICPCRRSGAGVPHNPVITAIDPDRPL

SEQ ID NO: 259452 - protein, 214 aa, Zea mays
  unsure (1)..(214): unsure at all Xaa locations
  Clone ID: MRT4577_168203C.1.pep
ALPNYFPLQVLPPXGQQPDLKLPRCPVTSPTKRTSPTKRAHAGYRLYDVELTVQRSYKGHHVPLVSLISKWTGKPIVGYPVTVEVLEDSRPTTSRNEHRPPMGSLGSLPKSRVAEPRQARSSPASRSKSKPSGRKKASEHDLDKSWRPHIKKPASSPRKMRRLSSFAGSRRESADQKPVVVKAGGPAVACVPLRLVLSRINEALSFPLRQENPT

SEQ ID NO: 259453 - protein, 167 aa, Zea mays
  Clone ID: MRT4577_168204C.1.pep
APSLSPSTLAALSLSLPPGPCHGRRAAALWCSVAQSPCSAPDCSSPELPTESLWCALPCRRACYLPALSLPQSSLEFLSQLARWCSAELPGAHVPVAARIFMTTAPSMDASSKLLLVQPLSRRPCRVPSQLAPSPMSLDCSWVWPESLTSISLALRLSDFARARICC

SEQ ID NO: 259454 - protein, 56 aa, Zea mays
  Clone ID: MRT4577_168205C.1.pep
VVRTGGPPSTNALILALVLPLSLLEGTLVTAARVANDLDDRFPRAGTVEYHSTSMT

SEQ ID NO: 259455 - protein, 62 aa, Zea mays
  Clone ID: MRT4577_168206C.1.pep
RGNWSLPNMFSTCLIQCNIQPSRVCPARVLIPTKISNWKRGPFFWQPPFFLLPTFSAQAGGV

SEQ ID NO: 259456 - protein, 46 aa, Zea mays
  Clone ID: MRT4577_168207C.1.pep
PNEKRSYLLRVWVERISKCKARCVMCSREVLGRDGIGIKYAILGHL

SEQ ID NO: 259457 - protein, 63 aa, Zea mays
  Clone ID: MRT4577_168208C.1.pep
MSKQGGKAKPLKQAKVAEKDYDENDLAYLQKKKDEQKALKELKAKAGQKGALGGSGLKKSGKK

SEQ ID NO: 259458 - protein, 203 aa, Zea mays
  unsure (1)..(203): unsure at all Xaa locations
  Clone ID: MRT4577_168209C.1.pep
AIFGLGAVGLAVAEGARLRGAARIIGVDINPEKFTKGREMGVTDFVDSRASDKPVHEVVVLPSSAYTYTGPEMMTGXVQVIREMTHGGVDYSFECTGINGVLREAFVSTHDGWGLTVVLGIHATPKMLPLHPMELFDGRRITACVFGDVKGKSQLPAIVDKCVNGDLDINLDGFITHRMPFSDINKAIQLLEEGKSLRCVLNL

SEQ ID NO: 259459 - protein, 88 aa, Zea mays
  unsure (1)..(88): unsure at all Xaa locations
  Clone ID: MRT4577_16820C.1.pep
XXITHQXTLTXXXXXXXXIPYXNPTXFFXXKXXFPNHLXKXTKXPFFIYXXPPPPTXXFCFYTQFXXSFFSXLSPXXXXXSPLPXXSP

SEQ ID NO: 259460 - protein, 398 aa, Zea mays
  Clone ID: MRT4577_168210C.1.pep
MAANGKSSLANGASTGGKPIKCKAAVAWGPGEPLVMEEVEVAPPGRLEVRVKLLFTSICHTDLSFLKGENELHRKFPRILGHEAAGVVESVGDGVEDLAAGDHVIPIFNGECGACAYCESDRTNLCGTYRVDASKSTMVSDGGTRFSVADRVSGRTVPVYHFLNTSTFAEYTVLDAACAVKVNPEAPLQKMCLLSCGISTGVGAVWNTANVSAGSTVAIFGLGAVGLAVAEGARLRGAARIIGVDINPEKFTKGREMGVTDFVDSRASDKPVHEVIREMTHGGVDYSFECTGINGVLREAFVSTHDGWGLTVVLGIHATPKMLPLHPMELFDGRRITACVFGDVKGKSQLPAIVDKCVNGDLDINLDGFITHRMPFSDINKAIQLLEEGKSLRCVLNL

SEQ ID NO: 259461 - protein, 63 aa, Zea mays
  Clone ID: MRT4577_168211C.1.pep
AGVLGGDSAWQHSDRSARSMAPRSSRCRPAGSGPRRPTVNHCHRSASGRGRKPGPCLLRLGAS

SEQ ID NO: 259462 - protein, 64 aa, Zea mays
  Clone ID: MRT4577_168212C.1.pep
TRDPHRIGEADGAGLPQTRSKQPGQLPRIPDEATTAKEAPAQAQQLRTRATAHKGRKGAEAEAS

SEQ ID NO: 259463 - protein, 229 aa, Zea mays
  unsure (1)..(229): unsure at all Xaa locations
  Clone ID: MRT4577_168213C.1.pep
ASSGVGAVWNTANVSAGSTVAIFGLGAVGLAVAEGARLRGAARIIGVDINPEKFTKGREMGVTDFVDSRASDKPVHEVIREMTHGGVDYSFECTGINGVLREAFVSTHDVLRSICLLXLASXPLNFSNVLRCATHMQGWGLTVVLGIHATPKMLPLHPMELFDGRRITACVFGDVKGKSQLPAIVDKCVNGDLDINLDGFITHRMPFSDINKAIQLLEEGKSLRCVLNL

SEQ ID NO: 259464 - protein, 95 aa, Zea mays
  Clone ID: MRT4577_168214C.1.pep
RTRGRTRGRTRGRVRRQERSAPNAARRSSSSSPSPVGVLAVLASAFRRCCRGAQINPDSCRFLLSLMLKVISYMLQNVEKPCHEMEKWFERNGTA

SEQ ID NO: 259465 - protein, 112 aa, Zea mays
  Clone ID: MRT4577_168215C.1.pep
MSGVWVFEDGIVRRADSDPPSGAGAGGSRPNKVLVHVPSGEVVTSYDVLERRLRELGWERYLYDPCLLQFHQRSTVHLITVPRDFSRLKLVHMYDVVVKTRNVFEVRDAAPA

SEQ ID NO: 259466 - protein, 301 aa, Zea mays
  unsure (1)..(301): unsure at all Xaa locations
  Clone ID: MRT4577_168217C.1.pep
MMHVRGIHSMLHTGGAFWWTKLSSCSYNEGLHSYVEKAGLEDELIVRNALVDMYGKCGCIESAHRLFCLMREKDLHSWRPMISGLSCHGRGEEVVGLFFSSDFRAACSHAGLVDEGCXIFNSMESEYNVSSDTKHCGCMVEFXSRAGLVHHAYVFISMMPFVLNKMDSVCSYKEGAGVLLSCDQYMSSATWVMSDCEFSADLNFLQLPSSVQLHSQAHGTFDIFATVLCTLEGADPPTIVYAINGLGASRILSGGECQHHHRRGSSRLGRRGKDKLRQEEEKTEPRPCRMRRANVGMVGPE

SEQ ID NO: 259467 - protein, 46 aa, Zea mays
  Clone ID: MRT4577_168218C.1.pep
MAETKSADAPVSDAQHNVPSGPYIALGPQGVEGLSGNEDDNDDSTN

SEQ ID NO: 259468 - protein, 108 aa, Zea mays
  Clone ID: MRT4577_168219C.1.pep
DFFHWWIICFSKRPCEGEMGLAPLHGFNMLWTISVIRLARLHPYLGRACSDQYILGKKQLSLVLSSITVCMCWSPVQYETPYTGQSRISRKNPEDSGKQSAIKQTRSV

SEQ ID NO: 259469 - protein, 133 aa, Zea mays
  Clone ID: MRT4577_16821C.1.pep
PQYHAEVSQHAVTTLRISHGICRDSKACRNRPSNKCISISRSSTVMASRQLRQWAGCTHVRMLCIISDEGSEEYLPKGSTCTVWKKLSGVRASSCLHRGERERERSHASSRKGEDKKQVISHQLQTQNRGSEF

SEQ ID NO: 259470 - protein, 55 aa, Zea mays
  unsure (1)..(55): unsure at all Xaa locations
  Clone ID: MRT4577_168220C.1.pep
GEERHFLEVICETSVRPPGHVTPSPCFRRRRCFALAGKGESWRRQKXSRTARRVV

SEQ ID NO: 259471 - protein, 147 aa, Zea mays
  Clone ID: MRT4577_168221C.1.pep
AKLIYREQTQKDQTSKIKFSFWQNNQHSFLNPKALLSCTDRLPQTPEPKRRLQPEMRRSLGHHPNVLLIASLIIFRMSWLPWTTIFFSVSFSPIGLPKWIAFRDAWPGSPTNGGPVKNGLASAVQWCLLACFFSASPTCVLSRGNSR

SEQ ID NO: 259472 - protein, 239 aa, Zea mays
  Clone ID: MRT4577_168222C.1.pep
MAARRLQWEPVSTAALVLFLLLAAAGAAAASAAPAGRREAVTSPHGAVAADDLRCSRIGRDALREGGSAVDAAVASAFCLGVVSPASSGVGGGAFMLVRLADGTAVVYDSRETAPLAASRDMYGGNESLKARGALSIAVPGEIAGLHEAWKHHGKLPWKRLVLPAARLALAFRVSPYLRIQMEATRDGILANNGTRAVYAPGGDILRAGDVCRNPRLAQTLRAVAEHGPTVFYGGAVGA

SEQ ID NO: 259473 - protein, 55 aa, Zea mays
  Clone ID: MRT4577_168223C.1.pep
LLLIAHCVKSTHGLLFWNFSGTHGVFGQSRLFHWLLGWTPSRKLFPCCFLVIQKL

SEQ ID NO: 259474 - protein, 228 aa, Zea mays
  unsure (1)..(228): unsure at all Xaa locations
  Clone ID: MRT4577_168224C.1.pep
KAVSKILPENLGYMLSHPETKERVQSCSDASDVLRYAFTLTEDAIDHQYEGCTGTALLIWFDQNKDCFAQCANLGDSACVMXTIDMTEDHRVASATERARIARTGQPLKDGEVRLNGLNLARMFGDKFLKEQDSRFSSEPYLSQAVRITKACTAFAVIASDGLWDVISTKRAVQLVVEGTERYSGDSASAAKVANRVLDEARSLRTKDNTSLIFVDFDILRTDPCIAK

SEQ ID NO: 259475 - protein, 123 aa, Zea mays
  Clone ID: MRT4577_168225C.1.pep
GMGSTNNNHEKHSSIQIANNPAGPSFFLVSTPTTLRSAPAHHITSPSRSRTPPAPPCSAPPSSPWSSTYQAPNPGPTSAIRCSLPAAGSVLIAFILYLIAYYLHLNIRRDGGRGCSLPLPAFL

SEQ ID NO: 259476 - protein, 99 aa, Zea mays
  Clone ID: MRT4577_168226C.1.pep
GVFKLLAYIIWTDYNPKQTPLNLPIMRGNVTGAASSMALSHLGSGLARPFTSFRIFVSSPPAALRHLPPLRPLRRDLKVVETSPPPPPPLRSGMDGKSR

SEQ ID NO: 259477 - protein, 114 aa, Zea mays
  unsure (1)..(114): unsure at all Xaa locations
  Clone ID: MRT4577_168227C.1.pep
GGLAPSKSVRTQINFSGASRYSATAPTAGDQKSVSLFNRKXPAQKRKNAAASASSPDMSNEPDKRDERDRRMYLPDGVLDRSEESEDLTRQVAVDYGXDPFGXLREKAEEFSKY

SEQ ID NO: 259478 - protein, 107 aa, Zea mays
  unsure (1)..(107): unsure at all Xaa locations
  Clone ID: MRT4577_168228C.1.pep
QQIKIIDVQSFSQQLQIIFQFXGAPSPNKNLFKPIFFQQQQQFLGTQGFNPLALIMGPNNPPLGGFFQDQLPRFPPHPFGVSPPLPPPYLFFKFGEFPPPPSPLLKM

SEQ ID NO: 259479 - protein, 99 aa, Zea mays
  Clone ID: MRT4577_168229C.1.pep
CPSGKVPRSPAHRGRKGTSTLSELLNPDQSNLNRHKQALGMQVTSIHGPRTTTEFIYLAVSPPEKQPQLRRYIHACIHETDRHHHERRDPGKTKAGNRD

SEQ ID NO: 259480 - protein, 102 aa, Zea mays
  Clone ID: MRT4577_16822C.1.pep
DHFFYFFSRLSIMTTLHICMFAIQYQDMHAHSKMLHHRPACAHVSPIQSHMINIHHHLFFLDTLVELHEVDGLPRGDVSGQHLLNLLRCCRRRAAEDEETQR

SEQ ID NO: 259481 - protein, 108 aa, Zea mays
  unsure (1)..(108): unsure at all Xaa locations
  Clone ID: MRT4577_168230C.1.pep
VDPRIRSCDVLEREDGLLLYYQAVDDASEIGGDELTHEQKVSLAYIRKNKAFLXIPQHKMKNRTVERRSIVPRKWDXNRTFRTDRMARQLSSMVLDPMAAIITTTYQS

SEQ ID NO: 259482 - protein, 104 aa, Zea mays
  Clone ID: MRT4577_168231C.1.pep
SIVTEFLQRGSLFRLLQRNPAELERKRRVHMALDIARGMNYLHHCNPTIRHGDLKSSNFLVDKNGTGKVGDFGLPRLKHATFLTTKTGKGTPKWMGPEVFSNEP

SEQ ID NO: 259483 - protein, 83 aa, Zea mays
  Clone ID: MRT4577_168232C.1.pep
ASLESFPCSDHLSCLRTHLLLSFLESFPLCFILTPDVQMFCSVWGLCPLLFVLLLCPFPLHGVIMLTIMCNARSFHWFIYRNF

SEQ ID NO: 259484 - protein, 57 aa, Zea mays
  Clone ID: MRT4577_168233C.1.pep
LDLEQSPTGPTKELIQIKRVALTVLYKQLQTRWSNNAINGTTCNDSGEQCGMSYSCC

SEQ ID NO: 259485 - protein, 134 aa, Zea mays
  unsure (1)..(134): unsure at all Xaa locations
  Clone ID: MRT4577_168234C.1.pep
SPSTYTVAPFSDIQRGDRKSAAMASTPATTFAVIAPVLFCAAAGXPSTRTLPDYVVQGRVDCDTWCAGFVTNVTEYSAGAKVRLECKQFGTGXLKRSSDWVTDGNGVYTMKLKDSHEEEVCEVVLVESPRKDCD

SEQ ID NO: 259486 - protein, 235 aa, Zea mays
  Clone ID: MRT4577_168235C.1.pep
IQTGGASPSSVEEQFSQALSYIRDTQSDGDVLVQLWVPVNHDDGKLVLTTSEQPFTLDHRSDSLLRFREVSTKYQFSANVKSGDSPGLSGRVFIGRLPEWSPDIRYFTSYEYPRVRDAQYLDVHGTMGLPVFEKGSYNCLGVIELITTRQKINFTSELNTICSALQAVNLRSTEVSSIPRIKFSTASYKDALPEILEVLRAACLTHKLPLAQTWVTCAQQGKRGSRHSDENYRYC

SEQ ID NO: 259487 - protein, 163 aa, Zea mays
  Clone ID: MRT4577_168236C.1.pep
MARFVDPLVVGRVIGEVVDLFVPGSKDISNGCLLKPSATAAPPLVRISGRRNDLYTLIMTDPDAPSPSNPTMREYLHWIVINIPGGTDATKGEEVEEYMGPRPPVGIHRYVLVLFEQKTRVHAEAPGDRANFKTRAFAAAHELGLPTAVVYFNAQKEPANRRR

SEQ ID NO: 259488 - protein, 112 aa, Zea mays
  Clone ID: MRT4577_168237C.1.pep
MARFVDPLVVGRVIGEVVDLFVPSVSMTVAYDGPKDISNGCLLKPSATAAPPLVRISGRRNDLYTLIMTDPDAPSPSNPTMREYLHWIVINIPGGTDATKGEEVVEYMGPRR

SEQ ID NO: 259489 - protein, 79 aa, Zea mays
  Clone ID: MRT4577_168238C.1.pep
RFGGVNLCISGFLVPEKVAGKSVVCHRRVSARVQNGLVVRHAGGAGMVLSNTGGNGQELVADSHLLPVFVFFYREGTVI

SEQ ID NO: 259490 - protein, 64 aa, Zea mays
  Clone ID: MRT4577_168239C.1.pep
RFTFLIPCSILRHNPDWWSVADPTGSPFNHQRAVDNCERCSVQNNKVIVLGAIPTGMTCLCFFL

SEQ ID NO: 259491 - protein, 65 aa, Zea mays
  unsure (1)..(65): unsure at all Xaa locations
  Clone ID: MRT4577_16823C.1.pep
DLNSGCLXNLFKTVFGKXLAVQLKEHRGEHAVTMDAVCNRSTTSYTENQQLLHHSFHPNLLVSLL

SEQ ID NO: 259492 - protein, 84 aa, Zea mays
  unsure (1)..(84): unsure at all Xaa locations
  Clone ID: MRT4577_168240C.1.pep
DSYRAIGFSPRXRGRPLTXGAQDRSLGTQASSTAAVTAIPSPRYASLPRRRFLLLLLHPRPSPSGARARPRWRTRDRVSPVNDE

SEQ ID NO: 259493 - protein, 57 aa, Zea mays
  Clone ID: MRT4577_168241C.1.pep
SINPANAFGWAYFNTPHKTWKQFNVYGKCPFMGPILVGWILRVIFLTPPPKPKPKKP

SEQ ID NO: 259494 - protein, 417 aa, Zea mays
  unsure (1)..(417): unsure at all Xaa locations
  Clone ID: MRT4577_168242C.1.pep
MSVPPPAGGGAIINEVLTDDELRAVLRRLGPEAERDAFGLVCRRWLRIQSSERRRLRARAGPDMLRRLAARFPGVLDLDLSQSPSRSFYPGVIDDDLNVIASSFRNLRVLALQNCKGISDVGVAKLGDGLPSLQSLDVSRCIKLSDKGLKAVALGCXNLSQLQIMGCKLVTDNLLTALSKSCLQLVELGAAGCNSITDAGISALADGCHHIKSLDISKCNKVSDPGVCKIAEVSSSCLVSIKLLDCSKVGDKSIYSLAKFCSNLETLVIGGCRNISDGSIQALALACSSSLRSLRMDWCLKITDTSLQSLLSNCKLLVAIDVGCCDQITDNAFMDXGKDTGFSLXRVLKISSCVRLTVAGVGRVIESFKALEYLDVRSCPQVTRDSCEQAGVQFPAGCKVNFDGSLLESDPSAEMFF

SEQ ID NO: 259495 - protein, 70 aa, Zea mays
  unsure (1)..(70): unsure at all Xaa locations
  Clone ID: MRT4577_168243C.1.pep
DAWGGRGGSDGGCFKCGEPGHMARDCSSGGGSXRGGGGGGGGRCYNXGQAGHMSRDCPSGGERWQKEVRR

SEQ ID NO: 259496 - protein, 68 aa, Zea mays
  Clone ID: MRT4577_168244C.1.pep
GVLKGTLFWGFKSGPRVPWFFSRSMKKEFRVGGSFTPNMNLVEIKNPFPLLQKGGCLLFVLPIQFLNS

SEQ ID NO: 259497 - protein, 69 aa, Zea mays
  Clone ID: MRT4577_168245C.1.pep
SHGVVPLSTSQVEGFSLGGLDLFAGDRSRLASGWAAPWAWGVDGDASLLVIKKPPAELLASDGHLAVLN

SEQ ID NO: 259498 - protein, 61 aa, Zea mays
  Clone ID: MRT4577_168246C.1.pep
DPRDRAATLTDSSPFSRAMTLGAICSSYTTGGASLNSNGHQQADNSIGLLLLLLLLTLLQY

SEQ ID NO: 259499 - protein, 50 aa, Zea mays
  Clone ID: MRT4577_168247C.1.pep
VGIETNSTGECSGQTSKCGAPCWCEPIVPVIYPYICKFNDPKPSSWFRLR

SEQ ID NO: 259500 - protein, 44 aa, Zea mays
  Clone ID: MRT4577_168248C.1.pep
LLLPFMQHPKVFYLSTFKHKWYSLSGMLQSSTNWEYKTMNLHRG

SEQ ID NO: 259501 - protein, 162 aa, Zea mays
  Clone ID: MRT4577_168249C.1.pep
MAAKSHTRKAFLLCNYVLLGASSSCIFLTLSLRLLPSPCGLLLLFLHALTAVFSAAGCSGSFTAPATPAQWHNAHTAGAALTAIFQGAIALLAFTRTSDFLAELQSYVRDEDGAVILKMVGGLGTAIFVLEWAALALAFSLRLDEDDDDDDLQAKNWQSYHV

SEQ ID NO: 259502 - protein, 79 aa, Zea mays
  Clone ID: MRT4577_16824C.1.pep
EDGRTLADYSIQKESTLHLVLRLRGGIIEPSLQALGRMRNQDRTICRRCYARLRPRAVNCRKKKCGHSNQLRAKMKIKN

SEQ ID NO: 259503 - protein, 161 aa, Zea mays
  Clone ID: MRT4577_168250C.1.pep
MAGKSHTRKAFLLCNYVLMGAASSCIFLTLSLRLLPSPCGLLLLFLHALTAVFSAAGCSGSFTAPATPAQWHNAHTAGAALTAIFQGAVALLAFTRTSDFLAELQSYVRDEDGAVILKMVGGLGTAIFVLEWAALALAFSLRLDDDDDDDLQAKNRQPYHV

SEQ ID NO: 259504 - protein, 94 aa, Zea mays
  Clone ID: MRT4577_168251C.1.pep
LIFSHIGCGTWARRLSAESGQFTTVQDIWKRCFVDTCSIAHMAHYCIPDSQTWDMIPLSATFDSTTDASDPRNENEILLLSVFCGRFVALSNLH

SEQ ID NO: 259505 - protein, 70 aa, Zea mays
  Clone ID: MRT4577_168252C.1.pep
MEEMDDMEDMEDFEGLSDGGTDEDDVLDDPVSKKPKGSSSSKQNAGKRSRKVMTEVEQDEEINTRQRRRA

SEQ ID NO: 259506 - protein, 64 aa, Zea mays
  Clone ID: MRT4577_168253C.1.pep
VAVHRVVVHASTAKVTLCGRVHCHGSHQTRRGGPCKPDGSTAEYFSIAVSDPQEGKEETIPFFS

SEQ ID NO: 259507 - protein, 75 aa, Zea mays
  Clone ID: MRT4577_168254C.1.pep
FGTREPRCPDLNLDLSVGPPAAADTPTSQSQLAVCLCYRLGLRAGEACSCQAQADNAGQQRFRFSDFRTERRVVK

SEQ ID NO: 259508 - protein, 94 aa, Zea mays
  Clone ID: MRT4577_168255C.1.pep
LDPKSCSCSCSSGSETRREDAGGVQRRGGGSAFLRLWKGRARLMTTRRRRANLAERLLTTICTRQRVRAVNIALANLLLARQPCPTALKVDRCE

SEQ ID NO: 259509 - protein, 63 aa, Zea mays
  Clone ID: MRT4577_168256C.1.pep
PVTALQKAPKAYLVGLFEDPNLCAIHAKGVTIMPKEIQLGGGIRGEGPKGVRFRGLLPTAGGV

SEQ ID NO: 259510 - protein, 130 aa, Zea mays
  unsure (1)..(130): unsure at all Xaa locations
  Clone ID: MRT4577_168257C.1.pep
MHLCGGFAPQPNLKHTSVTTKNTLPLIVSKLHHHHDRIETAMTTSIEYDYLFKLLLIGDXSSVGKICLLLRLADDSYADTYTSTIGADLKNRTIDPRGKTVKLQXWDTPGXDRSRTTTSSYYRGAHGIIT

SEQ ID NO: 259511 - protein, 68 aa, Zea mays
  Clone ID: MRT4577_168258C.1.pep
IQRRYQLKLIIVSLFYFLVLVRRLVHLFLLSKIGRSAPKTNKILTSFKPKACSILFYLFYSSKEAIHA

SEQ ID NO: 259512 - protein, 109 aa, Zea mays
  unsure (1)..(109): unsure at all Xaa locations
  Clone ID: MRT4577_168259C.1.pep
MAAKKEKAPATSTKPSTCGGGQHKKNRGSMGKHNEKGNNAGLFDQGSYDKLICYAPKYNXITTSIXLSDRLRGNGSLATDXIKDLIDKELIMMVSDHSSQQIYTKGTNT

SEQ ID NO: 259513 - protein, 310 aa, Zea mays
  Clone ID: MRT4577_16825C.1.pep
MEGKEEGRIFVGGLSWQTDERKLQDAFGRFGKVVDVQIMLERHTNRHRGFGFVTFEDRRAVDSAIKEMRGQELDGRTISVNKAEPKMNTDDTRFDNGGGRDYRGGRGDGPPPGNCYECGRPGHWVRDCPSAAGGRSGRFPSKFSGGGRGDRFSGSDRFSDRYMDDRYDGGRYGYRDQVDARDKYAGGRDRYANDRYSAGGDHFDGDRYGGGPDRYAPNGYGRERERSYERDGVRGGGGYDRNDSRGGGSYDRDGPRGGKGGGYVRDGPRGGVADRYGGGGPARYDGGSYRDRPGPYDRPSRGGGRFDDRH

SEQ ID NO: 259514 - protein, 63 aa, Zea mays
  Clone ID: MRT4577_168260C.1.pep
KKKKIKKKWGGPFRGSRLTTPGLQRISFFLGSLKLNQWAVVLKRRAGETPGVPKLNGLEEIPL

SEQ ID NO: 259515 - protein, 82 aa, Zea mays
  Clone ID: MRT4577_168261C.1.pep
AKHSRAYREMDNLCTQPPEQKYIRCPYQTCLTGHSWQNCIRRSGLPKIITAVCDEICIATATGNGFIDFLTDVAYISNRTYR

SEQ ID NO: 259516 - protein, 76 aa, Zea mays
  unsure (1)..(76): unsure at all Xaa locations
  Clone ID: MRT4577_168262C.1.pep
RVRPYLPSMIAGVCENPSIQPYRLQQAIAESNIPLLPLFXQSAALSLVXSLERTIKAQQLQKLVLPVINQRSFGKP

SEQ ID NO: 259517 - protein, 48 aa, Zea mays
  Clone ID: MRT4577_168263C.1.pep
ASKGLGWFVRSKGPFYVIVKTGCHLWVLFCPGCSWLPSFGNTSLFFNQ

SEQ ID NO: 259518 - protein, 102 aa, Zea mays
  unsure (1)..(102): unsure at all Xaa locations
  Clone ID: MRT4577_168264C.1.pep
RIRLARGSYVGSGAAPGGAAPWQQQAPPPPPGGQAGYGYGYSAFPPPPPAGGHGAPPGLPSAPPGLESMYYGGAAAPPPPPPGEGPPPPPPSDHPPXPPPPM

SEQ ID NO: 259519 - protein, 101 aa, Zea mays
  unsure (1)..(101): unsure at all Xaa locations
  Clone ID: MRT4577_168265C.1.pep
AAGVETVAVLPQHAGTIVLAGEETGLLVXGLQNDGESIVNVAGVHSTLHLPYDHTMYGQNLTVXRISSIXVPVAVQAAFHYKYAGSKYLQPAAYDLAVYIL

SEQ ID NO: 259520 - protein, 41 aa, Zea mays
  Clone ID: MRT4577_168266C.1.pep
LGIPSVFPVPMLLVVGHLICILVPFFNIFAFAFILNFGCVF

SEQ ID NO: 259521 - protein, 94 aa, Zea mays
  Clone ID: MRT4577_168267C.1.pep
LLVLFIVIVYFFKTLPLCNNDVTFISIHLVIIKKKKKKKKKKKKKKKKKKKKKKKKFFGGGGGKERGSPPQGSQPPQRYPVAPFGFLGPPGEQT

SEQ ID NO: 259522 - protein, 81 aa, Zea mays
  Clone ID: MRT4577_168268C.1.pep
TASVMPLYMPSDTLKDHIYMVDLHPNICQHLLSWTYHLICSMDLCYNPALYNLPLSLSFFFFCSAFNVYRVVPIEKLHQNT

SEQ ID NO: 259523 - protein, 139 aa, Zea mays
  unsure (1)..(139): unsure at all Xaa locations
  Clone ID: MRT4577_168269C.1.pep
MAKDTHMGHDWTHPRWWGASGSSGETHYAWRSACERRGGGVEPTSCAHCWNGGMAGAMPMHMVNINCLSRDDXVMNYKGLHDEPNKLTISDHVERVRLINGRPLGTPEXMQWVKRYXDSVHGGFPSRGNASERRESSNG

SEQ ID NO: 259524 - protein, 294 aa, Zea mays
  Clone ID: MRT4577_16826C.1.pep
MAASPDHLFGLRNSFYVGAYHAVITSSQSLPAHALSPDDLVERDALMYRSYIAIGSYQLVIGEIGPSAATPLQAVKLLAVYLSGDGGNRESVVSRLRELLSDAAVGSNPILRVMAGTVFMHERDYAEALKHTNSGGSMELLALNVQIYLQMNRTDHAEKQLRVMQQLDEDHTLTQLANAWVDLVLGGSKIQEARLIFQDLSEKYPTTCTILNGKALCSMHMGNFEDAEGLLLESLNKDAKDTETLANLTVCSLNLGKPATRYLNQLKLAHPDHALVKRMSSAAESFDRACQAMA

SEQ ID NO: 259525 - protein, 47 aa, Zea mays
  Clone ID: MRT4577_168270C.1.pep
FACVFLLFLHGYAGNRLKSCRVITKQCWGSTSYVKIIGRRHQISSKI

SEQ ID NO: 259526 - protein, 46 aa, Zea mays
  Clone ID: MRT4577_168271C.1.pep
PDIMVPTPVRISYQRGKWLSVGLDDLSPVILDNANRLFEWRSRTRI

SEQ ID NO: 259527 - protein, 77 aa, Zea mays
  unsure (1)..(77): unsure at all Xaa locations
  Clone ID: MRT4577_168272C.1.pep
KALECLDPTQSPEKKDYQEKLKEVEPVSTPIVSAVYHRSGGAPGGNPAGGGVDDAPDKLXMVVGTGYVESRDPTQIL

SEQ ID NO: 259528 - protein, 438 aa, Zea mays
  unsure (1)..(438): unsure at all Xaa locations
  Clone ID: MRT4577_168273C.1.pep
MSDGQETDKNIEIWKIKKLIKALESARGNGTSMISLIMPPRDQISRVTKMLGDEYGTASNIKSRVNRQSVLAAITSAQQRLKLYNKVPPNGLVLYTGTIVTEDGKEKKVTIDFEPFKPINASLYLCDNKFHTEALNELLESDDKFGFIVMDGNGTLFGTLSGNXREVLHKFTVDLPKKHGRGGQSALRFARLRMEKRHNYVRKTAELATQFFINPATSQPXNVAGLILAGSADFKTELSQSDMFDQRLQAKILNVVDVSYGGENGFNQAIELSAEILANVKFIQEKKLIGKYFEEISQDTGKYVFGVDDTLKALEMGAVETLIVWENLDVNRYVLKNTATGETVIKHLNKEQEADQSHFRDPSTNAELEVQEKTSLLEWFANEYKKFGCTLEFVTNKSQEGSQFCRGFGGIGGMLRYQLDIRSFDELSDDEGVYEDSD

SEQ ID NO: 259529 - protein, 55 aa, Zea mays
  Clone ID: MRT4577_168275C.1.pep
RKIFPLPKIKPIMLPTTGTHTLLIYIPYPWGSLSHLPNLKYTHGGLVINKPNLCG

SEQ ID NO: 259530 - protein, 126 aa, Zea mays
  Clone ID: MRT4577_168276C.1.pep
RPPAGLLPPRRWSGPPAIGLQNPPRLSLSRCRARLHVTSSSGMHQPMPYLKAEGIPVAGLPIRLLYALGHMQDAEAVAGLGAGLKHRAVHPKDPHDGWAALHPMGLEQITPVQGEKVTTDPAVGGP

SEQ ID NO: 259531 - protein, 84 aa, Zea mays
  unsure (1)..(84): unsure at all Xaa locations
  Clone ID: MRT4577_168277C.1.pep
QLFEGQVSYDGERTFCCVKGPARCNTWGNCIDSTLSAETVLAVEVXKLKAHQFKPTXQVTLDPYKHDHACLVGGYRMPKKQKAI

SEQ ID NO: 259532 - protein, 109 aa, Zea mays
  Clone ID: MRT4577_168278C.1.pep
MPVEAPRKEADPPSKSSFTSSNGVPDPAAQASKPKKPRTPTAKNPENFAWEKLRRQACSEGQMKQRSFERRDSIDWEAVRCADVRRISHAIRERGMNNVLAERIQVIVQ

SEQ ID NO: 259533 - protein, 41 aa, Zea mays
  Clone ID: MRT4577_168279C.1.pep
LKARAGLFHSIPHHKKTHAEACTWLIILLHLQQDCTLREIR

SEQ ID NO: 259534 - protein, 49 aa, Zea mays
  Clone ID: MRT4577_16827C.1.pep
SAEPFHVGSNNGATVLWVCIAVLQFDGYDSWVPTLSSSHPQYPGWFGEH

SEQ ID NO: 259535 - protein, 177 aa, Zea mays
  Clone ID: MRT4577_168280C.1.pep
EIYAHPICVIRPSRSKPRSNNLRIPIKMSSHDAKVLQNLVLNLASSVESGAFNIRTFLEEAFRHLGDEHYLLNALLAIRKEVDMMEQDALESKARSDPEKERMEEQIHLTEPAKTAPRQFTFTPLPHQNCTRPVTMTPTTRTGPLSIAFGTCNSGTSTFVVVVQMHPNQLGTSVLCL

SEQ ID NO: 259536 - protein, 50 aa, Zea mays
  Clone ID: MRT4577_168281C.1.pep
KSFITWCIRFFISSFIPVFFFTTGHGIAETSKWSLTLGPFPPQLYHIFHF

SEQ ID NO: 259537 - protein, 97 aa, Zea mays
  unsure (1)..(97): unsure at all Xaa locations
  Clone ID: MRT4577_168282C.1.pep
RTKTNPFVAGYLLSKVEKVNLKEEKEIIVTWSRASSILPAMVGPTIAIHNGKEHIPIYITNPMVESXLGEFVPTSDFTSFFFARKDTKSSSVIEFGI

SEQ ID NO: 259538 - protein, 126 aa, Zea mays
  unsure (1)..(126): unsure at all Xaa locations
  Clone ID: MRT4577_168283C.1.pep
NLTWISGWMVSIFSYFLPSRFCDFRSGGCFLEFIVGILANFLKTLSQKVSFRGFLAASGAGFSGGVGTGFFFFFFFFFFFFFFFFFXFFFFFFLRRRKAEIFYHPLHPHHCSTNMHTSSMQAVQLA

SEQ ID NO: 259539 - protein, 175 aa, Zea mays
  unsure (1)..(175): unsure at all Xaa locations
  Clone ID: MRT4577_168284C.1.pep
TREGTLASKKSREYWTGKTTSSTASLARASIRNEHDGAATGELHGREDAASRSRKHGRAGTSSAAVALGRARTASAPGRIAGRHGRAQGTQAELEPSASXWESARELRGPSWVSSMAGQRARYQGDPTGAVGEEAEELELGERLGVRREQRELGTAARELSCVAGGVPGKNDAMD

SEQ ID NO: 259540 - protein, 170 aa, Zea mays
  unsure (1)..(170): unsure at all Xaa locations
  Clone ID: MRT4577_168285C.1.pep
SCRRXSXLCRSXFVQVRPALLAXXAATPSRPXXPXILATXLIXSWPXPSSMGXXGGXGAXRAKGQRXAXLAXWRXRXXARSGGAXNSXGGDXXLXRXAXXPQXLRXPXRRAXACRXXGXPPXARQNPWAPGXSTXXXATRXLTXXXPALRILGVIWELXXWSXXVGLXSL

SEQ ID NO: 259541 - protein, 98 aa, Zea mays
  Clone ID: MRT4577_168286C.1.pep
AVNSLRLIQEETSNVRGRKLGGAFGCIAIASYEYSALQYRSRSRYLLVDHRFSACGRCLPASFVRYLDRSSPVISHTHSKSRRRRAPLSYTAAAALAS

SEQ ID NO: 259542 - protein, 205 aa, Zea mays
  Clone ID: MRT4577_168287C.1.pep
MGDFNVALVIVAAVVSVLVLLVSVYLLVNYQHPDDVNQAYFPKLVVVLGLTVAVLSILMLPADVANRQACRKAVYNGACSLTLPMRTLWLVVYIVDAVLVFLVIPFAMFYYEGDQDKSVGKRLRTALIWVVASAVVCGLVLGILYGLVGKVDFTVRHLSSSVQTFPNSFSGFSSGQPCISPLTRQCAASTAPANSQTPWDNACYL

SEQ ID NO: 259543 - protein, 105 aa, Zea mays
  unsure (1)..(105): unsure at all Xaa locations
  Clone ID: MRT4577_168288C.1.pep
MNLGVFFNQGRVPPFSQXGYVGPVAFLTQQQVGRFYRPGGPKGGPLLKGEQLVPFNPLVFSNPKGFSPNPTMGGALFWMGYGVKVKKKVFWKKFGGSPKKKRAFF

SEQ ID NO: 259544 - protein, 53 aa, Zea mays
  unsure (1)..(53): unsure at all Xaa locations
  Clone ID: MRT4577_168289C.1.pep
QRVTLYVRGTILGYERSKSKQDDTTSXFRLRQLNTNEDVLWYSAQRMAYLHKV

SEQ ID NO: 259545 - protein, 70 aa, Zea mays
  unsure (1)..(70): unsure at all Xaa locations
  Clone ID: MRT4577_16828C.1.pep
NKPYVFSKANKGGLLLPLEKQSSLVAHCRHGCXAPPPGLKNKGPPSKICFQFPSPKNINRAILEGGLVFQ

SEQ ID NO: 259546 - protein, 510 aa, Zea mays
  Clone ID: MRT4577_168290C.1.pep
MGDFNVALVIVAAVVSVLVLLVSVYLLVNYQHPDDVNQAYFPKLVVVLGLTVAVLSILMLPADVANRQACRKAVYNGACSLTLPMRTLWLVVYIVDAVLVFLVIPFAMFYYEGDQDKSVGKRLRTALIWVVASAVVCGLVLGILYGLVGKVDFTVRHLSSSVQTFPNSFSGFSSGQPCFSPLTRQCAASTAPANSQTTWTMRATFPEYVVALTTIVGSVLFTIFGGVGIACLPLGLIFSFVRRPKAVITRSQYIKEATELGKKARELKKAAEALHQEERSGNKGRKWRKNVKALEKELLLLEDDMKALEEMYPQGEQAEATWAFTVLGYIGKLLFGVVGLIVSIAWVAHIVIYLLIDPPLSSFLNEVFIKLDGVWGLLGTAAFAFFCFYLLIAVIAGEMMLGLKLVFITIHPMKWGGTLMNSFLFNVGLILLCSISVIQFCATAFAYYAQATAAQEIFGHTLQSLRGIKYLYKYNVFQYGFVALAILTLFYYAIFGWRKRKPTGRFQLSN

SEQ ID NO: 259547 - protein, 225 aa, Zea mays
  unsure (1)..(225): unsure at all Xaa locations
  Clone ID: MRT4577_168291C.1.pep
MAHAAQVGLQDATSPIIEELITFHDHALIIIFLICFLVLYALFLTLTTKLTNTNISDAQEIETVXTILPAIILVLIALPSLRILYITDEVNDPSLTIKSIGHQWYXTYEYTDYGGLIFNSYILPPLFLEPGDLRLLDVDNRVVLPIEAPIRIIITSQDVLHSXAVPTLGLKTDAIPGRLNQTTFTATRPGVYYGQCSEICGANHSFRPIVLELIXXXSXEXGXVF

SEQ ID NO: 259548 - protein, 53 aa, Zea mays
  Clone ID: MRT4577_168292C.1.pep
PPIVALGPKAPPKFWGGTDPFPYPNVLGLPQFPIILFGPGGSKFLKKKKKPPP

SEQ ID NO: 259549 - protein, 160 aa, Zea mays
  unsure (1)..(160): unsure at all Xaa locations
  Clone ID: MRT4577_168293C.1.pep
MPHLCNKLLGVTCAVGVTKTLFILVATFLLDRVGRRPLLLTSTGGMVISLISLGTALTVVGHHPDAKIPSVVALCIASTLVXSMTFLSLSXGGSFFLYAGXAAVAWVFFFTCLPETRGRTLEEMGKLFGMPDTDDMAEAEDATAGKEKVAEVEMYMPSKM

SEQ ID NO: 259550 - protein, 81 aa, Zea mays
  Clone ID: MRT4577_168294C.1.pep
RRATARAESRCSNHLGLSGQAAFLAGFSQLAAQPGRDRAVAVAVAVAPTPGPARVGGAPLPIHVGAELGLTRKNVQPFLPL

SEQ ID NO: 259551 - protein, 137 aa, Zea mays
  unsure (1)..(137): unsure at all Xaa locations
  Clone ID: MRT4577_168295C.1.pep
GGYPAEAWNFWTRKGLVSGGLYESHVGCRPYSIPPCEHHVNGSRPPCTAEGDTPKCSKICEPGYSPTYKQDKHYGYNSYSVSNSEKDIMAEIYKNGPVEGALCEYSDLLLYKSRVYQHVTXQMMGGHAMRILGWGAE

SEQ ID NO: 259552 - protein, 63 aa, Zea mays
  Clone ID: MRT4577_168296C.1.pep
KLIKKYKNFCYSKLNKRDLETDGEIHRQGQALLTSLGVTASLNRSTARTSEGREPIQSLLKRT

SEQ ID NO: 259553 - protein, 43 aa, Zea mays
  Clone ID: MRT4577_168297C.1.pep
PGLDITGWLTDMPAGTCLLLTQLQEGCTLHICDTPYKWLCVPH

SEQ ID NO: 259554 - protein, 75 aa, Zea mays
  unsure (1)..(75): unsure at all Xaa locations
  Clone ID: MRT4577_168298C.1.pep
SFVGRLLEMMTGRRSLDTIRANVEHSAAEWARPYLEERRVFYKLGHPRLDGNLXIKGAHITAQLAHACLSANPKA

SEQ ID NO: 259555 - protein, 87 aa, Zea mays
  Clone ID: MRT4577_168299C.1.pep
PRSLHCSMGPGGPYIPKNPPPPPRGGGLLPLCEGGPVNKSPASGGRTSPVPNPFLFKRVVVREIKKEIFGPHPGFSLACFENQKLFT

SEQ ID NO: 259556 - protein, 95 aa, Zea mays
  Clone ID: MRT4577_16829C.1.pep
FGIWVVRMLGKQTGRRFLASLSAAKTRISSDFMSLAKLVFLVSPLCRVLHTVFHLGCCIRYFCHVRLQVVFLELLHGLPLCHSGAHLLFGKFVSF

SEQ ID NO: 259557 - protein, 50 aa, Zea mays
  Clone ID: MRT4577_1682C.1.pep
TYKGRNSYIKLGRKNPRLWVLLVPHMYPEWFYIDAYQPYFARVPASVRLP

SEQ ID NO: 259558 - protein, 69 aa, Zea mays
  Clone ID: MRT4577_168300C.1.pep
LDVKNNGQNEEQTGQPAANDASDRMEEELIRQEIDQGSKKNDTIMEPAGSCCFQQQIFISDLLANSFIT

SEQ ID NO: 259559 - protein, 102 aa, Zea mays
  Clone ID: MRT4577_168301C.1.pep
WTPLFFGDTTKACQEAAILLKTSINCFPYMTDHRLQSREPFCIPSFDISNVHAGQGQGDIFVLMVVVVIQMYPGKTRVAFMGSLMAKVIAGPIGHVHQRRRR

SEQ ID NO: 259560 - protein, 347 aa, Zea mays
  Clone ID: MRT4577_168302C.1.pep
MGDSSDSVSVDVERIFFGGKGHRVRTRHGPLSVSVYGDEDKPALVTYPDLALNHMSCFQGLFFCPEAASLLLHNFCVYHITPQGHELGAAPISADVHVPSVDDLADQVADVLDFFSLGSVMCLGVTAGAYVLTLFATKYRERVLGLMLVSPVCKAPSWSEWLYNKVLLNLLYYYGTRGLVKESLLQRYFSMDVRGNGQDPESEIVQACRSLLDERQGANVWRFLQAISRRHDLTESLEKLKCQTLIFVGENSQFHADAVHMTTKLDRRYCALVEVQACGSLVTEEQPHAMVIPMEYFLMGYGLYRPSQQESSPRSTLSPFCISPELLSPESMGVKLKPIKTRISRNV

SEQ ID NO: 259561 - protein, 62 aa, Zea mays
  Clone ID: MRT4577_168303C.1.pep
HQEPVLTGMRPTDRLSSACPTQATDLHHRHSGAALFASDTWTNAGSAAPPERVRPSPISRSS

SEQ ID NO: 259562 - protein, 51 aa, Zea mays
  Clone ID: MRT4577_168304C.1.pep
MIRHQIRNEYGLADPEVYAAPGEEDDPEALLEGVAMAGLVGVLRQLGDLAE

SEQ ID NO: 259563 - protein, 107 aa, Zea mays
  Clone ID: MRT4577_168305C.1.pep
QQSHASTECGVRLLPGCARHIFHQPIELVLRGLTCWPALSDGFIRLLVGGEEESGARRAPARRRSQTPSILGNGGEALLVLPGGSRWDVAGSAYGMGASPRGLCRSL

SEQ ID NO: 259564 - protein, 48 aa, Zea mays
  unsure (1)..(48): unsure at all Xaa locations
  Clone ID: MRT4577_168306C.1.pep
RGQTPRRSRXXXXSPXTRRPXPXVRPRDAWADRGSPTTPSADQRQPPQ

SEQ ID NO: 259565 - protein, 271 aa, Zea mays
  unsure (1)..(271): unsure at all Xaa locations
  Clone ID: MRT4577_168307C.1.pep
LGPSRPAGKKSKKRKKKKKKKKKKKKKKKKKKKGKKKKKKKKKRLVSLAGKKLTLLGLWASPFVLRARIALSLKGLTYAYSEENLDDKSEFLLSSNPVLKKVPVLIHHGKPVCESQIIVQYVDEAFPAAAPNFLPSDPYDRAIARFWASYVDDKXGRTAEEMAEAARQAVAALETLEQAFRECSKGKAFFGGDSVGLVDVVLGGLXVGWLYATEAICGVKALDAGRTPLLAAWAERFCALEGVKGLIPDVDRLLEXTKARRAVFGLPPLRP

SEQ ID NO: 259566 - protein, 42 aa, Zea mays
  unsure (1)..(42): unsure at all Xaa locations
  Clone ID: MRT4577_168308C.1.pep
SSHXGGRPCFCFIGGLLQIFIATETDEPGTLMTTTEAYQWKH

SEQ ID NO: 259567 - protein, 232 aa, Zea mays
  Clone ID: MRT4577_168309C.1.pep
MAGKELTLLGLWASPFVLRARIALSLKGLTYAYSEENLDDKSELLLSSNPVLKKVPVLIHHGKPVCESQIIVQYVDEAFPAAAPNFLPSDPYDRAIARFWASYVDDKFYSAWIPVFRGRTAEEMAEAARQAVAALETLEQAFRECSKGKAFFGGDSVGLVDVVLGGLVGWLYATEAICGVKALDAGRTPLLAAWAERFCALEGVKGLIPDVDRLLEYTKARRAVFGLPPLRP

SEQ ID NO: 259568 - protein, 97 aa, Zea mays
  Clone ID: MRT4577_16830C.1.pep
DDSPELVYQFQLRIKIAPEVDSFFPEQQLATSFPLSLPSWGGWHPHMARGRRAKKHPLSIPLTTLKKQNTQPYHQNAIPCPHNAFVHILLPCSPSHQ

SEQ ID NO: 259569 - protein, 68 aa, Zea mays
  Clone ID: MRT4577_168310C.1.pep
GHLILIACRRKHYRSVFKKREHASRTMFRNIIQRGLAHYILIYWVNYLMKIFWGKTILVAHKYIYCMN

SEQ ID NO: 259570 - protein, 100 aa, Zea mays
  Clone ID: MRT4577_168311C.1.pep
NPFFGGTPRFHSTGGKKQSPQNMLRAQNPQKGKGPKPKKCLGPRSSNSTNNWNGLKRQSIKPQRAPRGAKPPALLFGFETLTRPLKNTRTRFCQQTTHKR

SEQ ID NO: 259571 - protein, 147 aa, Zea mays
  unsure (1)..(147): unsure at all Xaa locations
  Clone ID: MRT4577_168312C.1.pep
PGKNFVIPRGRVPFQXNVGKGPGGPIPFFNTQLPGLVFPAQPLLGAAPEIPHKVLAKGFRGDPAPIRFLKSNFQKEKGGNPPCSQNFRFLPVLFPPEKKKGCFPLLKNFFCPKKKLCDLPQKKKKKKKKKKKKKKKKKKKKKKKKKP

SEQ ID NO: 259572 - protein, 113 aa, Zea mays
  unsure (1)..(113): unsure at all Xaa locations
  Clone ID: MRT4577_168313C.1.pep
ASASSNSAACSLSAGGANPTAAALLFKRQHFQTIGTRGVCPFTDKKTKRANKEAFSCHXTKNQQIVNLQDKKLWREAAKCFYKLRLSTKALKTIEKHGLDAVARKAGIDLNKK

SEQ ID NO: 259573 - protein, 140 aa, Zea mays
  Clone ID: MRT4577_168314C.1.pep
SRASSWAPAGAPSTTGSAANTQTSPGFQAGPAVLPFSLRPASNKPPGAHDAGDGATSSRFIATGCTVTASPFVSPATSECRIVSGGYALGGGVTMAGVRNVPDVELAATTNSLMAMGQMDFMFPLDAASFLELESPASYC

SEQ ID NO: 259574 - protein, 228 aa, Zea mays
  unsure (1)..(228): unsure at all Xaa locations
  Clone ID: MRT4577_168315C.1.pep
LGTSRPARTCSRHPRARGGVESCAADSLTSPVTCPPSCRSYFRCTHRHTQSCQASKHVQRTDGDPLLFDVVYHGSHTCAQAQGAAARPVNQPAQQQTDTEQTTSPGFQAGPAVLPFSLRPASNKPPGADDAGDGATSSRFIATGCTVTASPFVSPATSECRIVSGGGGGYAVERWAGGXXRXWAGVRNVSDVELAATTNSLMAMGEMDFMFPLDAANFLELENPASYC

SEQ ID NO: 259575 - protein, 187 aa, Zea mays
  unsure (1)..(187): unsure at all Xaa locations
  Clone ID: MRT4577_168316C.1.pep
MPPLTTPKSGDALFASVERVNAELFTLTYGAIVRQLLTDLEEVEEVNKQLDQMGYNIGTRLVDEFLAKXNVSNCADFKETADTIAKLGFKMFLGVTATVTNWDAEGTTCSFVLEDNPLVDFVELPDTCQGLQYCNVLSGVIRGALEMVSMKTEVTWVRDMLRGDDAYEMRVKLTKQVPEEYPYKDDD

SEQ ID NO: 259576 - protein, 127 aa, Zea mays
  Clone ID: MRT4577_168317C.1.pep
HEYRSTMQCVYLASTYSYLAIACMHACIYGSHHRTLTSLAPFGSPPVCALALLTHHSLLRRCFQESQMGGSTVQESVAGWRRRRRSSVLLPIQKAKERASESDHVDAWRGIMERKFRFHIGPVPLFC

SEQ ID NO: 259577 - protein, 105 aa, Zea mays
  unsure (1)..(105): unsure at all Xaa locations
  Clone ID: MRT4577_168318C.1.pep
ETLEEELADXPYFSSSDLDYVDVAVEPLTCWLLAYNKLVGIDIQELCHTIVDWAARRRERESVADALADPAKVLELVHFLQSKHGAKRSEALRVLLCRRQDMLVL

SEQ ID NO: 259578 - protein, 92 aa, Zea mays
  Clone ID: MRT4577_168319C.1.pep
MATEDEEREAPYGTEVPVEAVVLGTFHLHAHPEGKLSSLMDIKSMGETIDSTEGTVKIPEDQVLVEAPSDVQLSSEHSLNGGASVFEGAYKQ

SEQ ID NO: 259579 - protein, 236 aa, Zea mays
  unsure (1)..(236): unsure at all Xaa locations
  Clone ID: MRT4577_16831C.1.pep
GPINSWVSNTPIYXXMPIYFLPKTTVKNMDAIRGKFFXSREAVTKKYHVINRGKVCDEKKNGGLGIKDLMLLNISLLCKWWWKLENEEGLWQKLIRKKYMYNKNVHKVSHSVHGSXLFSMMLKVKNFYLLGRQVITKSGDKTRFWEDCWXGEXPLRCIVPKLYDICDCKDITVKKVXGKCXLSFRRLLCVGMLKKWENICMKAENFKYNSDPYVIIWEWEKSRMVTVKSIYSHIRK

SEQ ID NO: 259580 - protein, 73 aa, Zea mays
  unsure (1)..(73): unsure at all Xaa locations
  Clone ID: MRT4577_168320C.1.pep
GGEGLGFFEFXLCGSPPLGPAAVCVSLLSFVVXCSSPPFGRGCXXXRCLVCXAFCPFPVSLLXCCCEAXKKGG

SEQ ID NO: 259581 - protein, 123 aa, Zea mays
  Clone ID: MRT4577_168321C.1.pep
GNIKACISIHSYSQLLLHPYGYKTEPVPDQDELDQLSKAAVTALASLYGTKFNYGSIIKAIYQASGSTIDWTYSQGIKYSFTFELRDTGRYGFLLPASQIIPTAKETWLALLTIMEHTLNHPY

SEQ ID NO: 259582 - protein, 125 aa, Zea mays
  unsure (1)..(125): unsure at all Xaa locations
  Clone ID: MRT4577_168322C.1.pep
FPSRGTHTHTLFLSHFLISSIGSPTSDVFPLWTRRKCYNPLPTQLNLITTHPTFIRWPNTXYTLTDTTSQQTLTLTASLDTPCIHSLSSPAFLLTLIFTSTLSISLSPAPFTLFPYFLSTFTNFP

SEQ ID NO: 259583 - protein, 208 aa, Zea mays
  unsure (1)..(208): unsure at all Xaa locations
  Clone ID: MRT4577_168323C.1.pep
AEPTHCCTCIYSPRLIAPPPATDIHEKQADQMNKPTFTNTCSANDVRAECETAITXIDIALWKFETTKHYCTAIDAPGHRDFIKNMITGTSQADCAVLIIDSTTGDFEAGISKDGQTREHALLAFTLGVKQMICCCNKMDATTPKYSKDRYDDIVKEVSSYLKRVXYNPDXIHFAPISGFEGDNMTERXTNLDCDEDPTVLEALDLIN

SEQ ID NO: 259584 - protein, 71 aa, Zea mays
  Clone ID: MRT4577_168324C.1.pep
AGPAGIIFATRLIDRTSTLKIIGGTANGSGHIHSQGGAKLTHCSSKSTNVLIDQYHNATVSHYWPIDLTSA

SEQ ID NO: 259585 - protein, 199 aa, Zea mays
  unsure (1)..(199): unsure at all Xaa locations
  Clone ID: MRT4577_168325C.1.pep
SLGHVRSLCQVDPSTGHLXIYNAXGGIDXAXIVEVAEKVGLRSMNXRSFKYVXWVLDNAXAERXRGITIDIALWXKSETTKYYCTVIDAPGHRDFIKNMITGTSQADCAVLIIDSTTGGFEAGISKDGQTREHALLAFTLGVKQMICCCNKMDATTPNYSKARYDEIVTEVSYYLKKVGYNPDKXHFVPICGFEGDNMI

SEQ ID NO: 259586 - protein, 94 aa, Zea mays
  Clone ID: MRT4577_168326C.1.pep
MGGEWWRKKWVAWAAAAAIFVVLMLVTPAIPQDEDYHDFADQRVLFLGIPNTLNVISNIPFLFVGLAGLILCHYKNYFRLCSQGELWSWTLFYA

SEQ ID NO: 259587 - protein, 240 aa, Zea mays
  Clone ID: MRT4577_168327C.1.pep
PELSGLNSVSVINLHSNGLTGNIPPQLGKLPNLVQLRLDRNRLKGSIPGGNATGFSPMADTGSTPHSGLCPSPRLSVADFSFNFLVGKIPICLKYLPRSSFQGNCLQDDYSIRQRAHQICASASTAANLKGFKRPASEHKHSKVQQPTWLIVLEIATGALLLVFVITAAITASRSCNLKPSIRISSWSRSKSWSDEITVLIDSDMLKSLPKLSRQELEVACEDFSNIIGSTPETVVLQGT

SEQ ID NO: 259588 - protein, 114 aa, Zea mays
  Clone ID: MRT4577_168328C.1.pep
MEEQNSWLIRTKFSHTVYTRVDPRRVAAVAPVGKDVVLPFAPLSKDVERKLQKIFSMKKSASMPVDRDDEDTGTAFKHCASLPLVRSSPQLDRDKVNKPRRGALEVFANPPIYF

SEQ ID NO: 259589 - protein, 47 aa, Zea mays
  Clone ID: MRT4577_168329C.1.pep
PRVRLVLDREWFPYFFIQLIGGSILFSGATFPNQKQSFISFSWGVEN

SEQ ID NO: 259590 - protein, 59 aa, Zea mays
  Clone ID: MRT4577_16832C.1.pep
AGRSGLADGSASAGQACSSATVARSTPPTTTINATTWPPSPTVFPDFARSLLHEANHIS

SEQ ID NO: 259591 - protein, 119 aa, Zea mays
  Clone ID: MRT4577_168330C.1.pep
TLTGTGDMVTCSKEKDADLFDAVLGGLGQFGIITRARIPLAPAPARARWLRLLYTGAVDLTGDQERLIVDDERRGGALAGLMDYVEGSVVTDLQQGLIGSWRSQPPTFFFVLYSESVTD

SEQ ID NO: 259592 - protein, 328 aa, Zea mays
  Clone ID: MRT4577_168331C.1.pep
MDMISGSTAATSTPHNNQQAVMLSSPIIKEEARDPKQTRAMPQIGGSGERKPRPQLPEALKCPRCDSNNTKFCYYNNYSMSQPRYFCKACRRYWTHGGTLRNVPIGGGCRKNKHASRFVLGSHTSSSSSATYAPLSPSTNASSSNMSINKHMMMVPNMTMPTPTTMGLFPNVLPTLMPTGGGGGFDFTMDNQHRSLSFTPMSLPSQGPVPMLAAGGSEATPSFLEMLRGGIFHGSSSYNTSLTMSGGNNGMDKPFSLPSYGAMCTNGLSGSTTNDARQLVGPQQDNKAIMKSSNNNNGVSLLNLYWNKHNNNNNNNNNNNNNNNNKGQ

SEQ ID NO: 259593 - protein, 79 aa, Zea mays
  Clone ID: MRT4577_168332C.1.pep
NIRTQQLTPCAPMAPLEAPFCRKEQAEAEEYTLFSAQTNGRHQSMHMRSHLLQSGCPVLQVSPLAPRKCIVLFVAKLRS

SEQ ID NO: 259594 - protein, 154 aa, Zea mays
  unsure (1)..(154): unsure at all Xaa locations
  Clone ID: MRT4577_168333C.1.pep
RKSRHPPVPLXSLPPNAAGPAGRKSGTPARSEPAFPRRQAAGCARPFTCLLPXTAIYFRHAPWXCTLWKMGCRCRRHSIPLSLWRSGLLLPSPPHFPARNPPPSELLGLVSSSSPRLACDASMRAQSASKRLRRRLEEPLATGRQGLCGGXXSV

SEQ ID NO: 259595 - protein, 66 aa, Zea mays
  Clone ID: MRT4577_168334C.1.pep
VRDWLPQITISAATATTSLTPVLAHSNNRVLDSQFVKLSLKGKDPNSWQDTHSKYDGGSWIFCLDR

SEQ ID NO: 259596 - protein, 66 aa, Zea mays
  Clone ID: MRT4577_168335C.1.pep
IYMLQNSSKSRSNLGQAACNQSSNQVPSNLCHGIRAYRMTIGNILPRFASSSTKSHNCCSHWINIS

SEQ ID NO: 259597 - protein, 44 aa, Zea mays
  Clone ID: MRT4577_168336C.1.pep
LGRDEPARGVQVERAHIKLQGGIRHVLLGDARMQLRLFTDAVHI

SEQ ID NO: 259598 - protein, 62 aa, Zea mays
  Clone ID: MRT4577_168337C.1.pep
NTVCCQNSCPACAYYPFKERKHDTENCFSIDTHYYLRGGYCTLSSQQILKLWGDMHPCKPTY

SEQ ID NO: 259599 - protein, 80 aa, Zea mays
  Clone ID: MRT4577_168338C.1.pep
QQQAEAVSAVGGGVSLTLGLHQNNNRTYVAEPLPAALPHRFGLEDVSDAYVMQGTTSFGGQDRHFGKGMGGHHFVHDLVG

SEQ ID NO: 259600 - protein, 93 aa, Zea mays
  unsure (1)..(93): unsure at all Xaa locations
  Clone ID: MRT4577_168339C.1.pep
QERVHPYSNKDRYDVKAPSLHIVRYIDKTLLFMTHGSKIASDDLIHRAYDVRLANLXKATRITLTXIKLSAEDKHDSNVLTNXCCMKFTSDKL

SEQ ID NO: 259601 - protein, 102 aa, Zea mays
  unsure (1)..(102): unsure at all Xaa locations
  Clone ID: MRT4577_16833C.1.pep
LPECTGKRGENPAINRYRIQHAXLIMQKRFITRGIYNSQTGLSLAQSYKQTITAQPIRQLEQTVITQSTLAXLSDYSQQQQFLNIHQLSTLNPAAYLQQQQL

SEQ ID NO: 259602 - protein, 201 aa, Zea mays
  Clone ID: MRT4577_168340C.1.pep
PRVRAGGGSSTQGESSGMATFAHELSHLLGIGDNYNNPFSNPARRTYTGPWSMLSRGSFNGPGGPHTRWQIPPVQGASMGSLHTMRDKHQIGLIDNTPILQISRSGLAASGPVIAQLTARSVDPVGSLMGFNITFGSAGDLAPPCNVTVDPLCDGRRYNNYNVEVVDRMGADSFCPDSGVMISKTKNSDRVQPFQWVIDAN

SEQ ID NO: 259603 - protein, 60 aa, Zea mays
  unsure (1)..(60): unsure at all Xaa locations
  Clone ID: MRT4577_168341C.1.pep
XXAGXAFFCRDPKITLQQPLPNRKPSKQKSGIQGTTTCHFNASHKHQGCQHISKTTRPKN

SEQ ID NO: 259604 - protein, 116 aa, Zea mays
  unsure (1)..(116): unsure at all Xaa locations
  Clone ID: MRT4577_168342C.1.pep
ASGKAVIFPLHPGKGTHGSMCIQKANHFFAELPDKALHQYDVSITPVVPSRGVXNRAVMKQLVNLHRHSHLDXRLPPYHGRKSLYTAGALPLTSNTFEITLQDEQNSLGGGQRHQM

SEQ ID NO: 259605 - protein, 149 aa, Zea mays
  unsure (1)..(149): unsure at all Xaa locations
  Clone ID: MRT4577_168343C.1.pep
SQKTQTRGGGEKGGVAPTGGGRAPGKGPPPPPPPPGGGPPLGGGGPPAPPXNSNPRPLGGDTGFFXPSFWPPKXGPPPPRSPGSGLPGRGPHWRPLGGGPGGHPGPLFPRNLGAKLPPASLGEPREEGRFPAPGFHKLNPAPGVPPGIP

SEQ ID NO: 259606 - protein, 79 aa, Zea mays
  Clone ID: MRT4577_168344C.1.pep
CSPQSDILVVDTATKPVQVVTQWRVVATAICDRHDQLYILHLPYAVTPGDPLIGAFTSIGVQHRIMYGHVRTCTLDNMV

SEQ ID NO: 259607 - protein, 86 aa, Zea mays
  unsure (1)..(86): unsure at all Xaa locations
  Clone ID: MRT4577_168345C.1.pep
DKHVPVNIAGTXIXXQXVALXRXRWHXCLQDXTHRVDXXLVVCVCIRNRALXLXSXXLXXXXLAGSXIYXCXXRMLAXXVXRRPRI

SEQ ID NO: 259608 - protein, 292 aa, Zea mays
  Clone ID: MRT4577_168346C.1.pep
MSSMWRVSRRLLRAAASASTSAIGRGAEPRRWVPPPFALQRCGHASLPDAARRDGEEEVTAAEARRLMRLTNVDALKRRLGDGEVIPYADLLRACQDSGAARTRAEAAALAGALDEAGVVLLFRDRVYLQPDKIVDLVRKAMPLALTPENDPGKDELKQLQVQLENINKLAHKQVRRILWSGLGFLITQVGLFFRLTFWEFSWDVMEPITFFTTTTGLVVGYAYFLITSRDPTYRDFMERMFESRQRKLIQRQNFNLDKYLELQRRCKDPLEKACGTTNTDMAHLHELSIHK

SEQ ID NO: 259609 - protein, 143 aa, Zea mays
  Clone ID: MRT4577_168347C.1.pep
MISGKEELKQLQVQLEDINKLAHKQVRRILWSGLGFLITQVGLFFRLTFWEFSWDVMEPITFFTTTTGLVVGYAYFLITSRDPTYRDFMERMFESRQRKLIQRQNFNLDKYLELQRRCKDPLEKACGTTNPDTAHLHELSVHK

SEQ ID NO: 259610 - protein, 61 aa, Zea mays
  Clone ID: MRT4577_168348C.1.pep
VWMDYIKLGMLHRYEGRCLRRNKHIMAVVSKVSKSNSKMMLKILPPKLIIKSRLKSFKSEL

SEQ ID NO: 259611 - protein, 68 aa, Zea mays
  Clone ID: MRT4577_168349C.1.pep
ALDLRALPGRVQPHLRPVAEAHLPRGLHERPQDMRRWRRLVAVTIVPKGRNGDLIPSQQVRLRSLQLQ

SEQ ID NO: 259612 - protein, 67 aa, Zea mays
  Clone ID: MRT4577_16834C.1.pep
GLFFFFFLVKFHEAKFEQSLAQASVCLPRWAHRSKTIMRTHKLIYAKNQRGGSSCAINVRAGGQKQS

SEQ ID NO: 259613 - protein, 173 aa, Zea mays
  unsure (1)..(173): unsure at all Xaa locations
  Clone ID: MRT4577_168350C.1.pep
LRRAAGRAQQRGPPRGPPARGGPLAGPPPPGXPAPPPPPKKGGARDGREGRKPSPGPAPRAHVGXPGQRGAAGPTEGPMTPGTNLEGGCPGKAITPGLKGLGVKTSPVSPPKAGFWFSKNGDTPPCPVTGPLFAWVSPAWELPGGRDPFQALSPKKKKKKKKKKKKKKKKKKK

SEQ ID NO: 259614 - protein, 268 aa, Zea mays
  unsure (1)..(268): unsure at all Xaa locations
  Clone ID: MRT4577_168351C.1.pep
FFFFFVEKYLWIGSXRYKQLVVSXLDVSTLSMEDITGRLKAAEHADDASPPSTGGKLYLTEEQWEARWKEKHRNDAGASKSGNHRRRLRRGXRQATGERTGAGKGRDQCRSCGKTGHWARDCPSKSNKGKAYVAQAEEEEGTLLLARVSSVQLRPLCGGDRIVGRIPGAGGFSGSDPPTGDPGRGIGGAAGTTVAASGPVPGGGGADRSSPEAGGLAPAGEGGAGSTTSNPSPSAGGVAQCCGGASDPAASAGEATRRDGAAARTSGG

SEQ ID NO: 259615 - protein, 96 aa, Zea mays
  Clone ID: MRT4577_168352C.1.pep
QISSPFQYLTRIREVANDFPMQTICRALDRYYTNFGFRCFVERLASTNVTVAKAGEHQRYCCQSCRYLLAARYHHQVCQQRTHQRHSNLPIHQSRA

SEQ ID NO: 259616 - protein, 478 aa, Zea mays
  Clone ID: MRT4577_168353C.1.pep
MPLALAQLQDLRDRISDRLRPWSRSAQFWVRAADIYTSYKVCQLRAGFVKDEDELETMWERQHELGAEKMYSLCSELGGLFLKAAQILGKPDLAPMAWVKRLVTLCDQAPSTPFDVVRDVVEKQLGKNFDDMFEFFDVEPVGSASIAQVHRARLKLSKTDVAVKVQHPGAEQLMMVDIRNMQAMALFLQKHDLNFDLFSATKEMEKQICYEFDFVREARAMERIREFLRVTNKKPPVMVPRVIPGMVSREVLIMEFIKGTPIMNLGNEMAKRGIDPGGKIAAMAKQKILSDLTLAYGQMILKDGFFHADPHPGNILICKDTEVALLDYGQVKEMPEDLRLAYANLVVAMADDDFSRAEESFRELGIRTWAITDNKLEELFQLSLRMFDTRLPPGVTVMSPFADDSSLNKIGVESFPEELFSVLRTIQLLRGLTVGMGLTFSCAQHWRPIAEEALLKAGRQSASKSRKQKRSFLRRLFW

SEQ ID NO: 259617 - protein, 35 aa, Zea mays
  Clone ID: MRT4577_168354C.1.pep
KPRDCRKLIGSLVNDRIPQRAYRYPRPPIGSRIHN

SEQ ID NO: 259618 - protein, 182 aa, Zea mays
  unsure (1)..(182): unsure at all Xaa locations
  Clone ID: MRT4577_168355C.1.pep
MPLALAQLQDLRDRISDRLRPWSRSAQFWVRAADIYTSYKVCQPRAGFVKDEDEREAMWEQQHELGAQKMYSLCSELGGLFLKAAQILGKPDLAPMAWVKRLVTLCDKAPATPFDVVRNVVEKQFRKNFDDIFEFFDVEPVGSASIAQVHRARLKLXNTDGAVKGQHXRAEHLMMVDIRNMQ

SEQ ID NO: 259619 - protein, 166 aa, Zea mays
  Clone ID: MRT4577_168356C.1.pep
TRPLICKDTEVALLDYGQVKEMPEDLRLAYANLVVAMADDDFLRAEESFRELGIRTWAISDNKLEELFQLSLRMFDTRLPPGVTVMSPFADDSSLTKIGVESFPEELFSVLRTIQLLRGLTVGMGLTFSCAKHWRSIAEDALLKAGRQSASKSRKQKRSFLRRLFW

SEQ ID NO: 259620 - protein, 79 aa, Zea mays
  unsure (1)..(79): unsure at all Xaa locations
  Clone ID: MRT4577_168357C.1.pep
PPKICLGFITRGKHYAPAPPGGEKFETGPTAPFKPFKTXGDEPGVSTKKKKKSKLRLSQFSRSLRCVPPXXXXKKNKKG

SEQ ID NO: 259621 - protein, 87 aa, Zea mays
  Clone ID: MRT4577_168358C.1.pep
QTCIAQPVLPEVRFRSLGLRRLPGRHSKCLREREPNIRPGAECSEQPIPSPRSPRSDFLHVRLLARPHPAHAAALRPWQPRPDRHGV

SEQ ID NO: 259622 - protein, 39 aa, Zea mays
  Clone ID: MRT4577_168359C.1.pep
SLYLSQERYRCLTYLVASHILDRTSEVLRQTTIGFYGSD

SEQ ID NO: 259623 - protein, 88 aa, Zea mays
  Clone ID: MRT4577_16835C.1.pep
ELTSRRPPSFFFFCLYCFYIYIYAWHTPNTYICQRPKAHSLPLGHVPGKALEKKTKTKTCGGQHIWAESLNRHGFRVKNSKAFVQGPD

SEQ ID NO: 259624 - protein, 115 aa, Zea mays
  unsure (1)..(115): unsure at all Xaa locations
  Clone ID: MRT4577_168360C.1.pep
TQKDLVASVSYIHKADSXTGPYYPKXSGLTHXTLVGAELTXCFSTNENTLTFGGQHXALDPXLNVLKVRINNSGKTSALNQPSEAIVAWSTCSXEVVTKLIEHSSKVGMSVALKP

SEQ ID NO: 259625 - protein, 116 aa, Zea mays
  Clone ID: MRT4577_168361C.1.pep
YPGPPLEFFFFFFFFFFFFFFFFFFFFFYFFFLEKKNSRDSTLPPNFTHKEKPKITRKKDGGPWPCSTKHDCIRLNPRSLQRINWHRWKKPSGWPAAPQRTPGGKRLWPQTKAQAF

SEQ ID NO: 259626 - protein, 129 aa, Zea mays
  Clone ID: MRT4577_168362C.1.pep
SPLQRPSGQVLSGFDGQDFLLGSSDHRVHSDRSTIALSPCLRSSILFHGDRVRNRNQRVSVRLYWPLEWCSAEALPFDLVPTVCPCKEGRMSPLSPVVNVFSSSADIGTSFSCNSVSLVCSILPALPVR

SEQ ID NO: 259627 - protein, 82 aa, Zea mays
  Clone ID: MRT4577_168363C.1.pep
NVCCNLLRAMFVHQNRLLAVKGTFRFSAYFCKSRFYENRSNQHEYKVYRAITAGGINPPLLNPKPWRLIHLSPHVSLMESRF

SEQ ID NO: 259628 - protein, 46 aa, Zea mays
  Clone ID: MRT4577_168365C.1.pep
TPCLIIRINLVMSPDDVHDEYALIAVPGSAYSLRIPDNGSDLKAAI

SEQ ID NO: 259629 - protein, 266 aa, Zea mays
  unsure (1)..(266): unsure at all Xaa locations
  Clone ID: MRT4577_168367C.1.pep
MADHFALMTGRLLTESTLQSAIQEAFADAVASXPPATTVQIPPLFLKMFXGMGVGKGKGKSGVMVECRICQEEGDEAYMETPCCCKGSLKYAHHRCVQRWCNEKGDTICEICLQQFEPNYTAPLFRHGRXPNKFKGSWRSTGKRRXLVMVKPRIRLMVHQALILRTSTXGVVYCRVVAIALMILLVLRDAILLMLRDDEMCSVELITLLLFRTAGIVIPVYIILVSVTALLHWCNQRRIFRIQVVHETTVSEPRGAGGLQHIINIR

SEQ ID NO: 259630 - protein, 41 aa, Zea mays
  Clone ID: MRT4577_16836C.1.pep
MEGGATDSDKAEFNECLRLLRTQPYILELLLSAGIGALLFR

SEQ ID NO: 259631 - protein, 99 aa, Zea mays
  unsure (1)..(99): unsure at all Xaa locations
  Clone ID: MRT4577_168370C.1.pep
KGEKGLGKGGAKRHREVLRDNIQGITKPAIRRLVRRGGVKRISGLIYEESRGDHKNILENVIRDAVTYTXEHARRKTVTAMDVVYALKRQGRTLYGFGG

SEQ ID NO: 259632 - protein, 68 aa, Zea mays
  Clone ID: MRT4577_168373C.1.pep
MAAPRHRQGHIAQCLGRILACRGSATAAVAAGPGGRRLTGAEFVDGVRSLAAGLAVRGVRPGHVVAAV

SEQ ID NO: 259633 - protein, 76 aa, Zea mays
  unsure (1)..(76): unsure at all Xaa locations
  Clone ID: MRT4577_168376C.1.pep
TVYPPLAGNYSHPGASVDLTIFSLHXXAGVSSILGAINFLTTFTXIKPPAITQYQTPLFXXIRLITASXILLSLPV

SEQ ID NO: 259634 - protein, 48 aa, Zea mays
  Clone ID: MRT4577_168377C.1.pep
PEICPNFLSAVQSRRCIRTRSAHPWPCPASPRTSIAVLSPQEPTRITS

SEQ ID NO: 259635 - protein, 63 aa, Zea mays
  Clone ID: MRT4577_168379C.1.pep
KCPFCNCTRRSRMTCPDGSVVSCPTAKAANLASSTMCSTLFIRGMRMGMVYFIPHPWCAYLFC

SEQ ID NO: 259636 - protein, 114 aa, Zea mays
  unsure (1)..(114): unsure at all Xaa locations
  Clone ID: MRT4577_16837C.1.pep
ERPADPGYAQKGGPIPRPVVKGAXRAPIPPTIGXPPPRPGPGPEDNPTRGEPHPFRLPLAAGGRGPRGAPPPGGEPPLPKTPGGAPPXGQPPPGPFGSRQPRIAPPXPRSPPPR

SEQ ID NO: 259637 - protein, 145 aa, Zea mays
  Clone ID: MRT4577_168380C.1.pep
PCLFFLPFTRARSFPSSCRRPGDRRAPARAPLSQATRRQRAATRRSRPLLTLVSPAAWPPFTRFALPRDRRSPEWPTSEFPHPFSQPAGYRGSLHCFTCMLYEKRENYSLTFAQLPIDLYYCWSITVASMVYQHVNFFEIYHFRK

SEQ ID NO: 259638 - protein, 84 aa, Zea mays
  Clone ID: MRT4577_168381C.1.pep
MTMTIVAVLCLLLFSGRRAAAEKTFRGGGCRCYCGLEAGGGGSGGYSTPSEAAPFTPAAGETTTPPSGGGYFTPSVAAPSTPAA

SEQ ID NO: 259639 - protein, 95 aa, Zea mays
  unsure (1)..(95): unsure at all Xaa locations
  Clone ID: MRT4577_168382C.1.pep
MTDTKPWAQQEDLDEHAENALTVADNTSSDNKLILYGLYKHATAGDGTTDGAGVLYQKDRAKRDARKAAVGKGKDEAKTDYVTXVKRFHEEAAAP

SEQ ID NO: 259640 - protein, 45 aa, Zea mays
  Clone ID: MRT4577_168383C.1.pep
GGPKLLKPPSIKRGPFHGVLWKGNWGQAHVNPLIQHRRIKSNKAW

SEQ ID NO: 259641 - protein, 36 aa, Zea mays
  Clone ID: MRT4577_168384C.1.pep
DSFDHVTQLLVRLHPEHSIGAVLESQSKAFLGGRVV

SEQ ID NO: 259642 - protein, 120 aa, Zea mays
  Clone ID: MRT4577_168385C.1.pep
VNSALVNMYNKCGCIEDATKAFVEMSIRTLVTWTSMISGYSQHGRPQEAIFLFVDMRFAGVRPNEITFVCVLSACSYAGLAEKAEHYFDMMKEEYKIEPIVDHYGCMVDMFVRLGRLDDA

SEQ ID NO: 259643 - protein, 142 aa, Zea mays
  unsure (1)..(142): unsure at all Xaa locations
  Clone ID: MRT4577_168386C.1.pep
SSNGILIXDALGSGNAVVYATQGFVTITGFNREEVIGQNCRFPLNEDRQGEQNKQLXKLRAAIAHGQECEVVLKNYRKDGASFWNHLYLSAIYNQQNFLVNFIGIQTDVTQQNLAEHQLRASKKIFSSMIDTITDGPLSVIL

SEQ ID NO: 259644 - protein, 133 aa, Zea mays
  unsure (1)..(133): unsure at all Xaa locations
  Clone ID: MRT4577_168387C.1.pep
MESRLEFGELAAGVGDNIERCLXDALSPLGIGSVGWNNLFWAVHRGGPKVMDNFTAALRLEPGKLAPSRQVFSEYGNMVGPTLIFVLDQVIAHRQQDHEEGSCEWGFMVGFGPGFPIDVMALHACSGMSPVPH

SEQ ID NO: 259645 - protein, 186 aa, Zea mays
  unsure (1)..(186): unsure at all Xaa locations
  Clone ID: MRT4577_168388C.1.pep
MDDSPTRDECLALPLSMITLTSRASHISPHDFXNPHTPARAVVYVRPLPWNENVAAFWWSYAAQRQSAWTLLHSVGGTNLYVHNIFWINHIAWKASDACALWMPHKXNYHYNMLSCARXNVCGHYTQDCCCKSPAIRCXSCVCIYVRXGCFITCNYDPHALLPRCHTRLPTYLRSAMSYHTRTYTL

SEQ ID NO: 259646 - protein, 101 aa, Zea mays
  Clone ID: MRT4577_168389C.1.pep
VLTFPRSPILSEHPLGPSNARADAVKRHPAPRLALPRTAYEWLLHFCITARDSTTAQQTLAHLIRLCMMHLLAKVRGPSLRYVRPRRTTKLFPYIGTKTWN

SEQ ID NO: 259647 - protein, 94 aa, Zea mays
  Clone ID: MRT4577_16838C.1.pep
PPRSRARRCTHPRTRTCPPRTIRTAWSCNTPYLAECGSSHKTTYIAPGFCCSRSRSISRFLCWDWSSFRRPCCGADDLTGSTITQCGAYHRAGP

SEQ ID NO: 259648 - protein, 51 aa, Zea mays
  unsure (1)..(51): unsure at all Xaa locations
  Clone ID: MRT4577_168390C.1.pep
STITDCNTLXSIMDRARPKINKEREHLSNSVSHLNLIASYRQNISSSLSTY

SEQ ID NO: 259649 - protein, 64 aa, Zea mays
  Clone ID: MRT4577_168391C.1.pep
IGGAHKNFLVGPPPGKGPWGSSQPKRVGNPNLSLKKGNYLFKKVKNARPFFSHVLLTIYPRAAR

SEQ ID NO: 259650 - protein, 82 aa, Zea mays
  Clone ID: MRT4577_168392C.1.pep
SEDHRGSLKLRCIEIAYHADLLDKYAERPGDSIWAHIFLAPIGGKIILFGLMEQESWTHRDPYYIGFRCAYPFIQYYVANIT

SEQ ID NO: 259651 - protein, 53 aa, Zea mays
  Clone ID: MRT4577_168393C.1.pep
HGRSECPKNLHDRLDPWRVLTSDEAMAEIATGVMTTPKFGKISVLAEQMLRRG

SEQ ID NO: 259652 - protein, 55 aa, Zea mays
  Clone ID: MRT4577_168394C.1.pep
KVTGGSITMTLRLSKQAPLTSNFESGNTCTPHTRINTRSSTRSSPTRLKVLYLSN

SEQ ID NO: 259653 - protein, 83 aa, Zea mays
  unsure (1)..(83): unsure at all Xaa locations
  Clone ID: MRT4577_168395C.1.pep
MSGRGKGGKGLGKGGAKRHRKVLRDNIXGLIYEETRGVLKIFLENVIRDAVTYTEHARRKTVTAMDVVYALKRQGRTLYGFGG

SEQ ID NO: 259654 - protein, 72 aa, Zea mays
  Clone ID: MRT4577_168397C.1.pep
MEVWEEYVPQTERRSNERRAGGHVGNKTLMQNLVRIHHIYGTSWIGDLNLLLLLVSSSLSLGMAAEVFNTCN

SEQ ID NO: 259655 - protein, 89 aa, Zea mays
  Clone ID: MRT4577_16839C.1.pep
MAEGRGELSDGVEKGLEHRMGELDWGARGSGAKADAREGDAAALATGEDAAGWRSEQGTDAVARAGGEGLGIRVRGWCALLLGGEGGWK

SEQ ID NO: 259656 - protein, 156 aa, Zea mays
  unsure (1)..(156): unsure at all Xaa locations
  Clone ID: MRT4577_1683C.1.pep
VAKPFSVPKLCARMKVNKDFAAKISDEFSLSPVAPLLFLXPGPLAFGRSVGGCVVFFPGLLRCVPSXRRFPSPCWPVLWVLLFGSPWXLXPPVFGSPPVLGXPXPVLVCVGXFFFSLCWGXSVSGLGXALSLFLLTXPXXXXXGGKKKKXXKXKGE

SEQ ID NO: 259657 - protein, 47 aa, Zea mays
  Clone ID: MRT4577_168400C.1.pep
QGFFQKHLPMATSPFHSPPEKFFFIHTLGHFLLLKQKPSNWKLREKN

SEQ ID NO: 259658 - protein, 49 aa, Zea mays
  Clone ID: MRT4577_168401C.1.pep
YYLLGEAQTEGLHFPHRKKVTVPFTHGVDHTMLNICPIFANRVSVNNVA

SEQ ID NO: 259659 - protein, 156 aa, Zea mays
  Clone ID: MRT4577_168404C.1.pep
AKVFSIFEDLGISVDSHATGEVSISLTLDPSKLWSCELVQHKNELDDVIEELEKIAVVHLLQNRSIISLIGNVQRSSLILEKAFNVLRRNGVNVQMISQGASKVNISLVVHDSEAKQCVQALHSAFFENGFLLEADELDVLHDGFTSHSNGTIHSH

SEQ ID NO: 259660 - protein, 133 aa, Zea mays
  unsure (1)..(133): unsure at all Xaa locations
  Clone ID: MRT4577_168405C.1.pep
PTRPPTRPGSPHQPTSKNSPILSSTRRKCQGAARAGRAWARVGAKRHRKVLRDNIQRITKPAIRMLSRRGXGVKRISRLIYEETRSVLKIFXLENIMRDAVTYTEHARRKTVTGMDVDYTLKRHGRTLYRLRG

SEQ ID NO: 259661 - protein, 564 aa, Zea mays
  unsure (1)..(564): unsure at all Xaa locations
  Clone ID: MRT4577_168406C.1.pep
MAAPALRITARLGLALDGATAARRREASAPVAVPAAPWLKKAAVRCQRAVGAAVAEKKDAPVSVAQERSGDGGAAPELTVVMKFGGSSVASAERMREVADLILSFPEEHPVVVLSAMGKTTNKLLMAGEKAVGCGATKASEIPELAVIKDLHLRTVDELGLDRSIVXVYXDELEQLLKGIAMMKELTLRTRDYLVSFGECMSTRIFAAHLNKLGKKARQYDAFDIGFITTDDFTNADILEATYPAVAKRLHVDWMNDPAIPIVTGFLGKGWRSXLITTLGRGGSDLTATTIGKAFGXLREFRSWKGVHVVMTCDSKIFANAIPVPYLTFDEAAELAYFGAQVLHPQSMRPARDGDIPVRVKNSYNRHAPGTVITKSRDMSKSILTSIVLKSNVTMLDIVSTRMLGQYGFLAKVFSIFEDLGISVDCVATSEVSISLTLDPSKLWSRELIQQELDHVVEELKKFAVVHLLQRRSIISLIGNVQRSSLILEKAFNVLRRNGVNVQMISQGASKVNISLVVNDSEAKQCVQALHSAFFENGFLSEVEGAEVPQNGASLNSNGAVYGN

SEQ ID NO: 259662 - protein, 70 aa, Zea mays
  Clone ID: MRT4577_16840C.1.pep
NKAEITYTVMRPKITPLAIPKQNPLSENLHLTQFNPPAVHPPIPRWQNPPFASSLHPYQHLPILTFQQYP

SEQ ID NO: 259663 - protein, 180 aa, Zea mays
  Clone ID: MRT4577_168410C.1.pep
AAPWQNGERKVDGGGPGSNSRQVAPDDTGIVGSVGDGSSRDETFYEATAWLELDCEDDFYSVNGGKLNPQPKDLTPARSFASRTSGRNTPTPRPRDLPTLAAILKAEPLLPPETQAPTADPQRRLGDLLREAQDVDDDDNDTGVDGLSRDDSLRMGAEANRCCVPRLARAISCNGRTQRK

SEQ ID NO: 259664 - protein, 83 aa, Zea mays
  Clone ID: MRT4577_168411C.1.pep
RFLPRSVRKKRFLQLSLLMRNRNIVSMELVSCCPLLVKRVEMGVCVFKLSIPHLTHPFLEIFFGCIAFVLNLKKIGILYYTEH

SEQ ID NO: 259665 - protein, 131 aa, Zea mays
  unsure (1)..(131): unsure at all Xaa locations
  Clone ID: MRT4577_168412C.1.pep
VEHSETHQAKLPSDDLAARATEMFAFLGLRAVRASATNAAIIPQCSLAPSAVIRQXLRPVTSMGCEHLAERAYRIQHALAECVLHQPINQHGDHXLAHVTIQTIRTQQWPLLLPALSQLDVLNPATYLRQQ

SEQ ID NO: 259666 - protein, 66 aa, Zea mays
  Clone ID: MRT4577_168413C.1.pep
AVLLVVEDEDDNEGTRRHQFGCREGESARGKLHAGDVQLLGHGAPLEATRDSQDHHPPCQFRSVFP

SEQ ID NO: 259667 - protein, 98 aa, Zea mays
  Clone ID: MRT4577_168414C.1.pep
KKIKKKKKKKKKKKIKKKKTKKHRGKLNGGADCKCSPFLINPPLLPLPCHFISFFFNTTNNMYYATPFYGGSGYPSPSPLKHLSLNSPFLTLVYYYPK

SEQ ID NO: 259668 - protein, 62 aa, Zea mays
  Clone ID: MRT4577_168415C.1.pep
LIQWFFSSKNFTVTKIIWRKFFLGGLWTGVFSLELGGPSFFKGNEANFFQFLGGAIFFLISF

SEQ ID NO: 259669 - protein, 62 aa, Zea mays
  Clone ID: MRT4577_168416C.1.pep
IRLEQDFPLPSVVHEHQPLKMGFFNNPGGAVTLLWVRFVPRIGDIVLASVEGTLDFTYGHFL

SEQ ID NO: 259670 - protein, 51 aa, Zea mays
  Clone ID: MRT4577_168417C.1.pep
QCSFSSLKFLPLPPKMSPICSCIRCSQSSPLYQICTSLCLVPRITSRLGSS

SEQ ID NO: 259671 - protein, 61 aa, Zea mays
  Clone ID: MRT4577_168418C.1.pep
AGMRLASRLLRITRAGTSPRWRGKDDCSAGAGQFRCVAVWGRSEGRDRPLVSPGPAGSRGP

SEQ ID NO: 259672 - protein, 69 aa, Zea mays
  Clone ID: MRT4577_168419C.1.pep
FCWSDLKVLRVCVVEYIKYNGSVVFTYCWRWGLLIVTFIYVLCMVLSLIIVLGVMTKFSRAVFGAILCP

SEQ ID NO: 259673 - protein, 126 aa, Zea mays
  Clone ID: MRT4577_16841C.1.pep
PFLHAVADLAPLLSHGHDDLQPFLVAKPIFLLAPPLFPPLRVSARPTPMVFPPSRLPCSLPMAFPLDARDLFPTVQANVLSLPAAAPWWLSSSTSRLRSLGHDVVHPANHWCHTSRVMCSPKCLNM

SEQ ID NO: 259674 - protein, 153 aa, Zea mays
  Clone ID: MRT4577_168420C.1.pep
SIVDHEGSEEGSGRGGGGHTDDCAAHARSTDGHDRPLDERNRVRCLPRHDDLGDHDDGHVVLHGSRHANTLHWFTPACSCSFKDRLCYPDIYYSVALSCRPLPRSHNSYMHAPDRPLHTLPLASYWSSDDCCNASMDAIRICGLNNRVQKPIQ

SEQ ID NO: 259675 - protein, 87 aa, Zea mays
  Clone ID: MRT4577_168421C.1.pep
MNQTAHYTNTPRRTATPPPYFCLFRPYEVIHPIAKSFAKEHMLSPRVAPTGTRPRSIPKRTHRILTDLMVVNCVLPSALTRLYETMR

SEQ ID NO: 259676 - protein, 40 aa, Zea mays
  Clone ID: MRT4577_168422C.1.pep
LCSYLKIIYIYMSTIIFTWTFQTCHTVILHSYIDYTCDIT

SEQ ID NO: 259677 - protein, 132 aa, Zea mays
  unsure (1)..(132): unsure at all Xaa locations
  Clone ID: MRT4577_168423C.1.pep
MPHAVNHNSSIPTAITRTDRAGSAPFYDALFLQHAFMPYVQQRPLKHLLXRNIRTQPLLQXALSNLADYCECLQIVPLLTLASLISASYLRRRQSXPVSQLSAAYPQQYIAFNQLTAFNSTAYLQDAHLLPC

SEQ ID NO: 259678 - protein, 405 aa, Zea mays
  unsure (1)..(405): unsure at all Xaa locations
  Clone ID: MRT4577_168424C.1.pep
MDCAKGRAVADLYNELMVEIFSRVPVKDLRRCTCVCKSWRNLITDPLNRKKLPQTLEGFFHGVVGGPHSYGQFTSLSGSGERVPPVDPSFSFITAMLPGVERMVLLDSCNGLLLFGCTREDKFGYIVTNPATKELMTVPASSGSCPPPPPFERDMDAGERYAHTFLMINPAVSSHFHLVQIWEXGGEGXVETVHSYSSETKAWSDRSSKWGRGEKGGEWELWGESVIGVMCGWTLVDGLLHFLAFDLQKEETVIIAVDGEGETRRIIGWHGKDVRAIVFIGESQDHLHCIGVNVQLDQGSQVRFTQMSIWVLEDYDTEAWILKHNVSSSQFFELLSHPIKDFHIVAIHPDHNSFILVQHWNQKLVSYNMDTQELHGLCTLGKXLCDXITPYVPCFLESSVLATKH

SEQ ID NO: 259679 - protein, 395 aa, Zea mays
  unsure (1)..(395): unsure at all Xaa locations
  Clone ID: MRT4577_168425C.1.pep
MDCAKRRAVADLHDELMVEIFSRVPVKDLRRCTCVCKSWCNIITDPLNGKKLPQTLEGFFQGGVGGPHNYGQFTSLSGSGERVPPVDPSFSFITAMLPGVEHMVLLDSCNGLLLFGCTREDKFGYIVTNPATEELMTVPTSSXLSSSTFGXGERYAHTFLMFNPAVSSHFHLVQIWEDNAVKEVETVHSYSSETKAWSDRSSKWGRGEEXAVNGSCGVXVIGFMCGWALVDGLLHFLVFDLQKQENVIIAVDGEGKTCRIIGWHGKDVEAIVFIGQSQDHLXASVXNVQXLDLXFTRMSIWVLEDYDTQAWILKHNVSSLQFFELLSHPIKDFDIMAIHPDHNSFILVQHWNQKLVSYNMDTQELRGLCTLEKGYVVITPYIPCFLESSVLATKH

SEQ ID NO: 259680 - protein, 71 aa, Zea mays
  Clone ID: MRT4577_168426C.1.pep
MELDAPPPAAAVAIPPAGSDKHKGFERMKFARAGSEPLAKIQMHHSKMNPRIMRMGHRRYDPQIHGKSMEI

SEQ ID NO: 259681 - protein, 179 aa, Zea mays
  Clone ID: MRT4577_168427C.1.pep
MDCAKRRAVADLHNELMVEIFSRVPVKDLRRCTCVCKSWRNLITDPLYRKKLPQTLEGFFHGGVGGPHSYGQFTSLSGSGERVPPVDPSFSFITAMLPGVEHMVLLDSCNGLLLFGCTREDKFGYIVSNPATKKLLTVPASSGSCPPPPLFAFEAEVDDYSGEKYAHTFLMVNPAVSWD

SEQ ID NO: 259682 - protein, 85 aa, Zea mays
  Clone ID: MRT4577_168428C.1.pep
MASAEGERWVGLATDFSQGSREALQWAATNLLRAGDHLLLLHVIKEPDYEQSEAILWESTGSRTHPFSNLHHRLLLPFAMLGSCN

SEQ ID NO: 259683 - protein, 92 aa, Zea mays
  unsure (1)..(92): unsure at all Xaa locations
  Clone ID: MRT4577_168429C.1.pep
DHLRECVQKILAASKAKKRGFVESIELQVSLKNYDPQKDKRFSGTXRLPPPTRKMRXCILGDVXHVDMAKKEGLAWMDVEMLKKLNKDKKLV

SEQ ID NO: 259684 - protein, 92 aa, Zea mays
  Clone ID: MRT4577_16842C.1.pep
LGTSRRRASLQPTWSSGRLWSPYLATCLETKSQPRGNEPSRQAHRRPRAMASTNSWTVEIASPVAAPRLFRAAATDCCPPAPVLSSPLPLPA

SEQ ID NO: 259685 - protein, 82 aa, Zea mays
  Clone ID: MRT4577_168434C.1.pep
IALTIQHNVADPALAHSASTHPASPLMPTKVDTEGTECPRSQLRHVNWHALHPTAFRRKTHKQHKLLSLESELGSDKLHRCG

SEQ ID NO: 259686 - protein, 72 aa, Zea mays
  Clone ID: MRT4577_168435C.1.pep
HTHIHKSESHAFILQQTKYTTHESNQKALYKIHEIKLGRHQPRVRACDGDGSTGFGRTESKARLRTASAWLR

SEQ ID NO: 259687 - protein, 32 aa, Zea mays
  Clone ID: MRT4577_168437C.1.pep
HLFSLNLSICQFLPLYRVDRRIAYLMLAVLRT

SEQ ID NO: 259688 - protein, 64 aa, Zea mays
  Clone ID: MRT4577_16843C.1.pep
CCPLRCTLSFIVSIPHPCATKRVGEEGSVDLDPSPGRQTGIQWCLLLSAQPPGLVVRVDPPAVI

SEQ ID NO: 259689 - protein, 52 aa, Zea mays
  Clone ID: MRT4577_168440C.1.pep
KKKISLKNGGAQLIRKFKGVMGFNSLGPKPAPKLGVPFGPLLGLVQKVSVYA

SEQ ID NO: 259690 - protein, 45 aa, Zea mays
  Clone ID: MRT4577_168444C.1.pep
YSYTCSEQTQGFIALYIPLSSKNIMRAAHSVIRFVLAHILWNRNL

SEQ ID NO: 259691 - protein, 126 aa, Zea mays
  Clone ID: MRT4577_168445C.1.pep
MAEIRSAAEGARAGGRALTGGLGGVSDRGGGRTDRAGRAPGNMGRRARGVERAYAKRYPRSGSCDQDQTREIRPGRDERLQAALLLSAAVRSLELRQACARGVLGSPGLGREGENATTNSMAEKRP

SEQ ID NO: 259692 - protein, 175 aa, Zea mays
  unsure (1)..(175): unsure at all Xaa locations
  Clone ID: MRT4577_168446C.1.pep
PGGTQRKENKEKARAERRRQEREPKRHQARETRQARPEDKGQQRGHRGRGPEDRRHXRARSSNQQRRERPGTGTXAPETGPPGRTGRQKADHRGKEGRQEGNHRXNEHQETRPKKQEREEKQGQGQMRGDARGPGRRDARPHRDKGRREGRVQEEEQDRDRGERQQPRQPETEQR

SEQ ID NO: 259693 - protein, 146 aa, Zea mays
  Clone ID: MRT4577_168447C.1.pep
KRLEKTSPTMSSSAFGDFGPLTERRRAEKARQQRRRIMIAVGTVSIIAILIVIGWYAVMNSGKKSSSDGDHNHKSSSSRAKGKSSGGSDSEAEAETETESGSDSKTDLKAVSKSIKAMCSQTDYTDACEKSLCRPANARLVGAQGH

SEQ ID NO: 259694 - protein, 62 aa, Zea mays
  unsure (1)..(62): unsure at all Xaa locations
  Clone ID: MRT4577_168448C.1.pep
LGPPLTHVFVSLVNGLGSTNNNSTVSLKSPLSICKKKKXXGCVIKKKKKKKKKKVLCVVTTA

SEQ ID NO: 259695 - protein, 86 aa, Zea mays
  unsure (1)..(86): unsure at all Xaa locations
  Clone ID: MRT4577_168449C.1.pep
LLQYSPLPPLSSIVYLHQHQLLPFSQIAGVSPATFLIQPQLLPFYQHAAPNAGTLLQLQQLLPFNQLALTNPAAFIXQPIIGGALC

SEQ ID NO: 259696 - protein, 41 aa, Zea mays
  Clone ID: MRT4577_16844C.1.pep
LDRGRPAVAHKKSRVFTKTQTITMPSWTPPTQTKGRTNSTG

SEQ ID NO: 259697 - protein, 56 aa, Zea mays
  Clone ID: MRT4577_168450C.1.pep
LGWVGLVYFFSQSKFCPGGKKVKSGLLKKKKKKKKKKKKKKKKKKKKKKKKKKKTR

SEQ ID NO: 259698 - protein, 56 aa, Zea mays
  Clone ID: MRT4577_168451C.1.pep
RVPARGIFWLPPCSLGRKKNVFFSPVRGAVLFWWIPKGPDFGAFGPFNNKPLNFAS

SEQ ID NO: 259699 - protein, 108 aa, Zea mays
  Clone ID: MRT4577_168452C.1.pep
FANFFSQPADFKPTPLTIIIPKKNHNEICKYLFKEDLLYPKKDYNQANHPQIDVPNLHVIKLMQSFKSKEYVRETYSWQYYYWYLTNDGIEHLLNYLNLPSEIVPATL

SEQ ID NO: 259700 - protein, 100 aa, Zea mays
  Clone ID: MRT4577_168453C.1.pep
QYVPPEETMCHQRAHPNMPQPRRDRQMAVGSTLARLQDLGTAYSRPPSQPRPRTAHEVNHKYKCGNPVSMTFEGQRACQTTRTCVTNIRMHPYTRGVKRV

SEQ ID NO: 259701 - protein, 360 aa, Zea mays
  Clone ID: MRT4577_168454C.1.pep
TERERENLRLRLVAAEASVLASLGSNITMSSNCGEDEKELVCVTGAGGFIGSWVVNELLQRGYRVRGTARDPADSKNAHLLALEGAKERLTLCRADVLDRASLRAAFAGCHGVFHVASPVSNDPELVPVAVEGTRNVINAAADEGARRIVFTSSYGAVHMDPSRSPDAVLDETCWSDYDFCKRTDNLYCCAKMMAEVTAAAEAGARGLQLAVVLPCMTTGPMLQQTLNFSTNHVARYLMGTKRSIPNAVAAYVDVRDVARAHVLAYERPGARGRYLCIGTVLHRADLVDMLRDLFPQYPVTAKCEEDGKPMAKPFKFSNQRLRDLGLEFTPLRKSLYETVLCLQQKGHLPVIQPQQRAYL

SEQ ID NO: 259702 - protein, 55 aa, Zea mays
  Clone ID: MRT4577_168455C.1.pep
VCPPPPMGHLMATAAQVRLSWGLCLSTVSVHDRIALPVVSFLSSPRYHGAARLCP

SEQ ID NO: 259703 - protein, 472 aa, Zea mays
  Clone ID: MRT4577_168456C.1.pep
PTRPPMCRCTTSYQQSIAGVCNLPWPKSNFLVQVLDDSDDPLTQTLIREEVAKWQQQGARIVYRHRVLRDGYRAGNLKSAMSCSYVKEYEFVAIFDADFQPHPDFLKRTVPHFKDNDELGLVQARWSFVNKDENLLTRLQYINLCFHFEVEQQVNGVFLNFFGFNGTAGVWRIKALEDSGGWLERTTVEDMDIAVRAHLHGWKFIFLNDVECQCELPESYEAYRKQQHRWHSGPMQLFRLCLPDIIKCKIAFWKKANLIFLFFLLRKLILPFYSFTLFCIILPMTMFVPEAELPDWVVCYVPALMSLLNILPSPKSFPFIIPYLLFENTMSVTKFNAMISGLFQLGSAYEWVVTKKSGRSSEGDLIALAPPKEPVKLHATRTGSAPNLDAVAKEEHLAAASRKDAAAAATTVKKKKEKHNRIYKKELALSMLLLTAAARSLLSKQGIHFYFLLFQGVSFLLVGLDLIGEQVE

SEQ ID NO: 259704 - protein, 195 aa, Zea mays
  unsure (1)..(195): unsure at all Xaa locations
  Clone ID: MRT4577_168457C.1.pep
LSRLCFSIIIKCXIAFCKKATLIFLFFLLRKLILPFYSFTLFCIILPMTMFVPEAELPDWVVCYVPALMSLLNILPSPKSFPFIIPYLLFENTMSVTKFNAMISGLFQLGSAYEWVVTKKSGRSSEGDLIALAPPKEPVKHATRTGSAPNLDAVAKEEQQQQQLAASRKDAAAKKKEKHNRIYKKELALSMLLLT

SEQ ID NO: 259705 - protein, 81 aa, Zea mays
  Clone ID: MRT4577_168458C.1.pep
MSLAPRALCLLPPQLFHRGTLLRPLLRGMAPAAATGSHVAAEAPPFGVGGWGASDPRWLVLEKLPAGYPTTCDLKPFRGRF

SEQ ID NO: 259706 - protein, 73 aa, Zea mays
  Clone ID: MRT4577_168459C.1.pep
ASLCISWCMWVHVLVLLVSPPFNLTYVMEWVIFLPILLLYSMERLVGMCITALYFIHCMFCHSVMNGKTLLLP

SEQ ID NO: 259707 - protein, 119 aa, Zea mays
  unsure (1)..(119): unsure at all Xaa locations
  Clone ID: MRT4577_16845C.1.pep
MAPKSDHAGGSAGGSGATQAHFDFMDPLFQGLRGLPFFFLWAAGTRLKVAANLALPLPMNGFFLILITXFGGGFGLVYQVIGEPPGIGRAQEPGTGAGRPSVFLPRRVNGQYIIEGLFF

SEQ ID NO: 259708 - protein, 99 aa, Zea mays
  unsure (1)..(99): unsure at all Xaa locations
  Clone ID: MRT4577_168460C.1.pep
RRKLEFLKYTVFYLPTXEYTSGGXGNFYGLTTTLTKXPDTGEFCIEADSLMISDNGVCCIHEFDKMYIKDQVSIHETIEHQTITISKSGIHATLNARTS

SEQ ID NO: 259709 - protein, 90 aa, Zea mays
  Clone ID: MRT4577_168461C.1.pep
SLSPEEHRSPEFEPLLVCLKAKIQEMKEKAPDPLSDKDGNSHVCKVCFESATAAVLLPCRHFCLCKPCSLACSECPLCRTRIADRIITFT

SEQ ID NO: 259710 - protein, 662 aa, Zea mays
  unsure (1)..(662): unsure at all Xaa locations
  Clone ID: MRT4577_168462C.1.pep
IRHEGHVSLICTITPASSNMEETHNTLKFASRAKRVEIYASRNRIIDEKSLIKKYQKEISSLKQELDQLRRGIVGGASQEEIMSLRQQLEEGQVKMQSRLEEEEEAKAALMSRIQRLTKLILVSTKNNIPALTDGHQRHNSVSEQDKLSTSQDSSTLVQNEGTTKDHLPDSLDEINQLRSGSGEHSSATCSATDSMQAGFTASDHMDLLIEQIKMLAGEVAFGTSSLKRLIEQSIDDPEGSKDQIENLEREIQQKRRHMRALEKQIMESGEASVANASMVDMQQTITKLTAQCSEKAFELELKSADNRVLQEQLQQKNAEVNDLQEKVFHLEQQLSAKVGISPEQETDCAQQEAIDLKSKLQSKEAEFEKLKFEHLKITEEQCDLINQNHKLSEEAAYAKELASSAAVELKNLAEEVTKLSVLNVKQAKELLVAQEMAHSRVHGRKGRTTSRGRDEVGTWSLDLEDMKIELQARRQREAALEAALAEKELLEEEYKKKFDEAKKKXELSLENVLAGMWVLVAKLKRGALGISDFNVDDRTVNLADITNGTKENKGEKNFALVEKQVSEDSVKSLSTEEHRSPEFEPLLVRLKAKIQEMKEKDTDPLSDKDGNSHVCKVCFESATAAVLLPCRHFCLCKPCSLACSECPLCRTRIADRIITFT

SEQ ID NO: 259711 - protein, 214 aa, Zea mays
  unsure (1)..(214): unsure at all Xaa locations
  Clone ID: MRT4577_168463C.1.pep
SLFVEDMKIELQVRRHREAALEAALAEKELLXEEDIXLTDKDGNSHVCKVCFESANEKELPLEKDLSGMWVLVATWKRGALGISDLNVDDRTVNLADITNSTKENKGGKNFALVEKQASEDSVKSLSSEEHTSPEFEPLLVRLKAKIQEMKEKDIDPLTDKDGNSHVCKVCFESAAAAVLLPCRHFCLCKPCSLACSECPLCRTRIADRIITFT

SEQ ID NO: 259712 - protein, 42 aa, Zea mays
  Clone ID: MRT4577_168465C.1.pep
CPSLLHVLLQCVSVVVYLFCNSVPCFSHVNSKRPIRKFRLVV

SEQ ID NO: 259713 - protein, 671 aa, Zea mays
  unsure (1)..(671): unsure at all Xaa locations
  Clone ID: MRT4577_168466C.1.pep
KKIKEEVVLSPGHALSFIAAGEEHRHVGSNNFNLFSSRSHTIFTLMIESSARGDEYDGAMYSQLNLIDLAGSESSKTETTGLRRREGSYINKSLLTLGTVIGKLSEGRATHIPYRDSKLTRLLQSSLSGHGHVSLICTITPASSNMEETHNTLKFASRAKRVEIYASRNRIIDEKSLIKKYQKEISSLKQELDQLRRGMIGGASREEILSLRQQLEAGQVKMQSRLEEEEEAKAALMSRIQRLTKLILVSTKNNIPALTDGHQSHNSLSEQDKLITSQDSSTLVQTEGTTKDPLSSALPDSLDEINQLRSGTGEQSSVTGSATDSMQVGFTASDHMDLLIEQIKMLAGEVAFGTSSLKRLIEQSIDDPEATKDQIENLEREIQQKRRHMRALEKQIMESGEASVANASMMDMQQTITKLTAQCSEKAFDLELKSADNRVLQEQLHQKNLEIYDLQEKVLRVEQQLSAKVDISPEKETDCAQQETIDLKSKLQSKEAEIEKLKYEHLKISEEHCDLINQNHKLSEEAAYAKELASSAAVELKNLAEEVTKLSVLNAKQAKELLVAQEMAHSRVHGRKGRTASRGRDEVGTWSLDLEDMKMELQATRQREAALEAALAEKELLEEEYKKKFDEAKKKELSLENDLAGMXVLVAKLKRGALDISDLSVDDGTKV

SEQ ID NO: 259714 - protein, 73 aa, Zea mays
  Clone ID: MRT4577_168468C.1.pep
MAVTVLRLARRGGVKRISGLIYEETRGVLKIFLENVIRDAVTYTEHARRKTVTAMDVVYALKRQGRTLYGFGG

SEQ ID NO: 259715 - protein, 97 aa, Zea mays
  Clone ID: MRT4577_168469C.1.pep
ATLQHTKDTIFVSTIAPPTMRGDLYIVGLSSIVATATIKPQCSQDNINFLLPPYLQPTFHQIFENPINKHFSNHLGFNTPFTIESYSYYLPTNNNYI

SEQ ID NO: 259716 - protein, 144 aa, Zea mays
  unsure (1)..(144): unsure at all Xaa locations
  Clone ID: MRT4577_16846C.1.pep
AFYAREDDDLESLERDVNEESGWKLAHGEVFRPSGGQLFLSVLVRIGTXLAALILLAIVLAIVDILYAGRAAIMTTLIECYALTSVISXYVSGGLYSWNGEKNWIQAMILTASLFPFLSCSTGLLLNTIAILYRSLAAIPCGTM

SEQ ID NO: 259717 - protein, 131 aa, Zea mays
  unsure (1)..(131): unsure at all Xaa locations
  Clone ID: MRT4577_168472C.1.pep
RAPPPQPRPGKQEAQRQPKEPPPPRAKTXRRRRKQQQQPPTEGDGXDHDDNDKGKKPXXXTAPPTKEPTRRTKAKRTSGDSCFWLAPRVSSTWRKLIFLYNAMPASNPAVCHRRPSRKRSRNSPRTSRQRR

SEQ ID NO: 259718 - protein, 64 aa, Zea mays
  unsure (1)..(64): unsure at all Xaa locations
  Clone ID: MRT4577_168473C.1.pep
SSLVVRGCLRRRLSASWRRLXGXPPLHGPWXCLWRSRXPRPAVXSSPCPVXGAGGGGRWXWPSR

SEQ ID NO: 259719 - protein, 70 aa, Zea mays
  Clone ID: MRT4577_168478C.1.pep
LHREEQNICHKQMEGKLLLSFLIKRSTSVELAHGTHFFIRMLDDNNSLKDLYIGEIRKMVRKFLNEKHWI

SEQ ID NO: 259720 - protein, 110 aa, Zea mays
  Clone ID: MRT4577_16847C.1.pep
PRVRSISKRSLDMAIRHMDIRQNLGGIRGASLFPQSTRSAAAKVRPARTSDPGHGISKSDQHRTDNGNSLNGHLYVSGDSNGALSRNGGSSTGSPDRESIMTNETLIELD

SEQ ID NO: 259721 - protein, 80 aa, Zea mays
  Clone ID: MRT4577_168480C.1.pep
GMVWSHLGGSYIPRIRGQVWGCPGFMTIALPSSVKSPLAQFGLRPRSAVLLGRPSLFFRPIINPGFSEIGPGFCIQKTAP

SEQ ID NO: 259722 - protein, 155 aa, Zea mays
  Clone ID: MRT4577_168481C.1.pep
MDGSKAKKVAANKFGGPRKKSVTKSIKAGLQFPVGRIGRYLKKGRYAQRVGSGAPVYLAAVLEYLAAEVLELAGNAAKDNKKSRIVPRHLLLAIRNDQELGRLLSGVTIAHGGVIPNINPVLLPKKAAEKAEKAEKTATKSPKKATKSPKKATKA

SEQ ID NO: 259723 - protein, 119 aa, Zea mays
  Clone ID: MRT4577_168482C.1.pep
MVWYVLNNCSQVDKYMKRFKNDLQRNGMPNIEKTLQKGFQTWFKTNILRMKNINQEDADDDLFSLACGPDFRVRKYSSRIVNGVRFNTSDRDKHRKTQNSGVMTQGTHNGQEIDFFLEP

SEQ ID NO: 259724 - protein, 100 aa, Zea mays
  Clone ID: MRT4577_168483C.1.pep
SGQWGTSHTIIGHFLGQKRAIQVQVEPLLIIRAWEKFKYHTRFRFQGGGTIPPHPRHPRKIFYGNRPKVVGPNPQVILEPVGKGSFWEHNYCWGGACGGG

SEQ ID NO: 259725 - protein, 93 aa, Zea mays
  Clone ID: MRT4577_168484C.1.pep
LHLVTGRVNERLWSAHLRSRWMINVVGAIWIPSNTSDAMETRTRALTRVLLAVTTRRFERWPSGVHRLRCEHERHTVAAYPSSVLGLVVHEHM

SEQ ID NO: 259726 - protein, 469 aa, Zea mays
  Clone ID: MRT4577_168485C.1.pep
MGKRSGGRKLPFFTRSSSSSSKRNRSARRLPSLPKQDNATRALLASPSAASPSATPGSAAAGQTAQLPPPLSVTAGGGVAVSGKVNKKKAGTRLWMRLDRWSASEIVELDKASIIRRAGLPPRDLRILGPVFSRSSSILAREKAMVINLEFIRAIVTAEEVLLLDPLMHEVLPFVDQLRQHLPLRSRVGENGECAPDGNGEKQKGSLNEATGAEHELPFEFHVLEVALEVVCSSLDLSVSDLERHATPVLDELTKNVSTRNLERVRNLKSHLTRLLARVQKVRDEIEHLLDDNEDMEHLYLTRKQVQNQQVEALMSSAASNSIVLAGTGVPRLNSSFRRSLSIATSMHLDNDVEDLEMLLEAYFMQLDGIRNRILSVREYIDDTEDYVNIQLDNQRNELIQLQLTLTIASFGIAANTFIAGAFAMNIPGSLFNTDGSLFWPFVGSTSSGCFVITVLLLGYAWWKKLLGP

SEQ ID NO: 259727 - protein, 63 aa, Zea mays
  Clone ID: MRT4577_168486C.1.pep
DLDRLPCGLDALHAGAGLLLRFISPFLGQQLPSRRRHRHLYVRHDMVQAGTNHRARRHQASGG

SEQ ID NO: 259728 - protein, 115 aa, Zea mays
  unsure (1)..(115): unsure at all Xaa locations
  Clone ID: MRT4577_168487C.1.pep
DEWNRACMKHADDERDLTYEGIIESVSGELEKELHXMERTREKHATTLDHLDRVDRHEESPLIEQAIQTRIVDXKNLDDHEALSQIQLDRLHHAXLTREKLXLSQTFEHNNAVPE

SEQ ID NO: 259729 - protein, 91 aa, Zea mays
  unsure (1)..(91): unsure at all Xaa locations
  Clone ID: MRT4577_168488C.1.pep
RVDGSLIVDXILQRSSEVGYDATRLGDLVNMVGKGIIDPTTVVRTALLDAAGVASLLTTAEVVVTEIPKEEKDPGMGAMGGMGGGMGGGMF

SEQ ID NO: 259730 - protein, 67 aa, Zea mays
  Clone ID: MRT4577_168489C.1.pep
GSSPPAQSARAHHRLLRTCIDRASRLVLRVLVERPNGQRGVRCSGGDRHGWHGRLGPRLEPNSELTT

SEQ ID NO: 259731 - protein, 183 aa, Zea mays
  Clone ID: MRT4577_16848C.1.pep
AAACLSAGGTLRSRDAWSCARWGRGIHLWAVVRDEQDGGWRRRDGSATICAGGNSTYLAPAMGRSERRGQVRASGTPSIEVSERRRLRWRGGVGENRDAACLLSCVGEHHGEGAAQGWCMGCGRGLRRRVPGGAELRGSGTRLGEGSGPRGAHGSAICGLDLLRARKGTRSRVAHPWEQALRG

SEQ ID NO: 259732 - protein, 406 aa, Zea mays
  unsure (1)..(406): unsure at all Xaa locations
  Clone ID: MRT4577_168490C.1.pep
GNKFFSIAGHTKDPSEGVTGLLXSAFKEFDPHTCTWSIVRTYGKSPVSRGGQTVTLVGTTLVLFGGEDAKRCLLNDLHILDLETMTWDDVDAIGTPPPRSDHAAACHADRYLLIFGGGSHATCFNDLHVLDLQTMEWSRPKQQGLTPSPRAGHAGATVGENWYIVGGGNNKSGVSDTLVLNMSTLTWSVVSTAEGRVPLASEGMTLVHSNYNGYDYLISFGGYNGRYSNEVYTLSLKSDFKSTTKEETVXSRVVEPEVEMVIGVDSADSDLKNSXSTDEASEQFLAALKAEKEELEATLNREQLQTVQLKEYIAQAESRNVELTKELQAVRGQLAAEQSRCFKLEVDVAELRQKLQSMDALEKEVELLRRHRAASEQAALDAKQRQSSGGMWSWLVGTPPDDKSES

SEQ ID NO: 259733 - protein, 92 aa, Zea mays
  unsure (1)..(92): unsure at all Xaa locations
  Clone ID: MRT4577_168491C.1.pep
APKNKAQQTRGPQKTPRKPPPETRPGNAPRVSGGEGGPRGASGNVFDPXQGALQPLGNDPSPRVGGPPQAPMGQLNTGGLGGPNEQGRFGWV

SEQ ID NO: 259734 - protein, 85 aa, Zea mays
  Clone ID: MRT4577_168492C.1.pep
RILPHDVASHVMPQGERPINRQRCLKACLSSLLRHATEHITRMKPLGAGATLVAHTIKDSEALLHGKWYSEYPQTARSHDYEGDY

SEQ ID NO: 259735 - protein, 120 aa, Zea mays
  Clone ID: MRT4577_168493C.1.pep
WGTAPQGGLVQPGNCRTGFLGGGVGNPWAPLRGGLKIGGKTGCIGAPRNFWCRRGPPFFFLALAPCPTGALKKGRPPFYHGWVKMGPKRSFWGPKLFFNKKRKKKTQKKKKKKKKKKKGQ

SEQ ID NO: 259736 - protein, 40 aa, Zea mays
  Clone ID: MRT4577_168494C.1.pep
EVWDRCNAYAAKCCRLVGSIPHATDDDTLYYTNHQRNGYL

SEQ ID NO: 259737 - protein, 49 aa, Zea mays
  Clone ID: MRT4577_168495C.1.pep
CGVCSCVCATYSCSAICKACPYRVHRSPCTLSVETLRALRWLSVKMICL

SEQ ID NO: 259738 - protein, 124 aa, Zea mays
  Clone ID: MRT4577_168496C.1.pep
EIVRYPEVVSVFPNRGRKLHTTRSGQFMGLERDRDVPQWSAWEKATVREDTMIRYSHLSVWPESASYNDGEMGPIPDYWKGICQNDHGRAFQCNRKVICARYFNKGFAMRCSVPVHAVFKTTCV

SEQ ID NO: 259739 - protein, 92 aa, Zea mays
  Clone ID: MRT4577_168499C.1.pep
LALRVRRGRTALSHGGGEGVLLSARPASESCGDLLSKYALLMDGCLALVSRRMGSLRRASRLFMVCCSIRDSLSLSSIELRCLKLTRRSKNG

SEQ ID NO: 259740 - protein, 69 aa, Zea mays
  Clone ID: MRT4577_16849C.1.pep
SGTKFGAPGRIQVPDRALNIYPKSALFKGNDPNLKPKPTPTGGPALPNLEIPPKRVYTGGPNREQPPLT

SEQ ID NO: 259741 - protein, 169 aa, Zea mays
  Clone ID: MRT4577_1684C.1.pep
MALSPASVGPVISEVEMNAGADQGATTVRATVVQACSVFYDTPATLDKAEKLIAEAAGYGSQLVLFPEVFVGGYPHGSTFGLTIGSRSAKGKEDFRKYHAAAIDVPGPEVSRLAALAGKYNVFLVIGVVERAGYTLYNTVLSFDSLGKYLGKHRKLMPTALERVFWGGG

SEQ ID NO: 259742 - protein, 143 aa, Zea mays
  Clone ID: MRT4577_168500C.1.pep
APADISLVNRLCLLDHHPHTISWSPPSRPVFLPTQIANSGSPDITSCRFAQCIGNPWLPYTMVGRHRFHRRGSLSLDGQTPSAMMSRSSTVEVSACRRRTVAVVGAHPIWRSSSASAPPAAFLLTRHPCHIYLSFPLSLSLDR

SEQ ID NO: 259743 - protein, 171 aa, Zea mays
  unsure (1)..(171): unsure at all Xaa locations
  Clone ID: MRT4577_168503C.1.pep
MKEEDKPKTSLITPLGTXCFVRMPEGXKNVGTTVSRXTKSILESQMGRNNFTYVNDIVIASKNKEGNLXDLTETVPNKREARRSLSPRKCISNIRQDKTRGYLVSQRGRKAERSXYSPAMDTAPQQTKPXAPPPPGGHAAHKIFTSRSSDRRLPFGRIPRGAKFLVKEKKK

SEQ ID NO: 259744 - protein, 127 aa, Zea mays
  unsure (1)..(127): unsure at all Xaa locations
  Clone ID: MRT4577_168505C.1.pep
VPASSLEFFFFFFFFFFFFFFFFXFFFFFFFFFFXFKKRGFGFLKPALRGLTGPKKVLKPLNRVFWVQTPGAPRGKGGGGFFSSKKNPNKGLTPVGRLPLKKPSPRGTFGGPFFLKGGGGKTRAYPP

SEQ ID NO: 259745 - protein, 331 aa, Zea mays
  unsure (1)..(331): unsure at all Xaa locations
  Clone ID: MRT4577_168506C.1.pep
MGEIGTDHRGLAEAEAGGSGKEEGMVLGDEEEEEETSPVEQVRLTVPSTDDPSLPVWTFRMWSIGLLSCALMSILNQFFSYRTEPLIVTQITVQVASLPLGHFMARALPRARFRAPALLGGGEWSLNPGPFNIKEHVLISIFAXNAGFAFGNGSAYAVAIIDIIRAFYHRHISFLTAWLLVVTTQVLGYGWAGLLRKYVVQPAHMWWPGTLVQVSLFQALHEKKDESAKASRQISRSKFFVVVLACSFAWYAVPGYLFPTLTSTSWLCWVFSKSVTAQQLGSGMKGLGLFAFTLDWSTVSSFLFSPLISPFFATXNIFVGYVVFVYVIMPM

SEQ ID NO: 259746 - protein, 337 aa, Zea mays
  unsure (1)..(337): unsure at all Xaa locations
  Clone ID: MRT4577_168507C.1.pep
MASHIVGYPRMGPKRELKFALESFWDGKSSAEDLEKVAADLGASIWKQMSEAGIKYIPSNTFSYYDQVLDTTAMLGAVPDRYSWTGGEIGHSTYFSMARGNATVPAMEMTKWFDTNYHFIVPELSPATKFSYASHKAVSEYKEAKALGVDTVPVLVGPVSYLLLSKAAKGVEKSFSLLSLLDSILPIYKEVVTELKAAGASWIQFDEPTLVKDLAAHELAAFSSAYAALESALSGLNVLIETYFADVPAESYKTLTSLSGVTAYGFDLVRGTKTLELIKSAGIPSXKYLFAGVVDGRNIWADDLAASLSTLQSLEAXVGXDKLVVSTSCSLMHTAVD

SEQ ID NO: 259747 - protein, 514 aa, Zea mays
  unsure (1)..(514): unsure at all Xaa locations
  Clone ID: MRT4577_168508C.1.pep
MGARRRLLADTPPPEHRHRQGAPASDWSAGYLNGWLSQPTPIFGLRLWVLVGIAVGAAIVLVLLLIFVCLSHRRRRRGGDLLAANLYPAGDXSFSSSTSSTRPXTKDIQEIVRRQQAETPPPPAVQLAKAXRSRRRLLRRRRRSTGSRRGRRPAAAGANGTGXPRSTGSAGMPEVSHLGWGHWFTLRELEEATDGLTEENVIGEGGYGIVYKGTLHDSTLIAVKNLLNNRGQAEKEFKVEVEAIGRVRHKNLVRLLGYCVEGAYRMLVYEYVDNGNLDQWLHGDVGEVSPLTWDVRMNIMLGTAKGLAYLHEGLEPKVVHRDIKASNILLDQQWNARVSDFGLAKLLWSEKSYVTTRVMGTFGYVAPEYASTGMLNERSDVYSFGVLIMEIITGRSPVDYTRAAGEVNLVEWLKTMVAERKAEEVLDPKMAEKPSPKTLKRALLVALRCVDPDANKRPKMGHVIHMLEMDDLLFRDDKKPGRDVHPHGSDRYSSKEEGSISKREHHHHHHHRHR

SEQ ID NO: 259748 - protein, 150 aa, Zea mays
  unsure (1)..(150): unsure at all Xaa locations
  Clone ID: MRT4577_168509C.1.pep
VFPLPATRKPDIVGVLAPTDLACLPQDCRRSPPSPSRRAMPAVIPASARPTSTNLLCRCPPAHRHPSPAAATDDLPRPPQGGFCKRACRGSYRRARRGTRTRRRPRGCWRTSSPSRSTLGPPTRSFWPRNGGGDXAPSRPSAGGRTNEFH

SEQ ID NO: 259749 - protein, 306 aa, Zea mays
  Clone ID: MRT4577_16850C.1.pep
IWACFHLGPAFVRIRFVNLPERTKVTRPHPRETLAPNRDPLPHAVTTIPPRVTADLLPMTQKKRPRRRRSPREGPSRRRRGEEGASLSGSLVESDSSSTTSSAPPSGSFDKPAGRTSSAPPSGSLDEPPVAWPARQSRYHEILASRLVRLQLQAGVAIDSPNLPSDQIVQVLARSNFYDDELRAALVEYQVQKFLSVPHGPDVEDTYFGEESGDDITAEEFVKYSGQLKTRRPAEIDTETGLDQEQLDSLLAKYKRYRFKAYLLLLGKPVDELEEAALESKYPMELALENDFFYPCHHDSAFGLVF

SEQ ID NO: 259750 - protein, 290 aa, Zea mays
  unsure (1)..(290): unsure at all Xaa locations
  Clone ID: MRT4577_168510C.1.pep
RTRGRTRGPDANASVFYGRIKRLCETELGLVTQCCQPKNVFKGGRQYLQNLALKINVKVGGRNTVLEDALNRRIHLLTDLPTIIFGAXYKPSRIIFYRDGVSEGQFSQVLLYEVDAIRKACASLEEGYLPPITFIVVQKRHHTRLFPEDHHAHGQMDRSGNILPGTVVDTKICHPSEFDFYLCSHSGIQGTSRPAHYHVLFDENKFTADALQTLTYKLCYTYARCTRSVSIVPPAYYAHLAAFRARHYMDDDLSDQGSSSVASSRMKDGAVPVKQLPKVMESVKQFMFYC

SEQ ID NO: 259751 - protein, 241 aa, Zea mays
  unsure (1)..(241): unsure at all Xaa locations
  Clone ID: MRT4577_168511C.1.pep
MIRELLVSFYKANGSRKPSRIIFYRDGVSEGQFSQVLLYEVDAIRKXFLHNIILFCCNLLIELRLCLYXACASLEEGYLPPITFIVVQKRHHTRLFPEDHHAHGQMDRSGNILPGTXVVDTKICHPSEFDFYLCSHSGIQGKSRPAPYHVLFDENKFTADALQTLTYKLCYTYARCTRSVSIVPPAYYAHLAAFRARHYMDDDLSDQGSSSVASSRMKDGAVPVKQLPKVMESVKQFMFYC

SEQ ID NO: 259752 - protein, 75 aa, Zea mays
  unsure (1)..(75): unsure at all Xaa locations
  Clone ID: MRT4577_168512C.1.pep
HSVNLIPYPKIEEYAPYRQVVTDVDNDQDNQYPNDQLNIEKRARKLSDYLSPXYSNDEATRAVNNNALPTDLSLM

SEQ ID NO: 259753 - protein, 123 aa, Zea mays
  Clone ID: MRT4577_168513C.1.pep
TKRTPIDMKFYTHLSKYVSKISPKFELNLTCDSPADLKIQQKLGFCWGFLERVQTQFFSNIDQNLQQLGVCSGPRSATHHQSIPKPNPLKGINGFSPTTQEWGKGETKTIKLQKFQQGYKTEI

SEQ ID NO: 259754 - protein, 130 aa, Zea mays
  Clone ID: MRT4577_168514C.1.pep
VSIGSPIHPPSRCFHLPATSPGSPLLQRRPVLAAGTPASQCRVPNPLAAHLAPPFALAMFPALASKMLPQGRPLPYHGRALSRPSPEASLERLSILQTSLIAGVNPLARPSAGPCPAAQPFFVVATAGSV

SEQ ID NO: 259755 - protein, 97 aa, Zea mays
  Clone ID: MRT4577_168515C.1.pep
LLSHVYDHLALMMETLGKMPRKIASSGTRSKDYFDRYGDLKRVRRLKFWPLDRVLVERYSFSEPDAKGFADFLRPMLDFAPEDRPSAAQCLKHSWLN

SEQ ID NO: 259756 - protein, 51 aa, Zea mays
  Clone ID: MRT4577_168516C.1.pep
ISRKKKKKKKKKKKKKKKKKKKKKKKKKKKKKKKKKKKKKKKKLVPSRRSP

SEQ ID NO: 259757 - protein, 513 aa, Zea mays
  unsure (1)..(513): unsure at all Xaa locations
  Clone ID: MRT4577_168517C.1.pep
MAHGGLERSLSFKNWEADDSRGGINGARPGALALQQQESPRRVVSVSPQAQAMIEYISPRPRVELDQAATTLQKMYKGLRTRRSLADGAIIAEELWWKTVDSVYLNIKSISFFDEDKQETAASRWSRAGXKRIAKVGKGLSKDDKAQKLALQHWLEAIDPRHRYGHNLHLYYDIWSASSSCEPFFYWLDVGNGRDLHHHKCPRSKLNSQLIMYLGPNERAAYEVVVEEGRLVYRQSGDPVSTNEESKWIFVLSTSRSLYVGQKRKGKFQHSSFLSGAATSAAGRLVAKEGVLRAIWPYSGHYLPTEENFREFIAFLEDNNVDLANVKRCSVDDDEFPSFKKPAAGTEEKQQAAEEAAPVATEEEPRPVPELPAVDIVKEGTGTAADAEPPKTAMGRRPSFKWSTPTGARIGCLQNYPADVQSMALEQVNLSPRVAAVAPSPRLPIPSPRPSPRIRLSPGLHYMGCPTPTGASRLATPTPACRRSSPKQQQQQQHLMGFRAPAVALTLPKHKAK

SEQ ID NO: 259758 - protein, 148 aa, Zea mays
  Clone ID: MRT4577_168518C.1.pep
PGSGFLTRKKVSKAGGFSQVVSTALVLKLRGALEGLKKIRTPRGLGPYWGLRVRGQPPKTFGGGGKPVGVSKKRWAFFPPEKFWPPSRVGLCPPRPDEGFLFRPFPEMVFCFRPPPRFLTLNISGPWVGFFCPFLSNFLWVGLNFGLP

SEQ ID NO: 259759 - protein, 112 aa, Zea mays
  Clone ID: MRT4577_168519C.1.pep
PPFPPHKHQIQRQVFPEFGPCGRGKSEVLPPPRGPHVPSPKISPPPLDPPPWPHVHFSGFVPVAPEVKPMSRFLTKTPKSPPPGFCYGPAPRPVGFLGYVSVFFPPGMPPPL

SEQ ID NO: 259760 - protein, 61 aa, Zea mays
  Clone ID: MRT4577_16851C.1.pep
DQGFIIKYIGQKLMYVNNPYNMLGHYSFQRFGLSYSPIVEISTFAHTCHAFKQRLCSLTKG

SEQ ID NO: 259761 - protein, 322 aa, Zea mays
  Clone ID: MRT4577_168520C.1.pep
MEDVRHDMEVLQQANVVRPRLEEDGDSWCVYNDAREELPTDVEAADFDRFIIFGSCTGTHDDEPWILGLVDLIRLLHAAGKRIVDICFGHQREEELLAYWWREDPLVESDVSPNLYKVGEDQVRVPVKPGLHSYGGLWHATRQGRSHEEGYPISVGRAFLLRKMPGVPTGKLAAKLILCVIGLPGDSRSYWPRWRVLRLLGSVEAGSLPAPLSWPHAVTRARPTSSKHQLIENSLICGMDKYVGHYRNRVLCRVSKTLGKGYFTLGKGFAECNTRQRTLGKDFIGKGFFAECFFSDTRQRLCRVSKSTRQRKTLGKLRIENF

SEQ ID NO: 259762 - protein, 136 aa, Zea mays
  unsure (1)..(136): unsure at all Xaa locations
  Clone ID: MRT4577_168521C.1.pep
LLFLLPHQHQPPALLFLQTPPQFRRGGGRRQHPQTNRAAYSQQQQILAGSRRAAANSASYGRRRRLPSQPRPAAYPQQLLPFNQLAALDSPAYVQQXQLLPFSQLAGVSPATFVRHPQXVPFYQHAAPNAGTLLQL

SEQ ID NO: 259763 - protein, 223 aa, Zea mays
  Clone ID: MRT4577_168522C.1.pep
PDQLNFLFRSSGLRFSNLYCDPLIIPGGHKITARQRWQPTPMQLQILESIFDQGNGTPSKQKIKEITAELSQHGQISETNVYNWFQNRRARSKRKQAAASLPNNAESEAEADEEPLADKKPKSDRPPPPPPPIQDNTKATGALSADRVSGGTRHLDTGHDQTSGVMYGCNDSGLLRSSGSSGQMSLYENFMSNPRIDRFPAKVESSRSFPHLQQHGEGFGMFG

SEQ ID NO: 259764 - protein, 94 aa, Zea mays
  Clone ID: MRT4577_168523C.1.pep
TNNLTGNIMEAFKECKNLTELNLQGNHLHGEIPHYLSELPLVTVELAQNNFTGKLPEKLWESSTILEITLSYNQLTGPIPESIGRLTSLQRLQI

SEQ ID NO: 259765 - protein, 125 aa, Zea mays
  Clone ID: MRT4577_168524C.1.pep
TGPCILRTQCTMMHDSIDGLSYRHALLCLYAHSLYPPIDPNALITTQYCYTLYHSHEIMRVLTYIYSSTGDSNNSHTAKDNAIIKTHSCYTTVTKRVTNYKHILCCIVYIGVPRDDKCRKNYINR

SEQ ID NO: 259766 - protein, 85 aa, Zea mays
  unsure (1)..(85): unsure at all Xaa locations
  Clone ID: MRT4577_168525C.1.pep
CICSMTPDKDFVIDXRIDWLGGEFGEDMVVGAGFSGHGFKMGPAVGRLLAEMAIDGEARTAVEAGVELGHFKINRFNVQDQQVQG

SEQ ID NO: 259767 - protein, 48 aa, Zea mays
  Clone ID: MRT4577_168526C.1.pep
FSFFSPGLLFFFFFFFFFFLRAGVCPKNQSHTALYCSNNEQITVLRTR

SEQ ID NO: 259768 - protein, 157 aa, Zea mays
  Clone ID: MRT4577_168527C.1.pep
GGKWAPPPGGVKKPPGFRPGAVGFRGIPKSQKGFELFVPIFPFQPLVREFAQVFKLVLGFRSPPVGALQGPPEGSLVGLFGAPPLWPLPPGGVPFGPRALPLARGLRGEGAWAPVVRPVVVGFLKVNGGLRLGAPFPGGGNVLNVLAPGQWPVVAPF

SEQ ID NO: 259769 - protein, 111 aa, Zea mays
  Clone ID: MRT4577_168528C.1.pep
FEGAPILGCPFPPWKNPKGVLFKTMEPQSPLNKPGQIFSSVKKVVAQIFFGSPFFQNDCLDFLFPPVEKGHHSSLLLFLGHPCAMLLKVWPMFKKPKSQSQPQLPSLFLVE

SEQ ID NO: 259770 - protein, 66 aa, Zea mays
  Clone ID: MRT4577_168529C.1.pep
KPKNPGGALFFLIFQPFNFIGGPHTDGFRFLQLLKYSIHVALVVGFVPIQQETVQLRVVFLASCHK

SEQ ID NO: 259771 - protein, 145 aa, Zea mays
  unsure (1)..(145): unsure at all Xaa locations
  Clone ID: MRT4577_16852C.1.pep
VSHINTTVSNIGSQIFRLIMLLGPFASAXSETMLPAMXQAAITLLVSPNLVPSVASVCENPIVXPYMIQHAITTGISPLSSLMLQHSXNTYHXIPLVHLLAQNMKAQQLQQLELTKLAAYCQQQQVLSFNQLAALNTASYLQQPP

SEQ ID NO: 259772 - protein, 71 aa, Zea mays
  Clone ID: MRT4577_168530C.1.pep
LYASYEEKRPTKYADFDHPKLINSCLTFQASAMSELHTAGSFTYQPGPQSSAMDCICLPAFLTNGALVTLS

SEQ ID NO: 259773 - protein, 141 aa, Zea mays
  Clone ID: MRT4577_168531C.1.pep
LTLVRWIGGWRRLGRRLLLRLFWVRLLRLLVRVGLLSLVILRLVVLLLLLMLLLILFLLLLLLLLLVLIPILVSLLLVGRVRSVVVGMWWFGLVRSHPILTRAVGPGIVRRGGTHHHTYPYAYSDSSVSRTPTHPVIIPLM

SEQ ID NO: 259774 - protein, 99 aa, Zea mays
  unsure (1)..(99): unsure at all Xaa locations
  Clone ID: MRT4577_168532C.1.pep
MAPPSWQGHAAAVLSVPLLILVVAASTTAIGVNYGTKGDNLPPPATVASFLANRTRIDRVKLFDTNPDMVRAFAGRXIAVMVTAGNGDIPKLATKDGAA

SEQ ID NO: 259775 - protein, 99 aa, Zea mays
  Clone ID: MRT4577_168533C.1.pep
GLEQGRSKKAGMMYLAAAAAILCTIRENGGVCDKAGHLDTELDGRLECCSEQCRPHKGKWARPCPFPQYRQHRLSAALYFVNFICGSETPIYVITQYLI

SEQ ID NO: 259776 - protein, 53 aa, Zea mays
  unsure (1)..(53): unsure at all Xaa locations
  Clone ID: MRT4577_168534C.1.pep
MQVTGSMASLAKELLRLRTDGRLTEYGMHHLLAXHPRQKMALHRKTVESAGRS

SEQ ID NO: 259777 - protein, 92 aa, Zea mays
  Clone ID: MRT4577_168535C.1.pep
LTLGSRVRQNVASEVKNQTCPKYVNHCWIAPVAFLLQRNIVYLVNITDCADGRVGLGVKYLYNNFTISVQGEYVVLDQNIVYNVHDYVLLAL

SEQ ID NO: 259778 - protein, 271 aa, Zea mays
  unsure (1)..(271): unsure at all Xaa locations
  Clone ID: MRT4577_168536C.1.pep
KLEWDMIPELSIAVRFAESRLADLIGQNEFECLDFGAYGKNFMTSMGFSPDAFVQMAFQAAYYGLYGRVECTYEPAMTKVFLHGRTEAIRSVSEESVNFVQTFWADNQAEHKVEALRRACQRHTNTTRECAKAEGCDRHLYALYSLWQRLTDDELSSTTTGMDSNSYGSPYGSDRAFSPPPRVGSPGTDGDNSTMRARGDSSSSRHNSQQHMPSIFMDAGWDRLXNTILSTXNCGNPSLRQFGFGPVSADGFGIGYIIKDDGISIXCVSSK

SEQ ID NO: 259779 - protein, 78 aa, Zea mays
  Clone ID: MRT4577_168537C.1.pep
KELKACHSPTQQNITQCLKPLLLLFEALLFLKLGEPWVSAANCLEFSGASSIPPRCCLDPSRAASKNKALVLCEDGRP

SEQ ID NO: 259780 - protein, 152 aa, Zea mays
  unsure (1)..(152): unsure at all Xaa locations
  Clone ID: MRT4577_168538C.1.pep
CATRSMGLSSTVFVGKAVNSVXSSYFGDAXVTMHKTAAKVNAVGECGRPRLGPHRVLXLGPLSGQPPCYLPRELPGDYGWDTGXLAEDPETFANNREVDAIHSRWAMVGADGCVFPQVVDRDGLQVGEAEGDNDGSQIFTEGLLDYPVQANV

SEQ ID NO: 259781 - protein, 92 aa, Zea mays
  Clone ID: MRT4577_168539C.1.pep
RGGKKKRGGYKLKKLKIKGRQFSKWGPFLRVPGFRFLSLGGQKLIWGGPFLNSVAIVLHRGGLGIFLGGPKLKLFGAGFILAGGGNPGGSPP

SEQ ID NO: 259782 - protein, 64 aa, Zea mays
  Clone ID: MRT4577_16853C.1.pep
NILTLFVLMFDVLLFLSTSCLFVCIATSSGEVTSHLKTKLVPGNHESKASCALDHSFLPNNVCC

SEQ ID NO: 259783 - protein, 65 aa, Zea mays
  Clone ID: MRT4577_168540C.1.pep
GRFQVHRCCAGWCEHRSPCSLRNPASGVCKHDFIDEHQHACSTSWTGIAPPLSSSSCSQANASRS

SEQ ID NO: 259784 - protein, 235 aa, Zea mays
  unsure (1)..(235): unsure at all Xaa locations
  Clone ID: MRT4577_168541C.1.pep
MGSTDETGTPYGEYTYAELERELYWPSEKLRISVTGAGGFIGSHIARRLKSEGHYIIASDWKKNEHMTEDMFCHEFHLADLRVMDNCLKVTTNVDHVFNLAADMGGMGFIQSNHSVIMYNNTMISFNMLEAGRINGVKRFFYASSACIYPEFKQLETNVSLKEADAWPAEPQDAYGLEKLATEELCKHYTKDFDIECRIGRFHXIYGPFGTWKGXREKAXAAFCRKXQTSTEQFE

SEQ ID NO: 259785 - protein, 60 aa, Zea mays
  Clone ID: MRT4577_168542C.1.pep
YPRATMGNLAGSKMPNRAQCIFKRDCPMNTGQSLCYQQKQGANGHQGTFSTKPEEMPKFY

SEQ ID NO: 259786 - protein, 133 aa, Zea mays
  Clone ID: MRT4577_168543C.1.pep
KQLYDSYVLFRIHSSNMGELKSRRMYIKRTKKCANVFKHMINEPPKNLDLLKRLFHDEDQGTPLIIPATPVVRATVVIHARVVVPATVVSVILVTFLYFMDRVCMYILPHLGTNVDIRIVRTSLIIFLNYICV

SEQ ID NO: 259787 - protein, 262 aa, Zea mays
  Clone ID: MRT4577_168544C.1.pep
MVFTIDLSGKTIVVSGGNRGIGLAMSEACANAGANVAILFHSHPKAHEAAENVAKQFNVKCKAYQCDVGDAKLVKDTVAQIEGDLGTPIHGLCANAGVSVVKPALELTTEDFHKVFNANVLGAFNTCQALAQHWVEKGYKTGSIVITSSMSSSLYNQKGLNDPLTQIFYNASKGAVTNMVKGLATEWVKHGIRVNALEPGFCETEQTSGMDPKIREWQAASVPMGRFSQPHEQADPAILLLSDKASYITGTQLRPDGGFSAY

SEQ ID NO: 259788 - protein, 516 aa, Zea mays
  unsure (1)..(516): unsure at all Xaa locations
  Clone ID: MRT4577_168545C.1.pep
MLFTPIAELDLKSTNAAIRVRIIRKWEFRGATNDGPLRHVNLILADEQGTAIHAEIQAPLVADKGSLIQIDKVYELKRFRVTPSRNYYKPVDNSMMIQFTLYTQAKLVQDPPPTFPRYAYKLTSFENIGNNVDNKTYLIDVLGILTEIGSXTMLVTTTQISSETYFSKTXNNTSTKVTLWGHQASSFSVDNNCDENDNKPVVVLFVGCLAKRFKGEAYLSATAACTWYFNPDIPEAQVYYSKLLNTKLQMIRPQATEQEFQASQTLNIEDRTIEQLLQLDPDMFPEQGFKCTVTISRLVQDGRWWFPSCIKCNKSSSQTSTGYQCTTCNGTETEFRYKLSFIATDGTSEAEFFCFDTIAKRIVGKSCQTLFSTSDVSRGPPPDLAAIVSLKFTFAVTINMSAFSVTNRVFSILSVLTNHGRQASIPYATQNLSQQQMLTQDNTLDVKTTQESPATSFAKLSTSTKQENVPRRRLTYSEMLQDTNVDEQVSAELNKDSLASPPKKIKSAQLGSTSTI

SEQ ID NO: 259789 - protein, 145 aa, Zea mays
  unsure (1)..(145): unsure at all Xaa locations
  Clone ID: MRT4577_168546C.1.pep
YFGMGYKTCPNKSKQGCFAKQRHAIFSALHCFSHGSQMPTAEYTSQLPGHVDEGDQGVNATQWLHNEPVLVTVSGDGSVGMWDVTLGQPCVRHIVAHTRCANAVAAAPNDXYLCTGGSDQKVGLYHNRSGATHLNWASFTSLCRK

SEQ ID NO: 259790 - protein, 91 aa, Zea mays
  Clone ID: MRT4577_168547C.1.pep
PSHPLDLAFSLPPCPAFCLRPRRHARVSPLIAVPHGTVVLSIRPPVHCLAVFVPAICVTRVSPREGGRARGRDGGDGGRPGCRGGPRGGGC

SEQ ID NO: 259791 - protein, 569 aa, Zea mays
  unsure (1)..(569): unsure at all Xaa locations
  Clone ID: MRT4577_168548C.1.pep
MGSLSSMAEKAPGAALPESSCAYLLQELKMIWDEVGQEQSERERILEELEQECQEVYRRKVNSANMSRIQLHQALAESEAEFTNLLLSLGERSFPARPEKMAGTLKEQLNSITPFLREMQMRKDARVKQIVEFQTEAYGIAPVIAXRTPXDDAMXKRTLAQXSRAFREIPEAVQSLMKIKQKTSQRSKXKVTSHIPTLPSPLTVTSTGSLCSTLCGIYPLITLVNMTWHLTCVFCSRHLTSMAKAMXRRPKKSHVSASQNILALIYWDKSXVSHTKVLFDVLEAEKXATVAXETDVTSQLDPTDKWLIAEQVRMSNKPIVPSPEXSNESVASRVDFKGSNVXHLQRKIXDSGESISHNWTTAXTMDEYIYRAKEEATSRKDIMDKDDRRYSVSRGAHKHLKRAERARIIVSKIPGLVEQLMVKTQFWEQERNKIFYYDELPLLAMLKDYMFTLKEKEEEKYRQRENKKIQTLLVKRHENSIMLRPNTSFSRPSSRGFNTSPGSTSIWSSQVSAKVQLPDSENSPAEKDMRAKIIRNRGMQGILGNNRSCSISHEDKAEVSTVKQDISPI

SEQ ID NO: 259792 - protein, 70 aa, Zea mays
  Clone ID: MRT4577_168549C.1.pep
TRKKSLHDNVSLSFNHLGPFGRAYFSASALAHAKVVPNTSFSNGFTSDVLFQNELEGMSQKKVAHPASAH

SEQ ID NO: 259793 - protein, 132 aa, Zea mays
  unsure (1)..(132): unsure at all Xaa locations
  Clone ID: MRT4577_16854C.1.pep
MCIRPEQPRKTPAYVAFPRPPSRVAIDHIPTRRYLRTRCASWNIAPIPRADCTLKAPTTRSRTRQRITLNCRGHTTNPYYHRLTICEATYPIRGAGKDAPPATMTESACIGTSGSTAMXITAKVPYDVLFSL

SEQ ID NO: 259794 - protein, 72 aa, Zea mays
  Clone ID: MRT4577_168550C.1.pep
TTPIRTRSPTRPTSRIYKTRPTTTSRPLTTPTTTSRSLTIPTTVRVHSASTIIRSRRLRAVVIRTKIRRMRS

SEQ ID NO: 259795 - protein, 72 aa, Zea mays
  Clone ID: MRT4577_168551C.1.pep
AWGQSCLHKRSSPGQGTFAMGAPFDYGENGRLPLPKKGLSILLICLEKRFKKPFFKQLPMMIPFFIWLSLCY

SEQ ID NO: 259796 - protein, 126 aa, Zea mays
  Clone ID: MRT4577_168552C.1.pep
PSVRPSDPLYTVYVATKAYVDQFSRCLYVEYKSKGIDVQCQVPIQVATKLASIRKPTFLAPSPETYARAAVRYIGYEPRCTPYWGHALVWLLISLVPEPIADRMFLNRSVTIRAKGRAKEAKKKAQ

SEQ ID NO: 259797 - protein, 47 aa, Zea mays
  Clone ID: MRT4577_168553C.1.pep
FIIVICRVVIDHQVVKYIEYMCKIRSGIWYYVLSQGLFKIIYIAFVV

SEQ ID NO: 259798 - protein, 55 aa, Zea mays
  Clone ID: MRT4577_168554C.1.pep
PFLARLCLSSLEPRAPSQPWCSSVCSSPQPRSLLLLAHAQLSSYLVSMAMRSLSS

SEQ ID NO: 259799 - protein, 74 aa, Zea mays
  Clone ID: MRT4577_168555C.1.pep
PTRPLTPSGFDPYTACDLKVKDLKNGRLAMFSMFGLFVQAILTGKGPIENLFDHVADPVCNNSWAYATNFVPCN

SEQ ID NO: 259800 - protein, 90 aa, Zea mays
  Clone ID: MRT4577_168556C.1.pep
LFLRSTRGSGRLASRQGGGRRCWTYRSGACGCCSSSRPSSRSASPVSFPVAESFPSCAISRVSFRRRSVGTVFSSLYCWGMIFFLCETQI

SEQ ID NO: 259801 - protein, 277 aa, Zea mays
  Clone ID: MRT4577_168557C.1.pep
MLGHLHQSLVILLPCDIPNTNLRTLLNPHHQSGTEVIVDDMEGTTANKTMISARKPRVMLYSSPLMGHLVPMIELAKLFAARGLAITVVLMDPPYDTGATGPFLAGVSAANPSISFHRLQQVKLLESDDSVMPALAFARLSNPHLRDFLAGASPDFLVVDFFCSAAMDVAAELDIPAYFFSTSGAQILAFFMHLTVLHGKSTRSFREMGEELVHVPGITPFPATHSIQPLMDRDGASYQALLNVSLDLFRSQGIFINTFRSLEPRAMDPILAGLSAP

SEQ ID NO: 259802 - protein, 167 aa, Zea mays
  unsure (1)..(167): unsure at all Xaa locations
  Clone ID: MRT4577_168558C.1.pep
MGHAENPILYSCRIHHAISAGGLTFXPLVLQQLLGLLQQVPWVGLLAQNIRGHQLQQLGLANLAAYCAEQQCLPFHPLSALDCASYLLHAHLPFSQPPVVFPRHFFLFGALAALGSPAYFLLPLLLPFXSRLAGVGPATFLSRPLALGFSLPRCAFRWPPCLTAPVG

SEQ ID NO: 259803 - protein, 83 aa, Zea mays
  Clone ID: MRT4577_168559C.1.pep
RQKLNLSAGGPSEDLACQLMSADRRCARCFDSTIVGPHLETRWKMDIGPSRHHIAYLDETPMANQQSLCLKATVRCENTRSFF

SEQ ID NO: 259804 - protein, 128 aa, Zea mays
  Clone ID: MRT4577_16855C.1.pep
MIREGKRAVSRELTRILEFVDKVLIKEHQQMVMGDALETHEYHDGCNATFVAARPSVSKKVSFSGNDQVRTLNGKIENRNEVDEGSEGSSSAESDELKPNKRGAYGKPGLAAPMPVHMESRPVAGERR

SEQ ID NO: 259805 - protein, 102 aa, Zea mays
  Clone ID: MRT4577_168560C.1.pep
LAVFGIIWYGKAFSKPGGKKGGRVLPLRFASFKGSLEKKGGAEKYFFFFLFPTLTGGFPFQGLIFGEVTLSSPYWGLLPNFLRKEQTCFLLKPRIFFVSGIL

SEQ ID NO: 259806 - protein, 47 aa, Zea mays
  Clone ID: MRT4577_168561C.1.pep
HTSWSADHALVSLFGRLLFWVLVLALVTAILRFVRLSLVELSGWELR

SEQ ID NO: 259807 - protein, 52 aa, Zea mays
  Clone ID: MRT4577_168562C.1.pep
HDSKRAFVRWYVVEGMEQGQFSQARQHLPALEKDYKQVGAKYDEAQHGGKGA

SEQ ID NO: 259808 - protein, 59 aa, Zea mays
  Clone ID: MRT4577_168563C.1.pep
CMHGLLRPPLPLAKEADVETIPFAIPTLARVRVLPWAKANINPAGQGHNAYKLGGIDYI

SEQ ID NO: 259809 - protein, 91 aa, Zea mays
  Clone ID: MRT4577_168564C.1.pep
NGGAELFPPVRRNSLEEAVQFFLSGGLPGIVFKAPGVFRPPPPVPKIKEAYLSLFTFGTFNPVPEAVFLPPPLGVNRVLLPLGPGIPQAVF

SEQ ID NO: 259810 - protein, 66 aa, Zea mays
  Clone ID: MRT4577_168565C.1.pep
VRIQVSNGGLFFPPAPTPVRGFAPQGPVPLVKPARPTPRGGPPQSSLPKGGGVESFADALKPPGAF

SEQ ID NO: 259811 - protein, 101 aa, Zea mays
  Clone ID: MRT4577_168566C.1.pep
SLVKLHSMAREKIPKGLELPSYMLPLFTTTISDFSLRSRSMTCSTVVEVGTRRGASSLVQSRYNHHGEQYQHNLPNHRQQELSRHLSRIISQPSLWKYAGP

SEQ ID NO: 259812 - protein, 35 aa, Zea mays
  Clone ID: MRT4577_168567C.1.pep
MIQASELHHGITVYLPVERERQINRWQFCSSRKQR

SEQ ID NO: 259813 - protein, 124 aa, Zea mays
  Clone ID: MRT4577_168568C.1.pep
NRGRPRFARAIIPPRGGCTNSHSPTTTTPAAWLGRAPAWVCCCASDAVCVSPSLFFFGGRRGSGGAKRGLGGATGRRRPAGLGMRGVTHAGPTAGAPRPRGRLVGGLLMWGLCLWVASRAGRDH

SEQ ID NO: 259814 - protein, 60 aa, Zea mays
  Clone ID: MRT4577_168569C.1.pep
TGGGKKKKTENYCALTFFQTPKGHSEAPPSLLGDKQRVFGPTGEPYLFPYANRKVPHPGP

SEQ ID NO: 259815 - protein, 92 aa, Zea mays
  Clone ID: MRT4577_16856C.1.pep
SATAGAGAGAEPAKSVKAEASGSPASSLSPATTTTPASTVTTCSPSSDAGAGHEMFPVTPSSWTWEQLEGVFGILSPLSPHPQLGFPEVTVN

SEQ ID NO: 259816 - protein, 196 aa, Zea mays
  Clone ID: MRT4577_168570C.1.pep
MHAPPLVAFAGGACPASAASSLSPWLASLRPAIVAAPARLLWFRRGALRLEAKAAWRATGGGRGPRVPAKGAVLASYMGAEEVVGPLSLLDEEELILHIRKERDNGKLPADVAINLEELYYNYRNAVLQNGDPNAYEIMLSNMTALFDRVLLDVQNPFTFPPYHKAVREPFDYYMFGQNYIRPLVDFRNSYVGNIS

SEQ ID NO: 259817 - protein, 153 aa, Zea mays
  Clone ID: MRT4577_168571C.1.pep
EFGLAQIMTTPQTSLPQLVGYRAPEVLETKKTIQKSDVYSFGVLLLEMLTGKAPLRSPGRKDSVEHLPKWVRSVVREEWTAEVFDVDLLRHPNVEDEMVQMLQIAMACVAADPEQRPRMDEVIRRITEIRNSYSSSSGTRTPLEDRPETAQAP

SEQ ID NO: 259818 - protein, 201 aa, Zea mays
  Clone ID: MRT4577_168572C.1.pep
MAMEDDASKISDWEVLSATSSRGGGDDDEVLTVSGGGGDVVLLDHFVLTPDPAASCPGDGEGLWSDDRGAWQGLELLDGFDPIPEASFDLAVGVRSQQLLISAVDDAREEGSIVQATVARGATRSAEGNQEDVVEVEIEQESSSVISRGALCPVLQVAARHGVEETLDSEAVTPTGASLQSQVSESSLVQLDDGGNGAGVK

SEQ ID NO: 259819 - protein, 62 aa, Zea mays
  Clone ID: MRT4577_168573C.1.pep
IQCSICSIDGLSNHTTLISSHGYINKHRYFRSYKLLIMLRCISKTWQYIKLKNLRRVPGRVV

SEQ ID NO: 259820 - protein, 55 aa, Zea mays
  Clone ID: MRT4577_168574C.1.pep
GNQRCYVYLSDRGKPFFLTHSFSLGETSYVINVFSNVAFYLKFKSIANIPFPYMI

SEQ ID NO: 259821 - protein, 172 aa, Zea mays
  unsure (1)..(172): unsure at all Xaa locations
  Clone ID: MRT4577_168575C.1.pep
GPEFLGRPKSPPKVVDALREEHDAIAKNRKGPDAPVTWAEYRSMTFTNQVIMEMVRLANIVPGIFRKALQDVEIKGYTIPAGWGVMVCPPAVHLNPDIYEDPLAFNPWRWQGKPEITGGTKHFMAFGGGLRFCVGTDLSRVLXLATFIHSWVTKYXSWRTVKGGNIVRTPGL

SEQ ID NO: 259822 - protein, 97 aa, Zea mays
  Clone ID: MRT4577_168576C.1.pep
MFSVASGQPPSPDPPPAPPPANASLPLAARMTEAPFLPRERLFKLQHHFQNMTKHTYLKGRYDVITSVAIPLALAASSMFMIGRGVYNMSHGIGKKE

SEQ ID NO: 259823 - protein, 223 aa, Zea mays
  Clone ID: MRT4577_168577C.1.pep
MEVAAVPRSAAACRAAPLLPAVRAAACHLALPRRAFSASVAAAPAPRRLAARRAADGDSVETAPEAVPIEKRFPPFPSVMDINQIREILPHRFPFLLVDRVIEYKAGEYAVGIKNVTINDNFFPGHFPERPIMPGVLMVEAMAQVGGLVMLQPEVGGSRDNFFFAGIDKVRFRKPVIAGDTLIMRMTLTKYQKRFGLAKMEGKAYVGGDLVCEGEFLLVSATE

SEQ ID NO: 259824 - protein, 86 aa, Zea mays
  Clone ID: MRT4577_168578C.1.pep
RYGELGGGIVTSDQDAGLGVEVSDGLWLAMGCEDYPEVLYSSSLECEVTPQPLWPWQAPFGLGCHCLGRVKGAWRSMGVEVLSAKR

SEQ ID NO: 259825 - protein, 50 aa, Zea mays
  unsure (1)..(50): unsure at all Xaa locations
  Clone ID: MRT4577_168579C.1.pep
HGTSRSHCCIXLGXKDHRDPGTARYGIHRNYPLCALYVITCNMDLRHDLD

SEQ ID NO: 259826 - protein, 173 aa, Zea mays
  Clone ID: MRT4577_16857C.1.pep
MGKEFELIDSILLDSMSTTSSNMDGTATPTHTVMSETLLDYTESVPYPGAHFIIRQRDTGKVITLIAGELQLAEGLNPKGGYHWECIEKNRWLGFRNCVSGTIIGHNNNKKFVARAEKHQSYEYITLRPNPHGGYELMTKHNHDELWSMNVADDGQQLVETKGQGALWDFLKV

SEQ ID NO: 259827 - protein, 50 aa, Zea mays
  Clone ID: MRT4577_168580C.1.pep
LSGGVILTLEALNTSHNPINQHPLPTYHSMPINMTSSSHSSHNLYIGLHH

SEQ ID NO: 259828 - protein, 55 aa, Zea mays
  unsure (1)..(55): unsure at all Xaa locations
  Clone ID: MRT4577_168581C.1.pep
GVRXPPWGRTGGXTKXXARKARVWLGTFDTAEAAARAYXAAALHFRGPKAXKTNF

SEQ ID NO: 259829 - protein, 61 aa, Zea mays
  Clone ID: MRT4577_168582C.1.pep
MRQPKFIMQASTYTRSALLNFSRYTTTFLSYYIRFNSTSKKLMRHPNLYPPIYIRFSTQHS

SEQ ID NO: 259830 - protein, 96 aa, Zea mays
  Clone ID: MRT4577_168583C.1.pep
KTPPGRVGHPWPDHFYPLHVALGPPGGGAKGEQIPQCWANAPLSYGSYRFPPKNLRARATVGWRTTAPLAPRGQLLNLWEAHPSTWVAAFIYPPRM

SEQ ID NO: 259831 - protein, 130 aa, Zea mays
  unsure (1)..(130): unsure at all Xaa locations
  Clone ID: MRT4577_168584C.1.pep
MSRAKMMECICHRTSEMAVLSATTGADACYCIEGVSKNDDQINPKKIIRRDDELSCNYITDSGTPRDVTCEKLCHIECVVICPVCKTYXICDFYPEELCRELHYAVNNFNSFHYHSKKDMDLCFVSHIDL

SEQ ID NO: 259832 - protein, 72 aa, Zea mays
  Clone ID: MRT4577_168585C.1.pep
NGFSRPTWFFPVVWGRLPFHQGRPLTGLSRAGVGLVLNLAACPSDLPDFPHGWTLGPPVVFSKTPGLTGPVM

SEQ ID NO: 259833 - protein, 77 aa, Zea mays
  unsure (1)..(77): unsure at all Xaa locations
  Clone ID: MRT4577_168586C.1.pep
KPGLEWDXRQPKKPNFTAGHWKRNVTLPRLKTCFEKFCFWESILWPWGKKSKSNSTTTGNSPVPAAKTTPVASLLSS

SEQ ID NO: 259834 - protein, 47 aa, Zea mays
  Clone ID: MRT4577_168587C.1.pep
LGQHSLYPRHWYIQRRGATHIRRFTLCSPVSLQLQSRHRFMWIKNNV

SEQ ID NO: 259835 - protein, 217 aa, Zea mays
  unsure (1)..(217): unsure at all Xaa locations
  Clone ID: MRT4577_168588C.1.pep
MEAKSAAAEVLRKTDAGGDNERYRHGELGREAVEEEEVKPRRVADAPLPERKRKRAADPEDDGSVSDSGSGSEGPPQQQVKPCLSPVPPLQRLLSACRALLTGSSSPPTPSAVALIRGIMDKIGPDDVGLRDEIRFFNKMNAAGLQNPPIVTCKPIYEXQLXRSRVFFLPXEAVMPLHDHPXMTVFTKVLIGSARLEAYDWGPSPVSWPAAARASVA

SEQ ID NO: 259836 - protein, 79 aa, Zea mays
  Clone ID: MRT4577_168589C.1.pep
LNNHSPSSPCRVSAVSTAQRTPRLEFVSARAPARRTCGKPAEARETAAGGSGVRPCARQSGRTGGIGTRKQRGPKGCGR

SEQ ID NO: 259837 - protein, 213 aa, Zea mays
  Clone ID: MRT4577_16858C.1.pep
QLRRRDESPKLPLPSPRASGSLTRSGSGSLEGGAVALFDMEFSNGEFTESEKKKIMANERLAEIALTDPKRVKRILANRQSAARSKERKMRYIQELEHKVQVLQTEATTLSAQLTMLQRDSAGLATQNNELKIRLQAMEQQAQLRDALNEALTGEVQRLKLATGEMTDGPMPKGLQQQMNSQMLQLQQLQIQQQAPPQQTQQQGQRQQPQKSA

SEQ ID NO: 259838 - protein, 73 aa, Zea mays
  unsure (1)..(73): unsure at all Xaa locations
  Clone ID: MRT4577_168590C.1.pep
NHFSEMSQRPVKNKFFRLLQMLPLFNFEGGSEIXDFWGGNAGHFRWLFTPAKVRRVFGLRIYFRPEAIAAFRL

SEQ ID NO: 259839 - protein, 236 aa, Zea mays
  Clone ID: MRT4577_168591C.1.pep
PAGLVVTRVTKKYKQAVAGVARNNGDEPRPLHRVAVEEARQLQAVIHPFAELVAYELLFSIPLIVCTLNGTASIIAFEIYVIYIDFMNNMGHCNFELVPNWLFKWFPPLKYLMYTPSFHSLHHTQFRTNYSLFMPFYDYIYNTMDKSSDTLYEKSLKGKEETADVVHLTHLTSLHSIYHMRPGFAEYASRPYTAKWYVRMMWPMSWLSMVLTWSYGSSFTGERNVMKKLKMQSWVI

SEQ ID NO: 259840 - protein, 108 aa, Zea mays
  Clone ID: MRT4577_168592C.1.pep
EKELPPGRLAILGFLGFLIQPNVPGKGPFYNLFQPLFFPWANPFFQTFSGLVQVQEENHPSLVSLFGLEDHPLTPKFPFGPGWGGLSFWGGPIRAVFPCLPGFKGARA

SEQ ID NO: 259841 - protein, 619 aa, Zea mays
  Clone ID: MRT4577_168593C.1.pep
MATNPGLFTEWPWKKLGNFKYLLLAPWVAHGGYLAATKGWRAADLGYVAILPSLLLRALHNQAWITASRLQSARGRRQVVDRGIEFEQVDRERNWDDQILLSGILLYLGSTYLPGGQHLPLWRADGAALIALLHAGPVELVYYWLHRALHHHFLYSRYHSHHHASIVTEPITSVIHPFAELVAYELLFSIPLIVCTLNGTASIIAFEIYVIYIDFMNNMGHCNFELVPNWLFKWFPPLKYLMYTPSFHSLHHTQFRTNYSLFMPFYDYIYNTMDKSSDTLYEKSLKGKEETADVVHLTHLTSLHSIYHMRPGFAEYASRPYTAKWYVRMMWPMSWLSMVLTWSYGSSFTVERNVMKKLKMQSWVIPRYSFHYGLSWEKEAINSLVEKAICEADKKGAKVVTLGLLNQAHNLNRNGELYLQKCPKLGVRLVDGTSLAAAVVVNSVPQGTDQVVLAGNISKVARAVAAALCRKNIKVVMTNKQDYHFLKPNMAEDAAENLLFSKTTTAKVWLIGDGLDASEQFKAQKGTQFIPYSQFPPRMARKDTCTYSTTPAMVVPKTLQNVHSCENWLPRRVMSAWRIAGMVHALEGWNEHECGDIVLDMEKMWSGALLHGFRPVAQV

SEQ ID NO: 259842 - protein, 96 aa, Zea mays
  unsure (1)..(96): unsure at all Xaa locations
  Clone ID: MRT4577_168594C.1.pep
MNDVGIEMNNSQTWKDDSTVDIETLVTSVSAAVNSIRGKINNLLDSTSHITPNRGRSRRRGXSSIIISRYEDDLPSSSCSDCNTSVCGPVPRRDQE

SEQ ID NO: 259843 - protein, 138 aa, Zea mays
  Clone ID: MRT4577_168595C.1.pep
MDASHSPSPRRLPQRAAASTATAIGLSRGRPGLLSDNPTPAQAQTAMIPTAQPLVATASQYGRLPGGDVSLTGMSYMRVGDRRQASNLTTSSPGPATAAVTQQHLQYHHGYYYHVSGGEQGNNSPDGAAIQALPFSSW

SEQ ID NO: 259844 - protein, 75 aa, Zea mays
  Clone ID: MRT4577_168596C.1.pep
TGAALYVFDYGRFLGELVNSTLCRCSAGEARKIGVLLLELVHPPGFHVLKFSRYRLRVLLPSPAQPQAHKSAQRS

SEQ ID NO: 259845 - protein, 56 aa, Zea mays
  unsure (1)..(56): unsure at all Xaa locations
  Clone ID: MRT4577_168597C.1.pep
NRSNINSHCVVETQPRIIELCAEQTSXFLAMKAREQRSLIYLQDADIELCADPLAS

SEQ ID NO: 259846 - protein, 108 aa, Zea mays
  unsure (1)..(108): unsure at all Xaa locations
  Clone ID: MRT4577_168598C.1.pep
VINPPPFDSKADVFSFAIVFWELITSKXPYYTMTPFQTAVGFKQGLRPGLPKKTPPKLLDFIQKCWETDPSDRPAFLDILTELEDFLAQAQGTSGKTVQDPSNLNAKN

SEQ ID NO: 259847 - protein, 70 aa, Zea mays
  Clone ID: MRT4577_168599C.1.pep
SQQGRHHRRGYILTCVERPNRNDDILKDFCLKHNIKYLYDITELINTRANTDYTVVSHISLAQESESPPS

SEQ ID NO: 259848 - protein, 130 aa, Zea mays
  unsure (1)..(130): unsure at all Xaa locations
  Clone ID: MRT4577_16859C.1.pep
CIAPSSPPTQVLMRDIEWENYMELTLSAKRVLSSNRDYDHKXRASELYLVEEDGPAYIRALLNILQSIYREETXEYALVLIGEMLATNPRLALLQYDQRLPHEDIHEALLKVAXKGNWFGPERSRNILTV

SEQ ID NO: 259849 - protein, 118 aa, Zea mays
  Clone ID: MRT4577_1685C.1.pep
SSSRARVGAQAIRAAASSIYQASLEYGAASSKSPSSRATAEHRAPPSSRAAAERRVFSDKAEKLVAEAAGYGSQLVLFPEVFVGGYPHGSTFGLVVGNRTAKGKEDFQKYHASAIDVP

SEQ ID NO: 259850 - protein, 51 aa, Zea mays
  Clone ID: MRT4577_168600C.1.pep
FIVKKTNSNYSQIFKALKTFTQISIFSYRNKIIVLAQKFSVHIPPPCCVPY

SEQ ID NO: 259851 - protein, 65 aa, Zea mays
  Clone ID: MRT4577_168601C.1.pep
RNLGGTKLPDHITHKLYEVACTLRALGTLTYRRPFSPTRINTMHTLGFHIRASLYSIKPHSHSAT

SEQ ID NO: 259852 - protein, 63 aa, Zea mays
  Clone ID: MRT4577_168602C.1.pep
QTSKDPLHKIQTSETLLQDNRTRSLYQDLAPSTSPYPVSQLYASLKPINQSQRTLILKFTISS

SEQ ID NO: 259853 - protein, 55 aa, Zea mays
  Clone ID: MRT4577_168603C.1.pep
QHHHRLIQSKAADDGEAIRGRLAWWLLVSEPQRAGVLEYGDEVAGDVRGHEPVEA

SEQ ID NO: 259854 - protein, 309 aa, Zea mays
  unsure (1)..(309): unsure at all Xaa locations
  Clone ID: MRT4577_168604C.1.pep
MATIPTTXLASSSVXALLRRTRRAASSVTARLPAVARRRPQLLVRASAKEIAFDQGSRAALQAGVEKLAAAVGVTLGPRGRNVVLDEFGTPKVVNDGVTIARAIELADPMENAGASLIREVASKTNDSAGDGTTTASVLAREIIKLGMLSITSGANPVSVKKGIDKTVQKLVEELEKKSRPVKGSGDIKAVAAISAGNDEFVGTMIAEAIDKVGPDGVLSIESSSSFETTVEVEEGMELDRGYISPQFVTNLEKSIVEFENARILVTDQKISSIKEIIPLLEQTTQLRAPLLIIAEDVSGEALATLVIN

SEQ ID NO: 259855 - protein, 583 aa, Zea mays
  unsure (1)..(583): unsure at all Xaa locations
  Clone ID: MRT4577_168605C.1.pep
MATIPTTXLASSSVXALLRRTRRAASSVTARLPAVARRRPQLLVRASAKEIAFDQGSRAALQAGVEKLAAAVGVTLGPRGRNVVLDEFGTPKVVNDGVTIARAIELADPMENAGASLIREVASKTNDSAGDGTTTASVLAREIIKLGMLSITSGANPVSVKKGIDKTVQKLVEELEKKSRPVKGSGDIKAVAAISAGNDEFVGTMIAEAIDKVGPDGVLSIESSSSFETTVEVEEGMELDRGYISPQFVTNLEKSIVEFENARILVTDQKISSIKEIIPLLEQTTQLRAPLLIIAEDVSGEALATLVINKLRGILNVAAIKAPGFGERRKALLQDIAIVTGAEYQSKDLGLLVEDTTVEQLGIARKVTISSSSTTIIADAASKDDIQARIAQLKRELSQTDSTYDSEKLAERIAKLSGGVAVVKVGASTEAELEDRKLRIEDAKNATFAAIEEGIVPGGGAAYVHLSTFVPAIKETLDDPEERLGADIIQKALVAPAALIAHNAGVEGEVIVDKIRESEWEFGYNAMADKHENLVEAGVIDPAKVTRCALQNAASVAGMVLTTQAIVVEKPKKAPAAAAAAAP

SEQ ID NO: 259856 - protein, 86 aa, Zea mays
  Clone ID: MRT4577_168606C.1.pep
QPASTANIPEVEVITEAPSGFQTPVEINLDISDAIADTTDGNTGTDELVKAEGVIHPENKESFLEDTSTTEPLEEVANVEDQHNQQ

SEQ ID NO: 259857 - protein, 1078 aa, Zea mays
  unsure (1)..(1078): unsure at all Xaa locations
  Clone ID: MRT4577_168607C.1.pep
CPHHNLDQDIAARDARIQTGVQLVGVDCAALADHLRAATWPPKFRPHLLEKYDGTTNLSEFLQVYVTAITAAGGNTAVMASYFHVALTRPTXTWLMNLTPASIYSWXKLCSRFTANFASVYQQHGMEAHLHVVRQEPGETLRAFISRFTMVRGTIPRISNASIITAFRQGVRDKKMLEKLAMHDVEIVTTLFTLADKCARAAEGCAWHSASQTGVTQMGGSVAVAATGGRDERDKRPRQQGSDSGSCLVHPNSHHSALECREILKLAKRISERREQALRDGSPPRRRPGKEKVDEGDVAAGERDLGYQAPEQVLKDILTRDSDSGDDNDRRKKLYVMYGGSCELTFCRNVKSLRREVLSTTSGVSKAAPHQRWRSTTISFGASDCPKNMAWAIILPLITAPVIANMKLHLVLIDGGAGLNMPSPARVLTVRGDXRCACSCREVACXLAAEAARPDDEGRDPSTSCTKAPAKVPKENVDVFAWESSQMPGIPREVIEHHLKIHPDTKPVSQKPRRQSIERQDFIRKEVQKLLDAGFIDEVHHPVWLANPVIIPKANGKLRICIDYTNLNKACPKDPYPLPRIYQIVDSISGCDLLSFLDAYSGFHQIQMFRQDRKHTSFVTVDGLYCYIVMPYGMKNALPTFVRAMSKTFGDLIRDKMEVYVDDIVVKTKRGSTLVEDLTLVFDKLRATCTKLNPDNCVFGVSAGKLLGFLVSHWGIEANPEKIKAIETMRPLARIKDVQKLTGSLAALSRFISRLAERALPFFKLLRKSEPFSWTKEAERAFQELKQHLVSLPILVAPEPGEPLYLYIAAATKAKPVYYVSEVLHVAKAKYLEKHKLIYAILAASRKLCHYFQAHRVVVVTSFPLRAILHNSNATGNIAKWAAELAEFHLDFQPRHAVKSQGGGAGVVLIDPSRDQVKYMVHLEFKATNNMADCNEPRLAAYLLHVRKLEKDFIALELQHVPRANNSAADELSTRAPTWAPVPEGVFERRLLRSTAQPAKPGEGGETSTSKLAVPVAIHLQNPPRIVCAAEGPANLVAPQPVAQSGPDAWISEVWDYLKENILPKDHVSAECIVRLAK

SEQ ID NO: 259858 - protein, 68 aa, Zea mays
  Clone ID: MRT4577_168608C.1.pep
SSPVQDPSNRIYAGGQVIYKQLFTAHRIVCSSLHFSSEHNLPQSTVSPSTQYAYNKCLSSRVVISRML

SEQ ID NO: 259859 - protein, 55 aa, Zea mays
  Clone ID: MRT4577_16860C.1.pep
TLELEFLALGHRTVRCAPTVRCTLCQVGPGWSTAETLPGGAPLAHRWRTGLSGAP

SEQ ID NO: 259860 - protein, 40 aa, Zea mays
  Clone ID: MRT4577_168610C.1.pep
EIVVVPGKGTLILPFEYLRDADKRDPVSVHDTPTLLDCCQ

SEQ ID NO: 259861 - protein, 107 aa, Zea mays
  Clone ID: MRT4577_168611C.1.pep
EGTKKHLQTPPQNPRFKLFVLSNPFTHFHGHILYPFGHLNYTSSIHTTPNLHCYTQNNIFISTNLILSHITPIISIHLKIHEHHPYFHLFTSLSHHLLHYIPHLFTH

SEQ ID NO: 259862 - protein, 57 aa, Zea mays
  Clone ID: MRT4577_168612C.1.pep
SGWLARSASFQEDGEEAVSDTLDSRSTRRWRPTQSLIRRSHERPPEFEACVYRSIHP

SEQ ID NO: 259863 - protein, 239 aa, Zea mays
  Clone ID: MRT4577_168613C.1.pep
MAFSSAASSAAAAAAYPRTTLPLRRRPGLLALLLLLLCFLSFQVVIHVPSARSAVSLWLFSGHRAERGTRENCPGCSKLQDVDKAEKTIAYTDQHGRIKLFKVTAREFGSSSIWENPWLPRDSQPVARTQEVAGDHLLASGSETTNLSSAETLATTIVDPIKLRRQVFRRRRKERRVQELLQMDKKIELQMRNAAINSSRNFNNKVRGSYNIWRQEFRLVNTDSTLRLMKDQIIMAKLY

SEQ ID NO: 259864 - protein, 90 aa, Zea mays
  Clone ID: MRT4577_168614C.1.pep
MSSRTHHPCFASVESWEQAAMAHDGFLGDLACPLPLAHAATAAPFDPLRVHVAQALTGAGAGWEHDAATGALVPSRPRPLSPSSLAAAPP

SEQ ID NO: 259865 - protein, 95 aa, Zea mays
  Clone ID: MRT4577_168615C.1.pep
DLKRVWPHRKKKQWWVCSCHVLNKMCLKRACPIIVPCFHPTPPVLVVAAAATKLGLRLNRRILQTSLFCARLIRPKMGQHILPLVATYRDNCLVS

SEQ ID NO: 259866 - protein, 510 aa, Zea mays
  unsure (1)..(510): unsure at all Xaa locations
  Clone ID: MRT4577_168616C.1.pep
MQPDPSGNANAKTKLPQLVTAPAPSSGRPASVLPYKTANVRDHYRIGKKLGQGQFGTTYQCVGKADGAEYACKSIPKRKLLCREDYEDVYREIQIMHHLSEHPNVVRIRGAYEDALFVHIVMELCAGGELFDRIVAKGHYSERAAAKLIKTIVGVVEGCHSLGVMHRDLKPENFLFASTAEEAPLKATDFGLSMFYKPGDKFSDVVGSPYYVAPEVLQKCYGPEADVWSAGVILYILLCGVPPFWAETEAGIFRQILRGKLDLESEPWPSISDSAKDLVRNMLIRDPTKRFSAHEVLCHPWIVDDAVAPDKPIDSAVLSRLKHFSAMNKLKKMALRVIAESLSEEEIGGLKELFKMIDTDNSGTITFDELKDGLKRVGSELTENEIQALMEAADIDNSGTIDYGEFIAATLHMNKLEREENLVSAFSFFDKDGXAFITIDELSQACHEFGLDDVHLEDMIKDVDQNNDGQIDYSEFTAMMRKGNAGATGRRTMRNSLHLNLGELLNPSKT

SEQ ID NO: 259867 - protein, 62 aa, Zea mays
  Clone ID: MRT4577_168617C.1.pep
GLLANVRGFPRRMDEKTSLTFNSAPCWPPLKELAPAGGPCGSYPLRLWAWPARPGFPAQHGK

SEQ ID NO: 259868 - protein, 286 aa, Zea mays
  unsure (1)..(286): unsure at all Xaa locations
  Clone ID: MRT4577_168618C.1.pep
DSRAGRTIPDAIGGLRPXTVLDLXHTSVGGGFPASLYNCAAIARLDLSHNQLAGDLPADIDRLGANLTYLALDHNNFTGAIPAAVSRLTNLTYLALGGSQLTGTIPPELGQLVNLRTLKLERTPFSAGTLPESFKNLTKLTTVWLAKCNLTGEIPSYVTELAEMEWLDLSMNGLTGNIPSGIWNLQKLTNLYLYTNNLSGDIVINNGTIGAAGLVEVDLSENMLTGTIPGSFGSLTKLRLLILHDNNLVGEIPASIAQLPSLVYLGLWSNSLSGEAPAGLGKETRC

SEQ ID NO: 259869 - protein, 40 aa, Zea mays
  Clone ID: MRT4577_168619C.1.pep
VDYVAWVCDQDAYACSGQKCSAQSVLFMHKVKTVKCVLLC

SEQ ID NO: 259870 - protein, 342 aa, Zea mays
  Clone ID: MRT4577_16861C.1.pep
LVPRAGTRRSQSDIPFGFAQLSPPLPPPAPVKREVTAAADGCRSDGGGGDDAALYDLVNAYMDLDGLDPLNSSEDRHDDRDSRASGTRAGSAAESSENEAESQSTSADRKDGGKSRHCRSLSIDSFMGKLSFAAGEESPKLPLPSPGGSLTRSGSGSLEGGAVALFNMEFTNGEFTDSEKKKIMANERLAEIALTDPKRVKRILANRQSAARSKERKMRYIQELEHKVQVLQTEATTLSAQLTMLQRDSAGLATQNNELKIRLQAMEQQAQLRDALNEALTAEVQRLKLATGEVTDGRMPKGLQQQMNSQMLQIQQLQVQQQAPQAQQQGQRQQQQQPQKSA

SEQ ID NO: 259871 - protein, 235 aa, Zea mays
  unsure (1)..(235): unsure at all Xaa locations
  Clone ID: MRT4577_168620C.1.pep
MQQNHITNPNEPFPKPQALASATTTHSQGRFRISTRKLPISKAGTIDALTEQIGIPMPEMIFGENFVGIEHIPSGWSLNFNTPDALDAVDKTDRHMLKVAYARDWESTREGTTQGIKEIMKPYDWSYSTTYTGSVDPSAKQFAPTENMIPIELLKRRDPILFXFDEVMLFESELDDNGISIFSXKVRVHEKRMLLLCRLFMRLDNVIXRIRDTXRVYGDXEDDEVIRDISAQRRL

SEQ ID NO: 259872 - protein, 160 aa, Zea mays
  Clone ID: MRT4577_168621C.1.pep
SVNEGRIQCPYHGWEYSTDGKCEKMPSTNMLNVHIQSLPCFEQEGTVWIWPKDDPPKATILSLLPRSGFTCSLLMQGVHGLGGWRLGSSMAASSSCSTTRHSSSPRASAPLQVLHIIGREDRVQIDDARRLHRRAVTPAAMMPPYGTPPPYAAMYAQGTP

SEQ ID NO: 259873 - protein, 65 aa, Zea mays
  Clone ID: MRT4577_168622C.1.pep
IKYPQHIRAPETVYSKNQMPLPRVQGKTARVWDPLGTFTKQTFFENEYPSSLKMGGFKNEYAPRA

SEQ ID NO: 259874 - protein, 56 aa, Zea mays
  Clone ID: MRT4577_168623C.1.pep
YPKSLLEEGFRKFLEGSYVSHKGVIKKAQLGTSRSHPFSWNYRLGCNFLRGHFVNR

SEQ ID NO: 259875 - protein, 57 aa, Zea mays
  Clone ID: MRT4577_168624C.1.pep
CRSSCSSMTIYLTMRSRRLRGFCPGMLSRTGGPVLPACATTTSWTKNAHKSVQKVNY

SEQ ID NO: 259876 - protein, 79 aa, Zea mays
  unsure (1)..(79): unsure at all Xaa locations
  Clone ID: MRT4577_168625C.1.pep
CRPEXEEITCEXENVPLRCTQRDRFSREDFESDFIFCVASSAYQIDRGRGRGLNVWDGFTHRYAQKGGAELGNGERNCD

SEQ ID NO: 259877 - protein, 148 aa, Zea mays
  unsure (1)..(148): unsure at all Xaa locations
  Clone ID: MRT4577_168626C.1.pep
GYLEAGRAGLRLDHARPKPLAAYLFTKNKKLQEEFVADVPAGGMLVNDTVLHXGSSSNFAPVPDXAQLANPYMPFGGVGDSGMGCYHGKFGFDCFSHKKGVLVRGFGGEANARYPPYTTEKQKILRGLINGSFIALILALLGFPREKR

SEQ ID NO: 259878 - protein, 63 aa, Zea mays
  Clone ID: MRT4577_168627C.1.pep
YSKSSNREDHEPHTAYVTGMTDVSQWQLKLGRDQDKKLQTVHREASIIYADLYEGAIGYIPSP

SEQ ID NO: 259879 - protein, 144 aa, Zea mays
  Clone ID: MRT4577_168628C.1.pep
MTGEFGPLLPIVTVEKIEESFDLINARPKPLAAYLFTTDAWVQEEFVADVPAGGMLVNDTVLHLANPYMPFGGVGDSGMGCYHGKFGFDCFSHKKGVLVRGFGGEANARYPPYTTEKQKILRGLINGSFIALILALLGFPREKR

SEQ ID NO: 259880 - protein, 154 aa, Zea mays
  unsure (1)..(154): unsure at all Xaa locations
  Clone ID: MRT4577_168629C.1.pep
MSQPGCPELWPMETAAMASTNSAMEEELQRLTAYSVVACLCREKDDVGPTVVARALCARLGVLEEDIKVSCHRPEDFPITFVHQHHRSAALELGHFGVGRTDIDIRICLEGIPAHAWNKSIAKRTVARACTVDYVEXRPLRRDDSRALCLWPWT

SEQ ID NO: 259881 - protein, 42 aa, Zea mays
  Clone ID: MRT4577_16862C.1.pep
LIIKTCLNGQNEKLWPLLYKLNVTMNADENELIGKSLMNRVL

SEQ ID NO: 259882 - protein, 204 aa, Zea mays
  unsure (1)..(204): unsure at all Xaa locations
  Clone ID: MRT4577_168630C.1.pep
NHGDLRRTLSTAANYTQLYRTRASLNKPSNGLGHDXGRERAQRSIARQATSSISADRVPDMEKRKMMNXAPLCDAISVPTDVMVDPYGDYLLPCRFREXSHRTYAKDKLSNYITADAXFNTHGANDLTLAQGIKGDPAYLEAEEDKTLASYVINDACTHLGCVLPXTAARRISFCQCHGSQYNNQGKVVRGPAPLSLDLXHADV

SEQ ID NO: 259883 - protein, 66 aa, Zea mays
  unsure (1)..(66): unsure at all Xaa locations
  Clone ID: MRT4577_168631C.1.pep
YIQQGPXITEGINFHLPHVQGGAPAIPGVRHVGLYIFKSMPYDDATIMKWLLTTWTYDKCTAMTRN

SEQ ID NO: 259884 - protein, 81 aa, Zea mays
  Clone ID: MRT4577_168632C.1.pep
LHLWRLMLFSPAGFCCPVSPLRGVSPSSTMKASFCGDGELHTSIQLRGPQPAAVHVQADPLLSERHADRQVALRHRLGYPT

SEQ ID NO: 259885 - protein, 186 aa, Zea mays
  unsure (1)..(186): unsure at all Xaa locations
  Clone ID: MRT4577_168633C.1.pep
MEEATRRRITPTTTLLLALAVLAASVPAGFGAINPQDASALNAIQSQWTNAPLNWSSASDPCDGGWDGIMCSNGRVTSLLLSTFNIQGTLSDSVGQLTQLMYLDVSFNLGLNGRMPATIGNLAQLTKLILAGCSFTGGIPQQLGNLQQLSFLALNSNKFTGTIPXTLGLLSNLFWLDLSDNQLTGS

SEQ ID NO: 259886 - protein, 39 aa, Zea mays
  Clone ID: MRT4577_168634C.1.pep
FVVGLRVCEYHVERRELKVETATFRLVANGAVSEIERVV

SEQ ID NO: 259887 - protein, 68 aa, Zea mays
  Clone ID: MRT4577_168635C.1.pep
PYALSTLHRLHRRAYSPSASRPSAFGSGHRPRLTAPRLQHPAAGRRTSPGGRTNLVRWSGLKPGAPAC

SEQ ID NO: 259888 - protein, 73 aa, Zea mays
  Clone ID: MRT4577_168636C.1.pep
RKRRASIDIFLLASTTHLRHQSIRRHETLGPLTINTQLLSPWAQREDPLWPCQHPGVHGLYGVTHMRTDLWTY

SEQ ID NO: 259889 - protein, 178 aa, Zea mays
  unsure (1)..(178): unsure at all Xaa locations
  Clone ID: MRT4577_168637C.1.pep
RSLLFTAIYGVVESSSVAVFGPTVGTLVDNLTYLQASAAALALWNVASVGLEYWLFVSVYNGVPALAESSRLRTAGANASEAMVLPSXXSSENAVPADKELDWRVRMTEQLSIIPCWESWVVYLTQDVALPGVSLTFLYFSVLSFGTLMTATLDWEGLPAYVIMLARGFSAIVGIGAT

SEQ ID NO: 259890 - protein, 78 aa, Zea mays
  Clone ID: MRT4577_168638C.1.pep
RCAISSCSICRSSAISCVSASIDCCESPPLFGNVTTATPIEAPSALIPSDAIPNELLHKRALCIHDFILRLFLPTRKR

SEQ ID NO: 259891 - protein, 601 aa, Zea mays
  Clone ID: MRT4577_168639C.1.pep
MRKHGWQLSYHPLQVVAIAVFSALGFTFYVFFVPFVGTKPFQIVAMAIYTPLITCVVVLYIWCAATNPGDPGIFDSTKNLKLDKNEKHSYVNSDQGINHGGRPLSETFGTADNSEKLSSMLERNDSPSWPRFSGIISLVCLPFSCLCKRCLHSDSLSSEHKMCEEGMFFCSLCEAEVLKNSKHCRVCDKCVDGFDHHCRWLNNCIGKRNYKGFFVLMASAVILLVMQWLSGGLVLILCIVKRGEFSRQVVTKLGSSFSTVAFVIVVATCTILAMVATVPLAQLLCFHVLLVKKGISTYDYIIALREQEEQQEVPGHQSPQMSIVSSVTGFSTASSFGPLHRGSWCTPPRLFLEDQFDAIPPEIGISRNSGSKKTKEEEGARRKAGAVKISTWTLARLNAEEVSKAAAEARKKSKILKPVGKHGAPENSSKPDHLPSYKRRLDRRGFPAELSLDPLATLSASGTESNYSDAATEICGSLAPLQLEARSAFQPSTAASTRNVASSPESSFDSPNLHPFRTSSATADEMQGAMMHTAHRGIEFKRSSSDGYEASGGEDSDRIPSRIVHRSSNWASVFLNSGQGDPPADLLTTSAEGFVANDSGS

SEQ ID NO: 259892 - protein, 62 aa, Zea mays
  Clone ID: MRT4577_16863C.1.pep
KPKKKPKGGSNPSKGPKKKKEKVLKAKRPFLEQFNKVDGRPHNKQRIGELPKPLQRFPKKPQ

SEQ ID NO: 259893 - protein, 88 aa, Zea mays
  unsure (1)..(88): unsure at all Xaa locations
  Clone ID: MRT4577_168640C.1.pep
WAGDSSGRPRSYYWANPVAWTLYGLGAGQLXDIQTTLSDNETVEQFLRHYFGFKHDFLGVVATVLTAYVFVFAFTFAFAIKAVNFQIR

SEQ ID NO: 259894 - protein, 79 aa, Zea mays
  unsure (1)..(79): unsure at all Xaa locations
  Clone ID: MRT4577_168641C.1.pep
LLKSCHGRTGXDMCQPRVTSGTSTHGTYLRIDAKRKHGHYAGWCALTHTLVSWYRDRLILIHMNSSCAERAAPPSSVGA

SEQ ID NO: 259895 - protein, 51 aa, Zea mays
  unsure (1)..(51): unsure at all Xaa locations
  Clone ID: MRT4577_168642C.1.pep
KXLRXXLXPPVYXXHXLLXSPVLEAPXAXXXXVXRPXYXXRVKVAXSPVPK

SEQ ID NO: 259896 - protein, 92 aa, Zea mays
  unsure (1)..(92): unsure at all Xaa locations
  Clone ID: MRT4577_168643C.1.pep
MHMGRVLVVCLALSAAIASAMHMPCPCTVLHXLXYCAGAGLTTMMDACSLYPYTXYLMQPQCSPLTAAHYYTSRGQSTAMFHTLRAQFCPHH

SEQ ID NO: 259897 - protein, 232 aa, Zea mays
  unsure (1)..(232): unsure at all Xaa locations
  Clone ID: MRT4577_168645C.1.pep
MESTLKGIRGSDAPCVLDLDDAATVAGGVEDTYGEDRATEEQLVTPWTVSVASGYNLLRDPRYNKGLAFTERERETHYLRGLLPPAIVSQELQERKIMNNIRQYQLPLQRYMALMDLQEGNERLFYKLLIDNVEELLPIVYTPTVGEACQKGKILEVLKNWPERSIQVIVVTDGERILGLGDLGCQGMGIPVGXLSLYTXLXGVRPSACLPITLDVGTNNEELXYGRIYIGL

SEQ ID NO: 259898 - protein, 70 aa, Zea mays
  Clone ID: MRT4577_168646C.1.pep
QQFMSLAPISYIQYPFLVPESASPFRYKVHAGMAMHACLCVRMSFSAGVINQLLASRCPHGPCFKPMHSP

SEQ ID NO: 259899 - protein, 124 aa, Zea mays
  Clone ID: MRT4577_168647C.1.pep
MGIPVGKLCLYTALGGVRPSAGLPITLHVGTNNEELLNDEFYIGLRHEHKPLSNLLDAVNAIKPTVLIGTSGKGQTFTKDVGEAISSFNERPIILALSNPTSQSECTAEQAYTWSKGQAVFATG

SEQ ID NO: 259900 - protein, 664 aa, Zea mays
  Clone ID: MRT4577_168648C.1.pep
MSPSNPLPPPGETRVGCSLPSPVTPQAMGGGPARHVAMRALRARFLSRQREGGPAAASTWWWCASGSAKGDMESTLKGIRGSDAPCVLDLDDAATVAGGVEDTYGEDRATEEQLVTPWTVSVASGYNLLRDPRYNKGLAFTERERETHYLRGLLPPAIVSQELQERKIMNNIRQYQLPLQRYMALMDLQEGNERLFYKLLIDNVEELLPIVYTPTVGEACQKYGSIFSRPQGLYISLKEKGKILEVLKNWPERSIQVIVVTDGERILGLGDLGCQGMGIPVGKLSLYTALGGVRPSACLPITLDVGTNNEELLNDEFYIGLRQRRATGQEYTDFLQEFMSAVKQNYGEKVLIQFEDFANHNAFDLLARYGTTHLVFNDDIQGTASVVLAGLIAAQTLLGGSLADHTYLFLGAGEAGTGIAELIALEISRQTKAPIEECRKKIWLVDSKGLIVSTRKESLQHFKKPWAHEHKPLSNLLDAVNAIKPTVLIGTSGKGQTFTKDVVEAISSFNERPIILALSNPTSQSECTAEQAYTWSKGQAVFATGSPFDPVEYNGKIHVPGQANNAYIFPGFGLGVVMSGAIRVHDDMLLAASEALAQQVTEENFEKGLIYPPFSNIRKISAHIAASVAAKAYELGLASRRPRPKDLVKYAESCMYSPIYRNYR

SEQ ID NO: 259901 - protein, 114 aa, Zea mays
  unsure (1)..(114): unsure at all Xaa locations
  Clone ID: MRT4577_168649C.1.pep
MESTLKGIRGSDAPCVLDLDDAATVAGGVEDTYGEDRATEEQLVTPWTVSVASGYNLLRDPRYNKGLAFTEREREIXYLRGLLPPAIVSQELQERKIMNNILQYQLPLQRYMSL

SEQ ID NO: 259902 - protein, 52 aa, Zea mays
  unsure (1)..(52): unsure at all Xaa locations
  Clone ID: MRT4577_16864C.1.pep
IVTYNPAGDRSMLCSGPASLRLLRPLFMXMCYCILSXXRMLAGVXGGARAPL

SEQ ID NO: 259903 - protein, 60 aa, Zea mays
  Clone ID: MRT4577_168650C.1.pep
AEPVRPQFLSVLPLPNYVRFDHSGSSLGYCCYVFNKWLQCIISYLEPFMCMNLYPLRMRS

SEQ ID NO: 259904 - protein, 61 aa, Zea mays
  Clone ID: MRT4577_168651C.1.pep
NFEKGLIYPPFSNIRKIFAHIAASVAAKAYELGLASRRPRPKDLVKYAKSCMYSPIYRNYR

SEQ ID NO: 259905 - protein, 75 aa, Zea mays
  Clone ID: MRT4577_168652C.1.pep
CLFSQPRKVYGEPSKGHTYARGGQLQDHSRAGLFHTRGAFLNTIGERNSPTQQVKRPSKGERPYKGRDAPPLVQG

SEQ ID NO: 259906 - protein, 399 aa, Zea mays
  Clone ID: MRT4577_168653C.1.pep
RLELEPLGCQGMGIPVGKLSLYTALGGVRPSACLPITLDVGTNNEELLNDEFYIGLRQRRATGQEYTDFLQEFMSAVKQNYGEKVLIHFEDFAFHNAFDLLGRGGTTHLVFNDDIQGTASVVLAGLIAAQTLLGGSLAHHTYLFLGAGEAGTGIAELIALEISRQTKAPIEECRKKIWLVDSKGLIVSTRKESLQHFKKPWAHEHKPLSNLLDAVNAIKPTVLIGTSGKGQTFTKDVVEAISSFNERPIILALSNPTSQSECTAEQAYTWSKGQAVFATGSPFDPVEYNGKIHVPGQANNAYIFPGFGLGVVMSGAIRVHDDMLLAASEALAQQVTEENFEKGLIYPPFSNIRKISAHIAASVAAKAYELGLASRRPRPKDLVKYAESCMYSPIYRNYR

SEQ ID NO: 259907 - protein, 109 aa, Zea mays
  Clone ID: MRT4577_168654C.1.pep
MNGNASGKLYQTAGSIILSASQRSYFSVLAAEGRTAALDNYDTKNLPTACSYHRHRSHTASRWGAIAVADPAAHYMLQDQQAHAAEIEHTFIDIKPNGVQRGLISEIVN

SEQ ID NO: 259908 - protein, 73 aa, Zea mays
  unsure (1)..(73): unsure at all Xaa locations
  Clone ID: MRT4577_168655C.1.pep
AIDVSLIITVYCMPAMSRYDLLMRVNGSSXYKTYDXCFMSAANATARVILRSQDRAVELFLKPSNHSCLAKLK

SEQ ID NO: 259909 - protein, 45 aa, Zea mays
  unsure (1)..(45): unsure at all Xaa locations
  Clone ID: MRT4577_168656C.1.pep
YNVVSLKVSLLGDCQIGKTSFMVKYVGDDXFSIXLHMTGLNLMDK

SEQ ID NO: 259910 - protein, 79 aa, Zea mays
  Clone ID: MRT4577_168657C.1.pep
YVVWSLNGGADLAAMQMRSASRLCWARAGRAPLGRWAHCHGRAGGSSARVLGHEREQERAPAEKAHEGESGTRMRRRAR

SEQ ID NO: 259911 - protein, 88 aa, Zea mays
  Clone ID: MRT4577_168658C.1.pep
LCHCLGREPVTFVCRCALPSCFRGGLVARRYGACLGAGSRARPGRAEPTRNGPAPPEAAGRRRLRRPHWHLRSHWSSDRGSHRRRGRQ

SEQ ID NO: 259912 - protein, 145 aa, Zea mays
  Clone ID: MRT4577_168659C.1.pep
MRPRVWMGWWWWWRLPVAALLAAILPSSDATLSPAGINYEVVALMAIKTELEDPYNVLDNWDINSVDPCSWRMVTCSSDGYVSALGLPSQTLSGKLSPGIGNLTRLQSVLLQNNGISGPIPGTIGRLGMLKTLDMSDNQLTGTIP

SEQ ID NO: 259913 - protein, 73 aa, Zea mays
  Clone ID: MRT4577_16865C.1.pep
LAELSRHLGTKAQAPATPAFRIGISATTSEASHPDPRHAPRALDSGIRPSAHCPATPEPEPAIQIIHMPAPDA

SEQ ID NO: 259914 - protein, 503 aa, Zea mays
  Clone ID: MRT4577_168660C.1.pep
MASADAAKPASPPAADPPVDDPMDADPAPPAGEEEQATPQKQQPEKKRGGRRKKGEAAEKTPPSSKKSAGPTVERPSRERKTVERYAELAPRATPAKKSPAILQGSGTKLKDIPNVSFKLSKRKVDENLQSLHTVLYGRKSNNHFLKRNISQFSGFVWTDNQEKQRNRIKEKLEKFNKEKLLDFCEILDVIVKVTMKKEEVSAKLLEFLESPCVTRDVILTDKKKGKKRGRKSKVSREVTSEGASAEKKRKRVQKQAAEDGKENDDGDDADPAGSEDASTGEEADGDSEANDHALSDDEHDEPAAKKKSSDVKQKKETGSDAKEKDAPGKKGSTKRASKPSQNSKNEPEVEIKKVGKREKSSKETDVSPDSNKSNKKISKSKKGDGKETQNNKAARSSNKSKGKVKGGSVAGTAPTTEQLHAVVSGILKEVDFNTATLADILRQLGTHFEMDLMDRKAEVKRIIEDVINSMSDDEGEEGSEDEAEDDGKADNLKSEPDGGEEK

SEQ ID NO: 259915 - protein, 119 aa, Zea mays
  Clone ID: MRT4577_168661C.1.pep
GNDGKGERGGPLQSQTKGRKRGVPPSHSDGEKQGFPKTVLKKGRAGLMENAPIKRPRGGPIKARLPQTARGRKTTKIAPRGGPAKGQKYFFYFFFFFEFFNVFFFFFFFFFFFFFFFFF

SEQ ID NO: 259916 - protein, 449 aa, Zea mays
  Clone ID: MRT4577_168662C.1.pep
ADKKTPPSKKSAGPALERPSRERKTVERYSELAPRATPAKKSPAILQGSGTKLKDIPNVSFKLSKRKADESLQSLHTVLYGRKSNNHFLKRNISQFSGFVWTDNQEKHRTKIKEKLEKFNKEKLLDFCEILDVIVKVTTKKEEVSAKLLEFLESPCVTRDVILTDKKKGKKRGRKSKVSREVTSEGASAEKKRKRVQKQAAEDGKENDDGDDADLAGSEDASTGDEADVGSDSEANDHAVSDAEPDEPPAKKKSTDVKQVKETGTDAKEKDAPGKKGSMKPAKRASKPSQNSKNEPEVEIKKVGKRAKSSKETDAPPDSNKPNKKVSKSKKDNGKEAQNNKAARNKNKGKGKGGPGAGTAPTNEQLHAVVSSILKEVDFNTATLADILRQLGTHFEMDLMDRKAEVKRIIEDVINSMSDDEGEEGSEDEAEDNGKVEKSKSDPDGGEEK

SEQ ID NO: 259917 - protein, 108 aa, Zea mays
  Clone ID: MRT4577_168663C.1.pep
RREGARKKPKIKQHPKGGRQGEPQKQPQGHPPAKRGLKQPSPPPPPTKAATQAGNFPPGSPEDGRPHGGPHGKPPPKGPWPKGGPKKPPAKKPPDGDGGEKEHLGRQG

SEQ ID NO: 259918 - protein, 339 aa, Zea mays
  Clone ID: MRT4577_168664C.1.pep
MFWKDSGSRSSSGSGRDQNGVGPFGQVRVLIVGDSGVGKSSLVHLILKSSAIARPSQTVGCTVGIKHVTYGSAGGSSNNISDAERNFFVELWDVSGHERYKACRSIFYTQINGVIFVYDLSQRKTKTNLNKWAVEVAETGTFSAPLGSGGPGGLPVPYLVIANKVDIVPRDGARASRGNLVDLARQWAEKQGLLRCSEELPLTESFPGNSGLVSAAKQARYDKEAVIKFFRLLIRRRYFSNEPPAPSPWSLAPREDTILPMETLGDGADSFQRKSLSGEGFLYNGLVPLPAQRNLTPPPTLNPQQPVSPLDNYRYHRFSSSSLPDVSSSRTSREDIINL

SEQ ID NO: 259919 - protein, 118 aa, Zea mays
  Clone ID: MRT4577_168665C.1.pep
LGLVNFFLGFYINTRADKTPPGSQKDHSKRKQAKGNKKGETKDQATTRAQKPRAKKDGNNWGVKTQGKEGHPGQTNGAPRAPPQSKGSRGGQTGHHCAHNRPWAPQKKNNPKKTLGGG

SEQ ID NO: 259920 - protein, 274 aa, Zea mays
  unsure (1)..(274): unsure at all Xaa locations
  Clone ID: MRT4577_168666C.1.pep
MILALFAASVLSTGPPPAMAAAMQPSATCLRRCGDIDIPYPFGVGPGCHLETGDWTFILSCNRSEDGRLRLYNYQIEVLNMSVRLGQLRIYNSINPWCYNATTRAMNEQSNWWYNMSITNFRINDAQNRFTVMGCNSLAYIRWPNDSAAAYMTGCMAMCPGVGRLNNGACNGFGCCQTAIPSDLNAYSVSFEEKFNTSRIANFSPCSYAVLMEAAAFNFRTTYVTTDAFMADNDXQVPLVLDWXIGNMTCEEAKRSASAYACASSNSECIDSKY

SEQ ID NO: 259921 - protein, 43 aa, Zea mays
  Clone ID: MRT4577_168667C.1.pep
AARPRVLHQPIEWRRRTFIISEEATVHQISFFINERGLTRNLK

SEQ ID NO: 259922 - protein, 70 aa, Zea mays
  unsure (1)..(70): unsure at all Xaa locations
  Clone ID: MRT4577_168668C.1.pep
LVKNGKKIAAFVPHDRLSNYIEENDEVLIAGFGRKVDAVVDIPGVRFKVVKVSEXSLLALFKEKXEKPRS

SEQ ID NO: 259923 - protein, 96 aa, Zea mays
  Clone ID: MRT4577_168669C.1.pep
QSPLPQHYAATAPNSISLCLHRLQENSYFDYACPSMRLLISSSPGMWSRASLCRTGGQEQVPQDEARGGCCDEFVSGLGRRLPVNFGLLDRCLLIM

SEQ ID NO: 259924 - protein, 299 aa, Zea mays
  unsure (1)..(299): unsure at all Xaa locations
  Clone ID: MRT4577_16866C.1.pep
MNKQTNVAHSPTRCYIFLPSLSRRSGSVHSAGAAAARQQRTWARLDQELRSTRPIPPRGPPAGRPAGAPSTTRRSAPAAPARARRPPAAGAARPPPXPLPRHPAAXPPTRARRPSRRGAARGQRPRPGRAPGARRPPPRRAGAPAPPRTPSAWPTPPGPPPXRPPRPSRSPPXPPSSKGTEPVPWRPTPRSRPWTRRRSRWTRPTTPRGRRPGAAPGAASRAWTPGSWRRAPWRRSAGRGTPSPRRSARPPRPRRARTACRCRASGPPPWSHEQRPFPTSPASCLLGLRSLGVRRPRRS

SEQ ID NO: 259925 - protein, 72 aa, Zea mays
  Clone ID: MRT4577_168670C.1.pep
NNGVFPLNPEFLKNQFLYQAKVVLFITELWCPFHLNFIDNSDIFGNFFLILISKIKFLFLLYWNFRCCSIIS

SEQ ID NO: 259926 - protein, 59 aa, Zea mays
  Clone ID: MRT4577_168671C.1.pep
SIYMSRNDMFCRWYSLFQQKWFCFIASLSVCFLRNLLGADVVHQYLFVSAQGFRYPRTA

SEQ ID NO: 259927 - protein, 368 aa, Zea mays
  Clone ID: MRT4577_168672C.1.pep
MMDVSQVAAAVALMAFAVAFPASAFPSGFPPGTPSAFPNPWAAFQNLSGCHMGEERQGLAGLKDYLSHFGYLPPAPPSSPFSDAFDQNLEAAIATYQRNFGLNATGALDPSTVSQMVAPRCGVADVINGTSTMARSSSADAHAHGRHLYAYFPGGPTWPPFRRDLKYAITATSAASIDRSTLSDVFARAFSRWAAATNLRFAETASESDADITIGFYSGSHGDGEPFDGPLGTLAHAFSPTDGRFHLDAAEAWVAGSDVSRSSATGAVDLESVAVHEIGHLLGLGHSSVPDAIMYPTIRTGTRKVELEADDVQGIQSLYGSNPNFKGATPTSPATSSREMDSSAGAGCRPDRVFVGVVAAVGLLLLVL

SEQ ID NO: 259928 - protein, 264 aa, Zea mays
  unsure (1)..(264): unsure at all Xaa locations
  Clone ID: MRT4577_168673C.1.pep
AAQVRSICKPLXXLGIHSVSLHPGASIEHQISGSLMXLKCFVDHNVSDKIFSIRDAISNNLQITIFTDPSDKNIATMAKNLLRGRITKLSINDSVSSRSAFIAQHVHFCPSEELKTTKVKEILEQILQDHPKKTSKVLLVAASDKKARLMSLSLKLENCTVIDDSCGNSFTICSSVGLMNVIVKDRENMSVTDVEAFETVLVVDLPPSVDEYIEILTGAALHVIXSEVHSIFCNTDASVAKPLAQLLADCGQVVPEFLKSLKSS

SEQ ID NO: 259929 - protein, 167 aa, Zea mays
  Clone ID: MRT4577_168674C.1.pep
MASRLLHLRRLITPPSTVPAASFSTAVSATPRVSALVDEICGLTLLEASSLADALRGRLGVDQLPPLAILTGGAAPLVGGGVGPGAAGEEAKAKEEKMAFDVKLEGFDAAAKLKIIKELRAFTNLGLKEAKDLVEKAPAVLKAGVPKEEAESIAEKMRALGAKIVLE

SEQ ID NO: 259930 - protein, 525 aa, Zea mays
  Clone ID: MRT4577_168675C.1.pep
MAKGDDALARKRNRVRRKRLRSSENAVSARVAAIIASKHRRKSGKRRACEGMCFSLPTPDDPFNERHGRKHKLDDEPADDTAADAAEDSGNPKKKGANTKKQQPVAKYGAEAKSKAVRERETGAEVVRGDFDRPSKFLVVCLNAIRDAVAPEEGGGSIHGAGDWGVELWRCCSAQAPSDVLDASGACATVAQTAWLVSTACDIVARKERHGMVVSCPFLLYLVSSQDKAAQVRSICKPLKPLGIHSVSLHPGASIEHQISGLKTCEPEFLIATPERLLELVSLKAIDISGVSMLVIDGLKCFVDHNVSDKIFSIRDAISNNLQITIFTDPSDKNIATMAKNLLRGRITKLSINDSVSSRSAFIAQHVHFCPSEELKTTKVKEILEQILQDHPKKTSKVLLVAASDKKARLMSLSLKLENCTVIDDSCGNSFTICSSVGLMNVIVKDRENMSVTDVEAFETVLVVDLPPSVDEYIEILTGAALHVIGGEVHSIFCNTDASVAKPLAQLLADCGQVVPEFLKSLKSS

SEQ ID NO: 259931 - protein, 97 aa, Zea mays
  Clone ID: MRT4577_168676C.1.pep
GLIRRIYRCVGTNGKEEGRPSIADLFLDETSSPTAYFRMPAGADSARYRQERTSEPSTSQTTTTTTTSGASAVSRTRSSMRCPTDRRSPSLTETVTQ

SEQ ID NO: 259932 - protein, 220 aa, Zea mays
  Clone ID: MRT4577_168677C.1.pep
MGRPSNSHGGGGDEERLPLRGVLETSPSHHAAVQPKDKEARRGGSRLWRASVRAGLLLCLLTVPAVLLLLWWQADSSPQWVFDFEPPEEDDDQDIQDDMSDDLSPSPQIEYDRLLGGLLVEGFDDKSCRSRYRFARYHNSPSIPSPYLIERLRKQEALQKKCGPGTRAYREASKQLKSGQSMRINATDDCNYLFLIIHAGLGNPMLEITSAFLYALLTNR

SEQ ID NO: 259933 - protein, 189 aa, Zea mays
  unsure (1)..(189): unsure at all Xaa locations
  Clone ID: MRT4577_168678C.1.pep
PAQPRWRRATGVDEGHGDFDRLSKFLVVCLNAIRDAVAPEKGGGSIHGAGDRGMELWRCCSTQAPSDVLDASGACATVTQTAWLVSTACDIVARKERHGMVVSCPFLLYLVSSQDKAAQVRSICKPLKPLGIHSVSLHPGASIEHXISGLKTCEPEFLIATPERLLILGSXKAIDISGVSMLVMDGLKC

SEQ ID NO: 259934 - protein, 51 aa, Zea mays
  Clone ID: MRT4577_168679C.1.pep
QGPFWAWFQIPVSQTPVAPAMGGISDSHTQLLKKHKSYFGGTFKFFERGTL

SEQ ID NO: 259935 - protein, 97 aa, Zea mays
  Clone ID: MRT4577_16867C.1.pep
LDIGGTDRTSGVDEKRELYIAGAQDGSSKTMNEEIVSSGAYLNSGRERFQLKDLVAEARMENREKIPTTKERMLGHQSQVTKDNNLLEKSRARKSGT

SEQ ID NO: 259936 - protein, 79 aa, Zea mays
  unsure (1)..(79): unsure at all Xaa locations
  Clone ID: MRT4577_168680C.1.pep
QEALALASLLDDEKKLGDCQFDLWKQSFMAACAAVDDKLRCSHRLDAVQRGCTTLSIIKXGNLMVVANVCDSRVVLGTR

SEQ ID NO: 259937 - protein, 97 aa, Zea mays
  unsure (1)..(97): unsure at all Xaa locations
  Clone ID: MRT4577_168681C.1.pep
FVVETLGRGKGGKGSGKGGVKCYWKASCDNTXGTMKLVTWRSVRRGGAKCTLGSTHEEICGASKTPSENATCDVAIHMEYVCCKIAIVTDAAHVSKC

SEQ ID NO: 259938 - protein, 251 aa, Zea mays
  unsure (1)..(251): unsure at all Xaa locations
  Clone ID: MRT4577_168682C.1.pep
RPVREPQCHHECGTSTKPWSPHYSASRRCRRRHGHARQPVSWAASPWSPPSPRTRPPPSTRRRSRTATRSSSTSLARSSRWPRAPAPPRTTTARSPPRYPPTPPTARTRCSRSPSRRWPRARRRRGCPPAPSASRGSRPPPAAXSPFDRCYDSTKLPQSLLGYAVPQIDVMLEGGQNFTVLGGNSMVQVNANTACLGFVQAPGQAPAAVIGGFQLENHLLLLDVDKKQLGFTTFLNAIGLSCSSFNFTLAS

SEQ ID NO: 259939 - protein, 411 aa, Zea mays
  unsure (1)..(411): unsure at all Xaa locations
  Clone ID: MRT4577_168683C.1.pep
WVPPGRPEPAARGRARRGKKKKKKKKTPNAITNVEPQQALVTSLLCISALSSSPWPCTAAGQLGGKPLVTAVTKDASTSLYTAPLKDGHPLVLDLSSPVISLATCASSSKNNNGTLTATLSANATDGQNPLFPVSFSAVATCAPSSRLPAGAGAVGVAGLAPSSSSQQSLPAQVARTQKVADKVALCLPSDGRSTSGDSVGVAIFGGGPLFFVPPDRGDFTTMLAGTAPLHAGAGAGAPGYYVSSTGIAVEQARVGGPAGALVVALSSTVPYTALRPDVYAPFVKAFDAAAAGPNFPWXPGSPXAPFDRCYDSTKLPQSLLGYAVPQIDVMLEGGQNFTVLGGNSMVQVNANTACLGFVQAPGQAPAAVIGGFQLENHLLLLDVDKKQLGFTTFLNAIGLSCSSFNFTLAS

SEQ ID NO: 259940 - protein, 96 aa, Zea mays
  Clone ID: MRT4577_168684C.1.pep
TSHMRKAPQVVSKMSVALGPEVWFRRAKRPGVKPPAGGPSCTTGISLMHAQSPSCAHAHRGVPVYLAGYRDRGSVLVSLPHCRNSSRLPHSAFTEH

SEQ ID NO: 259941 - protein, 67 aa, Zea mays
  Clone ID: MRT4577_168685C.1.pep
PASAQRPPTRPGAQENGQTQITELAGQMTGMDLLTNAAGTQSSIHTINRMRSVMSAIRRRFGNPLPP

SEQ ID NO: 259942 - protein, 74 aa, Zea mays
  Clone ID: MRT4577_168686C.1.pep
SGSSSFTRLKILSICLVKVVHVATAAQEKMKPWRKTSRSSKSTTSFRRGLAATPSWLPMKAACIYVSFSHFDYC

SEQ ID NO: 259943 - protein, 97 aa, Zea mays
  Clone ID: MRT4577_168687C.1.pep
VSSPVLNMRCVLSSLVTTGLHSVQDVPPVVLVQSHVIESRSEQPARSTVGRLCANVRLVQEHQSISVLVVQNSDHDPGLAGSQSARPLERRSTREPS

SEQ ID NO: 259944 - protein, 62 aa, Zea mays
  Clone ID: MRT4577_168688C.1.pep
RYSIIELISKIIMFQCKIFLFIHRVIPICFTYDFHSPVVSMCRSVSRIVYYTIPLHVSAHAT

SEQ ID NO: 259945 - protein, 94 aa, Zea mays
  Clone ID: MRT4577_168689C.1.pep
IISLVTRKPPRGVHDPRGKQGPLETRTTTTTRTPSPAPGATPYIHTPAGPLHRDPHDPGWTYPPQTRRIIFWGRNHVSRPDLAKKVPQGGGPLG

SEQ ID NO: 259946 - protein, 110 aa, Zea mays
  Clone ID: MRT4577_16868C.1.pep
MTKRERKDPGRMTSLGSLTKQPNLSWVPPGYRGFCKAKKCNWRIHASQLPDGKTWQVKKMSKRHYCRSRSKMEKNCMANQYWVRDKVVPMLRENPNLGVGSMLRCAEGLA

SEQ ID NO: 259947 - protein, 75 aa, Zea mays
  Clone ID: MRT4577_168690C.1.pep
DPHVAKGAYLCRSRVWRLCLHFHRRVRGYLSGNRVFAGAFPMEGFQHGHGWEQRSGSEGEDFEDRIAPTGMGRGG

SEQ ID NO: 259948 - protein, 89 aa, Zea mays
  unsure (1)..(89): unsure at all Xaa locations
  Clone ID: MRT4577_168691C.1.pep
VTHAAGPFPIELKGGPTGGICQVVLVASPRKVCYXVQALRDRTGVLLSRNVGISDSLPAANPLGFFKDVPLPVCAPLLKQLDSALHDGQ

SEQ ID NO: 259949 - protein, 62 aa, Zea mays
  Clone ID: MRT4577_168692C.1.pep
YRPCPRGRNCPPRQIASSTLGTRCVYFPNGQGRTGHRDGLGTPPPSSPRRTIYHPTYSSSKQ

SEQ ID NO: 259950 - protein, 187 aa, Zea mays
  unsure (1)..(187): unsure at all Xaa locations
  Clone ID: MRT4577_168693C.1.pep
TGRGELGLSAVRARKSRDTHGAPGRRQGGSARQGKTPGRQARHRGKRRGSRELGARTEKHHGAQISRKIEEERSSWRSKGGARPRDAGSRGQGNARRLQPSRQAARCTREQGCRGHGEREAGGGSLERESRXRKTEIEYERVGELVGPTKSEQRGDSGPGWSSAWPGEQEIREPRPPWPSREPGRDG

SEQ ID NO: 259951 - protein, 93 aa, Zea mays
  Clone ID: MRT4577_168694C.1.pep
PPKTHTRQCDSAHPFSSLTCLPLTESYRRLLRLPVAGSIAFGRDGHEENCIRHMRARERALFTDTRTGRHHAMSQDQIRPVPMSGLKPIVRLK

SEQ ID NO: 259952 - protein, 74 aa, Zea mays
  Clone ID: MRT4577_168695C.1.pep
LGGLLLLLVLPRRYWGVPPVRRPFLRLSHSSSLLVTDPNTRVPIDVELGHPRLSRLSSPLYDDDVGDTNGTPAE

SEQ ID NO: 259953 - protein, 253 aa, Zea mays
  unsure (1)..(253): unsure at all Xaa locations
  Clone ID: MRT4577_168696C.1.pep
MRPAILAALLLLLAAAASPAAALYSAGSPVLQLNPNNFKKVLNANGVVLVEFFAPWCGHCKQLTPIWEKAAGVLKGVATVAALDADAHKELAQQYGIRGFPTIKVFLPGKPPVDYEGARDVKPIVNFALSQVKGLLRDRLDGKTSGGSSGKTSGGSSEKKHEPNESVELNSSNFDELVVKSKDLWIVEFFAPWCGHCKKLAPEWKRAAKNLKGQVKLGHVDCDSDKSLMSKYKVEGFPTILVFGADKXEPFPY

SEQ ID NO: 259954 - protein, 122 aa, Zea mays
  Clone ID: MRT4577_168697C.1.pep
SKSQQVSASSIRHSLQDRLSKVSGKGRPDEITVKLCTSTAPPLKLIDIPGVDQRSTDESISNYAARNDAILLVIIPALQAPDVASSRALRIARELDSEGTRTIGVLSKIDQASGEQKALGAV

SEQ ID NO: 259955 - protein, 102 aa, Zea mays
  Clone ID: MRT4577_168698C.1.pep
LISYSGPHRGSACLPWTPDHGHGRNGSANLLHYPVLSDPTAKHTGGRQEHRPQTRDPPVEVQRHSDRRPARCTARTPVGGATATPLEALGSSSWRCWRPMAR

SEQ ID NO: 259956 - protein, 90 aa, Zea mays
  Clone ID: MRT4577_168699C.1.pep
LSTNLYTTTNTVQEMSTIDKKEQMIQPTEQLCQIQKNKCVKYASSPVRRKHCAQAAVTLFSSRPTNRDFFFFFFFYFFFFFFFFFFFFFS

SEQ ID NO: 259957 - protein, 59 aa, Zea mays
  Clone ID: MRT4577_16869C.1.pep
SNDTIVKYSKDIQHTSLHTMLNLFKGSRSIRQSSSPPHKQDSSKLKTHRLRPKLVFLTW

SEQ ID NO: 259958 - protein, 88 aa, Zea mays
  Clone ID: MRT4577_1686C.1.pep
PSTTKEPLGVAAIDGRNVQSGAPPDTVRYASHVTQPLEFESYQPLEALSSSGTGQSGAAPDRHCSVSGAPLTSGSDSTRTVLHCSSDL

SEQ ID NO: 259959 - protein, 81 aa, Zea mays
  Clone ID: MRT4577_168700C.1.pep
MAGRGKAIGAGAAKKATSRSSKAGLQFPVGRIARFLKAGKYAERVGAGAPVYLAAVLEYLAAEVRFSQISSLPLFSRYSIP

SEQ ID NO: 259960 - protein, 66 aa, Zea mays
  Clone ID: MRT4577_168701C.1.pep
APGVDEASALVLHGMARGFQLSDEVVHARARGVVGVALQQEQWQPVRILDLERHRRQYISRGSSMS

SEQ ID NO: 259961 - protein, 33 aa, Zea mays
  Clone ID: MRT4577_168702C.1.pep
CTQELSYITHVPSKPHTQQGELLALPKFQLSMK

SEQ ID NO: 259962 - protein, 102 aa, Zea mays
  Clone ID: MRT4577_168703C.1.pep
THPLSPRGLAVFFKSVGQQVFHVEMGKWPLPDYCGFLSSLGPPGFPLFNSGCYFFCNFCGLALSFGTPVFPFFLPVWYVVGILKGCPPLSGNCPFHGPARVG

SEQ ID NO: 259963 - protein, 116 aa, Zea mays
  Clone ID: MRT4577_168704C.1.pep
IILNIFFFLGGFFEGFLAFLAKKKRNKTKHRGPKKKWEPQTQSEQPKGMETHGHEHKDWPQTCRGGKQTEKPWFSFFYTHPTQNPWRGASPAPIKMGQPPPQARKKKKISMGGERR

SEQ ID NO: 259964 - protein, 45 aa, Zea mays
  Clone ID: MRT4577_168705C.1.pep
YYPPTQQSVGWDHFTVARRPQKYKTIIQKRIGIPKVPHQSILEIY

SEQ ID NO: 259965 - protein, 63 aa, Zea mays
  Clone ID: MRT4577_168706C.1.pep
QQTKKGGHPFLIINKNTHPPGLTPGLPWDRPNKNNRPDRGPNQKFPTPTLRLQLYLMSWQHMG

SEQ ID NO: 259966 - protein, 68 aa, Zea mays
  Clone ID: MRT4577_168707C.1.pep
RLHTSRSQSNFLWLKLNWGCILNRLLTNTTTQSYRRLRRPGLTYYFHHSITSIPTSPKHPLKKPLKSY

SEQ ID NO: 259967 - protein, 92 aa, Zea mays
  unsure (1)..(92): unsure at all Xaa locations
  Clone ID: MRT4577_168708C.1.pep
AFAQRPPSVRPRVKKKKKKKKKKKKKKKKKKKKKKKKNKKKKKIKKKKKXYRRKIKKNGWAVFWGGGFWTNPCRYLNFFFVGAHNLFRGVGF

SEQ ID NO: 259968 - protein, 55 aa, Zea mays
  Clone ID: MRT4577_168709C.1.pep
NFARNRLALQMPQIQRFHKRAVPLSLHFLATLFCWYVQFACLSLCFSKWRSNSRY

SEQ ID NO: 259969 - protein, 185 aa, Zea mays
  Clone ID: MRT4577_16870C.1.pep
RAQLDPCCGSTSLMGICGACELEECSAAFAHCLSYSRARHPREGRQESLQHRGVVAAERNGARAEPDLWNRRMRLQSPRGGPIRARPRRIRVRGGRRRCTAGRIEAGEMRRRRVGPAAPPTRVGLAGAREEGSRWGRAGRGWIRAPRVGTALEQPVPRNTSEDEVESTAAAATAPLQHGWPSTSA

SEQ ID NO: 259970 - protein, 354 aa, Zea mays
  Clone ID: MRT4577_168710C.1.pep
MIHRPIDHPLWSNPTIYPPGASYKYRGSVASASSSSHRARTIVLPIDRSQPVLLRDELKPEVNRSIDRASERAPMKTLVLAAVLLLQHGGAASAGGNFYQDVDITWGDGRGKILDNGQLLTLSMDRSSGSGFQSKAQYLYGRFDMQLKLVPGDSAGTVATFYLSSQGSQHDEIDFEFLGNASGEPYTVHTNVYSQGKGGREQQFRMWFDPTAAFHAYSVLWNPAHVVFYVDGVPIREFRRRGDGTVPFPTSQPMRVYASVWDAEEWATQGGRVRTDWSKAPFVASYRGYAAAGCTAPDAAACARSNGAWMSQELDSAGQEQLRRAQASYMIYNYCTDKYRFPQGPPPECSSPAK

SEQ ID NO: 259971 - protein, 170 aa, Zea mays
  unsure (1)..(170): unsure at all Xaa locations
  Clone ID: MRT4577_168711C.1.pep
MKTLVLAAVLLLLLQQQHGGAASAGGNFYQDVDITWGDGRGKILDNGQLLTLSMDRSSGSGFQSKAQYLYGRFDMQLKLVPGDSAGTVATFYXYYYVHTTPPPPPRPSFVYIRCRLSLSRAEHMSAXTHARAQXSSQGSQHDEIDFEFLGNASGEPYTGHTNVSSQGKGR

SEQ ID NO: 259972 - protein, 123 aa, Zea mays
  Clone ID: MRT4577_168712C.1.pep
GVPIREFRRRNDGAVPFPTSQPMRVYASVWDAEEWATQGGRVKTDWSKAPFVASYQGYAAAGCTAPDAAACARSNGAWMSQELDSAAQGQLRRAQASYMIYNYCTDKYRFPQGPPPECSSPAK

SEQ ID NO: 259973 - protein, 74 aa, Zea mays
  Clone ID: MRT4577_168713C.1.pep
SSSSDYFIQANEMLHHKANLNGYLAYHTGQPLDKINVDTDRDYFMSAKEAKEYGLIDGVIMNPLKALQPLPASS

SEQ ID NO: 259974 - protein, 85 aa, Zea mays
  unsure (1)..(85): unsure at all Xaa locations
  Clone ID: MRT4577_168714C.1.pep
ITSLSYLIVTIYLYIHPPPPHQEEEPTRIQNQTMLCSCTRTHPVRTHADAPYYIQXSSTNPRSHVRERRRKARAGSLTNTPQEHS

SEQ ID NO: 259975 - protein, 121 aa, Zea mays
  Clone ID: MRT4577_168715C.1.pep
TPYTISGFQHAFSSIGRFRQLSFCSRAGAAFAFCSKLFVPWCVCFGPNLAQFGRDSSIHLLRRKRITGSVQCSSSPVSYDSQGRMSQIIVVEHTRRSILMSGFRVNVDYMFVTSVFASCEP

SEQ ID NO: 259976 - protein, 81 aa, Zea mays
  Clone ID: MRT4577_168716C.1.pep
FEDDRLMQGNWTKEPNSSTILLFFRILALCHTAIPEINEATGSIAYEAESPDEGAFLVAAREFGFEFFKRTQSSVFVREKH

SEQ ID NO: 259977 - protein, 183 aa, Zea mays
  unsure (1)..(183): unsure at all Xaa locations
  Clone ID: MRT4577_168717C.1.pep
AAARLEVQSSVEELQKPRSHXXPPPPLPAQASPTITNSRRTTPTAHRFPRSACTTGDGSRQNLLAPHRQELLFLSLLWNLGGTLDRWSGEARFLYPGCRICCRGRRSLRRGIRITRGRGEPDTIGPHAFAALGQTGFASAHPPGHARGAAEATQPAETAAQEAETAAQEAETAAHPGFSLGRR

SEQ ID NO: 259978 - protein, 123 aa, Zea mays
  Clone ID: MRT4577_168718C.1.pep
WPLLLVFPWLIATRGMFVSVSMTLIWDASTPGVVLALCRLAIPSGVPSGISLYHPLRLQPGEDVETSSIVLVAQEDDRLMGICKKPSASFSFREERCSSQARSLPFRKRVTAGYRSIRWSVQR

SEQ ID NO: 259979 - protein, 47 aa, Zea mays
  Clone ID: MRT4577_168719C.1.pep
LYLTKYKKYKYPQPNSKIPNFRLFLGRHRKSGRLRTPRIYSFSSGII

SEQ ID NO: 259980 - protein, 101 aa, Zea mays
  unsure (1)..(101): unsure at all Xaa locations
  Clone ID: MRT4577_16871C.1.pep
CETLSVISAITYHGGVNPPGGVWSDDSSPRGKPENPFFKTTNSQRSEXFYYSNSLSYLGYVVITILFVNTEYCEHVIXSYTLIECFVVGFVSLLIAYSAGS

SEQ ID NO: 259981 - protein, 106 aa, Zea mays
  Clone ID: MRT4577_168720C.1.pep
RKKKLRREGRPQGGEKGPIGGEHQGGGPVGGGAPPGKPRGHFPRGGAPQKPGGVRGEKDKKPPPPPPRNFPKERFKGRANQHGKGSKKTPHNPQESPKKKKRPPQQ

SEQ ID NO: 259982 - protein, 111 aa, Zea mays
  Clone ID: MRT4577_168721C.1.pep
PEKKARPRFFKAPGEVRKAPPRLQLGKGLQVQPLQLLFPSIGAHGYDYFLSTLGGGLTKKKKAQTGSQKKVFFGVCLKKKKTKFFSLLSPFAFLGTVFGLMYVGLHPFWLV

SEQ ID NO: 259983 - protein, 131 aa, Zea mays
  unsure (1)..(131): unsure at all Xaa locations
  Clone ID: MRT4577_168722C.1.pep
RSCPGGATXTNPIXIRGGVQKNXKXLVXELSNFPNKGGDSEKKDISAVNAGNNYEIGXNMXIAEGHGARVDPKGVVTLXRGEGVXNFLYVMEXKQFYRGYISPYFVTDNXKITTEYENFKLTLKYEISILF

SEQ ID NO: 259984 - protein, 49 aa, Zea mays
  Clone ID: MRT4577_168723C.1.pep
FYFSFLFLFYFYFFLLFFIYLFYLHRHPNIYILITIQQVTIGSPTNSYS

SEQ ID NO: 259985 - protein, 73 aa, Zea mays
  unsure (1)..(73): unsure at all Xaa locations
  Clone ID: MRT4577_168724C.1.pep
KNXXPLKXTHSSSAFSSLSTPLAQFLMPARPQTNHITSIFLSYITHSIHLHLLSPYIIFYFLPPFIINTFNPF

SEQ ID NO: 259986 - protein, 79 aa, Zea mays
  Clone ID: MRT4577_168725C.1.pep
ARPGCPGEPTQTTSRPRAESPNNRTPDLRVTGPVFYPHAGEQRKFPILKLRNTSPDHLTSPSQSRSSESRRIGQVAPHR

SEQ ID NO: 259987 - protein, 93 aa, Zea mays
  unsure (1)..(93): unsure at all Xaa locations
  Clone ID: MRT4577_168726C.1.pep
GRVGKNXXXAAWSALKQLVREVVNSSNETEISDXHEQIMIAKXVGNYXMNDKIEMANYPYVXPYPNXYPKQPERKPFFRSIFXSSYSKILPKY

SEQ ID NO: 259988 - protein, 45 aa, Zea mays
  Clone ID: MRT4577_168727C.1.pep
KILKGLGCPCLYHLRVPCVEKQISPAPLGLTNVFPRGKNGWVWVI

SEQ ID NO: 259989 - protein, 73 aa, Zea mays
  Clone ID: MRT4577_168728C.1.pep
INVLFVSNAICRGIVSLRTSFLLVTICMCTGLCKQLLITLMCGFMLHHCIIHGSVILSPKLIPICPYVMHDLM

SEQ ID NO: 259990 - protein, 120 aa, Zea mays
  Clone ID: MRT4577_168729C.1.pep
LAAAAVRADVNCADVEASLGPWVGFVTGKEGAPPPQFCPGVKRVRAIPSGPAERRQGCEWVKQGGANFHPVNAGAIPGLPGQWGGPLPFPLPPHFGCPPGGFFFFLGKCPAVVPGGPCFF

SEQ ID NO: 259991 - protein, 69 aa, Zea mays
  Clone ID: MRT4577_16872C.1.pep
AKQQEKGNPKTSKTATDDKGHIPTRTDNDGSTGNATSRPDYSHDAIAARLNSEQQSHRPTVWEKPGRQP

SEQ ID NO: 259992 - protein, 136 aa, Zea mays
  Clone ID: MRT4577_168730C.1.pep
VSAPRPPGFALVFLGFLFRLLLRGLAVPVALVVPGFFRGLRGLASGVLRLWDLFCVGLRLGNFRFCALFLLRPFFLVPFFSVCLFFCSRPPRFSSAAPVPPFPLLLVPFLGFFGFVSPCYILHPSSKTLKNSFNLT

SEQ ID NO: 259993 - protein, 82 aa, Zea mays
  unsure (1)..(82): unsure at all Xaa locations
  Clone ID: MRT4577_168731C.1.pep
LILPFYFPYCIIXNXRCFYNRYSSYNNISXLSNFLNNFFLYFILSTXLSFFFFLLLHYKSSFIISISFILQLLSLLLNHFTF

SEQ ID NO: 259994 - protein, 91 aa, Zea mays
  Clone ID: MRT4577_168732C.1.pep
QYSLYRRTCHHIKFTFSRKQKQLSAPTEPDLLCPRGFNGAVDAGTSRILYLRVEHKAWKCCGDIPVEKLIHDKNNVSIKDVTPSNIHRFII

SEQ ID NO: 259995 - protein, 60 aa, Zea mays
  Clone ID: MRT4577_168733C.1.pep
LFRQYVQCLREYVLFVSICSCQQATLLSRHMTYCDRFRQALYPCTPAPRSSASSSCAAGA

SEQ ID NO: 259996 - protein, 52 aa, Zea mays
  Clone ID: MRT4577_168734C.1.pep
APTNKKHRRGYFRDILPLGNAPPSPWGSMPLVRLCKNPAKHGPVFPSLGQPP

SEQ ID NO: 259997 - protein, 74 aa, Zea mays
  Clone ID: MRT4577_168735C.1.pep
LPKDGTKGNNMRGYPGEPKHGFHLYTRGSGFISCGTYENRYQALLVKFGTPLSNLCTTNLLGTPKLGTVSRLWL

SEQ ID NO: 259998 - protein, 141 aa, Zea mays
  unsure (1)..(141): unsure at all Xaa locations
  Clone ID: MRT4577_168737C.1.pep
GAPRTKKTKKKSQGPEGPKGTNQQPQGPLGREGGERGAPGGPPGLKDQKDQKPRAPPPQGRKGENRGPGRGEPGGPPRGPKWGEKGAPGGKGETGKTPPIPPPGSPRGKTGXEPGGGTDRPKPRXARPPPPGGNPGNPAGQ

SEQ ID NO: 259999 - protein, 60 aa, Zea mays
  Clone ID: MRT4577_168738C.1.pep
RFIHCRSPLPFFLISLLFIYDIDLRCYTKKTLSAYLCLTLFRISGIKNCSTLYVMIPRDY

SEQ ID NO: 260000 - protein, 61 aa, Zea mays
  Clone ID: MRT4577_168739C.1.pep
AGKGSKICGWGRVTIFGWVHMLGFGWFHNKDFYGGFLASIHSTIKVGKGFMSMLASFLPGV

SEQ ID NO: 260001 - protein, 94 aa, Zea mays
  unsure (1)..(94): unsure at all Xaa locations
  Clone ID: MRT4577_16873C.1.pep
YINIILAFTISLLGILVYRSHLISSLLCLEGIILSLFIIATLITLNTHSLLANIVPIAILVFAACEXAVGLALLVSISNTYGLDYVHNLNLLQC

SEQ ID NO: 260002 - protein, 54 aa, Zea mays
  Clone ID: MRT4577_168740C.1.pep
VSVLEGEEGNLHGFGSTKDMSSLYVYKGTLEVATALTRELDRAKAASAQQEQTN

SEQ ID NO: 260003 - protein, 148 aa, Zea mays
  Clone ID: MRT4577_168741C.1.pep
MAANLPDADAAGFKLFGKVIQPPDAQKRGADEGDDPTPQTALPPPPPPPPPPPPQQAPAAGGPGAEPLPCPRCGSRETKFCYFNNYNVRQPRHLCRACRRYWTAGGALRRVASASPGRRRPRPTARSAPVAAAASSAPAAAEEVGGPR

SEQ ID NO: 260004 - protein, 55 aa, Zea mays
  Clone ID: MRT4577_168742C.1.pep
RQRQEQHQQHRVTYAVHDRMRLAKRWAPGLRCCAGADWYWSGSGGKKFTRPAFEV

SEQ ID NO: 260005 - protein, 126 aa, Zea mays
  unsure (1)..(126): unsure at all Xaa locations
  Clone ID: MRT4577_168743C.1.pep
VCKPLSIYEVXVVSPHDMDDRVKILFTSVCHTDVYFWPAKGQTPMFPRFFGHEVGGIIQSAGERVTDVYPGDHVFPEFTAERTDRAHCKSPHRYTSDLIRIYTNRREMIAHRQSRXPIPAKPIYHF

SEQ ID NO: 260006 - protein, 63 aa, Zea mays
  Clone ID: MRT4577_168745C.1.pep
ILADEHANENPLISHGLLPGGRHIDRGLLLHRLHPHALLNGPGRHRSLVGRKIDNRMQGQCEE

SEQ ID NO: 260007 - protein, 50 aa, Zea mays
  Clone ID: MRT4577_168746C.1.pep
FMMHSHAQLHSEFSIFLKVFRSRDGWGDNLQHTACIKDPPHTRHSPGLDR

SEQ ID NO: 260008 - protein, 58 aa, Zea mays
  Clone ID: MRT4577_168747C.1.pep
AGSTDSYDHKQYVIIFDFSVKQPSQELVNITQATGKCTMNILIKPLTFWSILIFAVPT

SEQ ID NO: 260009 - protein, 211 aa, Zea mays
  Clone ID: MRT4577_168748C.1.pep
MSVDAPVPTLRPEERAGLLALLASAARPLADVVADFLARFPRERRLRVGATLCFLLEDKKMLHATGRLIAFAILHQSYSSQPVNPYVPLLLNAACDESSDKSEQAFVQLLLTSASGDNNNEVLQKSAVDYVNGPVAASQALLPREQLEKQFCRSIVQPQPQVSSFRSATVRCAIPDPDIPQSRANSSEISAPGSKQKSTSDDRDSALVALL

SEQ ID NO: 260010 - protein, 133 aa, Zea mays
  Clone ID: MRT4577_168749C.1.pep
KKSENILLREPKFQFTGPAFFTSPVIGGNPWRHSTCGGGGGVSPLGASCAGCPPRPAPFRSVPSVPLPAWRFGPAPCRGGLRVRPPLLVSWHPAPFLSVLAVTARCLSPFFPFLSLLPAPVCPCPAPFCGVFL

SEQ ID NO: 260011 - protein, 93 aa, Zea mays
  Clone ID: MRT4577_16874C.1.pep
KKKKKKKKKKKKKKKKHNLGEEKQTNIHIHTYIISLFSFHLNSLHFPPFSITRNCFFSFPFPFYSPSITSPFLHLPYFLKTPFSSSLPTFLLS

SEQ ID NO: 260012 - protein, 250 aa, Zea mays
  Clone ID: MRT4577_168750C.1.pep
SRVVVDRNAITSQGPGTAVEFALALVEKLYGKEKMEEVAGPLYLRPQHGVEYTIEELNSVEWKCGSTPQVLVPVANGSEEIEAVNLIDVLRRAGANVIVASVEEKLQIVTRRHKFNLIADMMLDEAIKMQFDLIVMPGGLQGAQKFASTKQLVDLLKKQAESNKPYGAICASPAHVLEPHGLLKGKKATAFPPMSHLLTDQSACEHRVVVDGNLITSRAPGTATEFGLAIVEKLFGRDKAVSIAKELIFM

SEQ ID NO: 260013 - protein, 101 aa, Zea mays
  unsure (1)..(101): unsure at all Xaa locations
  Clone ID: MRT4577_168751C.1.pep
NLTLSTIQLLLLPDDCVIAILQYLRPQHGVEYTIEELNSVEWKCGSTPQVLVPVANGSEEIEAVNLIDVLRRAGANVIVAAVEEXLQIVTRRHXFNLIADM

SEQ ID NO: 260014 - protein, 62 aa, Zea mays
  Clone ID: MRT4577_168752C.1.pep
IRALFKETKKDKVVVLPSHHPPTLRLIIMDLHGVKKLFGKRESAGHCQKSGLHVMVNCTVCY

SEQ ID NO: 260015 - protein, 143 aa, Zea mays
  unsure (1)..(143): unsure at all Xaa locations
  Clone ID: MRT4577_168753C.1.pep
KRAKETREKGEAKKKEKAXNXXGKPRHSNDXNRPXDXXXXXRXAGGXSXXXXTXRRXKKXKTRPKKDRAGKXXRNXXQXKEXPNTRXEPDRRXXGKTRXXGQPQXXKXREEPQRRXXDNPXXXXKERKXPXXRXQEXQKQAKA

SEQ ID NO: 260016 - protein, 47 aa, Zea mays
  Clone ID: MRT4577_168754C.1.pep
ACLLEAAQPQIILRGCGFIESNTSLVFLCTVLLWSTRLRVIVCAMGP

SEQ ID NO: 260017 - protein, 52 aa, Zea mays
  Clone ID: MRT4577_168755C.1.pep
EGCGQKINGFFQEKKTGEMGPQDGHFRDLPKKAQVEDLIDRIEAQNKKWGPF

SEQ ID NO: 260018 - protein, 50 aa, Zea mays
  unsure (1)..(50): unsure at all Xaa locations
  Clone ID: MRT4577_168756C.1.pep
MAXSFAVATVPSLAAPAAKKRSVGVTYLEGMNAYSGLKGLNMVNMLGVRK

SEQ ID NO: 260019 - protein, 64 aa, Zea mays
  Clone ID: MRT4577_168757C.1.pep
SLKKANQRTPAGSQTEGRKGRTIHLNYSSPIRRHQEQGKRKRQKPTQPHENSLTQPPSNIKLET

SEQ ID NO: 260020 - protein, 169 aa, Zea mays
  unsure (1)..(169): unsure at all Xaa locations
  Clone ID: MRT4577_168758C.1.pep
LAAATAAATPALGDVPPKLDPSQEVXEFLRVSGRDDCARPSLAPXISPLGLSPWKIGXDTRRGITSQCTEKGLRXVTMKLTVHNXRQGKVSXCPSDAKLVIXALXEPQRYRKKDKNXKHSSXISLNDVLYIARTIKCSSMSXELAATAEDILATSAFVRCTDDGENPKD

SEQ ID NO: 260021 - protein, 81 aa, Zea mays
  Clone ID: MRT4577_168759C.1.pep
FFLFRASLLVHHLIKGGAAAYDPLPAEESRGGKINELQGHLADYACQHRKHGHYALLRMLDGFTLVSCLLLLLPGKPVSAT

SEQ ID NO: 260022 - protein, 83 aa, Zea mays
  Clone ID: MRT4577_16875C.1.pep
VASNIMEEPSPKQLFLVRGKIRKMIEHDVSPHFIFSHLVAELKRDKDEDFQHSVDELASDLNHIPKGSAKETNHGRQTLKRGI

SEQ ID NO: 260023 - protein, 80 aa, Zea mays
  Clone ID: MRT4577_168760C.1.pep
RSRVPTYRSAGASKRHLGSNLNHSFKIEGHSTNECIAKHLIMPRDQDLTRSQRYMLQGIHVDQHVLHNIDSQDPEGYMAL

SEQ ID NO: 260024 - protein, 53 aa, Zea mays
  Clone ID: MRT4577_168761C.1.pep
WVRLSQGSVHTSDSITLHPSLASAKGSRPRETSVSPEAPHFTADTPPARPRPG

SEQ ID NO: 260025 - protein, 47 aa, Zea mays
  Clone ID: MRT4577_168762C.1.pep
KTNKRMHPCTPKGQHSDMSKNLEINTSHTAYIKETIVTNITINLFIN

SEQ ID NO: 260026 - protein, 99 aa, Zea mays
  Clone ID: MRT4577_168763C.1.pep
NKDQIAKDVKQFYDQALQQAVVDDDANNAKAVVKTFHETLDYCGSSTLTALTTSVLKNNLCPSGSNIISNLFKEDCHQKIDDLFSGKLYLIGIAAIVVA

SEQ ID NO: 260027 - protein, 61 aa, Zea mays
  Clone ID: MRT4577_168764C.1.pep
AGETHTCWLRKHRGRMVSSSTGQGCRSERKGPPLAVSLAGLGRARRATAQGHGGWPGPGAW

SEQ ID NO: 260028 - protein, 46 aa, Zea mays
  Clone ID: MRT4577_168765C.1.pep
VAVQTPYTLVCILYREPLRVIIGSYNLNEHAILCYLVSNTDPISHH

SEQ ID NO: 260029 - protein, 50 aa, Zea mays
  Clone ID: MRT4577_168766C.1.pep
FPPRLLKSYPQSFEPRKDRFLRTGRNLTPHDSIRADPGGGMGPKSVGGTP

SEQ ID NO: 260030 - protein, 77 aa, Zea mays
  Clone ID: MRT4577_168767C.1.pep
GALRDCKRITSRQRRHNRRRRIISVFERARCTGERVGEGTALVAYGNGEELGASRSPHKQGSPEGRGLLFASERASP

SEQ ID NO: 260031 - protein, 68 aa, Zea mays
  unsure (1)..(68): unsure at all Xaa locations
  Clone ID: MRT4577_168768C.1.pep
EQRXQSARAPLIRWSTHLQLRDPTTAAMASSGAPGPAAAMASDDTEDDQLASMYTEDIIRAYRLHDNN

SEQ ID NO: 260032 - protein, 78 aa, Zea mays
  Clone ID: MRT4577_168769C.1.pep
LPPPSPPTAAPLGNPKRAAHPQTRILLPIGPAIGGQAHRNSAAYCRGTPHEGHETHETIYAPSQAILLNPTGLQRPVQ

SEQ ID NO: 260033 - protein, 97 aa, Zea mays
  unsure (1)..(97): unsure at all Xaa locations
  Clone ID: MRT4577_16876C.1.pep
MGRVRSKTVKKAARVIIEKYYXRLXGNDFHTNKRVCEEIAIIPSKNLRNKIAGYVTHLMKRIQRGPVRGISIKLQEEERERRDNYVPEVSALDQEII

SEQ ID NO: 260034 - protein, 63 aa, Zea mays
  unsure (1)..(63): unsure at all Xaa locations
  Clone ID: MRT4577_168770C.1.pep
VLSKRQAWLMTQVHTPGLLYTAPIRKCKAGAWTASSVTAPXCXYICGLRLTSENGKRKPVPPV

SEQ ID NO: 260035 - protein, 139 aa, Zea mays
  Clone ID: MRT4577_168771C.1.pep
IIEGSARTEVCVARGLILLSLQLMEGPPTGMSARSPRVSAPHGSLATTPKVTMLSQHAVLQRGRHAKTLPCFTPDCSCRLRDRLCYVILYCLMLEPRPLREATTLTCDATTDDDYAASRELLLKGNVLQGIQVSLTDMR

SEQ ID NO: 260036 - protein, 47 aa, Zea mays
  Clone ID: MRT4577_168772C.1.pep
FLFKGLPLIQGGDIIQEGRPIIQKHDRGHDLVASSYALGEIPFFDVT

SEQ ID NO: 260037 - protein, 140 aa, Zea mays
  Clone ID: MRT4577_168773C.1.pep
MDSKGKGKVFDEKEMIPIDDEPKGEKIVDSRSEKWKEGKKKCIKKIIYYDSATSSSSQKDDNASPSKQKARRVQQGKWLAKCQVNGIKVLWVKSPRFPISFDFHLHFWITYSPPLGALTCNSGTHERSGGGGHTKSGSGN

SEQ ID NO: 260038 - protein, 41 aa, Zea mays
  unsure (1)..(41): unsure at all Xaa locations
  Clone ID: MRT4577_168774C.1.pep
MHDVTSIXQEMRRXQAPAAQEAYEXNHQIPGGAQRVQCVQQ

SEQ ID NO: 260039 - protein, 238 aa, Zea mays
  unsure (1)..(238): unsure at all Xaa locations
  Clone ID: MRT4577_168775C.1.pep
MVFARSAINLARPAGSLFAQRAAPSSAFSKIGAVRTLTASSSRQGKVLLCLYNGKEHAKQEPRLLGTTENELGIRKWLEDQGHTLVTTSDKEGESSVFKKEMVDAEVIITTPFHPGYLTADRLKKCKNLKIAVTAGIGSDHVDLNEANKTNGGITXVAEVTGSNVVSVAEHVVMTILTLVRNFGPAREQIARGDWDVAEAAKNEFDLEGKVVGTVAVGRIGERVLRPLKAFDCKELLY

SEQ ID NO: 260040 - protein, 63 aa, Zea mays
  Clone ID: MRT4577_168776C.1.pep
GVKRKVYTNDVRIPLKKKKKKKKKKKKKKKKKKKKKKKKKKKKEGASDLEPQETAQASGPTSP

SEQ ID NO: 260041 - protein, 133 aa, Zea mays
  Clone ID: MRT4577_168777C.1.pep
HASATRDRTTDPAVASVCGGLGGPRPRFRWTEAYRLARSRRSSIRLEENQVARHLFSRRCDNFYRRLVGCHARPEFIASSSPEVLDDLRHASMEVGFSTDEREVYQDSASKLQIKEKSVVKSYAAKFVKLITS

SEQ ID NO: 260042 - protein, 78 aa, Zea mays
  Clone ID: MRT4577_168778C.1.pep
SGSMAGELHQITEADFPVNKPIISCVDRVDHLINRARALRAQFQVRHEEACLSIPLETHAADWVRTKPVAFTQELTHC

SEQ ID NO: 260043 - protein, 270 aa, Zea mays
  Clone ID: MRT4577_168779C.1.pep
MEAAGGGGEVHKASNDKEEHFVLVHGAGHGAWCWFKLACLLRGSGRHRVSCVDLAGAAGSLVDPDDVRSFDEYDAPLLDLMAALPDDGRKVVLVGHSAGGLSVTHAMHLFRDKIKQAIFVAATMLPFGYQSEQDIKDGAPDLSEFGDDVYDLKFSLGDDRPPTSVALREEHQRAILYQQCTHEDSTLASILLRPWPAALGAARFGRADDGAVNTVRRVYVKTANDRMLKPEQQEAMVRRWPPSEVAAMDTDHSPFFSAPERLFELIIKSL

SEQ ID NO: 260044 - protein, 69 aa, Zea mays
  Clone ID: MRT4577_16877C.1.pep
PAGGPPNLKGLSNGKVNNLLFLTVFYSILASGPPFGLFFRHTNKELLGPLKSQNEPPPHFFFGFNFYNP

SEQ ID NO: 260045 - protein, 293 aa, Zea mays
  unsure (1)..(293): unsure at all Xaa locations
  Clone ID: MRT4577_168780C.1.pep
MEAAGGGGEVHKASNDKEEHFVLVHGAGHGAWCWFKLACLLRGSGRHRVSCVDLAGAAGSLVDPDDVRSFDEYDAPLLDLMAALPDDGRKVAVPASSVALPYMHGASSCCVXQVVLVGHSAGGLSVTHAMHLFRDKIKQAIFVAATMLPFGYQSEQDIKDGAPDLSEFGDDVYDLKFSLGDDRPPTSVALREEHQRAILYQQCTHEDSTLASILLRPWPAALGAARFGRADDGAVNTVRRVYVKTANDRMLKPEQQEAMVRRWPPSEVAAMDTDHSPFFSAPERLFELIIKSL

SEQ ID NO: 260046 - protein, 143 aa, Zea mays
  unsure (1)..(143): unsure at all Xaa locations
  Clone ID: MRT4577_168781C.1.pep
GRYSAHFRGQAHFFXYEGRCGLPTNFDSNYCYALGYGAGALLQSGKTGLISSVGNLAAPVEEWTVGGTALTSLMDVERRHGKFKPVIKKAMVELDAAPFKKYASMRDEWALKNRYISPGPIQFSGPGSNDSNHTLMLELGAAL

SEQ ID NO: 260047 - protein, 44 aa, Zea mays
  Clone ID: MRT4577_168782C.1.pep
PSRAVLPQLRHPLLALLHRLSQYQHHYCLYYLHGLRGWSSILSV

SEQ ID NO: 260048 - protein, 136 aa, Zea mays
  unsure (1)..(136): unsure at all Xaa locations
  Clone ID: MRT4577_168783C.1.pep
VTNEEDPITEIFFDAKWRIPLPRRRTRRGTLAPLHETARIGDEXGSRMLSPSEIPQRDWLPSDFTFGAATSAYQSFXARTEDGKGESNWDHFCHNHPERILDGSNSDIGANSHHMHKTHVRLFKEMGMGRYRTSIS

SEQ ID NO: 260049 - protein, 214 aa, Zea mays
  unsure (1)..(214): unsure at all Xaa locations
  Clone ID: MRT4577_168784C.1.pep
CARGAAKQWPPQRQQQARHPPLSPPLPSXPPLPSHPDPPTPPSRQQDPDALPEATPPPXPSPRPPPXPPPPEDAEPXPTPSSSPSPAPPPTRXRADPKPPPPPPSPPPPPQPSAKESSGSKEAFERALEYRNGNGGGLDGGSSLLNPSPTFGQSTFTSKEGAFGKVAKKKGGYAYDETDFLGLGFFEKNVIKVHHQGCLKELILFQMKILLRWR

SEQ ID NO: 260050 - protein, 564 aa, Zea mays
  Clone ID: MRT4577_168785C.1.pep
MAAAAVTSNGGAVAANGPAPGRLASVYSEVQTNRLLHALPLPSVLRSNFSVVVGPASSAAGNPDEIAKLFPNLFGQPSASLVPSAEPAATRPLKIGVVLSGGQAPGGHNVICGIFDYLQERAKGSTLYGFKGGPAGIMKCKYVELTSDFVYPYRNQGGFDMICSGRDKIETPEQFKQAEDTANKLDLDGLVVIGGDDSNTNACLLGEYFRSRNMKTRVIGCPKTIDGDLKCKEVPTSFGFDTACKIYSEMIGNVMTDARSTGKYYHFVRLMGRAASHITLECALQTHPNAALIGEEVAAKKQTLKNVTNYITDIICKRADLGYNYGVILIPEGLIDFIPEVQKLIAELNEILAHDVVDEAGAWKSKLQAESRELFEFLPKTIQEQLMLERDPHGNVQVAKIETEKMLISMVETELEKRKAEGRYSAHFRGQAHFFGYEGRCGLPTNFDSNYCYALGYGAGALLQSGKTGLISSVGNLAAPVEEWTVGGTALTSLMDVERRHGKFKPVIKKAMVELDAAPFKKYASLRDEWAIKNRYISPGPIQFSGPGSDDSNHTLMLELGAEL

SEQ ID NO: 260051 - protein, 79 aa, Zea mays
  unsure (1)..(79): unsure at all Xaa locations
  Clone ID: MRT4577_168786C.1.pep
LIFSNCDSTGERTSHRPPVDLAFVAARXFIXGALMQNYSVIKGRTRMGRPSGWPIITTSYDYEATMVSSRLLTFTKVSH

SEQ ID NO: 260052 - protein, 264 aa, Zea mays
  Clone ID: MRT4577_168787C.1.pep
MAAAAVTSNGGAVAANGPAPGRLASVYSEVQTSRLLHTLPLPSVLRSNFSVVDGPASSAAGNPDEIAKLFPNLFGQPSASLVPSAEPAATRPLKVGVVLSGGQAPGGHNVICGIFDYLQERAKGSTLLGFKGGPAGIMKCKYVELTSDFVYPYRNQGGFDMICSGRDKIETPEQFKQAEDTANKLDLDGLVVIGGDDSNTNACLLGEYFRSRNLKTRVIGCPKTIDGDLKCKEVPTSFGFDTACKIYSEMIGNVMTDARSTGNT

SEQ ID NO: 260053 - protein, 71 aa, Zea mays
  Clone ID: MRT4577_168788C.1.pep
SARPAPCYSATTRLCLLRTLVAAAATSTIACTRHHRRKEDPPVCLVHPMLSPYLVVVCCSSSCYRRRFVRQ

SEQ ID NO: 260054 - protein, 105 aa, Zea mays
  unsure (1)..(105): unsure at all Xaa locations
  Clone ID: MRT4577_168789C.1.pep
TLARRRRLIIAVDTAFGXNSLLMKNIVHCDLKXDILLVNSRDPQCALCKGGDLGLSKVKRQTLICGGGRGTLAWVAPDLLNGCTXCASDKAHVFCFGIGLWLLIP

SEQ ID NO: 260055 - protein, 780 aa, Zea mays
  Clone ID: MRT4577_16878C.1.pep
MSLEVDNPAGGAGGGGESANRLSLKRHDSLFGDAEKVSGGKYHGSEGSWARTLHLAFQSVGIIYGDIGTSPLYVYSSTFPDGIKYNDDLLGVLSLIIYTLIIIPMLKYVFVVLYANDNGDGGTFALYSLISRYAKIRLIPNQQAEDAMVSNYSIEAPTSQLKRAQWFKQKLESSRAAKILLFTLTILGTSMVMGDGTLTPSISVLSAVSGIKEKAPNLTQTQVVWISVAILFLLFSVQRFGTDKVGYTFAPVISVWFVLIAGIGLYNLVVHDVGVLRAFNPWYIVQYFKRNGKEGWVSLGGVILCVTGTEGMFADLGHFNIRAVQISFNGILFPSVVLCYIGQAAYLRKFPENVGDTFYKSIPAPLFWPTFIIAILAAIIASQAMLSGAFAILSKALSLGCLPRVQVIHTSKKYEGQVYIPEVNFMMGLASIIVTIAFRTTTSIGNAYGICVVTTFSITTHLMTVVMLVIWKKHIVYVLLFYVVFGLTEMIYLSSILSKFIQGGYLPFCFALVLMTLMATWHYVHVKRYWYELDHIVPTNQMTALLEKNDVRRIPGVGLLYTELVQGIPPVFPRLIKKIPSVHSIFLFMSIKHLPIPHVLPAERFLFRQVGPREQRIFRCVARYGYSDALEEPKDFASFLADRLKMFIQEEVAFAQNDAENDDEAATDHQAPPRPRRSTGSVVHSEEAIQSRGSTHSGRITFHASQTAEEEKQLIDREVERGVVYLMGEANVSAGPNSSVLKKIVVNYIYTFLRKNLTEGHKALAIPKDQLLKVGITYEI

SEQ ID NO: 260056 - protein, 123 aa, Zea mays
  Clone ID: MRT4577_168790C.1.pep
MAGCCVFLRWPSASPSRIGYRSLVDAAADDAAPPSTVTVVVGKERRAFAVDRLVLDSYPLRLLLETAARREERRAGGGAGAIFVDVDAILFEHILWLACDARSVSQILHLDLKEIIDFYAQDA

SEQ ID NO: 260057 - protein, 123 aa, Zea mays; identical to SEQ ID NO: 260056
  Clone ID: MRT4577_168791C.1.pep

SEQ ID NO: 260058 - protein, 123 aa, Zea mays; identical to SEQ ID NO: 260056
  Clone ID: MRT4577_168792C.1.pep

SEQ ID NO: 260059 - protein, 220 aa, Zea mays
  Clone ID: MRT4577_168793C.1.pep
SPDRAEPHPQPLIPAGSLTVFLIGSILLTVPVYDRLLAPLARRLTGNPHGLTPLQRVFVGLLLSVAGMAVAALVERHRQVASGHGATLTVFLLMPQFVLVGAGEAFTYMGQLAFFLRECPKGMKTMSTGLFLSTCALGFFFSTLLVTIVHKVTAHAGRDGWLADNLDDGRLDYFYWLLAVISAINLVLFTFAARGYVYKEKRLADAGIELADEESIAVGH

SEQ ID NO: 260060 - protein, 50 aa, Zea mays
  Clone ID: MRT4577_168794C.1.pep
DIYSLLDLTEFGSIFKSNKCENHNKYKCNKGLISNKKLVIIKYSIVIILL

SEQ ID NO: 260061 - protein, 135 aa, Zea mays
  unsure (1)..(135): unsure at all Xaa locations
  Clone ID: MRT4577_168795C.1.pep
DPRGRPGRSSLHRLRRLLHNTKAKAPTRRRRQQQKLYPRTKETXRKSTGXGKAPRGQKDSKATRKPGTTTSATKTPHTERPGTGAPRKTPKKHKRTERLSRKQQTRLLARERAERPTTDFLFNTPPPRGEEEGKE

SEQ ID NO: 260062 - protein, 89 aa, Zea mays
  Clone ID: MRT4577_168796C.1.pep
GQIKTNIFTFMQAALHLDLGYIPLCLYWGGGGSIMPATPQKLAPKGTGADESMKHWSQFRGTNLTHSTPQTGLGIHSYIRGARIDMGVS

SEQ ID NO: 260063 - protein, 56 aa, Zea mays
  Clone ID: MRT4577_168797C.1.pep
LLLNNITQGFSHMPQLGISQETSGTALPLSRYSPLLNDSPYRTCTSWGLTFTCASK

SEQ ID NO: 260064 - protein, 133 aa, Zea mays
  unsure (1)..(133): unsure at all Xaa locations
  Clone ID: MRT4577_168798C.1.pep
PPPLRPRKLSWPPMFRDPXPKGVSLXPVKKRARPPQKPFSRSIGGASLGVIPKKKVXKPRGPHFVKKTAFFGFKGGPQKPQGWKKAKKGGVGQSPKTPPKGAVPKGSQGPQLGGGGGKPLKNLGWFFALPVVP

SEQ ID NO: 260065 - protein, 58 aa, Zea mays
  Clone ID: MRT4577_168799C.1.pep
RFWRLTCPQVLARLRGGRRRLSSCSTAATSTADAPCCGGTMSAVSSIPPCVRLPVGLY

SEQ ID NO: 260066 - protein, 107 aa, Zea mays
  Clone ID: MRT4577_16879C.1.pep
RTQTTSIGIRYRTPGVSAISVDVVSPCARVSTWFSSRLFMFVCASSILNSLQDRFPFLCGCVGAEQYSASPPMLSQGRICVGVLRVCRREPRADSPYGFFDQWSASV

SEQ ID NO: 260067 - protein, 61 aa, Zea mays
  unsure (1)..(61): unsure at all Xaa locations
  Clone ID: MRT4577_1687C.1.pep
MALVPSRSDSEALIPEVEMNAGADQTAXTARVTVVQASSVFYDTPATLDKAEKLVAEAAGY

SEQ ID NO: 260068 - protein, 78 aa, Zea mays
  unsure (1)..(78): unsure at all Xaa locations
  Clone ID: MRT4577_168800C.1.pep
LIGEPITDTRGDTGWQHTSPSCARGSLDTCXANATIDPECSQAPIAALLCADRPSIIASVCENPALQPYRLQQAIAAS

SEQ ID NO: 260069 - protein, 309 aa, Zea mays
  unsure (1)..(309): unsure at all Xaa locations
  Clone ID: MRT4577_168801C.1.pep
MMPYGTAAEAEAALGRSMTWAEALWFRYSAGMPDLCLTWHVSLVYLVLYALVPLPVMVIQKLAPGYALRHKLQPGVPEPSPVSTYVEYIRDSRGVTLAALGPFPLIYSIAFKLFGVRTGLPLPSVWETATHLAVYSLVEDYTSYWLHRFLHTRWGYEKIHRVHHEKTAPSGFAAAYATGTELSLYLTTLFLGPAIVPSHVTTHWLLFSIRIMEAFDTHSGYHFPFSLARFIPFYGGAEFHDYHHYAGEKTRSNFSSVFTYCDYIYGTNKGYMYHKRSLAELKTXGRTQRERRLRLRTLNILCTNKLDTA

SEQ ID NO: 260070 - protein, 101 aa, Zea mays
  unsure (1)..(101): unsure at all Xaa locations
  Clone ID: MRT4577_168802C.1.pep
FTHLAAMSNVVSPITMGGSVSNDLNEPLKGGLVRGEPKNXIXTKGGGGGGDSSWGMLQVQSSLACPEFVLRIGWFILPWGWPRRSLGGGRPCSCCWVATYV

SEQ ID NO: 260071 - protein, 93 aa, Zea mays
  unsure (1)..(93): unsure at all Xaa locations
  Clone ID: MRT4577_168803C.1.pep
GSKAGKRYPDLEETGTAGQATVVLGLAPNXKASPDFFMASKDSCQASNSCGWGGSCKCAPRTCCPHESTPWDMIITYLAGGGGGPLIGGAGLA

SEQ ID NO: 260072 - protein, 79 aa, Zea mays
  Clone ID: MRT4577_168804C.1.pep
QIKYAVRSKYDVDAIFQVVPIVAAHCVVYRSTLAHNHNPSRACCMSIAPRIITLNAQMLVVYLHMFVLLMHGNVLFDPS

SEQ ID NO: 260073 - protein, 86 aa, Zea mays
  Clone ID: MRT4577_168805C.1.pep
TIQRRLAWPLRKDDTHKSRNGPNFFADSHICPRRSHFDPSAPVFINNSVLANSCRLCTRTFCSLFADWPLPLQTWDFAHCPSYYHF

SEQ ID NO: 260074 - protein, 66 aa, Zea mays
  Clone ID: MRT4577_168806C.1.pep
GSPDRGGGEDARSAGSSCLCSGPRGTHNTTARIVARMPLSETVCSNSTLKLLLTIYPLFLFKLEKT

SEQ ID NO: 260075 - protein, 43 aa, Zea mays
  Clone ID: MRT4577_168807C.1.pep
LNPVRVCLPRYKPLRSEPPEGFFQGAPSLRAKYATPSNNRTCV

SEQ ID NO: 260076 - protein, 104 aa, Zea mays
  Clone ID: MRT4577_168808C.1.pep
TVSTSCYLCRFLVRAPPLKSRSAVRCPSAAPPGASGATSTSKVNPHLLPVCFVRPIYTCRLQPPAQGYVPACSFQLEQYSPVLDWNMQPQPKVAEAIGVVAFRG

SEQ ID NO: 260077 - protein, 87 aa, Zea mays
  unsure (1)..(87): unsure at all Xaa locations
  Clone ID: MRT4577_168809C.1.pep
PRVRILPIFLLLQLXIPPNHPISNAILYKILGPSFQLLQTSTKPYIFSYYNHIINYTHILNKSSDNIKHDYATTNHTIIIPTPSYIT

SEQ ID NO: 260078 - protein, 68 aa, Zea mays
  unsure (1)..(68): unsure at all Xaa locations
  Clone ID: MRT4577_16880C.1.pep
STHRVRPRXRPRVRPRVRDRVHICSPQNAHKVLSLLDVCYIGFGYGCSRRREFVNLAKGLVNLIQILS

SEQ ID NO: 260079 - protein, 228 aa, Zea mays
  unsure (1)..(228): unsure at all Xaa locations
  Clone ID: MRT4577_168810C.1.pep
MSALFNSSRVAVRAASAAPSAARAFSSTPAPQATLRELESRIKSVGNIXKITKSMKMVAASRLARAQRAMEGAKTYGAANQAVFDQSEASKSESKVEKILYIVASSDXGLCGGIHSSVAKAARKDIEHGEGQGKEIRVVALGEKPKQQMARGNGANDLDLSFXXIGKXPLTFGDALAIADKIEATKFEFDKVKIIFNKFVSVISYEASALEIYSTKALQGSPARRLRS

SEQ ID NO: 260080 - protein, 91 aa, Zea mays
  Clone ID: MRT4577_168811C.1.pep
DDFAPTSLSFPRSWLRDGPVRESVSVINLLASQKRCRATETRLCFVETMDCVGENRRTNTRVLQIIYSCCVIAYVFQCQCVKSNLEYRVRK

SEQ ID NO: 260081 - protein, 105 aa, Zea mays
  unsure (1)..(105): unsure at all Xaa locations
  Clone ID: MRT4577_168812C.1.pep
IYFYRVSLKYSHFTRTNRPTSVGEGRAASMAHWSTTTTIGAAELIAWFSRGNYSYGRHEAWRFRISWAHGPVLLPTAXDSXNSIXLLHXLLLHRWTARPRQWXSC

SEQ ID NO: 260082 - protein, 100 aa, Zea mays
  unsure (1)..(100): unsure at all Xaa locations
  Clone ID: MRT4577_168813C.1.pep
YLHEYARPAWVLMDVSSGRXLAGDGPRAKLQSFGAARAITGATAGXTSXGAEEALFTMTSRIEGTRGYISPESLEHGVVSPKANVFSLGVVLLELVTGMD

SEQ ID NO: 260083 - protein, 156 aa, Zea mays
  Clone ID: MRT4577_168814C.1.pep
GIAFISSLESLMFDRTRGRALPRIALFTGCRECELIVSEWIGRDTPVVGDGRHVVVLFPDAVRSDRRWSGFCVSMSYKGVSGRRGGVVRTPTLVWVCTAGRSSVDCFQYIKGNGEMEGQGVIVPELGNRQEAAVSGVVSGCQVETLPVQDRRFNIA

SEQ ID NO: 260084 - protein, 66 aa, Zea mays
  unsure (1)..(66): unsure at all Xaa locations
  Clone ID: MRT4577_168815C.1.pep
PPPXPGPPGEPPGSATSPPPFPPPPDPPVGGLXRPPPXVPSKPKPLAGLGGISQFCPLGNRPLNKC

SEQ ID NO: 260085 - protein, 101 aa, Zea mays
  Clone ID: MRT4577_168816C.1.pep
PYGQCLVAGLAKYPKKVIRKDPPKKTAKKSRVKCFIKLVNFTPLMAPRYTLEVDFKKVASGGADALSPRDKKVEACKAPKGGLEERFKTGKNRWFFSKLRF

SEQ ID NO: 260086 - protein, 89 aa, Zea mays
  Clone ID: MRT4577_168817C.1.pep
DHHILKGRAEMEQLPDDMLVEILSRLPPSSLATSRCVSTHLCSIVDARRLLRTGHLLPLRLDAFYCISLASVDRETYLFARPSVARQIP

SEQ ID NO: 260087 - protein, 298 aa, Zea mays
  Clone ID: MRT4577_168818C.1.pep
RTLAPARHASVVGAGDPAIISTEKTSSFNTPATIWNAKVLLMSGMSKGAFANITSLRSTEERVVHLNNILKFAVFKKDRSLFAIGGPWNADIDGGDPSADCSCLIRTAIRCVKETVHVDLSSCTHWNRFVEVHYNRIGKDGLFSHKEITVLFVPNLLECLPSVDIWKNNWILYKKSKAERDEQTVKKKKSPGDPKEQMQGELNDGKNLDADQLKEADVGCSDMKNEKDDVDIKQQGNDGEGTGKVEEPVQKMGGDVEGKSTGDSSIDHATTGDKKPTKKKIIKKVVKVVRKKNNWTFS

SEQ ID NO: 260088 - protein, 220 aa, Zea mays
  unsure (1)..(220): unsure at all Xaa locations
  Clone ID: MRT4577_168819C.1.pep
KLLIPAPTRSPLPXPPAPPXAAPPCSASASASDVAPSPSSSHRPPPPLPSPXAPRLPQPPPXRPRPSSPRTLASPSRSTSSPPAASPERRHSRPPPSSPTSSPPPTPTPSSPSSPASASPAPMWPPWSPGTPRCSAPAWRGPWPPTSPRSPASASRAPTSRASSRLPATTSAVDPSSPIYSTACACSGPTRISSLLSSAISTFSRPTLREWISPMSQSCE

SEQ ID NO: 260089 - protein, 60 aa, Zea mays
  unsure (1)..(60): unsure at all Xaa locations
  Clone ID: MRT4577_16881C.1.pep
XRPLRXQGXXVPWGELGFSRRKWPLDSNVLGKSPRSRHNWVTNTRINVRPFLEKTETVCY

SEQ ID NO: 260090 - protein, 57 aa, Zea mays
  Clone ID: MRT4577_168820C.1.pep
ISSCALWCHHVCYMVGLSNCICLCIIACYKRNCLNSVSRRRPRITCTSLIGRCPTRP

SEQ ID NO: 260091 - protein, 40 aa, Zea mays
  Clone ID: MRT4577_168821C.1.pep
HSHRTNWRFYYLGGHSTTPACLPLLHAVFNQFLTRLPLHL

SEQ ID NO: 260092 - protein, 118 aa, Zea mays
  Clone ID: MRT4577_168822C.1.pep
MCTLSSYISHSVLGFKQQCSILNHVLNDNNNNDLKNKTLSSPPGHRPGLSMLKIPIDSTENTFSIDRYGLLRGTLRAPALGWMMYNVLVSNEKSIQSQYKSHVYANPDNVTPDIIESR

SEQ ID NO: 260093 - protein, 71 aa, Zea mays
  Clone ID: MRT4577_168823C.1.pep
HIPARSRREIISQDQEAGPSVHTMLVLDGRRATGSSPHANSPPAAIARYAQPTHSQVLGLVWHPRPLPDAW

SEQ ID NO: 260094 - protein, 109 aa, Zea mays
  Clone ID: MRT4577_168824C.1.pep
MASGELACTYAALILSDDGIAITAEKIATIVKAANIKVESYWPALFAKLLEKRSVEDLILSVGSGGGAAPVAAAAPAGGAAAAAAPAAEEKKEEPKEESDDDMGFSLFD

SEQ ID NO: 260095 - protein, 82 aa, Zea mays
  Clone ID: MRT4577_168825C.1.pep
CHDTEYRPWHGECRHADPEGVLCATSVYVLCFNSPSNDLSLERRCLSRSSSQILRWEMISGEQMFASTSRLVKRERRRRRQS

SEQ ID NO: 260096 - protein, 109 aa, Zea mays; identical to SEQ ID NO: 260094
  Clone ID: MRT4577_168826C.1.pep

SEQ ID NO: 260097 - protein, 109 aa, Zea mays
  Clone ID: MRT4577_168827C.1.pep
MASGELACTYAALILSDDGIAITAEKIATIVKAANIKLESYWPALFAKLLEKRSVEDLILSVGSGGGAAPVAASAPAGGAAAAAAPAAEEKKEEPKEESDDDMGFSLFD

SEQ ID NO: 260098 - protein, 109 aa, Zea mays; identical to SEQ ID NO: 260094
  Clone ID: MRT4577_168828C.1.pep

SEQ ID NO: 260099 - protein, 74 aa, Zea mays
  Clone ID: MRT4577_168829C.1.pep
LSWESRLSLLLSSTGSLALVPFSLSRVCLAAALRSSSSFPLAVRSASPFWSSALAASACFVLSTNMLEISVRVV

SEQ ID NO: 260100 - protein, 40 aa, Zea mays
  Clone ID: MRT4577_16882C.1.pep
KKNFFQPKKKKKKKKKKKKKKKKKKKKKKKKKKKKKKNKH

SEQ ID NO: 260101 - protein, 127 aa, Zea mays
  unsure (1)..(127): unsure at all Xaa locations
  Clone ID: MRT4577_168830C.1.pep
LALRAPIRAGRPSRPHPWDSGELGCTYAALIXLSDDGIAITGEKIATIVKAANIKGEAYWPALFAKLLEKRSVEDLILSVGSGGGAAPGAAAGPAGGAAAAAAPAAEEKKEEPKEESDDDLGFSLVD

SEQ ID NO: 260102 - protein, 139 aa, Zea mays
  unsure (1)..(139): unsure at all Xaa locations
  Clone ID: MRT4577_168831C.1.pep
MASGELACTYAALILSDDGIAITXVLSRCSFLLIEFSFFERSSCYVGGVSCLQAEKIATIVKAANIKVESYWPALFAKLLEKRSVEDLILSVGSGGGAAPVAAAAPAGGAAAAAAPAAEEKKEEPKEESDDDMGFSLFD

SEQ ID NO: 260103 - protein, 317 aa, Zea mays
  unsure (1)..(317): unsure at all Xaa locations
  Clone ID: MRT4577_168832C.1.pep
SPMPPPPPPPPPPPNPLPLPNPKPNPLPNPPPPPPPPPPPPPPRPPPLPNPAPMPCPLPPPRPSPPPRPPPLPNPAPMPCPLPPPRPPPPPAPXPLPPPRPPPPLPNPPPMSCPIPPPLPWPPPMPWPMSPPSPPPLPYPPPRPSPFPXPPLMPWSIPPPLPXPPPMPWPMPPPSPPPFPXPPPMSWPIPPPKPPPLPYPPPMPWPIPPPRPPPLPXPPPRPWPMPPPRPPPFPKPWPTPPPSPPPPPPPYPPPPPYPPPPPPPKPPPPLPKCFLSHRNFSSAAASLVATGRAHAPTAAPLRQSSSASATPLLPMAS

SEQ ID NO: 260104 - protein, 115 aa, Zea mays
  unsure (1)..(115): unsure at all Xaa locations
  Clone ID: MRT4577_168833C.1.pep
KTTPGPPARFSPPPPRWCGPGPPPWVGRGFFSPPPRGVFLFCSYAPPGXQGPGPFPPPRRGSQVKPKTPPPSIGGPPPFGCAWGGPPIDPARGGPPPPNKFWVWRKKTKNPVFFS

SEQ ID NO: 260105 - protein, 109 aa, Zea mays; identical to SEQ ID NO: 260094
  Clone ID: MRT4577_168834C.1.pep

SEQ ID NO: 260106 - protein, 54 aa, Zea mays
  Clone ID: MRT4577_168835C.1.pep
GEVLKGGNKVQRVGKKDNVGLKERHGQVLWHGKGVRLGLNQFESITHFWSPFFF

SEQ ID NO: 260107 - protein, 118 aa, Zea mays
  unsure (1)..(118): unsure at all Xaa locations
  Clone ID: MRT4577_168836C.1.pep
SACTLHVGVGRLLVFPLRRRPLDWVLAAAGLVPPDPGLLGDFAATIAGPPRYYRXPPSAAPRWRRTPYDRAAAHGVRRGFSGRLLACRAAGARARAGALPAGGTEACKAFRSVHKAGL

SEQ ID NO: 260108 - protein, 85 aa, Zea mays
  Clone ID: MRT4577_168837C.1.pep
APRGGLPPPPKGGPPATIAKSPKGSPKFGGEGPCKLCSKASKSERALQAPSKAKNGAKKVAGPLGSLKKKHGGQINPGPLRAHKG

SEQ ID NO: 260109 - protein, 161 aa, Zea mays
  unsure (1)..(161): unsure at all Xaa locations
  Clone ID: MRT4577_168838C.1.pep
SFFFFLFFFFFFFFFFFFFFFFFFTRPGGPSKGGTPPHGGPGQGNPSXRPPAGKNQGQKSPPGKKGXPPKNSKQKTXPKEKKEKPGGPKKGPNPXKKRGPPPALKKENPPGQRHKKNGPPPGKGGYRIGALSPSPEKNPLSSANGGGPAVPANPKARIRVP

SEQ ID NO: 260110 - protein, 75 aa, Zea mays
  Clone ID: MRT4577_168839C.1.pep
QLPGMTKSMTAVCVLLKAQKIADEIVLLLRPSSVSLPYANSSIDLLNEGVAYRTKHVPYNILMTDASAVINRLIK

SEQ ID NO: 260111 - protein, 63 aa, Zea mays
  Clone ID: MRT4577_16883C.1.pep
SDQANPASIMHLCRAVMVAALSGDYVIHMILISQRVVLHLWSWWSANTIKRDDSIDASHYPVT

SEQ ID NO: 260112 - protein, 61 aa, Zea mays
  Clone ID: MRT4577_168840C.1.pep
LYLKCERRVNLRKAHGFFYILVAAKGYLNASSVESKSCSPELNHSCYNQNRVHTMAIGSMI

SEQ ID NO: 260113 - protein, 112 aa, Zea mays
  unsure (1)..(112): unsure at all Xaa locations
  Clone ID: MRT4577_168841C.1.pep
GTAGSRGLIGLAKLGNTCFMTSSIQCLAHTAIRDEYFLGDYAQIICRATPFGLNGRLALTFGELLRRLSDTDREPVPPQQFKEXLARFAPQLGGFNQHDSYALRAFLPDGLQ

SEQ ID NO: 260114 - protein, 81 aa, Zea mays
  Clone ID: MRT4577_168842C.1.pep
MGSALRIRWTTSTPGFSNSCCPLVYFTTRRPLIQNNGQFVCTYIVKGPFCVVYRTPPCSEIHVHTNYAVYWNKRIHRSSKG

SEQ ID NO: 260115 - protein, 133 aa, Zea mays
  Clone ID: MRT4577_168843C.1.pep
PPPPPTRQYRVGIGGALPPPGGPFPRGGIFRGGSRGSGPPIVPRRCFWGFQGPPRGLVSSFVPSLFPKPGGEFAGGGSFTQVGPPPLCLLGAPGGAPFFLGPLVCPMFCPPCLAWLVGLGPVKADCFLKGLAP

SEQ ID NO: 260116 - protein, 379 aa, Zea mays
  Clone ID: MRT4577_168844C.1.pep
MGRGSDAVPDARRAALLLIVCLAARAASAIQDGLLPNGNFEEAPPKSQLNGTRVMGRNAIPHWEISGYVEYIGSGQKQGDMLLPVPEGAYAVRLGNEASIQQRLAVTPGARYSITFSAARTCAQAEQLNVTVAPESDVLPIQTVYTSSGWDSYSWAFQAAGSVVTLIVHNPGVAEDAACGPLIDLFAIKTMPTPRSSKNNMLKNGDFEDGPYIFPNTQWGVLVPPMDEDDYSPLAPWMVLSSTKSVKYVDAPHHAVPHGARAVELVSGMETALVQNVTTVPGQLYRLQFSAGDAGNGCVGSMTVQAYAARGSVKVPYQSQGKGGHTRGVLDFAAVADQTRVVFVSMGYIMKPDGTLCGPVVDDVSLVSTRNHPARRLLL

SEQ ID NO: 260117 - protein, 110 aa, Zea mays
  unsure (1)..(110): unsure at all Xaa locations
  Clone ID: MRT4577_168845C.1.pep
SSRPANIFHCCGRRSRCIDVNDLLASPNEIRSTHIYCTHXIAEVLDCIPYTLHDNAALNPISIGTELTNRHATGDKNTGITXRKGXITYIMDETCPDRPLLLSTNDITLA

SEQ ID NO: 260118 - protein, 77 aa, Zea mays
  Clone ID: MRT4577_168846C.1.pep
MLRSLGKSAILRMEEAILGKLSSADAIATTACPRLPPVTRTPSGAATPTRGRKGGADADGDRDETRGCIREDIRPAR

SEQ ID NO: 260119 - protein, 62 aa, Zea mays
  Clone ID: MRT4577_168847C.1.pep
KNPGGLKKASNGVGSNPGASMNTGGPPPLFFYDIITPSHAGAPHTYIFVGKNIWLGQGQFYG

SEQ ID NO: 260120 - protein, 93 aa, Zea mays
  Clone ID: MRT4577_168848C.1.pep
HFLLIFGQSNLIKSRQSYQLRYYTLKMLLPSPSQPQQFQESVSPIRDKPCFGNIEEFTPSPDFTVSFVLGQSNDTIRVPKAFHGSYWKSSTPR

SEQ ID NO: 260121 - protein, 141 aa, Zea mays
  unsure (1)..(141): unsure at all Xaa locations
  Clone ID: MRT4577_168849C.1.pep
GTSKGGAGRGGGGNRAPREGRTTNGEPAAEQGGGANNNAPQRGAGAPXXGXXXAPKEKGXXGXKXDXXXXGXXXXXXKTXAXPKEXXKXXXQNQXERXKXGRXXEPXKXXGDRXGRTTRREXXXPPGRGNTXXGSRNXPTQ

SEQ ID NO: 260122 - protein, 47 aa, Zea mays
  Clone ID: MRT4577_16884C.1.pep
KVILFCSPAPQNCLVSDYLFGYGPPVKYGFIRRLITTTSWNQAACFE

SEQ ID NO: 260123 - protein, 114 aa, Zea mays
  unsure (1)..(114): unsure at all Xaa locations
  Clone ID: MRT4577_168850C.1.pep
QQLINYLLNFENSKPIIWLSHTSGCQDIMHYMHTNFDSFKNVYSVILHTQLTDSQYKDTLPETYXMIHLARKLINHCPRTYLMPRKANSYAPITAYRYHYLCSYITHDYIFNSH

SEQ ID NO: 260124 - protein, 198 aa, Zea mays
  unsure (1)..(198): unsure at all Xaa locations
  Clone ID: MRT4577_168851C.1.pep
RQSWPSLLPRRPPCSPLPYLPWRLAAARISPDPKLSSIHSRRSAPAPCPTRAPPQAHPHGRRTLPCMQPSSLPGCAPSTPRRRRLLPLLAMALSRPGRSALARSCAVAQLTPAPCFHGHLSLPLPSVQTSQLAPDSTSPSSWSSTPRNRPRVVVLADAASHHHPVFTIRGIGVVMSWLQHQRPRPRQIRSLLXPMSLG

SEQ ID NO: 260125 - protein, 54 aa, Zea mays
  Clone ID: MRT4577_168852C.1.pep
EPRRLAAGGGERHADRDLHPPEEEGEKREAHRVIAVDAEASKARRSVQLAHRPM

SEQ ID NO: 260126 - protein, 96 aa, Zea mays
  unsure (1)..(96): unsure at all Xaa locations
  Clone ID: MRT4577_168853C.1.pep
ANGHGFCPIVGLPYXYMAAKFPDLFTKMDRFFGKKLEKDPKFFKTGNAGWAKMVPTNPMELETFSKNPPLGRFAVRSMSQTLAAEVLKRVERRDPP

SEQ ID NO: 260127 - protein, 51 aa, Zea mays
  Clone ID: MRT4577_168854C.1.pep
HFQIATHPWEELTTREGSPQPPQINKNKLVNTPFSSSNNKNIHIHTYHTNY

SEQ ID NO: 260128 - protein, 57 aa, Zea mays
  Clone ID: MRT4577_168855C.1.pep
SVVFLKIIDFKELISEQKGLLCGKINHCQDSLISVLFCIIEFVHFSHASKCFTGALD

SEQ ID NO: 260129 - protein, 55 aa, Zea mays
  Clone ID: MRT4577_168856C.1.pep
ILTAFIFNKSCVPGFLGFPVNKKHSQFLSRFSNFFLNFGVTVVHQPKPYGCPKSV

SEQ ID NO: 260130 - protein, 124 aa, Zea mays
  Clone ID: MRT4577_168857C.1.pep
MEYAFVQFEMDESAQSSFDKLNGMLLNDKKVTIRPFVRKQDWEKVWNSITFSSSVLPGKMSGQWSIGHLLASENLRLVIPVLQSLGNPVIGDGYMVDSILIVGNSVTDQVLSSLIKRLKSDNKV

SEQ ID NO: 260131 - protein, 207 aa, Zea mays
  unsure (1)..(207): unsure at all Xaa locations
  Clone ID: MRT4577_168858C.1.pep
LLQSILVGGCVGAMPVIRMIPTSVLXGYFAYMAIDSLPGNQFWERIQLLFITESRRYKVLEGPHASXVESVVPKTVTIFTIFQLVYLLICFGITWIPIAGILFPVPFFLMIVIRQYLLPKFFDPVVLRELDAAEYEELDGVPLEHKLEDEASEVGSCPSRPDAEILDELTTNRGELKHRSSSLREERPIQVTVSTHMVASSAVQPSL

SEQ ID NO: 260132 - protein, 72 aa, Zea mays
  Clone ID: MRT4577_168859C.1.pep
TIGVAKKSCSGQPVNLSWYNKFGLLASPNSKIGYKYKAGANKWGYNGQLDGVGVETQKCVKLVGKKKTFFPP

SEQ ID NO: 260133 - protein, 57 aa, Zea mays
  Clone ID: MRT4577_16885C.1.pep
QKNARVEQQPQRAQQRCVLLTNLTQHKKKAQSFLEVGVHQPGYFEKPNAVTPSEYLL

SEQ ID NO: 260134 - protein, 667 aa, Zea mays
  Clone ID: MRT4577_168860C.1.pep
MDLLRHPFKGVVTDIKGRATWYKHDWVAGLHSGFRILAPTMYIFFASALPVIAFGAQLSTATNGILSTVETLASTAICGIIHSILGGQPLLIVGVAEPTIIMYTYLYNFAKNHQALGEQLYLAWTGWVCIWTAIMLFLLATFNASNVISRFTRIAGELFGMLITVLFLQEAIKGMISEFSVPEDADSSSPIYQFQWLYVNGLLGVIFSIGLLYTALRTRRARSWLYGTGWFRSFIADYGVPLMVIVWTGLSYLHPGKVPSGVPRRLSSPLPWESSSLGHWTTARDLFSVPPAYIFGAILPAFMVAGLYFFDHSVASQLAQQKEYNLKKPSAYHYDILVLGFVVLLCGLLGIPPSNGVLPQSPMHTKSLAVLKRQLLSKKMVDTAKESIGGSATSLEIYGKMEEVFIKMDSEQNTDSVDRELKNFKDAVLQEGDEEGRLAREFDPRKHIEAHLPVRVNEQRLSNLLQSILVGGCVGAMPVIRMIPTSVLWGYFAYMAIDSLPGNQFWERIQLLFITESRRYKVLEGPHASFVESVVPKTVTIFTIFQLVYLLICFGITWIPIAGILFPVPFFLMIVIRQYLLPKFFDPVVLRELDAAEYEELDGVPLEHKLEDEASEVGSCPSRPDAEILDELTTNRGELKHRSSSLREERPIQVTVSTHMVLQQYMI

SEQ ID NO: 260135 - protein, 85 aa, Zea mays
  Clone ID: MRT4577_168861C.1.pep
NWNSPRNSDHHFFWLQDRRNKKTNNSNSYMNIFASLFLENVELEFTEEFRSHFMWLQDRLNKTTDNSNSSINSSAALILENCGIG

SEQ ID NO: 260136 - protein, 45 aa, Zea mays
  Clone ID: MRT4577_168862C.1.pep
LNNAIFRLILLIHLAKQQTVVQIRFKTIQKHNETTEKRMMQTGLK

SEQ ID NO: 260137 - protein, 66 aa, Zea mays
  Clone ID: MRT4577_168863C.1.pep
VLSNALISAIEGTKTEKCSYSDTHTHGDAITGFSVYQRCLRRYYTCVADHRTQGDCGSSEYACVAV

SEQ ID NO: 260138 - protein, 53 aa, Zea mays
  Clone ID: MRT4577_168864C.1.pep
PNSNLTYFHSPSSPPQYDRIHNHNHLHSPGKLQISLTISKGELHPKLINLKPA

SEQ ID NO: 260139 - protein, 72 aa, Zea mays
  unsure (1)..(72): unsure at all Xaa locations
  Clone ID: MRT4577_168865C.1.pep
NFXGVSSQAYQCLNLLIRAKSLLKHLSCEDLTTFFHKRSWVKXXSTXXKNKXSLYXFPXSKHXXXXKITXHX

SEQ ID NO: 260140 - protein, 827 aa, Zea mays
  Clone ID: MRT4577_168866C.1.pep
DEVSFSGASHPANMYTQEDLPKQVSRTLNQGSNVMSLDFHPVQQTILLVGTNVGDIAVWEVGSRERIAHKTFKVWDIGSCTLPLQASLMKDAAVSVNRCLWSPDGTILGVAFSKHIVQTYTFVPNGDLRQQAEIDAHIGGVNDIAFSHPNKTLSIITCGDDKLIKVWDAQTGQKQYTFEGHEAPVYSVCPHYKESIQFIFSTAIDGKIKAWLYDCLGSRVDYDAPGHWCTTMAYSADGTRLFSCGTSKEGDSHLVEWNETEGAIKRTYNGFRKRSLGVVQFDTTRNRFLAAGDEFLVKFWDMDNNNILTTTDCDGGLPASPRLRFNREGSLLAVTTSDNGIKILANTDGQRLLRMLESRAFEGSRGPPQQINTKPPIVALGPVSNVSSPIAVNAERPDRILPAVSTSGLAPMDASRTPDVKPRITDESEKVKTWKLADIVDNGHLRALHLTDTDTNPSKIVRLLYTNNGVALLALGSNAVHKLWKWQRSDRNPSGKSTASVAPHLWQPANGILMTNDTNDGNPEEATACIALSKNDSYVMSASGGKVSLFNMMTFKVMTTFMAPPPAATFLAFHPQDNNIIAIGMEDSTIQIYNVRIDDVKSKLKGHQKKITGLAFSQSMNVLVSSGADAQLCVWSIDGWEKKKSRYIQPPANRPGTLVGDTRVQFHNDQTHLLVVHESQLGIYDGNLDCLRLWSPRDALPAPISSAIYSCDGLLVYAGFCDGAIGVFEAESLRLRCRIAPSAYIPPSILACAGRVYPLVVAAHPMEPNQIAIGMSDGKVHVVEPLDGDPKWGSAPPQDNGAHPHPHPAISAAPSTATNQASDQPTR

SEQ ID NO: 260141 - protein, 216 aa, Zea mays
  Clone ID: MRT4577_168867C.1.pep
MTCVCMSLQVSAMQEEMEKMKEENRMLRRVVDRTMRDYDELKKKVEACYQQQQADEPKEPEVFLSLGATAAGTGGGFAEPKRKERQTVRRPSAGSDDTDDDTKEDRLGLSLSLAASSYEEEKLGAGPAGHDLEEASVAGADRKAKGYALLESSKLEAPAPPAAAGDLAAAGITSQSVNPANRKTRVSVRVRCQGPTMNDGGQWRKYGQKVAKGNPC

SEQ ID NO: 260142 - protein, 119 aa, Zea mays
  Clone ID: MRT4577_168868C.1.pep
CSRCNFSKNMVDGLHSLHLPFATESTENQLICRSKLCFSGILITEGKLEGNMELLRSVAFSDARNCHVAVVCPSSPHLFLLLPHLTYCFQSCWKLSCCYCVSVQSLCLLLPHLTFFLSC

SEQ ID NO: 260143 - protein, 64 aa, Zea mays
  Clone ID: MRT4577_168869C.1.pep
STAHRGENEWEMAVFPRHWASMCPSRAQTPAHGAPSLRLQGLANVCLCVLVNLLQFLFSFGSCQ

SEQ ID NO: 260144 - protein, 100 aa, Zea mays
  Clone ID: MRT4577_16886C.1.pep
GAPFNFHPFQGVLLGGNPLLGGGPAFLQWGGGAFPGGPQPLVPPQGVPGGFFPPRGPLPQIGHFPVAQGGLVGGPFDRSSGRLFDNLFAGGFLGSFSICR

SEQ ID NO: 260145 - protein, 124 aa, Zea mays
  Clone ID: MRT4577_168870C.1.pep
MPSSTMRLLSRRTVTPPPRPRHRIPLTTWDISFLSADYIQKGLLYAKPPFPTDRLLDHLQASLAQALDAYYPVAGRFVTDQHRDANGHVLGCSVSIDCDGQGVDILHAVADGVAVADVIPPTAT

SEQ ID NO: 260146 - protein, 117 aa, Zea mays
  unsure (1)..(117): unsure at all Xaa locations
  Clone ID: MRT4577_168871C.1.pep
DPRRAARXWLGTFDTAEDAARAYDAAAVSYRGRRAKLNFPDAAAAAAARDVQPRRPLPGQSLRENCGSNAASPLHVAVARAPTTLQGTGPAPPKDQDIWDGLNEIMTMDDRSFWSMP

SEQ ID NO: 260147 - protein, 96 aa, Zea mays
  unsure (1)..(96): unsure at all Xaa locations
  Clone ID: MRT4577_168872C.1.pep
VWMXYSSRKFXPLAWAGPGTSLSYHISFLLFYLFFLFNVGTLFTTVTIGGHSTNLLGTTQQWSTNKPSLVGPCFRLLMSYRTSNEVFWMMLVASQK

SEQ ID NO: 260148 - protein, 95 aa, Zea mays
  unsure (1)..(95): unsure at all Xaa locations
  Clone ID: MRT4577_168873C.1.pep
MAPKVALFLALSLLSAATAHRCXPNCSGPADPTPPVXPTPSPHSHSRCPIDALKLKVCVNALRLVKAGLPQNKQRSPXLQRMPHLDRTLRLCTAI

SEQ ID NO: 260149 - protein, 227 aa, Zea mays
  Clone ID: MRT4577_168874C.1.pep
MGGIISGDSPRHSSPASKLEKKMVDAMQQRALKGTSVKSFNSVIMKFPKIDESLRNCRTIFQEFDEDSNGEIDQLELKRCFQNLGIESTDEEIKDLFEACDIYEHMGMKFNEFIVFLCLGYLLNDPAVSEARKRMGLGNLEPTFETLVESFVFLDKNKDGYVSKSEMIQAINETIGGERSSGRIGMRRFEEMDWDKNGTVTFKEFLFAFTRWVGIDNEDDDDEDKEE

SEQ ID NO: 260150 - protein, 152 aa, Zea mays
  Clone ID: MRT4577_168875C.1.pep
VRRSSRPGPGTAYLTLLLFILARCYACVVCSAAPCLPRSLPPPSSARHCSSPPLGAAAKVPPPLLQSAPRCDPLLLCPSAASSPAARLVAFLLERGRRLVLPQSGNLPAPCLRTADLHVSFAALHTTPIFCFHLFFLSRPSPYFFFPLSPPP

SEQ ID NO: 260151 - protein, 76 aa, Zea mays
  Clone ID: MRT4577_168876C.1.pep
MHLCTTHSFQFNNYRKLIKVKKSQCSSSVSSKKVTFYVVILYPSSMSTVRTHAFTGRMFVLHYITIRKIINILHFI

SEQ ID NO: 260152 - protein, 52 aa, Zea mays
  Clone ID: MRT4577_168877C.1.pep
MTTIARGLCVNHRLISPKENEPEPAYDEARIPGSYLSGVAGLHALHLSRRKH

SEQ ID NO: 260153 - protein, 103 aa, Zea mays
  unsure (1)..(103): unsure at all Xaa locations
  Clone ID: MRT4577_168878C.1.pep
EKTVRKAQVEPRKQTSDNFDPKNPQDDPLAMLEHREHLPRENWIQIQTAHIIRESLRGSDRTEGINHPRKCRPLVDQYXLKATRGVGWGKDARPPEAAEPKKT

SEQ ID NO: 260154 - protein, 83 aa, Zea mays
  Clone ID: MRT4577_168879C.1.pep
CSLQLSKARGAVTKGHRLFPLLLIHHVMRSLPATPDRMLADACTTRAWRFYPRQTPPRPSARCCLPPRLLAVRAMDALLFGHH

SEQ ID NO: 260155 - protein, 89 aa, Zea mays
  Clone ID: MRT4577_16887C.1.pep
MGGDFVPYPYPWGQFSSHTHNLIGEFPTGWREALTLASLIDDEKKLGDCQFDLWKQYYVATCVAVFGKLRCSHRLDAVQSGCTALSIFK

SEQ ID NO: 260156 - protein, 41 aa, Zea mays
  Clone ID: MRT4577_168880C.1.pep
MPELNDDDVASDHSAAFSRGSRSRSTSWRLEDGRADAMVQR

SEQ ID NO: 260157 - protein, 99 aa, Zea mays
  Clone ID: MRT4577_168881C.1.pep
TDRSRYKQGLCFQTDTNTYQHWSQTDTNRYNWSHLATLVTNRIFLNDWKQNFGPFYSLCTSRLIFFLGVIFFASHFKLLRGELGGVSTRTSSPSGFISS

SEQ ID NO: 260158 - protein, 75 aa, Zea mays
  Clone ID: MRT4577_168882C.1.pep
IIQVFFSLLSHPPEGPLEVFVQGQVNPFWLIIWLVAQKLMGLFSPYGGGFIPVGGWPSLAFWQVREGGLKGKGLV

SEQ ID NO: 260159 - protein, 154 aa, Zea mays
  Clone ID: MRT4577_168883C.1.pep
VLGPKLTPKPTPSRAPAPKPVAPPAPQIPILALTYAGSGGPKHCRGKLLKKSYFPPPLEKWKNGTCINLPGEARCGVFFSNKGDNCEAQLFNEGDCLNTTSAYINTVVFMPEERAVGALWKSMFVRCGVEVPEAKMLDPSILGGALKKPGGGHG

SEQ ID NO: 260160 - protein, 126 aa, Zea mays
  Clone ID: MRT4577_168884C.1.pep
LGAWMGTGEVCPRRMPSLGDQLVRSPAFALDLRGRNPAAFVREVEAEASRIVGRYVPKKKTLRSWDIRGSNVRLNRVFELNRLPYGGYPGDDDAGVVDRRGKGRLLRSTRALRGELCRPRPLKRGN

SEQ ID NO: 260161 - protein, 136 aa, Zea mays
  unsure (1)..(136): unsure at all Xaa locations
  Clone ID: MRT4577_168885C.1.pep
PRVRFLFVVDDTLHPGLVRRHADSDYNDALSKTIIFLAAHGCGKLASSNSGKRRGNYRLYYXKLADVELTGGYYDTVHNVKYRLPLAITVTTLARTALATTHELDADXSIKHVRQAMKGSTEYMIERGILKNKLGV

SEQ ID NO: 260162 - protein, 117 aa, Zea mays
  unsure (1)..(117): unsure at all Xaa locations
  Clone ID: MRT4577_168886C.1.pep
MGVGLARSPPYCNIKTNYDLNVSGGEGAPYPDCGGKKTTFSVSASTRHNLTGRKLGVDVNYSSFHVHHEAIHLCYXTSCPTSRRFRTSHSQELTGLTSPGSYTLTMIMVVDTNHSLS

SEQ ID NO: 260163 - protein, 67 aa, Zea mays
  Clone ID: MRT4577_168887C.1.pep
TSTVQPLLSVFIPSSTISSIMNKTAGCAIPISAKSLTEYVNSGASSDTSPPAEQGSHKLAYPGTFDR

SEQ ID NO: 260164 - protein, 114 aa, Zea mays
  Clone ID: MRT4577_168888C.1.pep
AVHTKAHLRQQKVLHEDSQAIAHNLHSKVEMDRAHMGSLIHTVRNHLHEDHRDKQRLRDLLKAVKHNMAADNLHTGHHQLTLVHPLMPPGRLTTATIKQNLWLGRLWTAHILHY

SEQ ID NO: 260165 - protein, 117 aa, Zea mays
  Clone ID: MRT4577_168889C.1.pep
PRCRVPTETWPPPLTAEGSASGEIRGRRHHRLRPYTIGRSVGRSFLGSPWGFSSSISGVCDDRRAAISRRTSTSPHNYVSPRIGLLAGVSLLVTAPEGAPGQKESGPDLGKGARTTS

SEQ ID NO: 260166 - protein, 85 aa, Zea mays
  Clone ID: MRT4577_16888C.1.pep
FPYTHIISLLGVLKNLDHYHNLYLFHLPYSLLLPLPSLNLPNIHLIYKLHLYLLLIPFIQISILSSIFFPKISYTFLPHIDIKTF

SEQ ID NO: 260167 - protein, 70 aa, Zea mays
  unsure (1)..(70): unsure at all Xaa locations
  Clone ID: MRT4577_168890C.1.pep
METRFFPQAPRSPSNHVASLGMARHGWELPAPHAPSCSGPVPEAGLARXGPAPALLLXKRREXLAWVGPG

SEQ ID NO: 260168 - protein, 87 aa, Zea mays
  Clone ID: MRT4577_168891C.1.pep
LIAFENKSPTAGLRPSRTILRDMFRFSYAIGRYDMLLICYHKKKESCAVCRYPCPHHQLCASIAPERPGRPCTPLRYGLVPDGARAS

SEQ ID NO: 260169 - protein, 252 aa, Zea mays
  Clone ID: MRT4577_168892C.1.pep
GCDGSVLLDETPFFESEKDATPNANSLHGFDVIDEIKSYVEHACPATVSCADILALASRDAVALLGGPSWKVQLGRKDSRVANRTGAEYGLPAPNSTLAELINLFKQYDLDARDMAALSGAHTIGTARCHHYRDRVYGYNGEGGADIDPSFAELRRQTCQSAYDAPAPFDEQTPMRFDNAYYRDLVGRRGLLTSDQALYGYGGPLDHLVKMYSTNGEAFAKDFAKAIVKMGKIPPPHGMQGEIRLSCSKINR

SEQ ID NO: 260170 - protein, 117 aa, Zea mays
  Clone ID: MRT4577_168893C.1.pep
GWGSYRTRPRRKGCGFVRPEMLNRARSPRLRLQGPLEVVGCGGARVGGRSGLVGPFWASAKCWTLPGVMGEDFFWGAVFFFGLWGGFLRGFFSSAVLFFLGVLFLFSPFCCCVFTLQ

SEQ ID NO: 260171 - protein, 71 aa, Zea mays
  Clone ID: MRT4577_168894C.1.pep
PCPGLAGPAALPSAAAVPRRIKNRNRTDGVYKGALAEVYGPTRAEERRRDANGKANTLSNGIALFSCTLLD

SEQ ID NO: 260172 - protein, 515 aa, Zea mays
  Clone ID: MRT4577_168895C.1.pep
MQPDPQGPGRGKAGGANAHPRLPPPVTAGSAGRPASVLPHKTDNVRDHYRIGKKLGQGQFGTTYQCVGKADGGEYACKSIPKRKLLCREDYEDVWREIQIMHHLSEHPNVVRIRGAYEDALFVHLVMELCAGGELFDRIVAKGHYTERAAAQLIKTIVGVVQGCHSLGVMHRDLKPENFLFASTPEDAPLKATDFGLSVFYKPGDKFSDVVGSPYYVAPEVLQKCYGPESDVWSAGVILYILLCGVPPFWAESEAGIFRQILRGKLDLESEPWPSISDSAKDLVRKMLIRDPTKRFTAHEVLCHPWIVDDAVAPDKPIDSAVLSRLKNFSAMNKLKKMALRVIAESLSEEEIGGLKELFKMIDTDNSGTITYDELKDGLKRVGSDLMEPEIQALMDAADIDNSGTIDYGEFLAATLHMNKLEREESLVSAFAFFDKDGSGFITIDELSQACEQFGLSDVHLEDMIKDVDQNNDGQIDYSEFAAMMRKGNAGGAGRRTMRNSLHVNLGELLKPTET

SEQ ID NO: 260173 - protein, 167 aa, Zea mays
  Clone ID: MRT4577_168896C.1.pep
PILPNVISTNHDPSASTITTSCSFRVQHPAARSYPVDLPMPLLSSRLAARCVCSARCSPPTYLQHPRTVKNVRRRSLKPALFRTSRLSRATSEFHPCASAPKNRRFSRGTARLQLIHPTVVRCACVAAHLSSRRREDISPGSRPMAHPMAHRYTSHFVSLLDTLAAA

SEQ ID NO: 260174 - protein, 146 aa, Zea mays
  Clone ID: MRT4577_168897C.1.pep
KKKKKKKKKKKIKKKKKKKKKKKKKLNGLVVGIKKVKYKKFFFFPGRAFLMVGFSLPLWGPFFGGSRAWAPILWCFLGPYFFPWGKFVFRFPFPPPFRPGALMCKPWGAFGGASLPLFGWASWPVFQSETRWVPFVFFLAPPLGGG

SEQ ID NO: 260175 - protein, 76 aa, Zea mays
  Clone ID: MRT4577_168898C.1.pep
KCTPESQPDPQAISARSPAWVPTLPPKNNSGTKLDRITDHVTKPCTVKKQMSKPLKKLLERHCGGVRRVIVLTWLW

SEQ ID NO: 260176 - protein, 45 aa, Zea mays
  Clone ID: MRT4577_168899C.1.pep
PPPLIKGARPPGLTYFGGGFKRFYRFASQNPKNFKGGRKRGFLKF

SEQ ID NO: 260177 - protein, 56 aa, Zea mays
  Clone ID: MRT4577_16889C.1.pep
ILFHTLILMNQGLLLSIGATNHILFTSFTHHRILSHITPTIVYIYMHTPLFVIINY

SEQ ID NO: 260178 - protein, 100 aa, Zea mays
  Clone ID: MRT4577_1688C.1.pep
MGPQQDGRSSTANGGTAARRKEAAAKQVVRYRECQRNHAASVGGHAVDGCREFMASSADGTAAALTCAACGCHRSFHRREVATATETAADCRDRASTTSG

SEQ ID NO: 260179 - protein, 103 aa, Zea mays
  Clone ID: MRT4577_168900C.1.pep
LAPFLRLGSFKPAPLGFFFFFFYFFFFLFSRRTFPQTKNPLLPLQMAGLKAIIRGPSKKPQTQIFFPNITLKPHPPEVLKTRPKRGSVDQNTPLGLKPQISPS

SEQ ID NO: 260180 - protein, 69 aa, Zea mays
  unsure (1)..(69): unsure at all Xaa locations
  Clone ID: MRT4577_168901C.1.pep
TPNPDVFRIKGKKLHYWTSFDERRKRAPWTXRAGKKRRDGLGGLKYREIDQNTDHQKREERAHEYLQRY

SEQ ID NO: 260181 - protein, 85 aa, Zea mays
  Clone ID: MRT4577_168902C.1.pep
IFHIIIFYSANTHKIGLSRPAHYKKKAFGEQSPAITRTRSDMKKNFSSCTAVHLFLIKAKAQLGTTIARPNQFVETLPRNNRPKP

SEQ ID NO: 260182 - protein, 79 aa, Zea mays
  Clone ID: MRT4577_168903C.1.pep
KSCSNSTDPILRTSNSNQVDQNQLQLRPGIAYCYKSEIATNSCRRLTSNTVHPYWLAKGARASIRVTCQCTTPESRAEH

SEQ ID NO: 260183 - protein, 463 aa, Zea mays
  unsure (1)..(463): unsure at all Xaa locations
  Clone ID: MRT4577_168904C.1.pep
MSVCSRRLGRLRQHWIWSSYQEAATPGNYSCKAEAEMEAAEVEMEAAEVEMEMEVEAERKSDGDGEYEARKKTPMRWLRGNVEHSDAEVAERQKRMKQTHGHLDDKEGEEARKGDIKREGQSESAKSRSESNDQKNKLMYERYLEWKRRNEEKEEEERRRYPDKVNDPEAYQAMLFRQSWDNCYLKKYGSFDKKTNIPCKRFTHNLPPRGGTAKQTVQVFYVKVGGITGGLQWPLXVFGLVALRDSLDYNRNIIFERKRDKCQILTDQNPYLELTGPVRAVLLSGHVIFEASLYVKGATRSDDKELSLLAITSLGEFDDAHSYLVEHSYTSRLSTLELMLGYLTYSVEATIEVRVICGTWPADGFRFIFEANAGIGQWIVLLETAETADVGDKISLARQVVSVDYHRDRELKVVATITNGSATYTDEKGFKPLKMGASSKELSIGGLGLQVTVYWSCFPFAPV

SEQ ID NO: 260184 - protein, 125 aa, Zea mays
  Clone ID: MRT4577_168905C.1.pep
MLGYLTYSVEATIEVLVICGTWPADGFRFIFEANAGIVQWIVLLETAETADVGDKISLARQVVSVDYHKDRELKVVATITNGSATYTDEKGFKPLKMGASSKELSIGGLGLQVTVYWSCFPFAPV

SEQ ID NO: 260185 - protein, 79 aa, Zea mays
  Clone ID: MRT4577_168906C.1.pep
FRGHHASEYCAITIPTATSRLLAKHFSSQSRHNILLRSKLRHLHLSVWDDNNAAKTIMAICAGRSSGHIDHTKGERAAA

SEQ ID NO: 260186 - protein, 101 aa, Zea mays
  unsure (1)..(101): unsure at all Xaa locations
  Clone ID: MRT4577_168907C.1.pep
IRLEGIQLIQVFYLLRGRCWREGALGFNCAFHLWLFNKQLIGXTSIIYYKNHPLDKLTITYSIGTCCTTTVLKPLFPSYRVRPLQGLIMTTYTGWDMAVTL

SEQ ID NO: 260187 - protein, 62 aa, Zea mays
  Clone ID: MRT4577_168908C.1.pep
GSVLVSVNPERQEMLQHLLGPVEFDRYYSNSWLAQQLLLGPLICSVLPYTAIGMAHSTVRVV

SEQ ID NO: 260188 - protein, 41 aa, Zea mays
  Clone ID: MRT4577_168909C.1.pep
LSINHASTRSQSIGEPCQTNKSLTGSSTYYSRYPHTVYSGP

SEQ ID NO: 260189 - protein, 91 aa, Zea mays
  unsure (1)..(91): unsure at all Xaa locations
  Clone ID: MRT4577_16890C.1.pep
TWEGVEPPQPYSTLLYLCLGGAVVLPRSGLGPLPFSVRPRVEQRFGRLLVRKALEIGGARVMGHGRGGGGSDECDGRGGRXXIXXGRPRGS

SEQ ID NO: 260190 - protein, 58 aa, Zea mays
  unsure (1)..(58): unsure at all Xaa locations
  Clone ID: MRT4577_168910C.1.pep
NAPEFTIAVSMPIRCGRNVIGNSHRVCLARQGACPVSSRVVSFTFTLFLXCKTRNTFL

SEQ ID NO: 260191 - protein, 286 aa, Zea mays
  unsure (1)..(286): unsure at all Xaa locations
  Clone ID: MRT4577_168911C.1.pep
MEATTALALSSSSLATARRSPEKATAASLSLRRFSATTSLHLRAARSPALRSHQSPFQGWRRRGRAGGLVVRAEMFGQLTTGLESAWNKLRGVDVLTKENIAEPMRDIRRALLEADVSLPVVRRFIESVSEKAVGTDVIRGVRPDQQLVKVVSDELVQLMGGEVSDLVFAKSGPTIILLAGLQGVGKTTVCAKLAFYLKKLGKSCMLVAADVYRPAAIDQLTILGKKXHLNVXVGVPVYSEGTEAKPSQIAKNGLKEAKVNKADVIIVDTAGRLQVIHMLLRYLFH

SEQ ID NO: 260192 - protein, 231 aa, Zea mays
  unsure (1)..(231): unsure at all Xaa locations
  Clone ID: MRT4577_168912C.1.pep
PAGSTPRPLLASSTPPKSSTARHPHYNNFNYNFNLHLQTSSFSTYFAKMRLTTENINQRVVAAKYAVRGELAVKSEEYRAKIAKGDTGDLPFNEIISANIGNPQQLDQKPITFFRQVASLLENPILLENEEALTKHFGYQTDVIERAKFLLSRXGSVGAYSASTGVPAIRESIAQFIERRDGFPADPEHIYLSAGASSGVNTLLNVICASPKTGILIPIPQYPLYTATLSL

SEQ ID NO: 260193 - protein, 85 aa, Zea mays
  unsure (1)..(85): unsure at all Xaa locations
  Clone ID: MRT4577_168913C.1.pep
TDGCPPMFSPAQEALLMVHRRILETDADDGDEDGEYGXGARMPGXGKTTTRLIVPKQHVGCLLGKGGKIIEPMRMETKTHIRILS

SEQ ID NO: 260194 - protein, 71 aa, Zea mays
  unsure (1)..(71): unsure at all Xaa locations
  Clone ID: MRT4577_168914C.1.pep
GVVDRWDGVXVGDCAPSPAVLRLSPDLRWEEAREPXHAGIDAXNHAVGVGPGMAFANALLGLGPAGGAGGG

SEQ ID NO: 260195 - protein, 80 aa, Zea mays
  unsure (1)..(80): unsure at all Xaa locations
  Clone ID: MRT4577_168915C.1.pep
PAFLVGCSRSVPAGGFVXSXRRANYKMLDKLWDDVVAGPRPETGLXKLRKASFLSARSSSTKDADGFXFXRSQSTPSFPL

SEQ ID NO: 260196 - protein, 96 aa, Zea mays
  Clone ID: MRT4577_168916C.1.pep
TKPKTAMSGYHHTVPVTATSRAYSKLRSAAINHIHAYSKLNSYNTAATHLLSSCSCPPPPTGPSRRRSKPPPPSSLRFLCGPGGGGPGGGGGSTSC

SEQ ID NO: 260197 - protein, 144 aa, Zea mays
  Clone ID: MRT4577_168917C.1.pep
RLARRKIPVFTGEAQQWRRMKAILNLSVSSVAVLAQDTGVQLNPNKSCDFDLECRRSNQTTDAHTHTQLSNPRRLANSNGQRRKAIHVRMRGSALHHHRHHPPLDDETRREPRRRRVEDPGQHQPREGGTGTGTGTPGRPRGTQ

SEQ ID NO: 260198 - protein, 69 aa, Zea mays
  Clone ID: MRT4577_168918C.1.pep
PRQFSNAAWHQSLAGAQAQRRALPGLTVMKARACQSRPSLSIIAFWLLAWAPRGLLSLLRAIWWRRLHY

SEQ ID NO: 260199 - protein, 36 aa, Zea mays
  Clone ID: MRT4577_168919C.1.pep
KKKKKKKKKNKKKKKKKKKKKKKEKKKKKKGFFFWP

SEQ ID NO: 260200 - protein, 70 aa, Zea mays
  Clone ID: MRT4577_16891C.1.pep
MGSCVSVSSTRHRRRRSRKLSVAARKFRRKLSTAIAADAPIVRSAGSAATCLARHGVVHLEAPDSNVTLR

SEQ ID NO: 260201 - protein, 61 aa, Zea mays
  Clone ID: MRT4577_168920C.1.pep
GNECTWRASRWMCIGALGGTSAVPVEMLTINTRLSTRQAGRSRFRRRGRLYHLELLFAPLA

SEQ ID NO: 260202 - protein, 34 aa, Zea mays
  Clone ID: MRT4577_168921C.1.pep
VGKIMLGHWGPYGAGLEEFMKIVSKLIDKVFQKK

SEQ ID NO: 260203 - protein, 126 aa, Zea mays
  unsure (1)..(126): unsure at all Xaa locations
  Clone ID: MRT4577_168922C.1.pep
AFRRLPMAFSDRAEHHQEPRPLHRLFSPSNTTLGALFPPPPKTTLLRPCGLSIGATLQPPPSVAPSSLKRQSTSSVSSYRISPSSITGHMPTSTGITILISLHYRPGVYCAAIYFHAIXVNFCFHP

SEQ ID NO: 260204 - protein, 110 aa, Zea mays
  Clone ID: MRT4577_168923C.1.pep
RFNSKPNLPLKQKRETGCVNQMLFQNITCYYNQAEETSALCPVYIWRTIYSQHLASLYGSCLCLSLASSAVVGLYALISLTSFSRHDHTEAEYARRKVDREALLRFLCVL

SEQ ID NO: 260205 - protein, 75 aa, Zea mays
  Clone ID: MRT4577_168924C.1.pep
LRWPRHRMRARHLKPNHPPTWPAATTASSPTPGVTLRQLPPAPLKMMSSVPIRNRVGSKSSVCQLTRSTGTTTSV

SEQ ID NO: 260206 - protein, 213 aa, Zea mays
  unsure (1)..(213): unsure at all Xaa locations
  Clone ID: MRT4577_168925C.1.pep
MRMTMRGSIVLVLSCDIHLRLRAYLTQCDSGYPFLLLLAMPADGRVAPSSAKVPPPLHRPTHGPHAARWAQRTGAIPTQRPGSHLITNKXIVNEIWQXDCTHFKSRHGDISFLHHTSAYWTINDNYDSYVHDDTEXFLNTIVPEDPSAXPWHYTIEXGPDDMTAHIXSSMFGCYLMIPIINGRFNMGTWQAIXICKHLDYATPLHIEITLNDI

SEQ ID NO: 260207 - protein, 107 aa, Zea mays
  Clone ID: MRT4577_168926C.1.pep
MAEVAPVDQGKKEEEEFSTGPLSILMLSVKNNTQVLINCRNNKKLLGRVRAFDRHCNMVLENVREMWTEVPKTGKGKKKALPVNKDRFISKMFLRGDSVIIVLRNPK

SEQ ID NO: 260208 - protein, 85 aa, Zea mays
  Clone ID: MRT4577_168927C.1.pep
GNNQKISSTKRWHPSCKLITYSGGKPVKTVILKTTFSHNLETPGGPKTQCLFFWQQKRWGSPGGRNHPHKISPRKGGPLPLGPLS

SEQ ID NO: 260209 - protein, 29 aa, Zea mays
  Clone ID: MRT4577_168928C.1.pep
FRRYKSQALLIGSAGHGGSINITLKAKLS

SEQ ID NO: 260210 - protein, 95 aa, Zea mays
  Clone ID: MRT4577_168929C.1.pep
HSQVQSRGQGGGGGGELASRGKAAARAWPCCDSCGGCTKSEPRRCQCLDAVPRGCHPACRDCVKSSLSADPPVYQCMDRVPNFCQRRCTAPAAAH

SEQ ID NO: 260211 - protein, 103 aa, Zea mays
  Clone ID: MRT4577_16892C.1.pep
CSGWGNIIPAPERPISEIPHGGQCAMVHYASRPSWFGSGISEHWWDDKNCRRCQYWCTPGIRLDCNIRYHDRENTQKKTLHSRQLNHMTHGLVNKYEIASPEV

SEQ ID NO: 260212 - protein, 166 aa, Zea mays
  unsure (1)..(166): unsure at all Xaa locations
  Clone ID: MRT4577_168930C.1.pep
RGEGDGDQHGQRAARSLWHLLLRRLPPTQQLLSWLDQLWSCCTQTAGGQTXDTACAASFLPISLRHQLLLLLLLFCLAVCHHSPPLPPPIRSLRFCFFTTATCLLLFFLLLFPPSSPLFLLRVSLQRKREREVDWRLGYCYCMCQPMPMEILKEGRGGSPXLDPAG

SEQ ID NO: 260213 - protein, 65 aa, Zea mays
  Clone ID: MRT4577_168931C.1.pep
QSRYVYAVFKCQLPRQLTCRYSPCVLGRLGVPVSPSSIVIAMVAYLRKYSSVIHQDDRIPQDHGV

SEQ ID NO: 260214 - protein, 55 aa, Zea mays
  Clone ID: MRT4577_168932C.1.pep
PGVIYTHHQLQVTYTVNFTLYSKSSTDAYALVLLTLTNDLIHGLYPEALTMYKNF

SEQ ID NO: 260215 - protein, 278 aa, Zea mays
  Clone ID: MRT4577_168933C.1.pep
MGNVSGRAEDLVDADIDDGNNMRRASSSSAGYVRGGGSSSSPPASPPRPHSPRMFVPQSPVTPLQRATEVPPPVFNQILMNQQHEDSDGPPQKKIPTLLTWTLGGRNIYVEGSWDNWTSKKLVEKSGKDHTILLMLSSGVHRYRFIVDGERRFIPDLPCETDNMGQIVNLVDVHDFVPDSVESVSELMAPPSPDSSYGFHVPGEKEFSKEPPQLPSQLYLGVLNSRSTEEGCARPRHVVLDHLYIEKGWGAQPLVALGYTHRFRSKFVTCVLYKAIER

SEQ ID NO: 260216 - protein, 109 aa, Zea mays
  Clone ID: MRT4577_168934C.1.pep
YPKAPFRSPFPIISHLYCPLEPPFFLPLKRGGGVFSPHFYLFICPILRLPFLSWFSFFFALFSFFPLISKLGLLSGSLLFFTAPFPQYFFWVIFPFWPFASIPFFPFSL

SEQ ID NO: 260217 - protein, 61 aa, Zea mays
  Clone ID: MRT4577_168935C.1.pep
LYLGVLNSRSTEEGCARPRHVVLDHLYIEKGWGAHPLVALSYTHRFRSKYVTCVLYKAIER

SEQ ID NO: 260218 - protein, 34 aa, Zea mays
  Clone ID: MRT4577_168936C.1.pep
SGNWTLGLNRAGHGVLLDRSYQLRPWCRPTTREK

SEQ ID NO: 260219 - protein, 64 aa, Zea mays
  Clone ID: MRT4577_168937C.1.pep
DIFCDPYRFHLSSHRVLMGNDLISCVYMWQLFLCYESGLLHAPECGLRTQFSGQICYHSVGPGP

SEQ ID NO: 260220 - protein, 69 aa, Zea mays
  Clone ID: MRT4577_168938C.1.pep
CRAVIPAVAATIHLVVANFGTSPTLERSRKQRHANLQNALRILDLVPSKHHHDQEEVPSHHRLIMAVWV

SEQ ID NO: 260221 - protein, 74 aa, Zea mays
  unsure (1)..(74): unsure at all Xaa locations
  Clone ID: MRT4577_168939C.1.pep
ARVRRIQHSIRDGMLPSLALLLQQSXPITVXLPAVHXLALIIRALRLQQLVLTKLAAYSQQQQFLSLNQLARLN

SEQ ID NO: 260222 - protein, 138 aa, Zea mays
  Clone ID: MRT4577_16893C.1.pep
MVVRIRLARFGCRNRPFYRVMAADSRSPRDGKHLEVLGYYNPLPGKDGGKRMGLKFDRVKYWLSVGAQPSDPVQSILFRAGLLPPPPLLAMARKGGPRDRRPIHPMTGRPLDLEGVAIIDNSNAPEGDTEVPTDEVAQ

SEQ ID NO: 260223 - protein, 191 aa, Zea mays
  Clone ID: MRT4577_168940C.1.pep
MGRPSRGRQRIEIRRIEEGGRLQVTFSKRKSGLQKKAAELSLLCGSPVAVIVFSPGRKVFALGSPSVDHVLRRHAPPIPSEGEEDGLLPALQDGDVMSSSAIADRAEVENIVRRTEETKARSVAEKARMDAVGKAVRQAAAKAGRRFWWEADSGVLGDAELPGFAKALRRLRVNLQRHLDSLSASANKQLQ

SEQ ID NO: 260224 - protein, 80 aa, Zea mays
  unsure (1)..(80): unsure at all Xaa locations
  Clone ID: MRT4577_168941C.1.pep
QFIVVKNIXXNIHFQIPISXTHRLSPFLFXHNYTTNNFHIFLNFFNHXYNPNPILIYXINFYLKYFFLSISLNIFSSFHP

SEQ ID NO: 260225 - protein, 189 aa, Zea mays
  Clone ID: MRT4577_168942C.1.pep
MGKPSRGRQRIEIRRIEEGGRLQVTFSKRKSGLQKKAAELSMLCGSPVAVVIFSPGRKVFALGTPSVDHVLRRHAPPIPGEGEEDGLLPVLQDGNVVMSSSAIADRAEVENIVRRTEETKARSVAEKARMDAVGKAVWQAAAKAGRRFWCEADSGELGDAELAGFAKALHRFRVNLQRHLDSLSASANK

SEQ ID NO: 260226 - protein, 74 aa, Zea mays
  Clone ID: MRT4577_168943C.1.pep
MATKIGPVLILHAASTCDAHSTLIPQCSQAPIASLIPPYLTSMIASLYENPALHPYRLQHAIAASNIPLSHLSY

SEQ ID NO: 260227 - protein, 209 aa, Zea mays
  Clone ID: MRT4577_168944C.1.pep
VPGPPLGSTQRPKGEAHTSASHQYHNATTRRRGGRAAAMAGGDRERDADEETRNQMMQNLFGDQSEDEDDADDDDVAEMVDEDDGHQPQSPPQSPPQRHQELDDDAYDDEEEDARSHAPARASGYHSEEVDGEAENGGEGEGEGESEGQVVIEEESEGEAHGADLDQGESDGDKVHSSPERELDDQRMEPDARGMDSEDEGYQQRTVSG

SEQ ID NO: 260228 - protein, 87 aa, Zea mays
  unsure (1)..(87): unsure at all Xaa locations
  Clone ID: MRT4577_168945C.1.pep
PPGPGLLSMANVGRDTTGFQFFFPPVPPNWLAGNHFFFGKVLFGMDFVSKVEIXGRQSGHPKSKVFLPNSGDLPIFLAELMFFLEGC

SEQ ID NO: 260229 - protein, 159 aa, Zea mays
  unsure (1)..(159): unsure at all Xaa locations
  Clone ID: MRT4577_168946C.1.pep
MMGGVMPAXQNEMCPVVHYFRDLLQHNGDHNLGFSSLMPNTTSDHQCVMGEGDLLYPPPYSFPDAAEDYSDDDVKDIEDLDRRMCSDRMNLKLLKXLQKTGAKDSXTSAEPLCDVSTKTRQTQXQVRRKNMSRAPDGILKYLLXMMHVCLAQRDVYGII

SEQ ID NO: 260230 - protein, 85 aa, Zea mays
  Clone ID: MRT4577_168947C.1.pep
WRTAVFVTIFNTVNTSLNVYRYKDALSHFVIARAVTGSLFMIDVCLRGLVAGGIIGGLLGTPVGGLLMAFQKYSGETVHEIKQKD

SEQ ID NO: 260231 - protein, 108 aa, Zea mays
  Clone ID: MRT4577_168948C.1.pep
EAIKKKPRQAMSLFRAMRDCCDESSRSMNKRRLSLTATERITNAPPPPMKQTTQTPLRFLRAQTVPKLASDHAAKPATTAAATKKPRAVAPSPPPGWPPLSPPSVVSC

SEQ ID NO: 260232 - protein, 182 aa, Zea mays
  Clone ID: MRT4577_168949C.1.pep
MAAIAAATQAAATVLLLAALVLAAGPGGARAQSASPSSQCTSALVSLSPCLSYISGNVSAAPPSCCAQLGKVVQSDPQCLCVALSADPASLGLTVNRTRALGLPDACKVTTPDVSNCKGAAAAAAGGAPVATPAGQTAPATGSKTTPATSSVPGAAASTRGSAARLVAGFFVAAAVVAGFAA

SEQ ID NO: 260233 - protein, 211 aa, Zea mays
  unsure (1)..(211): unsure at all Xaa locations
  Clone ID: MRT4577_16894C.1.pep
KDEHIVACSHRRWQAFRLSRRNSRMHSIDWTLFSSAHNDPMASDVIAPSPWTIFGCTNGLRLFTEANDGGSHGKYWDDHPAIMAVGVVDANSEAVFQTLMSLGQSRSEWDFCLREGKVIEHLDGHTDIIQKKLRSDWLPWGMRKRDLLLRRYWRREDDGTYGYIRACLKSGGYVISPVNQGRQSVVKHXLLAIDWKFWKSYLFTLSAKYIT

SEQ ID NO: 260234 - protein, 83 aa, Zea mays
  Clone ID: MRT4577_168950C.1.pep
ATDSPSSSGSRRSSSIITAPTSGRNPASSRTAGTSQRAASQEGRPGSASYSEDELRDESDLAIREYYHADDEHDVALCIEELH

SEQ ID NO: 260235 - protein, 160 aa, Zea mays
  unsure (1)..(160): unsure at all Xaa locations
  Clone ID: MRT4577_168952C.1.pep
RSRTTPGPTQPVRPAHLHTLCARALGSTRSRTEHRPLRVRGAVSRIARRVSDAASYHMRGAALLLPCSQRNAACFNGAVRCDRRSVCAGSTLHCPGWNSVTCKKYASYLPRILTQSRHDTLHARHQRARHSTSPAPARARSPLWRHPFPRGMDLRXQSPK

SEQ ID NO: 260236 - protein, 196 aa, Zea mays
  unsure (1)..(196): unsure at all Xaa locations
  Clone ID: MRT4577_168953C.1.pep
MSRPMMVTEKHQINIVFIAHVDSGKASTTRHLIYQLXGGIEHLVLEILEKDAAEMNKGSYKHEGVLDTLNGERERGXITIDITLRDLHTTKYYXIESIDAPWXHRDFIKNMITGTSQAXCADLINDCHALRAFDAGIYNDEQTHEHALLAFTLIVKIMIXCCYKMDATXTPRYSNARHEEIVQEVSSYLKTARYNP

SEQ ID NO: 260237 - protein, 34 aa, Zea mays
  Clone ID: MRT4577_168954C.1.pep
DDCREHHVVISAGVGAGSGGTIMSSRRCQVWSSQ

SEQ ID NO: 260238 - protein, 83 aa, Zea mays
  unsure (1)..(83): unsure at all Xaa locations
  Clone ID: MRT4577_168955C.1.pep
TLWLSFLICKMRHPLIVWPGLVSGSARRVLLGWAVFLPSGSDGGSEPWPPLGGHAVQPGQLPGVCXGHCYSLRRVTGRYQISP

SEQ ID NO: 260239 - protein, 47 aa, Zea mays
  Clone ID: MRT4577_168956C.1.pep
EAQRRGRHLHLSGVTNPFAMKMTTGFLFASSSSRMYWVVATKKHTNT

SEQ ID NO: 260240 - protein, 71 aa, Zea mays
  Clone ID: MRT4577_168957C.1.pep
HCRRQERSTSVLLKVAGELHMRSLSNTWKIYKLQDMMNDCVCRRATASTTSHDFLPTLVPQEEGQLIPTRR

SEQ ID NO: 260241 - protein, 103 aa, Zea mays
  unsure (1)..(103): unsure at all Xaa locations
  Clone ID: MRT4577_168958C.1.pep
GIDAKAAGPGGSFDITKVGAPRNGKTDSTKAVQEARASESGGTGKQTILIPKGDFLGGQLNLTGPCKGEGTMHADGNLRATTGLSQYKDHGNWNEXILRGDNP

SEQ ID NO: 260242 - protein, 92 aa, Zea mays
  unsure (1)..(92): unsure at all Xaa locations
  Clone ID: MRT4577_168959C.1.pep
NLLAAGRTKGHLYNSLEXMKLVTQISWKTPGAAATMQDFIEEMTNAGVMEEMVNXALDXTLEEQDIDXEIEXEGDMVLSGITGETAFELPDA

SEQ ID NO: 260243 - protein, 126 aa, Zea mays
  Clone ID: MRT4577_16895C.1.pep
RVQSGGGMLLLSQGLGDSNDIHSADSHKRLGFWFDRIIHAAERKGRRVIMIQRDTDKRMGRDGMARLQRVAVGYWYWYWAENDMSTSRPMCFPFWKKYEDIDQEAGRAGEREQTQQSSFSSSERNS

SEQ ID NO: 260244 - protein, 192 aa, Zea mays
  unsure (1)..(192): unsure at all Xaa locations
  Clone ID: MRT4577_168960C.1.pep
MNNSIALRKNVGKTKTDNPFSNNXWXDISAPSVFKVRHIXTTLACRTQDTRIASEGLNXRDFEGCRADLSSSTXDRPHFKITLRAEXERGRNVLTNLXSMQSTTDKLKSLLKKCQALIEFHADVQTTDHYVLRLVCVRFSNIYPLHHKTACYAQASQNRPIRRKMLQITHSTCCYMTTMRDILYRISSGMYL

SEQ ID NO: 260245 - protein, 108 aa, Zea mays
  unsure (1)..(108): unsure at all Xaa locations
  Clone ID: MRT4577_168961C.1.pep
XGSXXXLLCLFXXFXRFSXXXXXXXXXVAXXXXXFXLRXLXLFSVXRXXXGWPLSXXXXLLGXXFXXCVAGXKAVRSVCXSXXXXSAGXARVRLFSFXCAPPXXRGLL

SEQ ID NO: 260246 - protein, 181 aa, Zea mays
  Clone ID: MRT4577_168962C.1.pep
MESDASTSPRRRSTSCYSDSGDSSCSEPFSECGSDDLSFTPAAAAGIHRLLLSCAAEASEDAISSLVAELECPSQSLDSLRRAAMELRLLAKHNPDNRVRIAAAGGVRPLVRLLSHADPLLQEHGVTALLNLSICDENKATIVEAGAIRPLVHALKSAASPAARENAACALLRLSQLDGAS

SEQ ID NO: 260247 - protein, 114 aa, Zea mays
  unsure (1)..(114): unsure at all Xaa locations
  Clone ID: MRT4577_168963C.1.pep
ELINYLINFATSEXVIRLSHNTTCQNIMHYTLTNFACSKAASEVILQTPVSYNKHITTPSHTANMINLSTKIISQDHLIHVMPTIANSYASITAYKFHFLXSYISDDDIFSSYL

SEQ ID NO: 260248 - protein, 91 aa, Zea mays
  Clone ID: MRT4577_168964C.1.pep
GVLFFRESGCPPSRASLLPVGQRFCPPRWVLFHGGFVYYGMVNLGSLLGWYPPLISLFGPPVYVVLCPRSPVFRVGVTLRLSPGGFVNFPP

SEQ ID NO: 260249 - protein, 71 aa, Zea mays
  Clone ID: MRT4577_168965C.1.pep
IQQLQRLPWNLLTLVSPTTFLTQPQLLPFYHHVPPNAVTLLQLQQLLTFNQLALTNPSLFYQQPIISSTLF

SEQ ID NO: 260250 - protein, 86 aa, Zea mays
  Clone ID: MRT4577_168966C.1.pep
PTRPRRGRDHRKKKHKEKVYKKKKKNKKKKKKIYGPALKKWGALFLEVRVASRVMVPTSRSFASPRFFCFAVVLPRFRGISLTGSD

SEQ ID NO: 260251 - protein, 219 aa, Zea mays
  Clone ID: MRT4577_168967C.1.pep
SLDLHRCFRCWTLTLVASITPTSCRHFSQSMRPTSTSLYVVSTSRSECDTLWLAHTRAVLCRSRKRRRRRRNSRCFWVSVAVTALVLRIRQPVLGRSGSGVPLGRRGVSKGRDEDAVMRSYKVKTRKRNEVQEEASPAVVVCGVIGHRHGCRSRMPPPFRRSATQQSAWGVGDWATGAWGFGRASTELPTERPRLRAESQRRRRGLGLGESELGFVFCP

SEQ ID NO: 260252 - protein, 78 aa, Zea mays
  unsure (1)..(78): unsure at all Xaa locations
  Clone ID: MRT4577_168968C.1.pep
MGCVARAFLFTLESVNEGHPYKVCDQVFDAVLDACLAQDPDRKVACXTCSKTNMVMVFGEITTKGTVDYEKIVRDTLR

SEQ ID NO: 260253 - protein, 55 aa, Zea mays
  Clone ID: MRT4577_168969C.1.pep
SSHQQYPFTITKCHCYVLLLGMLKPTLCLVDLLFVDTTSLLLPYDRTRTIHRTSV

SEQ ID NO: 260254 - protein, 608 aa, Zea mays
  Clone ID: MRT4577_16896C.1.pep
LGPSRPAGRLSRRNTRMHSIDWTLFSSAHNDPMASDVIAPSPWTIFGCTNGLRLFTEANDGGSHGKYWDDHPAIMAVGVVDANSEAVFQTLMSLGQSRSEWDFCLREGKVIEHLDGHTDIIQKKLRSDWLPWGMRKRDLLLRRYWRREDDGTYVILYHSVFHYKCRPEKGYIRACLKSGGYVISPVNQGRQSVVKHMLAIDWKFWKSYLFTSSAKYITIRMLGRVAALREFFRAKNGNCSCMEFSSGELTRDTGLPQGENQRINLEMQQENENGRLEGPTEGSLGGSNRHLSSTGSFVQLNDAADEFFDVPDESEYDQREVMFPSDESLHAADQRHAKLSTAAVFVKRLHDLAVQKRGYIDLQGAADADNGPCCYGYTLPKDSSYTVPSTWAMTDPTTFLIRGETYLHDRIKIKANSTLMQMVGADWIKSDKREDDLAGRPGGLVQKCAAQGGTRFFFIVNIQVPGSTTYSLALYYMMDTPLEKVPLLERFVNGDDAFRNSRFKLIPYISKGSWIVKQSVGKKACLVGQALEINYFRGRNYLELGVDIGSSTVARGVVSLVLGYLNNLVIEMAFLVQGNTNEELPEFLLGTCRLNYLDASKAVSIDEC

SEQ ID NO: 260255 - protein, 47 aa, Zea mays
  Clone ID: MRT4577_168970C.1.pep
AHTDSMVKMLADLSYSNRVTSVMWGSYSASGSSKAWLADKMHHICTA

SEQ ID NO: 260256 - protein, 843 aa, Zea mays
  unsure (1)..(843): unsure at all Xaa locations
  Clone ID: MRT4577_168971C.1.pep
MEQRSLLVSALGVGVGVGLGLAXGQVGSTAGXNGGDGLGAGAAELEAELRRLVLDGPESDVTFDEFPYYLSDQTREVLISAAFVHLKNAELLKHVRNLSAASHAILLSGPTEAYLQSLAKALSHYFKARLLILDATDFSLRIQSKYGGSTKATARNQSVAETTFGRMSDLIGSFMAYPKKDGPIEKSLRRQTSSTDLRTRGSDGSSSTPSLKKNASVSSDMSDLASQVSGNPVRRTGSWCFDEKVLIQSLYKVMVSVSENGPIILYIRDVDHFLWKSQKIHSMFQKMLAKLSGQVLILGSRLLNPDADNRDADERISTLFPYHVDIKAPEEETHLDCWKSQIEEDKRKIQMQDNRNHIIEVLSANDLDCDDLSSICEADTMVLSNYIEEIIVSAVSYHLIHNKDPEYRNGKLMLSSKSLSHGLSIFQGSHGGKDTLKLEETKDGLKGALGSKKTETLPVGEGPVPLPKPEVPDNEFEKRIRPEVIPASEIGVTFDDIGALADIKESLQELVMLPLRRPDLFKGGLLKPCRGILLFGPPGTGKTMLAKAIANDAGASFINVSMSTITSKWFGEDEKNVRALFSLAAKVAPTIIFVDEVDSMLGQRARYGEHEAMRKIKNEFMSHWDGLLSKTGEKILVLAATNRPFDLDEAIIRRFERRIMVGLPTLESRELILRTLLSKEKVDEDIDFKELAAMTEGYSGSDLKNLCVTAAYRPVRELLKIERERELERREKESKDKAAAAENSEAPESEKKESSETKEARKSTQSPEGGGKGDEGPDSKAEGEKEAAVVDLRPLTMEDLRQAKNQVAASFAAEGAVMNELRQWNDLYGEGGSRKKQQLTYFL

SEQ ID NO: 260257 - protein, 211 aa, Zea mays
  unsure (1)..(211): unsure at all Xaa locations
  Clone ID: MRT4577_168972C.1.pep
MASTSRIFEYFVVCGLGPEIRALDGLKGFHGAEEMYMPAFIDQFPHSXHALYPPPPPQLPTCVLPAGVRIYSSRLDANDVSTYPRSYPIVLTEGDGSKIYVSCIAFRDPICEDIIEAYQIPVNSFADKCICFVSHSPCFQVLRDALEEIFVLCFSPAGCSKPLWDIISHVVSNVPLPTPXKGSXVLFAIDNCLLSAETPPKEWLPHADISF

SEQ ID NO: 260258 - protein, 82 aa, Zea mays
  Clone ID: MRT4577_168973C.1.pep
DAWVPTLESRELILRTLLSKEKVDEDIDFKELAAMTEGYSGSDLKNLCVTAAYRPVRELLKIERERELVTALSCCSNRISLY

SEQ ID NO: 260259 - protein, 87 aa, Zea mays
  Clone ID: MRT4577_168974C.1.pep
PNESKTGEPPCSVLGSPFPQSLKPRGCRFPSSSCPCHFCFQLLTGMNSFHVDQHRWLGKSFFSPILNNLIVGPLPGLLSLKKKYFPA

SEQ ID NO: 260260 - protein, 101 aa, Zea mays
  unsure (1)..(101): unsure at all Xaa locations
  Clone ID: MRT4577_168975C.1.pep
EEGELRNQRSSEEHAESRRRRQRRQGSRQQGGXGSEAKAEGEKEAAFIDLRPLTMEDLRQAKNQVAASFAAEGAVMNELRQWNDLYGEGGSRKKQQLTYFL

SEQ ID NO: 260261 - protein, 70 aa, Zea mays
  unsure (1)..(70): unsure at all Xaa locations
  Clone ID: MRT4577_168976C.1.pep
GKPKILKKCNLPLTAQGCVNRIITEMAVFDVDKSGXTLIEVAEGVTVDDVKKYTEPEFKVSPNLKKIAYP

SEQ ID NO: 260262 - protein, 167 aa, Zea mays
  unsure (1)..(167): unsure at all Xaa locations
  Clone ID: MRT4577_168977C.1.pep
MLVYQDLLSGDEVLXDSFTYKELENGVLREVEGKWITQGPVDVDIDANPSAEDDEDESVDDTVVKEVDIDDTFHLQEQPPFDEKSFVSYIKKYIKNLTAVLEPEKAHDLXKGVETATKFLLSKLKDLQVFGGESMKDEASVVFANYKDGATNATFLYFSHGLKEIKC

SEQ ID NO: 260263 - protein, 82 aa, Zea mays
  Clone ID: MRT4577_168978C.1.pep
NSPMHADLIFFDFVLRPVIIPKSPMDNGTLRPSNNLKKHNWYHSDEYRGDIHNCNHRGATKTLQPTSYMCILASLEKEYVQR

SEQ ID NO: 260264 - protein, 84 aa, Zea mays
  Clone ID: MRT4577_168979C.1.pep
AGKRKKATTSGKPKRPPSAFFVFMSEFRQEYQVQHPGNKSITAVSHLALCSPFIFWCVCRCDSLFVLVDQVSKAAGEKWHAMTD

SEQ ID NO: 260265 - protein, 202 aa, Zea mays
  Clone ID: MRT4577_16897C.1.pep
LGTSRPAGLAPRLHPHVEARVLDDVARGGGDVSAMDYLHAALTESMRLYPPVPVDFKEALEDDVLPDGTLVRARQRVIYYTYAMGRDKATWGPDCLEFRPERWLSKSGAFAGGAESPYKYVVFNAGPRLCVGKRFAYMQMKTAAAAVLARFRVEVLPGQEVKPKLNTTLYMKNGLMVRFVRREQRHELGHPLPAAAADAGED

SEQ ID NO: 260266 - protein, 500 aa, Zea mays
  Clone ID: MRT4577_168980C.1.pep
MQQLQPKQMHWVRADSSDFGGDRPAPRSGHTAVIIGKSKVVVFGGFADKRFLADVSVYDVENKLWYTPECTGNGSDGQAGPSPRAFHIAVVIDCNMFIFGGRSGGKRLGDFWMLDTDLWQWSEMTGFGDLPSPREFAAASAIGNRKIVMYGGWDGKKWLSDVYIMDTMSLEWTELAVTGSVPPPRCGHSATMIEKRLLIFGGRGGAGPIMGDLWALKGITEEDNEAPGWTQLKLPGQSPSPRCGHSVTSGGPYLLLFGGHGTGGWLSRYDVYYNECIILDRVSVQWKRLPTSNEPPPPRAYHSITSIGSRFLLFGGFDGKNTFGDLWWLVPEDDPIAKRDLVPSIDSNSKPSTVTDDNQQLNLKESQALENPITELAKRLGIALSEEVSASFVDEANDKELVELSSRLAGQSLPASDQVASIQVLRDHWKSSPASSLQLQELGPLLRDYQRLILRHYTGNSLPAFREMEALRFFHLKSASQLRMDDIPVLLSEYGRLLST

SEQ ID NO: 260267 - protein, 87 aa, Zea mays
  Clone ID: MRT4577_168981C.1.pep
GRLCFFFFFFFFFFFFFFFFKIFLGATLDPFKWEGLIFSRATGFLCPVLGGFNPSFLLGQGKIFVGGKKKTAPSFKRAYKKLFPTPR

SEQ ID NO: 260268 - protein, 67 aa, Zea mays
  Clone ID: MRT4577_168982C.1.pep
LKVCRNGTIKIGLETNKIMDFIKFDIGNMVMMTGGRNTRRVGVIKNREKHKGSFETIHVLLRTFCYV

SEQ ID NO: 260269 - protein, 85 aa, Zea mays
  Clone ID: MRT4577_168983C.1.pep
IFPSFLNFFSALKVMFFFTLFFSPFIRLFFTFFGKCMFFTYNILVPSNIFSSLILIPYLSKLHVFYPVFFLTSKTLLKCHNYLPF

SEQ ID NO: 260270 - protein, 47 aa, Zea mays
  Clone ID: MRT4577_168984C.1.pep
SVACKRVRGQPRVFIRLVAHLPLYVLLPHELPRCQGTKVVQCVGMLE

SEQ ID NO: 260271 - protein, 52 aa, Zea mays
  Clone ID: MRT4577_168985C.1.pep
SCLWGSREPCAPCAFADGQAFAIATRHKIWLRCPGLDDRGCRLAECGEEATG

SEQ ID NO: 260272 - protein, 61 aa, Zea mays
  Clone ID: MRT4577_168986C.1.pep
WGKCSSFFLGCLKSFQKKLFFFKKKKKKKKKKKKKKKKKKKKNKKKKKKKKKACTCPGGRS

SEQ ID NO: 260273 - protein, 157 aa, Zea mays
  unsure (1)..(157): unsure at all Xaa locations
  Clone ID: MRT4577_168987C.1.pep
DKFSSRHGQKGVCGTIVQQEDFPFSERGICPDLIMNPHGFPXVLDKMHARASGPRVLLTRQPTEGRSRDGGLRLGEMERDCLIAYGASMLIFERLLLSSDPYQVQVCRKCGLLGYYNHKLKTSYCSMCKNGENMAKMRLPYACKLLFQELHAMNVVP

SEQ ID NO: 260274 - protein, 42 aa, Zea mays
  Clone ID: MRT4577_168988C.1.pep
MLLRPHSLKMGCHVSGSPPTPTVYRPTSLMTFSLNVVLTMPK

SEQ ID NO: 260275 - protein, 230 aa, Zea mays
  Clone ID: MRT4577_168989C.1.pep
DGIAGPGQIIRNHDIYVNKRTPKNTSKGIGRALRESDYKDSPALYKGVDGETTVVDRVMLCSDTNDKLSIKCIIRHTRRPEVGDKFSSRHGQKGVCGTIVQQEDFPFSERGICPDLIMNPHGFPSRMTIGKMIELLGGKAGVSCGRFHYGSAFGEPSGNADKVADISSTLIKHGFSYNGKDFLYSGILGQPLEAYIFMGPIYYQKLKHMVLDKMHARASGPRVLLTRQPT

SEQ ID NO: 260276 - protein, 125 aa, Zea mays
  Clone ID: MRT4577_16898C.1.pep
RGMQKQRVFLKGRGFSTTNSEGPNWGKTLGGPHNQTTAKHNRMKKGGITGSNTSSISSKNPPPVFLIISETYGATNDLSTTDETHCLAAGKKKTQFPHWFPGKKRYLSPGRPCNRQGKGPRSRTD

SEQ ID NO: 260277 - protein, 48 aa, Zea mays
  Clone ID: MRT4577_168990C.1.pep
GMDMITKVTENEKIDNELVTKKVDEYYGLGAEDQRKLNEYCEVFCRFI

SEQ ID NO: 260278 - protein, 587 aa, Zea mays
  Clone ID: MRT4577_168991C.1.pep
SRAWPAKTIELVGYDKLGAGQNATVAVMGYSGYDIEDAIVMNKSSLDRGFGRCIALKKYTVLKDNYGDGVSDMIVEPQRDNGVLIKQNMRALDEDGIAGPGQIIRNHDIYVNKRTPKNTSKGIGRALRESDYKDSPALYKGVDGETTVVDRVMLCSDTNDKLSIKCIIRHTRRPEVGDKFSSRHGQKGVCGTIVQQEDFPFSERGICPDLIMDPHGFPSRMTIGKMLELRCRRQFRFAHHAAQALFPSLSVLAFSALLLYSSLSSTATGSPALSACDGEGSGVATRPSALQRRCAHHLRRVCCIPLSSCPPAPAPFFAIVGLGPQRRQQQEGSAPVKAAPLLPLNFRVAWLLFRTLLSSPSAMTVPTKDDSQSGKVANTVPFPTYRSLAAPVRKPVDKFALLPAFLKVRITPQERRLTYRTYSAPIKVHIEYTVGKQEAHNGPTNFIIGYVVHVGMPSVHVEYNVENITPHFCRLTDRTYSAPIKVHIEYTVGKQHEVRRKNNFIIGYMPIMLRSHACILYEKDEAELAKYGECPLDPGGYFVVKGTEKVILIQEQLLVERLVFLVDGLAMGLHLVSLVVMLTRVQT

SEQ ID NO: 260279 - protein, 41 aa, Zea mays
  Clone ID: MRT4577_168992C.1.pep
NEAISPQKKKKKKKKKKKKKKKKKKKKPKKKKKKKKKLEEG

SEQ ID NO: 260280 - protein, 91 aa, Zea mays
  Clone ID: MRT4577_168993C.1.pep
IPFNVISAGLKPVLRKVLDTFLGEEDSARIEIVANEASINEDGSEWKPIWRHDTEVGHDKALSVNEARIQARDNCGDDESRSSSSSVMVCP

SEQ ID NO: 260281 - protein, 122 aa, Zea mays
  unsure (1)..(122): unsure at all Xaa locations
  Clone ID: MRT4577_168994C.1.pep
GYSEAATKIQKKASFDSKFGPFQINSIDFYINGHDHCPYKLTCSAFSPIQYFTSRDRSRAWRGFFQPNENKLKFFYDGQGXMSIQLYQDQAEFTFYEXDGNILYQYSQWSLRETYLRHSYVA

SEQ ID NO: 260282 - protein, 79 aa, Zea mays
  Clone ID: MRT4577_168995C.1.pep
YAGVHSESTHFSLVLLLDWAMAFILCPLTCPGECEGSTGKLECCLCLPSQWAVLTAAPHPYRWSQEAGRVGEGKIGKTG

SEQ ID NO: 260283 - protein, 103 aa, Zea mays
  unsure (1)..(103): unsure at all Xaa locations
  Clone ID: MRT4577_168996C.1.pep
SCLMVGRKKAGMGSRYNLMIASKHALGXGATLRRGCLIYFPEVDNNSRIFLVYVXHWGFARLPVHLSWRAMGLVGAVPTVLLGVAELAMPETPRWLVMRCRID

SEQ ID NO: 260284 - protein, 47 aa, Zea mays
  unsure (1)..(47): unsure at all Xaa locations
  Clone ID: MRT4577_168997C.1.pep
LRWXPVAQGARRALLGSGHPPPRHPSPLRRAAPIRSRSPPLAKNWRV

SEQ ID NO: 260285 - protein, 50 aa, Zea mays
  Clone ID: MRT4577_168998C.1.pep
MGRKVFVRGHWECHGTTDQVEKIVKTLNEGQGPPSEVVEVVVSPPYVFLP

SEQ ID NO: 260286 - protein, 103 aa, Zea mays
  Clone ID: MRT4577_168999C.1.pep
RPVGGEEVCRGFFGGPFVGSWGGPIMKLAPSGGGCCFLCLPKPPLFFPYGDACFPLGDPVCCCMENVFWLRNWLAIFLRRKNEKRLKGRERVKISPSRGCGCG

SEQ ID NO: 260287 - protein, 93 aa, Zea mays
  Clone ID: MRT4577_16899C.1.pep
SMINYSQAHKYPEQTTVISLIQSISSQLYRWRKRKAISWRLLSILGASQSSIGRNKASAACKQDGMDLINGAETIPFSFQAIRLVIARPRFMR

SEQ ID NO: 260288 - protein, 69 aa, Zea mays
  unsure (1)..(69): unsure at all Xaa locations
  Clone ID: MRT4577_1689C.1.pep
SCVAXSSIREKHQLAIGIIVRVGVHANCQLMFLALHIIDPRVLWLLYTDVSVCGSQLLMVNVIYKYSDN

SEQ ID NO: 260289 - protein, 135 aa, Zea mays
  Clone ID: MRT4577_168C.1.pep
PLPARLHGHTKPPVVLSECAAIAGVAGAGRTRNPAAGGRGIDAGAHKDVAAGAADNDKGSGAAPDASATLLLNFVMKQYHPFILFFGVMQKNQTQKSTKGHKLSNVAASRNKLSAYSHLTFDGIWFSIKEFSKSK

SEQ ID NO: 260290 - protein, 79 aa, Zea mays
  Clone ID: MRT4577_169000C.1.pep
WNPPLPHAVYIVWWSFQHCLDSALGFQPAGSPSAEGTAAWSPGGKPRLPVLAPPRAVGVRRCWAAGTRPPCPGRTSEVY

SEQ ID NO: 260291 - protein, 88 aa, Zea mays
  unsure (1)..(88): unsure at all Xaa locations
  Clone ID: MRT4577_169001C.1.pep
GRAQAKGKEKXHXNXXDKGQXDXGKXTTXGHXXXQAGRGDNRFFXRXEKEAXERNKRXXKXARXPDKXKAEXERXNTXDXAXRKHETT

SEQ ID NO: 260292 - protein, 114 aa, Zea mays
  Clone ID: MRT4577_169002C.1.pep
MAAARRQAAVLVLVLALVMGAGLAPGPRGCAAQGEAVVVSSYGQGHLSLKPYDWTYLRVELPPSFSSVTMDFAADIDLQRERLKGIPRNKLAIICLMNSNPPIPDISDSYLDNL

SEQ ID NO: 260293 - protein, 68 aa, Zea mays
  unsure (1)..(68): unsure at all Xaa locations
  Clone ID: MRT4577_169003C.1.pep
LEENTQKVLFELTGGDSTSDRTELDLLVVLDMSGSMHGEXXEKMKTAMKFEVKKLIYIHRLSIVTFLD

SEQ ID NO: 260294 - protein, 46 aa, Zea mays
  Clone ID: MRT4577_169004C.1.pep
QTYNPFNMIIQGGGDLANLVQFHKMKVALHISISLFFTILFIPLLP

SEQ ID NO: 260295 - protein, 72 aa, Zea mays
  Clone ID: MRT4577_169005C.1.pep
GGRLPRGALCCGFSSSIMGPPRSFCAGLAFADQGGRLGLFFWLEEFGPVVFVLRLPPMVVGRLWVWLNVKMG

SEQ ID NO: 260296 - protein, 112 aa, Zea mays
  unsure (1)..(112): unsure at all Xaa locations
  Clone ID: MRT4577_169006C.1.pep
HHGLVKGLREPTKSIKXQDAHLCVLAEDCDQPDXSKLVKALXCIRHNVRLGSVLAGKTLDEWCGLCKLDCEGKARKVVACSCVVGKGPGKQYEGLDIGPEYHKAPEMCDMVH

SEQ ID NO: 260297 - protein, 102 aa, Zea mays
  Clone ID: MRT4577_169007C.1.pep
NSARGTGPLHRLRLRLDTSTHRACLNPTLSPPSRDSERLQPALRRRPRRDVLRLNPTLLRERHDFFFETAHAPDASVAATLPYALSVTFTDTSSSLDPQPGL

SEQ ID NO: 260298 - protein, 47 aa, Zea mays
  Clone ID: MRT4577_169008C.1.pep
CLFIFYMSFPFRRVSSLAYPNLIGTKRPCFCTRLCTHKNLKLAVLYN

SEQ ID NO: 260299 - protein, 67 aa, Zea mays
  Clone ID: MRT4577_169009C.1.pep
VFVIITYVRGRDFQQLVSEPVDLGGDFCCPVRCIDWRRRLSRQRCNATAILQVLRDEMLWCYGKAQP

SEQ ID NO: 260300 - protein, 179 aa, Zea mays
  unsure (1)..(179): unsure at all Xaa locations
  Clone ID: MRT4577_16900C.1.pep
MLLTRLSSVSCSSTAQQLHAGVGKFAAAACWSWKKKREELPCFMFRLAGKPPRASPAKGGIVPASDDDDGVSLGTVKLPGNIDTARLESLLFQISSPDAIDQVDKVEGGIRLGFVAVEDGATRTLVYIDCLVSPAPDGSGPVFRAIRNGPMKDKEPPGEPRIMRSLLQALEKXIQIARV

SEQ ID NO: 260301 - protein, 47 aa, Zea mays
  Clone ID: MRT4577_169010C.1.pep
RERSEVAISLRVSSRDRRNEAATYTRVFYQVVSHWAWLERVSIGGSC

SEQ ID NO: 260302 - protein, 580 aa, Zea mays
  Clone ID: MRT4577_169011C.1.pep
MELVYMERRNGSYDDGAVPEFSGRGAGGDQDQDPPAAASEVQSDSRQTPDEKKSKGCQSCRDPFCSCSGGTPHSELFPPHPAKMMILEFLIASLRHPTRTHNVSDLDDLIADGVSQGSVVNLGPSEKKVLESLHAMVNAKTRPKSPSPFMAGSKLRKIRSKSHVITQSEILKLISPETWEASSFPGASPMIGGGTAEDGVHGNKPPPPCCSSVSSNQHVLSRCPSSLSACLLQCIWKDGLPHFELSLDDHPIAVYAASPVRVLEKDRAFDYVYMIHSGEQGRKDWMGHSSNVSRLVGKVKVSSSLVLNPDKSGLLETEFVLYGSPDDYLRQMRSPYSVPKGKGLVRRVTEIMRAGNVSASPRHPWKLGKSSSHQFDDLAGVLEGEMISAGGSDLVSLKADDLPSNQELAAIVVREQRRRRRKEPVSGGWGLKFLEKAGLNRPQGTEETDVQNSDGATHCVTVVVPRGYHGGVVSKSSRPSGLVERWRSGGRCDCGGWDLGCPIRVLNGDGCGSLPEGESRDRRSVEISIKGAKNETMLKLVNITEDLYILYFDSSISPLQCFSTGIAIVHSRAPELCPKL

SEQ ID NO: 260303 - protein, 181 aa, Zea mays
  Clone ID: MRT4577_169012C.1.pep
GGPGGRASRRSQREREREREGPGRLWTGAWWSIRPRRERDAAPLARTAADETTKRTTGKGRRRKTKDVGGRAGGADRQARGGAACSRTGGGRQQGEARRQGKKGCWLCSSSSHLSVSINTRRLVCLWFGGRRRTWRTRSTLSLSLSDSRSVTRGRYSSGVPFPCPAACLRLLRMEAKETVP

SEQ ID NO: 260304 - protein, 53 aa, Zea mays
  unsure (1)..(53): unsure at all Xaa locations
  Clone ID: MRT4577_169013C.1.pep
SVLPGXITCRGRHXAAHTDPSQAASAVAAAHRRGCCFICSSSLVFVYCVPGRP

SEQ ID NO: 260305 - protein, 87 aa, Zea mays
  Clone ID: MRT4577_169014C.1.pep
NCGPSFPFKFPKSAPPPPLGQGLWWSENHGFFKQVILPPSWRSPPKWRFLEGHPLRETSGFKMARFFCLRGPPRLFSTGEHKKNKRY

SEQ ID NO: 260306 - protein, 77 aa, Zea mays
  Clone ID: MRT4577_169015C.1.pep
CDHYFFQTTIQSEPNVPMVYQVHKIQTLEHLTVQSLVGPILQRNTRNRMCYKCLNFWIASGTLGGACYQGEAQVMRH

SEQ ID NO: 260307 - protein, 81 aa, Zea mays
  Clone ID: MRT4577_169016C.1.pep
KLSGPGMRPYCKDKASGASGARRWIVRPRQSALGARPWMVAVFMPNNSRPTPESLSVGVRSAKRALFDIGPANVNIHIESC

SEQ ID NO: 260308 - protein, 212 aa, Zea mays
  Clone ID: MRT4577_169017C.1.pep
MDQQGAGGDAEVPAGLGLTAAEYEQLRSTVDAHHRYAVGEGQCSSLLAQRIHAPPEAVWAVVRRFDCPQVYKHFIRSCALRPDPEAGDALCPGRLREVSVISGLPASTSTERLDLLDDAARVFGFSITGGEHRLRNYRSVTTVSELADPAICTVVLESYVVDVPDGNTEDDTRLFADTVIRLNLQKLKSVAEANAAEAAATTNSVLLPRPAE

SEQ ID NO: 260309 - protein, 71 aa, Zea mays
  unsure (1)..(71): unsure at all Xaa locations
  Clone ID: MRT4577_169018C.1.pep
FGTRTTRXQXAASHIEHSISSLYTVPRHIRVLEDQKKPGPGSTYSCLAGGANEAXIWXXRGRWFFRXXSCW

SEQ ID NO: 260310 - protein, 177 aa, Zea mays
  Clone ID: MRT4577_169019C.1.pep
RPNFYWRCFPDGEAVYNNITTGVVCHGDPSVIKEGYKGFPSGHTSWSFAGLGFLSWYLAGKMTAFDRRGHVAKLCVVLLPLLVAALVAVSRVDDYWHHWQDVCTGGVLGLVVASVCYLQFFPAPSDEKGFWPHAHLRFVSEMVEEEESRTQRSTETAGARTSHELDALEAGSRRDQL

SEQ ID NO: 260311 - protein, 63 aa, Zea mays
  Clone ID: MRT4577_16901C.1.pep
PPPPPPPPPPPPPPPPPPPPPPFGNGKSFFPGPCPLDWAFSKGYKQHPSLSLKQGGAFFPFWV

SEQ ID NO: 260312 - protein, 276 aa, Zea mays
  unsure (1)..(276): unsure at all Xaa locations
  Clone ID: MRT4577_169020C.1.pep
MEEGQGEELEVMLSESDDSEFDLDDEFPPSTDGTPNSPSRLLCTRAPAHHFSSPFPSLSISANPIDPKAMDQQGAGGDVEVPAGLGLTAAEYEQLRPTVDAHHRYAVGEGQCSSLLAQRIHAPXPAAVWAIVRRFDCPQVYKHFIRSCXVRPGPRTPGDALRPGRLREVCVISGLPASTSTERLDHLDDAARVFGFSITGGEHRLRNYRSVTTVSELAGPGICTVVLESYAVDVPDGNTEDDTRLFADTVIRLNLQKLKSVAEASTSSSAPPPPSE

SEQ ID NO: 260313 - protein, 43 aa, Zea mays
  Clone ID: MRT4577_169021C.1.pep
SVKRGVVQNSMTMVIDLLVCLALSVDSTSPMQMPCPCAMLHVL

SEQ ID NO: 260314 - protein, 138 aa, Zea mays
  Clone ID: MRT4577_169022C.1.pep
VTMESQRSELPFKLDHSIHVSTRGLIQHHQPGSVHRRRVVVLDLEGVRLVCLSVLRLPGLLPAVGVGGSVRCYSAGAHRHASPRAGSPGEGEARYLSVLGDLWRKKSAGRENERRAGSRVRVWCARCKKPKAAIEARG

SEQ ID NO: 260315 - protein, 83 aa, Zea mays
  Clone ID: MRT4577_169023C.1.pep
TTLTRSPSLLSTPLPSWTSSSTHHHSYLHARHSSFHTPHVRLSDVRYDTYLPSTCKTGKSELFHQRASEGHDIRCTCIGQRHA

SEQ ID NO: 260316 - protein, 87 aa, Zea mays
  Clone ID: MRT4577_169024C.1.pep
IHNTSLQVQDSRPTDATNEIHKTYKMGCKVGAPLTHSWITDGSQMSHRWNTGGSLRAHSWRTGGTQLANRRYTDCAQDIQHSFLTEC

SEQ ID NO: 260317 - protein, 109 aa, Zea mays
  Clone ID: MRT4577_169025C.1.pep
SDFTLHKKKKKKKKKKKKKKKKKNKKKKKKKKKKKKKKKKNKKKKIKKKKGGPFLKIPILLPLGGGGRVFFLCPLILIIGPPFKNGVIGKNLGLPKLYPFGKYSLFPIG

SEQ ID NO: 260318 - protein, 105 aa, Zea mays
  unsure (1)..(105): unsure at all Xaa locations
  Clone ID: MRT4577_169026C.1.pep
ATAACQSIXLXRLLSDLRXNAAAETIDLKVDNKSTLALIKNPVFHDRSKHIQTRYHFIREAAENGDVKPDYICTGGQLADVLTKPFPHDRFQMVRTQIGMSDFGA

SEQ ID NO: 260319 - protein, 106 aa, Zea mays
  unsure (1)..(106): unsure at all Xaa locations
  Clone ID: MRT4577_169027C.1.pep
MHVGPQTTAGGRLGNGRLLTLSLDRTSGSGFQSRHEYLFGKIDMQLRLVPGNSAGTVTAYYLLSQGGAHDEIDFEFLVNVSGEXYALHTIVFTRGAGXREPAFSIS

SEQ ID NO: 260320 - protein, 121 aa, Zea mays
  unsure (1)..(121): unsure at all Xaa locations
  Clone ID: MRT4577_169028C.1.pep
MAGKGDGPAIGIDLGTTYSCVGVWQHDRVEIIANDQGNRTXPSYVAFTDSERLIGDAAKNQVAMNPINTVFDAKRLIGRRVRDAFGQKDIKLGPFKGIPGPGEKPMVGCQQQGEEKPFGSQ

SEQ ID NO: 260321 - protein, 274 aa, Zea mays
  unsure (1)..(274): unsure at all Xaa locations
  Clone ID: MRT4577_169029C.1.pep
VLWLSSPGRPPIPLPVSRATGQFPFPVLAPPSARERERDGPARVDGPAIGXIDLXGTTYSXVGVWQHDRVEIIANDQGNRTTPSYVAFTDSERLIGDAAKNQVAMNPINTVFDAKRLIGRGFSDASVQSDIKLWPFKVIPGPGEKPMIVVQHKREEKQFAAEEISSMVLIKMREIAEAYLGSTIKEXAVVTVPAYFNDSQRQATKXDAGXVLAGLNXVLRIINEPTAAAIAYGLDKKXTSVGEKXVLXFDLGGXTFDVSLLTIEEGIFEVKGTA

SEQ ID NO: 260322 - protein, 263 aa, Zea mays
  unsure (1)..(263): unsure at all Xaa locations
  Clone ID: MRT4577_16902C.1.pep
MRSCSSARQMLLTRLSSVSCSSTAQQLHAGVGKFAAAACWSWKKKREELPCFRARLAGKPPRASPAKGGIVPASDDDDGVSLGTVKLPGNINTARLESLLFQXRCSCRACVPERVRAPCIFFLRFLACVIDTDGIXLTLXWGNSLCQGANLPLPVPLKVGEQKNRATCYNSDMACXQISSPDAIDQVDKVEGGIRLGFVAVEDGATRTLVYIDCLVSPAPDGSGPVFRAIRNGPMKDKEPPGEPRIMRSLLQALEKSIQIARV

SEQ ID NO: 260323 - protein, 253 aa, Zea mays
  unsure (1)..(253): unsure at all Xaa locations
  Clone ID: MRT4577_169030C.1.pep
MAGKGDGPAIGIDLGTTYSCVGVWQHDRVEIIANDQGNRTTPSYVAFTDSERLIGDAAKNQVAMNPINTVFDAKRLIGRRFSDASVQSDIKLWPFKVIPGPGEKPMIVVQHKGEEKQFAAEEISSMVLIKMREIAEAYLGSTIKNAVVTVPAYFNDSQRQATKDAGVIAGLNVLRIINEPTAAAIAYGLDKKATSVGGKNVLIFDLGGGTFDVSLLTIEEGIFESQGTAGDTHLWWXDFDXRMGNHFVQSQEK

SEQ ID NO: 260324 - protein, 71 aa, Zea mays
  unsure (1)..(71): unsure at all Xaa locations
  Clone ID: MRT4577_169031C.1.pep
TIVSRQKAYGRSRRRGQNXRNVLATAARXVVVIRAFTILPQPVLRQRRDLWAFGFLPPSLPGIFSLLSAAS

SEQ ID NO: 260325 - protein, 272 aa, Zea mays
  unsure (1)..(272): unsure at all Xaa locations
  Clone ID: MRT4577_169032C.1.pep
MRWLLSITVAFLWSVVVQAKSFTXPLAGCARRAGGXEKYSVFLEDLTSRGFTTSVESPKESKLSLLKHGERAYDHVLLLPGKSKGLGPALTANNFLEFMKKDGNILVALSSEHATPTAVQAMLAELDINIPADKGALVVDHFNYDSSSAQEQHDVLLLSFPNALRSDVKNYFAGEGYIAVPRAVGQALGNESPLTSPVLRAPATAYSYNPKDEADGVEDPFAVGGQLNLVSAMQANNAARLAVVGSAEMLQNKWFAXRRPSWATSRYTNAIC

SEQ ID NO: 260326 - protein, 72 aa, Zea mays
  Clone ID: MRT4577_169033C.1.pep
LAGAAIPDRVGAESGGAPFASHPLNSDPAPRSCFLFFYYDKCSRLIKHLDGRFTPVHGSTDHVSCRTLFRSS

SEQ ID NO: 260327 - protein, 45 aa, Zea mays
  Clone ID: MRT4577_169034C.1.pep
ARVFHRTYRSCIPSDSISIIFIFIGPKDILCTVVRMCYWNPAFMS

SEQ ID NO: 260328 - protein, 164 aa, Zea mays
  unsure (1)..(164): unsure at all Xaa locations
  Clone ID: MRT4577_169035C.1.pep
GGTVPQEVAVSPPIVVAVAAEPLLAPAVVGGPAVRWFGLFSCCAAGPFWCSPPRLLWWWRPWWFFFFFGPLPGCFFVWWADLVGEPPAGGAAVFFFPAVGWGVFGCWFPPPPPPFFFSWFFFFFLFRVASFSAVSSVGIINTPRIFFKKKKKKXKKKKKKKKKK

SEQ ID NO: 260329 - protein, 155 aa, Zea mays
  unsure (1)..(155): unsure at all Xaa locations
  Clone ID: MRT4577_169036C.1.pep
GPSRPPPKKTIPGGPKGARPKRFNGFXPSWPRRAQISKSFAPRVSPPQKKWPRFSPKNRGGDFFNHRLFFFPPTAPGFSWGAPPNPQPVKLVFFLSRGGAPPPALGWVGLNPAGPPQTLWVFSKLGPRINPPPGGRFGYGKKGNQPRFFLNYTPQ

SEQ ID NO: 260330 - protein, 59 aa, Zea mays
  Clone ID: MRT4577_169037C.1.pep
CHISLWTLKPRLVTRPSNHYEEHYQDPGTGKGVSSVTRLPELNPAVGGTDVTDIPTTSL

SEQ ID NO: 260331 - protein, 85 aa, Zea mays
  Clone ID: MRT4577_169038C.1.pep
VVVVVCICVVDVCLDFYREVFVDVVVRWFWVLVDNMCLDFVSCRLYCYGVRCWACAFLYWSWSMGLVMLLKLNELPVVVRSVACV

SEQ ID NO: 260332 - protein, 58 aa, Zea mays
  Clone ID: MRT4577_169039C.1.pep
TYYLPPTPSHTRMLRSISPKELIAEHTLGDQLWPYVYMERISNRRDICLCSTQNHCTI

SEQ ID NO: 260333 - protein, 63 aa, Zea mays
  Clone ID: MRT4577_16903C.1.pep
FCFVDIRRSFFWGMGICYHFVGSQEFLVFSSRAQLQMGHATVGVNLFKQTLGWTWPHVKSGDF

SEQ ID NO: 260334 - protein, 85 aa, Zea mays
  Clone ID: MRT4577_169040C.1.pep
KGGDQVPQNFNKSRKNQERQGTKHIYRGTDILQPFIPPNFRPPCPNKKPSIKKGHYTSPIYGKKNKLTLVSTKQKGKGEPKKKTQ

SEQ ID NO: 260335 - protein, 57 aa, Zea mays
  unsure (1)..(57): unsure at all Xaa locations
  Clone ID: MRT4577_169041C.1.pep
MKQYRYTTYTEGVEAFFFWETQNETTRKYFPQIEEILXAVVITDKNTGIFNCYRFIT

SEQ ID NO: 260336 - protein, 207 aa, Zea mays
  unsure (1)..(207): unsure at all Xaa locations
  Clone ID: MRT4577_169042C.1.pep
PASAAWXKKKKKKKKKKKKKKKKKKKKKKKKKKKKKKKKKKKKKKKKKKKKKGGGLFRGSRFSSGGWQSLIFFLGALNLILGAGFLNRGRGKTPGFPKFIGFGEIPLFPSGVIRKRARPVALSKILPPLMGNGAPPFRGFLRGGVGGFPPRGPFSFASPLGPVFFFFFLFFLASLGGFPRKFLNGGFLLGFLLIVFGTPHPKKLIGG

SEQ ID NO: 260337 - protein, 39 aa, Zea mays
  Clone ID: MRT4577_169043C.1.pep
AALSMVYISGAPVMFVGCGQAYTDLKKLNVKSIVKTLLK

SEQ ID NO: 260338 - protein, 54 aa, Zea mays
  unsure (1)..(54): unsure at all Xaa locations
  Clone ID: MRT4577_169044C.1.pep
PGPISXTRYPAGRYQRLPSEXELVLEAVARNSXGHLAVFAGAXNCLCRLTQFLH

SEQ ID NO: 260339 - protein, 120 aa, Zea mays
  Clone ID: MRT4577_169045C.1.pep
FFYHGSDGWAWAGNKIRGRAPREPRDGSERTSGGANTVVNAPHAPTHKKRKNGRRNALGWGRRPGPPLPPRTPKPGPQTEQTSPSVRVFSSSNTPLHPACHRPPPSLGPVPSVYINPRPS

SEQ ID NO: 260340 - protein, 82 aa, Zea mays
  Clone ID: MRT4577_169046C.1.pep
NVKKALRLMGSNEGEFKAEGNSKFTYTVLEDGCTKHTGEWGKTVFEYRTRKAVRLPIIDIAPYDVGGPDQEFGVDVGPVCFL

SEQ ID NO: 260341 - protein, 110 aa, Zea mays
  Clone ID: MRT4577_169047C.1.pep
PYRFQFSSPEIAVNPSLLFCHQSQNMVHGSSHSPQDGCLPVRLFFPGRGNLTLCMSCQHHQPPLPPHIYVACWDSKRYISAATQTIDCLVLTLPHDSCFWSTGYSNRTSN

SEQ ID NO: 260342 - protein, 211 aa, Zea mays
  Clone ID: MRT4577_169048C.1.pep
MEALVGRYWGLGGRRCGACGGSPAAAHCRTCPGGAYLCAGCDAGHARAGHERVWVCEVCECAPAAVTCRADAAALCAACDADIHDANPLARRHERVPVQPIGAAADPAAEKAALLFGLAAEGKDGGDDDAAKVVVDASKLDLLFADDVVDPFLAQDFARFPHADSVVPNDGSSCGAAVDFDFGGGVAVAAKQPSYSSYTAASLGHSVSVPF

SEQ ID NO: 260343 - protein, 192 aa, Zea mays
  unsure (1)..(192): unsure at all Xaa locations
  Clone ID: MRT4577_169049C.1.pep
MASKRANAGDEQQKLSPSGLPVHKIPGSYGVPFFTPLRDRLDYFYFQGAEEYFRFRVAKHGGATVLRVNMPPGPFLSGDSRVVAVLDARSFRVLLDDSRVDKDGTLDGTYMPSLALFGGHRPLAFLDGADPRHAALKRVMIRLAAARMHTXAPGVRRRLHRTFGRRGIRAWGGRSLRPWKSTSTTCATCWTS

SEQ ID NO: 260344 - protein, 42 aa, Zea mays
  Clone ID: MRT4577_16904C.1.pep
VTITTGTPAFGFWSSWCPYLCRRYLETLVLYCHCQLILSFFL

SEQ ID NO: 260345 - protein, 329 aa, Zea mays
  unsure (1)..(329): unsure at all Xaa locations
  Clone ID: MRT4577_169050C.1.pep
MGDVAAGAAALSPPPMTKETNLFMQIVGNPDGTVTRPEVPLVPASAEATGGVISRDVPLDASAGTYLRLYLPDPSSAPAAKLPVVLYFHGGGFVILSAATVFYHGHCEAMAAAVPAIVASLEYRLAPEHRLPAAYEDAAAAVAWLRDGAPGDPWVAAHGDLSRCFLMGSSSGGNMAFFAALRTGGLDLGPATVRGLLLHQPYLGGVDRTPSEARSVDDXMLPLEANDRLWSLALPVGADRDHEFCNPVKAMAPEALAGLPRCLVTGNLGDPLIDRQREFARWLQDRGGAEAEVVVKLDVAGFHASELFVPEIAEVLFAAMREFVYTGDA

SEQ ID NO: 260346 - protein, 71 aa, Zea mays
  unsure (1)..(71): unsure at all Xaa locations
  Clone ID: MRT4577_169051C.1.pep
KQAXSLSFTHXGVTRXXTLHRRXXECXTFKDLSCGQVHKDEXXXEGVLHEGETNMGXQLXNPIAXALNTYX

SEQ ID NO: 260347 - protein, 57 aa, Zea mays
  unsure (1)..(57): unsure at all Xaa locations
  Clone ID: MRT4577_169052C.1.pep
PFKLKGPFTFPCPDISKFVMDKGYYIXLYKWTKVDISDKAHKERVNTIIEYHEPFKG

SEQ ID NO: 260348 - protein, 136 aa, Zea mays
  unsure (1)..(136): unsure at all Xaa locations
  Clone ID: MRT4577_169053C.1.pep
GGGGASPMXVXQTYXXAXLGEGHLGATPASVEXXTSGSPFSXSQPWSFWVRGVFFLAPPFXWGGPVPGKQGFLFGPRWGETLGNWGSWKGDTVVYRNPWEHDFPNQPLTVCGAPLHHLGDVSYPPLGRIGAGLLRL

SEQ ID NO: 260349 - protein, 312 aa, Zea mays
  Clone ID: MRT4577_169054C.1.pep
MGCRSCDKPKMNYRKGLWSPEEDQRLRDYILKHGLGCWSAVPAKAGLQRNGKSCRLRWINYLRPGLKRGMFSQEEEDVVIDLQAKLGNKWSQIAMHLPGRTDNEVKNYWNSYLKKRVMQQAQGASSNSSPKSPPELTSMSTTADLSSMSMPMPMPMPMHQRHHVKNNSGGGSTATSHGQQDDANISGSHAALSAPPPPPLAQQPFEHQAARSFVFSDWAPESYSLSTHWPAATSTSGNVTPSHGSTAAAAAAAFGDQMSGTYGAGGLPPQHQDHHHSTAPATGIAGSGYFDLLNMGDIYGGFSSTNNDDLLF

SEQ ID NO: 260350 - protein, 64 aa, Zea mays
  unsure (1)..(64): unsure at all Xaa locations
  Clone ID: MRT4577_169055C.1.pep
LQYXIVHYMESVMHQXLTVNPGRTTRPPLFLTYQAHILISPSSLAVSNSNATRWISSHSEASST

SEQ ID NO: 260351 - protein, 64 aa, Zea mays
  Clone ID: MRT4577_169056C.1.pep
SIKELTQLFFFCLKLNTMGEGVLYFRSLMSKMVCHAITIRLNVSYVGKDNSVYKVLLNIHRSIY

SEQ ID NO: 260352 - protein, 96 aa, Zea mays
  Clone ID: MRT4577_169057C.1.pep
SPSPFGSWRRSPGWDLCRATSQRSSDTRELVNGGNPGSAPASASPPRQPNGNAGVRFALPETPLQAGLVATERTRGPAEPPEAESEAMIRSWHRQI

SEQ ID NO: 260353 - protein, 338 aa, Zea mays
  unsure (1)..(338): unsure at all Xaa locations
  Clone ID: MRT4577_169058C.1.pep
MAVSPELEGLRRIAPSRFVSFAFPNPFLGHASNPYGGGDDGDAGECVRVAVLDSPLPAPPVPATAAMLVPTGRHRDWIFSTRAGHLHLLLSATRFSRXILVGPELSAPSPRVVSCARRRPDPDPPAHARLLPLLLALCPVAAFRGNAVPDVPLLTFQDDLLRLAPIEFVAGPVVGEMVVEDVAVDCSPSRPAELRRRLRFKRMPCLVQTQVRLRQSHASPSLSLEALEGSSGELLQPEVGGPLAQPYLQAMVAGLAVTAPSIEKSIQSGAKPRCLCAGVGGGSLLMSLRVGLQFDVLGIEADGVVLDVARSHFGLVEDEFLRVHVGDAIQTIRGFRCW

SEQ ID NO: 260354 - protein, 72 aa, Zea mays
  Clone ID: MRT4577_169059C.1.pep
YKYNRRVYISSCHLHPPLSIHGRSWGSCSSVACYRSCPSRAGLIVPSMPFVFLLSYDMRRFIARHCGPRYTG

SEQ ID NO: 260355 - protein, 53 aa, Zea mays
  Clone ID: MRT4577_16905C.1.pep
HASADAWEKFKKKKKKKKKKKKKKKKKKKKKKKKKKKKKKKKKKKKKKKGGLF

SEQ ID NO: 260356 - protein, 75 aa, Zea mays
  unsure (1)..(75): unsure at all Xaa locations
  Clone ID: MRT4577_169060C.1.pep
KPFSDIRFYILLQATIICIDELLCMRNNHYSXNNFQAQADAVNLICSANTHSNPKNTIGVMTMAAKGDHFLNTPT

SEQ ID NO: 260357 - protein, 142 aa, Zea mays
  Clone ID: MRT4577_169061C.1.pep
MSRVTAAVLFYILAVAALSAAEAPAESPKEGSAAKAPESAKRTAAPAEAPEAASTPVAAAAPSPSSRKSGPATAPATASTPPSSTDEELSPSPPASTAAASPAAGPAADDSCFGWRWTTTRGDTRVMIQEAAASYTNFRRSN

SEQ ID NO: 260358 - protein, 59 aa, Zea mays
  unsure (1)..(59): unsure at all Xaa locations
  Clone ID: MRT4577_169062C.1.pep
ASDDASVFCQDLPAVPKXANRRKNKGSSEANGGAAPKDTATAGPEEGAAATTPPAVDDD

SEQ ID NO: 260359 - protein, 138 aa, Zea mays
  Clone ID: MRT4577_169063C.1.pep
MSRVTAAVLFYILAVAALSAAEAPAESPKEGSAAKAPEAAKRTAAPAEAPGAASTPVAAAAPSSSSRKSGPATAPATASTPPSSTDEELSPSPPASTAAASPAAEGPAADDSAGAAALGSGAAIAGVAAAVATMIFFY

SEQ ID NO: 260360 - protein, 84 aa, Zea mays
  Clone ID: MRT4577_169064C.1.pep
SSYLRAKFTDRVCYYRQQYGSLHHWAQMFHAVIMICFIAFSASLGINCTPAYASLSVARFRLVFHFVTSQFGYVVIYVPMFSGL

SEQ ID NO: 260361 - protein, 132 aa, Zea mays
  Clone ID: MRT4577_169065C.1.pep
MMSAANPQVKSTPLPPPAAPTAASQNPQVAASKASSSSTSAADPNPNKRTNPGNAAAASAPPEPTPSVNGEASRSPLVPSPLPHPHEQQQHQHVQPPQQQQNQSGGGVRPNASGSAGPAATTSGSFLTMVHH

SEQ ID NO: 260362 - protein, 289 aa, Zea mays
  Clone ID: MRT4577_169066C.1.pep
YGLGRAIYINLQDRDVKQGASTLTQQLARSLFSEVGRENTAGRKIREMFVALKLEAVYSKDDILKAYLNRVYLGAGNYGFEDAAQFYFDKSAQDLDVGEAATLVAMLPAPNLYNPVQDYQTSVQLRNRVIERMAMLGMIDEQEANRARRSRIQVSPKATQTLSQRQAPYFYGYIFGELNHLLGEDVAKEGNFVVETSLNLKMQALAEKSLQKFLTTEGKKYAVSQGAVVTLDSRTGAVLAMVGGKSYRESQFNRASQAQRQPGSTFKLFAYTAAIPNSGNRILRWRKLI

SEQ ID NO: 260363 - protein, 52 aa, Zea mays
  Clone ID: MRT4577_169067C.1.pep
VIIFFLCPQHFFPKKMVVWLYPSSFKPHHQKPGKKLILPFFVASQNSGNIGY

SEQ ID NO: 260364 - protein, 185 aa, Zea mays
  Clone ID: MRT4577_169068C.1.pep
RSDSSIKDGSLQLEFNAEPTDARSTSFVGTHEYLAPEIVRGEGHGSAVDWWTFGIFLYELLHGTTPFKGDSNRATLCNVVDQPLRFPDATPPVPVSTVARDLIRGLLVKDPQKRIAPRRGAAEIKQHPFFDGVNWALVRDAHPPSVPDPADLGRVASKEKPAAAVATAHRAPAAKPKTGNFVQYF

SEQ ID NO: 260365 - protein, 65 aa, Zea mays
  unsure (1)..(65): unsure at all Xaa locations
  Clone ID: MRT4577_169069C.1.pep
RLALHKSSPAGGCALFLVGFWRFTSWVLVGGPFFSSVDVWHLMGEIWGGLSKKFLKNPLKIVLXR

SEQ ID NO: 260366 - protein, 57 aa, Zea mays
  unsure (1)..(57): unsure at all Xaa locations
  Clone ID: MRT4577_16906C.1.pep
GXGLXFRXFVFDXERXXLPTPFFLNFFFFFFFFFFFFFFFFFFFFFFFHPKNFIIEL

SEQ ID NO: 260367 - protein, 55 aa, Zea mays
  unsure (1)..(55): unsure at all Xaa locations
  Clone ID: MRT4577_169070C.1.pep
YNSSCQLLTAAAAPRTPPVLLKEECFCCTARRPCTLCVWNASTCRPVXARRRRSR

SEQ ID NO: 260368 - protein, 66 aa, Zea mays
  Clone ID: MRT4577_169071C.1.pep
SGHPFRVPPRFFTVFPFVYRRLFFFLKAEYSDFTLICHDRCCRYIVQNDRLHFINPGIDTSFAHSF

SEQ ID NO: 260369 - protein, 114 aa, Zea mays
  unsure (1)..(114): unsure at all Xaa locations
  Clone ID: MRT4577_169072C.1.pep
FKKPHKTHSRSCAWRSHYANHNAKHSGYRKRICTREVRLHNKILXMPKMPILKRMMRKSRASXKIAPHMYHDMYMXKVKGNIFKNKTVLMESIHMPKAXKAREKTLYLSVCKPS

SEQ ID NO: 260370 - protein, 897 aa, Zea mays
  Clone ID: MRT4577_169073C.1.pep
MAATEAATDTGSSRRSQDDTTTLVPHSGNLGEPIQKGVKTTRFKDDDEVVEITIVQRDSVAIEDVRVVDDGGSGHSNGFDGLSLVSPSSSRSGKLSSKIRQVKNGLKMKNSSTKAPQTQLGKNMRKRLDRSKSGAAVALKGLQFVTAKVGHDGWAVVEKRFNQLQVDGVLLRSRFGKCIGMDGSDEFAMQLFDSLARKRGITKQVLTKDELKDFWEQLSDQGFDNRLQIFFDMVDKNADGRITEEEVKEIITLSASANKLSKLKERADEYTALIMEELDRDSLGYIELEDLKALLLQSPSQVVARSTTHSSKLSKALSMKLASNKDTGPFYHYWQEFMYFLEENWKRIWVMTLWLSICIGLFIWKFIQYRNRAVFHIMGYCVTTAKGAAETLKFNMALVLFPVCRNTITWIRSKTKIGAVVPFNDNINFHKVIAAGVAVGVVLHAGAHLTCDFPLLLHASDAAYEPMKPFFGDKRPPNYWWFVKGTEGWTGVVMVVLMTIAFVLAQPWFRRNKLKDSNPLKKMTGFNAFWFTHHLFVIVYALLIVHGTCLYLSRKWYKKTTWMYLAVPVLLYVSERILRLFRSHDAVRIQKVAVYPGNVLALYMSKPPGFRYRSGQYIFINCSAVSPYEWHPFSITSAPGDDYLSVHIRTRGDWTSRLRTVFSEPCRPPSDGESGLLRADPSKGITETNARFPKLLIDGPYGAPAQDYQEYDVLLLIGLGIGATPLISIVKDVLNHIQLGGSVAGTEPEGSGKAKKRPFMTKRAYFYWVTREEGSFEWFRGVMNEVAEKDKDGVIELHNHCSSVHQEGDARSALIVMLQELQHAKKGVDILSGTSVKTHFARPNWRSVFKHVAVNHENQRVGVFYCGEPVLVPQLRQWSADFTHKTNTKFEFHKENF

SEQ ID NO: 260371 - protein, 73 aa, Zea mays
  unsure (1)..(73): unsure at all Xaa locations
  Clone ID: MRT4577_169074C.1.pep
ARVICIMKHLYPVCQGXHSVQIILPSKHLXHXSDMYVFXCSYAYNVAPKGKFLAFVSASVETKLVLDRDLELV

SEQ ID NO: 260372 - protein, 68 aa, Zea mays
  Clone ID: MRT4577_169075C.1.pep
APAVVIAPGDEEDQAALSIMTPSRDNLVLGITGPPAAHLELGGTRDTRKAPHACVVEFKHHSLPGRIK

SEQ ID NO: 260373 - protein, 461 aa, Zea mays
  Clone ID: MRT4577_169076C.1.pep
PSLRSGGVLVQPATLCGYEDRDMFCIVLLPGSGNRKVFGKAVVFIVDTSGSMQGKPLENVKHAVSTALSELVQGDYFNIITFNDELHSFSSCLEQVNDKAIASATEWMNANFVAEGGTDIMHPLSEAMALLSSVHDTLPQIYLITDGSVDDEHNICRTTKTDLSNRGSRSPRISTFGLGSYCNHYFLRMLASIGKGHYDAALETASIENQILKWFKRAASTIVANFSIDALTHLDEFEVDSEYIPDLSANSPLCVSGKYKGKFPDTIKAKGYLADMKEISVELKVQQLKEIPLDKVLVIQQIDFMTSKAWMSADKQVERKVIKLSIQNGVPSEYTDMIFLQTNLDKVEGTQKVKQKLKGHKGRDEQQIYGLKLGFGNKDATRENLITGFGDMNPAEKSVMLQKGSGCCSRVADCLCCMCCIKACNRMNDQCAVLMAQICAALACLGCYECCAEVCCGGSES

SEQ ID NO: 260374 - protein, 70 aa, Zea mays
  Clone ID: MRT4577_169077C.1.pep
GKFPLVRPKVFTPGGIFFPSVQGPGVNLYEIPFLLNSLPPWGFFFGPNGIDHSAVVLEIIAVPILCLSTG

SEQ ID NO: 260375 - protein, 113 aa, Zea mays
  Clone ID: MRT4577_169078C.1.pep
APARDSPLLVPMLYQNKPMPYSKHTRSVPAALPSSRPCRVFNLHQRLRVAGYHSVRLSQDLTDDLLFAPPHQQPLSAIRPRPRSWAEGHCGTDSMLTGRTSNSPWGTPQMTLW

SEQ ID NO: 260376 - protein, 43 aa, Zea mays
  unsure (1)..(43): unsure at all Xaa locations
  Clone ID: MRT4577_169079C.1.pep
MARRASLLLXAALVVAVAAAAVQPKCERIQCQLYVVVDSANGF

SEQ ID NO: 260377 - protein, 118 aa, Zea mays
  Clone ID: MRT4577_16907C.1.pep
MAVPSPELDAAPKSGLITLLMASKHRVGYAKARSSPRALPQALSRRRTRDPSQRLRFLANSSCGAADGRRRGEGRRMPTYLVAGNLREDLTKWLRKLELRTMVMAPAITGDVGTKTRL

SEQ ID NO: 260378 - protein, 68 aa, Zea mays
  Clone ID: MRT4577_169080C.1.pep
IFHVYSPDRPALLNLGWHGPFELTFPNILPFLKIGLPPSRYMASIPSRSHCQCKQFIQIIPVCYPLIG

SEQ ID NO: 260379 - protein, 70 aa, Zea mays
  Clone ID: MRT4577_169081C.1.pep
MGYTYTYEKAEAHRHVAPSTTEQNYNLKNNIAKPNCRYADDSDSNISLSTRCLLHWSSFLLLHPNTWDSA

SEQ ID NO: 260380 - protein, 51 aa, Zea mays
  Clone ID: MRT4577_169082C.1.pep
YRILYQVSSILKRLFRGPRYGYRVPVTPVQYDIEIGFQRRPSTCQTVFLSK

SEQ ID NO: 260381 - protein, 52 aa, Zea mays
  Clone ID: MRT4577_169083C.1.pep
PTTWGWSLLLGVKMCQSSSSQRVKPSGSALRVMCFSRHPSGTGTGSFRWGML

SEQ ID NO: 260382 - protein, 299 aa, Zea mays
  Clone ID: MRT4577_169084C.1.pep
MSSSAAPRQQLPPPASTPLATSGAQVAPPAATSAMMLTDTGALASTIPRSGAPLVQPPAEALTSAEIAATLVSLSHWMRNVQDTLSALLSGQISIPAPPNAQPPQPNQSVPLPSVDRPALTHPSSPLQSAPLHPISYPYGMPIESAPSSTTSLQSSTPIHHIKFPPSPSPILSWAYGTAAVAAPVYSSISPRPTITSSMPGSATGGHGGPIASSPLYGGVDGLLSQERSSLLPHVSAAATVWSPYHAHTHDAGMEATAYEGVDARPSPCFYKLEFATYDRSEDPLNWLNHCEQFFRGQL

SEQ ID NO: 260383 - protein, 245 aa, Zea mays
  Clone ID: MRT4577_169085C.1.pep
IILFGGSGKISELKATIDMGLAHRDSILKTIASEFEHWNHLAKKEKSIYHTLNMLSVDVTKKCLVGEGWSPVFAANQIQDALKRATLESKSQVGSIFQVLNTKESPPTYFQTNKFTSAFQEIVDAYGVAKYQEANPGVYTIITFPFLFAVMFGDWGHGICILLATLYLIIREKKFASQKLGDIMEMMFGGRYIIMMMSIFSIYTGLIYNEFLSVPFELFAKSAYACRDSSCSDSTTEGLIKVRDT

SEQ ID NO: 260384 - protein, 75 aa, Zea mays
  Clone ID: MRT4577_169086C.1.pep
LFFVLTPSLGVCPSLTNKLRGRKAPLAIYVFWGIFKQVPADNVVERYKENTLILPRNYGKNKTPFLQKKASEEIL

SEQ ID NO: 260385 - protein, 103 aa, Zea mays
  Clone ID: MRT4577_169087C.1.pep
PRSGGKGGKGLGKGGPKPPPKFLRATIQGFTNPAFLRLARRGGVKAFFGFFFEETPGVLKFFLEKVIRDPVPYPGPAPPKTVPPLDFVYGFKPQGRPLLGFGG

SEQ ID NO: 260386 - protein, 289 aa, Zea mays
  unsure (1)..(289): unsure at all Xaa locations
  Clone ID: MRT4577_169088C.1.pep
MYPYRMSNVMIGYLNLATLLASLPIIGAGLWLARGSSSSSSTTCSSILQTPLLAVGFAALLVSLAGFVGACFHVAWALRLYLAAVALLVAFLLGLTAFGFAVTAGGGGAQVYGRPYREYRVTDYSAWLQKRMQDDRYWRPALACVVGSKACPKIQNWTPMDYLQHDLTPIQSGCCKPPTACQYSGGMPVGAQDEDCYRWNNAPDILCYRCDSCRAGVMEQVRQDWHKIFVLDVAVLAALVCICSCGCCAFRNARRSRSQYPYGVNQTSKINPRWDYWWRXWGGRREQIY

SEQ ID NO: 260387 - protein, 76 aa, Zea mays
  Clone ID: MRT4577_169089C.1.pep
MATSGPSAAAAAPKDSWPEVVGMSSEEAKKKIKEDKPGADVQVVPADAFVTMDYSTGRVRVFVDSNDKVAKAPRIG

SEQ ID NO: 260388 - protein, 86 aa, Zea mays
  Clone ID: MRT4577_16908C.1.pep
SCRRRAAWGSSRVWCARYSAPRRELFRVDHRRRRRVGVVLGRDLFRLWAAMPRMSFGMSVRTARVVSTSATFDQSACASVVQRSRL

SEQ ID NO: 260389 - protein, 78 aa, Zea mays
  Clone ID: MRT4577_169090C.1.pep
VVHELIPPLAGCFLGSSCVQKVAGHGDRLPQAQPRYTRSRPWSAHCSTDRVTAFYGTGSVRGIGRGRSKMRKFWVPER

SEQ ID NO: 260390 - protein, 160 aa, Zea mays
  Clone ID: MRT4577_169091C.1.pep
RFPPRVDPRVRSAGLGSSTVTTYIESTAGIREGGRTGLTAITVAACFLASLFFGPLLMSVPPWAVGPSLVLVGAMMMRVAKDIEWGDMKEGVPAFVTMALMPLSFSIANGIIAGLGVYVALHWYDWARHGYGKVRNALDERRNQVAAAAGEVGPAAQDVV

SEQ ID NO: 260391 - protein, 74 aa, Zea mays
  Clone ID: MRT4577_169092C.1.pep
SAFDRRTGTLKRRRRRINGGKPDQQLRAVHLQDTADEKHLQGAAEHDDRMIRRWSGRRCPCRTLRVERGGRERQ

SEQ ID NO: 260392 - protein, 103 aa, Zea mays
  unsure (1)..(103): unsure at all Xaa locations
  Clone ID: MRT4577_169093C.1.pep
PPKGGRLFVHIGGQIGVLSAGASRRVLPRVPAGGQGPPLSVAPFFNPGPDPVVAPAPXGTIKXXGAXXGVPGPYRFGGSLGFFQGPKFGAKDPRFPAVKKLFG

SEQ ID NO: 260393 - protein, 56 aa, Zea mays
  Clone ID: MRT4577_169094C.1.pep
RRAPRVMVVGAPRHCQGQISEARSLKVKLLAVKQTAYKQTRSTTGRKNGANFLSII

SEQ ID NO: 260394 - protein, 118 aa, Zea mays
  Clone ID: MRT4577_169095C.1.pep
GDLSSGIVRLRGSMILFMGVLRLASRCCLCGGRCRGAGSPVCGRCPYPLWGLFWCVELRVRFSLGFLSPGCSVYFFFASPLCFRVRVGIGVFWARESACPLLLSQQKKKKRKPFFLFN

SEQ ID NO: 260395 - protein, 370 aa, Zea mays
  Clone ID: MRT4577_169096C.1.pep
MTSTAAGASSSAAKSESYLRADKIDLESLDIQLEKQLAKTWEKHKGSYNQGPREDWEIDLAKLEIRYVIAQGTYGTVYRGTYDGQDVAVKLLDWGEDGFASETETATLRASFKQEVAVWHELNHPNVTKFVGASMGTTDLKIPANSSNSGGRTELPPRACCVVVEYLAGGSLKQYLIKNRRRKLAYKVVVQIALDLARGLNYLHSRKIVHRDVKTENMLLDTQRNLKIADFGVARVEAQNPKDMTGATGTLGYMAPEVLEGKPYNRKCDVYSFGICLWEIYCCDMPYPDLSFADVSSAVVHQNLRPDIPRCCPSPMANIMRKCWDANPDKRPDMDDVVRFLEALDTSKGGGMIPEGQAGGCLCFFRARGP

SEQ ID NO: 260396 - protein, 78 aa, Zea mays
  Clone ID: MRT4577_169097C.1.pep
IESIGSPSNTNTSRGASDKEEKTKEDKIKGKDSSGPSLKENETLLAYHGPLLHEAKVQRIENHEDESRYLVHYLGWNK

SEQ ID NO: 260397 - protein, 44 aa, Zea mays
  Clone ID: MRT4577_169098C.1.pep
SRALLSFPVGILSVAACRNEAWGSCCTWAPRSPWALTTWAHICN

SEQ ID NO: 260398 - protein, 65 aa, Zea mays
  Clone ID: MRT4577_169099C.1.pep
VDVFSAGLSNFKPGGLNDLSSGNMVQPLLDCMLARFVLGKWFQCSSPLFWLPYRGLRAVSFKLSN

SEQ ID NO: 260399 - protein, 57 aa, Zea mays
  Clone ID: MRT4577_16909C.1.pep
KLNMPLRSKKLKLRQPKVVPHKKREKKRVLPLALSVMPADPKQFFLRLRFKILFEKA

SEQ ID NO: 260400 - protein, 29 aa, Zea mays
  Clone ID: MRT4577_1690C.1.pep
MAYIPVPSPLNSLALFFHKLINELIAASR

SEQ ID NO: 260401 - protein, 119 aa, Zea mays
  Clone ID: MRT4577_169100C.1.pep
RVFFFFFFFFFFFFFFFFFFFFFFFFFLTEGGRKPGKINLVFGPKIKFPPPFPKKNGGDLLLLYMGDGGGNPQQDQPNWPGARKQFPENLPLPFFKISGPPETWGVKKKWGTQGPGLET

SEQ ID NO: 260402 - protein, 66 aa, Zea mays
  Clone ID: MRT4577_169101C.1.pep
SKCYPPQAFLCFGPSWKKTTRKVDLTVWSTTFGLVLITTVFGFCFQGGWESFTLGAPSPLLVLALP

SEQ ID NO: 260403 - protein, 77 aa, Zea mays
  Clone ID: MRT4577_169102C.1.pep
CVDHVLEDRCMLILKHDDVLKVVPVLTTLAMESYASSSVYFIICGPETNSSINKDESSRIPYGSRRVSTRFWCFSGP

SEQ ID NO: 260404 - protein, 192 aa, Zea mays
  Clone ID: MRT4577_169103C.1.pep
TTKPRKLYRPQTISYPEDRLRQTFYEDHPWELARPRVVLELDGKDAQRCDWSKGVRQPGVALTGECVVQRQLWLMEAQKMPKRKAYDTARREFYRLRQLEEVEKRVALEEARYVGAYFGKNRLDVGMHLEDLEFEKWKIWATKQVAALEARDKAGVETFDTEEVEGAEVTDGDVLEPVSGEAESKPATALSS

SEQ ID NO: 260405 - protein, 87 aa, Zea mays
  Clone ID: MRT4577_169104C.1.pep
PTLFGARTGHVHAKVTGSYVPGFVRNTPPPPQRDPRNRRVLNKKIPGYTGMYPREKLPRHARTPIPWGLGPGPPPWVRTGSLVGLLG

SEQ ID NO: 260406 - protein, 44 aa, Zea mays
  Clone ID: MRT4577_169105C.1.pep
NAVDLLKTIAILPSRSGILASSASSCISSSPAYVHRVPIYLNHA

SEQ ID NO: 260407 - protein, 101 aa, Zea mays
  Clone ID: MRT4577_169106C.1.pep
GAFPGRTGGSCSCSCWSPGTGPPGGGFCSLGAPKGHPVRPWAPNGGGQGPGPRGSACARGGVIFCGGTWQYNTGFFCSVRSGYWGLSVWGGVCVVRSPVRS

SEQ ID NO: 260408 - protein, 71 aa, Zea mays
  Clone ID: MRT4577_169107C.1.pep
GHTPKSLKPNLETYINLAIHNNSIYITRYITYPINKVLMDCIIYQPTPDIKPDFDLYHVIYLTTYILTICP

SEQ ID NO: 260409 - protein, 75 aa, Zea mays
  Clone ID: MRT4577_169108C.1.pep
ILSQLSPYGRRPRCLGFPVPFREVRFSRARYCANNQVLPTEADTSGLLFKAPFSSSKTRSLVFPKKKKKKKKKGK

SEQ ID NO: 260410 - protein, 49 aa, Zea mays
  Clone ID: MRT4577_169109C.1.pep
LFDSVRVDGGASCTSGFEFRCRLAVPSGLEQSGLSLAAELSFGSLLHMV

SEQ ID NO: 260411 - protein, 86 aa, Zea mays
  Clone ID: MRT4577_16910C.1.pep
YKITRWKDPFCSRRTETVMITAHELLHGVHVPLQPTPDGGPQACQHHSQRQAFPLRHHRHSGHQLTVRCTRTRRSVSTCVEYQNPG

SEQ ID NO: 260412 - protein, 132 aa, Zea mays
  Clone ID: MRT4577_169110C.1.pep
FQMPVASMPIIPLVFLIFAVPIYEQLFVPFARRLTGIPTGITYLQRVGVGLVLSIVSMVMAAVVEVQRKKVAERHGMLDMIPGFQHLPMSCFWLAPQFAVFGIADMFTYVGLMEFFYSQAPQALKSMSSSFL

SEQ ID NO: 260413 - protein, 89 aa, Zea mays
  unsure (1)..(89): unsure at all Xaa locations
  Clone ID: MRT4577_169111C.1.pep
QAQRRGRADXAQQHEASARNXRTAGHMQPTNIGNGHSLPPLLEAHTPPGGRTARGHKGLHDTSKNAKHLQVGRAQASLGATTPLGAQQT

SEQ ID NO: 260414 - protein, 109 aa, Zea mays
  unsure (1)..(109): unsure at all Xaa locations
  Clone ID: MRT4577_169112C.1.pep
ASPMNTETQRFQMIQCLXKHASXHMVSECVKLDLYSNYKVCLIFKVTHIFRXNSLTVTKAEMTTLYKMAVNTLYVRWFAVDAVYPYAIDCITEDICHRLHVIGQADPTK

SEQ ID NO: 260415 - protein, 73 aa, Zea mays
  unsure (1)..(73): unsure at all Xaa locations
  Clone ID: MRT4577_169113C.1.pep
ANCTKKFIERPSTGELVASSSSSSHRRLILAAAVLLSVLAAASASAGTSCVPGCTIPHNPFPSWXWSPTSLTL

SEQ ID NO: 260416 - protein, 52 aa, Zea mays
  Clone ID: MRT4577_169114C.1.pep
LIFLQTTGTKHKPPVGGPYYHKLVDRHQFFFNNTGQFLTTGGFSFKGSKYWG

SEQ ID NO: 260417 - protein, 81 aa, Zea mays
  unsure (1)..(81): unsure at all Xaa locations
  Clone ID: MRT4577_169115C.1.pep
LCYHXLAYAARCTSLDPPXHAGHGXNXFXLETLTSAGHLSWSLAISRVSVLRQISQPFCEPIMMELYLLLISTYLLSNCNV

SEQ ID NO: 260418 - protein, 84 aa, Zea mays
  Clone ID: MRT4577_169116C.1.pep
KFSGLDNGFGEEIRFEDSLIVLESDIMCVHMFGNLLSLHLKVSYRVCHRIPLAWKILQSLRVGRNLTASIWSAWMRTRPLRPRI

SEQ ID NO: 260419 - protein, 62 aa, Zea mays
  Clone ID: MRT4577_169117C.1.pep
RGRVVAAVVAHPVGSSPVWLGPRHSCAPLRLALSGDQTSTGVTLSCLALEEKRGEEREWTMA

SEQ ID NO: 260420 - protein, 98 aa, Zea mays
  Clone ID: MRT4577_169118C.1.pep
MAASVACAFFFDAEPAGEPGKHALDACALCAKRLARDSDVFMYRGDTPFCSEECRHEQMHLDAVCARQAARRLQRFSAETESQSHRGQRQSRKVSIAG

SEQ ID NO: 260421 - protein, 158 aa, Zea mays
  unsure (1)..(158): unsure at all Xaa locations
  Clone ID: MRT4577_169119C.1.pep
REDDSLLAKLHRTSSSSSSSSDDQEXEVIVDTARLSRRSKTMVLKEMVTENLAAYTAHDDGYHYQTPVPAVVVYTHAHHXEGEHFPEPAPPPHVETHHPFCFHKIEDDDPKIQTLPQAPEEEKKGLLDNIKEKLPVGHNMPEDAVVAAAAPAVHAPPP

SEQ ID NO: 260422 - protein, 54 aa, Zea mays
  unsure (1)..(54): unsure at all Xaa locations
  Clone ID: MRT4577_16911C.1.pep
LXIKCCIVHPPIENASWCGTGGDNLGMFPILNRCQDGIQFITRGRCLLSNQQLT

SEQ ID NO: 260423 - protein, 44 aa, Zea mays
  Clone ID: MRT4577_169120C.1.pep
AFRNVINPPAYCCAHGAHQGGGPCHVRGASRTDLLHPGHVLLGP

SEQ ID NO: 260424 - protein, 58 aa, Zea mays
  Clone ID: MRT4577_169121C.1.pep
FGTANCLHILIAIILPTMGVYLKYRCRHEFWICLLFTFLGYIPSIIYSIYSITKNTYH

SEQ ID NO: 260425 - protein, 101 aa, Zea mays
  Clone ID: MRT4577_169122C.1.pep
PSVQPHQHTRPHPIRSMFQQKRGSLCGSGHLLQENKRRDFAHPDLNQPWSTENKNQTQSLPARTNMSDYSAPWHTGICKQEAQFKSRKGGANTNHLEEEKN

SEQ ID NO: 260426 - protein, 681 aa, Zea mays
  Clone ID: MRT4577_169123C.1.pep
MVVNNKVDSLSYDVEAPPPSAAGAAAGQAPPPASPAPAPAPATHAPVTREGGAASVLELHKVSLPERRTTAKALRQRLAEVFFPDDPLHQFKNQSSARRLVLALHYFFPIFQWGSAYSPRLLRSDLVAGLTIASLAIPQGISYAKLANLPPIVGLYSSFVPPLIYALLGSSRDLAVGPVSIASLVMGSMLRDAVSPDEQPLLYLQLAFTATFFAGVFQASLGFLRLGFIVDFLSKATLTGFMGGAAVIVSLQQLKGLLGISHFTSHMGFLDVMRSVVNRHDEWKWQTIVMGSAFLAILLLTRQISARNPKLFWVSAGAPLASVIISTILSFIWKSPSISVIGILPRGVNPPSANMLSFSGSYVALTIKTGIMTGILSLTEGIAVGRTFASINNYQVDGNKEMMAIGLMNMAGSCASCYVTTGSFSRSAVNYSAGCRTALSNVVMAAAVLVTLLFLMPLFHYTPNVILAAIIITAVVGLVDVRGAARLWKVDKLDFLACVAAFLGVLLVSVQTGLGVAVGISLFKVLLQVTRPNVVVEGLVPGTQSYRSVAQYREAVRVPGFLVVGVESAVYFANSMYLVERVMRYLRDEEERALKSNHPSIRCVVLDMGAVAAIDTSGLDALSELKKVLDKRNIELVLANPVGSVAERMFNSAVGESFGSGRLFFSVAEAVAAGACKAAQP

SEQ ID NO: 260427 - protein, 120 aa, Zea mays
  unsure (1)..(120): unsure at all Xaa locations
  Clone ID: MRT4577_169124C.1.pep
FFSKTRGQGGGKKNPYNNGGGKPPNSLEQTPLTRWGGQPSGEHGIRGAHGPGGGEKENFFRTGNPGGHPRPYGTQHRPPGRPFGAPPGPHGPKKNNLSSNPYRGTRAQRPPWGTRGXNLG

SEQ ID NO: 260428 - protein, 392 aa, Zea mays
  unsure (1)..(392): unsure at all Xaa locations
  Clone ID: MRT4577_169125C.1.pep
AGREESSKPTRQQQTPPSFFTSLPLLQEASEVFFPDDPLHQFKNQSSARRLVLALHYFFPIFQWGSAYSPRLLRSDLVAGLTIASLAIPQGISYAKLANLPPIVGLYSSFVPPLIYALLGSSRDLAVGPVSIASLVMGXMLRDAVSPDEQPPLYLQLAFTATXXFAGVFQASLGFLRLGFIVDFLSKATLTGFMGGAAVIVSLQQLIRLLGISHFTSHMGFLDVMRSVVNRHDEWKWQTIVMGSAFLAILLLTRQISARNPKLFWVSAGAPLASVIISTILSFIWKSPSISVVSIFSSIETSPIIIRXHLCKKTFVCCVXQIGILPRGVNPPSANMLSFSGSYVALTIKAGIMTGILSLTEGXAVGRXFASIXNYQWTAQEMMAIGXMNMRL

SEQ ID NO: 260429 - protein, 56 aa, Zea mays
  Clone ID: MRT4577_169126C.1.pep
FSLCSVLAKSHNFIIDQIKLFNNAKQHQGLPAEDHPVSELPSSRGRSHAWPVLCRL

SEQ ID NO: 260430 - protein, 262 aa, Zea mays
  Clone ID: MRT4577_169127C.1.pep
GTSRPAGKIQRANKATTNTSLLLHFPAVVAGSKRGHTNRQGRPRARRPPPLPTSRHQFKNQSSARRLVLALHYFFPIFQWGSAYSPRLLRSDLVAGLTIASLAIPQGISYAKLANLPPIVGLYSSFVPPLIYALLGSSRDLAVGPVSIASLVMGSMLRDAVSPDEQPLLYLQLAFTATFFAGVFQASLGFLRLGFIVDFLSKATLTGFMGGAAVIVSLQQLKGLLGISHFTSHMGFLDVMRSVVNRHDEWEWQTIVMGSAFL

SEQ ID NO: 260431 - protein, 126 aa, Zea mays
  Clone ID: MRT4577_169128C.1.pep
IPFIYSTAQSNPTDTIRWGLGSLPFLAWVSSATSTHTIQGWGWHPPHPVHLMYRVHFIRQVHLTCQVHFISQVQLTWRVQLTWQVHVMCPVHLMWRPCHYTTLLNRPELNPKPNQCHCQQNNPIQS

SEQ ID NO: 260432 - protein, 84 aa, Zea mays
  unsure (1)..(84): unsure at all Xaa locations
  Clone ID: MRT4577_169129C.1.pep
MRCECATQGRGEEFLKDVTSCCCSCCQVRSNETRIAAWQFRPVFSFCIKEKKKKKKKKKKKKKKKKKKKKXXXKKRKKKKKKGA

SEQ ID NO: 260433 - protein, 339 aa, Zea mays
  Clone ID: MRT4577_16912C.1.pep
LESSYEQHDKEGHAHMNEELSGWKLVVGDVFREPSCSKLLCIMIGDGVQILGMAVVTIVFATLGFMSPASRGMLLTGMIVLYLFLGIASGYVSVRFWRTIKGTSEGWRSVSWLTACFFPGVMFTVLTVLNFVLWKSESTGALPISLFFTLLALWFCISVPLTLVGGFLGTRAEKIEFPVRTNQIPREIPARKYPSWLLVLGAGTLPFGTLFIELFFILSSIWLGRFYYVFGFLLIVLLLLVAVCAEVSVVLTYMNLCVEDWRWWWKAFFASGSVAVYVFLYSINYLVFDLRSLSGPVSAMLYVGYSFLMAFAIMLTTGTIGFLTSFAFVHYLFSSVKID

SEQ ID NO: 260434 - protein, 55 aa, Zea mays
  Clone ID: MRT4577_169130C.1.pep
RAVAPLLGVPPVVLLLRLLGAPLRLVLAVALPRGGYSRTGSKNAPPCSFACRRCE

SEQ ID NO: 260435 - protein, 340 aa, Zea mays
  Clone ID: MRT4577_169131C.1.pep
MGRGRAPCCAKVGLNRGSWTPQEDMRLIAYIQKHGHTNWRALPKQAGLLRCGKSCRLRWINYLRPDLKRGNFTDEEEEAIIRLHGLLGNKWSKIAACLPGRTDNEIKNVWNTHLKKKVAQREKKKAGAGSGDAGTPATAPLSSATSSTTTHNSSGGSDSGDQCGTSREPDATDVCPLQLEDMDVSDMLVDGAPPAAQPMPSPSSSSSLTTCVGGVEELIELPVIDIEPEIWSIIDGESAVARHGGDAAAPCTGTGTAVSTSEAEEAAANDWWLENLEKELGLWGYAEEDTQAHPDLLDHYTGLSPLCALEGDPVSTYFQTGPAAAEPELLVVVEPSAVLL

SEQ ID NO: 260436 - protein, 80 aa, Zea mays
  Clone ID: MRT4577_169132C.1.pep
VRQTRRGRNMALDILKVHLKTTAHIPICGSLTCDGHYVLVNQFHGWPINDHYRYIYCTQMYAYENLITSSFDNLFQVGIS

SEQ ID NO: 260437 - protein, 287 aa, Zea mays
  Clone ID: MRT4577_169133C.1.pep
MASPDLLFNLRNLFYLGAYQAAINNSDVPGLDADAAAERDAIVFRSYIALGSYQLVISEIDSSAATSLQAVKLLALYLTGDKEGAISSLKEWLSDSAIGSNPVLRLIAGIIFMHEQDYNEALKHTHSGGTLDLHALNVQIFIKMHRSDYAEKQLKIMQQIDEDHTLTQLANAWLGIAVGGSKIREAYLIFQDFAEKYPMTGMVLNGKAVCCMHMGSFEEAETLLLEALNKDAKDPETLANLIVCNLHLGKPSSRYLSQLKLSHPDHVLVKNAAASEATFERALQAVA

SEQ ID NO: 260438 - protein, 277 aa, Zea mays
  Clone ID: MRT4577_169134C.1.pep
MEQGDPTPAASACNCDPAAAPPAWIPLHDHDDTAHSDDTLLQQLDAILLGMDDDDVATADDRCCSGWLSSSPSPSPSSSSEATTTASPPPSTREQHRRHPAKDDTALAGGGDEKRAVTTAAFIGVRKRPWGKFAAEIRDSTRKGARVWLGTFDTPEAAALAYDQAALAARGAAAVLNFPVERVVESLGALALAGAGSPVLALKRRHSKRTRRRKPSAVATTDGDGKDTMMKQPRRRQPAAAPRQCSGLPGAVPSYTTVAAVPPPPQQHATARGQSHT

SEQ ID NO: 260439 - protein, 95 aa, Zea mays
  Clone ID: MRT4577_169135C.1.pep
SQPVNALAFIFDGLHYGVSDFDYVAQATIVVGVISSLVLLYAPRVFGLAGVWAGLTTLMGLRMAAGILRLLWKSGPWSFLHEEPETKLQAQPLAS

SEQ ID NO: 260440 - protein, 87 aa, Zea mays
  Clone ID: MRT4577_169136C.1.pep
EFPARPTRPKKKKKKKKKYKKKKKKKKKKDYYKNPNLQNTYIQQNKLFYIFTLHTIHSPPFYNFITFKTLSFPNLISFHHIPLSPNP

SEQ ID NO: 260441 - protein, 53 aa, Zea mays
  Clone ID: MRT4577_169137C.1.pep
VSSNKCHCFCTESRTQHVASWPSGRVYVETMVSSVCVETRGYGIFSLCREYTQ

SEQ ID NO: 260442 - protein, 67 aa, Zea mays
  unsure (1)..(67): unsure at all Xaa locations
  Clone ID: MRT4577_169138C.1.pep
LYNAYTIYTEVLESNIIMIRXRRXSRGYDLHNMHTMDAMRNAIDGMNGKELDGRNITVNEAQFRRGR

SEQ ID NO: 260443 - protein, 34 aa, Zea mays
  Clone ID: MRT4577_169139C.1.pep
SDMHAVTSCKCLAFSSPYKHPVDHSLHIHKQVRL

SEQ ID NO: 260444 - protein, 48 aa, Zea mays
  Clone ID: MRT4577_16913C.1.pep
HGGLKKTAQETNTGGQNHYPQRKPTPSLKTERAKGVLKSEGKTAHLGS

SEQ ID NO: 260445 - protein, 66 aa, Zea mays
  Clone ID: MRT4577_169140C.1.pep
QFKDFVGFFPASLTQVNACNQIGKISPFYPPCLPSGVSNKNGKTSDLWDLKPLLFGKNHKWGSSHL

SEQ ID NO: 260446 - protein, 53 aa, Zea mays
  Clone ID: MRT4577_169141C.1.pep
SRTEVVCSKKDGTSISQHTNIKLIKLWIWISTWLLAEKKTAISYTGATSLICC

SEQ ID NO: 260447 - protein, 103 aa, Zea mays
  unsure (1)..(103): unsure at all Xaa locations
  Clone ID: MRT4577_169142C.1.pep
MATMILLLVMLVGLAACAANATSLHECLHAPIASLLPSYLASMIAXACENPSMQPYRLQQAIIACNIPLSPLFEQSPALSLVQTLVQTIRAQHLLQLVLPVIN

SEQ ID NO: 260448 - protein, 78 aa, Zea mays
  Clone ID: MRT4577_169143C.1.pep
LRKHVCIFKHEMKKRAQRGSRIVADGTAPPVGSQSPYVIRQVCLVAVLQRGVHSRAKFGASSSRGESQPELFRIGRVE

SEQ ID NO: 260449 - protein, 65 aa, Zea mays
  Clone ID: MRT4577_169144C.1.pep
QGIPISILRIICSTTQIGYIFSHYIMSNILSYKGKREEPFPNVAIEQHICTTADLAIRHSTPLFA

SEQ ID NO: 260450 - protein, 86 aa, Zea mays
  unsure (1)..(86): unsure at all Xaa locations
  Clone ID: MRT4577_169145C.1.pep
FLSHRVLNQIARPNLIRPAWXTFKTITSSSTSCVQIVASPPCISAFFFILTAPVTTSKTYCMLNTTSTFPKILFFCPLKIKPKFFS

SEQ ID NO: 260451 - protein, 79 aa, Zea mays
  Clone ID: MRT4577_169146C.1.pep
IWFEPLLYPPLFNTRTESTRWGDLYSPRGAEQPATTTSTPPKRHVTWCTSSLQEQPLPAAKGRRYADPRELPQAKNSRT

SEQ ID NO: 260452 - protein, 47 aa, Zea mays
  Clone ID: MRT4577_169147C.1.pep
LTRDPKVLAYVHELCPAFSEKKYVLQGTCSAKDHPVSPIFGVERSMA

SEQ ID NO: 260453 - protein, 77 aa, Zea mays
  Clone ID: MRT4577_169148C.1.pep
QFILNPLLPGSSICGKIRCGNLCMHASGHACHVTSRLATDAILASCSYTHTTAIKHLSASTAFFGCHCFSFFFFQFL

SEQ ID NO: 260454 - protein, 120 aa, Zea mays
  unsure (1)..(120): unsure at all Xaa locations
  Clone ID: MRT4577_169149C.1.pep
VMSEIIHNXPTCFITLKELGVPDAFISSVTAGVIPSCKALICVPNGLGAICLNNQGLEAVRETSALRFLVDTFTSMKYLIPMNEGVVLLANAVEELLRHVQSLRSIDVDIIIEIINRLSS

SEQ ID NO: 260455 - protein, 78 aa, Zea mays
  Clone ID: MRT4577_16914C.1.pep
RWWWKAFFASGSVAVYVFLYSINYLVFDLRSLSGPVSAMLYVGYSFLMAFAIMLTTGTIGFLTSFAFVHYLFSSVKID

SEQ ID NO: 260456 - protein, 94 aa, Zea mays
  unsure (1)..(94): unsure at all Xaa locations
  Clone ID: MRT4577_169150C.1.pep
GAXGFRGPKFPSPCFQRHFFFLGPPKSISGPAFFHPSFWESLAFPLFNRFEKHPLFPSWVITKEAPPYLLSKQFPILIDKGPPPCRVPLTAPVV

SEQ ID NO: 260457 - protein, 70 aa, Zea mays
  unsure (1)..(70): unsure at all Xaa locations
  Clone ID: MRT4577_169151C.1.pep
LYFFFFFFFLFKGXLRPLRIYPSSETGPRAQNAPIPQRHTHPLIWKNKKPPRLKAGTRTPKNMVKSTSTT

SEQ ID NO: 260458 - protein, 127 aa, Zea mays
  unsure (1)..(127): unsure at all Xaa locations
  Clone ID: MRT4577_169152C.1.pep
RATPKTKKTGEGKRRRGRKRRGRARAAASTAAAATRRAQQGAATRHHHGRGNAGGGGAAPTPADXADKSTRENXQGNTGKNGTXHTEQANEXGTNRXGGETTKKGGTEHXGPPGXNXAAQAKAETKA

SEQ ID NO: 260459 - protein, 121 aa, Zea mays
  Clone ID: MRT4577_169153C.1.pep
LHRRFTHTHLPIPPEEDYHEGGDSAEEGKAKPPTGGRRHGRGVQKHGPRRSSRRQTRTQTPAPTTTTTTTDTTEATAPGSARPGPRRTSTPPPARSTSARRASTPGLTDPPGRQEPHPDGP

SEQ ID NO: 260460 - protein, 83 aa, Zea mays
  Clone ID: MRT4577_169154C.1.pep
LGTRALPLEFFPPPPPPPPPPLPPPPSFFFWTKAFNFFKGGPCFFKNFLGAGKFPPKKAKILLKKGSLFKKGRSKREPVGDPH

SEQ ID NO: 260461 - protein, 42 aa, Zea mays
  Clone ID: MRT4577_169155C.1.pep
ARIAKGAIKNCECLQENMCVDIDILVVASRLTGQTRCFDAMN

SEQ ID NO: 260462 - protein, 126 aa, Zea mays
  unsure (1)..(126): unsure at all Xaa locations
  Clone ID: MRT4577_169156C.1.pep
PVRSTAASCPPYISPCAAYSCYRRAIRRRPEHDSEPELRAPPPLRHXATRSPPDAEAAGRTLTLRARELRKHQRRCSDSVRPWDREVCLSSSCGYDVKDAIRSSSALLARLSRSRGIWGEELNSHH

SEQ ID NO: 260463 - protein, 119 aa, Zea mays
  Clone ID: MRT4577_169157C.1.pep
ADTGALSLRTPPLFTRPAPEEHRGLHGGLPAGTHRRGRCRQAACRGAPWTRGCGAGRDRFSQQITRGREHFLKHPLPKRRSTKRGPAARHPRSRRRDLTARKTLRTSRAALRLHCSRPG

SEQ ID NO: 260464 - protein, 140 aa, Zea mays
  unsure (1)..(140): unsure at all Xaa locations
  Clone ID: MRT4577_169158C.1.pep
PAGHFIPVAHRTAIYTLHLILPRKIDSLVNVRKWEXVPDSTYDMIAGVGQLVTDIKEALELPLRHPKLCQRPGTAHPQAPLLYGPPGTGRTLLSRALAHHTDCTXLRVHGTELLHNYSGETLPYIXRELFIMASMHAPSI

SEQ ID NO: 260465 - protein, 79 aa, Zea mays
  Clone ID: MRT4577_169159C.1.pep
KAAVWAGPPPHFFLQGGGVLQASSRLQFKARSLELQLPFPLAGRHLKPKDGPCPPRPQNSGLTINLPCFLYNWGGGYPL

SEQ ID NO: 260466 - protein, 75 aa, Zea mays
  Clone ID: MRT4577_16915C.1.pep
EHEKKNQIWPNGQSEKEYPTQLTLTAHVYSLICNKVYKVALQYSRTTVFIDLQHASIHMPISLLLIVRRSARPVV

SEQ ID NO: 260467 - protein, 68 aa, Zea mays
  Clone ID: MRT4577_169160C.1.pep
WASPLLRGFCVPFFRTSCWAPFRRGSVWSVVSLSVRRFLAVVAPKFPPVWGSVLLGKKKGGAPPVEDP

SEQ ID NO: 260468 - protein, 94 aa, Zea mays
  Clone ID: MRT4577_169161C.1.pep
RSRRPTLPFRPSVSVGAGLSVRVTDGKRGQAVVAIASADARLEGIACSIRVIPDFPKPGIMLQDMTTLLVDTNAFRDTIDLFIGRDKDQRISAV

SEQ ID NO: 260469 - protein, 166 aa, Zea mays
  unsure (1)..(166): unsure at all Xaa locations
  Clone ID: MRT4577_169162C.1.pep
MEGDCAYFTNLLTEGLYEDIVEDNTTVLAEFQPTPPSSKPTQKQXKNFCEDEDRLLVSAWLNVSTDPIQGTNQTRATFWSRVYKFYDTNKGAFAERNQNSLLHRWGCIQDAVSKFCGCLSEIEVRNQSGMTIHDRVTQSKLTYSVWFKDQGSYNLVQSIMENMVAC

SEQ ID NO: 260470 - protein, 230 aa, Zea mays
  unsure (1)..(230): unsure at all Xaa locations
  Clone ID: MRT4577_169163C.1.pep
IGYLEAGRGGCNLKFRGSADCIISSCAWFPXSEKIVCASSEPASAPNRIFTCDLEGQNLEXWAGDRIPKVSDLAVTPDGRHLIFVSCNDIWIRELPRGREWRFREKQTISSLSLSGDGQSLIVNLNSQEIHLWKINESCTVPEKFMGHKQDKFVIRSCFGGSNSSFIASGSEDSQVYIWKRHVEMPIKVLHGHTMIVNCVSWNPARPHMLASASDDRTVRIWVGRKNATK

SEQ ID NO: 260471 - protein, 95 aa, Zea mays
  Clone ID: MRT4577_169164C.1.pep
SRKKLHNFSLHSNEWLATLGPRLFLRALLAHKTNICGELALKRGRDLSLQAKAQSYAQLAKIGTVSTFKKVSSKAASEHYRFDIVMLLAEAKEIA

SEQ ID NO: 260472 - protein, 77 aa, Zea mays
  Clone ID: MRT4577_169165C.1.pep
RFILCNNLTYEEALHGLRGMRVFTTHFLKILYGPHMTSLDSNNALVYLIICCNANITNKSTEVHSLIDYNFFEPIHS

SEQ ID NO: 260473 - protein, 38 aa, Zea mays
  Clone ID: MRT4577_169166C.1.pep
IFFFFFFFGFFFGDSSAFSLNTLNTGLHWTHTVTALAS

SEQ ID NO: 260474 - protein, 185 aa, Zea mays
  unsure (1)..(185): unsure at all Xaa locations
  Clone ID: MRT4577_169167C.1.pep
RPGSPILLLRSATAGSASRSRSSRIPRYDDRRGKYTPCLVTRFGPXTRSLDLEYLFSKYGRIPSRCLNGDYTFIEFTDPPEGDDXRXHLDDRPVHRRRIIDEFAKRDLRGXGASREYXYKGPLPKAEQCLNCYMDDTXTTNCLAGDXWTTPCYCCARIAAHIYIDCSTPTSNLRREMRYSISPSP

SEQ ID NO: 260475 - protein, 176 aa, Zea mays
  unsure (1)..(176): unsure at all Xaa locations
  Clone ID: MRT4577_169168C.1.pep
IGERHRLCGLSSQANNGHLVVEGLLIAVIVFQLSRKSYKPPKKPLTEKEIDELCDEWEPLWLLLHDAAGPHTIVDGKEVVNFASANYLSLIGNEKIIDSCISSLEKYGVGSCGPCGFYGTTDVHLDCESKIAKFLGTPDSILYSYGISTIFNVIPAFCKKGDIIVXADEGVHWAMK

SEQ ID NO: 260476 - protein, 56 aa, Zea mays
  Clone ID: MRT4577_169169C.1.pep
IASSNRTFLYFVSSFRLQSQSVALTYFFSPSHVLFSPVVSELIPGSSMCARFARDY

SEQ ID NO: 260477 - protein, 55 aa, Zea mays
  Clone ID: MRT4577_16916C.1.pep
LWRKSGTNSGVASCCCDHGTSVSRILRPCVCDATFLRSLTCTHLPTLHFPRITRR

SEQ ID NO: 260478 - protein, 241 aa, Zea mays
  unsure (1)..(241): unsure at all Xaa locations
  Clone ID: MRT4577_169170C.1.pep
IGERHRLCGLSSQANNGHLVVEGLLIAVIVFQLSRKSYKPPKKPLTEKEIDELCDEWEPXGCCCMSNPTYHFIYGLTGCAAGPHTIVDGKEVVNFASANYLSLIGNEKIIDSCISSLEKYGVGSCGPCGFYGTTDVHLDCESKIAKFLGTPDSILYSYGISTIFNVIPAFCKKGDIIVADEGVHWAVXNGLHLSRSTVVYFKHNDMASLASTLEKLTRGNKRAEKIRRYIVVESIYQVQCF

SEQ ID NO: 260479 - protein, 177 aa, Zea mays
  unsure (1)..(177): unsure at all Xaa locations
  Clone ID: MRT4577_169171C.1.pep
MDMALPVVNATAAVLARVSAAFNAPLARAVVFGVHIDGHLVVEGLLIAVIVFQLSRKSYKPPKKPLSEKEIDELCDEWEPEPLWPPVKXEGPRIDTPMLESAAGPHTIVDGKEVVNFASANYLGLIGNEKIIDSCIGSLEKYGXVGSCGPRGFYGTIDVHLDCEXKIAKFLGTPDSI

SEQ ID NO: 260480 - protein, 37 aa, Zea mays
  Clone ID: MRT4577_169172C.1.pep
KGVGLAEVKSGDVVLKKYVDDASDKDFIQGSPCDQQP

SEQ ID NO: 260481 - protein, 89 aa, Zea mays
  Clone ID: MRT4577_169173C.1.pep
TPNLYQKLLYRGRFPQPTSPLNSSASEQRDHMSSKATSGDQSAGWGTAARAYKLTFPLQNASMDKAADILSAADAPATNISAPSLAKPY

SEQ ID NO: 260482 - protein, 49 aa, Zea mays
  Clone ID: MRT4577_169174C.1.pep
YDVVHLSSSTSQGLGHDYPVLPTRPTTRPTTRSPTRPRTRGKTRGRTRG

SEQ ID NO: 260483 - protein, 54 aa, Zea mays
  Clone ID: MRT4577_169175C.1.pep
PTVSYFLYMLASDCIPNILNIYLSDCDIAYCCSCIILMDCRAFLSTSRFSFSRQ

SEQ ID NO: 260484 - protein, 137 aa, Zea mays
  Clone ID: MRT4577_169176C.1.pep
APSLPSAEPPSAACVSGITSINNTACGGNNAASAMAPPPAKPALHEPPQLPRSAASANKTSEKRQRVPSAYNRFIKDEIQRIKASNPDITHREAFSAAAKNWAHFPHIHFGLMPDQGLKKHPMQTQEGAECMLFKDG

SEQ ID NO: 260485 - protein, 54 aa, Zea mays
  Clone ID: MRT4577_169177C.1.pep
GEVRLRPAQLLPELRRRRHCLVSSGGHGSCVAATPGGFCFFCVVTSNCSQDVSY

SEQ ID NO: 260486 - protein, 112 aa, Zea mays
  unsure (1)..(112): unsure at all Xaa locations
  Clone ID: MRT4577_169178C.1.pep
MSFCFFLLQRNRKKAKKGAGGARESDPVRTKXTPSVKNGLQFPAGRKKRGLKKARHSQRVGTGTPVYRDNALKNLALGELEXARNAAKENKKTRGGPRHKLLAIRNDEELGK

SEQ ID NO: 260487 - protein, 81 aa, Zea mays
  Clone ID: MRT4577_169179C.1.pep
PGLGVSAWWRTQGLSLMLESSFWNRLMVPEHSTNHLPTMGLSRARSFGSCALHDTQEPLRPEPQAPRKGKDLVLRGSPDAW

SEQ ID NO: 260488 - protein, 116 aa, Zea mays
  Clone ID: MRT4577_16917C.1.pep
KIHYHFPLFFFSSYLKTLFEDHFFFFIYRVPPYGTRTIYTYRRVAKPLARGSFTKAFPPQQAKTSCPPKKNSSISTCLQKASFIKNQKEGCLQLSPKKRTQPVRSTGQHKTIYRPK

SEQ ID NO: 260489 - protein, 83 aa, Zea mays
  Clone ID: MRT4577_169180C.1.pep
LQRLAFVGGKGISHVSNCHAEGANENQLCSTDIRTFEILLRTYEVRDVALKSLTSDEAYVGPLPQKRRMPTTPGENTDCPQRT

SEQ ID NO: 260490 - protein, 96 aa, Zea mays
  Clone ID: MRT4577_169181C.1.pep
HRVGVNEWGEGRGVKTCIRDHKSNPNLKNILLEGNLDRIKQAINLVRDLMGAIIASMPARGPSYDAAPAGGGPGRGPGGTSRNYKTKLSENLLKIC

SEQ ID NO: 260491 - protein, 203 aa, Zea mays
  unsure (1)..(203): unsure at all Xaa locations
  Clone ID: MRT4577_169182C.1.pep
MISQLFKPSTVRSAGLLGRVAKYRVQARYLATVQSNTERVMPAPSARRATAVSNEPATFTIKNGPIFEGKSFGAKTNISGEAVFTTSLVGYPESMTDPSYRGQILVFTQPLIGNYGVPSSARDEHGLLRYFESPYIQASGIVVQDYALKHSHWTAVESLGAWCAREGVPAISGVDTREVVTYLXREXGSSLARISXGEEYDAD

SEQ ID NO: 260492 - protein, 49 aa, Zea mays
  Clone ID: MRT4577_169183C.1.pep
PRVRMVTNFYKHFKTHKYWIHFKLELYLIIAFCDHSDNRFMATYWNQKQ

SEQ ID NO: 260493 - protein, 78 aa, Zea mays
  Clone ID: MRT4577_169184C.1.pep
NILTAPYQVNQREFGGGHLDYSQLQRLQPAKEERQREEWPNGMKNFASMSYTGGDNNMTKAFINLPPRSGIYHRYQWY

SEQ ID NO: 260494 - protein, 25 aa, Zea mays
  Clone ID: MRT4577_169185C.1.pep
NDIECFLFGNPQVVIYATSHLYSFM

SEQ ID NO: 260495 - protein, 92 aa, Zea mays
  Clone ID: MRT4577_169186C.1.pep
AKKKTYGSSIFFCRVVSKTAGGNGLFDAEWGEDRNRLETTPPVLVRGKYWEAPVRGIRFDALNNSINLWWGVLPFPAGKGRFFLNTEERPHF

SEQ ID NO: 260496 - protein, 64 aa, Zea mays
  Clone ID: MRT4577_169187C.1.pep
GGPMQQCTSGVPADSPPIVICAKCWKTLHTCLIKWSSDVLVPAFVPVLFARLFINCEFTSGPLC

SEQ ID NO: 260497 - protein, 154 aa, Zea mays
  Clone ID: MRT4577_169188C.1.pep
FPPAPRSPPASSPSGPTPRPSSRRPPRASTRRRTYPPTITPSPRGKRDTQLPGPYTMRLGLRTGDSEREIKGADRRQALARNPDEGKHMTWKDEDFNRVHILLHNTLQRHTSALRTTGWQSYKTLECMEACMEEELPAYTSQSGLQIGNIDQCL

SEQ ID NO: 260498 - protein, 83 aa, Zea mays
  Clone ID: MRT4577_169189C.1.pep
GGLTHQLRAPWKAATRLAAGAPTPTTSLCAQTLPFPATIKSPCFRGAAQELHQFQRKVPQPEATDLFVPSVYKFVQAARCKKP

SEQ ID NO: 260499 - protein, 67 aa, Zea mays
  Clone ID: MRT4577_16918C.1.pep
TWSSRAPRPAGRACVGHRCRGSCRIHACTHTERPPNLHTLTLVISRIRRMSCLVWMLQLVEADDVSG

SEQ ID NO: 260500 - protein, 79 aa, Zea mays
  Clone ID: MRT4577_169190C.1.pep
RGWKIKREKGVQPPYCFLKKGFAPGGGGPLSWGEKKIGLRGFKRICPGFRPQFHKGGKKKASTQKLDGPQDLFKTSRGG

SEQ ID NO: 260501 - protein, 57 aa, Zea mays
  Clone ID: MRT4577_169191C.1.pep
RGVFACVLGEIGAVGANHGCPLPPPEIFLVAPVQQLADEHYPPKKCVPPPIIMSLYN

SEQ ID NO: 260502 - protein, 90 aa, Zea mays
  unsure (1)..(90): unsure at all Xaa locations
  Clone ID: MRT4577_169192C.1.pep
GRPHAYAPQSGPRRSHIMASTSCCLLDHSTVRLEASSXLSLLKPTQRKFRALHSLATLVCSPRVRPRVRPRVRPLVRTTIHALLVSELSY

SEQ ID NO: 260503 - protein, 68 aa, Zea mays
  Clone ID: MRT4577_169193C.1.pep
HWNSPDTPKRTNPGVASHRVTGTFLPSPTTSHVGRVLLPGNLSQHVGVLPVQSQKSLSRLSFIGQFNS

SEQ ID NO: 260504 - protein, 231 aa, Zea mays
  unsure (1)..(231): unsure at all Xaa locations
  Clone ID: MRT4577_169194C.1.pep
SKPYSCGTSAGAANPLPLFATVNPLPSFATSDESENRWSQGCGPASXIDLRTTYSCVXSGQYDRVKTIAPDQXNRTTPCDESFTDYERLLRYAGLQHIVAMNPINTGYDAKLTIGRRFSDASVQRDLKLWPFNVMPGPAEKPMIXVHHKGEDKHPAXEEISYMGLIKMXEIAXAYLCSTLKNAAVTVLAYFNDSQRHAHKDAGVIAALNELRXINEPTVAAIDYGLGKKAP

SEQ ID NO: 260505 - protein, 33 aa, Zea mays
  Clone ID: MRT4577_169195C.1.pep
ILLRDKSTIIGCNSTSPIKDRQSLVQPYNLSNL

SEQ ID NO: 260506 - protein, 33 aa, Zea mays
  Clone ID: MRT4577_169196C.1.pep
KASLHRSVSMGHYLMIAPSSSMYSLSPVSASLL

SEQ ID NO: 260507 - protein, 127 aa, Zea mays
  unsure (1)..(127): unsure at all Xaa locations
  Clone ID: MRT4577_169197C.1.pep
MAHLVLLLISLVVADALAGDXSAQDPLIRQVVPVGDDSDLXLNVETHXFLSFLHRIGKFYEDVDXHSYRISGYEVMLMRVRRHLLLDPEEELPIAKFSKLLTKDDLAELHQPPLCSGSLSSDNSWSG

SEQ ID NO: 260508 - protein, 140 aa, Zea mays
  Clone ID: MRT4577_169198C.1.pep
WYPSPAGFCLLRDWRLTPLIIATFRGYPSIVKILLEHGADAGANVNGFGSYNPLARAAEKGLTEAIKCLLEAGANPNVPDTFGRLPIELAAEYGTWEDVELLFPVTSKIPTVADWSVNGVISHVHMEVTQLETSVRSRVI

SEQ ID NO: 260509 - protein, 126 aa, Zea mays
  unsure (1)..(126): unsure at all Xaa locations
  Clone ID: MRT4577_169199C.1.pep
KGGPQGRGRTPKGDRRGGPAGDPRGQGERGPKFIPGRETDPSXXXPKKRQKEEKAAKEEEMEELRRQQAEAGGREKEKEREKRAKPPPPGARPGLXKGATXXGPQRMGLEIRPDKTYPSPGILGPG

SEQ ID NO: 260510 - protein, 47 aa, Zea mays
  unsure (1)..(47): unsure at all Xaa locations
  Clone ID: MRT4577_16919C.1.pep
KKKKKKKKKKKKKKKKKKKKKKKKKKKKKKKKKKKNNKXKKMKKKNI

SEQ ID NO: 260511 - protein, 192 aa, Zea mays
  unsure (1)..(192): unsure at all Xaa locations
  Clone ID: MRT4577_1691C.1.pep
MALVPSRSDSEALIPEVEMNAGADQTATTARVTVVQASSVFYDTPATLDKAEKLVAEAAGYGSQLVLFPEVFVGGYPHGSTFGLVVGNRTAKGKEDFQKYHASAIDVPGPEVSRLSALAGKYKVFLVKGVVERAGYTLYNTVLSFDPLGKYLGKHRKVMPTALERVFWXGFGDGSTIPVYDTSIGKMGALIC

SEQ ID NO: 260512 - protein, 69 aa, Zea mays
  Clone ID: MRT4577_169200C.1.pep
MSMLTKYSIAMWIMDPSVQWHSLLSPRLDFNNRLNVLIPEKMCLLQALKRSRSYWAQPEGGWPKWNFPL

SEQ ID NO: 260513 - protein, 65 aa, Zea mays
  Clone ID: MRT4577_169201C.1.pep
YELASCCDVPKWQPLYPCNLRGLYPAYASSKFCNLNSMPIPGRIRTIYVHEFIPAHVHLNNIGIA

SEQ ID NO: 260514 - protein, 186 aa, Zea mays
  Clone ID: MRT4577_169202C.1.pep
MDAFVAGSRGRPALSFLCPKISLFSPPSHSWFRWLVGAPRVLPPFTVAAVLRPIHGDHDAIDLPREADEIRGLLPRGFDIIGVLLVGGEGSDADVTRALEQARALRELLFGVAASHGLVGGHMDAATGEIRFVVSESGWTNSVEGSVVTWEDEPGRLLWEKGCLLRCELLLKHPLYLRPDVNSGIG

SEQ ID NO: 260515 - protein, 120 aa, Zea mays
  Clone ID: MRT4577_169203C.1.pep
MNTTKVMLRVLVFSLLFTMLSTHQALGNKENCDKDKDFIKRQCEKCIGVGRKFPTTQLCCNAIKRADMACVCRSITLEEQLTISVVKVVDVAKECGNPVPPGNKCGTWTVPPQLLGWVHP

SEQ ID NO: 260516 - protein, 155 aa, Zea mays
  Clone ID: MRT4577_169204C.1.pep
MLASEPEQRKRAQEATTSEILAGEDDRGRKSQQEGHKEHQQHKLTLPTVSNYTIHDATDGTDNGKQEELDNMERDKPLCDFSNFRANVCEMRGNIRIHPNGSSVIYMEPTGSGSKRNEQWKIKPYPRKGDELCLNHITEVTVKSSIVAPELSKYH

SEQ ID NO: 260517 - protein, 215 aa, Zea mays
  unsure (1)..(215): unsure at all Xaa locations
  Clone ID: MRT4577_169205C.1.pep
MKAVERAKLVRSLRHESRRLRLLVLVIGFFLVTLTFVVVSKPDALLFNLNGRLSVDQAPRSLLIRQRVDADEGRSAETLASASGDPKVVEDDTYGEEASAKARANANARGTTAEEERMLASEPEQRKRAQEATTSEILDXQNLIXTPDVDQRNGRDRSHQAALDNMEXGTNHXCDFSNFRANVCXEMRGNIRIPPMGSSVIYMEPXSSGSKRNEH

SEQ ID NO: 260518 - protein, 596 aa, Zea mays
  Clone ID: MRT4577_169206C.1.pep
MKAVERAKLVRSLRHESRRLRLLVLVIGFFLVTLTFVVVSKPDALLFNLNGRLSVDQAPRSLLIRQRVDADEGRSAETLASATGDPKVVEDDTYGEEASAKARANANARGTTAEEERMLASEPEQRKRAQEATTSEILAGEDDRGRKSQQEGHKEHQQHKLTLPTVSNYTIHDATDGTDNGKQEDTEFNLTPDVDQRNGRDRSHQAALDNMERDKPLCDFSNFRANVCEMRGNIRIHPNGSSVIYMEPTSSGSKRNEQWKIKPYPRKGDELCLNHITEVTVKSSIVAPECSKYHDVPAVIFALTGYTGNLFHDFTDVLVPLFTTASEFNGEVQFLITDMAIWWTRKYAVVFEKLTKYPLIDFNKDNEVHCFKHAIVGLHAYMEFTIDPLKAPHNYSMVDFNRFMRRTYSLPRDAVRAPGETPQTRKPRLLIISRQRTRMFLNLKEIVVMAEEIGYEVVVEEANVNSNVGHFAKVVNSVDVMMGVHGAGLTNCVFLPHGATLIQIVPWGALDGICRIDFGYPAEQMGLRYQHYSIGMHESSLTEQYPLDHEIFRNPLAFHKNGFEFVRQTFMDTQNVRLDCNRFRPVLLEALDQLNQ

SEQ ID NO: 260519 - protein, 483 aa, Zea mays
  unsure (1)..(483): unsure at all Xaa locations
  Clone ID: MRT4577_169207C.1.pep
MGGGSPVAAVQDASDDGARVVVLVAGSPVDSASDSLPPPVAATPAPAAEAKQESVSETEETKQAAAAAAAAAAAAGGVQAMAVTVVRDVETGLDASTSDRDGDKPSWFTPKRLLVMFCIINMLNYIDRGVIASNGVNGTRKSCSGGTCTSGSGIQGDFNLNNLEDGTLSSAFMVGLLVSSLIFASLVKRVXISGCXQASFCTVGGTRVDDXNPFRLIGVGLLVWTIATAPXMLNPEVQDQINNNATKHVLPGGIEDLSGKVPQKFSLSSFCHGIMTEIGRFSKDMKELLQEKVFVIVVLGYISYNFVIGAYSYWGPKAGQEIYNMGSADLMFGGITIVCGIVGSLAGGFILDKIGSTIPNAFKLLSGATFVGAIFCFGAFCFKSLYGFIPSFAVGELSVFATQAPVNFVCLHAVKPHLRPLAMAVSTVWIHIFGNVPSSPLFGLLQDKINIWGETALRLTSIIFAAVVFWFFSIFVPTSGQNQ

SEQ ID NO: 260520 - protein, 77 aa, Zea mays
  unsure (1)..(77): unsure at all Xaa locations
  Clone ID: MRT4577_169208C.1.pep
IFERGMATCFAYGQTGSGKTHTMGGDFSGKNQDCSKGIYALAARDVFLXLKKPNYKKLELQVYATFFEIYSGKVFDL

SEQ ID NO: 260521 - protein, 110 aa, Zea mays
  unsure (1)..(110): unsure at all Xaa locations
  Clone ID: MRT4577_169209C.1.pep
MPPPPLRTPGTSDMGGYTFLCRYNSXEWTGKXHSGQIQASAATPYELHLRLITADFAFESAYXTMSYFSMVTPTSDEFHVIICALGGGAMMERQSEGGGAAASVGAAAEA

SEQ ID NO: 260522 - protein, 46 aa, Zea mays
  Clone ID: MRT4577_16920C.1.pep
SNILFSEMIGSISLPHTSSKAYAPQQCSTTYDAPLERFELRADTRR

SEQ ID NO: 260523 - protein, 556 aa, Zea mays
  unsure (1)..(556): unsure at all Xaa locations
  Clone ID: MRT4577_169210C.1.pep
MGGGSPVAAVQDASDDGARVVVLVAGSPVDSASDSLPPPVAATPAPAAEAKQESVSETEETKQAAAAAAAAATAAGGVQAMAVTVVRDVETGLDASTSDRDGDKPSWFTPKRLLVMFCIINMLNYIDRGVIASNGVNGTRKSCSGGTCTSGSGIQGDFNLNNLEDGTLSSAFMVGLLVSSLIFASLVKRYNPFRXLIGVGLLVWTIATAGCGVSFDFWSITICRMFVGVGEASFPRLAAPFIDDNAPVAQKTAWLGMFYMCIPTGIALGYVYGGLVGKYLNWRVAFWGESILMVPFVILGFVIKPLNLKGFAHNTTKEYGQMLNPEVQDQINNNATKHVLPSRIEDLSGKVRQNFSLSSFCHVLMTEIGRFSKDMKELLQEKVFVIVVLGYISYNFVIGAYSYWGPKAGQEIYNMASADLMFGGITIVCGIVGTLXGGFILDKIGSTIPNAFKLLGXPTSSSTTSPWTCASARGTPRARGPPTVRSTTCCISTTTGSYHRRTGDGSGTGSKDKEDGEALEELMSTSADERMPWQLPPASELKDSGVTFVGALVRHL

SEQ ID NO: 260524 - protein, 525 aa, Zea mays
  unsure (1)..(525): unsure at all Xaa locations
  Clone ID: MRT4577_169211C.1.pep
MAVTVVRDVETGLDASTSDRDGDAGDNPSWFTPKRLLVMFCIINMLNYIDRGAIASNGVNGTRKSCSGGTCTSGSGIQGDFDLNNLEDGTLSSAFMVGLLVSSLIFACLVKRYNPFRLIGVGLLVWTIATAGCGVSFDFWSITICRMFVGXVGEASFISLAAPFIDDNAPVAQKTAWLGMFYMCIPTGIALGYVYGGLVGKYLNWRAAFWGESILMVPFVILGFVIKPLDLKGFAHNTGKEYGQMLNPEVQDQINNNGTKNVLPSRIEDLSGKVRQNFSLSSFCHVLMTEIGRFSKDMKQLLQEKVFVIVVLGYISYNFVIGAYSYWGPKAGQEIYNMASADLMFGGITIVCGIVGTLTGGFILDKIGSTIPNAXQLLSGATFVGAIFCFGAFCFKSLYGFIPSFAVVELSVFATQAPVNFVCLHAVKPHLRPLAMAVSTVSIHIFGDVPSSPLVGLLQDKINNWRATALILTSILFAAVVFWFIGIFIPSVDRFNEESEHGLTVAERSNLRPLLDEKDEPRTSD

SEQ ID NO: 260525 - protein, 75 aa, Zea mays
  unsure (1)..(75): unsure at all Xaa locations
  Clone ID: MRT4577_169212C.1.pep
SVRRAYTMNPKPAHKGAQPQAKGIPFSTRRPKNRRPARKKWRSRCRRRRPSPPGXPGSXPVPPAATAAGHRACVR

SEQ ID NO: 260526 - protein, 103 aa, Zea mays
  unsure (1)..(103): unsure at all Xaa locations
  Clone ID: MRT4577_169213C.1.pep
EGKYEAGYGEEVTGGGVGEHEVYDWGRGTXESTMMVAGIFSLMARREPISSFRICAGCRSDQWSGSDLGACAIPISNMSMMSIGREELARERIWLSRYYVRAT

SEQ ID NO: 260527 - protein, 183 aa, Zea mays
  unsure (1)..(183): unsure at all Xaa locations
  Clone ID: MRT4577_169214C.1.pep
MDRSEEETIMSDSDPLLDRNDQSGSLPXALATTAGDRDXVLEIEDEETDGSYAACCRICLEAESEIGDELISPCMCKGTQQFVHRSCLDHWRSVKEGFAFSHCTTCKAQFHLRVETLEDNSWRKIKFRLFVARDVILGFLAVQITIAIISAVAYFLDRDGSFRNSFRDGWDRILLKHPIPFYY

SEQ ID NO: 260528 - protein, 608 aa, Zea mays
  Clone ID: MRT4577_169215C.1.pep
MGVGLKGNGDESIAAPSCCSARKSKDVVRERDACWEYCDKLDGNKVRCRFCHKVLNGGISRLKFHLSQIPSKGVNPCTKVKEDVVDRVKAVISAKEEYKEFQLLKRQRVADLSSAAAPAKWAPEAPPSLSTSPGRVASPAAVITRAAEQSRLLAPEASAPVPRPSAAAANNKPRAAAASEWETERCIAEFFFENKLDYSIADSVSYQQMLEALGGPGFRGPPADVLRDKWLQRLKSEILQKTKEIEKDWATTGCTILADSWTDNKLKALINFSVASPMGTFFLKTVDASSHFKTHRGLYDLFDEVIQEVGPENVVQIIADRNINYGSTDKLVAQNYGGAIFWSPCASFCVNAMLDDFSKIDWVNQCICQAQTVTRFIYNSRWVLDLARKCVAGQELVCSGITKSVSDFLTLKSLLRHRPKLKQMFHSAEFSSSSYASRSIPCVEILDDDELWRAVEEIAAVSEPLLRVMRDVSGGRQAIGYIYESMTKVTDSIRTYYIMDEGKCKSFLDIVEQRWQTELHSPLHSAAAFLSPGIQYNPEVKFFRTIKEEFYQVLDKVLTTPDQRHDITAQLHAFRKAQGLFGSNIAKEARNNTPPENQYIGITGHLYR

SEQ ID NO: 260529 - protein, 121 aa, Zea mays
  Clone ID: MRT4577_169216C.1.pep
GLTAWWDGRWSQVLERRHLRVTVCSTTRRFTLLAVAACFLDEREFRPDVSPSPLPQSLSRSVADRTTQQLRRSSVFKFQWKLRQSRELFDHCVVCHLYKTNVKVSPCINMHVTYYGHVVYL

SEQ ID NO: 260530 - protein, 86 aa, Zea mays
  Clone ID: MRT4577_169217C.1.pep
THSDGSRAPLNHPYLPRGCGGGSTSTYSHLSDQLQQGTRMDEQLPRARATPAVQAECNVPLTTSGQSDCEPLQRAVEPTAHYKKWR

SEQ ID NO: 260531 - protein, 82 aa, Zea mays
  unsure (1)..(82): unsure at all Xaa locations
  Clone ID: MRT4577_169218C.1.pep
KIVASGTGYGQPQPAAADADPGAGDNKLVFETPLHPQPLWEDYFENTIKFIXHPKVKGFPGVYRLSLLEKKGLTTQEIDEAL

SEQ ID NO: 260532 - protein, 56 aa, Zea mays
  Clone ID: MRT4577_169219C.1.pep
WRPRVLGTRPCFNRRRHVQLSKCSCQNICCTSSIYAIVPRHCLQTLRNESHISSFE

SEQ ID NO: 260533 - protein, 76 aa, Zea mays
  unsure (1)..(76): unsure at all Xaa locations
  Clone ID: MRT4577_16921C.1.pep
NNEVFGFFKHRGVKSSFKNHLLLKGCFIRRKFQHVRAACPVRDRFHRRETTCLSFXLPATTCPSVHVSAETLHLVF

SEQ ID NO: 260534 - protein, 209 aa, Zea mays
  Clone ID: MRT4577_169220C.1.pep
MFSAARRLLTSRARSRALAAATPYPHSAVASPSCPRFPTPKEIRRGLDEFVVGQDKAKKVLSVAVHNHYKRIYNESSNKCSVKSWVRGGVATNSDDVIELEKSNILLIGPTGSGKTLLAKTLARYVNVPFVIADATAITQAGYSGEDVESVIYKLLVAADFNIEAAEHGIVYIDEVDKLTKKADCRKDRKDVFREGVQQALLKIFEGTS

SEQ ID NO: 260535 - protein, 333 aa, Zea mays
  unsure (1)..(333): unsure at all Xaa locations
  Clone ID: MRT4577_169221C.1.pep
FGQLWRLEPLPPEKKAMWRREMDWLLCISDHIVELVPTWQSFPDGTRLEIMTSRPRSDLYINVPALRKLDHMLLEILESFXDPEFWYVEQGIAAPDCDGSASFRVAFHRRDEKWWLPVPRVPPGGLHNKTRKQLQHKRDCANQILKAAMAINSNTLAEMEVPEPYLDSLPKNGRSTLGDIIYRYITSDQFSPECLLDCLDLSTEYQALEVANRVEASVYVWRRRVAAKPVNGLGRSSSARSSWGMVKDMMVDSEKRELLLAERAEGLLICLKQRFPGLTQTSLDMSKIQYNKDVGKSILESYSRVLESLASNIVTRIDDLLNIDELDGHAEHF

SEQ ID NO: 260536 - protein, 102 aa, Zea mays
  Clone ID: MRT4577_169222C.1.pep
AKTLVRLNSSEWNAVRCAWSRSNRVLSLPRLRESVSLSRVATPPSPSQLPPVPYSLGMSMSPGRGLHFRGRGCCAGGEVRGGSAGRGGRERDDLGLYPGSLE

SEQ ID NO: 260537 - protein, 170 aa, Zea mays
  unsure (1)..(170): unsure at all Xaa locations
  Clone ID: MRT4577_169223C.1.pep
MARNNEGHLELPEMDQIQPKNIPHNESLPLGQKLLLHHGSDAPLRIGHSSHGNMGLRINDLPSSSRTVQTLGYRVGNPGTSHAPFVHFHAGSSGSHLPDPAVXYPHRSEEGFXSVGSHMDNRRAAMKRXGPSVHPXAGISATGYFMFGKSSSTQPSNSVQPNAAPLAEXF

SEQ ID NO: 260538 - protein, 506 aa, Zea mays
  unsure (1)..(506): unsure at all Xaa locations
  Clone ID: MRT4577_169224C.1.pep
MARNNEGHLELPEMDQIQPKNIPHNESLPLGQKLLLHHGSDAPLRIGHSSHGNMGLRINDLPSSSRTVQTLGYRVGNPGTSHAPFVHFHAGSSGSHLPDPAVNYPHRSEEGFAPVGSHMDNIRAAMKRKGPSVHPAGISATGYYVGSSSSTQPSNSVQPNAAPLAEPFLRQIPLSIDQSGWDIQHLIHQEGFQRNVRARHSSIPLVPRSASTYPLNINSVHVPSFGSTASASSSAPVEMNQVPVSLPIRTLPSGAPGMTSRVPTGRAYYPVVGSSSSSSSVGAVPTIHGSSGAAMFANGGYVPSSVHAGTVPIFPNPAPATSSGSRAMPHQMVIQSHPAATSAATSSTSMRTAQPSLPARTAAASRHARHVSAGLANNGRYRRARSSYYRLHPLMVEAERFMMDHLVFYESRAAAADPHRDMRLDIDNMSYEDLLALGEAMGNVNTGLADEKISECVKEVVCCSSDHTQMDQDDGSCAICLVRWEXDYRDKDALGILKCRHDFHAG

SEQ ID NO: 260539 - protein, 110 aa, Zea mays
  Clone ID: MRT4577_169225C.1.pep
IRLPLILLLGVTTGKGNYMCFAHKNIEKAHSPTRLYHRPRKAIHHCHAPQEQTDKAAQPPMSASLLLPGPSSVTLLKPLPSTWHLYMFNSATKRTMYAKSAYHDPPSSPL

SEQ ID NO: 260540 - protein, 50 aa, Zea mays
  Clone ID: MRT4577_169226C.1.pep
SVVLVLCWWLSRRYLILGLRLRLSYFVSCFTVQSAVTVHVCSSFESKSVM

SEQ ID NO: 260541 - protein, 59 aa, Zea mays
  Clone ID: MRT4577_169227C.1.pep
RPHMSCPWPQGTSKKGGCFLFPVPKNLNFVWSKNWQRSALSLNQVLPGQSWSGRTLEKE

SEQ ID NO: 260542 - protein, 99 aa, Zea mays
  Clone ID: MRT4577_169228C.1.pep
VGRRGRRRQSLQWRTAAKRKAAPEATSAAARDGIATPAADTGLGAGASWAETTEKAATDRMATRARALDATVEAAIASVGGSDERRTRRCDLWRRRGME

SEQ ID NO: 260543 - protein, 95 aa, Zea mays
  unsure (1)..(95): unsure at all Xaa locations
  Clone ID: MRT4577_169229C.1.pep
ATCVSNHSYDHYINSVYHQPSTKPYSDLNSTYPASSEHYNQVAYSHLNLSYPLKRIHYDTAGFEDVEYSMDMEIDXLSNLGTCNTXMFAAPVLFE

SEQ ID NO: 260544 - protein, 69 aa, Zea mays
  unsure (1)..(69): unsure at all Xaa locations
  Clone ID: MRT4577_16922C.1.pep
YDLDRHLLRSXTTVRXRADCXAXXXRRXDQXYADLXPXDRPCPTVSRPSPTXLTYDQVLXSIFELRGID

SEQ ID NO: 260545 - protein, 71 aa, Zea mays
  Clone ID: MRT4577_169230C.1.pep
KKAIQETRYKESVRAAINQKRAAAESKRMGILEAERRRENARLIRVFGAASSVRSQKEAERRKMKDRLEEY

SEQ ID NO: 260546 - protein, 64 aa, Zea mays
  Clone ID: MRT4577_169231C.1.pep
TTTHPYHFLYLLQSAKKPVLTSLVCCSLQSISWLYLQAPPQLIQTEDIIAINFFILINQQLYNF

SEQ ID NO: 260547 - protein, 99 aa, Zea mays
  Clone ID: MRT4577_169232C.1.pep
MAARGETVLVDDPGTSTGMDIISVPDGGHQQKRMESSAMDDVTGGTSIVAVIPPAALRAPGIVADNNTGATEMVGADQRIPMRHIDAHDQDTPHILHSH

SEQ ID NO: 260548 - protein, 88 aa, Zea mays
  Clone ID: MRT4577_169233C.1.pep
GSLAQMSSEWRSLDQIMFVALWLVKKHMLFSWHLRLKVLTCFLDEACPRENYVLGRKFSRQMYSLRWRSIRAGDRIPSQFFRKLVDDG

SEQ ID NO: 260549 - protein, 73 aa, Zea mays
  Clone ID: MRT4577_169234C.1.pep
TAYPIFRVAQCRHSFVLNHYTGNPKGGGRFSQWYTDCPSYRGEIFMWGISNSFVRNRWIGPLVQKACTPLSHG

SEQ ID NO: 260550 - protein, 113 aa, Zea mays
  Clone ID: MRT4577_169235C.1.pep
VFRPSQMSHSVTHYFPSQSHLTGQSNLLSSFLNVCHIKCHLNDSTGSKDDKRLNVSISVCVLTLAIRRLASVLLVSHWLVVVSVVVAVHLLHGTMTNAHPRQRPGSRSTRRSG

SEQ ID NO: 260551 - protein, 62 aa, Zea mays
  Clone ID: MRT4577_169236C.1.pep
TLVWRTEGLHAYFPVHVEITCSTQTLRVQPCWFRLSQVGLTAGNDRMILRMHLSRIRQGYFR

SEQ ID NO: 260552 - protein, 74 aa, Zea mays
  unsure (1)..(74): unsure at all Xaa locations
  Clone ID: MRT4577_169237C.1.pep
NPILTIXQXLKQWSLYSVRYYYKLKNISNGKPLGFQFXXSFXXSGFXXAHXLVCLRXGAGCXMAYLFLVYTNTS

SEQ ID NO: 260553 - protein, 47 aa, Zea mays
  Clone ID: MRT4577_169238C.1.pep
CSMLALRSHMDIHCSIQCEQGYLVLRVKYRRHRSESRAYIHYQSLPR

SEQ ID NO: 260554 - protein, 95 aa, Zea mays
  Clone ID: MRT4577_169239C.1.pep
TLLTTYRGNREEQQGIQTRQLMNFVNNLLQLVRCGLLRLQSGCGCGFYSIFLSMDCSCSSPNSCNSVGLQPAEHAESNSGTHIAESKAPHAHGLD

SEQ ID NO: 260555 - protein, 84 aa, Zea mays
  Clone ID: MRT4577_16923C.1.pep
TEPLVPFTKVVSPLFQRPSLVVYPKMVFCDFIGFLFSRKRGFFLSQFPRFPSPSWVPPPPVVFFLNARGFPPPVGSPPPLLFFF

SEQ ID NO: 260556 - protein, 141 aa, Zea mays
  unsure (1)..(141): unsure at all Xaa locations
  Clone ID: MRT4577_169240C.1.pep
YYIFINIIFXGXVFIKRQSPPHQGNVKMFIQSTHIREGKNKLVNWPKKMESNGTGVNPSLEGKNKKQGTKKNGGINETNLLKENQVKRGRKKNKQKGNEGVPLPPPCPKKTPPPIGNAREQKNNAKKTNFSPHLGFFPPVP

SEQ ID NO: 260557 - protein, 46 aa, Zea mays
  Clone ID: MRT4577_169241C.1.pep
DSEFWKLYKDNPASCAIVMKTSAGLVYLLACLLEPFMPSFSKEVWS

SEQ ID NO: 260558 - protein, 93 aa, Zea mays
  unsure (1)..(93): unsure at all Xaa locations
  Clone ID: MRT4577_169242C.1.pep
KNPNYKGKWKTPGFVNPKLEVDPDLYVLKPLQYVXIEVWQVKAGSVXDNILICDDPDYARHVVDETFAANKEAEKEAFEGAERKRKAREEEVN

SEQ ID NO: 260559 - protein, 66 aa, Zea mays
  Clone ID: MRT4577_169243C.1.pep
LGFGKKPLWNLLGPFLKVSLPVNSGLSIGCFFRQKKLGKCMVFNSKAPANSFLTGGPFGVQGFSRN

SEQ ID NO: 260560 - protein, 121 aa, Zea mays
  unsure (1)..(121): unsure at all Xaa locations
  Clone ID: MRT4577_169244C.1.pep
MLNQPESWDDDDDGTWKPRMIPNPEYKGPWKRKVYLLYTSYNFLTFCSFEYLCTHDFSLXKIKNPNYKGKWKTPWIVNPGERHISDLLLFTYCHVDYVYCLLMTVLSISLGSKFTSYLSLN

SEQ ID NO: 260561 - protein, 420 aa, Zea mays
  Clone ID: MRT4577_169245C.1.pep
MGRLRDGRAFLHRALVLSSLLLLASGEIFFEERFDDGWDSRWVKSDWKKSQGQAGTFRHTAGTYSGDPDDKGIQTTGDAKHFAISAKFPQFSNKDRTLVIQYSLKIEQDIECGGAYIKLMSGYLNQKKFGGDTPYSFMFGPDICGDQKKKLHLILSYQGQNYPIKKELKCETDKLTHFYTFILRPDATYSILIDNREREFGSMYTDWDILPPRKIKDVNAKKPKDWDDREYIEDPDQVKPEGYDSIPKEIPDPKDKKPESWDDDDDGTWKPRMIPNPEYKGPWKRKKIKNPNYKGKWKTPWIVNPEFEDDPDLYVLKPLQYVGIEVWQVKAGSVFDNILICDDPDYARHVVDETFAANKEAEKEAFEGAERKRKAREEEEARRAREEGERRRRERDRDRGRDRYKDRYKRHRHYDYHDEL

SEQ ID NO: 260562 - protein, 105 aa, Zea mays
  Clone ID: MRT4577_169246C.1.pep
MASPFCAAAAACRLAVPAPSLPAARAPRPRRGLVAVRAEAGGGINPAIRKEEDKVVDTVLTGELAKPLTAYCRCWRSGTFPLCDGSHVKHNKATGDNVGPLLVKK

SEQ ID NO: 260563 - protein, 57 aa, Zea mays
  Clone ID: MRT4577_169247C.1.pep
VNNGHQYSWPAHGELLFLQVLLTTALTGHAHNLEEFMSKDDTMDQRWLQGEQTHLFD

SEQ ID NO: 260564 - protein, 80 aa, Zea mays
  unsure (1)..(80): unsure at all Xaa locations
  Clone ID: MRT4577_169248C.1.pep
ELKLQFEAFFXCIIIRLAQPRFGATYHQQEVAMEALVDFCRQXKKIMVEMYANLDCRNVFEELANLLSKSAFPINCPLSS

SEQ ID NO: 260565 - protein, 109 aa, Zea mays
  Clone ID: MRT4577_16924C.1.pep
LPLEELRRQVHRTRTLATRSRRAAGLHNPEPRAGHSERRHPAPHPSADPSPTTGMYAGARSFTRAAQGKRVWGVSAAEAKQAERTPPKTGFVVGRSAPSVEGDCGGNGV

SEQ ID NO: 260566 - protein, 51 aa, Zea mays
  Clone ID: MRT4577_169251C.1.pep
IRLELEREVYELKKKVMQWGRMTQEVLGNTNMRVLNDSPIGVLQFTTNYVM

SEQ ID NO: 260567 - protein, 279 aa, Zea mays
  Clone ID: MRT4577_169252C.1.pep
MEFLQGQRLETTLAVAGAVVAVAAGSAYLFLRSRKPRGCLDPENFKEFKLVEKRQLSHNVAKFKFALPTPTSVLGLPIGQHISCRGQDASGEEVIKPYTPTTLDSDVGSFELVIKMYPQGRMSHHFREMKVGDYMSVKGPKGRFKYLPGQVRAFGMVAGGSGITPMFQVTRAILENPKDNTKVHLIYANVTYEDILLKEELDGMAKNYPDRFKIYYVLNQPPEVWDGGVGFVSKEMIQTHCPAPAADIQVLRCGPPPMNKAMAAHLDGLGYTKEMQFQF

SEQ ID NO: 260568 - protein, 193 aa, Zea mays
  unsure (1)..(193): unsure at all Xaa locations
  Clone ID: MRT4577_169253C.1.pep
AQTPPGVPPGAGPHDQSTGXXXXARRDARPDAASRERXTRAGEQRETSRGRSGWXPRTGSQARAMEKQGAGAWGELRAEKKPGRSWARHERNLEKSARVYDKRRARWRDSVRAQSEQKPRTRGGASQGTGAPHKGSSSRTRRSSSAMGEKLELDTRERRGGRESSRRAELKAEGWRLRMVRRGMEDTGRETQG

SEQ ID NO: 260569 - protein, 212 aa, Zea mays
  unsure (1)..(212): unsure at all Xaa locations
  Clone ID: MRT4577_169254C.1.pep
MDFLQGQSVETMVAVAVAVVAVAVGGALLLRRSKRPKGCLDPENFKKFKLVEKTQISHNVAKFRFALPTPTSVLGLPIGQHISCRGQDATGEEVIKPYTPTTLDSDLGNFQLVIKMYPQGRMSHHFREMKVGDYMSVKGPKGRFKYLLGQVRAFGMLAGGSGITPMFQVTRAILENPKXNTKXHLIYANVTYEDILLKVYAFYADRLHRLLT

SEQ ID NO: 260570 - protein, 78 aa, Zea mays
  Clone ID: MRT4577_169255C.1.pep
VCSRFPQVLRATPFPEPIVECSLMAGLTGNIPRPIGPSIPLLLRRCYDVLLLLLLLMRGFTPCTWRRRRPASNLIMPL

SEQ ID NO: 260571 - protein, 316 aa, Zea mays
  Clone ID: MRT4577_169256C.1.pep
MSGGIDVLALKEEDVTKMLAASSHIGTDNANFQMEQYIFKRRADGPYIINLRRTWEKLLLAARAIAAIEHPAEVFVISSRPYGQRAVLNFAAHTGATAIAGRFTPGAFTNQIQAAFREPRLLVVTDPATDKQPITEASYVNIPVIAFCNTDSPLRFVDIAIPCNTKSHHSIGLMWWLLAREVLRLRGQIPRESKWDVVVDLFFYRDPEEAEKEEQAAKEVAAVPIKVETDYAAISSAANWDGEAAPVVGATENWDGEAAAPAAAGAAPVAPAAVDPATFVAAAAASDNWADEAWQAQPGAPAAAPATGSWGANAQW

SEQ ID NO: 260572 - protein, 148 aa, Zea mays
  Clone ID: MRT4577_169257C.1.pep
KKKTKPLLKKTFGGGGGGSLPLVFYNWGQQKHPPTNFSKPTSPNFFFFFKTKILSLGGNQGPFNNLKPKTWAPPHCHWVCRKKRGFLNPLGVKNNGIKGEKGFPPRCKMPQEAPKNLGFFNVPRGHKVPILPWGPIVPIPEFFIGKNL

SEQ ID NO: 260573 - protein, 223 aa, Zea mays
  unsure (1)..(223): unsure at all Xaa locations
  Clone ID: MRT4577_169258C.1.pep
SPLGKPHRFHRCTRSLNAVCKCKMCTTAFSMDGQRWFRCRWWSVDSPLHPRRHRRRCLTQDRLHRPPWMSIWQHHHRLRPLQRQLLVVRHLHQCLWSSGPLLPVVDSPLVPSMLRVDASSSQAIAQMGWPRLPPPMGGPNGPRSGRCVGRLGEGGGGMALQAQCSGVALLSGMEQRTCSEPAMSAPTRPWLVCQARPRPPPWRRLGALALXPGRRLENAWGGD

SEQ ID NO: 260574 - protein, 147 aa, Zea mays
  unsure (1)..(147): unsure at all Xaa locations
  Clone ID: MRT4577_169259C.1.pep
RADPRRPVTYTTLISIHCKDGDMEEARKLFRKMAQKGATPTVVTYSVMIHGYATNGRIHEAEKFIQHMDNKGFVPDVYTYASLFHGHCVNGNVDVALKLFEXMTHRGTEPNVVAYTALISGLANERRSEAAFQLYDHMLKAGLSPHD

SEQ ID NO: 260575 - protein, 69 aa, Zea mays
  Clone ID: MRT4577_16925C.1.pep
GSHRGLRLFERQLRIPGHGSSSRASAPQSIPRELRSTRSPFRSCLRHIPSSSAHWLSGARGRTQTELTA

SEQ ID NO: 260576 - protein, 113 aa, Zea mays
  Clone ID: MRT4577_169260C.1.pep
HASAHAFVHASAHASAHACAHAFAHAFADAWAEKTLTMEVAGDPGKIAVVQRNLWKFGIKEICRTGKIALRRERIGATARFWRFSVAFYPDLIEALSKNSLTFCNRTVIGMFG

SEQ ID NO: 260577 - protein, 248 aa, Zea mays
  Clone ID: MRT4577_169261C.1.pep
MGKRSGGRKLPFFTRSSSSSSKRNRSGRRLPSPSKQDNATRALLASPTAASPSATPDSAAAGQTAQPPSPLSVTAGAGGALSGKITKKKPGARLWMRLDRWGASEVVELDKATIIRRAGLPSRDLRILGPVFSRSSSILAREKTMVINLEFIRAIVTAEEVLLLDPLMHEVLPFVDQLRQHLPLRSLVGGNGECAPDGNGEKQGGSHGGQVPRLNEATGAEHEFPFEFHVLEVALEIVCSSLDLAVMT

SEQ ID NO: 260578 - protein, 82 aa, Zea mays
  Clone ID: MRT4577_169262C.1.pep
WLNAFFISGYPASNDLLGDLPLSSVTSKLRYMLVTCAMPSRTFLHQLLKRRPSRSELCSALVQYGPVPAGGTARHSLCRVTP

SEQ ID NO: 260579 - protein, 55 aa, Zea mays
  Clone ID: MRT4577_169263C.1.pep
QLEHSVFFLCSLPREPLCQIEQKNILLALIYQPSRAILLRKMIEETLHDHLMQLN

SEQ ID NO: 260580 - protein, 43 aa, Zea mays
  Clone ID: MRT4577_169264C.1.pep
MSLSKPRAMPERSIPPGAATVDIGGVSRGALREILLGLQAQEV

SEQ ID NO: 260581 - protein, 102 aa, Zea mays
  unsure (1)..(102): unsure at all Xaa locations
  Clone ID: MRT4577_169265C.1.pep
LFCTILWITWGNMFFFIAGHTKDPSEGXRFAKIQXKEFDPHTCTWSIVRTYGKSPVSRGGQTVTLVGTTLGGLVGEDAKRCLLNDLHILDLETMTWDDVDAM

SEQ ID NO: 260582 - protein, 71 aa, Zea mays
  Clone ID: MRT4577_169266C.1.pep
FAHKKVEVEISKPYIWSLEPHNSIWTLFPPLSKEEKFFGGFPKKNTCSVIAQRHCGVSKGILKAVFMKVVF

SEQ ID NO: 260583 - protein, 128 aa, Zea mays
  unsure (1)..(128): unsure at all Xaa locations
  Clone ID: MRT4577_169267C.1.pep
PKIDVPFKLSWAGPPPRWFPPHFVGAEHLPPRSHPFFFPPHESDASKKDPTWAPPPAWKVAPXAPPSPTTTLLPLPLPSTLSPAASSGFSKTAPTTAPAPSAASFRRFDPPPPLLSSSLSHHHHPPRR

SEQ ID NO: 260584 - protein, 59 aa, Zea mays
  Clone ID: MRT4577_169268C.1.pep
KGLNHVNSTFWLCFILVTLMKINYTNGMRMLRGILGCMFKLFFHNLTFNIFSVIVHFVV

SEQ ID NO: 260585 - protein, 89 aa, Zea mays
  Clone ID: MRT4577_169269C.1.pep
CFSCFYYLHLSAVSCQRTPDRFACLNHTNLLCSCGMDMKITFFRYSMEELNTLVSPLEGDLTAVCCWVHDHLRLFCQIMFSEAQQNGLM

SEQ ID NO: 260586 - protein, 132 aa, Zea mays
  Clone ID: MRT4577_16926C.1.pep
HAIPYCDLGGQFSCVPLPYMLYAQRTLYKCSNSNNNGQGAKYPYKMNIKRCAIRKKINIHTTVWFVYLLVSSRSDEQTFCNQRRAFSYRQLLYPIVDFQHTYLLRPMVYFQHVLLIPIINFDAKSSFLWFRL

SEQ ID NO: 260587 - protein, 102 aa, Zea mays
  unsure (1)..(102): unsure at all Xaa locations
  Clone ID: MRT4577_169270C.1.pep
LLPFGPSLLGVRLLSPWFWSGLVLCSLFLALCSLFLSFFGVVVPAVSAGLRLACPFLLRSFCPAFSWPXCRWCAAPCSCSRSLACSVPSLSFPLVFSFLRLL

SEQ ID NO: 260588 - protein, 28 aa, Zea mays
  Clone ID: MRT4577_169271C.1.pep
ILEFVQVLGMCNLLCTSVLIVIVLLITP

SEQ ID NO: 260589 - protein, 77 aa, Zea mays
  Clone ID: MRT4577_169272C.1.pep
TPPTLTTPSSIFSSTSTTSSTPTHSTYITTQPNHPHPIPSTSSPPNTIYTLLTHPISPHHHNPNQTYSILINEHITS

SEQ ID NO: 260590 - protein, 79 aa, Zea mays
  Clone ID: MRT4577_169273C.1.pep
YSFTSWDIIRRFRAEKTDTNTLHKGLIQHGKSTVLHLVLPFKGQTSFPEKSFCLLVAAAVRCTPCRTQRAHHQAVVTIP

SEQ ID NO: 260591 - protein, 139 aa, Zea mays
  unsure (1)..(139): unsure at all Xaa locations
  Clone ID: MRT4577_169274C.1.pep
LRLTWGTKHILNELKDLHNDPNTXYSVTPDDEDMRDWKATIMKPPDNAYAAGVVLTNTYTXTDYXLKPXRILYETKRLHLSTNNRGLVXLHILNDXRSHAWTIINALVSISCLLXTAANPDYLLXPKIDQMFKTYRSKY

SEQ ID NO: 260592 - protein, 87 aa, Zea mays
  Clone ID: MRT4577_169275C.1.pep
LNFLIKPGPPQVRSFSWRWSFAMPVAFPSILWPVFPPFFGFLLLVSFPPKLSPVVPPFSSRLHPLIIWLVPVSLLCAIIYETMEQLY

SEQ ID NO: 260593 - protein, 140 aa, Zea mays
  Clone ID: MRT4577_169276C.1.pep
MGEPSKELLDLPSDPRPPASFIESLLAGREQQQQDKEGKRKLGASTDPLPKSQVIGKVKDFLGEIARANQKLQLDAQNKPPVEYDIEALTGNEEQYIEMDLLLGVADLHSEQAVEAAEATINGRQTSEMTFACSSSDFGR

SEQ ID NO: 260594 - protein, 98 aa, Zea mays
  Clone ID: MRT4577_169277C.1.pep
LQSQKQKKLPKLIGGHICFGSPKGAAYFSAGYFSTKDMPRQKFSTKNSSTTPLLHHRKLWLVQDGSMRKPLGSLTYPVGAEATARIGDSRMICPSLGP

SEQ ID NO: 260595 - protein, 378 aa, Zea mays
  Clone ID: MRT4577_169278C.1.pep
TPIHARTRHAGRCRILRRAAGHLVHPASLPPLLLAALLLLLFRSALLAGTLRLASFADRDPALRSLLARLSSPNPPSPPPPPHHLPRRRSPFTSPSSSLSDDDILVSPLDPAASAPSRRRNASYYHVLVTSYSAAPKPYPLPLPNPLPASASPFFLAVYNETAPPKPASPLGREFGFLALTRRDAAAIVNLLALLSSAHIFAILGYIAVHSAALGAVFASVAGHHVPGRRLVFLLTCAARGAKRLTGFAFLRWATRDAVVQMLCLWFFADVHDQAQLFRLFVVAKLMPFSTSVNPWLGAVVAGPELDGFFVAWAVLDAVVSVLFTVVPWVVVMDRDPRPPGRNAVKEGCYLVSLMATDATMLKAGETVVCGSMGRLIM

SEQ ID NO: 260596 - protein, 97 aa, Zea mays
  unsure (1)..(97): unsure at all Xaa locations
  Clone ID: MRT4577_169279C.1.pep
RDLELVLRMRTKSLXEITSTITYIRTIPRLIEQGFVSTYIHNNITNINVYFAREYECDYRSYDTTGRSMHLAPFTWPRLPPASRGQVHPAGSRSRAA

SEQ ID NO: 260597 - protein, 90 aa, Zea mays
  Clone ID: MRT4577_16927C.1.pep
VIKLLITSYFNIVRRTMIDMVPKAIMLNLVSWSRENMQSELLTNMYKTDELDELLKESDYTVRRRKDCQQMVESLTKAQEIVNQVSKRGE

SEQ ID NO: 260598 - protein, 67 aa, Zea mays
  Clone ID: MRT4577_169280C.1.pep
LGNSGCWPGRGVNLYILPRGTRAGESENDLLHSRVALWWRKRRLKPSNILLLLSCSSAALAAPGFLH

SEQ ID NO: 260599 - protein, 235 aa, Zea mays
  Clone ID: MRT4577_169281C.1.pep
MATARLLRCASSTFLFSTCTNPLRSCSPLVRRQHPRAAMTTDSSAASFQKIQIQREDTTFDAYVVGKENAPGIVVLQEWWGVDYEIKNHAIHISQLGGGYKALIPDLYRGKVALDVAEAQHLMEGLDWQGAVKDIQASVKWLKSNGSPKAHFGEHDNFVGFSDVTAAKSLEEKLKSSGISYEVHIYPGCSHAFMNTSPEALKRKKGMGLTDENQEAVDLAWSRFSSWMGRFLGSA

SEQ ID NO: 260600 - protein, 191 aa, Zea mays
  unsure (1)..(191): unsure at all Xaa locations
  Clone ID: MRT4577_169282C.1.pep
MSAGGGGRGCGHRRGPTHSFPSLLYEIHIHREDTTFDAYAVRKXNAPGMPTRQATRRPTRPLTRPAIHISQLGGGYRALIPDLYRGKVALDVAEAQHLMEGLDWQGAVKDIQASVKWLKSNGSPKVGVTGYCMGGALSIASGVLVPEVDAVVAFYGTPSSELADPSKAKAPIQAPIREHDSFVGFLDVTAA

SEQ ID NO: 260601 - protein, 230 aa, Zea mays
  Clone ID: MRT4577_169283C.1.pep
MQHILTFDAYVVGKENAPGIVVLQEWWGVDYEIKNHAIHISQLGGGYKALIPDLYRGKVALDVAEAQHLMEGLDWQGAVKDIQASVKWLKSNGSPKVGVTGYCMGGALSIASGVLVPEVDAVVAFYGTPSSELADPSKAKAPIQAHFGEHDSFVGFSDVTAAKSLEEKLKSSGIPYEVHIYPGCSHAFMNTSPEALKRKKGMGLTDENQEAVDLAWSRFSSWMGRFLGSA

SEQ ID NO: 260602 - protein, 53 aa, Zea mays
  Clone ID: MRT4577_169284C.1.pep
DKERTSSQPSRSSGDEGTSMLDNIENGDGWHVSTNGSGENYNSYSGWLLLQAT

SEQ ID NO: 260603 - protein, 139 aa, Zea mays
  Clone ID: MRT4577_169285C.1.pep
PTRPPTRPHPFTFPIPSLVDPAFVYGGCTGRRAPAAAYGGGAAPSPDEIRAAPAQIQFLRVYSPAVDSKIRSVGGEKVIFGRRHVGIMSAESVGNYGVRILFDDLHKTGIFTWDYLHHLGSDKFSLMRNYIRTLRKHGL

SEQ ID NO: 260604 - protein, 138 aa, Zea mays
  Clone ID: MRT4577_169286C.1.pep
MAAALGAVLRRLHTAAAQPPRLTKFALHPPKFVEIEFADGSSFHLSAEFLRVYSPAVDSKIRSVGGEKVIFGRRHVGIMSAESVGNYGVRILFDDLHKTGIFTWDYLHHLGSNKFSLMRNYIRTLRKHGLSRDPQRRK

SEQ ID NO: 260605 - protein, 56 aa, Zea mays
  Clone ID: MRT4577_169287C.1.pep
PTRPPTRPSTCPKKKKKKKKGKKKKKKKKKKKKKKKKKKKKKERKYKRKKALRLLQ

SEQ ID NO: 260606 - protein, 220 aa, Zea mays
  Clone ID: MRT4577_169288C.1.pep
MATTQFAMVEELASLIKDNLHSKHLILSTEESLVAALQELHCRDGDGDGGREEGDGAADTIELQPAGAYHRLLLHRLAEIYGFAHESAGEGEDRHLVLQRCPETAIPSVLVSDMIWKFDNSDDFMSVVLTRNDTDFQKPQKADIVQKDISVKSSRLKDNTDSKPLRQPAVHPAASLKEREAAYRAARERIFSVDDAKGNDRSYVKCRQVPVVAQRMIAHA

SEQ ID NO: 260607 - protein, 329 aa, Zea mays
  Clone ID: MRT4577_169289C.1.pep
MTTTQFAMVEELASLIKDNLHSKHLILSTEEALIAALQQLHCRDGDREEDDDAADTIELQPAGAYHRLLLHRLAEIYGFAHESVGEGEDRHLVLQCCPETAIPSVLVSDMIWKFDNSDDLASVVLTRNDIDFQKPQKADVVQKDVSVKNSHLKDNTDLKPLKQPAVLPAASLKEREAAYRAARERIFSGDGAKGNDRSYVKCRQVPVVAKRMIAHALGQKVQNTTETAASTESKGKQLSNGKTIPTHSRNNFCPVTPDNIEAVLMGMPSSAGSNSYQTPPSQRCHATNTRAVTAESLKKEQTGAAKRMFAHALGLSAARGSCGTLPKPK

SEQ ID NO: 260608 - protein, 64 aa, Zea mays
  Clone ID: MRT4577_16928C.1.pep
YRIYYEYGHPRCRIDLMDTCSTVAGDKAARPGRYALQGGEFLGRLCILPNSSMILGMCSWAHYR

SEQ ID NO: 260609 - protein, 46 aa, Zea mays
  Clone ID: MRT4577_169290C.1.pep
LLDLDPERMWPGAGSKIQAQMGKDVAGYALHAKPSGRETPLLSLVW

SEQ ID NO: 260610 - protein, 105 aa, Zea mays
  Clone ID: MRT4577_169291C.1.pep
MPSGFTIVSAPTGSAHQRPTRLGNPEMHFSTDQLIGSAFIAFGLTLFVCFFYVAVVSKLLPPHQNGFLAAIQNDWYYCLLVPLTLPVIIVAVYLHWLSMKMFKHA

SEQ ID NO: 260611 - protein, 73 aa, Zea mays
  Clone ID: MRT4577_169292C.1.pep
SFFWKVMAILNSGGFNKMRGRETVMELLHRLYHFPILTWHSQITSLNLSWLGTDFCSDCNSHNLRQKHPTKIF

SEQ ID NO: 260612 - protein, 61 aa, Zea mays
  Clone ID: MRT4577_169293C.1.pep
LSLYPPPPESLDLLHLPTCTMFLGAGAPDLLYYLHYAGVQGVRPLFYWSLFIVTDELKRIH

SEQ ID NO: 260613 - protein, 79 aa, Zea mays
  Clone ID: MRT4577_169294C.1.pep
MHFSTDQLIGSAFIAFGLTLFVCFFYVAVVSKLLPPHQNGFLAAIQNDWYYCLLVPLTLPVIIVAVYLHWLSMKMFKHA

SEQ ID NO: 260614 - protein, 82 aa, Zea mays
  Clone ID: MRT4577_169295C.1.pep
VISPPFIFPLVARPKWKILAFYPFCNNKLRPICMLFCNNYLISPPLGGPFFPWCSLPQKKKKKKKKKKKKKKKKKKKKKKKK

SEQ ID NO: 260615 - protein, 105 aa, Zea mays
  Clone ID: MRT4577_169296C.1.pep
MPSGFTTVSAPTGSAHQRPTRLGNPEMHFSTDQLISSAFIAFGLTLLVCFFYVAVVSKLLPPHQNGFLAAIQNDWYYCLLVPLTLPVIIVAVYLHWLSMKMFKHA

SEQ ID NO: 260616 - protein, 63 aa, Zea mays
  Clone ID: MRT4577_169297C.1.pep
PLTPYSPESPQFPCAPALPLPGRLRGSPQLTPPYSHLAMKPDAIVNFYRKTATDEARALIRQM

SEQ ID NO: 260617 - protein, 55 aa, Zea mays
  Clone ID: MRT4577_169298C.1.pep
LYIIIICTTNMRAVVHVYQHACMDVPSDVCMHGPCLASYCWNLLIGTIWPRLDQV

SEQ ID NO: 260618 - protein, 46 aa, Zea mays
  Clone ID: MRT4577_169299C.1.pep
AWTRGILAPASATAARVCGDQGTRGGRMDDLALRGGYSRDGMICLH

SEQ ID NO: 260619 - protein, 170 aa, Zea mays
  Clone ID: MRT4577_16929C.1.pep
WELARSVRWLGSPWFSVVSSPLRCIKAWPRPRLVLTSAATDGARLCLVDGSAVSSASVLILVRRPRLSSTREFAAAVTHSGALFVAGGYVPWSPFYARALDLSTLNAKRRAVASPAHLRAMWMHGCAALDGRVSMAARWRILHRGSSNCSPDFTSAAVPLYVEDRLQRAL

SEQ ID NO: 260620 - protein, 100 aa, Zea mays; identical to SEQ ID NO: 260178
  Clone ID: MRT4577_1692C.1.pep

SEQ ID NO: 260621 - protein, 77 aa, Zea mays
  unsure (1)..(77): unsure at all Xaa locations
  Clone ID: MRT4577_169300C.1.pep
GALTHKITHLSTLQIKSLNVKCLTTPXHASRHIYYFVDEPEDSEPPAIFTNDTLFIANYGEFYKKTTDKICKALLKI

SEQ ID NO: 260622 - protein, 82 aa, Zea mays
  Clone ID: MRT4577_169301C.1.pep
LDRLLGKLSCPLLLLWGDLDPWVGPAKAARIQEFYADTAVVHLQAGHCPHDEAPEQANRALLEWLAALDARAKPAEPSLQTV

SEQ ID NO: 260623 - protein, 85 aa, Zea mays
  Clone ID: MRT4577_169302C.1.pep
GPSRPAGPGYFVLLHPLLRSHLITRKSTAHQEGATADPSLSEDPLGGLEDEDGPIHRAAILPPGGEAQLALSSPGSSHRTVSSSL

SEQ ID NO: 260624 - protein, 88 aa, Zea mays
  Clone ID: MRT4577_169303C.1.pep
NYTASISVLVYSFSFSPCMFTRLSLIHIGPVSVFFIRFFCHVFPRFISVMLFLRLSSLCFLLALGTGFLFMLLLETLPCSCGYISPLC

SEQ ID NO: 260625 - protein, 75 aa, Zea mays
  unsure (1)..(75): unsure at all Xaa locations
  Clone ID: MRT4577_169304C.1.pep
ETLQLACSQRVKKEECIIINLMIIQVNHHITLSRFIEANMLYNNNSSLTLMFIWCWANFHAXGCIRGFIIIMVLL

SEQ ID NO: 260626 - protein, 38 aa, Zea mays
  Clone ID: MRT4577_169305C.1.pep
EDLKTFRAKSRTNRSMYLLAFSPKVSLSRHTHSPKDRY

SEQ ID NO: 260627 - protein, 80 aa, Zea mays
  Clone ID: MRT4577_169306C.1.pep
NGHPFNTFFFFSHKHKTSEPGLSRFIVIFPLPYITINTQQFQNRCTIKIPLRHQATHPIIIVPVPFLVRISFRIHLVTRP

SEQ ID NO: 260628 - protein, 57 aa, Zea mays
  Clone ID: MRT4577_169307C.1.pep
RPGLVPLRAHRSPHRTSRGEERRWEEESQGRLNGQTPDSLPSSDHRSRLIERVLIGL

SEQ ID NO: 260629 - protein, 58 aa, Zea mays
  Clone ID: MRT4577_169308C.1.pep
ALDLWADLCACGLLKERRPYSTAVTSLGRPVGTTRNGFSILQLGGFFGSTVVVSIRYL

SEQ ID NO: 260630 - protein, 104 aa, Zea mays
  Clone ID: MRT4577_169309C.1.pep
FRFKRLFCGASRLVPVAFGFDHLRFFFSFVPVLVSVPALFAGYLCGEPVYVCVLPWDFGAFFKILVSLWFGPSRGVLLLVVVCPCPSLIFPWPYVFFVWPVVLP

SEQ ID NO: 260631 - protein, 58 aa, Zea mays
  Clone ID: MRT4577_16930C.1.pep
GEGARYDLRHHHGHAPHLASAVRAPQDRVAESTRRLEEPALYPSSQTLKKSGLLGRPG

SEQ ID NO: 260632 - protein, 163 aa, Zea mays
  unsure (1)..(163): unsure at all Xaa locations
  Clone ID: MRT4577_169310C.1.pep
MHIDILGIDGPEEXSYSAEDCADPHGAAMIDAQEVTRCTVYXREVIHKPLATMIVLXSSEATEVEDDDQTEVAYMDADALCKXTRILSLAXGLAGMILILCYCTAAFCRVHVYPVVTFRLMLVSKRAYSQRCSHIIGEXVXGICGVPAHEGSLSAYYRRYLGD

SEQ ID NO: 260633 - protein, 64 aa, Zea mays
  Clone ID: MRT4577_169311C.1.pep
VFPASADAWAGGGVAMSTMLDVLYLPRRSDHTLFLCTKVKCPLIYRRGGLFLFFWTDAIKHEGD

SEQ ID NO: 260634 - protein, 183 aa, Zea mays
  Clone ID: MRT4577_169312C.1.pep
GSICALPSTDNLQQGLVANHVAVVDYFNRRGVSAIFLFRRNLLRQLVSQLANNHDRFLKQLNGTHKAHVHTEHEAHILARYKPRLNTSSLIRKLKQADEYTRDALENLNNTRHITVYYEDIVRNRTRLLDALDFLGVPRRELASRHVKIHTKPLSEQIENWDEVYSALNGTQYEGFLNAADYT

SEQ ID NO: 260635 - protein, 390 aa, Zea mays
  Clone ID: MRT4577_169313C.1.pep
MPLIFFSAAAPLAAVSLLPLPTHCCLRLTATRAAATSTTATPGPAPASTFAVEDYLIASCHLTPPQALKASKSLAHLKSASNAGAVLAFLADLGLSPKEVAAVVASNPRVLCARIDRSLAPISTELRALGLSPSQIARLAQIAGRYFLCRSFVSKVRFWLPLFGSPERLLQASDWNYWLLSSDLEKVVEPNVAFLRKCGLSAVDIAKLLVAAPRLVTMPPEYVQDAVRRATQLGVAPGSQMFRHALSTAGCIGQEKVDSKVAVLKETLGWSQEEVSLAISKAPRILVASEERLRRNAEFLLNEVGLPPQYIARRSVLLMYSLERRIVPRHLVLVVLKEKGLVEQDRCFFNVVAPTEEKFLEKFVAPYEESIPGLADAYESACMGKVTRGL

SEQ ID NO: 260636 - protein, 129 aa, Zea mays
  unsure (1)..(129): unsure at all Xaa locations
  Clone ID: MRT4577_169314C.1.pep
PPSPNSFQVPSIHPYDDTIRECISIHIDQTSFHVXNACWELYCLXHGIHADGQMPGDIIIVGGDDAFNTFFSETGAGKHFPLCCFLLTFKPNLLFYYVRTXGTYRQLFHPEQLIILKDDATNIFCLGHY

SEQ ID NO: 260637 - protein, 102 aa, Zea mays
  Clone ID: MRT4577_169315C.1.pep
KGPLFFFLFIETIVCLNYLYCWGGAKGPQLEKIWGGFPFLGGKPKNPQVLNGGGGGAKKKQGKGEGAKKKNMGDKPKTRETRGSPILNQWGPGRTNPGGPGI

SEQ ID NO: 260638 - protein, 61 aa, Zea mays
  Clone ID: MRT4577_169316C.1.pep
LFSRSSHIGWCMGFTAVCSGLHVLSFLPKGSICAQNLRCLYVTRSVIDVKHTCHFKTHPHL

SEQ ID NO: 260639 - protein, 82 aa, Zea mays
  Clone ID: MRT4577_169317C.1.pep
ETILKELYQIAEEPKRFVPGSSAGGYPPPAVQPPQRKVLAPAVKGGRNPKPGPNWNQGTGGFFDEKEIWDRAGPCMGFPSGS

SEQ ID NO: 260640 - protein, 130 aa, Zea mays
  Clone ID: MRT4577_169318C.1.pep
MLEELLIFTRGGLILWSSCRALGGAALLKGSPIDALIRSCLLEERSGDAGFTKDAYALKWTFNNDLDLVFVAVYQRMLHLLYVDDLLAAVRKEFSQIYNPNARAGGGAAGKKNSGSGKDDSDGDSGKEDN

SEQ ID NO: 260641 - protein, 58 aa, Zea mays
  Clone ID: MRT4577_169319C.1.pep
LCTILCIILSPFNGASNRWSGGACTLGYQIECSKYRPSEFGGYIMCTRQGAWQWKRMQ

SEQ ID NO: 260642 - protein, 278 aa, Zea mays
  Clone ID: MRT4577_16931C.1.pep
MAAADSSKPARAATLPARTLLLALPFLSLLLLFLYVYSTTSWRPASGLPATAATTTTTTVATTTTTTVPLTPSPPSPHIRMRRSRYRSYDDYLRHQLNKTLDPRLRRVWATRDWQRKVDAFARLFAGLRDEGLLSNASRALCVGARLGQEVAALRQVGVRGALGIDLAPAPPLVARGDFHAQPFPDATFDFEFSNVFDHALYPDRFAAEVERTLRPGGVAVLHVAVHRRGDRYSANDLLDVRGLVGLFRRCDVVRVSKVDAFGLDTEVILRKKGSSRR

SEQ ID NO: 260643 - protein, 215 aa, Zea mays
  Clone ID: MRT4577_169320C.1.pep
MLEELLIFTRGGLILWSSCRALGGAALLKGSPIDALIRSCLLEERSGDAGFTKDAYALKWTFNNDLDLVFVAVYQRMHHLLYVDDLLAAVRKEFSQIYNPKRVSYDDLFTETFRQLHLEAEARAEAMNKSKQQPTNPSSGSGAGRGPAGKKLGPNARAGGGAAGKKNSGSGKDDSDGDSGKEHNGGFTANGTVAKGGQENGAIKDSSRAARGCCC

SEQ ID NO: 260644 - protein, 90 aa, Zea mays
  Clone ID: MRT4577_169321C.1.pep
ARRRHHCHWRRIVHDTTRFQLPQATPKLVCIYTRAHIKLPWRAIDPIPCRPESLLLTRPAALCRRSCSCPLAPAPRTSPRPPGAPDSARR

SEQ ID NO: 260645 - protein, 240 aa, Zea mays
  unsure (1)..(240): unsure at all Xaa locations
  Clone ID: MRT4577_169322C.1.pep
MGDYGNAMMRNQDAGVQSRVKAQSRANLLQLKLIGQSHPTGLTTNLLKLFEPRPPLEHKPPLEKRKLPAYSGMSQFVSRFAEPGDPEYAPPVPTCETRAEKKDRIRQLKLEEGAAKVAEELQKYDPQNDPNVTGDPYKTLFVARLGYETSEQKVKRDFEAYGPIKRVRLITDKVTNKPRGYAFVEYAHTRDMKSAYKQADGRKVDNKRVLVDVKRGRTVPNWXXPRXLGGGLGFSRIGGE

SEQ ID NO: 260646 - protein, 159 aa, Zea mays
  unsure (1)..(159): unsure at all Xaa locations
  Clone ID: MRT4577_169323C.1.pep
MGRGRRGRGWPRRADGKHKRAPSPPSXSEEASSESDRSPALASPPASSEDSDDSMGLSTAARAYXRSIERTGLXDSSDSSEEWSGDNGDGEGDGSDNDSGDGSSDDSGEGDSGDGGNGSGDGSDGSKGDGGDGSSDSDSGDGDGSGKGDGKASDIMPLV

SEQ ID NO: 260647 - protein, 119 aa, Zea mays
  Clone ID: MRT4577_169324C.1.pep
DKAIYHMKQSSNESAGADVSRAQSVKSRIARSNDARRLKNWITVLQEAQAAVADGADCAPQVMALQAEALLRLQRHDEADSLLSGAGAPRFGVDESTKFFGTFGHAYFLIVRAQVDMAA

SEQ ID NO: 260648 - protein, 186 aa, Zea mays
  Clone ID: MRT4577_169325C.1.pep
TLQSSFHCIQLVFVGRWCLTLVLVFSYPLMKRFTFWPHAYLGLTFNWGALLGWAAIKESIDPAIILPLYTAGICWTLVYDTIYAHQDKEDDLKVGVKSTALRFGDLTKYWISGFGAACVGSLALSGNNAWTGWPYYPFIAAAAAQLAWQVSTVDLSSRSDCNKKFVSNKWFGALVFSGILFGRLVS

SEQ ID NO: 260649 - protein, 203 aa, Zea mays
  Clone ID: MRT4577_169327C.1.pep
MEMSDAERLFFFEMACNNSEVAYEQNPNDADNLTRWGGALLELSQLRNGPDSLKLLQDAEAKLEEALQIDPNKSDALWCLGNAQTSHGFFTPDTAIANEFFAKATECFQKAADVEPANELYRKSLDLSAKAPELHSEIHRQMASQAATQASSASNPTQSRKKKKKKDSEFWYDVCGWVILGAGICAWVGLARASMPPPPAPAT

SEQ ID NO: 260650 - protein, 56 aa, Zea mays
  Clone ID: MRT4577_169328C.1.pep
RNLQVSLLAIPVMYRTCSILVLSCCDITRHYTEDKLSYPCPRLATIKTFISGSRRR

SEQ ID NO: 260651 - protein, 47 aa, Zea mays
  unsure (1)..(47): unsure at all Xaa locations
  Clone ID: MRT4577_169329C.1.pep
KVXEQIVHIFSVCICVLTRLEFKSVRIQMLKFDIYEVDIYSYLVRHD

SEQ ID NO: 260652 - protein, 75 aa, Zea mays
  Clone ID: MRT4577_16932C.1.pep
KCFVETKENRGPTSEMVGPKRICFYSEASPKLIFSKLYLHLRYYRASVLAMQGFIKTQSVVGGILKLVKQPARLL

SEQ ID NO: 260653 - protein, 91 aa, Zea mays
  Clone ID: MRT4577_169330C.1.pep
RRHLGATIPRCRNVVQTKGTEEQSRPSFVGKPNLVFNSLGPKNRVLNCQSVTARKCGPDFFLIPLERVLSYLKSLLSTSRLQRVDELCTLP

SEQ ID NO: 260654 - protein, 178 aa, Zea mays
  unsure (1)..(178): unsure at all Xaa locations
  Clone ID: MRT4577_169331C.1.pep
MKDHTVTTPLMCPSVDCVRWRPRTAFTVRKIGGMHPPYQKTTDAEIRSGIEYPVRELKAHVLAGVGRGWSAGIQRLLALQDRPHDTLQYPEKXENTAFLARFTXNKEQPSLPLQDDRSILENEGGNLAQQKRNTYPLPDDALLDGTLNVCRDDYNFPSRDLLMWNDYNTYSIIYIYAA

SEQ ID NO: 260655 - protein, 61 aa, Zea mays
  Clone ID: MRT4577_169332C.1.pep
LFNLLNNDGVVVSIRMASQASRVISFVFQRSQSLSQGVKDPAVVINPAVVEISLEKNKIFD

SEQ ID NO: 260656 - protein, 148 aa, Zea mays
  unsure (1)..(148): unsure at all Xaa locations
  Clone ID: MRT4577_169333C.1.pep
SCLDLVMHAEGQMSADXTIAGGYDACNSLFRENVAGNHAPRAAPRELYPIWIQEVRSDPYRQMFHPQQLMRVKDDACIPCDPCDYAIGADSCVPALXEIXKLADSCPXLQCLLAHDAEGGGTGSGLGCFLLLRLGVDYRXKYKLAFTV

SEQ ID NO: 260657 - protein, 190 aa, Zea mays
  unsure (1)..(190): unsure at all Xaa locations
  Clone ID: MRT4577_169334C.1.pep
CVEVLYSTHLRIFAGGEVNPAHLNDLEHGGMLLMFFLFGALALASQLWPRHFPLTDGALCLVAATAFTAELVLFYFHSTTHMGLEGYYHYLLVLLVGLCVAAAVLGALLPDSFPADLASGVLVALQGLWFYQTALALYGPMLPAGCARDADAHVECRSRAAQXERAEQLAISQLFALVLLAFLYALGCYA

SEQ ID NO: 260658 - protein, 198 aa, Zea mays
  unsure (1)..(198): unsure at all Xaa locations
  Clone ID: MRT4577_169335C.1.pep
ERMKSLNQEETELSEWAPTKSHFKETNSNPKLMPLIRLQPQHVNLQTTCYKIRSNRALTGGPWRGTRPSSSPATLCATRSAKANTNQNNITAPAHSEEKPQRTDHTAKKPCRRGIWPGDDRGGGWTEQTEPAREEGERNSQELWFPLSLRNPSPPAAKNTGNAVPWNAERGAGNXGEERRARPPSAHTLATASPPRAE

SEQ ID NO: 260659 - protein, 125 aa, Zea mays
  Clone ID: MRT4577_169336C.1.pep
KSRGLPPTALQVVKLSRVQIRVLVSAAAASIHTGVLNRSYAEDLEDDVYPAFNELQFPPEGLFMRLGACSPKDGAQLTPGKLAIHSVEDIVLRITTSARTWSALTNILNHEGEEGYVYFLPSTLK

SEQ ID NO: 260660 - protein, 112 aa, Zea mays
  Clone ID: MRT4577_169337C.1.pep
TQGTNQTRGTFWKRIYLFSEANRENCPKRTENSLLHRWSCIQDAVSYCGCCNSIETRNQSGLAVHDRVEQAEKLFKEQDPHNKSFQFKHCWLLLRNQPKWHDKLNQLVTTKN

SEQ ID NO: 260661 - protein, 110 aa, Zea mays
  Clone ID: MRT4577_169338C.1.pep
SPLVMGNAPKYLQQQLLQQQLLQQIVPVFTQLVVANPVAYLQQLFPFNQLIVWKFVGDLQQGQQLFNPLGVGNPLVGAFLKKKQLLPYNQFFLMNPALWWQQPMVGGAIF

SEQ ID NO: 260662 - protein, 179 aa, Zea mays
  unsure (1)..(179): unsure at all Xaa locations
  Clone ID: MRT4577_169339C.1.pep
MSSDTAPHVVEDFFGAIQLLSDGTVVRGDEAALLPPKPFPDVPGVQWKDAVYDAARGLKVRVYRPTADAGDSKLPVLVHFHGGGYCVGSYDELGGADYLRRRLAADLPALVLSVQYRLAPEHRLPAAIEDGATFLAWLRGQAALAGAGGAGAGVEQWLAESADFARTFLSGXTAGANLA

SEQ ID NO: 260663 - protein, 52 aa, Zea mays
  unsure (1)..(52): unsure at all Xaa locations
  Clone ID: MRT4577_16933C.1.pep
YASCDSMVNPVAVKYRVVSDVSHPQLEVWPSNXSHRSFESVQPVWSHIAAQA

SEQ ID NO: 260664 - protein, 82 aa, Zea mays
  Clone ID: MRT4577_169340C.1.pep
NTIMEGLNINHRRSSLEDVLEATILEEVIAKGRPNMLDRRRSSTEDAGAMTIGGCHTHSPPYTPRHHRHRSCLRGDHNRACL

SEQ ID NO: 260665 - protein, 109 aa, Zea mays
  Clone ID: MRT4577_169341C.1.pep
HAYTVYTSTCRPKSTTVASSTRRQLDPDPPASLEDLNEGGLAALGAAASRRSWVQETEDGSTAPASHDHERTFETRTGDRRTSSMHIYSVGISICELLLISTTGYTLAT

SEQ ID NO: 260666 - protein, 59 aa, Zea mays
  Clone ID: MRT4577_169342C.1.pep
KTHASAPLPIYSPPLGNVPAGGADGKTLDAGRLKKSTRGEERPTLLGDGHPQRRARDRR

SEQ ID NO: 260667 - protein, 221 aa, Zea mays
  unsure (1)..(221): unsure at all Xaa locations
  Clone ID: MRT4577_169343C.1.pep
MYATGLLDDQFQQLQLLQDPSAPDFVSEVVTLFCQDGERIIEELAKLLEKPNVDFDRVDAFVHQLKGSSAXDYLAHTFFLNXCVMLVGMYMFCFHFSAGMGYATXNQVSGSMGSRNGNVVRGTLLKLGFNTTGTRLFPHSRNGTNVPGTRNVAKFPVPGYXIGAQKVKNTCIQFREFCQQKSRDGCLKVLETMRINFYELRGKFQTMLQLERQVNGFPPNK

SEQ ID NO: 260668 - protein, 109 aa, Zea mays
  Clone ID: MRT4577_169344C.1.pep
MPVTHECSKHLSSNGLVIHQACSFHIQCQDNYSRTWFLGLQTNQSVNAHNGPPGYGVAQGVSGAECSSARCRRAYPVTVWWRSSWRRRRGILFSKSRCAVSVVNPCASQ

SEQ ID NO: 260669 - protein, 144 aa, Zea mays
  Clone ID: MRT4577_169345C.1.pep
MSAANQLAALVSNMYATGLLDDQFQQLQMLQNASTPDFVSEVVTLFCQDGERIIGELAKLLEKPNVDFDRVDAFVHQLKGSSASIGAQKVKNTCIQFRESCQQKSKDGCLKTLETVKINFYELRDKFQTMLQLQRQVNGCPPSK

SEQ ID NO: 260670 - protein, 73 aa, Zea mays
  Clone ID: MRT4577_169346C.1.pep
VVLNMTTAVALIIHRSSLPGSRLPAAILATLAFPMGASSSSRGGSVPICASTSISFSTLRYDVNSFRFNFIKE

SEQ ID NO: 260671 - protein, 76 aa, Zea mays
  unsure (1)..(76): unsure at all Xaa locations
  Clone ID: MRT4577_169347C.1.pep
SQTHTHLKHNTFRLYHTLNSTKTLPHEPINNRRSYTLFPLSAKFHSIKDTLHNYXHNVTAPIVTNPLNYPLKLISK

SEQ ID NO: 260672 - protein, 154 aa, Zea mays
  Clone ID: MRT4577_169348C.1.pep
METNILSGEHMKKKILLVHRQTKTLITESLIITLQTQYVYGDSQSLSAFGDSINVLRMLHDLDGLRLEHLNYRSPYQFEQNRTIKLVVLIRTMQINLMPINVPDDKLRAHVAEAKTPAQAAVAQATAHQPGAQLAASEPAAAPAPTVRSIMPRY

SEQ ID NO: 260673 - protein, 63 aa, Zea mays
  Clone ID: MRT4577_169349C.1.pep
SIHMWIRRRKSDAHNCQRWEVSSAGCNANLILSTRLEFAPSSGPKMTLEELPVRESIFNYLLI

SEQ ID NO: 260674 - protein, 29 aa, Zea mays
  Clone ID: MRT4577_16934C.1.pep
VGAIVVPQDRLSPIGNADALGEVGETWWT

SEQ ID NO: 260675 - protein, 94 aa, Zea mays
  unsure (1)..(94): unsure at all Xaa locations
  Clone ID: MRT4577_169350C.1.pep
LPGGWTYLLGGRVRSVALGPAFRLHGGGVQAALSSREKXRRXDTXHAAGANHHHHHGHHGGHGFVVRETRVEEDINTCTGEVHERRESFLARAN

SEQ ID NO: 260676 - protein, 103 aa, Zea mays
  Clone ID: MRT4577_169351C.1.pep
MAGRHTIILMQPSQNRASRTFMDYNSINHALDGICGLYERKIRDINPMIPNITYDISDLYNFIDGLADISALVYDHSIQAFLPYDRQWIKQKLFQHLKKLAQR

SEQ ID NO: 260677 - protein, 113 aa, Zea mays
  Clone ID: MRT4577_169352C.1.pep
MEEQQSSLVDGLKTPTTVADQESTAVECLSNHEYHSQTLGYVIGGTNMRSDTNHLTEGINILIATLDRLLDHLQNTGSFKYKELKSTKKVMPDDKLAEFALLDPKPPRGEQVL

SEQ ID NO: 260678 - protein, 88 aa, Zea mays
  Clone ID: MRT4577_169353C.1.pep
SKKELDALLSGESKASVPFFILGTKIDILYVASEVELRYLFGLSIFTTGKGKVNLTFWNVSPLGVFLSSIVRKMGSVKGFKWFSQSFK

SEQ ID NO: 260679 - protein, 80 aa, Zea mays
  unsure (1)..(80): unsure at all Xaa locations
  Clone ID: MRT4577_169354C.1.pep
KKVKPPLKKIKQIVSYPPKGRPFPKKGNLRKIPGVKKKKIMLWLRVVKVXVPKASPKKVPLKMGMGLSNPLKAFAFAVGK

SEQ ID NO: 260680 - protein, 674 aa, Zea mays
  unsure (1)..(674): unsure at all Xaa locations
  Clone ID: MRT4577_169355C.1.pep
MRALLSLSRLARRLPASLSPVRAPTTLLLRHIHADAPPPPPSHDSTPFVSRILESEPCLTPNDESEPASDPTLDEFLARFVAAFRPRLAAAFPNHDRDVLDEMLRLVADAVLCRLTGTDRGGDAIELNDDLWAAVWEVSASVREAMRRDQVRADLRQYLHCDEVKEMTRFAVDVGIRGSMLRELRFKWAGEKLDEVEFYHGLDDKHADAEAXAPTGRQWPRLTALPKRKGEVKFTMYGLDMSDPKWAEVAERVAEAEAHFVPEEAKAVEGRAKKAEERLLSVDPRSGDPVPAIEEWKEDLRPNRVDWISLLERIKARNVELYLKVAEILLDQESFEANIRDYSKLIDLHAKANNVESAERVLGKMKEKGIAPDVIISIVLVHMYSRAGKLEQAKEAFDFIRREDFKPDRKLFSSMIKCYINHGEPEQAENLIKVMRDTRVKPTREIYIGLLRSYVQRGLMAYAERVLKTMSFDRVEPTQELYTICIEAYGRVGDPKEACAMFDQMRRKFGHEADDSSIAGVVAAYMKNNQLDHALQWLLSLEKEGLQLGVKTNLMLLDWLSMLQLVPEAEQFVQKIKNLGEEPIEVHVFLADMYAKSSQEDKARRSLKILEEKKKLLKSDQFERVIRGLVDGGFSEEANKFYKMMKSCGFEPSKTIEVAVKALRIRGGSHRTGR

SEQ ID NO: 260681 - protein, 165 aa, Zea mays
  unsure (1)..(165): unsure at all Xaa locations
  Clone ID: MRT4577_169356C.1.pep
PRVRPRVRILDGFPRTIGQAXANYLTXEILEGVTDIDLVINLKLREEALLAKCLGRRMCSQCGGNFNVASIDIEGEDGGPRMYMPPLLPPPQCESKLIARADDTEEVVKERLRVYHDLTEPVEEFYRARGKLLEFNLPGGIPESWPKLLQALNIEDPDNKRSAAA

SEQ ID NO: 260682 - protein, 115 aa, Zea mays
  unsure (1)..(115): unsure at all Xaa locations
  Clone ID: MRT4577_169357C.1.pep
LRPRXFRPPVCFRLLSLSXLPVLPPLAAPLCCXCFLWLXXCFSLWRAFALFFCRRFRVASRXSXSFAVPVRFWGSVCLCXSSGSVVVLPSWRLFXSPSPPACXPLSSAXXSGGGS

SEQ ID NO: 260683 - protein, 221 aa, Zea mays
  unsure (1)..(221): unsure at all Xaa locations
  Clone ID: MRT4577_169358C.1.pep
GAGSGGREARAVGVPRVXPGDLVRDALATPGPFSNKLAEIVNHGKLVSDEIIINLLSRRXXXXXXXXXXGFILDGFPRTIGQAEILEGVTDIDLVINLKLREEALLAKCLGRRMCSQCGGNFNVASIDIEGEDGGPRMYMXXLLPPPQCESKLIARADDTXXXXXXXLRVXHDLTEPVEEXYRARGKLLEFNLPGGIPESWPKLLQALNIEDPDNSRSAAA

SEQ ID NO: 260684 - protein, 102 aa, Zea mays
  Clone ID: MRT4577_169359C.1.pep
CSSGGPAGVVPSLGVAGPGFSGSWLCLFPALLGGWFLCSVRCVGLCFSVCVVRSFGLCFFPSVSSPCFFFCFVLGGSSLCPRVGFVGRFVYVPPVFVLFPGV

SEQ ID NO: 260685 - protein, 99 aa, Zea mays
  Clone ID: MRT4577_16935C.1.pep
RRILLARSFIHPFLSLSLSLSCHSACVSVCEREKRRERLNESKNYQGLSLVLQKFLTAPVPRTRPARGPPGAAANELGGMHCRDRRENHRGHTGHGFLH

SEQ ID NO: 260686 - protein, 288 aa, Zea mays
  Clone ID: MRT4577_169360C.1.pep
MAGMSRAIRNFAAASRRTLTAASGPALPKEAAAAGARVRAAAPGRMGRDQEDGRRVQWVFLGCPGVGKGTYASRLSQLLGVPHIATGDLVRDALATPGPFSNKLAEIVNHGKLVSDEIIINLLSRRLEEGEEKGELGFILDGFPRTIGQAEILEGVTDIDLVINLKLREEALLAKCLGRRMCSQCGGNFNVASIDIEGEDGGPRMYMPPLLPPPQCESKLIARADDTEEVVKERLRVYHDLTEPVEEFYRARGKLLEFNLPGGIPESWPKLLQALNIEDPDNKRSAAA

SEQ ID NO: 260687 - protein, 205 aa, Zea mays
  Clone ID: MRT4577_169361C.1.pep
SIFTPTRVFADMVVNRYKLRPDVQNVNLSGMGCSAGLVSVGLAKNLLQTARPGTHVLIVSTEILSSQYYVGTERAMLLPNCLFRMGAAAMILSNSPERARYRLTRLVRTVTAARDADYRCVFQEEDDKGNTGIRLSKDLAATAGHALKSNIAAFGPLVLPASEQLLVALSFLKRKLLLLRGRAKVRLYRPDFRTAFEHICIHAGG

SEQ ID NO: 260688 - protein, 208 aa, Zea mays
  unsure (1)..(208): unsure at all Xaa locations
  Clone ID: MRT4577_169362C.1.pep
PPTEYPFFFFFFFFFFFFFFFFFFFFYFFFFLEPKPFKRENHQPANSRKKNPGGGEKTKKKKTTHGYPNRATPKNKPRPGTPRPKKKKGGGPGEPKKXTPGRGGLGPKEKPPVKXGPRTKTGSRRTPWKGARPGTEPGPGNTNGTPGGPFKKGPGGGKNRPGFLKGQGGEGPPGGLFGGIKGGGFSPPGGKNIPPGAKGGRRPPGKIF

SEQ ID NO: 260689 - protein, 98 aa, Zea mays
  unsure (1)..(98): unsure at all Xaa locations
  Clone ID: MRT4577_169363C.1.pep
GPDPLLRYQHATYKVVYYNRTTKGTKILSLLMVLTNITFVANSTXFNXCSHASISSFFSPYLPSIIXSVFENPFLXPYILQQSILTSNISLSLMLFTT

SEQ ID NO: 260690 - protein, 82 aa, Zea mays
  unsure (1)..(82): unsure at all Xaa locations
  Clone ID: MRT4577_169364C.1.pep
RKGFXDSSXHRAQRSSSSNIRLCPVLCGSRIQDFVGRHAACGSGIXEREKDWISRAHEMWPDPFRHXQXGCILSKSDSYRFK

SEQ ID NO: 260691 - protein, 99 aa, Zea mays
  Clone ID: MRT4577_169365C.1.pep
TNAHSEHQSRALFLWEIFYWTFGRARVISTGSFRSHAQSLGLHACLRLQWRRARVARGTTFDSDGIIAEPSSSNSICGSHTLSSRVLAITQCPPSMPCL

SEQ ID NO: 260692 - protein, 112 aa, Zea mays
  Clone ID: MRT4577_169366C.1.pep
KGYRVPGGPLEKVVDPLYPGGSFDPLGLPEDPKAFGGLKVKELKNGPPPMFSMLGFFVQAIVPGKGPLKNLPDPLADPVKKKAWAYPPNFVPGKLGGRRGPRPPPPAPPAEI

SEQ ID NO: 260693 - protein, 44 aa, Zea mays
  Clone ID: MRT4577_169367C.1.pep
PQNLNSPDLTIKYSCPMLLPYTYPIGKKFTSLTDLCVYTLPNRP

SEQ ID NO: 260694 - protein, 43 aa, Zea mays
  Clone ID: MRT4577_169368C.1.pep
ICLLLTESNHDEAFVFEMDNMYNIYWAMYEDNSLSNRHKYGMC

SEQ ID NO: 260695 - protein, 83 aa, Zea mays
  unsure (1)..(83): unsure at all Xaa locations
  Clone ID: MRT4577_169369C.1.pep
RKSPVSVSLLLSCKEGGKTTHAILRVLTNNIWAXVHPYRLRRCGGRWALVSYYMSSFGSRAPGFGXQRELGASLLGALGALYG

SEQ ID NO: 260696 - protein, 159 aa, Zea mays
  Clone ID: MRT4577_16936C.1.pep
MGWKAAEKLIRHWKVLRGDNVMIIRGKDKGESGLIKRVIRSQNRVIVEGKNLVKKHIKQGEGHTGGIFSVEAPLHVSNVQVVDPVTGKPCKIGYKYLEDGTKVRYARGMYASGAVIPRPEILKERRKPRPTSPGPKDTPIELAQEKTYDEKAGIGMPDL

SEQ ID NO: 260697 - protein, 58 aa, Zea mays
  Clone ID: MRT4577_169370C.1.pep
DSPPLISSSPNFFLIIKYLANFSTCSFLKTKISLSYRATHAPPRSRRWRRWADAGRTL

SEQ ID NO: 260698 - protein, 89 aa, Zea mays
  unsure (1)..(89): unsure at all Xaa locations
  Clone ID: MRT4577_169371C.1.pep
RHPKPARRARQGAPRSQTXSVTPPPPRRCHLALICGGAGWSGGSESDEIRSRRGWDEMVTCSFRLGEARWGEGTRLVSDPTRPQRTPAG

SEQ ID NO: 260699 - protein, 69 aa, Zea mays
  Clone ID: MRT4577_169372C.1.pep
GSFSPPPAKKKPRLLPVKPRDSIFSLSNSAFVHALNPMSFSPLSSPPPSASPSRIRLTRVRNRAPSFCS

SEQ ID NO: 260700 - protein, 435 aa, Zea mays
  Clone ID: MRT4577_169373C.1.pep
MHSCKDSSARTRILNLLLGLLDSNSSNIEALMEHSWNSWLETSTKLEVFKDYKSVSKGDPDDVKADEISLVRNLYSLVLSYYLRFVRGGWHQLDDTANYFLLKTDQGQLSCSDLLRDILDDIAGSLLHKSVEDNIFLLQPCCDNVLHFLNLIQELLISQMGIRLLFLSPSISEESSHDNIWKEDIKSTVNDILNTESHGQFTRFSDVNEVSDDWWIFFDKVWSIIRHLNGKGPSKFIPKDPNVEVASLGQRARGLVESMNVPAAEKVAVVSGGGGIGTALGIKVNRFAEKATTSREEIIPRIFFHLVILYLCKAGLENASKCVIQFMSLLPILLISEDDQSKNKLHFLIWSLLIVRSQYGQLDDSARFHVFSHLILETIIYGKSMLVTNILERDDSVDVNNKETGFILSFIQKNRVLAAVCIFAPSPYLCLELFC

SEQ ID NO: 260701 - protein, 83 aa, Zea mays
  Clone ID: MRT4577_169374C.1.pep
VLTSEPSWRGIEQARWHRCHSMRVWHRCRQPENPLSLNEKEDSTFKGTVFGLDILFMHGETFEVLGARAYYVVSEVLKRQYQA

SEQ ID NO: 260702 - protein, 100 aa, Zea mays
  Clone ID: MRT4577_169375C.1.pep
LKRVPKERASDDDGESEGHSTPVTRRSARLVKNQSKSYRMYRGVSDIEDEDDNEGTAAPQGKSGDNDDEDMVPVYKLLKRMPNERSSEDDDESDLAKGHS

SEQ ID NO: 260703 - protein, 269 aa, Zea mays
  unsure (1)..(269): unsure at all Xaa locations
  Clone ID: MRT4577_169376C.1.pep
IGTLEAGRVCTPTPPFPSAATTFSSLLLPARTPGQGALLPTAAARSSAPLPWTSPPLPWRGALPAPPASGCSRELPLLPWRPPLLPHCSQQQHASAGTGTSTAERPPCELPPPRLILRSGTSSHGRPPPFRLGSRDNAHPSPCCSSPMACSPSSPRPAMARRPLLLLSRAAATPMDAQIFFSVPCSSSSQQQQSLRSSIFAHGRGPFLHGRPAPCLERPEISSSELLPCXGCRTSLLLPRSLVAQRAPSPTCASSCALQQHRSSPCIVI

SEQ ID NO: 260704 - protein, 104 aa, Zea mays
  Clone ID: MRT4577_169377C.1.pep
ATNSYVPHAACPCQLSTLLVLLFHSTPAVAFLMKFSPGNLRLYIKQASDRVQFEQKIQICSLSRREDKMSKLKFSIIDSFRSITNTFVRYRLNQSKIRLLRAKL

SEQ ID NO: 260705 - protein, 75 aa, Zea mays
  Clone ID: MRT4577_169378C.1.pep
PMSLIYTITLALHRPYNAVLRVYKATLHHHPPPLANAFDGCNHTKPSRCILTMHTAFTRLRSLWDAPVETPLFDS

SEQ ID NO: 260706 - protein, 70 aa, Zea mays
  Clone ID: MRT4577_169379C.1.pep
LPMFFVTIWMPTRCPCCCADRGCWPRGEKGEYCIGYLDLCEKSNNGKVTGSLNPDKLTDKLSWRACTNIK

SEQ ID NO: 260707 - protein, 248 aa, Zea mays
  Clone ID: MRT4577_16937C.1.pep
RAVYTNVFDANFDTLVSALKRVGLGHLPVMIGEVGWPTDGDRHATAALAERFYAGLLQRLAARRGTPLRPGARIEAYLFGLVDEDAKSVAPGNFERHWGIFTFDGRPKFPLDLRGDGRPAMPVPARGVEYLPRRWCVLNPISMAGDGRLPDNVAYACSRADCTALGYGCSCGALDARGNASYAFNAYYQAQGQVESACDFQGLAVVVDEDASQGACNFSVQLVGSGAPVATGVTTMAAVLVALFLVLI

SEQ ID NO: 260708 - protein, 54 aa, Zea mays
  Clone ID: MRT4577_169380C.1.pep
RSPRWRSPRAGAHIRVTHHVVRGVRRTATAARSASTTRPAAILATMMGADSLMD

SEQ ID NO: 260709 - protein, 78 aa, Zea mays
  unsure (1)..(78): unsure at all Xaa locations
  Clone ID: MRT4577_169381C.1.pep
MSRSNHNAFNLRAYYSRSHFVFNDYIHSTSFVVLACLLASLIEVGMTLANLTYLFLGAEDAGTXFHNSILLKISKHYF

SEQ ID NO: 260710 - protein, 151 aa, Zea mays
  Clone ID: MRT4577_169382C.1.pep
SSSSSSSSSTSSYSTSSSISSYSTSSSSSTSSGSSNSNWSCLTNSTDLVGAAFPVLLGIFQSSKFQGNSYGLCAAAVLQIEEQLCVLWSCGLKKCSVPGIQVRGCRCGSRRRGRIGESTGGGESGLAETLAGCGGGRTAVAVGVDRWTRDT

SEQ ID NO: 260711 - protein, 162 aa, Zea mays
  unsure (1)..(162): unsure at all Xaa locations
  Clone ID: MRT4577_169383C.1.pep
MPRRTGNAAPTKSVELVKQDQLEFDDPDEVDEEEEVEYEEIEEEVEYEEVEEEEEEEDDEDEEDEEMEGMHEIDANDESKMVDADGKVENEKEKHAELLALPPHGAEVYVGGISSDVSSEDLKQLFESVGKSVEVRMXRKGDNRTYAFIISXTKAMALKPSK

SEQ ID NO: 260712 - protein, 93 aa, Zea mays
  Clone ID: MRT4577_169384C.1.pep
PALIPITFRERLVPLKDPARISRGPPFWPAKGFRPGHLTYFQVQKAIGFPKTYPLTFSNKPPNQNPVMEMGALVKIKNRLLFQKKKKKRPPVL

SEQ ID NO: 260713 - protein, 56 aa, Zea mays
  unsure (1)..(56): unsure at all Xaa locations
  Clone ID: MRT4577_169385C.1.pep
RSRLEKNPRIXNRQKGGVLLGPPVKKRITRPFLVEKKKILKKVFKIQKTKEKASKK

SEQ ID NO: 260714 - protein, 132 aa, Zea mays
  Clone ID: MRT4577_169386C.1.pep
WGDPNPDHFLEKVKALEGVLPRRGHWVAKFLKAFQGSGLPNYGPGSPSKLASKKPFWAPFCWFFTPRKFLGFLGEFFFPLGPPGFWAPLFFFFSPPPPLEGGFVFFLPKEAGDTGFWGAKLFPPWVLSLVSW

SEQ ID NO: 260715 - protein, 96 aa, Zea mays
  Clone ID: MRT4577_169387C.1.pep
IFDTRVLRSRRSRRLYSSSHSHGHDSEEHAITQEDEHVHPATLSTDPRGALGGSAPRRGYLIAIIGDKVLQRYEWVEPATSCDYLHDRKYEEGIRD

SEQ ID NO: 260716 - protein, 122 aa, Zea mays
  Clone ID: MRT4577_169388C.1.pep
PSQAATGASSSAPSYASYSDYLYNSPFSHFTAPTPSSYSSSSPLMITYDDAPVAPPPMVVSSEHNLDDQLLPALPLQPLGLNLSFQGFNSCSSAVAGDDTKQNSTCSFDPPLLQPTPGSSYS

SEQ ID NO: 260717 - protein, 139 aa, Zea mays
  Clone ID: MRT4577_169389C.1.pep
MAAPATSSLLSTLLQLPLAPFSGKSSPPSVAHVARRAPTAVVAAKGYNVQILVDENEGEESIFRRFRREVMRAGVLQEIKRRRRYESKTDEKKRKAREAGRRNRRRRMMDEPRFPEEDADATSKARDEDNDNWEVDGIL

SEQ ID NO: 260718 - protein, 46 aa, Zea mays
  Clone ID: MRT4577_16938C.1.pep
RLGLSAHSVLSRRCQIIPSRTSWLVPGGVRIKRKCHLQVATELLPQ

SEQ ID NO: 260719 - protein, 48 aa, Zea mays
  Clone ID: MRT4577_169390C.1.pep
PTSLTLHQHLLRLRSRICFTRLRACSRQSLFQHYEGKKLVYNKACLKS

SEQ ID NO: 260720 - protein, 139 aa, Zea mays
  Clone ID: MRT4577_169391C.1.pep
MAAPATSSLLSTLLQLPLAPFSGKSSPPSVVHVARRAPTAVVAAKGFNVQILVDENEGEESIFRRFRREVMRAGVLQEIKRRRRYESKTDEKKRKAREAGRRNRRRRMMDEPRFPEEDADATSKARDEDNDNWEVDGIL

SEQ ID NO: 260721 - protein, 85 aa, Zea mays
  Clone ID: MRT4577_169392C.1.pep
GRVGLANTSVLSTKQNLILPASAVVPAGKRWQAVHPGAGGQDYRWVAGIRAQEQARVLGGRVDLRIVCTYRARVGGLPFAAHASR

SEQ ID NO: 260722 - protein, 72 aa, Zea mays
  Clone ID: MRT4577_169393C.1.pep
TAFASMSNHGHLQGLLHLTSRSPPATGKPVSNQTSLASVRSLMRHVSAPDGKPLTNHIAQAICKTHNEAENS

SEQ ID NO: 260723 - protein, 65 aa, Zea mays
  unsure (1)..(65): unsure at all Xaa locations
  Clone ID: MRT4577_169394C.1.pep
MSWXAYLDDHLLCDIXGQHLSAAAIVGHDGSFWSQSENFPELKPEEVAGMIQDFDXPGTLAPTVL

SEQ ID NO: 260724 - protein, 75 aa, Zea mays
  Clone ID: MRT4577_169395C.1.pep
DSKLTRLLRDSLGGKTKTCIIATISPSVYCLEETLSTLDYAHRAKNIKNKPEVNQRMMKSAVIKDLYYEIDRLKQ

SEQ ID NO: 260725 - protein, 348 aa, Zea mays
  Clone ID: MRT4577_169396C.1.pep
MARPRGKKRTAPRAAATDSVQPEAAATETAAAEPANRGRWKRVKAPPKPKPETDYFAEKRNLEDLWLSAFPVGTEWENIDKIKEFNWSFENLEKALEEGGELHGKTVYLFGSTEPQLLDVNGESKIVLIPIVVAVDCPFPPSDKIGINSVQRENEEIVPMKAMKMAWVPYVPLEDRLSRIDSLKTKIFTLGCTQRRSALKHLKIERVKKFDYCMPYYMPLQPLEDENDTVISFLYPLEPPIVDEFDWEMDDYEDFADQKVQEGGLPEDEKEKFKEFLKEKVRERKRELKQAKEARRKAIDDMDPKVKEAFENIKFYKFYPVKTPDTPDVNNVKARYINRYYRNAHYLM

SEQ ID NO: 260726 - protein, 90 aa, Zea mays
  Clone ID: MRT4577_169397C.1.pep
ARSVCLCMTLFLYLESWDTTLYKITNMSSNHIHDRYIHYDSNIVLSHLYILQIKSSVTFIFVSCMYPCLLHSKPQRITPKLPPSTSIGLG

SEQ ID NO: 260727 - protein, 112 aa, Zea mays
  unsure (1)..(112): unsure at all Xaa locations
  Clone ID: MRT4577_169398C.1.pep
ATTTRVINACTVKWSVRQPLNKLNYLHSYCIIHXDLKPCTXNXCGXRHEHVIIKLXXXGLSXFYXAPLKPLCDNGVAVTIWYRAPELLLAWKHFTSAVXIYXIGFIFTKMLT

SEQ ID NO: 260728 - protein, 57 aa, Zea mays
  unsure (1)..(57): unsure at all Xaa locations
  Clone ID: MRT4577_169399C.1.pep
IPRKNGFNHIITIYXKVCPSTHIMFSQPLTSRHLLVFLVHLSVPNLFVFSFGLTLPD

SEQ ID NO: 260729 - protein, 96 aa, Zea mays
  Clone ID: MRT4577_16939C.1.pep
NSARGSFLPQLSLGFSTPPSPPSPPNAPHSPSMQINASFHPNRAPRPSLVVLVPPRLAWSEDPSGLRLISSPAEETERFGQDWDQSAHGSVSYKNV

SEQ ID NO: 260730 - protein, 56 aa, Zea mays
  unsure (1)..(56): unsure at all Xaa locations
  Clone ID: MRT4577_1693C.1.pep
REKXKEGEFTKVILPPSPPKXXTLTNSCLITPNVNNSNTYPRLASQTIFQATHQTL

SEQ ID NO: 260731 - protein, 44 aa, Zea mays
  Clone ID: MRT4577_169400C.1.pep
EGGIISANLDIHDPHKAFFLHSNTLNWHVRVSIRGSIYCKIASN

SEQ ID NO: 260732 - protein, 168 aa, Zea mays
  unsure (1)..(168): unsure at all Xaa locations
  Clone ID: MRT4577_169401C.1.pep
MSEVFEGYERQYCEESASLSRKCTAASALDGEKKKQRLSEIQSGVQEAESLIRRMDLEARNTPPSVKAGLLAKLREYKSDLNNLKSELKRISAPNARQTTKEELLESGMADTLAVSTDQRGRLMMTTERLNQSTDRIKESRRTMLETEEXLXVSILQDLHQQRQSLLH

SEQ ID NO: 260733 - protein, 61 aa, Zea mays
  unsure (1)..(61): unsure at all Xaa locations
  Clone ID: MRT4577_169402C.1.pep
HVLSHDSRRCGGRDRFXWDDVKDDKHRETYPGHSVRASVGRWRRRKDLHWYSRAKKSDTED

SEQ ID NO: 260734 - protein, 37 aa, Zea mays
  unsure (1)..(37): unsure at all Xaa locations
  Clone ID: MRT4577_169403C.1.pep
SLSCSYIXFPSQAEKNNVLKGIIVVCSKYLILISDVM

SEQ ID NO: 260735 - protein, 74 aa, Zea mays
  unsure (1)..(74): unsure at all Xaa locations
  Clone ID: MRT4577_169404C.1.pep
XXSSCRILNRQCIPTKTPNLPIMSKPCRTIHTLTLSLPTLRVAMAKVFSFILHNRTRNSPLKRTHFRPHHSSPS

SEQ ID NO: 260736 - protein, 41 aa, Zea mays
  Clone ID: MRT4577_169405C.1.pep
PGLHVELWSEMKDHSGRSNWTPPAGDVFIKSNRECIRDFVS

SEQ ID NO: 260737 - protein, 16 aa, Zea mays
  Clone ID: MRT4577_169406C.1.pep
LNFFHHCNQKCLSVKA

SEQ ID NO: 260738 - protein, 43 aa, Zea mays
  Clone ID: MRT4577_169407C.1.pep
MWSSNDYIGDSKKKKKKKKKKKKKKKKKKKKKTRKKKKKKGPP

SEQ ID NO: 260739 - protein, 71 aa, Zea mays
  Clone ID: MRT4577_169408C.1.pep
LKGVTGADVCPGSSSGEVKGDLITNKVIAGPTSPLRVFPRRHVGQKRLVRNGCISPSNIAKTDAKVNEKQE

SEQ ID NO: 260740 - protein, 88 aa, Zea mays
  Clone ID: MRT4577_169409C.1.pep
NQQRAAPPSKGSAIVVMGSRHAALLAIQNHFSLFPLNVAPVQESGGLSTRPTETYESRTSNTDGTGFNDLEASVFRKLREAQKRKHFG

SEQ ID NO: 260741 - protein, 50 aa, Zea mays
  Clone ID: MRT4577_169410C.1.pep
IATYRSSRDRERISYALVLTVRMLTSCSTALHTLTTPYSPLPCLVLPLTR

SEQ ID NO: 260742 - protein, 79 aa, Zea mays
  Clone ID: MRT4577_169411C.1.pep
AKPDRDPDLLSEELVREVALPLSRTEALVRIPVVLALVFLDTCHFGLIVGHMHCSLALAEGSLRSGGSEYLGVLKRNAF

SEQ ID NO: 260743 - protein, 235 aa, Zea mays
  Clone ID: MRT4577_169412C.1.pep
LGTYETATVDVIGDGFRARDITFENSAGAGAHQAVAFRSDSDRSVLENVEFRGHQDTLYAHTMRQFYRRCHIVGTVDFIFGNAAAVFEECVIKTVPRAEGAQKRARNVVAASGRIDPGQTTGFVFVNCTVDGNKGFVELFRRKPDSYRLYLGRPWKEYARTLYVSCYLGTVVRPEGWLPWRGDFALSTLYYGEFDSRGPGANHTARVEWSSQTPEQYVKHFSTENFIQGHQWIAY

SEQ ID NO: 260744 - protein, 45 aa, Zea mays
  Clone ID: MRT4577_169413C.1.pep
IHGHPPMKKILNVVIECSCKSLYWGGIRQTCCSQGKRKEVMLVDS

SEQ ID NO: 260745 - protein, 153 aa, Zea mays
  unsure (1)..(153): unsure at all Xaa locations
  Clone ID: MRT4577_169414C.1.pep
KQLPLGQLLAQKNRGPQIQQIVVANPFAYFXQKQFFPFNPPSAFNPAFYFEQPQIPFSQVPFAHPQQFFPFNPLGAFNPPAFFQQPQLFPFNPLSGFNPPPLFKPPQFFPFYQPPGPKAGPPFQMPQIFPFNPPFFTNPKGFFPQPPLGGAPL

SEQ ID NO: 260746 - protein, 36 aa, Zea mays
  Clone ID: MRT4577_169415C.1.pep
MFWNGGKKKKKKKKKKKKKKKKKKKTPKKKKKKKKK

SEQ ID NO: 260747 - protein, 248 aa, Zea mays
  unsure (1)..(248): unsure at all Xaa locations
  Clone ID: MRT4577_169416C.1.pep
MGAVAALILAGLLAALTYVLCALHSIVWVPYRLERRLRCQGIRGPPRSLLSGNAAEYVAMTKAAQSAPLASFHHAFIGRAAPQYREWAARYGRPFVFWFGPRPRLVVSGPEVAKAVLTDSTGAFEKGTTGSGNNPQARQLIGEGLVGLTGEKWAHHRRVISPAFNMERVKGWIPEISAITSSMLDEWEVQGETRAEFEIDVNKEFHTLXSADVIXSGVAFGSSYEEGKRIFQLADEQIQLVILAMKTF

SEQ ID NO: 260748 - protein, 174 aa, Zea mays
  unsure (1)..(174): unsure at all Xaa locations
  Clone ID: MRT4577_169417C.1.pep
MFSLSQIEHDLPMPPHLLSRPLPDAIKAELERLFLDKVSFRLLMFKPFNGEILVGRITGYDDKGLQVSLEFFSDICIPGHLMQFGTVRGPDGRWMLKTELGDELYLDLDDXSTKYPPIPIDQNEDDPPFAPMQIVGSIKGDGLGLLVWWAADEEEGGGGGGRAIASCCLRAHFV

SEQ ID NO: 260749 - protein, 32 aa, Zea mays
  Clone ID: MRT4577_169418C.1.pep
CQSSSVLNLDFNRQLQGCNTRQLIHRRVYEHL

SEQ ID NO: 260750 - protein, 202 aa, Zea mays
  Clone ID: MRT4577_169419C.1.pep
MFSLSQIEHDLPMPPHLLSRPLPDAIKAELERLFLDKVITKLGLCVSVYDIRSIEGGSIHPGEGCSTYKVSFRLLMFKPFNGEILVGRITGYDDKGLQVSLEFFSDICIPGHLMQFGTVRGPDGRWMLKTELGDELYLDLDDEIRFLVSSTKYPPIPIDQNEDDPPFAPMQIVGSIKGDGLGLLVWWAADEEEGEEAAEEEQ

SEQ ID NO: 260751 - protein, 93 aa, Zea mays
  Clone ID: MRT4577_16941C.1.pep
GPIHAPERWNPKKGPPHKDAICKRNGVACTSSKPGPPPMFFPFFLMIFFAFSLLFVYYPPFFFSMKREFQFSSIIMNPRRVGDGNSDGPQATL

SEQ ID NO: 260752 - protein, 420 aa, Zea mays
  Clone ID: MRT4577_169420C.1.pep
MFGGILNDPQAGGSMEVGWGKLNEEDEDRDLQNKRLRVRHFGEENPLHSGASATPFGSESSFLPISDECVHLKLSRFPEHELEFGLSLFANDGSESPRDANNEQVDDAENSGGRNSVDVGIRMDLSDDFLHMIFSFLDQKDLCRAGVTCKQWRSASVHDDFWKCLKFENTSVSLENFVNICRHYQSVTELNLHGVINAEMLVLEAIMFLTHLKTLTMGKGQLGESFFQALAECPLLTALTVNDASLGSGIQEVTVNHDGLRELHILKCRALRISVRCSQLQILSLRRTGMAHVSLNCPQLLELDFQSCHKLSDNAIRQAATACPLLAKLDMSSCSCVTDETLRDIGNSCPSLSALDASNCPNISFESVKLSMLVDLKLLSCEGITSASMVAIAYSRLLEALQLDNCSLLTSESLDLPHLK

SEQ ID NO: 260753 - protein, 95 aa, Zea mays
  unsure (1)..(95): unsure at all Xaa locations
  Clone ID: MRT4577_169421C.1.pep
PGLAGTHGVIITTHWTQFDRSSHTGGHGGXHDHGLSCGRGASGPWAHGPPQLLLRRPLLQETRSTPTTATRIGGGLTGDVYGNRRKETVKGLYQL

SEQ ID NO: 260754 - protein, 105 aa, Zea mays
  Clone ID: MRT4577_169422C.1.pep
RRLFLLMSAPKHHVETVSYTEDRWAGVLGGKKERAPTETIWEQCSQAIIACVPGGKYYRRGLWPVKSNSINGTGSNRLKQVSCYLHHLCYSNNHYGLLQQLPEVH

SEQ ID NO: 260755 - protein, 215 aa, Zea mays
  unsure (1)..(215): unsure at all Xaa locations
  Clone ID: MRT4577_169423C.1.pep
MYKQATQKTGEVLSLPPRWLGMYSDFITKNSSAVTQIESALRSLTYIIPGRFRESEIASESLHSGVQVLSLYHDSLLSKAMAQMPGTRRHPVTPHHRYAKFWTQHSPTYKRIALVLQMIQYTELLWEMAAKRKGEKVRWRVVVLLEVVKAVCRLLLLRLTNSRPLLSPPLPQREIXTPALLKSHXASADGMDTPPSERFVEAENWGMPXTGLSMP

SEQ ID NO: 260756 - protein, 47 aa, Zea mays
  Clone ID: MRT4577_169424C.1.pep
HRMLFYDHPTDHEFIQNQLLDPRTPMGRIVSTADYAYRISDLGVAMN

SEQ ID NO: 260757 - protein, 127 aa, Zea mays
  Clone ID: MRT4577_169425C.1.pep
IIIIIISAHNVSGNVVLWCSLALVSIMQRKVLAALRASMMTVGVVLLCRYLRSGPCWMPGGGPRSTLRVLVRVAVNGQQSARWLRSHQLHVLYVDGVVRHGKPELGALQVVLDMLPIPQREIVEGSL

SEQ ID NO: 260758 - protein, 232 aa, Zea mays
  unsure (1)..(232): unsure at all Xaa locations
  Clone ID: MRT4577_169426C.1.pep
MSPLLAVAMNHTANHXALMSHLPSANNRQISAXTHLPXSSPQRKKQICNLTFTTRYAKVLNHHVVQMLSPSQIPQRHWFPSDFTFSAATSPHQIEGAWNEEVKEESNXHHFCHYHPKRILYXRNSNIVANSYHMYQKDGKLLKEMGMDTYKFSISCTKILPKGTEEGGIXPDVIKYYRNLXINLLIENAIEPYVTIFHCYVPQALEDKYGGFLDRSHKSIVXDYTYFXAKVC

SEQ ID NO: 260759 - protein, 432 aa, Zea mays
  unsure (1)..(432): unsure at all Xaa locations
  Clone ID: MRT4577_169427C.1.pep
MDERRTILMDRYEIGRQLGQGNFAKVYFARNLTDGQSVAIKMIDKDKITRVGLIVQIKREISIMRLVKHPNVLQLFEVMASKSKIYFVLEYAKGGELFNKVSKAKLSEDAARRYFHQLVNAVDYCHSRGVYHRDLKPENLLLDENENLRVSDFGLSALSESKRHDGLLHTTCGTPAYVAPEVLGRRGYDGTKADIWSCGVILFVLVAGYLPFHDPNLIEMYRKISRAEYRCPRSFSGELKDLLFRMLDPDPSTRISISRIKRSTWYRKPIEANAAKIKHGTARDTTVRDGEAATASSSIECSNRPEEDQGSSSLPNLNAFDIISLSTGFDLSNLFEERHGRREERFTTRQPVGAVFGRLKELAEXRLKLKNXKEREAGSLNLACAEGKGLKGVPWKLDAEVFELAPSFLLVELKKASRDTIEYQRLREGRKC

SEQ ID NO: 260760 - protein, 89 aa, Zea mays
  Clone ID: MRT4577_169428C.1.pep
HVILPPRRVVAAQGRPVLLVGPPEALLPDVACEPEDHRATVSDQPMRPGDGEDHLPDPGAVSLSPSPGTQHAGRVAHMVLLVLLLLVGT

SEQ ID NO: 260761 - protein, 255 aa, Zea mays
  unsure (1)..(255): unsure at all Xaa locations
  Clone ID: MRT4577_169429C.1.pep
VRVGEMYRKISRAEYRCPRSFSGELKDLLFRMLDPDPSTRISISRIKRSTWYRKPIEANAAKIKHGTARDTTVRDGEAATASSSIECSNRAEEDQGXSSLPNLNAFDIISLSTGFDLSNLFEERHGRREERFTTRQPVGAVFGRLKELAERLKLKIQKKESGVLKLAAQKEGMKGFLELDAEVFELAPSFLLVELKKTSGDTIEYQRLVREEVRPALKDMVWAWQSDRQQQQQQREQSVQGEDQQQPLSSLPTQQ

SEQ ID NO: 260762 - protein, 99 aa, Zea mays
  unsure (1)..(99): unsure at all Xaa locations
  Clone ID: MRT4577_16942C.1.pep
MARKKEKASPPWCNPAKSGAGKQKKKKWTKGNHKEKVPIAIFXGQPPYDELLFVGGEVSRSRPSILCEPSGGRGSSTRRPIKDGTTKGGIWMLSAHSSS

SEQ ID NO: 260763 - protein, 93 aa, Zea mays
  Clone ID: MRT4577_169430C.1.pep
AFQQPYMNSGLFHQAAAAVPTSSVKYPLPQYKSNIALAVVTHASAHISRVLAPHFRNAIPDRIAPFPPAADQIPARVLPNPPAPPPLVSEGRS

SEQ ID NO: 260764 - protein, 48 aa, Zea mays
  Clone ID: MRT4577_169431C.1.pep
LRLRVVVFHFRLRWGRVDEGRRLDSVRRLRWRWRVWSEDAVGRTGRMR

SEQ ID NO: 260765 - protein, 148 aa, Zea mays
  unsure (1)..(148): unsure at all Xaa locations
  Clone ID: MRT4577_169432C.1.pep
MGCRHSKVEDEEAVRRCRDRRNLMKQLXRRRVDLAAAHITYLHALRNTGATLRKXXAEVETASSHQXPRXXXLNXXXXPXXXXXRPPPPPPPXPPGYSVTSSMPPHSVTSSMPPSPFPPPLIPXSPIRIRTRKRDGELNGYDSTDEDD

SEQ ID NO: 260766 - protein, 127 aa, Zea mays
  Clone ID: MRT4577_169433C.1.pep
LVTLQAPARYFQVHPRVPGVVIGQFFFRFGPAHGMNGPRRGSPRGPDAGLIKCQRRYLPFYFGPRPWRTLLSFFHFFVPPHIDSFIFILGVPRPLGMKCKSFPPPPRLSSGFYFNPLNIPFFFVPPN

SEQ ID NO: 260767 - protein, 40 aa, Zea mays
  unsure (1)..(40): unsure at all Xaa locations
  Clone ID: MRT4577_169434C.1.pep
GELVCVSRXEAVHNILFAMCFNSFGGMKILFPSFVKWLGR

SEQ ID NO: 260768 - protein, 544 aa, Zea mays
  Clone ID: MRT4577_169435C.1.pep
MANRLRAVFDDIISEEQSAFIPGRLITDNVVIAHECFHYLRKKKGKAGAFAVKLDMAKAYDRVEWTYLESVMRALGFADKWRDLVMRCVTSVSFSVKVNGCLSEVFKPSRGIRQGDPISPYLFLLCVEGLTCMLKNTGPQYIARGIRISLRTPWVSHLMFADDCLVFGQANKRSADRVASILDLYNKISGQLVNKQKSGVLFSANCDQEGKQEVLQSLGISSEVLGEKYLGLPTAAGRATDGVIKSYADRIRNFVYGWSEKKLSCAGREVLIKANLQAVPTYPMSCFKLPAHVCKKMQTYISNFWWGSAVDSHKIHWQSWSKLTMPKISGGMGFRDLPLFNKAMLAKQGWRLMTRPNSLCARIIKGKYYPNNEFLKANKKKQSSEIWKAVLLGREALWQGLIKRVGPGSSISIWEDNWIPSIRQLKPTVHLEGVQVQSVDELFLPGTRCWNVDLVRKSFIAMDAEEILKLRPGTRMDADVMGWAHEENGVFSVRSCYRMLKQSQSVGKDYAVNAASSSNEEDWWRKLWKTGGENYGENYGRAPV

SEQ ID NO: 260769 - protein, 194 aa, Zea mays
  Clone ID: MRT4577_169436C.1.pep
RPGAAHLGHALSGQRQASASCSTPPSPSLLLSTGVLLAGAQPPARIPASARVDPGRRSRTAQFQLSATSLGLPAPLASVIFPAVGSCLISYHVGEDPFPCLSSSPCLWHRPQSSCCSAMASCWKAPPPALPARRSISPLPACPTPLRLASSNVLLSSSAMRCPWCRPRLLVTPRSSLPPALWCPGRPLASVSAC

SEQ ID NO: 260770 - protein, 94 aa, Zea mays
  Clone ID: MRT4577_169437C.1.pep
TTARMDSARQASCLPPVRPRIFLSGALAEAPRGEGLPKRRHFLCGVLLWMIRALRGLPRLLLLLLHLAGASSGGRSKRSRWGSPLSFFPTYQST

SEQ ID NO: 260771 - protein, 97 aa, Zea mays
  Clone ID: MRT4577_169438C.1.pep
PLKFFYSGFSKTELIPVLQVFFPRFRKMVFLFFGPFSQRFKPAPVVGLFFRSFLAKKLPNFSIIRARTLLKGFLTKFFGFYALKKNFLLKLFLKPLG

SEQ ID NO: 260772 - protein, 58 aa, Zea mays
  Clone ID: MRT4577_169439C.1.pep
IHSTVQFGSFSRRKLFPALLIAMMMLNVNRLAGHHNEEEDQKEDVGTTTAEATLLHND

SEQ ID NO: 260773 - protein, 63 aa, Zea mays
  Clone ID: MRT4577_16943C.1.pep
KKRRLILDPDQLYRGPKWDYSGKWEVYIVTNYGLSDEGENYVRGACLFTGYLSDPMTRNCPIG

SEQ ID NO: 260774 - protein, 72 aa, Zea mays
  Clone ID: MRT4577_169440C.1.pep
KRNSFPSGYKDAFEAQKKKKKASTDLDAYQFKPLKHLGVGGWLQDQTMAKREEQTDLKKKNPGRTETLEKFT

SEQ ID NO: 260775 - protein, 272 aa, Zea mays
  Clone ID: MRT4577_169441C.1.pep
MASLGVRAAAAARLPSLRPRRDGSRVLTGLRVGTGHYGVRLALSSSTSASPREFKVAGLPVDDSSLGPGDEYEFGLYTPKLLAVTGDDYVSNPRMPDEDEFDHFYRVVAKKTDMLLSCHLPKPLAVSEEEKAVQEKFKEMANECIDLLVDAMRRIPAEKRRPLFSVFGELYPVFESVRWTAEGGCAKWWMALQIMEKLEIVRKMVSSACGGTPLDRGTVFARKVDLTGVDGQALAGHGLGSNLSVVIFVLLHNVFSNVKSDIDGMVSASTPY

SEQ ID NO: 260776 - protein, 58 aa, Zea mays
  Clone ID: MRT4577_169442C.1.pep
LLYMHFAFVNFKHDFSITSDQLATFFIFSQWNVLLILYITCCLNFMYSSFIINHFSYM

SEQ ID NO: 260777 - protein, 66 aa, Zea mays
  Clone ID: MRT4577_169443C.1.pep
TTSGTCSKSFLSLFLKNQGSMAASQAHTQRSCNRNRRYINCQKETQISWATHCCQVQITRKCSSTL

SEQ ID NO: 260778 - protein, 121 aa, Zea mays
  Clone ID: MRT4577_169444C.1.pep
RTILTPRRLSHSDTLHALPSAEPHATNSWVYAELASHLRRSLPHRQWHRSSPTTRSDPIGEEPNMQSLVLTYRNSTPSSCRSAAPRTHILSDASVDTCAPDAAGAADERRCCCWCSWWRAH

SEQ ID NO: 260779 - protein, 78 aa, Zea mays
  unsure (1)..(78): unsure at all Xaa locations
  Clone ID: MRT4577_169445C.1.pep
ALTTLVSPRSKLKNLILYISIWGKLHYVKTDFLAVHTPIVQDLNASFTTSGCDSIFKIPXHVLLMTCAKAFLLGRMLK

SEQ ID NO: 260780 - protein, 224 aa, Zea mays
  Clone ID: MRT4577_169446C.1.pep
MEDGDESAAAALGLSPQLFVNEVHGIIADISAEAFEYCLQAAAAPGVVGAAKAAEKAMDLQRGLNAVHHVVKDRLDKRMANWEKFCLRHCFDVPEGFVADENDSSCAKESHKNGTSDSDLDLELDSLRRKLESANKESENLEREMSSLERQSMHKRKLDSSISEIQKLFEDKLMQGFEDLVKAIPAWRQKIIDMNKKRTEIRCLVRSTGLEHEQCERQQATNTG

SEQ ID NO: 260781 - protein, 777 aa, Zea mays
  unsure (1)..(777): unsure at all Xaa locations
  Clone ID: MRT4577_169447C.1.pep
MGTLSMSDASPIPAKNWDASPVKLEAQGGDTILGMKEEERLLELVKDEQADGILDSLPIDLEAKNGDASLITEAMKKEEEQLEDTRIKVQEEEEARKREEAARLAFDPETQYNKLDELLTKTQLFSEFLLENMDRIADESVETQAEQPQVEEKKKGRGRKRKAKPQYNDKKAKTAVAAMLTRSREERLAEDSTLSEEERWEKEQANLVPLLTGGKLKSYQIKGVKWLISLWQNGLNGILADQMGLGKTIQTIGFLAHLKGKGMHGPYLIIAPLSTLSNWVNEISRFTPSLVSIIYHGGKAARAEIRRKFMPTNVGPDFPIVVTSYEMAMFDAKFLAAYKWKYVVVDEGHRLKNAKCLLLKQLKRIPMDNKLLLTGTPLQNNLAELWSLLNFILPDIFSSHQEFESWFDFSGGNEETDEKKRLHVVSKLHAILRPFLLRRMKEDVEQMLPRKKEIIIYANMTEQQKQIQHHLIEKTFDNYLHEESDIILKRPGIRARLHNLMIQLRKNCNHPDLLESPVDSTGLYPPVEKLLEQCGKFQLFDRLLNFLMAQKHKVLVFSQWTKVLDIIEYYLDSKGHAVCRIDGNVKLEERRRQIAEFNDVNSSMRIFLLSTRAGGLGINLTAADTCILYDSDWNPQMDLQAMDRCHRIGQTRPVHVYRLATSHSVEGRMIKRAFGKLKLEHVVIGKGQFEQDRAKPSALDEGELLALLKDEQTEEDRIVQTDISDEDLQRLMDRSDLMGPPPGDAQXASPLVPLKGPGWEVVVPAKSGGGMLSSLTS

SEQ ID NO: 260782 - protein, 65 aa, Zea mays
  Clone ID: MRT4577_169448C.1.pep
SAPRVLQVSIGFLGLGYPVGGLAYLLLALHLTMRCLVSPLKHRRLPEQAHLVRPPPEPIHISIHQ

SEQ ID NO: 260783 - protein, 82 aa, Zea mays
  Clone ID: MRT4577_169449C.1.pep
TDCDSLRLEPYTICRRHSTCQLQGAGNGRRWCSSTPRRDKYLQMQIYSKHKKARALLKQAMRLLFLTQRQIPMAMTWLLQRM

SEQ ID NO: 260784 - protein, 64 aa, Zea mays
  Clone ID: MRT4577_16944C.1.pep
ELPVTKRSLVKDLSHKPGFHLEQGMISQKRRTFNPKAYYGQPFPSKSPWRPKEKKKFFAIENQI

SEQ ID NO: 260785 - protein, 80 aa, Zea mays
  Clone ID: MRT4577_169450C.1.pep
RRQARGRNRLHRHTDVGTYRERSSRWLAVLFNYHNPTQPCIGRTLCNRYLAGSLHRPIQLARGCQGARTSPRTRLLPFPC

SEQ ID NO: 260786 - protein, 42 aa, Zea mays
  Clone ID: MRT4577_169451C.1.pep
WMELRFLTNSYPELLNCNWMSIISLLTQHLPISFFCQHCIQG

SEQ ID NO: 260787 - protein, 50 aa, Zea mays
  Clone ID: MRT4577_169452C.1.pep
RSSPGVTPAPRSTKGESINSLLFIGSMPVVVPGPHVSPVVKLSTDTLVPS

SEQ ID NO: 260788 - protein, 155 aa, Zea mays
  Clone ID: MRT4577_169453C.1.pep
MHRNPRAVIRAAVSLTRRPPAVPAAEALQTLPKATPSPSPSPALGAWRPDQAVGPLGSVSRRRAFSSSAAEYGKDVDEVNRKFAEAREEIEAAMESKETVYFNEEASIARDAANEALAAFDALLARLPPTDADALRRSMGLKMEQLKAELKQLED

SEQ ID NO: 260789 - protein, 99 aa, Zea mays
  Clone ID: MRT4577_169454C.1.pep
LCSAVSLELSSSPRVVCIHYHDDPATDPFTFPVLHPPAFPTHLAHPAPPSPTAPPAALLIPWPSTPVLPPLLFLRDTRPAVAISYVIYISIFLLRDLLN

SEQ ID NO: 260790 - protein, 44 aa, Zea mays
  Clone ID: MRT4577_169455C.1.pep
GPPKIISINSSRTPYVNFGSFISPPPFFFFFSSPSPPFFFFFFF

SEQ ID NO: 260791 - protein, 131 aa, Zea mays
  Clone ID: MRT4577_169456C.1.pep
MDSSSSAGAGDDRWRLSKKGRSRSGRPHAMDAAAGSVLSRSYSASVSSSRSTAAGTSTAAATGSSAAAPSSQQQQQQQQAGAAACPAESSSSSSSSSSRLSKKCVEAVKEHRARFYIVRRCVSMLVCWRDY

SEQ ID NO: 260792 - protein, 207 aa, Zea mays
  unsure (1)..(207): unsure at all Xaa locations
  Clone ID: MRT4577_169457C.1.pep
MGISRDSRHKRSASGAKRAYYRKKRAFEAGRQGANTRIGPKRVHTVRTRGGNHKYRALRLDSGNFAWGSEGLTRKTRVIAVAYHPXYNELVRTNTLTKSAVVQVDAAPFRQWYEAHYGQAIGRRRQKAQAAKEGKTEEEVKKSNAVEKKQAARMSAGGKVESAIEKQFEAGRLYAVVSSRPGQSGRVDGYILEGEELAFXYQRKLPK

SEQ ID NO: 260793 - protein, 45 aa, Zea mays
  Clone ID: MRT4577_169458C.1.pep
MSTHQANTLRLYLTCIRNTLEAAMCLQNFPCQEVERHNKPEVELK

SEQ ID NO: 260794 - protein, 54 aa, Zea mays
  Clone ID: MRT4577_169459C.1.pep
CHVPHQPVIIYRLPYHREVVLEAHAAGRSRGCSCVMLRLHIPNVCVRKCSKVNG

SEQ ID NO: 260795 - protein, 58 aa, Zea mays
  Clone ID: MRT4577_16945C.1.pep
REGWGLYFWAFKTMKRRSLTVYCSMTKADHPRGLEFRPTPCFHKTNRLNPTHWISLPR

SEQ ID NO: 260796 - protein, 106 aa, Zea mays
  unsure (1)..(106): unsure at all Xaa locations
  Clone ID: MRT4577_169460C.1.pep
KKNIAEWKAALKIGDLSDPFTSLLXWSYEKLDPRLQRCFLYCSLFPKGHGYRPEELVHLWVAEGFVGSCNLSRRTLEEVGMDYFNDMVSVSFFQLVSQMYCDPYYV

SEQ ID NO: 260797 - protein, 106 aa, Zea mays
  Clone ID: MRT4577_169461C.1.pep
LSYCLKTPLFPFNRGIYISIYSKLFSEKQKIIRNITLSDTLKDPCSNDRTRGEWTSFFSRSIFHPNANLHLNLFFYTEKDSSTGCSSTKSNTQRCKAPPWRTLRMH

SEQ ID NO: 260798 - protein, 84 aa, Zea mays
  Clone ID: MRT4577_169462C.1.pep
GRAIGGSLQSVCISCRQIFEVLGDPGLFMGTVRRLIPQFMKRCVAISVELGKEQTASLVSMWDRCSWAAALRLFTPARYGVARS

SEQ ID NO: 260799 - protein, 54 aa, Zea mays
  Clone ID: MRT4577_169463C.1.pep
ARAGLDQQSSLLPISPRMQAGAEKLLVLHARKQAHLILRRSRITDTAIVNALAE

SEQ ID NO: 260800 - protein, 188 aa, Zea mays
  unsure (1)..(188): unsure at all Xaa locations
  Clone ID: MRT4577_169464C.1.pep
XFFRMLSCYFTTVGFYISSMMVVIIVYVFLYGRLYLALSGLEFAIMKQARMRGNRALQAAMGSQSIVQLGLLMALPMFMEIGLERGFRSALGDFIIMQLQLCSVFFTFSLGTKSHYFGRTILHGGAKYRATGRGFVVRHVRFAENYRMYSRSHFVKGLELMLLLVVYQLYGDVATDSTAYILLTSSMW

SEQ ID NO: 260801 - protein, 90 aa, Zea mays
  unsure (1)..(90): unsure at all Xaa locations
  Clone ID: MRT4577_169465C.1.pep
GTPYSSPQSHFLGQNFSPHFRRGDPQPRSQPIFGLVPQSFFQHHPXKAQFGGFLSAQITHPLRXMRRLXQPAHSPFSGAGGVPPLKTFFL

SEQ ID NO: 260802 - protein, 193 aa, Zea mays
  unsure (1)..(193): unsure at all Xaa locations
  Clone ID: MRT4577_169466C.1.pep
MAGDTVSGACSRGVIPRVLDAESCVHSTPASMDAPSPRVXLPKCSLCTTNNLKRLSAFMGXEVEIWCYNTXXDHDSSGMFKVDVCYALFIPVTSDLHXPECLESFLHAAGNHNPAPXPSTIVPETSDGKFLWMPXKYDYPLNECANPTQSGAIXKXLLDRLLKKTYTPDACHEPKPEPKAPTEPKPQPVNPPP

SEQ ID NO: 260803 - protein, 39 aa, Zea mays
  Clone ID: MRT4577_169467C.1.pep
RRASQGGIEGLGAAETAAIATGWSGVGALSRSVGLETWD

SEQ ID NO: 260804 - protein, 331 aa, Zea mays
  Clone ID: MRT4577_169468C.1.pep
MVTSSKGKVCVTGASGFVASWLIKRLLESGYHVVGTVRDPGNHQKTAHLWKLPGAKERLQIVRADLLEEGSFDSAVMACEGVFHTASPVLAKPDSTSKEDTLVPAVNGTLNVLRSCKKNPFLKRVVLTSSSSAVRIRDDGGQSSNISLDETTWSSVPLCEKMHLWYALAKVFAEKAAWEFAKENGIDLVTVLPSFVIGPSLSHELCVTASDVLGLFQGDTARFSSYGRMGYVHIDDVASSHILVYEAPQAAGRYLCSSVVLDNDELVSSLAKRYPIFPIPRRLNSPYGKQSYQLNTSKLQGLGFKFRGVQEMFDDCVQSLKDQGHLLECPL

SEQ ID NO: 260805 - protein, 48 aa, Zea mays
  Clone ID: MRT4577_169469C.1.pep
NTSRILAQDGHSLRLQLTAAVTMSSDTTISSPADDPASNHDYMTDMSV

SEQ ID NO: 260806 - protein, 65 aa, Zea mays
  unsure (1)..(65): unsure at all Xaa locations
  Clone ID: MRT4577_16946C.1.pep
FPFLFSFQDLTTFVCVCIPEFLSLYETERLVQELAKFEIDSHNIIINQVIFDEEGAYXNELRHFH

SEQ ID NO: 260807 - protein, 89 aa, Zea mays
  Clone ID: MRT4577_169470C.1.pep
EHSSIWLVPKSQVVAHLPLNMCSTCKWTCEVRGVFVQLEPHKYITKCIKEHDQSIRHMYATNQSKFHESKTFSTLRSLKKDFSSRVDLQ

SEQ ID NO: 260808 - protein, 166 aa, Zea mays
  Clone ID: MRT4577_169471C.1.pep
METPTPWRVLEFYSGIGGMRYSLASSGVRAEVVEAFDINDVANDVYEHNFGHRPSQGNIQTLTAGDLDKYKAHAWLLSPPCQPYTRQGLQKHSADARAFSFIKILNLMQNMSFPPQMLFVENVVGFEVSDTHDQLLAVLSTLNFNTQEFILSPLQFGVPYSRPRYF

SEQ ID NO: 260809 - protein, 109 aa, Zea mays
  Clone ID: MRT4577_169472C.1.pep
ARALGGSALGQAASAAAPCASAPLPPSTRPARPQPTSAGGSGTHYTLPGISVDSRQQHPPRRPRLADNSTQLHTERYYGLWYGDMEIGEWSCAVCLLVALTSADLPVRL

SEQ ID NO: 260810 - protein, 77 aa, Zea mays
  Clone ID: MRT4577_169473C.1.pep
PLRAPTRPVQRTLGMDAARCLFYQLEKCLNRDPSHWHSIGDPDTMLPTGTRARTMHSGPCRRTMRSGRPRGDAENQR

SEQ ID NO: 260811 - protein, 111 aa, Zea mays
  Clone ID: MRT4577_169474C.1.pep
TTKRKRSLNEKRLSRPVGQFLIPAGWPVFSSGRRAGFPPRIMGGGPPPRHPRFFPFWAPLVFRLDVLGGYYFAQVTGLPFLPANLFARWDPQVGPARGLDIALFQGAGGGP

SEQ ID NO: 260812 - protein, 119 aa, Zea mays
  Clone ID: MRT4577_169475C.1.pep
HQRRHTSRSFPPLLSWILPWRREESHTSSFSYCSSLHLHGIIHGSVTHRQRCQPPPAEPPPLDHNSTMDISARRHLLAQTAAAPPPPPCGGAPPTNENSEGASNDDDPCAGTRTSKPPA

SEQ ID NO: 260813 - protein, 94 aa, Zea mays
  Clone ID: MRT4577_169476C.1.pep
GPFPVFPKKIPVPTYFPLPDFVGSIFFGGTSSAEDPNPGFFYFGSPGKVFSFKNRFFDPLTNYGFFFFFFQTPGVNFRFLNSGFKPPNVFFFFL

SEQ ID NO: 260814 - protein, 60 aa, Zea mays
  Clone ID: MRT4577_169477C.1.pep
IDPHYPLPSGVWRLHLYQTPILFWQIPPQILCQIFDFRNECRACVGRSEIGILFFPGLTL

SEQ ID NO: 260815 - protein, 87 aa, Zea mays
  Clone ID: MRT4577_169478C.1.pep
MDKIKIGINGCRRIGRLEVRVALQSEDVELVSVNDPFITTDYMTYMFKYDTLHGHWNHSYNPLYDSKTLLLRDHPVTVLGIRNPDEI

SEQ ID NO: 260816 - protein, 85 aa, Zea mays
  Clone ID: MRT4577_169479C.1.pep
DTRWTQKLSHAHPRDRSTRVHDSATSRCSSARSRADSSTHSNARCSNGPPDQKTPTVRPRQQTASSLQGEWRSEAAQSGHRQHTP

SEQ ID NO: 260817 - protein, 70 aa, Zea mays
  Clone ID: MRT4577_16947C.1.pep
LWTADLGSPCSNTMGIRGKGLKREGWPISQEARSCLWWLCVGVCFFSVFLFIIFEWGKLFIVLRVVSGYI

SEQ ID NO: 260818 - protein, 60 aa, Zea mays
  Clone ID: MRT4577_169480C.1.pep
VKKKKKKKKKKKKKKKKKKKKKKKKKKKKKKKKKKKKKKKKKRGGRFLKKPNLPSRGSKK

SEQ ID NO: 260819 - protein, 89 aa, Zea mays
  unsure (1)..(89): unsure at all Xaa locations
  Clone ID: MRT4577_169481C.1.pep
MERMGPAGSQFDAKHYDSKMHELLSTGETEEFFTSYDETFESFDDMGLQEKLLRGMHSYGXQKPSAIQQRGIVPFCKGLVVRQLTQSGP

SEQ ID NO: 260820 - protein, 65 aa, Zea mays
  Clone ID: MRT4577_169482C.1.pep
SNPHGPRTPGVIPLRERGGPNRRIRNVKGGLPRGKARISRATYSFSTSRMTHLQLHRTRKGWVLP

SEQ ID NO: 260821 - protein, 141 aa, Zea mays
  Clone ID: MRT4577_169483C.1.pep
MATLSAISANVGYCKAPTLSWKGSGVPGRIVVSMSTTRRGLVSLRRRSPRFRVYAAKAETVSKVMDIVKQQLALAADVGLTAETKFTDLGADSLDTVEIVMTLEEEFKITVEEDNAQSIATIQDAADLIDKLVDQKPRDSD

SEQ ID NO: 260822 - protein, 121 aa, Zea mays
  Clone ID: MRT4577_169484C.1.pep
TILLIEISGVRALTGLHIGPPGRGGAAEARTAEREPDPYPSLRARRGGGSRAAGAADMTPMRLVVRACTAPPIRVLEVEEVLEAALPVHCWVHLVDQLLGAADLLVLGETMDAGNGNSCFI

SEQ ID NO: 260823 - protein, 207 aa, Zea mays
  Clone ID: MRT4577_169485C.1.pep
QALLKMLEGTIVNVPEKGARKHPRGDNIQIDTKDILFICGGAFVDLEKTISERRQDSSIGFGAPVRANMRAGGISSAQVTSSLLESVESGDLIAYGLILVSLAALNEDQLVQVLIEPKNALGKQFKKLFSMNNVKLHFTDGALRIIAKKAMSKNTGARGLRTILENILMDSMYEIPDAKSGESHWHVIPGSDRTSVTCKNLIPVISM

SEQ ID NO: 260824 - protein, 274 aa, Zea mays
  Clone ID: MRT4577_169486C.1.pep
MSGLMYAVPPSPKKGKKIPRCLLSLDLCFGLLSQTLVNYLIMAFMYMQIDTKDILFICGGAFVDLEKTISERRQDSSIGFGAPVRANMRVGGTSSAQVTSSLLESVESGDLIAYGLIPEFIGRFPILVSLTALNEDQLVQVLTEPKNALGKQFKKLFSMNDVKLHFTDGALRIIAEKAMSKNTGARGLRTILENILMDSMYEIPDAKSGEKRIDAVVVDEDAVGSVDQPGYGAKILYGDGALDQYLSHIKVAGDGVASEMDGEAELSPSRAIGM

SEQ ID NO: 260825 - protein, 417 aa, Zea mays
  unsure (1)..(417): unsure at all Xaa locations
  Clone ID: MRT4577_169487C.1.pep
MPKESCRGLVKXVTGEGRFKLVLSIACDNKYKRXNNNLYKRASLKQSXGGFDGEADDDNNVELEKSNVLLMGPTGSGKTLLAKTLARFVNVPFVIADATTLTQAGYVGEDVESILYKLLTVADFNVQAAQQGMVYIDEVDKITKKAESLNISRDVSGEGVQQALLKMLEGTIVNVPEKGARKHPRGDNIQIDTKDILFICGGAFVDLEKTISERRQDSSIGFGAPVRANMRAGGISSAQVTSSLLESVESGDLIAYGLIPEFIGRFPILVSLAALNEDQLVQVLIEPKNALGKQFKKLFSMNNVKLHFTDGALRIIXAKKAMSKNTGARGLRTILENILMDSMYEIPDAKSGEKRIDAVVVDEDAVGSVDQPGCGAKILYGDGALDQYLSQIKVSGDGVGSEMDGEAELSSSRAIGM

SEQ ID NO: 260826 - protein, 272 aa, Zea mays
  Clone ID: MRT4577_169488C.1.pep
MADDEQAEKKEEVPELAPFDPTKKKKKKKVVIQEPSDEVDNLAEKTESLTVTESSEPSFAGMKKKKKKHVELDSSLTETGDVDDTGDDQVREDEEGEGIVLAGAAATRYPWEGTDRDYKYEELLGRVFNILRENNPDLAGDRRRTVMRPPQVLREGTKKTVFVNFMDLCKTMHRQPEHVMMFLLAEMGTSGSLDGQQRLVIKGRFAPKNFEAILRRYINEYVICNGCKSPDTILSKENRLFFLRCEQCGSSRSVAPIKAGFVAQVGRRKAGS

SEQ ID NO: 260827 - protein, 102 aa, Zea mays
  unsure (1)..(102): unsure at all Xaa locations
  Clone ID: MRT4577_169489C.1.pep
FYGLRNPVNTNNPAGSGVTAANVGKFPALNTLGVSMARIYYAPGGQNPSHTHPRATEIIFALXGTLEVGFITTGNALFTKTDTKGDVFLFPRSLVHFQHNRG

SEQ ID NO: 260828 - protein, 91 aa, Zea mays
  Clone ID: MRT4577_16948C.1.pep
WHPFMERGGKPLGSFFGAVKNCLGKFSRPQKNRGFPWFFPCQISKRQVPPKAQNHDPVVTSGRPCQSGVFSHHPGFKRPPPFPGVIGPVTL

SEQ ID NO: 260829 - protein, 60 aa, Zea mays
  Clone ID: MRT4577_169490C.1.pep
VGVTPMVCQCERSAACVSPLCSIRASLRLALMHPVKRYAHDRTCFGEHGRLYVLKQFWLY

SEQ ID NO: 260830 - protein, 47 aa, Zea mays
  Clone ID: MRT4577_169491C.1.pep
KKKKLKFEKKGGGGKKKKKKKKKKKKKKKKKKKKKKKKKKKKKGRPF

SEQ ID NO: 260831 - protein, 68 aa, Zea mays
  Clone ID: MRT4577_169492C.1.pep
RGPFFFGFRGPQGGVSFLGKIQQQGFRVVFEGPGQGVGFAPKGFLPPRPEWLTPPFLGGGGGIFFPGF

SEQ ID NO: 260832 - protein, 61 aa, Zea mays
  Clone ID: MRT4577_169493C.1.pep
TTCFQRYISTEGCEHYISSCPDSKFDMDLNYLLLYYMPNSDENITQWPQIDCKANLRLESK

SEQ ID NO: 260833 - protein, 115 aa, Zea mays
  Clone ID: MRT4577_169494C.1.pep
MIISLIRIISKDIQYFSPHKFISSAQLSRVLRFVREDVEESEAVVEARKECGYSLRSMGASKRAHGGGSHVATRCQCLVKGVLSPSSSSVEVGEDLRRAALSRLWLDTHLRKDWG

SEQ ID NO: 260834 - protein, 71 aa, Zea mays
  Clone ID: MRT4577_169495C.1.pep
ECTRQVRHIGQQNWEKFISSHVTEMKGHLLKYPVSIDSRGKVNPLSGCATFPDLGGNICGSFLNIQENLTI

SEQ ID NO: 260835 - protein, 98 aa, Zea mays
  Clone ID: MRT4577_169496C.1.pep
SLMNRTRHNLIGLLGPYLITLDRMKQRHHGLRNFICDSIYNTSNICNKGATTGAEDVLSISKGIINGQLGSTLVDIVRTKRPRGVNFKGAKIIVGTRL

SEQ ID NO: 260836 - protein, 107 aa, Zea mays
  Clone ID: MRT4577_169497C.1.pep
HERHEPQQDWAGTNKTTSGRPCCQAPKCAKEAAGRRAEGGTVRIAPATGRGEWDERMVAWQKEQRRRALVAAAARCSPATMPPPGGEGVAMKAHLRSWAHAVACSVR

SEQ ID NO: 260837 - protein, 68 aa, Zea mays
  Clone ID: MRT4577_169498C.1.pep
TSSTRGSAGSRSGPTAPCDTTTLSGVSATNDPVPSESTFRRYTLARYAPEITASRIPVISFGFPTMAG

SEQ ID NO: 260838 - protein, 58 aa, Zea mays
  Clone ID: MRT4577_169499C.1.pep
PGICLSNTTRWGGTNLVCLRALSCTYKLDPKPYEGNFVRPFKKPICAFFRQQQQKKKQ

SEQ ID NO: 260839 - protein, 264 aa, Zea mays
  unsure (1)..(264): unsure at all Xaa locations
  Clone ID: MRT4577_16949C.1.pep
IRHEGAEQVGRETERENTRPLASALATKVPPDRSIPFHPNPQQNVSSHLILSYPARDFHLFRGWGMCSASRVFFCSDLFRRTDWSCCLSGFFIFRLGYIPPRTRFLACGRRRXKNINERXRAASPLSVDTCRSTGWNLWRLGRGAAFSSNQCSFLLRAWKKLRPSLCFVFFFWRRDLVLALPPSLRFFLCSNLRGARPWRGRARAPARPPALPNALCFPFVNGYCSAADLIVPSVSFCLHHADDSSGGSRFGARARRPGISGGE

SEQ ID NO: 260840 - protein, 181 aa, Zea mays
  unsure (1)..(181): unsure at all Xaa locations
  Clone ID: MRT4577_1694C.1.pep
MEEVEQQQDTPKLLNRXSFYDGQGNDISLNDYLAGNAXKYAMYLPHSVGGYSKKRHXREEQCPIVERLTNSLMMRGCNSGKKAMGGRIIKRTLEIIHLVSDANPIQDGGDAIINSGPREDATRIGSADDVRRXGAYISPLRRTNQVIYLLSTGARESAFRNITTIAESLEDELINAAKVSS

SEQ ID NO: 260841 - protein, 57 aa, Zea mays
  Clone ID: MRT4577_169500C.1.pep
PKSFIYTISLLDHLSHITHTNYLHYSTYIHSIISLHHSCTPMLIHHNISTHYSNATT

SEQ ID NO: 260842 - protein, 93 aa, Zea mays
  unsure (1)..(93): unsure at all Xaa locations
  Clone ID: MRT4577_169501C.1.pep
TYVMYFLHVYLVLMLSFSYILLSFFVPLFIYLYFFCFILFRMSFLIYFIFFFYVILFFFIFFFFFYFIXYLYFXVFFFSLNFFFFILSYVSIF

SEQ ID NO: 260843 - protein, 47 aa, Zea mays
  Clone ID: MRT4577_169502C.1.pep
GHRQLLASEPGLVHHSWVGKVRSMAERVLKYYLLVIFMFYLYHLLRL

SEQ ID NO: 260844 - protein, 84 aa, Zea mays
  Clone ID: MRT4577_169503C.1.pep
ERHRSYPRRACLLQLMPHWGYAVRPLCVVVMDTGFEFESVYNHHSLDQYIVCCSSTISWSGLVASWVSSRFVPPPAPVEYALLA

SEQ ID NO: 260845 - protein, 41 aa, Zea mays
  Clone ID: MRT4577_169504C.1.pep
LEPACLTRTWPPPVLRGRSIARVKIRSPAILVSRQETGGSA

SEQ ID NO: 260846 - protein, 218 aa, Zea mays
  Clone ID: MRT4577_169505C.1.pep
MAEKGVKVFGMWASPMAIRVEWALRLKGVVYEYVDEDLANKSDALLRHNPVTKKVPVLVHDGKPIAESTVIVEYIDEAWKDGYPIMPADPYDRAQARFWARFADDKCNAAIYPVFTATGEAQREVVREAQRCLKTLETALEGKKFFGGDAVGYLDVVVGWYAYWLPIIEEVSGASVVTDEELPLMKAWFDRFLAVDVVKETLPPRAKLLALNKARREQ

SEQ ID NO: 260847 - protein, 84 aa, Zea mays
  Clone ID: MRT4577_169507C.1.pep
PLNTYCVGAHSRNVGLGKKAPFHLSGSSALEPRVETRQTFWWTHMHAHTSGPLYLLSLAMDFPTGTETHPTARVHASCEQRGPA

SEQ ID NO: 260848 - protein, 67 aa, Zea mays
  unsure (1)..(67): unsure at all Xaa locations
  Clone ID: MRT4577_169508C.1.pep
VPRYLATLGXDVSKNCMLSCSARARPGRQVFRYLSVIRWPNMEVSHRRVLTRRAGSASSSSCRDQVL

SEQ ID NO: 260849 - protein, 62 aa, Zea mays
  Clone ID: MRT4577_169509C.1.pep
GGSLKLNKLYRRLKPRGFLFYWRPKYNSFASFFNFREGENHGVSQLISLLKKPFYPAWRMRK

SEQ ID NO: 260850 - protein, 113 aa, Zea mays
  Clone ID: MRT4577_16950C.1.pep
PVLLRFSPVLCPGVTFGKLGLGGMFFHLPLFLRVNPRGSLLNKRWLNVLSLWGKSSFGQPSGVFKARSFFNSGRSRPRGFNKFFSCWEYVFERSPLRPGDNMFQNGGKTISIA

SEQ ID NO: 260851 - protein, 72 aa, Zea mays
  Clone ID: MRT4577_169510C.1.pep
CLGLGPSGEGSPLNFPPGGRLTDHLRTVRNTCTGKPRSTMMLEGAEVAPGGAVHGLRRYEICGGGRGAGRVG

SEQ ID NO: 260852 - protein, 113 aa, Zea mays
  unsure (1)..(113): unsure at all Xaa locations
  Clone ID: MRT4577_169511C.1.pep
NVKKGAVGFYVFFSTKKTEKQPSRASLLIPVNRERGDLKKGRYPHCLCKEAPGYLDDGLEYLGDKVLELADNAARDNKKTRIILRXVLLGIRNDEEVGKLLAGITIAHGGVLP

SEQ ID NO: 260853 - protein, 78 aa, Zea mays
  Clone ID: MRT4577_169512C.1.pep
DHSEEEEEEEEVLEEDEPRFTIIPNPLDRREEAGGASSDEESGEDTGPQDAQEYGNYQPGSLCGYCSFCNRCTECESC

SEQ ID NO: 260854 - protein, 48 aa, Zea mays
  Clone ID: MRT4577_169513C.1.pep
VLGMFMAYWCYFGLLSCVSFLFPPLNFGQSCAFSLSNVCGVEGSICYW

SEQ ID NO: 260855 - protein, 183 aa, Zea mays
  unsure (1)..(183): unsure at all Xaa locations
  Clone ID: MRT4577_169514C.1.pep
QRRVRGECSCNEPRLTAYLLHVRKLEKDFTALELQHVPRAVNSAADDLCVRASTWAPVPEGVFERRLLRPTAQPAELGEGGKTSTLKLAVPVALQLQHPPKTMCAIGGPAYPLAXSQYLRVVXAWISEIWDYLREXILPEDHVSAERIVRLAKRYAVVEGDLYRRGTNDILMRCITQEEGCKT

SEQ ID NO: 260856 - protein, 113 aa, Zea mays
  Clone ID: MRT4577_169515C.1.pep
MEWTVPKRARADDGEVRCQVEGCGLDLSRVKEYHRKHRVCEAHTKSPRVVVAGQERRFCQQCSRFHALSEFDQKKRSCRRRLSDHNARRRKPQPDAFAFASARLPSFGNVFIS

SEQ ID NO: 260857 - protein, 44 aa, Zea mays
  Clone ID: MRT4577_169516C.1.pep
DIIVTCPTLNNTTNRLHINSILGLQVVKKCHQFPVQILNHSQHF

SEQ ID NO: 260858 - protein, 103 aa, Zea mays
  Clone ID: MRT4577_169517C.1.pep
MNNREKIKSKKITDVLLSSDTTEAQGFLQEGGDDCAQVVFRDEEDEMEGTGIPWSVIGEAVGAEEQLEPCRSARVRELYEGEEFESEEEEYEDEDLCYSEDEI

SEQ ID NO: 260859 - protein, 41 aa, Zea mays
  Clone ID: MRT4577_169518C.1.pep
IDRSIDQAVPVDLETILLVESSSIGAHKYIQRCIAIRLRCM

SEQ ID NO: 260860 - protein, 153 aa, Zea mays
  Clone ID: MRT4577_169519C.1.pep
GLSEQDLEVLRGIAGCGEDIGRDEFDRLWCWLYLVVVSLSRERIKKLWDCTAPRWIEGLITTEEAENALRSSRELLKEAGTFVLRFPITRSWPHPDAGSLVVTYIGSDSSIHHRLLSLDSSDASAEKLQDLLLQEPELSQLGRVDRVSITIRR

SEQ ID NO: 260861 - protein, 88 aa, Zea mays
  unsure (1)..(88): unsure at all Xaa locations
  Clone ID: MRT4577_16951C.1.pep
GIGYRPXSPSERPLASANKGKGVASGLPQLVPRYLAPAVAGPCLIVCFLQXFQSPNGSISVPPPRNPSKGALELFPPQFKFPPQLPVV

SEQ ID NO: 260862 - protein, 116 aa, Zea mays
  Clone ID: MRT4577_169520C.1.pep
PGQKKIFSSPAQTKGGGAAPPFSRFPFKAPGGPPKKRRWAPFRGPPTPQDWGFFHGGFGKNKRARGPFWVTPVKQKPFCPLPVYFWKPGAGTLFFFHGRNKSFWAPHRGKSCLCFI

SEQ ID NO: 260863 - protein, 610 aa, Zea mays
  unsure (1)..(610): unsure at all Xaa locations
  Clone ID: MRT4577_169521C.1.pep
MILRPSLLAVARPLSTVAVAAAVRRGDLAGAEEAFASTQLKTTTTYNCLLAGYAKASGLVRLADARRLFDSIPHPDTVSYNTLLSCHFACGDIDGARRVFSTMPVKDVTSWNTMVSGLSKNGASEEAAAMFRVMPVRNAVSWNAMVAALACSGDMGAAEDLFRNAPEKTDAILWTAMVSGYMDTGNVQKAMEFFGAMPVRNLVSWNAVVAGYVKNSRADDALRVFKTMVEDAIVQPNASTLSSVLLGCSNLSALGFGRQVHQWCMKLPLSRNVTVGTSLLSMYCKCGDLNDACKVFDEMSTKDIVAWNAMISGYAQHGGGMQAIKLFEKMKDEGVVPDWITLLAVLTACIHTGLCDFGIQCFETMXRXYNIEPQIDHYSCMVDLLCRAGLLERAVNMIHSMPFEPHPSAYGTLLTACRVYKNLEFAEFAARKLIEQDPQNAGAYVQLANIYAVANKWADVSRVRRWMKDNAVVKTPGYSWMEIKGVRHEFRSNDRLHPQLGLIHDKLDRLQMLMKAMGYVPDLDFALHDVEDSLKSQMLMRHSEKLAIAFGLISTSPGMTLRIFKNLRICGDCHNVAKLISKIEDREIILRDTTRFHHFRGGHCSCGDYW

SEQ ID NO: 260864 - protein, 58 aa, Zea mays
  Clone ID: MRT4577_169522C.1.pep
PMGADPTVGARRAQSMSKDLRFRGTVDRFSELSGATSEILINIILWGQYFTYRPSFFK

SEQ ID NO: 260865 - protein, 178 aa, Zea mays
  Clone ID: MRT4577_169523C.1.pep
HGMSPTKKGRVTWKFDCMEPYKTYSAYGTESKHMSWGFPASRDANQGVRARDTCLTRKGRPQRSLPPFRAASVPLHRTRAVRSTARARGWHAIFFARRPCHVLFPRLGSPRSRPTRIGSRPPCFHGAVLGITSVECGLLYSSSSLVFPSPVWESESVACVAWFGFYMYLLRSSSISTC

SEQ ID NO: 260866 - protein, 57 aa, Zea mays
  Clone ID: MRT4577_169524C.1.pep
QRPAGRRKQLNTSAQQGRCTGPPEYTGPLIRGLKQIVCPGIPGFNGTGQFVTPTLLR

SEQ ID NO: 260867 - protein, 78 aa, Zea mays
  Clone ID: MRT4577_169525C.1.pep
LLSLDLVTVVVDCSGATAAKVQEVEAVVMRAMENHANRPTIKMERVFENFILSDEEQEDLVRLFLLSLLKKIRCLNYI

SEQ ID NO: 260868 - protein, 124 aa, Zea mays
  Clone ID: MRT4577_169526C.1.pep
MRPQVLLVTLAVIVVLAALPLSKGTEEEDGGAVVAAVDDAGTSSWPCCDKCGFCYLSYPPQCQCLDFSTVGCHPECKQCIRYTADDGVDIPPVHAYRCADILVNFCERRCTPAAAASMSSASTK

SEQ ID NO: 260869 - protein, 124 aa, Zea mays
  Clone ID: MRT4577_169527C.1.pep
MRPQASLLVTLAVIVVVLAALPLSKGTEEEGGGGEAVAAVDAAAGTSSWPCCNKCGFCYLSDPPQCQCLDFSTVGCHPECKQCIRYTADGGVDIPPVHAYRCADILFNFCERRCTPAAVAASTK

SEQ ID NO: 260870 - protein, 70 aa, Zea mays
  Clone ID: MRT4577_169528C.1.pep
LKTMFMGSGEALAGRSWASSLIWVRAWPCWSSGALVLEVLWSRSFGGWGAEQPREPTLPLGLGLRKRKPV

SEQ ID NO: 260871 - protein, 85 aa, Zea mays
  Clone ID: MRT4577_169529C.1.pep
QLAAGLQEAHRSKVWQVKAQCPVHLNMQTRTRSMRWTASACQQAQSKVCVCARWLGGGHMSPSVIGASPFRSLACVCTCCRCAGF

SEQ ID NO: 260872 - protein, 65 aa, Zea mays
  Clone ID: MRT4577_16952C.1.pep
SFIFTKHKHRGGVELKRGGGSQRLHPAGFKFDCMAHALPWHTDGYVQTHALNAYPLHQMRQGIPA

SEQ ID NO: 260873 - protein, 114 aa, Zea mays
  unsure (1)..(114): unsure at all Xaa locations
  Clone ID: MRT4577_169530C.1.pep
XLHXEDXRGXAVXMRRRGPHNPYSESIVGASLEVIHKKRSGKPGVRYAGGEAVLREIKGRIGKTKGDMKAEEGGVGKSRKGDTKGAVGNDFGRPQADRCSELALWWCWGAFLDL

SEQ ID NO: 260874 - protein, 65 aa, Zea mays
  Clone ID: MRT4577_169531C.1.pep
VPISASNRDLITLLHCYLIPCMRTYVGVISERDMLSIFFFLERTGELRIIILREERSKVDRNIAP

SEQ ID NO: 260875 - protein, 97 aa, Zea mays
  unsure (1)..(97): unsure at all Xaa locations
  Clone ID: MRT4577_169532C.1.pep
GPVGTEGRGPHPMITEXXXHLVTPNQCRHGPSTTDVNRLSKYTQYNPTMINLFQNHEESNGRSIYTIARARSQSRNIILYIYHAKKNICTQPMIETT

SEQ ID NO: 260876 - protein, 62 aa, Zea mays
  Clone ID: MRT4577_169533C.1.pep
QSGHTDRWALFLSPQFNYWIPPQIFKVPFFFFKQSFFVVKNGAQLDLRKFGNTQSFAEKQTF

SEQ ID NO: 260877 - protein, 68 aa, Zea mays
  Clone ID: MRT4577_169534C.1.pep
RRMLGEVRTSFLSRNHKITVFFSLKSVNEIYSIINTHILLIMIIPTSYIFFFPCISTIIFFYFYFNYI

SEQ ID NO: 260878 - protein, 139 aa, Zea mays
  Clone ID: MRT4577_169535C.1.pep
GGKNRSLSITIITKEVHTSPHSPDPRARERINSPSAEPPLKRAKISGDEKGNPSNLGNAAKPHVFGGKPRARSKKPGGGAGQQERKQPLPEPRTRGGRKTRGQKHQPPGELLPRDPKIIFLLLPGLPCEPPHHGKGPLL

SEQ ID NO: 260879 - protein, 43 aa, Zea mays
  Clone ID: MRT4577_169536C.1.pep
PSPVFSHLPDRLPRVLVTPSRLALCPITTYILLLVTPPNYVNH

SEQ ID NO: 260880 - protein, 36 aa, Zea mays
  unsure (1)..(36): unsure at all Xaa locations
  Clone ID: MRT4577_169537C.1.pep
TQKNISSNSLVPQVKMGYWLNLLWSIPRRTLXSTLH

SEQ ID NO: 260881 - protein, 138 aa, Zea mays
  Clone ID: MRT4577_169538C.1.pep
MATKQPPNPYHLKWPQFGEPPPLFSPKTKRDGGPKGGGPHPHHQGENLHPGGFGPLAHPYPVLDNNFRGGGAPPPHNYPIQDPFGPFKQEIFPRGSSQFQGGTKKGPLGRGKTNPDPENPSVLEAKASPVGRWGHNPF

SEQ ID NO: 260882 - protein, 67 aa, Zea mays
  Clone ID: MRT4577_169539C.1.pep
RRKKRSIFPNTRLQNKSEPPRCEKKPRHGQLKNGAHRERNTSMLEHQNLTWGVHIPDFKYNPNLDKV

SEQ ID NO: 260883 - protein, 206 aa, Zea mays
  unsure (1)..(206): unsure at all Xaa locations
  Clone ID: MRT4577_16953C.1.pep
GAFARRSSQVCVIGFPRVFPPKTPGCVGPLVCWAGGPSKPVIPGPLFPTIVFCVGVPSELGDVFFGGLVFSPPGCVKPLNPFFSGVGFLVLLGKTPQNKGRAGWKSECFFVKVWDSREKLGKGPLXLFFGRTRPQCGLPPKGPPPIGWGGFRIFSGPLGPKVLGRAFFAFKIFPPRGGWAPPQLLKKKKKGGFVRAPPPFRFKKFF

SEQ ID NO: 260884 - protein, 76 aa, Zea mays
  unsure (1)..(76): unsure at all Xaa locations
  Clone ID: MRT4577_169540C.1.pep
HSSDPTTADKIFSLLRLIGLXGHADSTTIITECSESAIATVLTPYLSRETSSVCENPFVEPYKIQHAVLDGLLPLS

SEQ ID NO: 260885 - protein, 91 aa, Zea mays
  Clone ID: MRT4577_169541C.1.pep
FSIMWYRRSGQRLSTFMPRAIKSSTAADQSVSSYPRPASRRGRGDRYPDHQNGGVAGGADQSPPLQPRFAIRPSGSIGAMCSGPADVEQPG

SEQ ID NO: 260886 - protein, 97 aa, Zea mays
  unsure (1)..(97): unsure at all Xaa locations
  Clone ID: MRT4577_169542C.1.pep
LSDHQHQPEESTPILLEAIXTLPALSTANNPTHISQSRDETSNPMKEHRLRTGQQPTTQRVIYTQKRQNITHHQRPHIEKHEHLKLLTLIALFLSTY

SEQ ID NO: 260887 - protein, 50 aa, Zea mays
  Clone ID: MRT4577_169543C.1.pep
HTLRESILVGPLNGDIFVTVSLLFTFRAVSYKLFPGFYKSNVKKKALLRI

SEQ ID NO: 260888 - protein, 76 aa, Zea mays
  Clone ID: MRT4577_169544C.1.pep
PAGKININTRSPPPAHSTKPSSSTGVRQDLTKRTPKPHATLTATDRDDPSIHMDRRHPVCHLRTKPRTHLSPADGT

SEQ ID NO: 260889 - protein, 88 aa, Zea mays
  Clone ID: MRT4577_169545C.1.pep
LLRVRPINNKARVSSVAVRQRVTGVDRASILTIHGWSKEREIYIDLPEVKLLLHAYVYCISTTLLDTFINGTMLCLQTHPAIDLDMTL

SEQ ID NO: 260890 - protein, 91 aa, Zea mays
  Clone ID: MRT4577_169546C.1.pep
KAPNGVLKRPTPTHYGLPPGVFPKSWEGANPFRGGLRAGTVWVKFFNFFNFEIPFGGSKINAMGRKKGFSTLKNSPQGKGVVPPIKNPGGL

SEQ ID NO: 260891 - protein, 141 aa, Zea mays
  Clone ID: MRT4577_169547C.1.pep
CLHIGHFDNEIDMNGLETYPGVKRITIKPQTDRWVFPETKTGIIVLAEGRLMNLGCATGHPSFVMSCSFTNQVIAQLELWNEKATGKYEKKVYVLPKHLDEKVAALHLGKLGARLTKLTKSQSDYISIPVEGPYKPAAYRY

SEQ ID NO: 260892 - protein, 67 aa, Zea mays
  Clone ID: MRT4577_169548C.1.pep
AARATCSRPLAGPKGRLFFQALRSLRLLWIASRSVEWSRASFLPSVEAGTNGFHVLILGMRLGLLCG

SEQ ID NO: 260893 - protein, 76 aa, Zea mays
  Clone ID: MRT4577_169549C.1.pep
PPPFIFFPGGFGLAPSPNPKETGGFKLEGGDSGLQRGDPPGFPLPNTLAWGAVGPILGVGIVLGLKNTGALDQILG

SEQ ID NO: 260894 - protein, 58 aa, Zea mays
  Clone ID: MRT4577_16954C.1.pep
PRPGPGPSDGASKVTEIQVTVAFSHFGNGLVQRVPRWRHGFFQVVSNDYTHGLRYAIG

SEQ ID NO: 260895 - protein, 124 aa, Zea mays
  unsure (1)..(124): unsure at all Xaa locations
  Clone ID: MRT4577_169550C.1.pep
CMLKFGELHSKRLHXFITLTMDDKFLEIGVDHVGDRASSYKDSTNSLSENDCRYAIYDXDYCYWXDVQKSRIFYILWIPSCVXVNSQMLYASSIQRLKSVLIGIHAELLATDASEIILHEINDW

SEQ ID NO: 260896 - protein, 71 aa, Zea mays
  Clone ID: MRT4577_169551C.1.pep
NWFAKIKILVTPKFLQSRRCIKTTPHFKLVPPFHELLLLHARFFKLGPFFFFLPFFFFFFFFFFFFFFFFF

SEQ ID NO: 260897 - protein, 109 aa, Zea mays
  unsure (1)..(109): unsure at all Xaa locations
  Clone ID: MRT4577_169552C.1.pep
VSGPGPRRVQSPQARRNAAVSAEKSAEFRRXAPPEPAPRGRGTPPASPPXPAAAAPPXPIRRGPPARPPPRAPAATAAPRPPPPPRPPALCRAPRTPSSLWSVACAVAP

SEQ ID NO: 260898 - protein, 109 aa, Zea mays
  Clone ID: MRT4577_169553C.1.pep
MEKVFSEVGSKSEMLSIKLQREAIRADGQTQLSHEIALELSQRSAAAGLRPIGAVVFMQRGVLKVCLRTTDSTVNTSEIAKAYGGGGKRSSSSFTLRMDEFNIWTSVNS

SEQ ID NO: 260899 - protein, 89 aa, Zea mays
  Clone ID: MRT4577_169554C.1.pep
GSVLHNCSQRGTIWRCRFFKPRARSKNVLLRSRITIIEDDPFCYWSLTTISVARCIPFHLKASNLLLNGLSIMPPNCSPVIHIEEIILL

SEQ ID NO: 260900 - protein, 127 aa, Zea mays
  Clone ID: MRT4577_169555C.1.pep
LSPCQLLNKSLDVVQTGDVDTAKTYIILLLKKQNKNGTRIHYLVAANVKVVAASAKGSVCSSSYSSYSLASGAAALELLAWPSFPLTTNANVSVFLKSLAGIRSQIDSATHGSFSGQQHRRSAESQE

SEQ ID NO: 260901 - protein, 62 aa, Zea mays
  Clone ID: MRT4577_169556C.1.pep
GSVLHNCSQRGTIWRCRFFKPRARSKNVLLRGRITIIEDDPFCYWSLLTISVARCIPYGAKY

SEQ ID NO: 260902 - protein, 175 aa, Zea mays
  Clone ID: MRT4577_169557C.1.pep
MASTEMEMGVVGGGVNSSGGGSCGGLVVTELSHIKELVRQLEVHLGGSPDLCKHLASQIFSLTERSIGLITSSNLDGARRRKRPAGDAGLASPLSATPTSDVTDGPFQTTKKKRKVMEQRRQRVSSAGGENPVEDGHSWRKYGQKEILGAKHPRCYYPCASRSSQGCPATKQVQR

SEQ ID NO: 260903 - protein, 35 aa, Zea mays
  Clone ID: MRT4577_169558C.1.pep
MSVRVASVPYLEQMARWERQVERRQLFLRSYHFSR

SEQ ID NO: 260904 - protein, 74 aa, Zea mays
  unsure (1)..(74): unsure at all Xaa locations
  Clone ID: MRT4577_169559C.1.pep
KCFFIGLRSEVSRGCFTPGFVWWPLSPFNKVFLQLSAKGFRPGDKHFSGPNTGWILLFAXLXXLKTKPRMFSLI

SEQ ID NO: 260905 - protein, 121 aa, Zea mays
  unsure (1)..(121): unsure at all Xaa locations
  Clone ID: MRT4577_16955C.1.pep
ISKAGFVEDHSSLALLPNIVAGLHHTGVGINYSHIYTYFTDKTQSNTNLLTLNYFIDHAIVINLYDIEKIXHHTFYNXLLVTPQQHPSLLTESPLNPIPNRXKYNINNFXTFIFTAFYVAY

SEQ ID NO: 260906 - protein, 241 aa, Zea mays
  unsure (1)..(241): unsure at all Xaa locations
  Clone ID: MRT4577_169560C.1.pep
TRPARTTGLEQRRQRVSSAGGENPVDDGRSWRKYGQKEILGAKHPRXHIYLTQTRIVDLDWNRALSDDLRRAKPRRGYYRCSHRYSQGCQATKQVQRTDEDPTLYDVIYHGEHTCAPHRPAAAEHNPDARGHLQTLSAGLTVKTEGLPDPPRGRGAATPLYLSASSTPPSTSENWGVSPATSGSTHVASFRPFEAAEWRGQAEHQEVVSALVAAIAPPPAVDSLDDLLIDIDLDDIASFFA

SEQ ID NO: 260907 - protein, 50 aa, Zea mays
  Clone ID: MRT4577_169561C.1.pep
PQIDVTQFGYFKVLGKGVLPPKPFVVKAKFFSKVPKKKIKPPGGPFLLPP

SEQ ID NO: 260908 - protein, 330 aa, Zea mays
  unsure (1)..(330): unsure at all Xaa locations
  Clone ID: MRT4577_169562C.1.pep
MATTETMEMGVVVDGVSSNGSGGCGGLVVTELSHIKELVRQLEVHLGGSPDLCKHLASQIFSLTERSIGLITSSSSSSGLDGARRKRSAGDAGLASPLSATPTSGVTDGPFKNTKKRKAMEQRRQRVSSAGGENPVDDGRSWRKYGQKEILGAKHPRGYYRCSHRYSQGCQATKQVQRTDEDPTLYDVIYHGEHTCAPHRPAAAAAQHXGRARAPADPERRPHGEDRGPAGPVGAAGPGRRHALVPLRLLHAAVHVGELGRVARDLGLHPRRLLPAVRGRRVAGAGRAPGSGVRARGRHRAAARRRQPRRPAHRHRSRRHRELLRVTRAL

SEQ ID NO: 260909 - protein, 221 aa, Zea mays
  unsure (1)..(221): unsure at all Xaa locations
  Clone ID: MRT4577_169563C.1.pep
GSWRCTSAVPRPVQAPGLADLLPHRALHRPHHXPPTSTAPDGGSGPRVTXRPRLAALGDAHQRRHRQAFPEHQEEEEGDGTAEAEXALPAARTRSRTAIAGGSTARRRSSEPSTQGWQAHASRSDSQSSSGGAGRTRPRPFSSPPRRRALCRSAAPSPHRPRPRTGACPRRPRTPTTSSLSRLSRSPPPLPRSSSSRKSCQRSTEPTASFSRTSTSMSQAS

SEQ ID NO: 260910 - protein, 302 aa, Zea mays
  Clone ID: MRT4577_169564C.1.pep
MASVIDGNGGSRLVVTELGHLKELAMQLEGHLGGSSPDLCKHLASQISSITDRSISLLITATSSSPHGGASDAPPFIKATTKKRKRMDKKRHEVRVGSAGGGGGDHPADDGYSWRKYGQKEILGAKHPRGYYRCTHKSSQGCAATKQVQRTDEDPAFFDVVYLGDHTCVQSQRAAATAGRQAAADAQAPVYDANLMVKTEGPALEPEQQRRGWDDAPTPFLFSSTPACLVQERSPFSAPSTSENWGVSPATSDSNHVVSFPPFEVAAAAAAQFEFEEVMSAMDRADGEFLEDLDIYVSSFLA

SEQ ID NO: 260911 - protein, 232 aa, Zea mays
  unsure (1)..(232): unsure at all Xaa locations
  Clone ID: MRT4577_169565C.1.pep
LPRLLLLVSFQIASAAAAVASDEALLGXSTERCARTFYVAVLLSVVLWALIFYSTSLLQSGDALSKPPAFFSPRSGRPDPSCAGRYVYMYDLPPRFNADLARDCRRLSASTDMCRHVVNDGFGSSFTDGAGGSLPESGAYATDQYMLELIFHARMRQYECLTSDPAAAAAVYVPFYAEFDLAMRIDNSNMSARNALPRDMADWLVRRXEWRAMGGRDHFMVGSRPTWDLLCD

SEQ ID NO: 260912 - protein, 67 aa, Zea mays
  unsure (1)..(67): unsure at all Xaa locations
  Clone ID: MRT4577_169566C.1.pep
GGGGGXKHTKFFPHMQFKNPQLPQETLKRHTPLDGLIKVQVKHFFFTTNTGGGGGSXFIXXXXXTSS

SEQ ID NO: 260913 - protein, 117 aa, Zea mays
  Clone ID: MRT4577_169567C.1.pep
KFDIKGNLVVFLFFFDQKPKIHSDPKNTTQRGLICSNGATMDDHTFVRHGGFRSSGNRTPRGGRRESHCAAPPCAGVEAAVPEAFPASSATLAAFFTPAGAVAGAGSTPGQSRQAQC

SEQ ID NO: 260914 - protein, 267 aa, Zea mays
  Clone ID: MRT4577_169568C.1.pep
TTPPGRASSTPPEGTAPATRASFSYPTLATRPSPGATQPSSGPMNPTSLSPSSMTTAARISTPPSRPPSTSSPAASSPPSPPPPALSPPPISLPRSMISPRIAWASPIGCRPPSSRRISEPSTPSGLCRTHLSTPWSSVYSQTSRSRCPILKLPRMPPSAPTHTPFRVSGGAGRGRRNSSRTMTPMRTGTLARGVPPTWILMWTLTAGEDPEAGAGAAAARVRRVRVLKWCRVMQMPAWTKMRFKTNWISRRLLRCCCSFCPSPRIL

SEQ ID NO: 260915 - protein, 104 aa, Zea mays
  Clone ID: MRT4577_169569C.1.pep
MENGAPADPSRVRKPADGPAALILHFSSPEAIPSVDDINSIFRIHGPIVERETVITKKSKIAKVVFSKSADAESAYHSSGKHNAFGPSLLTSEIKYLPSDPQAS

SEQ ID NO: 260916 - protein, 194 aa, Zea mays
  unsure (1)..(194): unsure at all Xaa locations
  Clone ID: MRT4577_16956C.1.pep
MSDSEEHDFKSKDDAATSKTYPQQADTARKNGFIVIXNRPCKVEEVSTSKTGKYGHALCHFAAIHIFNARQLEDIGPSSHNCXDIPYANRTEYQLIDISEDGSVSLLTSDGSTKDDLRLPTDETLAAHIREGXSKXKDHVETVQTAMWEEQICAMKDVGPQELPWIWILNPTVSQLKSEKNVYTKGLLPRHSLA

SEQ ID NO: 260917 - protein, 80 aa, Zea mays
  Clone ID: MRT4577_169570C.1.pep
FSLRVLMQSRHITVPESVMHLVHRFSHLKLSTCHRHLRFLKCRSLDWWIRRGTHPSILPNQNSVFTFLSNFHMVNSGNAP

SEQ ID NO: 260918 - protein, 155 aa, Zea mays
  unsure (1)..(155): unsure at all Xaa locations
  Clone ID: MRT4577_169571C.1.pep
GKPGAGPGPEPNPGPTSPPLGGRPDQKGXVNLKDGPPPPEQGNKAEPPNRGGKNPGNTHRDGTKSPPKPNRATGXHNKAARQQAXPLPRAKQKKRGERPPNQGPRXGNTSPPEGQQRREKRPRAPQAGGPREPILSTSHKGPANRTNETTARWTK

SEQ ID NO: 260919 - protein, 97 aa, Zea mays
  Clone ID: MRT4577_169572C.1.pep
LPRLDYHWQDINVHARDSPSSETKARKLPTHSQITRLQEFFQVTGDADHRLIKCGSIIGTSATKNAYGLDLNEASFTLGCVQQNEAHDRNTSDLRRE

SEQ ID NO: 260920 - protein, 58 aa, Zea mays
  Clone ID: MRT4577_169573C.1.pep
RVRYIGHVSSGMKPSKLEEGLRAIKELVGVGFAVVKHTHRCSGGRGYNRRYIRSRVKS

SEQ ID NO: 260921 - protein, 225 aa, Zea mays
  unsure (1)..(225): unsure at all Xaa locations
  Clone ID: MRT4577_169574C.1.pep
MGIVEVQNTTGKLSAKSVGNSTVRAAVLANGGILVCEAFGRVEVDIPVAMTLNTQSERLCIGCSMPVYPSLPKGDLFSFYETCQSYSWMIADEKVVTFQSAKXGDTDLTKDYIQMEKRVHGFPMAAANFLSVIXGRSAGKTKISISVVCDFLLPGTSGSVVSYNASKIILVVPDPPLALALPMTWLFPPFYTTMSLLPRSANSLGEPNSLDLELVWYSLLGGMVG

SEQ ID NO: 260922 - protein, 135 aa, Zea mays
  unsure (1)..(135): unsure at all Xaa locations
  Clone ID: MRT4577_169575C.1.pep
PKNFGLSQRKYFXLIKGKIFFGLALPNAPKGVVLSPPKKGLRGPSEFXRFSKGKXRRSFKVFFAEVLGGKNPPNDPCPLEDAKASMFFFPQPQKAWGKTLKGPFRFQKKLQKRGQKKTLGSHGDGPHVPPVFFLR

SEQ ID NO: 260923 - protein, 96 aa, Zea mays
  Clone ID: MRT4577_169576C.1.pep
TYSLTYIKLSNISFLNTTTMGCDDNLIYYPFSKLKKNQTSNQSTYSSSNQTTISSHPTSFSSTSNTNSLSNPLILNTYSSQITTYSSTSINFINTT

SEQ ID NO: 260924 - protein, 44 aa, Zea mays
  Clone ID: MRT4577_169577C.1.pep
SDVVPGIIPARSVYPVLVPSIHLDIVIKRGILDIGGDVVVAHGR

SEQ ID NO: 260925 - protein, 86 aa, Zea mays
  Clone ID: MRT4577_169578C.1.pep
SPPPKPASCRSPCRSTYSSGKVISSRGDRRGVLGCHLSSYDPLYVQLMHSSHRPVCYLLRPEVLEIVNKIPFEDIQAPLSTNFSDS

SEQ ID NO: 260926 - protein, 103 aa, Zea mays
  Clone ID: MRT4577_169579C.1.pep
LDVATKGHGGLGVFVGVCIISAIFGTADANCQGALVGDLSLMCPEFIQSFMAGLAASGVLTSALRLVTKAAFESSKDGLRIGASKSEFCEPFADLVKLFILWY

SEQ ID NO: 260927 - protein, 139 aa, Zea mays
  unsure (1)..(139): unsure at all Xaa locations
  Clone ID: MRT4577_16957C.1.pep
DRPGEPPGGVPPGRPQGGNESXDGRTRKISGLGAGMXRLPTLSPSTEVSALLTDLVPACIPGSTVXVERLGPELQRMRASLVRRCADAGAQLEAHYSDLVAGLEDSLXDHLSLLPYFGDYLVLGXPEHGLLAQHVPVPS

SEQ ID NO: 260928 - protein, 88 aa, Zea mays
  unsure (1)..(88): unsure at all Xaa locations
  Clone ID: MRT4577_169580C.1.pep
MAPTVMASAGTSVAPFQGLKSTAGLPVSRRSNGASLCSVSNGGRIRCMQGWPFEGIKKCETLSYXPPVNTEALLEQEDYLVRCQGAPG

SEQ ID NO: 260929 - protein, 70 aa, Zea mays
  Clone ID: MRT4577_169581C.1.pep
MTINPYFYVIKHTNTGTVCIKDYMDDTPHLINIHTGNVTDQFTHFDTLITTRTSITIIPCHTRMKVSMNP

SEQ ID NO: 260930 - protein, 126 aa, Zea mays
  Clone ID: MRT4577_169582C.1.pep
TRPPTRPEGSGDDGDLDSDVIGSHRTCATSVPEVDRFYAALEGPELDQLKPSEDLVLPADRTWPFLLRFPVSAFGICMGVSSQAILWKVMALSVPTTFLHVTAKANLALWCISVALTCAVTAVYAC

SEQ ID NO: 260931 - protein, 192 aa, Zea mays
  unsure (1)..(192): unsure at all Xaa locations
  Clone ID: MRT4577_169583C.1.pep
MRASRRNIDLGVPAPKEVYNYRVYVLALISSMGAVMFGYDLGFIGTVLELESFQHDFGLADKTKSEKSAFSANVVSLLQAGCIVGSLGAGPLSDRFGRLVTLFFTAAFYVVGSAIQTGAHGSEGLMLAGRAIGGVGVGAASMIVPLYVAEASPPHIRGRLVGIYEMAVXMGTVXGFWINYGLANNLPATSSQ

SEQ ID NO: 260932 - protein, 90 aa, Zea mays
  Clone ID: MRT4577_169584C.1.pep
KNAKGRQDFCLVDVMINLDRNFGVDQNFRLQLSDQLQNRAFLIVNLTNCKNPDHDFYDTSQVSECISTSDDSGSPFVRSQWQWRCCVARR

SEQ ID NO: 260933 - protein, 96 aa, Zea mays
  Clone ID: MRT4577_169585C.1.pep
PPPPPRNPRRRGLCTGGGGGAPWAKPPPPRGGGHLKKQGPNRFPPRGRGRTAPPGGGARLARVGLRKARESPPGLPMMGRLWEPQECRIFSGGAQY

SEQ ID NO: 260934 - protein, 64 aa, Zea mays
  Clone ID: MRT4577_169586C.1.pep
KVTALELQLDLHENERLGSWFLTMIRTSRNVVAFQYSSVLFIVLVVPAFYVKCPLCFFCLFFFL

SEQ ID NO: 260935 - protein, 67 aa, Zea mays
  Clone ID: MRT4577_169587C.1.pep
ESGTQGQLIPSYLTLQNHARGFLCAPTQNHHNGWAFSLVNTHILATKKGGRPFYIFGQKIENASRYI

SEQ ID NO: 260936 - protein, 83 aa, Zea mays
  Clone ID: MRT4577_169588C.1.pep
LCRPAASGSWRCVPRASCCPLWRGACGCRRSLSGVSSFASLAPSRSVCVPCRVVALRAGSFCPCFSGGWAGRSARLCGRGVPG

SEQ ID NO: 260937 - protein, 85 aa, Zea mays
  Clone ID: MRT4577_169589C.1.pep
SLIKVQLSHAISILGKRHAAIIVAYAATSVGGRIGVPDPSSSTQVWSGFWPPIFLALVFQTMLLACCHLVTFSLYSGIMIMASLF

SEQ ID NO: 260938 - protein, 101 aa, Zea mays
  Clone ID: MRT4577_16958C.1.pep
WTALRRGQLKAHQWEEVAAKVASRCTATPGVLAHRSTGTQCRYTLEKLRKRYRTEGARPVTSLWPYFRRMDLLELRPLAVASSAYPAATGSPPDADGDQQG

SEQ ID NO: 260939 - protein, 96 aa, Zea mays
  unsure (1)..(96): unsure at all Xaa locations
  Clone ID: MRT4577_169590C.1.pep
PTLRRTFVSTRASLHRHSGLSVAGLAAHVKXNVSRTKSQAVSDEKVXYGKPISCKELAHRVSSYVHVCTLDWWLRPSGCGTILAGYDRDRAQVDMI

SEQ ID NO: 260940 - protein, 117 aa, Zea mays
  unsure (1)..(117): unsure at all Xaa locations
  Clone ID: MRT4577_169591C.1.pep
MSGGQAPPSSSTTTRRYYGVALLGEYLTPRPRWSPPPEYGEYDRYENEDNEHMHEHHLGEDGGIDDGDFGLYDKYEVNSDPRCSHGHNITXSVADAADVXTGGYLCPRHHEHTYKGH

SEQ ID NO: 260941 - protein, 79 aa, Zea mays
  unsure (1)..(79): unsure at all Xaa locations
  Clone ID: MRT4577_169592C.1.pep
PGGVFFFFFFLVFFFFFFFFXLTAENKNHPFPQTWFILMYNPNSTSPTSLGGGGGNKKTHSFPXINKSTYLPPFPPQKQ

SEQ ID NO: 260942 - protein, 68 aa, Zea mays
  Clone ID: MRT4577_169593C.1.pep
FTGAGLGCSFARSEPNRMIAALSRCLGTYSNCKESWRALQGPGMAQDLSWVPPAVLYGAVLVKGKFQW

SEQ ID NO: 260943 - protein, 85 aa, Zea mays
  Clone ID: MRT4577_169594C.1.pep
WFIYRDSIALRAIFGICPHNPLLGVLNTPMYKTPRRTGPHAHGGLPGTVSIARTTTCRLQKRATQLLGLTLARSLRGKGKPIERG

SEQ ID NO: 260944 - protein, 229 aa, Zea mays
  Clone ID: MRT4577_169595C.1.pep
MEAAAENKEAEQEEQQLPHAQKDNAPAAAEEDEADSEETERRNRDLKSGLHPLRHKLVLWYTRRTPGARSQSYEDNIKKIIDFSTVESFWVCYCHLARPSSLPSPTDLHLFKDGIRPLWEDPANQNGGKWIIRFKKAVSGRFWEDLVLVVVGDQLEYSDDVCGVVLSVRFNEDILSVWNRNASDHQAVMALRDSIKRHLKLPHSYLMEYKPHDASRRDNSSYRNTWLRG

SEQ ID NO: 260945 - protein, 69 aa, Zea mays
  Clone ID: MRT4577_169596C.1.pep
EHVVVDPLSLGPVALLVAGVPFLGCPSHHRFLQPDLQLNMPFLASMLDCTLHTLFKAYCRDGTRWSWLG

SEQ ID NO: 260946 - protein, 83 aa, Zea mays
  Clone ID: MRT4577_169597C.1.pep
KKNSPYFFFFLKVKCKSQRFKGLINQTRRGSSATSHKKGGTQRPCPKASHKGSPQILLTTVITSVATKPPGSRSHCIVSLDRS

SEQ ID NO: 260947 - protein, 63 aa, Zea mays
  unsure (1)..(63): unsure at all Xaa locations
  Clone ID: MRT4577_169598C.1.pep
LQVMDNENKPKAGEVVKRLIAEDGWKGLYRGLGPRXXSSSAWGTSMIVCYKYLKRLCAKVEEV

SEQ ID NO: 260948 - protein, 362 aa, Zea mays
  Clone ID: MRT4577_169599C.1.pep
MDTTSRAAKIPSLHQTEINWDNLDKTKLYVVGAGMFSGVTVALYPVSVVKTRMQVASGDAMGRNALATFKNILKVDGVPGLYRGFPTVIIGAVPTRIIFLTALETTKAASLKLVEPFKLSEPVQAAFANGLAGLSASTCSQAIFVPIDLISQKLMVQGYSGNVRYKGGIDVARKVIKADGIRGLYRGFGLSVMTYAPSSAVWWASYGSSQRIIWSALGHLHNKEEAPSQLKIVGVQASGGIFAGAVTSFVTTPIDTIKTRLQVMDNENKPKAGEVVKRLIAEDGWKGLYRGLGPRFFSSSAWGTSMIVCYEYLSMFRLPLPNLYLCSWFLNHCIESTCMCICSGICYCIPCRLILSIQALLI

SEQ ID NO: 260949 - protein, 61 aa, Zea mays
  unsure (1)..(61): unsure at all Xaa locations
  Clone ID: MRT4577_16959C.1.pep
RCAPVLESKRRPLVRSMHRSALSCLTTMSRMIPLNYMRLYDDIXSLVYTAIIATRMTIDSR

SEQ ID NO: 260950 - protein, 262 aa, Zea mays
  unsure (1)..(262): unsure at all Xaa locations
  Clone ID: MRT4577_1695C.1.pep
MDRSTSLLRLILLALGAALVLLVVRSAFRLPRGIDTPTTSLFDDEATAGSSCTRFAPWGCRQADRIKQKPPSHENDVPRHPLDPLTISEVNRARELLRAHPPFASSPSSMFVHSLALDEPDKPVVLSWRKGVDPLPPRRAVAVVRFRGEAFVLAIDLASGAVTPLPVPASGYPTMTMDEQVLLCYTPFRDPAFNATIQRHGVRLSDVACLPISLGWYGPSEENRRLIKIQCFSAEGTANFYMRPIEGLTVLVDMDTXGSGPH

SEQ ID NO: 260951 - protein, 669 aa, Zea mays
  Clone ID: MRT4577_169600C.1.pep
MGKNKKGGDSSHHSGNKRKHEPSPPSEDFGDFEYSEEEFSFESEGLPVYASPPVSSDDSNDSQGIATEVWTYIRAIERSVLEGSDGSEVSPDKENSSDSSEGECGGDSDDEGDGGDGGNDGDDDGNGRGSGGSSKASGKAPLERGLTTEAVVADFVFKNIQPLKDRAYPAYLYSGITDSTRVTNKKIPTEDLVSRLDMILRESSDSTHAEPMAITIGQELNKAAKTRKPEGTRPKHPRQVSRLTAPVEEKKNKKKRWLRQLSCLDQDVGPSAPVCDEVPAEVLSKVDPNGGVHVEVIVRTFDEDKEEEEEVPLIHKNSRHYRALSALVSLQELSITDFEQALEDVVPEDMLSEPIADGMMVVCSEIPDMGLEVSQAVSHASSTLEGSLQCQDVGQDCPTHMVVTEDPSALEVAVAENPVLKGGAGSHPAPEGVAGSDPALMGSASCNLAPEGVAGSHPALVGGASYNLAPEGVQIWLGGALSLTKNIFNNKPTQLDGTLILRRNILKLNSERAAHEEERRALAASRDNLDRLYRDASNSLTILERNHRFTMSDLDHHRRELQVSQDEVLWLRQLVSSKDSIIKDLHTSKKLVAQELVAARLATKVSEDHYTILKAQRNKAMDKAIRAGRIMMRRPGVVVPDDIVADVKAAPYASSRPSSSIAPAKDIAK

SEQ ID NO: 260952 - protein, 76 aa, Zea mays
  Clone ID: MRT4577_169601C.1.pep
ERGKKKKKKKKKKKKKKKKKKKKKKKKKKKKKKKKKKKKKKKFLPWPGKTLSGKLWGKSKKPGGRFELSFKGPKSP

SEQ ID NO: 260953 - protein, 201 aa, Zea mays
  Clone ID: MRT4577_169602C.1.pep
MAFSPRLAVSARLASRAFTSVRPVVPLTAARCFHSTPISMGEHPVATLNEELIPRLPPSSPTLFEAKKKKNLTFEAIAKHVGRDEVAIAALFYGQAMASPEDVQKLSEVLEIDPGKLESQLGGFPNRGSTLDMPPKDPTIYRLYEIVQNYGQAYKAVMHEKFGDGIMSAISFSTKVEKETDDKGEWAKITLRGKWLPYSRF

SEQ ID NO: 260954 - protein, 68 aa, Zea mays
  unsure (1)..(68): unsure at all Xaa locations
  Clone ID: MRT4577_169603C.1.pep
VHCAMREAIRAASKEFSICSGPAKAAVTFQMNVPTTMPVVKELCXLDVVERYLQSVSIGPTAPRAIIK

SEQ ID NO: 260955 - protein, 63 aa, Zea mays
  Clone ID: MRT4577_169604C.1.pep
TREGQYSLKDAVQVAAIAAMCVQPEADYRPLMADVVQSLVPLVKNRSNQKACNPNVQSSKPLD

SEQ ID NO: 260956 - protein, 73 aa, Zea mays
  unsure (1)..(73): unsure at all Xaa locations
  Clone ID: MRT4577_169605C.1.pep
RXRPGRGAXDXXDATKASGAGSRPAAPRVPVRTPCGGRAWRRSATAAASWRASSSELRGDGKKEVEVEVVAFG

SEQ ID NO: 260957 - protein, 421 aa, Zea mays
  Clone ID: MRT4577_169606C.1.pep
MTDGSDEYKRDESVTLLVIVSLAALSLLSLIAAFAYYCYITRKVSRRLQSLHIPKRSSSPPPPPPPRALPPPQQQGKDSPFSSSASDGVAAAAAAMSVVVAGERGVQVFSYRQLHAAMGGFGRAHMVGQGSFGTVYRGVLPDGRKVAVKLMDRPGKQGEEEFEMEVELLSRLRSPYLLGLIGHCSEGGHRLLVYEFMANGGLHEHLYPTRGSCGGISKLDWDTRMRIALEAAKGLEYLHERVNPPVIHRDFKSSNILLDKDFHARVSDFGLAKLGSDRAGGHVSTRVLGTQGYVAPEYALTGHLTTKSDVYSYGVVLLELLTGRVPVDMKRPPGEGVLVNWALPMLTDREKVVRILDPASEGQYSLKDAVQVAAIAAMCVQPEADYRPLMADVVQSLVPLVKNRYNQKSCNPNVQPSKPLD

SEQ ID NO: 260958 - protein, 68 aa, Zea mays
  unsure (1)..(68): unsure at all Xaa locations
  Clone ID: MRT4577_169607C.1.pep
HCGDSKXFHFHYDSAKERRVTNSWWTTIPHLWRKLIRCIMPIEVAVGYVSTNAGYPIELLNIITLCCS

SEQ ID NO: 260959 - protein, 207 aa, Zea mays
  unsure (1)..(207): unsure at all Xaa locations
  Clone ID: MRT4577_169608C.1.pep
MRSVDAAGAESSDHHNLKKPRLEPRTKMPLADAVAAGDSGGGVDAAAAGADFFGMTVEEIVQHPLPGYGAPAVLSFSPDDRRVAYLYSPDGTLHRKVFTFDTARRCQELLFGPPDGGGLEEGNLSAEERLRRERARERGLGVTRYEWRSRHSGESSRAGIVVPLPXGVYFQDLSGSEPVLKLRSSPTSPIIDPFLSPMXSMIAYVRD

SEQ ID NO: 260960 - protein, 91 aa, Zea mays
  unsure (1)..(91): unsure at all Xaa locations
  Clone ID: MRT4577_169609C.1.pep
KTKCNFSNLKSAFKKFATTGAKKITISLQPPKYVVYSIDIHNKTNCQLVGMTKFFIKNLVILKPYLTAPIFGVNSPQHNFCPLKXIFTTTP

SEQ ID NO: 260961 - protein, 69 aa, Zea mays
  unsure (1)..(69): unsure at all Xaa locations
  Clone ID: MRT4577_169610C.1.pep
NRGRSWAVVWALLVRFFSCPQRVRNHGGSQGPVFVRGPGPSLGSGFGHVQLRIFKVTQPKENKDNRKEX

SEQ ID NO: 260962 - protein, 111 aa, Zea mays
  Clone ID: MRT4577_169611C.1.pep
ETTLYTDQFLRQNSASHYSPMCIHVAVDSSNPNLHSVISAHVSLPISRQRQTLHSLRRSPHQVASASPLRTPAITTNAILNTNSMPKTRDLSHKICFGKFLIDSVRTVNDI

SEQ ID NO: 260963 - protein, 605 aa, Zea mays
  unsure (1)..(605): unsure at all Xaa locations
  Clone ID: MRT4577_169612C.1.pep
LRVDGRQLDEVRPLYCESNTYPLLHGSALFSRGDTQVLCTVTLGAPGDAQRLDSIVGPPTKRFMLHYSFPPFSIDEVAKRGGLNRREVGHGTLAEKALLAVLPPESDFPYTVRVNAEVMASDGSTSMASVCGGSMALMDAGIPVREHVAGVSVGLVXQVDPATGDISNYRILTDILGLEDHLGDMDFKIAGTRKGITAIQLDIKPAGIPLDIICESLEPARKARNQILDRMDQEISTARGINDGSSPRLATLSFSNESLRKLLXPQEKIEQETGARVSISDGTVTIVAKTQEIMDKAIEKVEFLVGREIEVGRTYKGIVSSIKEYGAFVEFNGGQQGLLHISELSHQPVTKVSDVVTLGQSLSLRCIGQDMRGNIKLSLKATLPQPRIKKDLKNKDPLPSEVTGWAAVENMSSVDVDAQLSSTEHENGTTEEAAAFSTPSVIIRSAADCDAQDDANGSKKRAKVAKSSPRPNKPASECHDVRKATAKKATGATTKKTKKVKIEESVSNGLETSGSDVPEQSADNTSDQNQSPTKFQSGAMKLGDVVTAKVYQIRAYGLVLELSDGVRGMHKFEANGLKEFEVGQELVVKCSSFNAKGIPLFSLLD

SEQ ID NO: 260964 - protein, 90 aa, Zea mays
  Clone ID: MRT4577_169613C.1.pep
MALIIKSAIIAVFLVLGAISYTSVYCIGAIGTEDTPAPKPKPGMPCFHAGTSQYPCTTDGCRRLCEHQHHRSDKAYCKSISPGECCCPNE

SEQ ID NO: 260965 - protein, 46 aa, Zea mays
  Clone ID: MRT4577_169614C.1.pep
VSALFFPQTRIGRLVTDPPALPVDINHPALHVLVPPQYIEGLESSV

SEQ ID NO: 260966 - protein, 116 aa, Zea mays
  Clone ID: MRT4577_169615C.1.pep
FPDTYGEALANILVSLQMGVNIVDLSVSGLGGCPYAKGAPGNVAPEDVVYMLPGLGVETNVGLNKLMEGGGYISKHLGRPLGSKTAPALPKLAALKNLFKPSPKKCIGSRSPLPVK

SEQ ID NO: 260967 - protein, 136 aa, Zea mays
  unsure (1)..(136): unsure at all Xaa locations
  Clone ID: MRT4577_169616C.1.pep
MDFGSDANRNKGKKNKEGGQRQEGRRTSEPKPPEGPNTDKGRTRKKHCRQSKRPHEARQAREGTPPREGQSKEKPTPGRREGGXGQKGGRKERPPXTEGPPRQEGEKHGRPGRGGHKGGKEGPTNNQAQLAGRKEG

SEQ ID NO: 260968 - protein, 79 aa, Zea mays
  Clone ID: MRT4577_169617C.1.pep
GPRHPKLDRLHITEKPPRQHEVHAASPRSKASRWQRNLHTYKRGLRMSYTTTRSRTIAGAYEHLGAITIIGCINERRDS

SEQ ID NO: 260969 - protein, 110 aa, Zea mays
  Clone ID: MRT4577_169618C.1.pep
ACFKAVWVMDKIKWPRKFLGKQSFFKTKVFGGGISLFVEPFPLTSKKGWFVFFGFSLVGKNLSSFFELKKKKAPPEMGILFFFFFPISEKRNFDFCLGHPKSCGSFWLGS

SEQ ID NO: 260970 - protein, 117 aa, Zea mays
  Clone ID: MRT4577_169619C.1.pep
MGRLSNGDWLLVGNSIFSDDNGTEFRMQDDGKVAVYHGEECAWQNTAEQNWQVHGIKMQEDGNLVIYDNSGTGHAIWHTDTAGGKGNQSTTLVVQDDGNVVLYNEGGDPIWHTASNK

SEQ ID NO: 260971 - protein, 216 aa, Zea mays
  unsure (1)..(216): unsure at all Xaa locations
  Clone ID: MRT4577_16961C.1.pep
MLGHLVFTLCLASSAIAAPDGAGLVSAPVVGKSLKVRALPNSPSGGYAPKVVDCPSTRPKVRLADGLSDQEEAWVRRRRNNTIDPMTDLLSRVKISGFDAKTWIEKNKNNATALPNIAIAASGGGYRALMNGAGFISAADSRNNKTGPISGLLQSATYLAGLSGGGWLVGSIFANNFSTIPDLQKGNRDSDIWAFDRSIFRXPKXSXLGVLNTAEY

SEQ ID NO: 260972 - protein, 37 aa, Zea mays
  Clone ID: MRT4577_169620C.1.pep
VALLHDVNLATEDRDVMASSCSIIHALDGRLRRWTGT

SEQ ID NO: 260973 - protein, 79 aa, Zea mays
  Clone ID: MRT4577_169621C.1.pep
KNDVHLWTVSSQGFEHLMTSQEFQGKPCSNKTRGLYIWGGKKKHPSKATKRHGLIICHQNIETLLSWDRPFTTGGVHFV

SEQ ID NO: 260974 - protein, 85 aa, Zea mays
  Clone ID: MRT4577_169622C.1.pep
RNSGGTPGAAPGAEKLERCPVGPHIFIVQSRPPPPKTKKFLWVPGQLKKKGNWPKKKMDFLAPGRKNQSFFKSHPREKKNLLGPG

SEQ ID NO: 260975 - protein, 73 aa, Zea mays
  Clone ID: MRT4577_169623C.1.pep
NSLLVFPPPFGFGFPFGIFNQNSWSKFLKKQKNFFLEKWNSPHFFFKPPFGFFSQIPHPPNFGRTPGGFPPKI

SEQ ID NO: 260976 - protein, 70 aa, Zea mays
  Clone ID: MRT4577_169624C.1.pep
SSPPRPMFHGQQLMCIQRLRTMQTRSWDRLESLQAPNPSSRYQAPEIRKHLMWPIPVSDSQYSPLEHHIC

SEQ ID NO: 260977 - protein, 32 aa, Zea mays
  Clone ID: MRT4577_169625C.1.pep
MVSVLHHLFPLDALLLIVAAVRSGNLYRDQQL

SEQ ID NO: 260978 - protein, 122 aa, Zea mays
  Clone ID: MRT4577_169626C.1.pep
LNWIPEKLSGKILRLLGGRITKAVTWGKRGEKKPVEGASMGSSLTQLYSFRRGQQWGSPFRARPKVGFWLHGLVFGLKVEHVLSKSITGTHPIQMTTGFYAIGVGGTIHSQFQPGVRGVTWG

SEQ ID NO: 260979 - protein, 74 aa, Zea mays
  Clone ID: MRT4577_169627C.1.pep
LYTVIIMCVDLEEVIIIMFTQLAIHVHVLGSETYLNQLTIQCRLGVNYPRLSQSYYFFFFFFFFFFLRGNLFYC

SEQ ID NO: 260980 - protein, 90 aa, Zea mays
  unsure (1)..(90): unsure at all Xaa locations
  Clone ID: MRT4577_169628C.1.pep
MASAYDDHSMRLSAPKHRLLDXLGGSHAPNXSSGSHKSMECLTLILMIRNRTLYALNYREVMSILMQRTILVDGKAKTDKTYPAESMDVI

SEQ ID NO: 260981 - protein, 68 aa, Zea mays
  Clone ID: MRT4577_169629C.1.pep
KKKKKKKKKKKKKKKKKKKKKKKKKKKKKKNPKKKKKKKKNFFPSPGGLLKGQFFHFSFPLGAVGPSF

SEQ ID NO: 260982 - protein, 84 aa, Zea mays
  Clone ID: MRT4577_16962C.1.pep
TVMVLLICNTYFDVSYWFVLRWNFIKAKAHQLISLPSVNIEDCENIPISDQVMLTAGTIDPCVVACCVANVSEAVATRYFLQRT

SEQ ID NO: 260983 - protein, 236 aa, Zea mays
  unsure (1)..(236): unsure at all Xaa locations
  Clone ID: MRT4577_169630C.1.pep
MATRYWIAALPVADDNVAAGKTALWARLQDAISRHSFDTPLYRFTVPDLRPGTLDSLLALSDDLVKSNIFIEGVSHKIRRQIEDLERAGGVEPGTLTVDGVPVDSYLTRFVWDEGKYPVNAPLKETVASIQSQVAKIEDDMKVRVAEYGNVKSQLGAINRKQTGSLAVRDLSNLIKPEDMVTSEHLVTLLSIVPKYSQKDWLSSYESLXDTFXVVPRSSKKXLYEGQWSMALYTVT

SEQ ID NO: 260984 - protein, 280 aa, Zea mays
  Clone ID: MRT4577_169631C.1.pep
MDGARVLIAAGATAVCCLVCAFWVFRSSSSSSPASPNKHQSPPTNFCGCASCGCRDAKPANGEMAVGGENKKKAPEPDPPEAPSMMEQLVPEITTHALSYLDYTSLCRLSMTNSAMRRAANDDGAWKALYHKDFTVEQGTINPPNGWKAYYAATKAIINLNAEFYNIIREGSLPAMSRFWLNADYVKCIHATGEFCTGYNAVMESWGMLLNWGQDGGGQGIAFQIRDVRVRVLGEVAWVNMKANVLFHVTNVYELCNGRWYMVHHHSSLMADPPPHNMFA

SEQ ID NO: 260985 - protein, 43 aa, Zea mays
  Clone ID: MRT4577_169632C.1.pep
TQTNYPNLIEAYMVRMNKTKLCDWDKDLIRDKTKNDSYRGQIW

SEQ ID NO: 260986 - protein, 284 aa, Zea mays
  Clone ID: MRT4577_169633C.1.pep
MDGARVLIAAGATAVCCFVCAFWVFRSSSSSSPASPKKHQSPSTNCCGCASCGCRDAKPANGEMAVGGENKKKAPEPDPPEAPSMMEQLVPEITTHALSYLDYTSLCRLSMTNSAMRRAANDDGAWKALYHKDFTVEQGTINPPNGWKAYYAATKAIINLNAEFYNLISPGSLPAMSRFWLNADYVKCIHATGEFCPGYNSVMESWGLLFNWGQDGGQGIGFQIRDVRVRVLGEMAWVNMKANVDVDPLVFHVTNVYELCNGRWYMVHHHSSLMAHPAPHNMFG

SEQ ID NO: 260987 - protein, 99 aa, Zea mays
  Clone ID: MRT4577_169634C.1.pep
GTGSLIYNDVSLGRVVVGLGVPANVILGRGDCDPVRRFSRWSPRSPVLSSLVVKEWWWLSHARHPMALTVVIHSLAVDRVKKIRVLIRCSQRRKRKGTR

SEQ ID NO: 260988 - protein, 77 aa, Zea mays
  Clone ID: MRT4577_169635C.1.pep
PTISSSVHQFQHSKITVGCLLFIATNLSLPRVCQPAVVCGEHAVFTLAMSMWHVLTLVVLGISGHPDGIKAVQCVFS

SEQ ID NO: 260989 - protein, 100 aa, Zea mays
  Clone ID: MRT4577_169636C.1.pep
VLRPRSLSLGHPVRHSSSHAYTSAAFSMLPGRPLGVGPAHLRPAISISAAHSLWASHTIKVYLKKPVPCLAFPLQLVVVFFCTALRSRSSSSFTYLATSA

SEQ ID NO: 260990 - protein, 77 aa, Zea mays
  Clone ID: MRT4577_169637C.1.pep
LSSSCPSGLSPGLSLSYFQKSLHPTYLLPPLSILHIICLQSLIFSLSHPSSLPLLPSELSLSTHLPHCAPSISPNHS

SEQ ID NO: 260991 - protein, 49 aa, Zea mays
  Clone ID: MRT4577_169638C.1.pep
SHKVIEVGMQILNQHVVEFLNVDQHSQLAPGHTVDDTTISIDMIALMES

SEQ ID NO: 260992 - protein, 114 aa, Zea mays
  Clone ID: MRT4577_16963C.1.pep
MVVKIRLARFGRRNQPFYNIVVAHARTARNSRPLEVIGTYDPIPKTDPYDDSGKLYKDIQLDRARARYWIGVGAQPTDTAWRLLSMLNILPKKEFGPKKDEIKGVVQKDQIQIR

SEQ ID NO: 260993 - protein, 74 aa, Zea mays
  unsure (1)..(74): unsure at all Xaa locations
  Clone ID: MRT4577_169641C.1.pep
RRHVASEEDGGVGPHECAPAVEPQGAGQLTRGGGGGDGVSVPWPPPWLEIDRIAEWQQQRLDRNERNXGPAGLE

SEQ ID NO: 260994 - protein, 99 aa, Zea mays
  Clone ID: MRT4577_169642C.1.pep
PQGSCGCDCGEDENGLTWELVDQAVGASCSLRGRNLPRNANKRARVSHSRFDFEEDFGSANEEEEDQDPHDDVNVTGSEDAHDDVGGENTEAAPDEFED

SEQ ID NO: 260995 - protein, 80 aa, Zea mays
  unsure (1)..(80): unsure at all Xaa locations
  Clone ID: MRT4577_169643C.1.pep
ETVDGTTDDVLNLXTXKPQNMMSHLFKMMLFGIAKPFHDMRSPSCTGRILFPXYTQNAPWQVLNNVSDVRNLQVELPSAD

SEQ ID NO: 260996 - protein, 71 aa, Zea mays
  Clone ID: MRT4577_169644C.1.pep
PVRGWETVKSRPSRGWSAGRRIRPRAVLEAARGSFPTSTARATTIMDLGPGNGNPPYRLSMRPRFSLRREI

SEQ ID NO: 260997 - protein, 52 aa, Zea mays
  Clone ID: MRT4577_169645C.1.pep
HASAIHPPSMLLSLSTYKLETVIMFLARFNHLRSHGMMFVSYHIFKLATQVN

SEQ ID NO: 260998 - protein, 65 aa, Zea mays
  Clone ID: MRT4577_169646C.1.pep
STNGPHALTRSSSSKAYTNDCTWCDRAKQMVICVSERLMIDATIGITKWSSSWSTCGTLYRACKK

SEQ ID NO: 260999 - protein, 148 aa, Zea mays
  unsure (1)..(148): unsure at all Xaa locations
  Clone ID: MRT4577_169647C.1.pep
HWVPRGRPGLSLLHSAAASPRARRHRSSTAPATTAPPRARRRSYDTEGRFVPEKFEEIFARHARTVPDALTSDEIDQPLXANREPGDYSGWAGAEAEWKILYILGKNGDDLLRKDVTRSVYDGTLFSRLAPRWKSPDREKLISVVREN

SEQ ID NO: 261000 - protein, 60 aa, Zea mays
  Clone ID: MRT4577_169648C.1.pep
ICLKPSIFNQIRHDTYKGLFKRQTGSLGSHYQLNPNCSFNMYIYIIIYPSIYIYKIMRYH

SEQ ID NO: 261001 - protein, 60 aa, Zea mays
  Clone ID: MRT4577_169649C.1.pep
PQRPANYIELTSRANTASLGLGSFYLDDGRMHTNSGFSDSFFSNNRPTMGWLRQSCPPSY

SEQ ID NO: 261002 - protein, 73 aa, Zea mays
  Clone ID: MRT4577_16964C.1.pep
WSSSRPGSAARSVGSRASPGPSSASSAGRAGRQRPGRAHTPLPICIGFGWAAYMCVCVIYYYYLLCYMRRLLA

SEQ ID NO: 261003 - protein, 95 aa, Zea mays
  Clone ID: MRT4577_169650C.1.pep
MSCNSGNVQLRLQLLLSAAHAYACRLTLHTVAASIINSMGRAAPTTNGNSCRFQADIDGCGCDCNTVQLRIHLRLLVLHLTTDTARPARRWHAKL

SEQ ID NO: 261004 - protein, 95 aa, Zea mays
  unsure (1)..(95): unsure at all Xaa locations
  Clone ID: MRT4577_169651C.1.pep
XXNXVXRGXVXXYNWSSXLVEXXVXRSYRVPDYELNASKXXSKXATGASARRPXRXTLGXSRXKXXXXXAQPARPTRRXGPXRXXLXXGXXAESF

SEQ ID NO: 261005 - protein, 119 aa, Zea mays
  Clone ID: MRT4577_169653C.1.pep
GMGDTAAEVTEPRRPPVGYLRPLTAGFAGWCHVRSYLSVIDPLHQITQAHPVQQCLTSLSAFCRYLQCFDVQRSTEPTTYHAHFLMFLVKNRVALLNKICLPNNILQVCYRVHGSIMYR

SEQ ID NO: 261006 - protein, 89 aa, Zea mays
  Clone ID: MRT4577_169654C.1.pep
HLLTIQHFYTWAAPNARIGFSHSTGLTHQRSFWPLNGAAYRYNDRISVTDPLVYQAICQSRIHTIFTDINSFWQIINTIDFKYHVSTGT

SEQ ID NO: 261007 - protein, 63 aa, Zea mays
  Clone ID: MRT4577_169655C.1.pep
PPGKCLPHQWLGGPNIFFFGKLNPQGLKLAPPPQKKKKKKKKKKKKKKKKKKKKKKKKKKKKK

SEQ ID NO: 261008 - protein, 123 aa, Zea mays
  unsure (1)..(123): unsure at all Xaa locations
  Clone ID: MRT4577_169656C.1.pep
AAKRQGEKRARRSRRAHGKPQAEPRTGAERGEAASGGEGAGSGEPPPAAPAEAGAGEATRHNRGANGGKGTEQTDRGATEGAXKEAAAGSGDAPAPQQRRXDKGRGRKDEQTQDSKGGETAHT

SEQ ID NO: 261009 - protein, 109 aa, Zea mays
  Clone ID: MRT4577_169657C.1.pep
AWNSARALLCLADFRRFIRSAHEDKKGSILLMEFLGSYLAELSLLDYGCLRFLPSVVAASVMFGGGLTIDPNTNPWNTKLQKMTGYKVSELKDCIVAIHDLQLNRKCSS

SEQ ID NO: 261010 - protein, 77 aa, Zea mays
  unsure (1)..(77): unsure at all Xaa locations
  Clone ID: MRT4577_169658C.1.pep
YGQILGGLLPTCPPLFDLQLDKSKGSFLTVSYFSQELGSTSADYXKTXTTHHILTRSNNVMRDVIRIDMLKPDYKIR

SEQ ID NO: 261011 - protein, 95 aa, Zea mays
  Clone ID: MRT4577_169659C.1.pep
NSKEGQRSFGSRKSCKAKKRRIIQVTDVIHQTPPPVSASKIVIAETAEAEAAAAEATRAETTEIATARAEATGAEAAETTGAEATGVEAGATEDS

SEQ ID NO: 261012 - protein, 93 aa, Zea mays
  Clone ID: MRT4577_16965C.1.pep
KKCVPRKGFQIAPTSLLWGVPVCRHPLFSSKIKGVLKFLDAWYFPIVNLNQSIRAPKNSSLKNVGCFSSGCSPEITRVLKTLMKKKKPLVFPA

SEQ ID NO: 261013 - protein, 101 aa, Zea mays
  Clone ID: MRT4577_169660C.1.pep
LVGNSPWAPCFFFRTKKTFRAREIKGARANLKFFAVQKSPPRFPPPGVPGLKTPKGEPGFIPQLVKKFFKGFFFNVFIGPGPLPVIGIGFLPPPVAFFPGG

SEQ ID NO: 261014 - protein, 43 aa, Zea mays
  Clone ID: MRT4577_169661C.1.pep
SSACGDPEKYLVWDGIHLTEAAYRSIADGWLKGTYCSPGILRR

SEQ ID NO: 261015 - protein, 512 aa, Zea mays
  Clone ID: MRT4577_169662C.1.pep
METAFVVVLSFFFIVAIHRLLNRGESKNMSKQPLPPGPRAIPVLGHLHLLEKPYHLAFMRLAARYGPVFSLQLGSRAAVVVSTADCARECLAEHDATFANRPTYPTLHLMTYGGATIGHSAYGAHWRHVRRVVSLHLLSPQRVLSSMVPTITAEVRAMARRMYRAAAGGAARIELKGRLLELSLSTLMETIAQTKTYRPADDADTDMSPETQEFKQLLDAIISLLGLTNVLEFLPVLQTFDVLGLKKKIAAAAGRRDAFFQRLIDAERRRLDDGVEGQKKSMLAVLLALQKSEPENYTDEKIMALCFSMFIAGTDSTATAMEWAMSLLLNHPEVLKKAREEIDAHVGSSRLLGADDVPSLGYLHCVLNETLRLYPVGPTLIPHESTADCTVGGYHVPSGTMLLTNAYAIHRDPAAWTEPDAFRPERFEDGSAEGKLLIPFGMGRRKCPGETMALRTLGLVLGTLIQCFDWATVGGVPKVDMTQGGGLTLPRAVPLEAMCKPRQVMLDVLQKL

SEQ ID NO: 261016 - protein, 396 aa, Zea mays
  Clone ID: MRT4577_169663C.1.pep
MAIQMDKTSIIVCSVIGSLGLLSAILGFSAEGTKLTPYTILVYGDDCLYPQNPAIGLGICAAIFLVVAQITFSAVGGCCGCCRSRAIPSETKRIVSIVCAVFSWIAAVIAFALFIQGAAWNANVVRVEQAPYCPYLKDGVFAGAAVLALAATALSITSFIMQRTQPAAAATVTGASAVGTPNMPGAGAGGQSPSPEVVMGQPLFPSGKAHQNDYPVKPQGYEHEQQPHQVQQVPPPTESHHPPQGYAQSAAQGNVSHAPNHQLPPRPAAPAAAAAPAAVAAAAAASAPSVLQPALGTVAMGQPLPLQVPPQYCLPVPAPQIGGVDIPAALPSAAAPPAAGSGSTLSTAIRNEVVRQGIRMAAEVVKDSLFPENGGSVLSMMTDSTGDRGDAVQVTN

SEQ ID NO: 261017 - protein, 64 aa, Zea mays
  Clone ID: MRT4577_169664C.1.pep
GLTHAFVVKKKKKKKQKKKKKKKKKKKKKKKKKKKKKKKKKKKKKKKGGPVLGVPRGSVFFPVF

SEQ ID NO: 261018 - protein, 115 aa, Zea mays
  Clone ID: MRT4577_169665C.1.pep
SFVYPKNHLQHFSTTLVPKKNLYKTNIHLEKLAHKSTTSIFNGDLMLLRALPLQQCHKKSSQAPAIKATTLSMSSLSFSHSCFWRKKTCSSPSDSSHPTFPVHSPSATVLYYPPV

SEQ ID NO: 261019 - protein, 62 aa, Zea mays
  Clone ID: MRT4577_169666C.1.pep
LHWCFGPFSPCRAEGSMLLGFFTGLCSQASQVLLRNLKAGSTHLCQSMLVPQCSVCLRQCLT

SEQ ID NO: 261020 - protein, 96 aa, Zea mays
  Clone ID: MRT4577_169667C.1.pep
SDDPGFPSGDILFSALSIALLLLFVCGLSSCKGVSFPGCLFFPLWGLPWGVFCKGFAPLFFFWPCGLVCFSHVRFPGVLYFCRILDLFFLIIPPQF

SEQ ID NO: 261021 - protein, 231 aa, Zea mays
  unsure (1)..(231): unsure at all Xaa locations
  Clone ID: MRT4577_169668C.1.pep
VVGDTTGPIIGSSFVLILDNAKKHKKEHGDEFVSVEHILQAFTSDKRFGQQLFKDLKIVENDLKEAISAVRGSQRVTDQXLISLDMGALLAGAKFRGDFEERLKAVLKEVTASNGQIILFIDEIHTVVGAGAAGGAMDAGNLLKPMLGRGELRCIGATTLDEYRKYIEKDAALERRFQQVYCGEPAVEDTISILRGLRERYELHHGVKISDGALVAAAVLSDRYILXRFLP

SEQ ID NO: 261022 - protein, 106 aa, Zea mays
  unsure (1)..(106): unsure at all Xaa locations
  Clone ID: MRT4577_169669C.1.pep
RASHPPRRRHXPLPSPTPSLPDDSCXXPXXHLQKKHPXXXXTPPXPXXFXXLTNTPXXXSFKTPSLTTXSNISSXTSXPAVPQLXFFFFLTVDLXPLRFQFNFSYL

SEQ ID NO: 261023 - protein, 100 aa, Zea mays
  Clone ID: MRT4577_16966C.1.pep
IQCHPYDLLQQTNNVCPTKRWQRRRYVMDSRILLDHGLAVQADLAADGVRSQADAAHLAQGAMELVQIVSLLGEAIDHPERTAVGEQREVEGEEAAAQLV

SEQ ID NO: 261024 - protein, 58 aa, Zea mays
  Clone ID: MRT4577_169670C.1.pep
KQGVISETWYSSALLNSHNAHASTCLHRLGYYRFLQGYRFPDIGSLVKQYSTDTHRTN

SEQ ID NO: 261025 - protein, 167 aa, Zea mays
  unsure (1)..(167): unsure at all Xaa locations
  Clone ID: MRT4577_169671C.1.pep
MLGIRLELASPHFFGVADMIGPGGVKKSVDYCQNDKSTGKFPGKSHILKDAPNTLCRHILLENNDNELGTNSRYTQQVKLEQGMDMLKIFKNQVDDAXILDDLELYEEREKALXENKVRVHQQHLPRCIVIEPKKPYTALSDLVGHITKSIAEAERLDEAKTVGHLT

SEQ ID NO: 261026 - protein, 241 aa, Zea mays
  unsure (1)..(241): unsure at all Xaa locations
  Clone ID: MRT4577_169672C.1.pep
MRPSVMRSAAQLLRRRNYSSASGQQARKVAILGAAGGIGQPLSLLMKLNPLVSSLSLYDIAATPGVAADVSHINSPALVKGFMADDQLAEALDGADLVIIPAGVPRKPGMTRDDLFNINAGIVKNLCTAIAKYCPNALVNMISNPVNSTVPIAAEVFKKAGTYDEKRLFGVTTLDVVRARTFYAGKANVDVNTVDVPVVGGHAGITILPLFSQATPSTNALSAEEIKALTXRTQEGGTEVV

SEQ ID NO: 261027 - protein, 80 aa, Zea mays
  Clone ID: MRT4577_169673C.1.pep
ILSKPAQHCKQKKPFQLGRQISAVNIQGSDQTIQAGEQMLTNYTRAGSDLGRKCTRSNVAVRAGDRGHALRTASVAPEEL

SEQ ID NO: 261028 - protein, 109 aa, Zea mays
  Clone ID: MRT4577_169674C.1.pep
RPISAPSVEEIKPRKSLIMLLLVCVPPPLIPLVLCFEFCPPPPPKNVVIWTPFIMFIPPPPYVSFWMVNPSPKKKKKKKKKKQKKKKKKKKKTTHASADAGRTLGDPGC

SEQ ID NO: 261029 - protein, 136 aa, Zea mays
  Clone ID: MRT4577_169675C.1.pep
GKVLKRRKTGPKTFLPSERKAKNLLITKGGPTKKKGQTTPGFGPTKKKCPRFKSVKKNLCPLGFRGGRMVFSPSTSCVQVCLDYKFLCPRLKFRLPLWVVGPCNRFPDHGCLSPPPPSHDPNFFYKPVPQFFWGCL

SEQ ID NO: 261030 - protein, 61 aa, Zea mays
  unsure (1)..(61): unsure at all Xaa locations
  Clone ID: MRT4577_169676C.1.pep
GNYKLPKHCDNNEVLKALCLXAGWVVEDDGTTYRKIRSELWMTSPVRFLRRLGRDASRRRG

SEQ ID NO: 261031 - protein, 140 aa, Zea mays
  Clone ID: MRT4577_169677C.1.pep
VLSGRRAIDKNRPQGEHNLVEWARPYLTHKRKIFRILDTRLEGQYNLDGAQAIAALSLECLSYEAKMRPTMDAVVTILEELQDSGEADKRQGPKAGTKQAPAAAAASASKSSRKLRRRTLGGTKETTVGPNPKPLLARSR

SEQ ID NO: 261032 - protein, 108 aa, Zea mays
  unsure (1)..(108): unsure at all Xaa locations
  Clone ID: MRT4577_169678C.1.pep
LTRAVYLTGDXAEENMASELGCFHRASHKGHAGAHIASGSLFVNGXEIPAVITRVNSGKSSXNWVKCLKKNPXQDPLKLAKEQVQNPAEAGCDLGLQLLKRLVTYENP

SEQ ID NO: 261033 - protein, 133 aa, Zea mays
  unsure (1)..(133): unsure at all Xaa locations
  Clone ID: MRT4577_169679C.1.pep
KENPFFDSFTNPKNPYPFLQRAPPSYKSHTPLAKFPKLHFPPKIAPRNKPQLPSKKKKPKPFTLKKKIIAPLVVPPANHQGASYTGSSAAKPKIKLGGPPNPTQKQDIEAWISPLMVGWGIXXIQIQNPLPAC

SEQ ID NO: 261034 - protein, 56 aa, Zea mays
  Clone ID: MRT4577_16967C.1.pep
TGFSLHVLLTCCRRSSPGPRRPTYWPSAVFVTVPSFRTAHTPRSILLAEKELLSYS

SEQ ID NO: 261035 - protein, 170 aa, Zea mays
  unsure (1)..(170): unsure at all Xaa locations
  Clone ID: MRT4577_169680C.1.pep
REKLFSYPEPRRPQHQARAPTRETETALPNQGTDDHPSFKLVIDGDGGTGKTTLVKRHLTGEFEKKYEPTIGEEAHPPESTTNCGKIRHHCWDTARQEKTGGPKDGYXNHGQRAIIMPDVTSRLTNKNDPTRQTDPRRACENIPTDLCGKKADEKNRQGKAKQDTFXHRK

SEQ ID NO: 261036 - protein, 149 aa, Zea mays
  unsure (1)..(149): unsure at all Xaa locations
  Clone ID: MRT4577_169681C.1.pep
RQRIAQHLPKPAERELLTSTYRETTEEGCDSPAASDHQNLITASVTKSGLMKVPPRAAPTAAEQDKAVVPADYAAGYHSAXGNITENEGVSAMNLAIMWSDKGMMCDTFTTGPSLLRMPKENCRLDLRSKQVGAKDXDAHDVEFDYATG

SEQ ID NO: 261037 - protein, 143 aa, Zea mays
  unsure (1)..(143): unsure at all Xaa locations
  Clone ID: MRT4577_169682C.1.pep
NYSLRVGTIDIDSLYEGIDFYXTMTRARFEXLNMNLYXKSMEPVEKCXLQDANIXKSTDHDVVLEGGSTMILIVHQLFHDYFNNKXLNMNINPYEAVIYGAAVHPVILSCDGNEKVHDLILLDVTPLSLXLETAGXAITMLIH

SEQ ID NO: 261038 - protein, 75 aa, Zea mays
  Clone ID: MRT4577_169683C.1.pep
MAMIFLVALKSELAAEVYAKQKVDDQWALHVSHHTSDILHCWMEQSWLPTSTVVQAGTTPQANKRCLYLEQDEGG

SEQ ID NO: 261039 - protein, 121 aa, Zea mays
  Clone ID: MRT4577_169684C.1.pep
ACALANTHTARSFFSRRSKRQGFVKTLTGKTITLEVESSDTIDNVKAKIQDKEGIPPDQQRLIFAGKQLEDGRTLADYNIQKESTLHLVLRLRGGILIFFKTLTGKTITLEVESFDTIYNL

SEQ ID NO: 261040 - protein, 217 aa, Zea mays
  unsure (1)..(217): unsure at all Xaa locations
  Clone ID: MRT4577_169685C.1.pep
LSFCSERFPARPPISDPRSPRRSKMQIFVKTLTGKTITLEVESSDTIDNVKGKIQDKEGIPPDQHRLIFAGKQLEDGRTLADYNIQKESTLHLVLRLRGGMQIFVKTLTGKTITLEVESSDTIDNXVKAKIQHQEGIPXPDQQRLIFAGKQLEDGRTLADYNIQKESTXLTLVLPLRGRMHIFLKTLTGKTITLEVESSDTIDTVKAQIPDKEALPP

SEQ ID NO: 261041 - protein, 48 aa, Zea mays
  Clone ID: MRT4577_169686C.1.pep
SPLPHSVIKISPIVFLSCAQIIPIFIANSAPWPVVWPLFQSLVVLELE

SEQ ID NO: 261042 - protein, 80 aa, Zea mays
  unsure (1)..(80): unsure at all Xaa locations
  Clone ID: MRT4577_169687C.1.pep
IFSPEKETXVFCEIARHSICVSDISRASNIHTEKCPDDAIKTEDQEESDSALQHDYKKKTQGFMGCYQTLATSFSGDKKK

SEQ ID NO: 261043 - protein, 54 aa, Zea mays
  Clone ID: MRT4577_169688C.1.pep
NKTTFFTGQLRMFKIILPNSPHIRKLTLSLRQANTSDNNIPCKYKRSIYQSFKP

SEQ ID NO: 261044 - protein, 110 aa, Zea mays
  unsure (1)..(110): unsure at all Xaa locations
  Clone ID: MRT4577_169689C.1.pep
KEEEGFFFIAKYGHRRWRTNPNFFFFFRKKKNRFFFFFYYLQPDLKRGAFXHEYEYLIIHFHSMRGIKKKKNFFFNRTGKTDXEGNNFLFLFGKNKLRQRGIDPVTHKPV

SEQ ID NO: 261045 - protein, 154 aa, Zea mays
  Clone ID: MRT4577_16968C.1.pep
SCNIFFNIYLKNKVAICLVYMRTEIQFPHTAHMPICDSPCDCEWRVQEPKRTLRRGGRRGARRGSSCSSSSRRSSGTNGGSSGSSTNVLAPSPTPSRHSSSPSEGPEGKAEERRRRVVALEKNRNNGSYGTQQKIRTGHTGGRVGRPGNSGPVP

SEQ ID NO: 261046 - protein, 39 aa, Zea mays
  Clone ID: MRT4577_169690C.1.pep
SFLRTLNLSIYKIIRNIYVNYASRFEVLRKFWKYLCMLV

SEQ ID NO: 261047 - protein, 71 aa, Zea mays
  Clone ID: MRT4577_169691C.1.pep
QTAVRKPQCVDVLYQVPQLEDIKEGGRCNGPELDSARLPREHDHLGETCGNDCRRDYNLRMHINTDGDQLK

SEQ ID NO: 261048 - protein, 110 aa, Zea mays
  unsure (1)..(110): unsure at all Xaa locations
  Clone ID: MRT4577_169692C.1.pep
PSVTFQXHVTSLAALDFLVCLKSDVFVMTHGGNFAKLIIGYRRYMGRHRLKSIKPDKGLMSKFFGDPYMPWATFVENVMITHETRTGLPESTFPHYDLWENPLTPCMCRA

SEQ ID NO: 261049 - protein, 139 aa, Zea mays
  Clone ID: MRT4577_169693C.1.pep
KKKNPQKTPHIWPKGLATFLGSPGKKKPNTPKRGILKKNPNPKHYTGRPRKQVKKKRGCLPGKQKPMTFGGINFQKNHPPFFFKNGEEGKKFAKGSGEHPGGGTLLKKTNGGEKKRPGASPPPCSPEKFLGTTVFKGGA

SEQ ID NO: 261050 - protein, 170 aa, Zea mays
  Clone ID: MRT4577_169694C.1.pep
MAASGTGNNRFAHTCARVRQFMMEQNRQVRMDDLIGSSSSPRPLQLTPVPVATGPPPAAAWETDAGARTLPLFPVRNSSSTEIIRPEQEAKATLTIFYQGQVATFHNFPADRAKDLIQMAGSVTGEAPGKGVTTTTAVPEKAGTSGGEPSAAGVAGTPPIARKLTLQRFS

SEQ ID NO: 261051 - protein, 79 aa, Zea mays
  Clone ID: MRT4577_169695C.1.pep
RFGSPRVVILWRRGLASCIHTSIFWICGTLLSGSARTRKKEIWGSLLDSLGPSPGFYAKCVFNVWPLFKCLLVSNVLNR

SEQ ID NO: 261052 - protein, 568 aa, Zea mays
  Clone ID: MRT4577_169696C.1.pep
MGLQMIHGRPCALCCPSSSSSSSALWMRMQAQLPPKQSHHPLNGGLALSSSPLAVLAWHFLLRRRSRDGATALASSSGVLQIAEDKSSAANLTKHKVSAERKLLNDALDRTGVRYETESWMDEETSSWMDRDLTDSDLRYRLLMQNLEELETSLVGKDLEMDILEQLGALGSFNASVARGVSALHGRPDGSLLDDPEPETTPLDAGQEDSQMVVVRSGKSQERKLRRMRASSDEKGSRTSVKVNPPRRPKKSRKASSSQFISEWKSHPGQRRIIVREQSALLSTIKECAGLEKIREKMVKEGQEVSYHRWAEAAGVDEAELVSRLQAGYCCRDRLLVTTEWLVRCIARTYTGMGTALDDLLQAGKMGVLDGAEKFDSRKGCRFSTYVKYWIRKGMLALLAENSGVTLLPARMESIMRKVKEARRGIRYRQGRNPSDSEVAAAVGVSVANVRLARKCSRRAVSLYSEVAIGQDVKFAEVIPDESASPDEAALFRGQLRERLLLVLGRLPAREGRVLRLRHGLEDGRCRSLEEIGGIYGVSKEWIRKIEKSAMARLRDDDAVRRDLHDFV

SEQ ID NO: 261053 - protein, 170 aa, Zea mays
  Clone ID: MRT4577_169697C.1.pep
CSVLRSAPGISSPGISSSMLQNLGHHLGTDPRPWTSLKKLPNCTTRPPAQHQQKRAGGQLQERAVHVEEPDDAPDRRLPRSRSFDTRGTPWPTNPPLLRLLWPTTRMERLRCSTSWTSSTRSATTAASTTRTPIYHRFIALDSICRGELFIEVDVLCALPSTSMMRALYS

SEQ ID NO: 261054 - protein, 80 aa, Zea mays
  Clone ID: MRT4577_169698C.1.pep
KTLPDYQNGQQRHLQILGEVFPTHPHMKVLAQLLNGRAVPTAGSCCVTHVLKYPVPLYGHKQDLSHVFHVFLRKRWVADV

SEQ ID NO: 261055 - protein, 54 aa, Zea mays
  Clone ID: MRT4577_169699C.1.pep
WGYVPCSKKMYVYGLGSFFLNNTATLLAIFIKKKEIRSLQVYGRKKMYLLQPTI

SEQ ID NO: 261056 - protein, 91 aa, Zea mays
  Clone ID: MRT4577_16969C.1.pep
GDSPVTNSKLAFLTHRSAASGGRARGREDEQQHSAGDPSSPGPPGLCYTRPKDLQDLQPIISAGATSAPAGGACRPATTSSPMSPPPARTG

SEQ ID NO: 261057 - protein, 66 aa, Zea mays
  Clone ID: MRT4577_1696C.1.pep
QFLTDYFVPNHSGESVHTVRYEHPPIVYLIHGLFLTKAEAHYSRPLIVGSIAHLRSVPLATMLNRE

SEQ ID NO: 261058 - protein, 151 aa, Zea mays
  Clone ID: MRT4577_169700C.1.pep
MASDGVVALYGNNKAVVEPSAKPAAATFSVKVGLAQMLRGGVIMDVVTAEQARLAEEAGACAVMALERVPADIRAQGGVARMSDPALIRDIKRAVTIPVMAKARIGHFVEAQILEAIGVDYVDESEVLTLADDAHHINKHNFRVPFVSGCR

SEQ ID NO: 261059 - protein, 154 aa, Zea mays
  Clone ID: MRT4577_169701C.1.pep
MQAVCNRTTGTHPSDFDASSMEAQTHTSCNRRVGYYMREIAPPFAPIPRLLDCGASAATLGNPVLGPTVPTEHIGHESVSRGRRRDGRYGQNWAGSNGGSRRAGAAVKSSAGSRPLLAQQGSPLPWREDDAPVFGPSNDSRTQQPPREQPVPSH

SEQ ID NO: 261060 - protein, 81 aa, Zea mays
  Clone ID: MRT4577_169702C.1.pep
MLTRHVQFIISNANICNQYTICINNDPSLSGNDVHLIRKILDPKYLDRAEDTYRDMQLTIQRHGTWASAWVSESGGVFNNG

SEQ ID NO: 261061 - protein, 96 aa, Zea mays
  Clone ID: MRT4577_169703C.1.pep
SPCRFWARILVCWPRSSLSLPSMACSSLFLNTAAPPSSLKQAAAAAPILHISAHHIPLGSYQVHARGLLLAKMALLLPGHGAQTTPLPQSCSPWSR

SEQ ID NO: 261062 - protein, 197 aa, Zea mays
  unsure (1)..(197): unsure at all Xaa locations
  Clone ID: MRT4577_169704C.1.pep
MALMSVSSASTTVVTAFPRNGESALASFFGGKRLIRQVETVRKSFREPSATYCYRPIWVPGSTPLSCVDESLLEDLGFXHCGLXSDPLSLKPNMFAEMAXCRXSTLAAACIFISECLIXIVVFHTTFWYTDVDXQKFSYTITLLXSMLILCSWSEDHRXWTDIIILGCENTDIIFPNNYLIVSDDGDPGGLRLDPVG

SEQ ID NO: 261063 - protein, 75 aa, Zea mays
  unsure (1)..(75): unsure at all Xaa locations
  Clone ID: MRT4577_169705C.1.pep
GXLPVVSNFRRAPPLATLASQTTLDHCHVRETASRGLREQRARTLRGHRLTPIYWVVAANTRLYKGYSILTRDHS

SEQ ID NO: 261064 - protein, 202 aa, Zea mays
  Clone ID: MRT4577_169706C.1.pep
MLLRAALHLNRLFSTDAALAPPKLRNLPYRLRHVAVPAARAVVSEYLHSTRCLPSSHADSIATHSPRSLFSFLAALPTVPCSLPTAEFPALLRRHLNFHPLNELPFFLESIGGPTAAPPCFNSIFLSDHPSLLGAVAALAHFGFPWSRLGLLYPGVLLDMPPDLISTRLSVLEGRLHGLPRAAIIAACLTFPSLLEGGSIRL

SEQ ID NO: 261065 - protein, 162 aa, Zea mays
  Clone ID: MRT4577_169707C.1.pep
FAKPKRPFPFALFDPSKKAAAEMVYYALLVGAELDGLTNLQPSGGCDDPSFPYYLKCKLCGRDGTIVMIPGQGTPLTIEQSQKEEKTCLMVFDCRGYEPVEFSFGAGWKAESVHGTPFEIDCSEDEFSEYDEKGECPVELSKLQSTFKVVKKHEKGGKIRFV

SEQ ID NO: 261066 - protein, 59 aa, Zea mays
  Clone ID: MRT4577_169708C.1.pep
EIADLSAVRTGRMIEGILLTKFDTTNDKGGASLPMGYLSGSPSARSPAEVRAYTDLNKL

SEQ ID NO: 261067 - protein, 204 aa, Zea mays
  Clone ID: MRT4577_169709C.1.pep
PHAWRTEAKPKRPFPFALFDPSKKAAAEMVYYALLVGAELDGLTNLQPSGGCDDPSFPYYLKLKCENCGEVTAKSTYVTLSEQVDLPKGHGTAHLVQKCKLCGRDGTIVMIPGQGTPLTIEQSQKEEKTCLMVFDCRGYEPVEFSFGAGWKAESVHGTPFEIDCSEDEFSEYDEKGECPVELSKLQSTFKVVKKHEKGGKIRFV

SEQ ID NO: 261068 - protein, 80 aa, Zea mays
  Clone ID: MRT4577_16970C.1.pep
ASDNSCRGFPSSRVLADKRDDGIVVVVGRLDGRRWQRLDGLLLDDVIDGIHVGSSHIYAMLPAAAAAEFPHSISVCRAAR

SEQ ID NO: 261069 - protein, 81 aa, Zea mays
  Clone ID: MRT4577_169710C.1.pep
NADVTSNHSAVIPKTTTWLKRTRLLPLKCRRRKKRTTRLLPLKILTVNQPFFLYEYASKSKMRLDDSKSLLKHYFQEQRLR

SEQ ID NO: 261070 - protein, 183 aa, Zea mays
  Clone ID: MRT4577_169711C.1.pep
MGLTFSKLFDKLWGKKEMRILMVGLDAAGKTTILYKLKLGEIVTTIPTIGFNVETVEYKNIQFTVWDVGGQDKIRPLWRHCFQNTQGIIFVVDSNDRDRVVEAREELQRMLNEDELRDALLLVFANKQDLPNAMNAAEITDKLGLHSLRQRAWYIQSTCATSGDGLYEGLEWLSNSLRKAGHQ

SEQ ID NO: 261071 - protein, 186 aa, Zea mays
  unsure (1)..(186): unsure at all Xaa locations
  Clone ID: MRT4577_169712C.1.pep
LTLGGRRXGGMVYYALLVGAELDGLTNLQPRHGCDDPNFPYYLKLKCENCGEVTAKSTYVTLSEQVDLPKGHGAAHLVQKCKLCGRDGTIVMIPGQGTPLTIEQSQKEEKTCLMVFDCRGYEPVEFSFGTGWKAESVHGTPFEIDCSEGEFSEYDEKGECPVELGKLQSTFKVVKKHEKGGKTRFV

SEQ ID NO: 261072 - protein, 204 aa, Zea mays
  Clone ID: MRT4577_169713C.1.pep
PHAWRTEAKPKRPFPFALFDPSKKTAAEMVYYALLVGAELDGLTNLQPSGGCDDPSFPYYLKLKCENCGEVTAKSTYVTLSEQVDLPKGHGTAHLVQKCKLCGRDGTIVMIPGQGTPLTIEQSQKEEKTCLMVFDCRGYEPVEFSFGAGWKAESVHGTPFEIDCSEDEFSEYDEKGECPVELSKLQSTFKVVKKHEKGGKTRFV

SEQ ID NO: 261073 - protein, 66 aa, Zea mays
  Clone ID: MRT4577_169714C.1.pep
IRHEAEMPVLCIAYCFGYLYLLSQTMTFEDLPLREALKTIAFTTDECSRTTIDLETSQKCRYDQCA

SEQ ID NO: 261074 - protein, 186 aa, Zea mays
  unsure (1)..(186): unsure at all Xaa locations
  Clone ID: MRT4577_169715C.1.pep
LTLGGRRXGGMVYYALLVGAELDGLTNLQPRHGCDDPNFPYYLKLKCENCGEVTAKSTYVTLSEQVDLPKGHGAAHLVQKCKLCGRDGTIVMIPGQGTPLTIEQSQKEEKTCLMVFDCRGYEPVEFSFGTGWKAESVHGTPFEIDCSEGEFSEYDEKGECPVELGKLQSTFKVVKKHERGGKTRFV

SEQ ID NO: 261075 - protein, 55 aa, Zea mays
  Clone ID: MRT4577_169716C.1.pep
MNPKQGLQEKGETWVLTLFLGPQKKKKKKKKKKKKKKKKKKRKKKKKKKKKKKLE

SEQ ID NO: 261076 - protein, 160 aa, Zea mays
  unsure (1)..(160): unsure at all Xaa locations
  Clone ID: MRT4577_169717C.1.pep
GAKPPTKNPAGGGSGHXTSTSAGRXXXAAAXGRGKXKGKPTGRRNPXTPEENXXXTXXRXRTGGGXXXXEEEEEEREEXEEEEXEDEXXDKXKXKGTEXXXQKEXPNXXKGKXXKAKEXXPGKTTEXTRXXEREEXEKQKAQEPGRKPQEQXGKTEQAPE

SEQ ID NO: 261077 - protein, 382 aa, Zea mays
  unsure (1)..(382): unsure at all Xaa locations
  Clone ID: MRT4577_169718C.1.pep
MVKRIVTLYMERLLPISFFFLILYSSIHRQISSSSAARKIIALSLIKISFLYMEAKKIYEGTVLSNNLVKPSVIAYMMKWLWARLVAAFLWPLHNLAKILVYKKIHSAIGISKAXXISGGGSLPMHVDKFFEAIGIKVQNGYGLTETSPVVAARRPFCNVLGTVGHPIKHTEIKIFDIETGEVLPDGSKGIVKIKGPQVMKGYYKNPSATNEAFDQEGWFSTGDVGWIVPHHAMGPSRQCGGMIVLEGRAKDTIVLSTGENVEPAEIEEAASRSTLINQIVVIGQDQRRLGAIIVPNNDEVLAEAKRKSILGEDGELAKDKVMNMLYDELRTWTAHCSFRVGPILVVDEPFTIDNGLMTPTMKIRRDKVTDKYRREIEALFK

SEQ ID NO: 261078 - protein, 148 aa, Zea mays
  Clone ID: MRT4577_169719C.1.pep
MATANKASILLLAVAVATAACSTTASAQTSRLGKLVVTGVVPCNTGTLIDAATSPAFPDANVELRCGGNVVAGGTTSRNGSFAIEADLTNALAALVGTCQLVVDTPLAKCNASLPAAGALASYLQGSLAGMLGGVFRLAPAGFSFRMN

SEQ ID NO: 261079 - protein, 186 aa, Zea mays
  Clone ID: MRT4577_16971C.1.pep
MARLLLLLLVVVDLAFSSPAAAYERRRNAITHVKGFDGPLPFYLETGYVEVDDTHGTDLFYYFIQSERSPKEDPLILWITGGPGCSALSGLFFEIGPLKFDVAGYTEGFPTLVYFEDSWTKVSNVIFLDAPVGTGFSFAREEQGLNVSLTGTGAQLRIFLEKWIADHPEFASNPLYIGGDSYSGYT

SEQ ID NO: 261080 - protein, 114 aa, Zea mays
  Clone ID: MRT4577_169720C.1.pep
VHGRKVKKRKIEKKKTKKKRKKKTPAKNPPPSPPPGQTPPGTAHPRNTAHRLTPKNQDPHGPGKGRRSNEPPGDRTADSPGRKNGTGLIADGWGLKRCGPTKNPPGDDPTTRGP

SEQ ID NO: 261081 - protein, 477 aa, Zea mays
  Clone ID: MRT4577_169721C.1.pep
MNTEKQKGLRIVTEPRNLSSALTWFSVPEVRKQVYIVGNSEPRENIGVLNELIHARDELAKIVGCMAPADSAIRPHMAPPPLVVCSFLENLSNTVKHKAEEEFKTIHNFKRRTCNEKSADLEPWDEDYFIGMMKSSVYDLDASVIAKYFPLSQCLKGLNVLVESLFGATFHQIPMRDGESWHPDVIKLRLHHPDEGDLGFMYLDLYSRKGKHPGCAHFAIQGGRRLSDSNYQLPIIALICNFSGACRKTARLNHGDVETLFHEFGHALHSLLSRTEYQHFSGTRVALDVAETPSNLFEYYAWDYRVLKTFALDETTGDAIPEKLVKALNASRNMFPATELQRQIFYSIMDLTLFGEQSSKPMDTISTVADLRRKHTSGKYAEGTHWHTRFTHLVTYGAGYYTYLYARCFATTIWQEVCQEDPLSRSAGSAIRDKFLRFGGSKDPSSLLKDFAGDAVIRNSGSGIIPNASSLCKEIGL

SEQ ID NO: 261082 - protein, 130 aa, Zea mays
  unsure (1)..(130): unsure at all Xaa locations
  Clone ID: MRT4577_169722C.1.pep
CTSTGWIDPLTALPSKIVPTSACNTDSSSEASRYHPRSDAHEDIRSCSKTTDMLILNQTLHNILIKHLAQDYKTAFLSHRRTMLDLHHAAXVYLVCLVVTTSSCAXIHANGVTIMTKDILLARSNPVERR

SEQ ID NO: 261083 - protein, 54 aa, Zea mays
  Clone ID: MRT4577_169723C.1.pep
FSTPPARERPPCRSAVSRGSRFAKVCFASGEEWSGVWRVPLLPWPQALLSWSVP

SEQ ID NO: 261084 - protein, 66 aa, Zea mays
  Clone ID: MRT4577_169724C.1.pep
WGNGLTVKHSYSVAFSCVGGSGEEPGCAFRIAVFRGVVQGQQFMCLNQDGDQPFEVVSQWLNVCVG

SEQ ID NO: 261085 - protein, 31 aa, Zea mays
  Clone ID: MRT4577_169725C.1.pep
KKKKKKKKKKKKKKKKKKKKKKKNKKKKKKR

SEQ ID NO: 261086 - protein, 139 aa, Zea mays
  Clone ID: MRT4577_169726C.1.pep
PLAPRFPLATALRSTRVGLFPVPTSPPLPRFLHPFSCSPAHLPPRVPVKPCSEANGLWILGFNTRVPCWRLFCIMESTDKNDKKIAVTEESSNPGQNCEDDGDFSMKTEMLNVEEAPSFSNDKLNNESEVQIQEGGNDS

SEQ ID NO: 261087 - protein, 313 aa, Zea mays
  unsure (1)..(313): unsure at all Xaa locations
  Clone ID: MRT4577_169727C.1.pep
MESTDKNDKRNAVTEESSNPGQNCEDDGDFSMKTEMLNVEEAPSFSNDKLNNESEVQIQEGGNDSEEGLNGQMNERTSSDVMECASSNEITKENLSEDKTEEPVFDGTEVLEIEEMRRSSNQSGELDSEAQGSVLNDRAVAIKKFVKERSAIAVSTFMRRLSGKXMRMNLRLKLTRLLVQNTXCEKTRTDAESNPKEVQQKSVERTVWNPLNFIKIGRDSDTFVTGESVNENVPGLVEIPPLEGRIIIYTKLGCEDCKKIRLFLHRKRLKDVEINIDIFPGRKVELEKNTGSFTVPKVYFNDLLIGRLIELRK

SEQ ID NO: 261088 - protein, 37 aa, Zea mays
  unsure (1)..(37): unsure at all Xaa locations
  Clone ID: MRT4577_169728C.1.pep
TXLIXPILTTLVNXNXKXCIPPLCKIHCGIHLYYAVL

SEQ ID NO: 261089 - protein, 68 aa, Zea mays
  Clone ID: MRT4577_169729C.1.pep
ETGGLMAAGSTGVTRQLRCTRFTVTGAVYNSLGKLQLSLLYIICMIVMGVEHMRNFVRVMTTSQGCSN

SEQ ID NO: 261090 - protein, 57 aa, Zea mays
  Clone ID: MRT4577_16972C.1.pep
GHKNERQKDHFHTQTAQGTPDFFFWFVLGLLAPVEQKIRVNPQGKLIRKLLRASKAK

SEQ ID NO: 261091 - protein, 74 aa, Zea mays
  Clone ID: MRT4577_169730C.1.pep
PRVLALTVCLLAHANYYLVHGHFSHRTTTYLNDLLTYLQHMQMKKVRCTNMVADLSANLHLSSLVFDMHPTEAN

SEQ ID NO: 261092 - protein, 93 aa, Zea mays
  Clone ID: MRT4577_169731C.1.pep
MPLAESAHSKRTGVNMILRKAELSWEMGMHVSTLHSLLCLHMDPPFAHLTVHKNSSPKSYERKRRGSAEAFWASKRHFGGARRRRVHPKRELP

SEQ ID NO: 261093 - protein, 75 aa, Zea mays
  unsure (1)..(75): unsure at all Xaa locations
  Clone ID: MRT4577_169732C.1.pep
LPSGKIAACTPGAALVARRTATTTTCCPRXSHSSRAEPCACRHILLLAAPTSPPPTPEILQRRRGKARGSGCAPA

SEQ ID NO: 261094 - protein, 41 aa, Zea mays
  unsure (1)..(41): unsure at all Xaa locations
  Clone ID: MRT4577_169733C.1.pep
GYGGGGGGYGGGRGGYGGGGGYCGANRGGGXYCNNDGNWRN

SEQ ID NO: 261095 - protein, 90 aa, Zea mays
  Clone ID: MRT4577_169734C.1.pep
RLARIQMFPAHLHASILADLECSSDSSIIVSNLVRSTGMRQNHWFYQHGKQHSRQRTDMGAIGDAHSYQADYPVKQLGNSSLQQCVADLL

SEQ ID NO: 261096 - protein, 191 aa, Zea mays
  Clone ID: MRT4577_169735C.1.pep
MGAEGEGAVEEATGFEVCIVLPKLSRAAATGPTEDCVARLVRELEGAGLLVERVRGVPAEFIKLAAPMGTLGRAAADMQMKKLTYIGMELQFQWDQVAAFVRQPDGSLFSWRERYCCFRYLICGIVNKTNSEIAIKFDGKEFHWKQSESLLTMLEAEGVVKRIFPLHDEIKRKQLLRNWALNWLDFTWQPY

SEQ ID NO: 261097 - protein, 88 aa, Zea mays
  Clone ID: MRT4577_169736C.1.pep
SALCYDLSQLQSLSLVRVELQAERVQVDPLEEQLLLHVMLAASLRLDVADLMSLGLHEGIDDARQRLTLLVMNSTPSPRCRRPSRSLR

SEQ ID NO: 261098 - protein, 85 aa, Zea mays
  Clone ID: MRT4577_169737C.1.pep
LLVRTAERASLGPFEVEAVSDPHVSDSGGSWTRTGDPEMSMTANTVDWYSFGPGYELAGMPYWRLRAVEGEYTDELDDNDYIKQE

SEQ ID NO: 261099 - protein, 67 aa, Zea mays
  Clone ID: MRT4577_169738C.1.pep
RLIPVTHLASPSSSSRFLTLNLIRGYETRPSIAIATHRHTLKSVTTRLHYSGTCTFTHWTLIYYNSS

SEQ ID NO: 261100 - protein, 117 aa, Zea mays
  unsure (1)..(117): unsure at all Xaa locations
  Clone ID: MRT4577_169739C.1.pep
KKTVQFVGWGPPGFKGGIKNQPPFVVPGGDLAKVQGAGGIKKKKTPVFKGFLGIDSKFALMDAKRGFFYWEVGEGKEKGEFSQAREELGAFXKEYKEMGAKGAKNKGGKGDDYLGTG

SEQ ID NO: 261101 - protein, 114 aa, Zea mays
  unsure (1)..(114): unsure at all Xaa locations
  Clone ID: MRT4577_16973C.1.pep
MLIYMLHRKFEPCEGIEDLSLTGQKVVGDYVAGSSRGDVEILHVHEIIFSTIDKPKLLAQLSALLSEVGLNIREAHVFSTTDGFXLDVFVXDDWDTKETDTLLQILKETAARNH

SEQ ID NO: 261102 - protein, 72 aa, Zea mays
  Clone ID: MRT4577_169740C.1.pep
GGGFSKKRGVELLNPLLTLGPMVGLFLPAKVGFFSLKKIVTPTGALVPPPPFVPGPVFRSLQKSKFLSNMAL

SEQ ID NO: 261103 - protein, 315 aa, Zea mays
  Clone ID: MRT4577_169741C.1.pep
MVTLCHPIRIRASGSTASWRRRNAAAAAKVLCSVQQMPPPPPAATAAQSTIKVVIVGATKEIGRTAVVAVSKARGMELAGAIDSQCIGEDAGQISGMDEPLEIPVLNDLTMVLGSIAQSRATGVVVDFSEPSAVYDNVKQAAAFGLSSVVYVPKIELETVTELSAFCEKASVGCLVAPTLSIGSVLLQQAAIQASFHYSNVEIVESRPNPSDLPSQDAIQIANNISDLGQIYNREDMDSSSPARGQLLGEDGVRVHSMVLPGLVSSTSINFSGPGEMYTLRHDVANVQCLMPGLILAIRKVVRFKNLIYGLEKFL

SEQ ID NO: 261104 - protein, 71 aa, Zea mays
  unsure (1)..(71): unsure at all Xaa locations
  Clone ID: MRT4577_169742C.1.pep
TLIMATPPDGAPAGPDDTSPPPSSNSSTPPPSDSSTPSPKSSGSGSPSPSPPAPSLSPXPPASPQDSTAPA

SEQ ID NO: 261105 - protein, 104 aa, Zea mays
  unsure (1)..(104): unsure at all Xaa locations
  Clone ID: MRT4577_169743C.1.pep
NSKSHSSFSTDXKRVRKKKNRTTKLKDKDQRIILGAATPNYPHPQPGGADMACFEHSNFFKVTAPEARPGQLRPGAHRRQKRSTQVGSRREADRPPPGPSGRVE

SEQ ID NO: 261106 - protein, 73 aa, Zea mays
  Clone ID: MRT4577_169744C.1.pep
VRVCVPPGLKCGPSQFVNPFSPRLPFFSIKVANVWFQFGAICPPIVSIPANVRNTLYLSLSEYLFFPTPLFGF

SEQ ID NO: 261107 - protein, 115 aa, Zea mays
  Clone ID: MRT4577_169745C.1.pep
PPPRPQRCLPQPPSSHSPRRSGPDEVGLIRACPDRESWVVGTWGPRALHRVGGGAPPPPARILSDRILLVLVVDAALSPLAPFKAWLLASPSLGRSRFRSHFSFSTLSCTLLAAG

SEQ ID NO: 261108 - protein, 291 aa, Zea mays
  unsure (1)..(291): unsure at all Xaa locations
  Clone ID: MRT4577_169746C.1.pep
MALLQSQSLPGIGCCSSSIVLARARVQQCLAAASHSQAPLLQANGGRAGLPSSSSILKAGNAISFSRRRRRDLRVVAEAATAGTAKVTPASSGGVSLSDVLWPSAGEXRNAGASAGAFLAMAVLGKMDQMVAFKGVSLTIAPLGAVCCVLFSAPDSPAAKKYNMFVAQIACAAFGVLALSLFGPGWLARGAALSACIAFMTLADYNIQKESTLHLVLRLRGGMQIFVKTLTGKTXPWRLRAPAASLPLLFIDGPKFHSLQLWYALFPGAAGCIVLCLIQEVVVYLKKNFKF

SEQ ID NO: 261109 - protein, 42 aa, Zea mays
  Clone ID: MRT4577_169747C.1.pep
LHYSLFRTGIQVTYYIIYIYIIITTISIIHINTKLSIKIYYN

SEQ ID NO: 261110 - protein, 66 aa, Zea mays
  Clone ID: MRT4577_169748C.1.pep
VYLPSHAIPSHASMFSLKEGDLRNMFVHMAVKHLPPYIMSRYLCDGDAYTALFAFPNLLANTQPPC

SEQ ID NO: 261111 - protein, 84 aa, Zea mays
  Clone ID: MRT4577_169749C.1.pep
FWKPFKYQGLTIGVKKEMPRSTLDSFMQPFQSTLWLLVGLSVHVVAVMLYLLDRFSPFGRFKVNSEDEEEDALTLSSAMWISWG

SEQ ID NO: 261112 - protein, 101 aa, Zea mays
  Clone ID: MRT4577_16974C.1.pep
EAGNVPNGDEAHHPAEATLDLARERHKLVIANEIDQVNERLQALEADREYIKQCVRALKRGGEGFDLLQEILQHLRDLRRIEQRARNSGELSPHYLHLYTD

SEQ ID NO: 261113 - protein, 75 aa, Zea mays
  Clone ID: MRT4577_169750C.1.pep
GSISDDTRFKTLEGSKESARASVHGVNNGTRRSASLATRESTERYGSRRKGSTLAERHRRPGSPTWFGPSDYRER

SEQ ID NO: 261114 - protein, 92 aa, Zea mays
  Clone ID: MRT4577_169751C.1.pep
RIQALVIDNGSGMCKAGFAGDDAPRAVFPSIVGRPRHTGVMVGMGQKDSYVGDEAQSKRGILTLKYPIEHGIVTNWDDMEKIWHHTFYNELR

SEQ ID NO: 261115 - protein, 118 aa, Zea mays
  Clone ID: MRT4577_169752C.1.pep
VGAGCQTARPRDCWVRTLRSKAAPWLDPATVWRALTWAWPERPPLRGASLLAAWGPRAESVSACRRETAFLAPLWNRAGRIHAPPRKMPPGLPAALGKEERLGFYPNCHSCMAGWAAA

SEQ ID NO: 261116 - protein, 212 aa, Zea mays
  Clone ID: MRT4577_169753C.1.pep
MNPFAKKPTPREVMRSSKRDLTNATRGIERDIASLQQEEKKLVAEIKRTAKTGNEAATKILARQLIRLRQQISNLQGSRAQIRGIATHTQAMHANTSVATGLQSASKAMGALNKQMEPTKQMKIMQEFQKQSAQMDMTNEMMSDSIDDVLDDDQAEEETEELANQVLDEIGVDIASQLSSAPKGKIAGKKVQVDESSELEELEKRLAALKNA

SEQ ID NO: 261117 - protein, 94 aa, Zea mays
  unsure (1)..(94): unsure at all Xaa locations
  Clone ID: MRT4577_169754C.1.pep
WSAVLSFVFISCLLRLAALRLSLAPVGGLDLPCVGRSLSAFLGLPVRSGRRCLGVCGIFFSVGGVSFGARPPRLGGYWGWXSSFLTVLPGRPRG

SEQ ID NO: 261118 - protein, 439 aa, Zea mays
  unsure (1)..(439): unsure at all Xaa locations
  Clone ID: MRT4577_169755C.1.pep
MAAEGSGVQETFEARVKRLFGSRLFDAVPDSSFPTASWSVAAGDVERHRWSKPSEARDAEEEAAGEAGRGDTPCVSAFYDANGCLRGRRRRSRQEEFEGNLDDLDEDEEEDGERERNAAEQDEEEGVRVNIGLDPTLDREEEEDKYDREAFGREEAADRVYMHDIMDDXYKHEHQQYXLTSLMIPXGVYRFKKDPRADMRAASARLREDDGSAKDGDSHYATEAKDFLNVGIQTKKAVEEVNVKPILKRKEEQADLKPRKRVRFDANVKDRESDMFERDEDSPMVPQSMEVVTGKESTPTLSVSPGVPDYVRNPSKYTRYTLDVPESNDDSNRTALADLHDLLGRSDQNRIHSETAVEIPSSVTFIPRKKSVDAMAVDDGPRAIDSNSSVIGLVAGASDEPDQCEMDEDDSNLSSTPQMHTNSKANSRRYRSSRTDDDE

SEQ ID NO: 261119 - protein, 46 aa, Zea mays
  Clone ID: MRT4577_169756C.1.pep
HHQSPAPLPRRSLGVAAMRCCDGGCWVPELRAWVLVGGSSYQVLRG

SEQ ID NO: 261120 - protein, 85 aa, Zea mays
  Clone ID: MRT4577_169757C.1.pep
GYRLCQCTMCITSFLASETWRAQASSVRSIPPEWDATPGVISQSPEGDDSRTSVSVGTTAPSKPKSGSINIQCMPLRCVARFLCS

SEQ ID NO: 261121 - protein, 50 aa, Zea mays
  Clone ID: MRT4577_169758C.1.pep
SHNKIHSIKSYSNSYAVKSQITYRDTNVIIRMNIKLYVNYDFTSEVTQMS

SEQ ID NO: 261122 - protein, 88 aa, Zea mays
  Clone ID: MRT4577_169759C.1.pep
KLARFDAMQPQTKILQTRRIRHSRINCTAHTEITNQQSKIFSVDMIFSVLKCSKSTGWQTCNPRTGSRLVDQNTPPPNLELTHKRRNP

SEQ ID NO: 261123 - protein, 293 aa, Zea mays
  unsure (1)..(293): unsure at all Xaa locations
  Clone ID: MRT4577_16975C.1.pep
MEDDDTEGVGESTCPPAADRGGSSSAGGGGGDSHGYTDIEKEVFDRLMEKRIPEVVADPVAFREELHRHFERLPLSYAIDVNVDKAEDVLLHRSILNECTDPENRPIFHVGFLNVXPLLDRVSTVLWLLTERPKTRQHRXIVSFFRRDXIFVLPLYDQCIPPSLDPQYNTQSISITLNPSLRAKTVXGGSQDSTLRKFEPCEGIEDLSLTGQKVVGDYVAGSSRGDVEILHVHEIIFSTIDKPKLLAQLSALLSEVGLNIREAHVFSTTDGFCLDVFVVDGWDTKVIYHSMIV

SEQ ID NO: 261124 - protein, 40 aa, Zea mays
  Clone ID: MRT4577_169760C.1.pep
SRHAAPVQYIVISSRSRIVRHIKHPKTSNDPIEYPTQAYV

SEQ ID NO: 261125 - protein, 63 aa, Zea mays
  Clone ID: MRT4577_169761C.1.pep
CIRGFPTFYHQVKLWVEMVSAFTLTWYQSQRSRVRILIDALFMPSPIYFYFCAFLSVAREWGC

SEQ ID NO: 261126 - protein, 93 aa, Zea mays
  unsure (1)..(93): unsure at all Xaa locations
  Clone ID: MRT4577_169762C.1.pep
PXXFSFFGENGARTFDNQLYSFEPPQAPTPIDPFFVPVLLFRGVVQFMRVFSCFYRLHPFGLLETTKRDFQIYRPPGTPQFSLPIYMNWHFWA

SEQ ID NO: 261127 - protein, 110 aa, Zea mays
  Clone ID: MRT4577_169763C.1.pep
PLVRGAPRLFRHLSSPEQSYIRQTFLKRRGAQQKIPNNQSQEPSPDQSPQYHPPSHHLQTSSLLPMPMPSTTYLNLNTLLTIASFLTLIFYSYFNNNLTSNTYPFLSQFH

SEQ ID NO: 261128 - protein, 50 aa, Zea mays
  Clone ID: MRT4577_169764C.1.pep
FTPAPRATGSPRFSNFIYGTIGPLFFSREETDYACEISVLCSNEKCTLDA

SEQ ID NO: 261129 - protein, 110 aa, Zea mays
  unsure (1)..(110): unsure at all Xaa locations
  Clone ID: MRT4577_169765C.1.pep
CPXXRGRINTEGGGQSAIDPSCADLGSRACXXTADAGGRPSMGGGALTRRTLHGPGGRSSAPPEGREDDPTRRQRELVGIALLCQEEDESRFVLSASEEPRAGSRATTRH

SEQ ID NO: 261130 - protein, 124 aa, Zea mays
  Clone ID: MRT4577_169766C.1.pep
VRMLNRDRSRHTTTRSTTPRIHHHQHPQSSKRLLPFGYRKASSSLRRSRQQIPILRHILRPLQLPLRELASSLMRRRKRKGGFSGSKHFVFLLLHYGGCSSFGGCIYIPGPWTPVTRINAICVK

SEQ ID NO: 261131 - protein, 81 aa, Zea mays
  Clone ID: MRT4577_169767C.1.pep
MSPQLVASSSKWLLTIDSFWDFIIHISRTEQLFICYLVASSFFFPGLQQSALITYVQFFWVARIFCLTVNRATCSDNYTLL

SEQ ID NO: 261132 - protein, 32 aa, Zea mays
  Clone ID: MRT4577_169768C.1.pep
DWWMENLLRVKLIFPVCQVKVLDIKRSLEAIG

SEQ ID NO: 261133 - protein, 277 aa, Zea mays
  unsure (1)..(277): unsure at all Xaa locations
  Clone ID: MRT4577_169769C.1.pep
AGREKKKKKKKKKYATIDWHDFSVIATVIFDEADDAADLPPPAQLNDLQSQSLEQKAAVSLSTRRLEEAMPDDVTYYNVTQQQVPPSPMQPNYAPTAPPVHSPYGASXCASSYARLPNTSADITRRGAGTIGQGTPGXSEQRARAQAAARGAPGRIVTDYVPRVATKKANVPMAVCPNCKQQIPSNEMDEHIRIELLDPRWKEQRDKAEARYSTTINTADVANNLKRFASQREDIYDGATGQSISAEEXARRKRLXCHMMDSQILQRMLPAYRRCRA

SEQ ID NO: 261134 - protein, 88 aa, Zea mays
  Clone ID: MRT4577_16976C.1.pep
PRVRKIKKKIINKKKKKKKKGKRKKKKKKKKKKKKKKKKKKKKKKKKKKKKKGAAFLKVQSLHPRILKVKPFLSAPQIQINGPLFKKA

SEQ ID NO: 261135 - protein, 120 aa, Zea mays
  Clone ID: MRT4577_169770C.1.pep
VRQVIRLWSWGNVPGVSTVRRLWCSNSASGASGPCIIVGRYRSPGRSCCPSYLYRGCCHILLVNLELWHGLFNAWILMVVSSRLVQGLDRRPPPVGSEVDCRSVMIELPAIGVAFTPTGP

SEQ ID NO: 261136 - protein, 73 aa, Zea mays
  Clone ID: MRT4577_169771C.1.pep
EQPGRAHKYSYFFSRIFDGRIGTLCVWHRQSKVSNPDFTLYAIAREQGSCYVDRWKCKLSRETSMASRSGTKK

SEQ ID NO: 261137 - protein, 84 aa, Zea mays
  Clone ID: MRT4577_169772C.1.pep
NFPMTHINTLIGEDLLSPTILFVLFPIAEVWSILLFECSRSAFIGTSFGENNCVAFEHPFPVLPFFQPIFINKEPRPAKLFPCD

SEQ ID NO: 261138 - protein, 83 aa, Zea mays
  Clone ID: MRT4577_169773C.1.pep
TLPRNEHVDGLERAGAVVRAQLRRGQLRGYRSPRKWARVAGGAALGWCRWNVLPCWSHCQVSAANSSGSPPAVRSESDAWCSV

SEQ ID NO: 261139 - protein, 142 aa, Zea mays
  Clone ID: MRT4577_169774C.1.pep
ELEERNSSHNLLKFDSNSFLPLAEDAAAEGELPAAASKPPSSPPVEAELSLGVERSWTTCWPWNGDSGGGDGGGGGCCCWPPAKTTLLSNVDHFMVPTPHPARRSRPDPADSPEFRRDSPASLVSPNDILFTFLARLRPPIF

SEQ ID NO: 261140 - protein, 44 aa, Zea mays
  Clone ID: MRT4577_169775C.1.pep
SHSLSTRASYCATTIVVTSVYSSSCNIWDNLAPYGSHARCVWGL

SEQ ID NO: 261141 - protein, 71 aa, Zea mays
  Clone ID: MRT4577_169776C.1.pep
GARAPPHQQKEGRADDGRRPRRRRLPRTPREEEGPQGGRAGRRRKKAPLHRLNEPPRPVVPPLGLRVLVLK

SEQ ID NO: 261142 - protein, 154 aa, Zea mays
  Clone ID: MRT4577_169777C.1.pep
GMEIMSGHSITKLMEWLIWRVPVRTRRCRGLLRLCCLRLSLRAGCSRGYMVRAVCFCVKRHRGNCMGSHNRGLSNIGIVVFVVGTTIGVAHLLGIISGSRLLVLVLVLAVSVPVMLDLVHDLFHKVGLVDWGGAGVAGLLGHDDDTTLCRGLGR

SEQ ID NO: 261143 - protein, 88 aa, Zea mays
  unsure (1)..(88): unsure at all Xaa locations
  Clone ID: MRT4577_169778C.1.pep
TNRSRKPQAIIVRSRRRPVDLDATTCYACVRLPGRFAQSSSPSXSYQSXXTLVTSFXMGSXRVLFGLRKMKXIHXSSPLHXFFIWFVK

SEQ ID NO: 261144 - protein, 147 aa, Zea mays
  Clone ID: MRT4577_169779C.1.pep
GVQDRGVFFMSTKAWRTNNVVAVGRFLGLHLVHGPRGPQHSRRLHPREAQQLALRVPRAIQRGLGYRARRLAVHGGDGEDGGAARRCVSCPGSGEFSHHRCRGSASSDPGPWCVLVGSVLHHFLLAVPGLVLWRVTRSERDVERSPF

SEQ ID NO: 261145 - protein, 91 aa, Zea mays
  Clone ID: MRT4577_16977C.1.pep
FHGKKNRQTPKKKPPGKCGFYQGPGSKILGGQKISRGQQGLNFGKAQGNFLGGGGSGNKFVRHLNLKPPKSSGYQLFFSEANPVPNKNGIS

SEQ ID NO: 261146 - protein, 162 aa, Zea mays
  Clone ID: MRT4577_169780C.1.pep
MDNVSYPIIIDQKYCPNNICVKSGASKVAVNDVVFKNGHGLRIKSYEDSKSSLKASKFLYEGITMDNVSYPIIIDQKYCPNNICVKSGASKVAVNDVVFKNIHGTSNTPEAITLNCANNLPCQGVQLVNVDIKYNGSGNKTMAVCKNAIGKSIGLAKELACI

SEQ ID NO: 261147 - protein, 61 aa, Zea mays
  Clone ID: MRT4577_169781C.1.pep
YTIDACLRVQAVLSIRHTRTLSEDTDSHDTSTDLTELWPDTHHSHCCTINFRQLDWYLTWR

SEQ ID NO: 261148 - protein, 61 aa, Zea mays
  unsure (1)..(61): unsure at all Xaa locations
  Clone ID: MRT4577_169782C.1.pep
LMEVASKRTYSSSPSVSWGNXTPVRVRHNRAQWRRRRRSPGPGRRGATGGPARTTSCGNSS

SEQ ID NO: 261149 - protein, 92 aa, Zea mays
  unsure (1)..(92): unsure at all Xaa locations
  Clone ID: MRT4577_169783C.1.pep
WPVASLGLLPVXRVASAAVLXGFXAPWFLAASSLGRSASVAAXPLRVVRFLWSLAVLSRAVAAAARPAAAVRRPLRXAVGRALAPGAPLFFS

SEQ ID NO: 261150 - protein, 122 aa, Zea mays
  Clone ID: MRT4577_169784C.1.pep
ESCATVSAAASSTIVSRGAIARLIALGLAVLRPRSERVLCTYAKDLDPVITKGASESLLATADVLTAPEAAPMALYVRAHVLRVHRVDPRDNEQCCWGGSSWGSSSSSGPSTTSTLSDLDED

SEQ ID NO: 261151 - protein, 291 aa, Zea mays
  Clone ID: MRT4577_169785C.1.pep
LKLILVSEPLRDKLRVSLSCRLVCHPPSQRHLDASKEKSVSHIFASNFKCSPVVLLFEKRKVRSSGYLVNDSLTVECTVTMLRDLDATDKEQHLPVLPPSDLHQHLGELLQTSDGADVTFRVSGESFAAHKIFLAARSPVFKAECFGGVELGSPASVYNKDMEAAVFRAMLHFMFTDMAPELDGAQDQEPEAAAAMAQHLLVAADRYGLNRLKLMCECKLSGGIDIGTAAATLAFAEKHDCPLLKAKCLEFVTKSPETLDAVLATDGYEHLVASCPLVLAELLRAARGRKI

SEQ ID NO: 261152 - protein, 81 aa, Zea mays
  Clone ID: MRT4577_169786C.1.pep
ETGMSSKKSCVVRTKASPGHNADQAAPHQARSGHVTALSIPNFFHRPIVSFYLPPSSELVRVARCCASCLNFATLVIGDLE

SEQ ID NO: 261153 - protein, 175 aa, Zea mays
  unsure (1)..(175): unsure at all Xaa locations
  Clone ID: MRT4577_169787C.1.pep
GRVGVLGPVTLSCLNEGKRCLRHHRWIYQVGLKGESLGLHTVTGSSAVEWAGPGGGTQPLTWHKALLGAPAGSDPVALDMGSMGKGQVWVNGRHAGRYWSYRAHSRGCGRCSYAGTYREDQCTSNCGDLSQRWYXTCFARRARALGIFHTCVALALRCRYHVPRSWLKXSGNLLV

SEQ ID NO: 261154 - protein, 55 aa, Zea mays
  Clone ID: MRT4577_169788C.1.pep
SLIHMTADHSQLGKRCSVLNDYLNQQDHPKCPAVQKHVTASDATFQLDHHGSDRC

SEQ ID NO: 261155 - protein, 86 aa, Zea mays
  Clone ID: MRT4577_169789C.1.pep
RLPFFSNHKNWGQGPPSQEGPPRLWMIMGRPKVGSPKLGEIPMLPGVPNQIEGPPFCALGDFPAWPVQGLFRPFRPKLERRIPHPP

SEQ ID NO: 261156 - protein, 66 aa, Zea mays
  unsure (1)..(66): unsure at all Xaa locations
  Clone ID: MRT4577_16978C.1.pep
RPVRDKLVNFTHLMPTRYTLDVNFKDVPSGGPDALSTRXKEAKDCMAAKARLEDRLETGKNRRFFT

SEQ ID NO: 261157 - protein, 75 aa, Zea mays
  unsure (1)..(75): unsure at all Xaa locations
  Clone ID: MRT4577_169790C.1.pep
MIGEKDPIEEEAMSCRVKGGKGLVKGGHKRHRKVLRDDIQGITNPAIRRLXRRSRAKHISGIIYEETRGVLQSLL

SEQ ID NO: 261158 - protein, 57 aa, Zea mays
  Clone ID: MRT4577_169791C.1.pep
MVVVMFLVFEGFMGVVVNEILQIIGEIVVCYAGVGNFEKFSFGWFKCLGWLFKLFST

SEQ ID NO: 261159 - protein, 44 aa, Zea mays
  Clone ID: MRT4577_169792C.1.pep
LSFRQVQEQRNGTHVVRWGSCCQTSCFLQVLLRRPFSRNAHKLL

SEQ ID NO: 261160 - protein, 98 aa, Zea mays
  Clone ID: MRT4577_169793C.1.pep
MGMGMGKAAVVSKSWQESKLLWHIAFPAILTAVFQFSIGFVTVGFVGHIGSVELAAVTVVENVIEGFAYGVLVRAAHICNDYTPPSSVLLVRKEKTFL

SEQ ID NO: 261161 - protein, 46 aa, Zea mays
  Clone ID: MRT4577_169794C.1.pep
SPGPAAIAVEGRMQCVKFLLYVLLLAFCACALGLITVGVVAQPVLS

SEQ ID NO: 261162 - protein, 73 aa, Zea mays
  Clone ID: MRT4577_169795C.1.pep
KNFKMEVRYDDKLTAFAQRLEISPPRRFGTSTSLYGENILCNHLSWCTHAIKRSDASDLDLIMTVILYLTPST

SEQ ID NO: 261163 - protein, 117 aa, Zea mays
  Clone ID: MRT4577_169796C.1.pep
MAYEISEIKKIGIGLVGFGILFSFLGVILFFDRGLLALGNLFTKKANLKGSVPFFIGLFLLFVRWPVAGIIMELYGSFVLFSGYGPPIQAFLYQIPIIGWILQYPFQLLGQLRRKRT

SEQ ID NO: 261164 - protein, 78 aa, Zea mays
  Clone ID: MRT4577_169797C.1.pep
QLFTRKANFKGSVPFFIGLFLLFVRWPVAGIIMELYGSFVLFSGYGPPIQAFLYQIPIIGWILQYPFQLLGQLRRKRT

SEQ ID NO: 261165 - protein, 135 aa, Zea mays
  Clone ID: MRT4577_169798C.1.pep
MAYEISEIKKIGIGLVGFGILFSFLGVILFFDRGLLALGNIFFLTGVGLLLGWQSMWQLFTKKANLKGSVPFFIGLFLLFVRWPVAGIIMELYGSFVLFSGYGPPIQAFLYQIPIIGWILQYPFQLLGQLRRKRT

SEQ ID NO: 261166 - protein, 185 aa, Zea mays
  unsure (1)..(185): unsure at all Xaa locations
  Clone ID: MRT4577_169799C.1.pep
MIRLTNPSPPLRAMDIDLPASGSNCNTTWPPPKTYHVYLKILVQLYRFLLQXTNTNSHVCLLQRLFMKITNPPPXISMRPLVKVMQGHDNTLAMNVRPHTNDNTIQQMPVMTATALKFTETDTNSIVNAAAQCLTFDQLALLAPLGENIILLTVPKNARHAHMIFGKDPVTPDNHDMPYERSETT

SEQ ID NO: 261167 - protein, 113 aa, Zea mays
  Clone ID: MRT4577_16979C.1.pep
KAKIALQQSPAYRQRSSASALVAVLCIRLLPHQSSTCSKYRSPDPVLFLCHIPISWADPPSHIVVTRPHPPQKLCVLNALAEERIKFPTKMQCYPYPCLYQHKTFCLAPQLDQ

SEQ ID NO: 261168 - protein, 172 aa, Zea mays
  unsure (1)..(172): unsure at all Xaa locations
  Clone ID: MRT4577_1697C.1.pep
ASLLWGSPHLRYHHARAESRAREQSPDSKATSAVTLRMRKLLIERLLSRKQFEIEMIHPVRGNVSKGKSKERVAKAYETDDPNTIFVFKFXRTHFGGRKSAGVGLIYDNLEAGKKYETKYRLIRNGLATKDEKSREPMKERKNRAKKIRGVKKTTAGDAKKKQTFDYICITV

SEQ ID NO: 261169 - protein, 101 aa, Zea mays
  unsure (1)..(101): unsure at all Xaa locations
  Clone ID: MRT4577_169800C.1.pep
MGAAGGRSPVPALSQKEQDIQMMLAGDVHLGTKNCDFQMERYAFKRRTDSIYIINLGKTWEKLQLATRVIFAIXNTQDIIVQTARPYRQRAVLKIAQNTGA

SEQ ID NO: 261170 - protein, 54 aa, Zea mays
  Clone ID: MRT4577_169801C.1.pep
RPLGRPLGRPLGLIIPCLENINKGPRLKACDLGTGFHGKTIGGNYPCPKRKATL

SEQ ID NO: 261171 - protein, 64 aa, Zea mays
  unsure (1)..(64): unsure at all Xaa locations
  Clone ID: MRT4577_169802C.1.pep
DSWVVGRDNKLGHLLTYVQXTLISKASIGRVRRPLCTCARITIGSELAWLYTMQFPFFPPFNYF

SEQ ID NO: 261172 - protein, 60 aa, Zea mays
  Clone ID: MRT4577_169803C.1.pep
GFSGRDPLLRLGHLRTGGLLGRGRGHQLHRIVRRRLDMSIGRHPVPRSPNPRIERLAGKG

SEQ ID NO: 261173 - protein, 120 aa, Zea mays
  unsure (1)..(120): unsure at all Xaa locations
  Clone ID: MRT4577_169804C.1.pep
KKKKKKKKKKKKKKKKKKKEGKKKKRRKKKKKGKRYGGCRFKGSRFPTACLQHNAFFIGYPKFNXLAVFLQHRDWKTPGVPQLNPLXAHPLFSSWGNNKWALPNRPSKKWQILNGNWDPP

SEQ ID NO: 261174 - protein, 234 aa, Zea mays
  unsure (1)..(234): unsure at all Xaa locations
  Clone ID: MRT4577_169805C.1.pep
GAPSRVFFFFFFFFFFFFFFFFFFFFFFFFFFFSKKRGGRGFFSWFKSLPTKAENPKPALKTPLFGGGPPKTKGGGQKKKNPPRGNPXKGGLNPGNPPKVFYEKKGPPKEKGSPPXGPPPPPGEGGGPPSKGAEAPPLEEPPVPXFGGKGGKKPPQPEKKSSPGKFGGPPGGEPPRAPTXKKPGKGLGPPEGEKPXQGPGKKGPWKKSFGNPALENRPRGRKPGGGPCGKKPPP

SEQ ID NO: 261175 - protein, 140 aa, Zea mays
  unsure (1)..(140): unsure at all Xaa locations
  Clone ID: MRT4577_169806C.1.pep
APERPGSERERERERERDQTPLPRVKGRCQXQKAERAPGGQTGKGRVRARGEMSAISPPRHPPHETLEKGLSPGGPGQAHHTEKQEAPKSAARASAPQKSAKESPSRRSKRARDTQKKKRKKKKTGKKKKERKKKRERER

SEQ ID NO: 261176 - protein, 122 aa, Zea mays
  unsure (1)..(122): unsure at all Xaa locations
  Clone ID: MRT4577_169807C.1.pep
RAATPCPTLPATCCCVSGDARTVSAGAGRDPSDESVAAGGGGHPPSLPQAAEPAXAAVTWVPEXPLRAAAPARAPARAHQGGARRPGAVARLSGPGSARRPRRAPLGGVGRPGAAPAGGSPG

SEQ ID NO: 261177 - protein, 126 aa, Zea mays
  Clone ID: MRT4577_169808C.1.pep
GWDFVFDQRIAFPRKKDFGKKKRALKWAPAQRTLPGLHPPDAKLFLARVNKFNQMAQKAKRRAEIPRLRELPPLKGHLESVFKLKALDFAPFHHLYPVLCPWFKSIHVYLVLAGGSPLLVCFSHIP

SEQ ID NO: 261178 - protein, 91 aa, Zea mays
  Clone ID: MRT4577_169809C.1.pep
GRHPTPFIPWLATPSPLMAGTRHFFLLPRSPPPPRSKDRDDDEQERIEEKKRITETFYPAPPIYGKSSGETPRGFHSKPCLAHSSFFNKGP

SEQ ID NO: 261179 - protein, 100 aa, Zea mays
  Clone ID: MRT4577_16980C.1.pep
VSVRARGLLVRVWRSGRRPGSPRAGRRSTGVANTALGAASRRASGPRGGIAGGRGRAGCAISVGGAPSRRCRVRPPQTGAAPRARPREVWVSPRVRARVG

SEQ ID NO: 261180 - protein, 68 aa, Zea mays
  Clone ID: MRT4577_169810C.1.pep
TSTVWGIMLSICVNVDVDPIGIYSNMYCILSYTILSDGWGVGSIPLVATRAAAGLDRRQPRKQEKQLS

SEQ ID NO: 261181 - protein, 163 aa, Zea mays
  Clone ID: MRT4577_169811C.1.pep
ASVLASVQRAAQLFYAQHIPRTAVDFDLRFTYVLAGWEGSAHDALVLRDALERENGLRVPQGKFYLVDAGYGAKPGFLPPFRAVRYHLNEWGNNPVQNEKELFNLRHSSLRVTVERAFGSLKRRFKILDDATPFFPFSTQVDIGVPCCIIHNWVIQDGGDELI

SEQ ID NO: 261182 - protein, 393 aa, Zea mays
  Clone ID: MRT4577_169812C.1.pep
MDKATKLLIYGASAHMLLSMMAMVIESRKRKRDSRRVGITYGPMEERDRMRLDYLNTKIWMSDTTCVNMLRLSRSSFFRFCKGFRDRGLLEDTIHMCVEEQVAMFLNTVGHNLRNRLVGTNYGRSGETVSRYFNKVLRAIGELRAELIRPPSLETPSKIAGNPRWDPYFKDCIGAIDGTHIRASVSIDMEPSFRGRKSYASQNVMAAVDFDLRFTYVLAGWEGSAHDALVLRDALERENGLRVPQGKFYLVDAGYGAKPGFLPPFRAVRYHLNEWGNNPVQNEKELFNLRHSSLRVTVERAFGSLKRRFKILDDATPFFPFSTQVDIVVACCIIHNWVIQDGGDELIIEESNWPIHNHATTSSGQASEHAFMVNLRQEITNQMWEDRQNHYAS

SEQ ID NO: 261183 - protein, 537 aa, Zea mays
  Clone ID: MRT4577_169813C.1.pep
MFTVFGNNMATGKYAKGSSEALGTEDRNSMAETEIDEGDVNAVPSPIDDIGASSSAPRPRKKAKVTSIDSRPAGIPSYSYLGGGEKCGAGAGERPSSRAGSRAQASGRPSRRRRAAVRLGVRPSELVQSSRRATVRPGVGFQEPMDKATKLLIYGASAHLLLSMMAMVIESRKRKRDSRRVGITYGPMEERDRMRLDYLNTKIWMSDTTCVNMLRLSRSSFFRFCKGFRDRGLLEDTIHMCVEEQVAMFLNTVGHNLRNRLVGTNYGRSGETVSRYFNKVLRAIGELRAELIRPPSLETPSKIAGNPRWDPYFKDCIGAIDGTHIRALVSIDMEPSFRGRKSYASQNVMAAVDFDLRFTYVLAGWEGSAHDALVLRDALERENGLRVPQGKFYLVDAGYGAKPGFLPPFRAVRYHLNEWGNNPVQNEKELFNLRHSSLRVTVERAFGSLKRRFKILDDATPFFPFSTQVDIVVACCIIHNWVIQDGGDELIIEESNWPIHNHATTSSGQASEHAFMVNLRQEIANQMWEDRQNHYAS

SEQ ID NO: 261184 - protein, 91 aa, Zea mays
  unsure (1)..(91): unsure at all Xaa locations
  Clone ID: MRT4577_169814C.1.pep
MIYYGQQPLVGVSPQQGYSGKDGYPPEGYPTDGYPPPXTGTPHEDYPXQEGYPPDHAAGVLHSQTALAARPSFMEGXLAALCCCXLVHACF

SEQ ID NO: 261185 - protein, 493 aa, Zea mays
  Clone ID: MRT4577_169815C.1.pep
MPIPSHEFLSGRYATASIMLRLAFPLVSHLPRRKPSAIRPRPPPARRYASAAAVTASSFSPPHSPLLPPLPPASAYVHLPFCRKRCHYCDFPIIALGSSSAPSRGEAAEDPRIVDYVNLLLREVSATRPVSDDGVPLETVFFGGGTPSLVPPRLVATVLDALRARFGLSARPEVSIEMDPGTFDAARLKELVGVGVNRVSLGVQAFQEDLLRACGRAHGVKEVHEAVAIVTACEGLQNWSMDLISSLPNQTEEMWEESLRCTVDARPTHVSVYDLQIEQGTKFGQMYTPGVFPLPSDTESANFYRIASKRLSEAGYNHYEISSYCKPGYECKHNLTYWQNRPFYAFGLGSASYINGVRYSRPRRTKEYAEWVQKLEDGTWRHESRSSDLKDMALDVVMLSLRTAWGLDLQSFSKSFGKSLALSLCNTFKPFVESGHVIAMDMDRQALPHTDFELDLQNEDGFGSRIAFIRLSDPDGFLLSNELISLAFGIISP

SEQ ID NO: 261186 - protein, 94 aa, Zea mays
  Clone ID: MRT4577_169816C.1.pep
FDLGNCEWIIKSVIGRLMARATRITVVIIELIRATRPRLAGRAHLLDKKLTRALPGDPMIHDYLTDRTALMPATHYSNFWPINFPWEDMGLPWW

SEQ ID NO: 261187 - protein, 98 aa, Zea mays
  Clone ID: MRT4577_169817C.1.pep
MRLSGGDWLPVTGRVTLKATKEEHVDMFSDYMETNFICHLKDAGLEMDDTFYDMDTYCRDCYFESVDDPDYYGENDRTQWWQIHRVLMLRQGRGTVGI

SEQ ID NO: 261188 - protein, 66 aa, Zea mays
  Clone ID: MRT4577_169818C.1.pep
CAFLMFHSLTPRGGSRTRVFAHVLDFDGPFCTPVEESRFGSFFPLPLSRILISFWSRHIFHTYCRY

SEQ ID NO: 261189 - protein, 85 aa, Zea mays
  Clone ID: MRT4577_169819C.1.pep
ARLGSRASRGIRYFFNARGRRRPFLLISRSLGAFFFFFFFFFFFFFFFFFFFFFFFFFFSETSTLPSSTVDTIIRHVLFSREPGR

SEQ ID NO: 261190 - protein, 50 aa, Zea mays
  Clone ID: MRT4577_16981C.1.pep
HVGEFIHCLELLWSCSWVMGFSLVQKWALVQIYVIPTLPRVQSGSGLTHT

SEQ ID NO: 261191 - protein, 102 aa, Zea mays
  Clone ID: MRT4577_169820C.1.pep
YLQTSVYCWQTVATRTQFLVLATDGIWDVLLIQGRGDTRVIGARLRPRRLGSLIAPVRSERGGASYPTCMVDHCAVMCLYLNLLASPAPDESTPDCSQFPTT

SEQ ID NO: 261192 - protein, 105 aa, Zea mays
  Clone ID: MRT4577_169821C.1.pep
MSAKVLADKDANATMTEQPAVKDVKSMEYHRQAFHSKMADDETDKYVSPSDGIMSPCSQKINALRNKHASKAKPKSLFAQASAKKLQGDNPFGARPAPTKGAFQL

SEQ ID NO: 261193 - protein, 63 aa, Zea mays
  Clone ID: MRT4577_169822C.1.pep
LEAGRAGVLSSATMTQDGYCVCGLLLSGLFVRPVLVLGPVSLKTGSILFFLIERQSSCHYVQK

SEQ ID NO: 261194 - protein, 92 aa, Zea mays
  unsure (1)..(92): unsure at all Xaa locations
  Clone ID: MRT4577_169823C.1.pep
AYSPLGSPGTATVKAGAVLEHPAVVSAAETLGKTPAQGALRWGGQGGHXXLXKSTXKXXIXXNLXLFGWXLPEDLLAKFSENEQERVXRAGL

SEQ ID NO: 261195 - protein, 113 aa, Zea mays
  unsure (1)..(113): unsure at all Xaa locations
  Clone ID: MRT4577_169824C.1.pep
PGGPRLFPKNAGGQPKGAKKRGFLGRPEKKGKKGTPQGGGIKGXPQGVGNPQXGPGGQGPLLSRGKQGFLKKKTPPPALKGGGNVSPPGPNFTAPPPKSFFFFPGPPQKGEPG

SEQ ID NO: 261196 - protein, 306 aa, Zea mays
  Clone ID: MRT4577_169825C.1.pep
MASTRAAATLLLLLALAGTSSAQLSTGFYSYSCPGVYGAVKSVMQSAIAREKRMGASILRLFFHDTPSFQGEKMANPNNGSVRGFEVIDAVKSAVEKLCPGVVSCADILAIAARDSVVILGGPTWDVKVGRRDSTTASFSGANNNIPPPTSGLVNLSSLFAAQGLSQKDMVALSGAHTIGQARCTNFRAHIYNDTDIDAAFARTRQSGCPSTSGAGGDNNLAPLDLQTPTVFENNYYRNLVAKKGLLHSDQELFNGGATDALVQSYVGSQSAFFADFVAGMIKMGDITPLTGSNNGQIRKNCRRVN

SEQ ID NO: 261197 - protein, 333 aa, Zea mays
  Clone ID: MRT4577_169826C.1.pep
MAPAAPASATKCSSGIVISVLLPLALLMAAAGTSSAQLSTGFYSSSCPGVYDAVKSVVQSAVASEQRMGASIVRLFFHDCFVQGCDASLLLDDTPSFQGEKMANPNNGSVRGFEVIDAVKSAVEKVCPGVVSCADILAIAARDSVVILGGPTWDVKVGRRDSTTASFSGANNNIPPPTSGLANLTSLFAAQGLSQKDMVALSGAHTIGQARCTNFRAHVYNDTNIDGSFARTRQSGCPRSSGSSGDNNLAPLDLQTPTVFENNYYKNLVCKKGLLHSDQELFNGGATDALVQSYASGQSEFFSDFVTGMVKMGDITPLTGSGGQIRKNCRRVN

SEQ ID NO: 261198 - protein, 320 aa, Zea mays
  Clone ID: MRT4577_169827C.1.pep
MASTRAAATLLLLLALAGTSSAQLSTGFYSYSCPGVYGAVKSVMQSAIAREKRMGASILRLFFHDCFVQGCDASLLLDDTPSFQGEKMANPNNGSVRGFEVIDAVKSAVEKLCPGVVSCADILAIAARDSVVILGGPTWDVKVGRRDSTTASFSGANNNIPPPTSGLANLTSLFAAQGLSQKDMVALSGAHTIGQARCTNFRAHIYNDTDIDAAFARTRQSGCPSTSGAGGDNNLAPLDLQTPTVFENNYYRNLLAKKGLLHSDQELFNGGATDALVQSYVGSQSAFFADFVAGMIKMGDITPLTGSNNGQIRKNCRRVN

SEQ ID NO: 261199 - protein, 64 aa, Zea mays
  unsure (1)..(64): unsure at all Xaa locations
  Clone ID: MRT4577_169828C.1.pep
RAAPLEAATACAGVYGNGAYPGYAXQLLVDAATGASYNANGARGRKYLLPALYDPDTAACTTLV

SEQ ID NO: 261200 - protein, 84 aa, Zea mays
  unsure (1)..(84): unsure at all Xaa locations
  Clone ID: MRT4577_169829C.1.pep
PFSYSLLTMHNTAXNAKPALQSGNPXYVPHLKLYLGPLSFEXASYLTNDFPDDYXANTPXLNVDPETFSNNQXLEVIHSRWVML

SEQ ID NO: 261201 - protein, 65 aa, Zea mays
  Clone ID: MRT4577_16982C.1.pep
SQLSWYCSHETILTKARPKTIPVTANADVETDLRHLICGVGPCYLDSARLLLARWTKANLSNVLV

SEQ ID NO: 261202 - protein, 109 aa, Zea mays
  Clone ID: MRT4577_169830C.1.pep
MARVRSTARVAHEGEEAGTSEAAPISEMMRRSRLIVPVPIEDVVDVEAEPTNAEANSENKDDDGILSPSKPNHIEFGKSIVKAEDLALMKKLGYFGENDDKLVRFAGKR

SEQ ID NO: 261203 - protein, 157 aa, Zea mays
  unsure (1)..(157): unsure at all Xaa locations
  Clone ID: MRT4577_169831C.1.pep
CKAGYLEQAMRTMADMDTACLKPDVYTYTTLIDALCKSGDLDRAHSLLQEMLDKGIKPTIVTYNVLMNGFCMSGRVEGGKKLLDWMLEKNIHPNAATYNSLMKQYCIENNMKSTTEIYKGMRSRDVGPNENTYNXLIKGHCKARNMKEALYFHDEMI

SEQ ID NO: 261204 - protein, 73 aa, Zea mays
  Clone ID: MRT4577_169832C.1.pep
FHNHHRAPYISSAYSEMNRLLMSMLTRMSSHRHDGDISWWRVNTCLQPLHCNKRTISMLVSMDVCDKRNSRIV

SEQ ID NO: 261205 - protein, 500 aa, Zea mays
  unsure (1)..(500): unsure at all Xaa locations
  Clone ID: MRT4577_169833C.1.pep
DPRAGRGHRIVWDAKFLGLEVFXTACSDGPTRLWRAXRNRVRCRFYLTSYKSQISTHKLXRMKVPGLKLMDLPGVEALHVPGNSDGQTLIVREGDNGVAYSWNXAELKWDKIGEVVDGPGEAAQGQVHDGVRYDFVFNVDIGDGEPIRKLPYNRSDDPYTVADKWLLKENLPLTYRQQVVEFILQNSGQNNFVPDPSFRDPYTGANAYVPGQPSSSSNGNTPEPIFKHIPKSGMLSFETAQFDGILKKVAEFNSKLSSDSEQKQLSLSETEMSRLPAIVNVLKETSFYHTSKLADADMTLLVKILKSWPPQMMFPVIDFLRMFVLHPDGASLLLKTIETGNDILLETFRKAVASPVQPANLLTVLKAVTNLFGNSCLHQWLRTHCAEIIDSVSNCKSSFSKNAHLAYATLLLNYAVLSIESKEEQSQAQILSAALEIAEDDTQDFDSKYRALVAIGSLMLKGLVKSLALDLDVKSVASSAKSSMDQKIAEVGGDIESLTR

SEQ ID NO: 261206 - protein, 183 aa, Zea mays
  Clone ID: MRT4577_169834C.1.pep
MASTTLSSAFTLLSRPSTSPCPAASLPRSSHAAPHIRRGRRAVAVACTATESPKILELGDAIAGLTLEEARSLVDHLQERLGVTAAAFAPAAVVAAPGAGGGAAAEEEAPVEKTEFDVVIEEVPSSARIATIKVVRALTSLALKEAKDLIEGLPKKLKEAVSKDEAEDAKKQLEEVGAKVSIV

SEQ ID NO: 261207 - protein, 116 aa, Zea mays
  Clone ID: MRT4577_169835C.1.pep
EEARNLVDHLQERLGVTAAAFAPAAVVAAPGAGGGAPAEEEAPVEKTEFDVVIEEVPSSARIATIKVVRVLTSLALKEAKDLIEGLPKKLKEAVSKDEAEDAKKQLEEVGAKVSIV

SEQ ID NO: 261208 - protein, 78 aa, Zea mays
  Clone ID: MRT4577_169836C.1.pep
FLPSQVYPFDSSYHQDQTGLSYFQENYPCFDTSACTMPWFTSLISGVLFVIHHVVADMSSIQTFKTSSLFAMFISKIN

SEQ ID NO: 261209 - protein, 183 aa, Zea mays
  Clone ID: MRT4577_169837C.1.pep
MASTTLSSAFSLLSRPSTSPCPAVSLPRSSFPVPDSRRRRRAVTVASTATESPKVLELGDTIAGLTLEEARNLVDHLQERLGVTAAAFAPAAVVAAPGAGGGAAAEEEAPVEKTEFDVMIEEVPSSARIATIKVVRALTSLALKEAKDLIEGLPKKVKEAVSKDEAEDAKKQLEEVGAKVSIA

SEQ ID NO: 261210 - protein, 66 aa, Zea mays
  Clone ID: MRT4577_169838C.1.pep
VNHRHDLTAVETGENPGEMQRQGNHWKAETSANLPATASSSGFERMARARVGKAGRARILLDDPPG

SEQ ID NO: 261211 - protein, 56 aa, Zea mays
  Clone ID: MRT4577_169839C.1.pep
NLKFCLTNVILEGRVTCGAPDPALDYLFRCLGHHTRGRNRDRRAPPSRGHAGRPAR

SEQ ID NO: 261212 - protein, 85 aa, Zea mays
  Clone ID: MRT4577_16983C.1.pep
RMDTCGGALYPLSSGCRAACAAGSRSGRVSVELSTHLLMVTHTLALPRKVFLRPSGLGHRTRAGPYGRRCTSGRWWRVCAVSRTF

SEQ ID NO: 261213 - protein, 83 aa, Zea mays
  Clone ID: MRT4577_169840C.1.pep
KKPLGGTKKKKPIPPKRPVFIPKKKKGPPKKKNPFPGNGFGKTPFLYVNKKKLKDGFLGADLITGICIGRQKNCVICVKNWCN

SEQ ID NO: 261214 - protein, 54 aa, Zea mays
  Clone ID: MRT4577_169841C.1.pep
MAAPAGDPHSSGSAHHPPSPRKQQLPAVLRKSAVRIVNPATATVRAAKCHDDGD

SEQ ID NO: 261215 - protein, 55 aa, Zea mays
  Clone ID: MRT4577_169842C.1.pep
KRKADSGLKQEHRGQRKEPQNLLKKQDRSPNQETGNIYLLLKFLVNSDSYIPPII

SEQ ID NO: 261216 - protein, 96 aa, Zea mays
  Clone ID: MRT4577_169843C.1.pep
VWSKIKGPWNLAGPWRLFRIGNPLSFPVTENKFFNPKTWDHKGIGIPVNGNVGVGTGGAGQPVRIHQGQTDIEPLTRIGPKSRVRYFKGSPRLRWG

SEQ ID NO: 261217 - protein, 149 aa, Zea mays
  unsure (1)..(149): unsure at all Xaa locations
  Clone ID: MRT4577_169844C.1.pep
ELIASDAQVIYIGDERFCXPEVLFQNSXIGMEAAGIHEXTYSSIRSXDVDISKDLYGIIVLSCGISMFLGIVDSMSKAFRSVDHISINIKVVVLPESKYSVWFAGCIXLASLSVLPANVYCQGMSWVMSVPVPSCHEAYAFCSLGPSDS

SEQ ID NO: 261218 - protein, 196 aa, Zea mays
  Clone ID: MRT4577_169845C.1.pep
VTARLDLVFADGPFLAEGASPVAGAFDPPYYEWCQFVGEDFLSCRNLDRCFSYLEELMAREGPFDGLLGFSQGAGLSAVLAGLQEQGLALTGVAQVKCVIVIAGAKIRAPAAVARAFDTKITCPSLHFIGEEDFMKVHSEELVRAFADPLVIRHPCGHTVPKLDEKGLQTMLTYLDKIEREIWEHSSTDAEIVGSN

SEQ ID NO: 261219 - protein, 91 aa, Zea mays
  unsure (1)..(91): unsure at all Xaa locations
  Clone ID: MRT4577_169846C.1.pep
MSKQGKRPTTTMSGGGSAAESPASSCVSSXGGRGTAGGGAXKPMVVVGCPQCLMYVMVSGEEQQPKCPRCKSPVLLHFLRGGNGKLPAGRQ

SEQ ID NO: 261220 - protein, 83 aa, Zea mays
  Clone ID: MRT4577_169847C.1.pep
VGDLTALAISRKCYVSLEALDLSFCRELTDEALGLIVDSCPSLRILKLFGCTQVTDLFLKGHSNTSVKIVGIGGSILVQMDSR

SEQ ID NO: 261221 - protein, 111 aa, Zea mays
  Clone ID: MRT4577_169848C.1.pep
MAPRVTYRRTTAWNTRSNKIRTVKTPGGRLVAQHINKRAKRPICPVCKKTLTGIPALRPTGYRLISQHKRSVSRAYGGHLCGKCLKDRITRAFLIEEVKIVKRVMVASKKQ

SEQ ID NO: 261222 - protein, 71 aa, Zea mays
  Clone ID: MRT4577_169849C.1.pep
SYKIKRVVQHTKHLKRVDMHTFLQLAETWFIRNIYLHSLLQDLYTMIIEDQHLEGKLVILATKLKHIMETT

SEQ ID NO: 261223 - protein, 128 aa, Zea mays
  Clone ID: MRT4577_16984C.1.pep
MAAAHGSRHCSVALCRLLLVVVLLVVTTGILQFQTDPVVSSLQIAAPMTTTAAAAGWPVLNTEQQQAIITGVGGGRRRRRTLVGSRAPTTCTYNECRGCRHRCSVQEVPIDASDPINSAYHYRCVCHL

SEQ ID NO: 261224 - protein, 59 aa, Zea mays
  unsure (1)..(59): unsure at all Xaa locations
  Clone ID: MRT4577_169850C.1.pep
SIVGHYLKDRPEDAQFIIISLRNYMFDLAHRLVGIHYPGKCTXCILINPGSFLYSMKVV

SEQ ID NO: 261225 - protein, 79 aa, Zea mays
  Clone ID: MRT4577_169851C.1.pep
PPMGWLTLRTRTPRRQSASSGKTLDSTMYWYSAWLLRRVLLWRLLPAPVPVSLPSPAPPEAIIRRKVLLSPCDVLCTAS

SEQ ID NO: 261226 - protein, 217 aa, Zea mays
  unsure (1)..(217): unsure at all Xaa locations
  Clone ID: MRT4577_169852C.1.pep
PLXLXXPSYRXVGXXVEXPLPFLXXRVSXSRVDSLKAXPPCPCYLSXXMPAGYSLLTWVRVTQXIPSWDAXYKXVRSIIFISSXNRSQLRPIQFRAKAWAVMQCMRWLAPECPAPAGSNISDEAKWRKQMEAYISHWDRRLEYKSTRPIYKGGTNTCHGIEMHTPGIKVEVETNLVCRVYKLYRKRLPPRGHETLMPRPIPMAPVGXLGVCTXPALS

SEQ ID NO: 261227 - protein, 91 aa, Zea mays
  Clone ID: MRT4577_169853C.1.pep
TKKKTGPKPGWVQRPGAPVKFILSINKQQKWAGTKGHWGPPTIGGEKYLSLLGLEQGGDKGENPGAVTPPVGGPKKQPEKKGVQGKPRLGG

SEQ ID NO: 261228 - protein, 48 aa, Zea mays
  Clone ID: MRT4577_169854C.1.pep
LLKLTRNHYSRKIKFNKNLEPCTGSRMVMGLVPNTSSQNVKPINKFQF

SEQ ID NO: 261229 - protein, 67 aa, Zea mays
  Clone ID: MRT4577_169855C.1.pep
YSRIHNRSHPLVNITRRLNYSFSPEGFFPPFPPDHAPKKSSCTTLFVPFLPKGFRKTTCIYSTFLGF

SEQ ID NO: 261230 - protein, 82 aa, Zea mays
  Clone ID: MRT4577_169856C.1.pep
HASGPMAEKLKEMGISVRGDIVAVNALLDHPEELQPSESESDDEGPELLQVTRVDRENILASVAFPTEIKVDVCKRVNLDIT

SEQ ID NO: 261231 - protein, 362 aa, Zea mays
  Clone ID: MRT4577_169857C.1.pep
EGKSLSQEQALLMTKQLVARYLANSGFESGTVVSIDVLSEIIIKPICKLGRNLKLLTDSYRKQFSSIELLKMFLQTVGYSNIGSLMEITKMGNRVANYPIHQDAQVLQTQNAISIHAQQLPRQFPPPMLQNLTPPQQQQLQNLTPQQQQLLQQQQWLRRNQLCSPRGPLTMADKNQPMVNVKVENTMDSQIDVPYGSFTRQQQFNIRQQQQLLHQQQQQLQQQQLQQQQQQLQQQQHQQQLNQQQQQLQQQQQQLQQQQQQFTQQQQLQQQQQQLQQINQQQHLQQQQQQQLNQQQLQQQQQQMTMSGNQNAQLAQQFKQVSSMSAYGMRMPPVKVEAFHELVSGDSSLKHDNDPNKLTSPK

SEQ ID NO: 261232 - protein, 61 aa, Zea mays
  Clone ID: MRT4577_169858C.1.pep
HARARTQACLLYSRPPSFLYPIFFFFFGGFFNNFMNPYTPTLGKPHMNHSQHRSDTTKTQR

SEQ ID NO: 261233 - protein, 721 aa, Zea mays
  Clone ID: MRT4577_169859C.1.pep
MEMGMTPDVMYGQNVFVPATATPYQYGYAEVGSQMEWCNQSSSLGYDGQDNFYPTEGMQCVYYAAPDNGSVHPTYSSYPSDPSFVPDGSFMPQEYVADPANSTCQIAQTSYYIPAVLPYAQDSALGSATTHLHSNSNVAFLPGIPGYAATSANAAFPLIAPVTTKSDIVMHPHVQSTIVPLKQFQDYAKPPKVQLHNSVPQKQELPDRCMIPAKLPHASQVSAHLSGNNCLGCAAGSDLHKWAAAEKFQPSSKSSGHLNGTGQKVHSLVDSEKPSNQSFAMIVKSHTLRLPVGNPDGTIIIRTDQYNRDDLRVDYMYAKFFVIKSIGEADVHKSIKYGVWSSSSNGNIKLDSAFRDADRISRRHSTKCPVFLFFSVNGSGHFCGMAEMVGPVDFHKDMDFWCQDKWTGCFPVRWHIVKDIPNGFLQHITLQNNENKPVTHSRDTQEIPYLPGISVIKIFKDIKVRDCLFDDFMRYEAEEAQMKPHRRCKLSYDAPDFVPVSQRTEQTKSSSVLVDRTSEIQNVSEKPHDAKVINPQEPRASDKQASEAEKENELQESHCSGSQNQEDAAKTATNHPPGPSLKAAGADGKQQYWKKVENPKQHADSGAAQGSLKAPEKRLNGVSGSASTVPVPEGGEQQRVTAKLGSLKISSKAVEADRKTSTAGMEKQLNGVSGSGSAVPEGGEEQKVKISSKVVEADRKTSKAGVVTIGSMPVRVDSYAV

SEQ ID NO: 261234 - protein, 108 aa, Zea mays
  unsure (1)..(108): unsure at all Xaa locations
  Clone ID: MRT4577_16985C.1.pep
ACEFIYADLCDAKAVNKIEAFRVREATGEELYHLQCSLWIADPQWFFPEPGQAXLIYAESGDANAVNKIXTXNPFDALMHFDAAAYVEQSTLYPLRLYHTVTLNTLAV

SEQ ID NO: 261235 - protein, 136 aa, Zea mays
  unsure (1)..(136): unsure at all Xaa locations
  Clone ID: MRT4577_169860C.1.pep
MFKKFSSEDISGQNQVKASVQRKIRQSIADEYPSLEPLLDDLLPKKSPMIVVKCQNHLNLVVVNNVPLFFNIRDGPYMPTLRLLHQXAIMAEGKQHALAIGYTKMSAKDIRTINKGIGVDNMHYLNDGLWKMERLE

SEQ ID NO: 261236 - protein, 94 aa, Zea mays
  Clone ID: MRT4577_169861C.1.pep
FFFFFFFFFFLGWGFFFLTEPKLNFNFGFDQKQKSAPPQQNKMTSQLKKKITSKTANLVNPRSIKKISITTPSGLVYKSKKEVLLIKNNLRALK

SEQ ID NO: 261237 - protein, 181 aa, Zea mays
  Clone ID: MRT4577_169862C.1.pep
MFKKFSSEDISGQNQVKASVQRKIRQSIADEYPSLEPLLDDLLPKKSPMIVVKCQNHLNLVVVNNVPLFFNIRDGPYMPTLRLLHQYPDIMKKFQVDRGAIKFVLSGANIMCPGLTSPGGALDDEVEEETPVAIMAEGKQHALAIGYTKMSAKDIRTINKGIGVDNMHYLNDGLWKMERLE

SEQ ID NO: 261238 - protein, 66 aa, Zea mays
  unsure (1)..(66): unsure at all Xaa locations
  Clone ID: MRT4577_169863C.1.pep
KKKNPPPPPPQTEVDKQXHHTIHYLPRPATAPTSVEPKKIVPKPKPSAEAITCASPRAIKGSRVIR

SEQ ID NO: 261239 - protein, 87 aa, Zea mays
  Clone ID: MRT4577_169864C.1.pep
CRPSVMRQMCYNSACAVRHSSSRLKWLFTASSCFFSRSCVSSCLSAQSHLALTVPLAGEIRLPNHAPQPAGVEAQLHSSQYLAVQWC

SEQ ID NO: 261240 - protein, 49 aa, Zea mays
  Clone ID: MRT4577_169865C.1.pep
VHAFGSLQIMTKTQPKRGYRYTNSWELYFIFTIISFTSMLDFFLHLFYD

SEQ ID NO: 261241 - protein, 41 aa, Zea mays
  Clone ID: MRT4577_169866C.1.pep
KPIYDELMVDEGRIMLTLHHRRTSFSRLGLGRSTGYAGNNT

SEQ ID NO: 261242 - protein, 70 aa, Zea mays
  Clone ID: MRT4577_169867C.1.pep
KKKKKNNTTTILKIPFFRTQIYNILNFPIEPPIFNIPTYVLQHLNYNFPFLPPHILLSVHPFYEHCIKYL

SEQ ID NO: 261243 - protein, 79 aa, Zea mays
  unsure (1)..(79): unsure at all Xaa locations
  Clone ID: MRT4577_169868C.1.pep
GGGGSPPGRGGEGPPEGPPTPLSGLGGFXLEGLCGRAFTXKAVPNSGLGAFSFLLPGFVGGPLRGVIFFGVKGPPQGLP

SEQ ID NO: 261244 - protein, 79 aa, Zea mays
  Clone ID: MRT4577_16986C.1.pep
MLNRIRRPTRGDCSPDPEAPMAFAAVLRARLLPVPTPLSSSSPPPFFAPSAYVRVPGLTAAAARTGRYRRPGGRAHRAG

SEQ ID NO: 261245 - protein, 140 aa, Zea mays
  Clone ID: MRT4577_169870C.1.pep
MQRGDPLVVGRIIGDVVDPFVRRVPLRVAYAAREVSNGCELRPSAIADQPRVEVGGPDMRTFYTLVMVDPDAPSPSDPNLREYLHCMLQHTYCQDLVYILHLVRLVTDIPATTGVSFGTEVVCYESPRAVLGIHRVVFCS

SEQ ID NO: 261246 - protein, 77 aa, Zea mays
  Clone ID: MRT4577_169871C.1.pep
HPRPFRRQDRKKGPSQQGQLVHQPPQLNKACHAPPRVNSINPTRAVIFCFNPGLPRLILMGAPSSTTVISLIFFVSM

SEQ ID NO: 261247 - protein, 282 aa, Zea mays
  Clone ID: MRT4577_169872C.1.pep
MSSSISMMEARMPPGFRFHPRLDELVMDYLLQKLSGHGHHAGAAIVVDVDLNKCEPWDLPDSACVGGKEWYFFSLRDRKYATGQRTNRATHSGYWKATGKDRAVVVGGEVAVGMRKTLVFYRGRAPRGKKTEWVMHEFRLHPHAAPCLLAAAAPNKEDWVLCRVFYKSRTTSPRPESEDARDGTPSAEPQLPAALPLAPLADTYAAPTVAEQVYCFSGLPALPFRRPVSLGDLLEFDASEKESVTTAMTSVSNNTSSVLELAPNCNWNQENGMSRMWSPLGI

SEQ ID NO: 261248 - protein, 68 aa, Zea mays
  Clone ID: MRT4577_169873C.1.pep
PGSTTPWSIISPPPNLVTCPNHHTRAIHYHLHGQISSLPCTPTCSIHHLLLFICHLLFFAGAQPFAMP

SEQ ID NO: 261249 - protein, 74 aa, Zea mays
  Clone ID: MRT4577_169874C.1.pep
NSGDFPSRLVLSFCPPHSVKQALIRESLSSLYELVEERDSMLSPEQTKKRGRAMENKIMWYFIDNGQSIGVVGV

SEQ ID NO: 261250 - protein, 53 aa, Zea mays
  Clone ID: MRT4577_169875C.1.pep
PSIWLLGYFYLVSVNNPFIISKGVASVRVMCDISVRLFLVGIIKMCGGGKRGL

SEQ ID NO: 261251 - protein, 56 aa, Zea mays
  Clone ID: MRT4577_169876C.1.pep
GHHCLSHTIYNLKNGTCNDGWLLGRIHQREVNILQQLALVLQEGNHQWVRHCKSIK

SEQ ID NO: 261252 - protein, 53 aa, Zea mays
  Clone ID: MRT4577_169877C.1.pep
MVNVPKTRRTFCKKCGKHQTHKVTQYKKGKDSLYAQGKRRYDRKQSGYGGQTK

SEQ ID NO: 261253 - protein, 132 aa, Zea mays
  unsure (1)..(132): unsure at all Xaa locations
  Clone ID: MRT4577_169878C.1.pep
SSWASSASCILRKKRRATLGDSTGRSITDDASDPNQLLERVALYTEHKIGDLKDRIEDCDGMWHRKNNNKLNWGPVGGSQKKREGNKERAQTALLNIXHRYRGILQSHVDSLRNQYSTYRLIEMLESYGRTI

SEQ ID NO: 261254 - protein, 63 aa, Zea mays
  Clone ID: MRT4577_169879C.1.pep
SVHKNRALVIVSLITLYPERLPSSVVDQSTAKYRSEICILVIPTPDGCPWLLKVVKGPIELPI

SEQ ID NO: 261255 - protein, 79 aa, Zea mays
  Clone ID: MRT4577_16987C.1.pep
SFHLKYYPKFGPTVSWRLKIFSLVFKQPTVCGTGRYKRPSSGKFPKGKTFHERLHFPGGMVLMIGPRKPKSILAWKSSH

SEQ ID NO: 261256 - protein, 91 aa, Zea mays
  Clone ID: MRT4577_169880C.1.pep
MQVLTKRYPKNCLLKVMDRYSAVVRNMEQVVMIPSLLRDVELSGYGGSVQDGAPDLYTYFTMLKSICVEVDHGLLPREEWQAKVAGNEGSE

SEQ ID NO: 261257 - protein, 70 aa, Zea mays
  Clone ID: MRT4577_169881C.1.pep
SSIFLSEGVYISLGNRFSLFILLLSYFFLIFHKRHNNKSKLVKTETKTTQVLKRGFLFVKLSIRILIHGQ

SEQ ID NO: 261258 - protein, 701 aa, Zea mays
  Clone ID: MRT4577_169882C.1.pep
MAEPAPAPPVTAPLVGLLYDERMCAHATPNGEEHPENPERLRSIWRKLNAAGVASRCVALKAKEAEDKYIASVHSKRHIKLMKEISSTIYDASRNKIARKFNSIYFNKGSSESAVLAAGSVIEVAEKVAAGELSSAIALVRPPGHHAEHDEAMGFCLFNNVAVAANYLLNERPDLGIKKILIVDWDVHHGNGTQKMFYDDPRVLFFSVHRFDYGSFYPAEGDASHCFIGEEAGKGYNINVPWEHGKCGDADYIAAWDHVLLPVTKVFDPDIILVSAGFDAALGDPLGGCCITPNGYALLLTKLLGFAQGRIVMALEGGYNLRSIANSVCACAKVLLGDKFTFNTPEMQPFESTWRVIQAVRNELKTCWPVLSSKLPENVSLRIKPAPSELYASSDSESDSEDVDELLGTVASVNVIEATGVAISEHLSKMKLDDDSLAVKTNSSCSAAEQHPVDSVKVHNNASVVLTKKISDLSLEWRSDLSKTDVWYASFGSNMWRPRFLCYIQGGKAEGMNIPCCGSRDTSSPKGTVWKTVPHRLLFGRSSTPCWGTGGVAFLNPEINYNEKLYVCMYKITLEQFNDILFQENRLVLEDGKDGNTVYPDSPLIGSSEIKFISTNRAVHLEPIKDSWYSNVLYLGNEDEVPILTMTCPASDIERYKSGELRLAPPSETYAATLIKGLVEGKQMDADGAASYINAAAARAL

SEQ ID NO: 261259 - protein, 58 aa, Zea mays
  Clone ID: MRT4577_169883C.1.pep
SWEVKVVCSCHGACCFRRGRPDGLGNQRPVGRCFTLRLCLPAIRLGIRARVGRPGYCG

SEQ ID NO: 261260 - protein, 92 aa, Zea mays
  unsure (1)..(92): unsure at all Xaa locations
  Clone ID: MRT4577_169884C.1.pep
GAPHRALLGRLREERGPGQLVLTRTRTRTTPRWRTRRPRAGAVAGAGPCPWLPLFTAGGVVAACLSLLLGVEVEEGLCIRPTRPPTXPPTXP

SEQ ID NO: 261261 - protein, 25 aa, Zea mays
  Clone ID: MRT4577_169885C.1.pep
FFFFFFFFFFFFFFFFFFFFFFFLG

SEQ ID NO: 261262 - protein, 51 aa, Zea mays
  Clone ID: MRT4577_169886C.1.pep
NHSQVYLTHQRRYTYQGWCIFLCQKEVSTAPHKSAAVNKATGLPVRKRTRG

SEQ ID NO: 261263 - protein, 75 aa, Zea mays
  unsure (1)..(75): unsure at all Xaa locations
  Clone ID: MRT4577_169887C.1.pep
SVRKVFLVAKADCSSPKKIQPWMVAITPGPTEVPEIAGADHPVMNSKPXELCNVLGRVATTCGLKHYAPANCSTL

SEQ ID NO: 261264 - protein, 130 aa, Zea mays
  Clone ID: MRT4577_169888C.1.pep
MGKSSAALEIMEVAPWLESACSKGAWPASKQGGGGPRPWKKKRACSPWEGHAELLLGHGRRGVHALDRKGKEGRRAEERDEVRHGERSQAPCLLPWSREEERGALLLRVGEEDREERLWRLKKWRGGNGK

SEQ ID NO: 261265 - protein, 43 aa, Zea mays
  Clone ID: MRT4577_169889C.1.pep
DSFLSCLSPSLYSLLSMSLSASLLVLQSFICLSFIPYNKNFIR

SEQ ID NO: 261266 - protein, 505 aa, Zea mays
  Clone ID: MRT4577_16988C.1.pep
PARGRLQSKTLFSHTLCLGRSKCCPHGFAMPHFVLVPMLAAGHAGPMLDMARALAGRGALVTFVTTPLNLLRLGRARGDGELPIRFLPLRFPCAEAGLPEGYESADALPGIDFLRNFHDACAMLRAPLVAHLREADPPVSGLVSDTCHPWTGAVARELGVPRLALETFCAFSSFCMRQMSIHSVFEGISDHKRPVRVPGFPIHVEMSRALSPENFSGFGKVFADEVMAENARADGLVVNSFAELEPLFVDAYEAALGKKIWAVGPLSLQHNINMPLSATSGSDDATAVRCGSWLEQKKPRSVVLVSFGSLARSSQPQLVEIAHGLEASNRPFIWVVKPASLAEFERWLSDDGFERRVGDRGLVVTGWAPQKAILSHPATGAFVTHCGWNSVLECVAAGLPMTTWPHFGDQFMNEKLVVDVLRVGVPVGVKDATQWGVEMEGVVATREDVERALEAVMDGGVVGAARQARAAELGRKARDAVARGGSSDRNMALLVDFVEQMKATV

SEQ ID NO: 261267 - protein, 83 aa, Zea mays
  Clone ID: MRT4577_169890C.1.pep
APLSLGPLVTVASSWNVDLVFFILIWDPFLPPTPNFLYFERPHQSGSEIFKFLIHSTISHNSEACGLTLYRIDNELSTNKNIS

SEQ ID NO: 261268 - protein, 137 aa, Zea mays
  Clone ID: MRT4577_169891C.1.pep
RSALSCILARSLTSNLYSNTRDAEASMGGKSESGLAKETARERPTYTPSFVILSSIDRSLARRSTRDGPCMRGAWPAHRQVILGYQSYHSHRHVSLALFSSRTSSSFRSSSPSLAANSMPHVTACMVHRLVYIYICS

SEQ ID NO: 261269 - protein, 74 aa, Zea mays
  Clone ID: MRT4577_169892C.1.pep
FVKPLPGKPKTLEVESPAPLANVKAKIQHKGGIPPDQKGLIFAAKQLEDGRPLADSTIQKEGPPPLVPRPRGGQ

SEQ ID NO: 261270 - protein, 170 aa, Zea mays
  Clone ID: MRT4577_169893C.1.pep
MPALLLLLLLAAAPAPARAGDPYAYYDWEVSYISAQPLGVKQKVIGINGQFPGPPLNVTTNWNVVVNVRNALDEPLLLTWNGVQQRKTAWQDGVLGTNCAIPAGWNWTYTFQVKDQVGSFFYFPSTPLHRAAGGYGAITINNRDVIPIPFAFPDGDITLFIGDWYNRGHR

SEQ ID NO: 261271 - protein, 71 aa, Zea mays
  Clone ID: MRT4577_169894C.1.pep
RPSIYSEPGVYQTLILSLPPKILEISLSRVSFSLPCDYAMYRSQQIDRLSIEMVSSYLLCCALALNMHNDY

SEQ ID NO: 261272 - protein, 85 aa, Zea mays
  Clone ID: MRT4577_169895C.1.pep
GGIGPQQFYLPPGSPLSLRIPPFQSNIQLFTFGGIGRPKGPPLIWYVKKNNTIHYDRGPGALKVKTLSTRKLYRGKLYIFHQFSL

SEQ ID NO: 261273 - protein, 48 aa, Zea mays
  Clone ID: MRT4577_169896C.1.pep
NRGPKCSPIYDMASMFPSCPPILVLTPYLIFWEENVAQTHLSIFLVFI

SEQ ID NO: 261274 - protein, 642 aa, Zea mays
  unsure (1)..(642): unsure at all Xaa locations
  Clone ID: MRT4577_169897C.1.pep
MAQGHISLSPVRPPVPEDAADRVVPRLVAEKEKKDAKKARARERMLAREDLEKRRRRQARDGLLREPSPETPDDDDDDDDDEDDDMAAHLGLSPDPRLGQGSPSQPPSGLAPSAPGAGTPRSQSEERRQTEGVLDPLAEAIVVTSRGQADPPAPQXSRCPRWLHRRQXKRNQGLASLAPTKALKTKPASAASAAARHAGWLASAQGXSSGGAQVARVAMGQASQADPHVGAAITLGEAADAAVALGSADLSPVSASTPAGVVADSPVELSVTADVMTVEAPPPVVIPDLSVLSQEEGALDLSEWGGRPLLFWSRSTSDSEPLLSLNDELEERSRDSFREYTEAAMRSLRSTMEILSRDVPRVFQELADVSTAKSLFLRRESDVWDSLWSQRVVLTVANERLAQRSAEVVDLRLLCDELKSEAVLAQAEALSARELVASQAEEMRLRQLELGQAIGERDQSRSQAVKAVSRAEALRGQLAEATERRAEASVWAEGFETALDESVKNCKALAEADEQKEGERVAMSEAISAFCQAFGLDGVPSGSXPQSHLRALGGXMRAFAMLASHYDVDLERVSEGYCLPDDEEAALAEVQRLDAAVEGPSAALASSFEVEVLPPVSPPGARPDSAEGGNDAEGAAPPPAAV

SEQ ID NO: 261275 - protein, 43 aa, Zea mays
  Clone ID: MRT4577_169898C.1.pep
KIKNKKKNKKIKKKKKKKKKKKKKKKKKKKKKKKKKKKKKKTT

SEQ ID NO: 261276 - protein, 922 aa, Zea mays
  unsure (1)..(922): unsure at all Xaa locations
  Clone ID: MRT4577_169899C.1.pep
MADKVTVIPPHDPWPFSTVAVEDLETLVVDGLLRPLFDGLQPEWMAPSSEAVPAPPSGYVLSFIPFHERGFGVPVSRFMRALLHHYGVELHNLNPNSNAQAAIFVAVCEGFLGIDPHWDLWTHLFSVEFFTATTEAKKVRMAVRASGCTLQLRQGRTQQYIPATLASSNKGWQNRWFYLRNDGGMLPSFSRRVVTAAGTNWRWGATREKQEKLQPILQALQKLRDAGLTAAGVVAAIHRRRVLPLAEWRLRLAEMRPGVDSEDSRMSSTSLSADDLLKRVTNTVGRPDAGALSQPAMCPDRGYVSLGLRIYNPVRPPVPEDAVDRAARRLVAEKEKEKKNAKKARAHERMLAREALEKRRRRQATDGLPREPSPETPDDDDDDDDDEDDDMAARLGLSLDPRLGLGSPSHPPSGLAPSVPGAGTXGSNPRSGGRPRGYXDPLAEIVVVTPGGQADPPAPQEQVPALVMQEPGPSAVVTMPGQAAPSAPRASEAETVLKPAAGQPSAAPAGIGARGASPQARLALVRSCKRKQGLDGLAPTKALKMKPASAAGGPDALVEGRAEPWPILGSSGLIPVQLDLSEWGGRPLLFWSRGTSDSEPLLSLNDELEERSRDSFREYTEAAMRSLRSTMEILSRDIPRVFQELADVSTAKSLFLRRESDVWDSLRSQRAVLTEANERVAQRSTEVADLWLLYDELKSEAVSTRAEALSAQEQVASQAEEMRQRQLELGQAIGERDRSRSQAAKAVSRAEALRGQLADATERLAEALGSAQSAQAEASRQRARAEGFETALDEAVKNCKALAEVAEQKEAEPVAMSEAISAFCQAFGLDSFPSGSSPQSHLRALGGHVRNRLRGVLHHGVRWAFAVLASHYDVDLEQGPSAALASSFEVEVLPLVSPSEAVPDPAEGGNDAEGAAPPPATD

SEQ ID NO: 261277 - protein, 161 aa, Zea mays
  unsure (1)..(161): unsure at all Xaa locations
  Clone ID: MRT4577_16989C.1.pep
GPPPRGGVVSPQAWLGEVPLDGPPRFLDPEAPVWGAAPEGGELPGFVQRSGFLTHLVVVGPGPLIPADNGGPAQEMVXGWVLGARMFGPGFGVCVPHGVRSPPPLWVPQPPHSPGECVPLFYCAIRIFFARVLKGPIRFYVFRVMKQIGKQKKQRFFLLFV

SEQ ID NO: 261278 - protein, 102 aa, Zea mays
  Clone ID: MRT4577_1698C.1.pep
AVYQVAAEGSPSGGRNGTPWCINRSSTPPEDRALYYQWLYADLPYRPIPSNCEVKVLHLYVNLQGGATFNPKVFLDITSWNKEENKISFEYKSYPFVTGGVF

SEQ ID NO: 261279 - protein, 451 aa, Zea mays
  Clone ID: MRT4577_169900C.1.pep
MGQDSQADPPIGAAIMPGEAADAAAAPSPPDLLSAPTSTPAGAVADSLVEPPVVADVGMVEAPPPVVIPDPPVLGHEVRAAVVAELNPNEWGGQPLLFWSRATSDSEPLLSLNDELEERSRDNFREYTEAAMRSLRSTMEILSRDVPRVFQRATLTEANERLAQRSAEVANLRLLCDELKSKAAASWTEAALARAEASSAQEQVASQAEEMWQRQLELDQVTSERDQSRNQDVEAVSRAEALKGQLAEATERLAEASTRAGTVAESLAVAAGTAQSAQAEASQQRARAEGFETALNESVKNCKALAQAAEQKEVERVAMSEAISAFCQAFGLDGVPSGSSPQSHLWALGGHVRNRLRGALHHDVRRAFAVLASHYDVDLERVSEGYCLPDEEEAALAEVQRLDATVEGPSAALASSFEVEVLPPVSPSGARPDSAEAGNDAEHVAPPPADV

SEQ ID NO: 261280 - protein, 73 aa, Zea mays
  Clone ID: MRT4577_169901C.1.pep
GGRQPARRRRNQRHLRHMAEGQHPGLSRHLPHRRGRRRGNHGQAGGGTSSAVKQVDNAGAPAGDTSGVVGDHN

SEQ ID NO: 261281 - protein, 30 aa, Zea mays
  unsure (1)..(30): unsure at all Xaa locations
  Clone ID: MRT4577_169902C.1.pep
XFFFFITNVFVYFLKYKXLFQSKFWDMRNH

SEQ ID NO: 261282 - protein, 298 aa, Zea mays
  unsure (1)..(298): unsure at all Xaa locations
  Clone ID: MRT4577_169903C.1.pep
MRSLRSTMEILSRDVPRVFQELADVSTAKSLFLRRESDVWDSLWSQRVVLTVANERLAQRSAEVVDLRLLCDELKSEAVLAQAEALSARELVASQAEEMRLRQLELGQAIGERDQSRSQAVKAVSRAEALRGQLAEATERRAEASVWAEGFETALDESVKNCKALAEADEQKEGERVAMSEAISAFCQAFGLDGVPSGSXPQSHLRALGGXMRAFAMLASHYDVDLERVSEGYCLPDDEEAALAEVQRLDAAVEGPSAALASSFEVEVLPPVSPPGARPDSAEGGNDAEGAAPPPAAV

SEQ ID NO: 261283 - protein, 185 aa, Zea mays
  Clone ID: MRT4577_169905C.1.pep
SARELVASQTEGMRLRQLELVQAIGERDQSRSQAAEAVSRAEALRGQLAEATERQAEASVRAEGMFCPLVTLFLSPFFFLRLKNVVLLSAGFETALDESVKNCKALAEAAEQKEVERVAMSEAISAFCQAFDLDGVPSGSSPQSHLRALVDHVRNRLRGVLHHGVKWAFAVLASHYDVDLERVSE

SEQ ID NO: 261284 - protein, 83 aa, Zea mays
  Clone ID: MRT4577_169906C.1.pep
GTQGFNPPLNKPPELAKWEKKPHPPPKGLWGGFNPQKPWEWRKDKPKGKKLKNPPGKGSGGGGPKTPKTFMSPQPFRPVFFGD

SEQ ID NO: 261285 - protein, 133 aa, Zea mays
  Clone ID: MRT4577_169907C.1.pep
RVIKTGLRSPDFFICFTDAVQSPQFGLSYLSPRKVFCLKILRHPQGFIFSNFVGLTYENFFMAYRVVVIQYPPAPCVKVKIVLCKNRQCLIFTFKIWTPMKMSFFSCIHKECVLLLTAFSKPPTVWVFSQSIW

SEQ ID NO: 261286 - protein, 263 aa, Zea mays
  Clone ID: MRT4577_169908C.1.pep
MSRLASGLQRLRRSSSQWEVLWSALASCGLVLFSQLAVAMVPRLFPFLSLLAMLPIAGLVFIAAIVLGRLWRRFIGVAASAPLFVLFNILLLWGVYVFVIRRETSSLLDMLINAECALLLWGFYRILSGDPGIVACDSSYLEEAGCKDFVEAIYSSEKLPMLSRVRQCTWCKANIRGYDHHCPAFGTCIGQKNHRLFMALLTGFVVAESTYTMCSTKYITRCISSGTIRSENPVSLNIVISTTLFSILQVLWQILRAVTRLYS

SEQ ID NO: 261287 - protein, 239 aa, Zea mays
  Clone ID: MRT4577_169909C.1.pep
MAVVGLSSAFAPLRGSWIAVRIRQGGQRAGISLCPSPRSRRSCAAVVRAEVSFVDADEAKRLVGEEGYTVLDIRDRAQRERAHIKSSTHVPLFIENQDNDIGTIVKRQLHNNFAGLFFGLPFTKLNPDFALTVKDKFSPESKLLVVCQEGLRSAAAADALEKEGFQNIACITSGLQTVKPGTFESVGKSELQNAGKAGLVTIQGKISVVLGTVLISAYLFITFFPDQAEKLFDLAGISL

SEQ ID NO: 261288 - protein, 62 aa, Zea mays
  Clone ID: MRT4577_16990C.1.pep
NASSRPAIHVLVGVHTIYHLILRTMRAMPENRLSATYMLIQSMNSGPYPGNISIYNAFSTIL

SEQ ID NO: 261289 - protein, 123 aa, Zea mays
  Clone ID: MRT4577_169910C.1.pep
DTIGGSTPSTSSHEKRIRTQCWAHYTRAHSQGHTWRERNIHRPMSITLLWEPSKTRKKKPPLIPENPYITSHRVRFVRQQPRGRADQATKPHSNYESSYDLHQHEPGQGPRALIASMSRPYTS

SEQ ID NO: 261290 - protein, 39 aa, Zea mays
  Clone ID: MRT4577_169912C.1.pep
HDKMACTDNAMIAMILLVALCIIHGEKEESKCIDAKASG

SEQ ID NO: 261291 - protein, 75 aa, Zea mays
  Clone ID: MRT4577_169913C.1.pep
RVDPFFREIKKGRLAIFSMFPFFIQPSVPGERPFETLPKHFSGPFGNNLLPVISGASQGTPSLLGRSPFLFIPSH

SEQ ID NO: 261292 - protein, 125 aa, Zea mays
  Clone ID: MRT4577_169914C.1.pep
TRKTPPNGEETGGSPRKKSPRPAEALPVAMVPVEAAVGASDEKLCKCNHAITDSDIWELVHSLTTKDAWICCACRRKDEKRDLLICVGCYSHLCCGVGSIAYPFGHSRSHALKKKHWFAVLYSDP

SEQ ID NO: 261293 - protein, 82 aa, Zea mays
  Clone ID: MRT4577_169915C.1.pep
THSGRLPSHRRSILKAPSQTSGPRQVHLCRTPSKPDRRDLCDTTINRHSRRLGYCRHASHTRAKDQRGSRRDWGLTASRVRH

SEQ ID NO: 261294 - protein, 60 aa, Zea mays
  unsure (1)..(60): unsure at all Xaa locations
  Clone ID: MRT4577_169916C.1.pep
PLXESAAXXTRMPLIXHLRXXAAAPWHKYQRTPLFEAXSGXXRVRKATEMLLRQEXPCGX

SEQ ID NO: 261295 - protein, 59 aa, Zea mays
  Clone ID: MRT4577_169917C.1.pep
QLIYAGYTCKQGWFFTQCISDPELRYASCFYLWVMNRTFYIYMSDTSHGQVITLMSVFF

SEQ ID NO: 261296 - protein, 64 aa, Zea mays
  unsure (1)..(64): unsure at all Xaa locations
  Clone ID: MRT4577_169918C.1.pep
HHLAHNLHFSFKKKHKGPDHSXIIYYXQHIHIFHLPTIHVFQYFNSTLLFISLHPLYYTQHLIH

SEQ ID NO: 261297 - protein, 140 aa, Zea mays
  Clone ID: MRT4577_169919C.1.pep
LVHGLANISSVLQVHCVHVNLAGRLLSCPPQQQVSFILGSITFTILSIEEAPSLSSSSSVIMSLWPFHLMFMVQSVHNNPQFFIHSTRSLGGCATSFVFFILPYVDQSAALSKSSPTILLAEAGEAVQEEQISTDLDRIQ

SEQ ID NO: 261298 - protein, 72 aa, Zea mays
  Clone ID: MRT4577_16991C.1.pep
SIHKHTKRSALATTYQQLLPGYELYLRFLPLLSSTSHAFIIAHCLLAPRAIILETLLPLTARCYVHRAVEAN

SEQ ID NO: 261299 - protein, 134 aa, Zea mays
  Clone ID: MRT4577_169920C.1.pep
QQGSPECGLSSAPPPPPLSSSSSSPSPPASDSAASPTSSTAAPRAPPPTAAASAGTPTAPTSPPAPPARSPSRASSTPPSPPSAPARTAPTPSSATRSPSTPTAATSSAPPSSTAPPRRPRPCSTSSWTAPSGP

SEQ ID NO: 261300 - protein, 48 aa, Zea mays
  Clone ID: MRT4577_169921C.1.pep
SHGLTRFQARVNNTDLVLSMGVLCKPNYLMDTFKNECIFLMNNGSKIK

SEQ ID NO: 261301 - protein, 64 aa, Zea mays
  Clone ID: MRT4577_169922C.1.pep
VYRDLSLRKQCGMLADVLESKMNTNVRNSYACNLRGLYDGYSTCWNWMGPAADVVPTVFMGGAV

SEQ ID NO: 261302 - protein, 80 aa, Zea mays
  Clone ID: MRT4577_169923C.1.pep
HAYVRSEFGSSSNYIRTLFVFPTHTLKQGRGFFKTRRGYLKPQPWFTAIAPNKCPYSLKTYAYLLYCILPLFRAGLVSTS

SEQ ID NO: 261303 - protein, 25 aa, Zea mays
  Clone ID: MRT4577_169924C.1.pep
TLSSFFYLSVARMLILLEIHYVSLS

SEQ ID NO: 261304 - protein, 81 aa, Zea mays
  Clone ID: MRT4577_169925C.1.pep
HLCYRRPLGRLRCRKREPLCLIGLVTSKERGALVSTAIHVPLAQRRQDVEGGLSQRKGCWLSCKTVHLKPASEGWIVNPAA

SEQ ID NO: 261305 - protein, 66 aa, Zea mays
  unsure (1)..(66): unsure at all Xaa locations
  Clone ID: MRT4577_169926C.1.pep
VCLTAARHNNIWNVYPLDXXALDEATNKRGPHLGNTHRKKTMNTPLRTEIYDGHMQRGGKKQRPPL

SEQ ID NO: 261306 - protein, 388 aa, Zea mays
  Clone ID: MRT4577_169927C.1.pep
PGFTLTARTVAAGHSWEELQKDLDGLLSTWKGITEHAQSAALAADEGVEGAVPVMLHRAKGQTLSVVQDDFNEKVKRLVVDSPRTYHEVTSYLEEVAPELYSRVELYEKRKPIFDEYNIEKEIDNILCKRVPLNNGGSLVIEQTEALVSVDVNGGHSMFGQGTSQEKAILEVNLEAAKQIARELRLRDIGGIIIVDFIDMSDDSNKKLVYEEMKKAVEKDRSTVGVSELSKLGLMEITRKRVRPSVTFMISEPCTCCHGTGRVEALDTSFSKIEREICRRLAASRRKSDPEKPKSWPRFVLRVDHEMCTYLTSGKKTKLGLLSSSLKVWILLKIARGFSRGAFELLPYSEKENYSMEKETSELPQKESRPKLSVFPIKKWMSRAKRAK

SEQ ID NO: 261307 - protein, 56 aa, Zea mays
  Clone ID: MRT4577_169928C.1.pep
GNRHYNASSHSLFSDLTGSVLANAAHIMLCSTCHDAIPLTYHLPYKQHLQAKLAFE

SEQ ID NO: 261308 - protein, 97 aa, Zea mays
  unsure (1)..(97): unsure at all Xaa locations
  Clone ID: MRT4577_169929C.1.pep
MSIQLTKMFESRCSPIKETLASAAPETHVEVARADSKRRKPPPVHRSYVSMECASMTXEPETPKMPVEERXAFGNCLGSISDQLPPPRSLLLALLNL

SEQ ID NO: 261309 - protein, 114 aa, Zea mays
  Clone ID: MRT4577_16992C.1.pep
KKKRGRWFIRDLPIQGLILGIKRKTRGEKKALERQIFIKGKGKKKVLGGAPGNGENSPMGGDIFWAKLKMGGSVEEGFFRPKKKNQKTKKKKKGGRPFFFFFFSIRGEEGGKNV

SEQ ID NO: 261310 - protein, 271 aa, Zea mays
  unsure (1)..(271): unsure at all Xaa locations
  Clone ID: MRT4577_169930C.1.pep
RAPAGSCWAPAAAGARARAGSSGTRAWRPSPRPPARSPWAPVRPLRRALQGLDPLTAASMFAGARCIGERKVNGEDCFILKLSAGPETLPARSEGLAEIIRHVLFGYFSHKSGLLVHLEDSHLTRIQSATGGDAVYWETTISSSVEDYRAVDGVVVAHAGXSAVTLFRFPRLAHPXGEAAMSHTKTRMEEAWTIEEVAFNVPGLSVDCFIPPADIRSGSVGEACELPSQPHGERARTGAAVHPSRVAAVERAGTAAGAGGRGEKVMWRVQV

SEQ ID NO: 261311 - protein, 54 aa, Zea mays
  Clone ID: MRT4577_169931C.1.pep
SSTRSSTRSKKKKKKKKKKKKKKKKKKKKKKKKKKKKKKKGGAFLKNQSLLPLE

SEQ ID NO: 261312 - protein, 39 aa, Zea mays
  Clone ID: MRT4577_169932C.1.pep
GCRGRDQREKHHGEEYGDGLGRAGHGDRRREGALSEVLG

SEQ ID NO: 261313 - protein, 70 aa, Zea mays
  Clone ID: MRT4577_169933C.1.pep
MVTSTTADDVLSPPSVDGLRLTPSPRERVSFRAASSRRPLPALAHLRPSLPIWLSTGATLLLGRFDFLHF

SEQ ID NO: 261314 - protein, 44 aa, Zea mays
  Clone ID: MRT4577_169934C.1.pep
MAMAYKMATEGMNAKEECPRWFMEMKWKKAHRFVVHKIHERWCA

SEQ ID NO: 261315 - protein, 58 aa, Zea mays
  Clone ID: MRT4577_169935C.1.pep
GTLNTGAICFNFHMYHGRNCFFYFFLKYAACHSGMAYSVVSLKQSILNPNDVKCNSKS

SEQ ID NO: 261316 - protein, 56 aa, Zea mays
  Clone ID: MRT4577_169936C.1.pep
EPWALCLNTACFLIKLGWLRCLSEIIGRGGWRVSGPIQGCQWVLLPEIFLLSFLSP

SEQ ID NO: 261317 - protein, 39 aa, Zea mays
  Clone ID: MRT4577_169937C.1.pep
PHSYFYYFFYTIFFFFSYFIFFRDSFILSFSVINTPHYT

SEQ ID NO: 261318 - protein, 91 aa, Zea mays
  unsure (1)..(91): unsure at all Xaa locations
  Clone ID: MRT4577_169938C.1.pep
LCLYHVHATVIEGKPDLGKIVMSASIYRQRKPLRFMDGVYMHYQVYAGVKVNPKVEMKGSVFTGPIVLXCLTFGTRFASALNANCLRVWCN

SEQ ID NO: 261319 - protein, 78 aa, Zea mays
  unsure (1)..(78): unsure at all Xaa locations
  Clone ID: MRT4577_169939C.1.pep
LGCGLKRGVVGGMGVLLIINKTKSPIPEGKIVKVGWNFVIKGFRQTLMGWGFWGXCLKSPAFGLWGCVGGKKEKRGGG

SEQ ID NO: 261320 - protein, 67 aa, Zea mays
  unsure (1)..(67): unsure at all Xaa locations
  Clone ID: MRT4577_16993C.1.pep
XGIPGQPHPSSPLTYFRRPFSHLKNFPTKERGLNNNNGEIPNPLFPQPPQPKHNNQPLLVGPPPSLL

SEQ ID NO: 261321 - protein, 35 aa, Zea mays
  Clone ID: MRT4577_169940C.1.pep
TCRVPDLTTNQYKLPNILNVRLMVLFLTEEGHSIS

SEQ ID NO: 261322 - protein, 91 aa, Zea mays
  Clone ID: MRT4577_169941C.1.pep
IVRRLNEIVREDIIQFILRHAVLATKLRIHLRLWFRLITLSRLKYRSRTRCKLVCLHRDRNSHENYPTRFGQNRLRCYSSDFRFMIRKMDK

SEQ ID NO: 261323 - protein, 75 aa, Zea mays
  Clone ID: MRT4577_169942C.1.pep
DDVRQEPGAGSGVEEREANEVQGSPRRDHRMTSGSLEIEYSCFFSLFPCLIACSSARCMGCWGYLEHEKPLWLPI

SEQ ID NO: 261324 - protein, 86 aa, Zea mays
  Clone ID: MRT4577_169943C.1.pep
RELLASSDFIVFWIWNSPLPQHIGRDFSAGLPKVAQVIRLSHVVGRLSTLQHLHVAGFCWAQHSVSFLSWLLTALQLCLLSISKEG

SEQ ID NO: 261325 - protein, 38 aa, Zea mays
  Clone ID: MRT4577_169944C.1.pep
RLIHQDVVRCPPHKRIAGSAISSHIGLHACRWYNVIQA

SEQ ID NO: 261326 - protein, 104 aa, Zea mays
  unsure (1)..(104): unsure at all Xaa locations
  Clone ID: MRT4577_169945C.1.pep
RATLLLGDALNEWTHLSINPLALWAWAALLMNAISTIPAGELDGVRIXLSMRLKKGIRPGSASLAIXLLVSACLFNDDSLYWARLIFFLQRGHIDLLFEEITHL

SEQ ID NO: 261327 - protein, 104 aa, Zea mays
  Clone ID: MRT4577_169946C.1.pep
FPLENLCTEFESRARLDSFFPFKPLSTCEVKIGSDFAAWMQVLGSSHRLPPALVVSRLLPLCFAAFSYSSEGSANGWAPDGVVSRSTDGSLKLAGCLDVHVGLF

SEQ ID NO: 261328 - protein, 417 aa, Zea mays
  unsure (1)..(417): unsure at all Xaa locations
  Clone ID: MRT4577_169947C.1.pep
EVANLASVPALGFLCLVGVMGSTGLELEFTEDGNGLHEPLLLGRQRREAEEELGCLRVTPYADAGILSLATLSWLSPLLSVGAQRPLELADIPLLAHKDRAKSCYKAMSAHYERQRLEYPGREPSLTWAILKSFWREAAVNGTFAAVNTIVSYVGPYLISYFVDYLSGNIAFPHEGYILASIFFVAKLLETLTARQWYLGVDIMGIHVKSGLTAMVYRKGLRLSNASRQSHTSGEIVNYMAVDVQRVGDYAWYFHDIWMLPLQIILALAILYKNVGIAMVSTLVATVLSIAASVPVAKLQEHYQDKLMASKDERMRKTSECLKNMRILKLQAWEDRYRLQLEEMRNVECRWLRWALYSQAAVTFVFWSSPIFVAVITFGTCILLGGQLTAGGVLSALXTFRIXQEPLRNFPDLISMM

SEQ ID NO: 261329 - protein, 75 aa, Zea mays
  Clone ID: MRT4577_169948C.1.pep
VAWLGAALLAALPLGRPSCHPAPVRGGTVLEPPCWPGVAALGGGGPFMIPFAEGPLVSPFCLASAGPARVGWVAP

SEQ ID NO: 261330 - protein, 117 aa, Zea mays
  Clone ID: MRT4577_169949C.1.pep
FPLPLLKKKTPLAPKTPTPSLPALANSLKQLAHQIFLLENGQLPPLHLFYLAPSFGPPGFTLYSSRSVIFLQFLPQNHFPPPPPITLFPPSFNPPPPPQNWFPFKNQTKNPKTNHPT

SEQ ID NO: 261331 - protein, 87 aa, Zea mays
  Clone ID: MRT4577_16994C.1.pep
IFHLDVPSCLNKSYSSSPFWPALSDAPGRSSVGNEPRNRVGHSWPIRHVWSLRNGAVSKAHRLQPGRYRISLDTPFTTREQTCGSET

SEQ ID NO: 261332 - protein, 535 aa, Zea mays
  unsure (1)..(535): unsure at all Xaa locations
  Clone ID: MRT4577_169950C.1.pep
TVETRTSLDNNVDRDDLQRKIVRPPANLLVFEGDVLDSEASELDSYLLSTCDFYGDFLLLDPCDAPSVFDFLQGKHSGKENSVARQGSPAPSKSQANVFTSPNARSAGTGCKAASGKVLGFXIQLRRILTNXTQETSPDDKHWSDPVEPNFTDDVEKPHPDDIGDPVGDYSDDEDPWKPLNPHEPGSLKIRPYRRVKGSLRGVIGTLRKKTLTSIFPVAKMVGVIIPEHAKSFEAQQSQQEEHYGSQSPPRFEKYLASFEFGEENSNVFGDLKDDNGSDIGINFDYNDPDMPNDIDVDPDVPTYPDEIIAATPKGTHGTQDDRDTRESLDDLCRSHLNALLASIAEVEKQSEMDARVSTWKERIEIALEEQDKNPPFDIGSYGEQILDALSSRTDSTGTASFSEIVCGRPKYEVARTFSALLQLVNSRSVYLDKGQATNELVCYTAENPFHVRLIGPNRRPEMEAHFARKRVKSPLRNAGKGGESSLARHECPKKPLHKNGKIQVKTAIRLTPDGKRRRRSVTHLMQPINLESSG

SEQ ID NO: 261333 - protein, 83 aa, Zea mays
  Clone ID: MRT4577_169951C.1.pep
VRADAHQVPPLSQRVLIIMLSRRLHGHQPSVQRHRRPEGLRPGVQPVAAVVIIRLRLLPVLRLVSRAPSCWCRSRCRRVVWRD

SEQ ID NO: 261334 - protein, 79 aa, Zea mays
  Clone ID: MRT4577_169952C.1.pep
LLERMVRKNREEDLISSSNSWETTLGAVTAIRTAAMLTQTNPHGAGLNSVQRASERIHVYTSVCMSCGFLNHRISSNAW

SEQ ID NO: 261335 - protein, 56 aa, Zea mays
  unsure (1)..(56): unsure at all Xaa locations
  Clone ID: MRT4577_169953C.1.pep
PTRPKKKKLNKKKKKKKKKKEKKKKKKKXKKKKKKIKKKKKKIKKKKXKKKKGVNF

SEQ ID NO: 261336 - protein, 120 aa, Zea mays
  unsure (1)..(120): unsure at all Xaa locations
  Clone ID: MRT4577_169954C.1.pep
MAFPRTYARNKMMLDKNLGRPLEEGPKALIXLASDAGSDESQNIPRGLRDHSLVFMGNNTLIGXTLXVYAEKTGIHSFDPFMDLLVGNVGLILTNGDLNEVHQEDHMYKVVAPARVALGA

SEQ ID NO: 261337 - protein, 85 aa, Zea mays
  Clone ID: MRT4577_169955C.1.pep
NDLLQFNIEYLSVKITINVYKNLHNKRKNRQCSTFRKIIKSFIAFTGKCHTENLQYSNLLQSQGSPIKKQSSYTPGFRKVLLECL

SEQ ID NO: 261338 - protein, 211 aa, Zea mays
  unsure (1)..(211): unsure at all Xaa locations
  Clone ID: MRT4577_169956C.1.pep
MSTAAPAPGSTATVRVSNIPASAIAAELLAFFDSAVTIAGATFACEIVAAHRGWLSRGHGFVQFDSSAAATHAIDLASSGRLPPFLGSCLSVSPARADLLPRAPDLSLRAASASLILGNRVAERELEVAYSCDGVRAEVIPRMRRVDLYLKHDSQSYKLEVLFEDINECFGCHLDGTGAILLQLTYAPRIHTAISGSTVKSRVTDDRXHAC

SEQ ID NO: 261339 - protein, 93 aa, Zea mays
  Clone ID: MRT4577_169957C.1.pep
ARERADPCRLSRHANRLLPMRACSLIPAFAPLLNLNGRTSIKLQPVLVLPLPQPATVLALLPHLLPRSSYTLHYLDCLRTHLASRHCPRLPGT

SEQ ID NO: 261340 - protein, 142 aa, Zea mays
  Clone ID: MRT4577_169958C.1.pep
PGSPPGSDFFARRFVPPPPFFFFPFAQGAPRVGETAPPPFNGGLSRAWGGSWKGFLFGFRPPPPPKLGSGFSRAGGFLFSPRFFPPFFPPIFPPGRAGLRVFLLSPPVFPPVFSTPCFFPGPPVLVLFRGVNKVKTKGMATD

SEQ ID NO: 261341 - protein, 69 aa, Zea mays
  Clone ID: MRT4577_169959C.1.pep
MGVLGQRKERNGDYQNHYDIKKYMGAAIIEIGMLEQLAKCTSYHNLFHFNDNHKNSSGAYIMRKKDFGF

SEQ ID NO: 261342 - protein, 835 aa, Zea mays
  Clone ID: MRT4577_16995C.1.pep
MPLAAMASASSSPCSRHPLILVVLLCAIAAISFSSSAAAGTVGGGTGGLGPISTNGKNYTKVCDPARFVALGLDMSRFRYCDASLPYADRVRDLVGRLALEEKVRNLGDQAEGAPRVGLPPYKWWGEALHGVSDVGPGGTWFGDVVPGATSFPLVINSAAAFNESLWRAIGGVVSTEIRAMYNLGHAELTYWSPNINVVRDPRWGRASETPGEDPFVVGRYAVNFVRGMQDVDDRPYAAAADPFSRPIKVSSCCKHFAAYDVDAWFKADRLTFDAQVEERDMVETFERPFEMCIRDGDASCVMCSYNRINGIPACADARLLSETVRSQWQLHGYIVSDCDSVRVMVRDAKWLNYTGVEATAAAMKAGLDLDCGMFWEGARDFFTTYGVDAVRQGKIKEGDVDHALSNVYTTLMRLGFFDGMPEFESLGASNVCTDNHKELAADAARQGMVLLKNDARRLPLDPNKINSVSLVGLLEHINATDVMLGDYRGKPCRIVTPYNAIRNMVNATYVHACDSGACNTAEGMGRASGTAKIADATIVIAGLNMSVERESNDREDLLLPWNQSSWINAVAMASPTPIVLVIMSAGGVDVSFAHNNTKIGAIVWAGYPGEEGGTAIADVLFGKYNPGGRLPLTWFKNEYVNQIPMTSMALRPDAALGYPGRTYKFYGGPAVLYPFGHGLSYTNFSYASGTTGATVTIHIGAWEHCKMLTYKMGAPSPSPACPALNVASHMCSEVVSFSLRVANTGGVGGDHVVPVYTAPPPEVGDAPLKQLVAFRRVFVPAGAAVDVPFALNVCKTFAIVEETAYTVVPSGVSTVVVGDDALVLSFPVTINLAV

SEQ ID NO: 261343 - protein, 47 aa, Zea mays
  Clone ID: MRT4577_169960C.1.pep
TRSATFHHIRCQVLQTMWRLVQCCPHGVYHILSCYYSFCLITIIVSI

SEQ ID NO: 261344 - protein, 213 aa, Zea mays
  unsure (1)..(213): unsure at all Xaa locations
  Clone ID: MRT4577_169961C.1.pep
MGDEDSAYYLLESRLRDPSADPTDLPLSLFKSITNNFSDKEVIGSGGFGVVYEGVLPSGIFVAVKKLSDALVEDKLFQDEVACLIRAKHRNIVRLLGYCADTQGKITEYKGELIMAKVRARLLCFEYVSGGSLDMHLEDEFCGLEWHQRYIIIKGICHGLRHLHEEQKIIHMDLKPQNILMDPNMVPKITDFGLSRLIGIXQSRIITMNNFGT

SEQ ID NO: 261345 - protein, 149 aa, Zea mays
  unsure (1)..(149): unsure at all Xaa locations
  Clone ID: MRT4577_169962C.1.pep
MPITSTASRARTTGRHQCGACRKVFRSYQALGGHRASVKRGKGGCVPVPVPVPPPAAPSSKARRAENGPAVHECPFCFRVFESGQALGGHKRAHMLSGAPXPAAPVPLDGSSEMRRXSSMSIDLNVPAATDDDFELSPVYDTEFGGTRQ

SEQ ID NO: 261346 - protein, 161 aa, Zea mays
  unsure (1)..(161): unsure at all Xaa locations
  Clone ID: MRT4577_169963C.1.pep
SAGTPGEAEQKGKKEDXRADHNDPPDDFYIITHHSGMXASIPTINFLLHKGAKVILPIHLGRPKGVTPNYSLKPLVPRLTELLGVELVMANDCIAXEFQKLAAALPQRLVLLLXNVRFYNEKEKNEPEFPKNLTXVPHLYLNYAQGTTHISYASTERLTNY

SEQ ID NO: 261347 - protein, 86 aa, Zea mays
  Clone ID: MRT4577_169964C.1.pep
ACERLLLLQRTPEQGSRERSPSPLLEVGGAAALPPRARSVWTHSYLTKWWRSAASELAMPRGPSMAATCPTVSRTRGAPPADIYNP

SEQ ID NO: 261348 - protein, 87 aa, Zea mays
  Clone ID: MRT4577_169965C.1.pep
TKRHATLPVTLISRLLNYCPDTNISNEPIFLHSIHHSLVTSQPLTFSTTIFHTLFQHKPDSSTHIISKRPISLRMSCSSILQAPSST

SEQ ID NO: 261349 - protein, 63 aa, Zea mays
  Clone ID: MRT4577_169966C.1.pep
KTPPGKRVGPPPVEKRNCWPSPGVFCKKLFSPVPPVKKKKKKKKKKKKKKKKKKTQKKKKKKK

SEQ ID NO: 261350 - protein, 44 aa, Zea mays
  Clone ID: MRT4577_169967C.1.pep
GRQIDPEAAYRPQAVDEPVVYSMGSLMMYWSRLYQGALRRAMGS

SEQ ID NO: 261351 - protein, 88 aa, Zea mays
  Clone ID: MRT4577_169968C.1.pep
IRKYCMHETLIILMIEHDTQHLSTHASCSFIQKIPRSRDYDNFLLILHACNPLTTKDVAATRLMILLLIGSKAGNEITINDATNAQSN

SEQ ID NO: 261352 - protein, 46 aa, Zea mays
  Clone ID: MRT4577_169969C.1.pep
VLQGGKRQEFSHLKVQVFFGFGQKVGPPNWKLKPPFRVLGANFFVF

SEQ ID NO: 261353 - protein, 69 aa, Zea mays
  Clone ID: MRT4577_16996C.1.pep
EKLDAFAAELVKEQQRRARSPGLPTVVIRQARPTATATPRLSSATTASSATVRTASTVPSPASQGSYQH

SEQ ID NO: 261354 - protein, 293 aa, Zea mays
  Clone ID: MRT4577_169970C.1.pep
MPRPEFQAPPDVFYNESEARKYTTSSRIIEIQSRISERALELLALPNDGVPKLLLDIGCGSGLSGETLTEHGHHWIGYDISKSMLDVALERETEGDLLLADMGQGLGLRPGVIDGAISISAIQWLCNADKSSHEPRLRLKAFFGSLYRCLARGARAVLQFYADNVKQSEMIVTFAMRAGFAGGVVVDWPHSSKAKKSYLVLTCGPPSVTTSLPKGKGENGEACSDDDDNESSGEDGDRTVGIYERNRPKKRQKTKKNGKGKDWLLRKKEQMRRRGHDVPADTKYTGRKRKGYF

SEQ ID NO: 261355 - protein, 53 aa, Zea mays
  Clone ID: MRT4577_169971C.1.pep
ACQRKGRIVALSAHVDRASSISSHNISVGIDTLPMLMDSAVNVKSWCQSYASR

SEQ ID NO: 261356 - protein, 51 aa, Zea mays
  Clone ID: MRT4577_169972C.1.pep
LAFPMTASRKTWFLINKPKCLGLFSISGKVNHTQKVTLHTILSLVLEACFI

SEQ ID NO: 261357 - protein, 63 aa, Zea mays
  unsure (1)..(63): unsure at all Xaa locations
  Clone ID: MRT4577_169973C.1.pep
VFLFKRELTKGGSICIWEVMXTDQAAIRAGIGRSTFARIKLHAPPTDXLLFYTISNFFLQKMK

SEQ ID NO: 261358 - protein, 364 aa, Zea mays
  unsure (1)..(364): unsure at all Xaa locations
  Clone ID: MRT4577_169974C.1.pep
MSRRVPCKFFLHGACFKGDYCEFSHDCNDQPDNVCTFYQKGTCTFGSRCRNEHVEVHCNCPQPATTVARASSNSSQLXLLPEIPIAANAKRIYVTKHSRFASQQQXSAHQPAWVVDYHDHDTPDDTTSWPLHQAVQNQTSQYPVHLPICSSTADGTCPYGKGCSQMHGDLCAFCERQCMNPYQSDERGVHVKLCKKNNRVLEAMRRSEDIECGVCLDRVLSKPTAAERRFGLLSDCDHSFCISCIRNWRSTSPTSGMDVNSTLRACPICRKLSYYVVPSITWYSSKEEKQEIVEGYKAKLRSIDCKHFDFGKGTCPFGSSCFYKHAYDDGRLEDALLNHHDADDASAAIAKLMRLSYLLTRLHV

SEQ ID NO: 261359 - protein, 129 aa, Zea mays
  Clone ID: MRT4577_169975C.1.pep
ATGEVVHIFRPLVYVLLIRKFGIKSWTPWLVSLAVELTSLGVHSHATDMNHRLGKVHQLSSAERDELKRRKMMWALYVMRDPFFASYSKRHLLKAEQVLNPVPLIGFLTGKLVELLEGIQTRYTYTSGS

SEQ ID NO: 261360 - protein, 107 aa, Zea mays
  Clone ID: MRT4577_169976C.1.pep
TPPPSKKSVLVAAPPPADTIKVFGPANPVVDLWSLTLVIKKEWQFAWHYNLCSPPPPHWGAKRKHGMFPPPFVLSVQMIMNKTKNKSESTKKTVKGKKKKNEKNHVT

SEQ ID NO: 261361 - protein, 142 aa, Zea mays
  Clone ID: MRT4577_169977C.1.pep
GRFFFFFFGFFFFFFFFFFFVFFSFFASTKNKLKKDASHTGQEKVWAQPRGHKRPSKPTTRGGGRQPQKPTAASQPRPQIRGTPAGHRNTHIPTCRARLSEPWWTDHRKRACPGREGSHRGRRASESSGQSARRTLIRERAE

SEQ ID NO: 261362 - protein, 180 aa, Zea mays
  unsure (1)..(180): unsure at all Xaa locations
  Clone ID: MRT4577_169978C.1.pep
MEAYKLWVRRNRDLVRSLESLANGLTWILPERFANSEIAPEAVMVAEKPTLASIWSAKGGTGRLFVLGEVVHIFRPLVYVLLIRKFGIKSWTPWLVSLAVELTSLGVHSHATDMNHRLGKVHQLSSAERDELKRRKMMWALYVMRDPFFASYSKRHLPEAXQVLNPXPLIGFLTGKLVEL

SEQ ID NO: 261363 - protein, 374 aa, Zea mays
  Clone ID: MRT4577_169979C.1.pep
MEAYKLWVRRNRDLVRSLESLANGLTWILPERFANSEIAPEAVYALLGIVSSVNQHIIDAPTENHSFASKEQSIPWGLVVSVLKDVEAVVEVAAQHFVGDDRKWSFLAVTEAVKAGVRLAAFRESGYKMLLQGGEVVNEEEVTVLENNYGVNGNGVPAIYPMDGHAENGHKTMAKGLDGKNGFVSKSLEKRAVAALNKFGENAKMMSDPMWMRRLQPTPEPTVMVAEKPTLTSIWSAKGGTGRLFVLGEVVHIFRPLVYVLLIRKFGIKSWTPWLVSLAVELTSLGIHSHATDLNHRLGKVHQLSSAERDELKRRKMMWALYVMRDPFFASYSKRHLLKAEQVLNPVPLIGFLTGKLVELLEGIQTRYTYTSGS

SEQ ID NO: 261364 - protein, 574 aa, Zea mays
  Clone ID: MRT4577_16997C.1.pep
MVMKDIPSSLQHTIKKENHMESPLRVASALRQPSYSLCFSHCGSDPRPKITKEILEGLSEDTDDSDNYDAESGGEDSEDRPWRPSHAVFGKSTIKQSHLDNMRGRYFRDLSIVGADADRAVPAPEENEVVIYRSFFKAGLRFPLSRFVVEVLKTYQIFLHQITPEAIIIMGIFVWAVRSQGLEPSAKCFSSMHELSYETKPWGKEQYHNNFGCYGFVSRSGSSYRVPTFRKRWPEAWMEEWFYVKNDFKAREDIKEIIMRPIWSRFGLRKPKVEIDEAAEAYQRAFSTVCAFIGTRDLVQEHVAYRIWPLIDSSEMSKETITNPSEGGLVRLKYTFRFGDQFIEPDDDWLKCVENTSDELLGAYSKSEDNALSAAFGSQKKKRLNRVFDAIGFVYLDYRYPPRGQKRKGTTSGKVAASAAPSEPALKRKKLKVLTHRPRYIEPAIVPLSGGETSSAAAPKEPTPPIQKAEELATMPKTDKIEEPRTEETKTLEVLSPSAGVEVPKTQKGLAATPKRKRMASVLDVLETIKASGSTPGKIAQASKTQIETETKLTEAEAILSQADAEAGPSEPTK

SEQ ID NO: 261365 - protein, 143 aa, Zea mays
  unsure (1)..(143): unsure at all Xaa locations
  Clone ID: MRT4577_169980C.1.pep
XSRPWLYRQGRGLAHXLDWHRMCGQQMATEPLQELYSXGQCTLETETXWNERCSMLYWLXVSVGALLSLAQSLTXINALVYYSTLSVARAHIXSEVGARALGRTIKDLGTMEAAMVMDKLETKSRIISNPLGMCTHKLQLGSS

SEQ ID NO: 261366 - protein, 150 aa, Zea mays
  unsure (1)..(150): unsure at all Xaa locations
  Clone ID: MRT4577_169981C.1.pep
AMSEKLDRLELXXESKDKQLEELHGLYESQKVLSADLSDQLQTLQKRMKETECTLADLETRYMKANDTIKEKQYLIENLLKSEKVLVGEAQTLRSELENTAGDLHGLFSKLERKEKIEDKNGSIIQYFHSQLIQEMNVLHRTVSTSVFQQ

SEQ ID NO: 261367 - protein, 64 aa, Zea mays
  unsure (1)..(64): unsure at all Xaa locations
  Clone ID: MRT4577_169982C.1.pep
WGGLAFSLNFSIFXVIHSTTAVGFKVAGTLKVPVAVLVSWSFFRNPIFAMNAMGGGIPLVGCPF

SEQ ID NO: 261368 - protein, 47 aa, Zea mays
  Clone ID: MRT4577_169983C.1.pep
IVATSEGLLMVHHPLMEIDHLEDFVAGESRHIICTRCMNDLLLLVRN

SEQ ID NO: 261369 - protein, 151 aa, Zea mays
  Clone ID: MRT4577_169984C.1.pep
MGILDHLSHLCSITETKEALKLRKKRPLQTVNIKVKMDCEGCERRVKSAVKSMRGVTSVAVNAKQSKCTVTGNVEPAKVLERVKATGKNAEMWPYVPYALTTYPYVGGAYDKKAPAGFVRSAPQAMADPGAPELKYMNMFNDDNVDACTVM

SEQ ID NO: 261370 - protein, 153 aa, Zea mays
  Clone ID: MRT4577_169985C.1.pep
MKRLTQDEDQEQEQEPGVVVSVAQGVTLLLARSGGGGGGGEPRASPRVFECKTCSRRFPSFQALGGHRASHKRPRAAPAKARPHGCGVCGVEFALGQALGGHMRRHHRAVAEECEARDGAAASAHGMDVDDAEAKPEEEATGLLRFDLNIAPS

SEQ ID NO: 261371 - protein, 151 aa, Zea mays
  Clone ID: MRT4577_169986C.1.pep
MGILDHMSHVCSITETKEALKLRKKRPLQTVNIKVKMDCEGCERRVKSAVKSMRGVTSVTVNAKQSKCTVTGYVEPAKVLERVKATGKNAEMWPYVPYTLTTYPYVGGAYDKKAPAGFVRSAPQAMADPSAPEVKYMSMFSDENVNACTVM

SEQ ID NO: 261372 - protein, 54 aa, Zea mays
  unsure (1)..(54): unsure at all Xaa locations
  Clone ID: MRT4577_169987C.1.pep
CKQRRAFVNWXVGEGIKKGEFSKARKNLDALKKDYKEVGFEFKKGEDGHKGNQF

SEQ ID NO: 261373 - protein, 99 aa, Zea mays
  Clone ID: MRT4577_169988C.1.pep
PLSAPLFPFSYLPPTQSNKPGLKILYSHPPTLLYSFPFSPTYSKPILTKFFSYSHPDINHYVQSSTTCYYISIVTCNFQLLIVFIIPLQLFQHQSTNFQ

SEQ ID NO: 261374 - protein, 76 aa, Zea mays
  Clone ID: MRT4577_169989C.1.pep
GRQRGPTRLFQGMRPSEAPSRHRNSLRGSIMGFISRRRFTDPTIYFIHSYAWSPDAISACPVCSWIFSIQEVFPQF

SEQ ID NO: 261375 - protein, 199 aa, Zea mays
  Clone ID: MRT4577_16998C.1.pep
TASEGEAAALPELALAPADKDAADADRKPYLDAAAAGSNNGGVLSARRDVVQSGVVKPAPEGQQAAPPQTHRKARRCWSPELHRRFVNALQILGGAQVATPKQIRELMKVDGLTNDEVKSHLQKYRLHTRRPMPAPPAPATAAPQLVVLGGIWVPPEYASQAAGQAIYGAHPATQPHYTAAAQEYYPSPAAVHHLQHHP

SEQ ID NO: 261376 - protein, 58 aa, Zea mays
  Clone ID: MRT4577_169990C.1.pep
SKHINLSRDLDGRCRLIPNPSIKVWGGGSEAGRHQSHGRRATRRASSRRQQLLLRKHV

SEQ ID NO: 261377 - protein, 125 aa, Zea mays
  unsure (1)..(125): unsure at all Xaa locations
  Clone ID: MRT4577_169991C.1.pep
LQNFDPQMDKRXGGYVKNTHMHLXKENVGMLGDAXHVEDGRXLXLDYMDADALKKMNRSRHLCKRLAMKYHAXLASEVIIKQIPRLLGPGINKAGDDPXTLVTHQEYLESKVNETKATXKLHVKK

SEQ ID NO: 261378 - protein, 76 aa, Zea mays
  Clone ID: MRT4577_169992C.1.pep
REKQFLLHLHVSFFGHYVTWAHTPYITYAGIPLPTNVHALIRYHLIQGPKTLHGANNLALFFLGCLGAIPTPGPTL

SEQ ID NO: 261379 - protein, 88 aa, Zea mays
  Clone ID: MRT4577_169993C.1.pep
MSPPPLLQPLLLMLPLLNVEPSGATLSRIPLHRVQPGRRILNLLRGWREPGELPKLGAPSPGDKPIFVPLSNYRDVQYFGEIGLGTPP

SEQ ID NO: 261380 - protein, 45 aa, Zea mays
  Clone ID: MRT4577_169994C.1.pep
LAPVAINFRAGGGEIIKGRAPVVLSPLLVRALKAPPTLGPLIAFF

SEQ ID NO: 261381 - protein, 90 aa, Zea mays
  Clone ID: MRT4577_169995C.1.pep
FARISMTAWEPDGVQVNTERWNPAVTSWSAAQGISDEMPRQRRPEKTIPQISVGFNAHDRGEADEHEEAGARQLGQRCAQARALLVYAAR

SEQ ID NO: 261382 - protein, 85 aa, Zea mays
  Clone ID: MRT4577_169996C.1.pep
GGGRGGPKKKEKLYTEKQEMPADPSPFECGGAGDDFRGPGNNLLNYMSGGGGSPFFWGPHNDRHALRTCKSSSPSRHLIDNLFSL

SEQ ID NO: 261383 - protein, 77 aa, Zea mays
  Clone ID: MRT4577_169997C.1.pep
VKPPKNGDIARFWKEGVANRFGKAHNFRFWNKLWNGGKVFFRVKLLLLFPGGHHVFPQWLRILREREVLGDLLRHLL

SEQ ID NO: 261384 - protein, 71 aa, Zea mays
  Clone ID: MRT4577_169998C.1.pep
SWSSFYQLANQLSEPKANPTVTSQGWLQEINIMFTIAITIFNITFTLTTEQSHSETAKRMHNRMHEVCHGI

SEQ ID NO: 261385 - protein, 69 aa, Zea mays
  Clone ID: MRT4577_169999C.1.pep
ISRIMAILLVMNPKIGLRSSKRMFFHHFSFMRRAFNATGVLYFFYQTRMFLLWVSLSKLQLLLSNQLFT

SEQ ID NO: 261386 - protein, 42 aa, Zea mays
  Clone ID: MRT4577_16999C.1.pep
RVQSWRGDNSTDRICRLLITRLGQRVDRRTQDETKTSYRSRS

SEQ ID NO: 261387 - protein, 99 aa, Zea mays
  Clone ID: MRT4577_1699C.1.pep
NTCPSFGQSNGGLTFITSGATNIDTLSIFKLLKLKCKTILQCPCTLTLNRPIIINKLGRKELLNTNQNENTRKSTGNYTNQNQNVVGDMNQALWIFRQK

SEQ ID NO: 261388 - protein, 75 aa, Zea mays
  Clone ID: MRT4577_169C.1.pep
FKLFLQNLVCRKNLVIDKSIHTAYVRAIRSAQHYIYIENQYFLGSSYAWPSYVNSRADNLIPLELALIIASEFLY

SEQ ID NO: 261389 - protein, 46 aa, Zea mays
  Clone ID: MRT4577_16C.1.pep
ITGALFIGPILSFPFMHLYIFFFFSPKLNPLPPFFHLLHLKTPVFP

SEQ ID NO: 261390 - protein, 77 aa, Zea mays
  unsure (1)..(77): unsure at all Xaa locations
  Clone ID: MRT4577_170001C.1.pep
PTRKRPKRRFVLVLGIKRGPGYSWHGCASPSRSTAAAPPGRYKGSRXPXPXSPSARETWGEGERRRGLGFRNPAGLE

SEQ ID NO: 261391 - protein, 55 aa, Zea mays
  Clone ID: MRT4577_170002C.1.pep
MGSWGAVGVFDLGDATEFIVPEYGCLGLMPMFGSVFYTKFSVGWPRTFDQNSPYL

SEQ ID NO: 261392 - protein, 73 aa, Zea mays
  Clone ID: MRT4577_170003C.1.pep
EGLQIVHDSKVAFRNPGKGFAQKSPDIGPVKPRFSSRKRLLLQFMKARSQACCQNCNSSTISATALRETPGES

SEQ ID NO: 261393 - protein, 210 aa, Zea mays
  unsure (1)..(210): unsure at all Xaa locations
  Clone ID: MRT4577_170004C.1.pep
APAIPLFSSPLTADRKISPAPPPPPPPAXAPSSPXFSSSLPPXPSPVSPGRHIPASEAPSHSHPASXRESISPPPPAPPXPPPWLHPRXAPLFPRHLPGPPSPPPPXRPPRPAFPQTLASPPTTTSSPPAASPEPRHSRPPPSSPTSSPPPSPTPSSPSSPASASPAPTSPPSSPRTRCSSAPAWKKPWDPSQLSSPASGCRIPRTRALS

SEQ ID NO: 261394 - protein, 80 aa, Zea mays
  Clone ID: MRT4577_170005C.1.pep
HACNFAVDLPSRMWRSHPDCAPVRIAKDRVQPPNSCESVGCKTPCTLTWSLKACLGESFQTWPFENYYQSIDSGATTRTT

SEQ ID NO: 261395 - protein, 60 aa, Zea mays
  Clone ID: MRT4577_170006C.1.pep
NTLWSKVMKKKSGNLLLLAIGKPKQGSKLDTYELCPNVYKKGLGVESFGPPRKLIRASLP

SEQ ID NO: 261396 - protein, 44 aa, Zea mays
  Clone ID: MRT4577_170007C.1.pep
RKTRSKVSGRLCVGVESNRYWDSRFRGTRASSNPCSDSYHGPSA

SEQ ID NO: 261397 - protein, 203 aa, Zea mays
  unsure (1)..(203): unsure at all Xaa locations
  Clone ID: MRT4577_170008C.1.pep
MELDADNLSATELRLGLPGTSSSSSDDWQKKPSPSVGAKRALDDGTKSEASGTSPAAGDLDFDHDHDTAAPPKAQVVGWPPVRAYRKNTFQAAAAAKKVEQKQKQQQQGGLYVKVSMDGAPYLRKVDLRMYKGYRELREALDALFTNSLSAAAEGGGDHHQHAIAYEGKDGDLMLAGDAPFVXMFISSCKKLRIMKGSASEAR

SEQ ID NO: 261398 - protein, 69 aa, Zea mays
  unsure (1)..(69): unsure at all Xaa locations
  Clone ID: MRT4577_170009C.1.pep
HXPPPASTYIRPASSSLMYPASSPTSVGRKDLLIKDYTYDHNLSIFTXISSLVNPIVREAMGSAHDPXY

SEQ ID NO: 261399 - protein, 94 aa, Zea mays
  Clone ID: MRT4577_17000C.1.pep
RFGGPLFQKNSGGGAFVFGGKKKTFALKDFNWTGGGNSFLKPGDLKGGARFPWEQLLDPFSFFYQKHAFWEINLPKPLGLGLWGEKGYNGAKII

SEQ ID NO: 261400 - protein, 132 aa, Zea mays
  Clone ID: MRT4577_170010C.1.pep
MAQVVGWPPVRAYRKNTFQAAAAAKKVEQKQKQQQQGGLYVKVSMDGAPYLRKVDLRMYKGYRELREALDALFTNSFSAAAEGGGDHHQHAIAYEDKDGDLMLAGDVPWDMFISSCKKLRIMKGSASESEAR

SEQ ID NO: 261401 - protein, 66 aa, Zea mays
  Clone ID: MRT4577_170011C.1.pep
SRILSYTRERTCDSSYVRRLPDDAFDWTQANLIDLGGYPIMCDSHPIWGLDRCASRLHQPMATQDI

SEQ ID NO: 261402 - protein, 151 aa, Zea mays
  Clone ID: MRT4577_170012C.1.pep
MAPLKGSTAAPEHAESGMTLGTSVTWPRLGLCSQGTLGHFRDQRERLCNGIPPEGGIEPLDPIEWVRVRKITFRPHEGTTRPTEASQKELRPQRSQTTPPRPRGLHPAGALARTHRNKIQPRRASPLEKSGRTSKRVPTLPLRLKGYCRVP

SEQ ID NO: 261403 - protein, 126 aa, Zea mays
  unsure (1)..(126): unsure at all Xaa locations
  Clone ID: MRT4577_170013C.1.pep
LTRWKIQLYKCSFANCQTAYLGNNISEXGKITDPAKISPIVQCPVPANQKELCSFLGLXGYYRKCVRNFGVISKPLTELRTPKAGVDIELARLGSTSWLVKITSWLSSTRYVNELKIQLGSTRLPT

SEQ ID NO: 261404 - protein, 316 aa, Zea mays
  unsure (1)..(316): unsure at all Xaa locations
  Clone ID: MRT4577_170014C.1.pep
MPRLLETTEPVQRLEVAPRMTQQCQLSATVTGQSAVGIDTTVGMTIGGPAVIAATGGGSGPTTNQALVPPTGSHPPLKRGSKAGPSKGFDSRPRTCRVRDDPGYVRYMAKARATLSRYPKTFPRPAGTVCNGIPPKGGTEPSDPIECVRVQQITCRLHEGTTRPTEESQEKLRPQRSQTTPPRPRGLHPTGKQHYLPRSDYCANHQGKTNNSESQPLPSSASGATGSSASPDPTPQPQPWPREKVSASPDPKPWPQPWPREKVSTSPXPQPRPREESQPXRPQPQPREESQPCPTSVSASGEVTASPDLGLRPTTL

SEQ ID NO: 261405 - protein, 50 aa, Zea mays
  Clone ID: MRT4577_170015C.1.pep
RSLSSSRRAPLRNLPSRPTSTAPCRHPLFLFYSTPFPLPRHILSLIYGTR

SEQ ID NO: 261406 - protein, 179 aa, Zea mays
  unsure (1)..(179): unsure at all Xaa locations
  Clone ID: MRT4577_170016C.1.pep
RSAASAAWNPXLPLPKNDKRQTWAIPAAATSTFANLTKRKPVTASPPLSSKQSVEDLDSPRGSFTPTTLLPAAHFPGQDARPVAEDGEEMFREMRRRTSSAASELATVPPPLPKRRGRQPSVNQNAHNWRLSPKDDVQGEPLFVVEAPVAEGSAEPSPVRGELGGEKIFGGVAHKAEKV

SEQ ID NO: 261407 - protein, 190 aa, Zea mays
  Clone ID: MRT4577_170017C.1.pep
MAALLLLPLVLAASLGLGNADPAPATIVHKDGTTCTLCASCDNPCNPSYYYPPPSPPPAPVTTPCPPTTPSYPSPSGGGGGGGGPVIYKSPPPPAASGGLGGGGFYYPPPTGGGGGSGGGASQQGGGVYPTAAPPPPNPFLPYFPFYFYSPPPPLHSGARALAATSPSAASLLPVLLLTSMLLLLLCQTP

SEQ ID NO: 261408 - protein, 86 aa, Zea mays
  Clone ID: MRT4577_170018C.1.pep
LVQGVNVKAKGLGFIEDLVELLGHYSPIPVIYVGGVSPRAALKGIKKPAKSGVNVPIGSALNIFGGDFPSKNVALWPRNQSMVGQV

SEQ ID NO: 261409 - protein, 96 aa, Zea mays
  Clone ID: MRT4577_170019C.1.pep
LTPDGAMLSRSTTAPSSFRLQSSPVLLYPGLIACHRCLRHPRLGEQGSHPPLRHRQRSPHGRDTYIQDLLLDWSCYLSFLQAYTRVTVGRQLFGGE

SEQ ID NO: 261410 - protein, 71 aa, Zea mays
  Clone ID: MRT4577_17001C.1.pep
EILVGGGLWGKFPSPPPKWALRAWGVSNPPRRWGLSNQLILSKVRGVKNPQFFFAAKKIISNKPRFLGHFF

SEQ ID NO: 261411 - protein, 89 aa, Zea mays
  Clone ID: MRT4577_170020C.1.pep
ILDKADPMDDPNSLWNQDVAGQTRSATNQNCVRPYQSNHSATIFCVCIQCRRVNRLQRRFSARISEQGQKILPSQTEANKKEHEIGAIS

SEQ ID NO: 261412 - protein, 79 aa, Zea mays
  Clone ID: MRT4577_170021C.1.pep
NQASSVMEGDLCVKVDSPPTGRCCQGRRQRRRPSVSNPPLYSFIQASSLAIGTTMLSHLTFLSHFIFLGSESNQTPCRR

SEQ ID NO: 261413 - protein, 37 aa, Zea mays
  Clone ID: MRT4577_170022C.1.pep
PIPSTKTKVYSSTVRSTRRNLNLCFGIWNCHFIKYAY

SEQ ID NO: 261414 - protein, 122 aa, Zea mays
  unsure (1)..(122): unsure at all Xaa locations
  Clone ID: MRT4577_170023C.1.pep
MHAALDELRLDLMTITRHVVNEQSRNPVPLGDFTILLSHILLDCXFGASAVDTAXVALLIGLPXQISLNXIREMNLDVLYNEVFVKALLCVDRPXVLVSKDDKERTFLIPQMCGRSCACFDP

SEQ ID NO: 261415 - protein, 40 aa, Zea mays
  Clone ID: MRT4577_170024C.1.pep
IGPASYEALRQQWSMLLVRQQSPNKFASKIHQHDFVSDLI

SEQ ID NO: 261416 - protein, 106 aa, Zea mays
  unsure (1)..(106): unsure at all Xaa locations
  Clone ID: MRT4577_170025C.1.pep
VHTGAFAWETNPVQVPVGTREPPPFIDRDESLXKFDGLQLSKRRPSFRETGGTVTAGNASSTYDGAAALRLVSGQKAQERGRQLHGRVTGXADASQAPELFTTSPA

SEQ ID NO: 261417 - protein, 85 aa, Zea mays
  Clone ID: MRT4577_170026C.1.pep
MKFLALLVLLGVSTILVSCQDAGTDTADTSDSADGTTDSGTQADAADGQQDAESSDGTSDAGDGDAPADQDQEQSAVLALVNTLK

SEQ ID NO: 261418 - protein, 79 aa, Zea mays
  Clone ID: MRT4577_170027C.1.pep
LFLRTIPSCGTGNIHPSSMALCRGATPVHRVLQDGAAQTGVCLAYADQALDAGAGIACEMNLVDEWEQAPDLPYMLDHA

SEQ ID NO: 261419 - protein, 62 aa, Zea mays
  Clone ID: MRT4577_170028C.1.pep
AATNPIFTCPDLCVFIYSARSPLDMVTHGSLALIRICGTDSYHIYFIMLCGSTFACYQLPAS

SEQ ID NO: 261420 - protein, 43 aa, Zea mays
  Clone ID: MRT4577_170029C.1.pep
FSPFHSAICIMGRVCSILHVHASLLLFPVYFAVVRAILGVIVR

SEQ ID NO: 261421 - protein, 87 aa, Zea mays
  unsure (1)..(87): unsure at all Xaa locations
  Clone ID: MRT4577_17002C.1.pep
LFITVGPPAPLNSIVSFQQPPVLAFNQLPGVRPYTFXPQPQRSPFLWLSAPNAGTMFHLQRFFPPYQLSLPGPSAFFQHPIIVGPLL

SEQ ID NO: 261422 - protein, 107 aa, Zea mays
  Clone ID: MRT4577_170030C.1.pep
MKPSLSKKKGKKKKKSSLPAAAPAPPPAEGAADTEACPPLPGTITLAAATAAAAVVSETESSSSGEASTCPSACFTASSSGTASSHSFSALSSSASTASSSAAGEER

SEQ ID NO: 261423 - protein, 241 aa, Zea mays
  unsure (1)..(241): unsure at all Xaa locations
  Clone ID: MRT4577_170031C.1.pep
LFYTELVQGIPPIFPHLVGKIPTIHSVVVFITVKSLPVPHVHVTDRFLFRQVEPKEFMVFRCVARYGYXDALETAADFVGVLVEYLPXYVRDLNLYGVVGDEPFKIVFHSARVDSFSWEKHSSGHAVYAEEMLTPAQSFSELTMHPVSMSSRLAHFQTGKMNLEEMLKIEEDQKIIQREVDNGVVYIIGESEVVAKPHANLFKKIIVNYVYSFLRKNSRNGEKMLSIPRGQLLKVGITYEI

SEQ ID NO: 261424 - protein, 72 aa, Zea mays
  Clone ID: MRT4577_170032C.1.pep
PPGRRNSPLSRGTNAEDAGLSRSSQSRTIIRHVFYYITPTKGRHLDFNSLVQSFFPLRRPKFTSEPAGKTQR

SEQ ID NO: 261425 - protein, 78 aa, Zea mays
  Clone ID: MRT4577_170033C.1.pep
MDPWGTSDPYVILQLNGQTAKSQIKWATKEPTWNEDFTFNIRKSRENLLQVAAWDANLVTPHKRMGNAGLYLESFCDG

SEQ ID NO: 261426 - protein, 53 aa, Zea mays
  unsure (1)..(53): unsure at all Xaa locations
  Clone ID: MRT4577_170034C.1.pep
DNPRQKXHKDTFQKTQEPPLPFXPPLFFLPLLPTTLIFKATLLHTFFMLNHII

SEQ ID NO: 261427 - protein, 229 aa, Zea mays
  unsure (1)..(229): unsure at all Xaa locations
  Clone ID: MRT4577_170035C.1.pep
LWRYTHVNVGGAPPARGGEERHPTQRLQPWIRALKKHLNRLNAPKNCMLDNVGGAFAPKPSSGPHKCREGLPLILIIGNRVQDARNYREVISXILMQHHELVDGKAXTDKTYPGAVMNVISIPNTMENYRMLYDTNGRXFRLHPIHXEDDKXFKLCKVRAVQIGQNGIPYLNTYNGHNIRYPDPVIKANDTIWIDLETHKIMDFIKIDVGKLHMQTXGRTPCCVCVIKN

SEQ ID NO: 261428 - protein, 76 aa, Zea mays
  unsure (1)..(76): unsure at all Xaa locations
  Clone ID: MRT4577_170036C.1.pep
MLGPNPTTILAPYPPSHGXTILDSYTHFIFFLXDAYFTFKSYFLKQTKPHLPSLNNPIFAFQEASYTFLHVPKDLP

SEQ ID NO: 261429 - protein, 77 aa, Zea mays
  Clone ID: MRT4577_170037C.1.pep
FFFFFFFLASVITVFIPVEDASNNHNTMIRVQCAHRKNNVIICDYTLHNHFILHLDLTLLHVYIHIHYIASSASHRR

SEQ ID NO: 261430 - protein, 310 aa, Zea mays
  unsure (1)..(310): unsure at all Xaa locations
  Clone ID: MRT4577_170038C.1.pep
MPIASNPSILSAVDTKREERMAEPNPELSGLITQTKKKNIVPKFTEIFPVEDTAYPYSAFITSVRKEVIKYCTNHTGIVQPVLPLEKNVPELWFYTELKTKTRSITLAIRMDNLYLVGFRTPGGVWWEFGKDGDTHLLDDNAKWLGFGGRYQDLIGSKGLETVTMGRAEMTTAVNYLAKKTTTTLAEAAEEEEELLLLQAAADPKAEEKSNLAKLVIMVCEGLRIHXCKGRRPYPFGFPVSPKVDEGFKNPQPVPISALKGKQVQKWDRISKPVFRWPVDPPVEIPDMKDLGIKNKNAAAQIVALVKAQN

SEQ ID NO: 261431 - protein, 55 aa, Zea mays
  Clone ID: MRT4577_170039C.1.pep
TAYTRNRHEALLCAVSPVHTCSPEQTEYSHSSPRVPFLTGQDLYIYVIVKTQSPV

SEQ ID NO: 261432 - protein, 351 aa, Zea mays
  Clone ID: MRT4577_17003C.1.pep
KEMAVPQVDKKMLGELEAMGFPTARSVRALHFSGNSNLESAVNWLLEHESDPDIDRLPLVPREISIECGDTSDEVRNDVEGMRDTVQEQKPKEHTETGRQNETSQLEREPNADGQEEEDRKRILALYKQKRDEEGRARGRIRSQLQEDQRERIRAAKDLMEAKRSLEENQRKRVMESRVADQEEEKRARERIRQRIADDKAERRRRLGLPQDDPRDPAATMTPAKVKPAGRAVVASEQLRDCLRTVKKNHRDDPAAVARAYQVLLKIVGNVAKNPGEEKFRRIRLSNPVFKDRVGSVRGGVEFLELCGFRRLSGIGYLVMPRDKVDVALLTAAGVEIASALENPYFGLLSK

SEQ ID NO: 261433 - protein, 193 aa, Zea mays
  Clone ID: MRT4577_170040C.1.pep
RPGYSTRKKKITKKKKKKKKKKKKKKKKKKKKKKKKRGFNFLPQFHSFSSFQAPGNLKKWGSVPAGPRGGAFPRGWAFLGNLSGLGGTGSPKGGTLRGKARGKGFPGFPSPSNLKGSWGGKKGFNPWGWGENPKNLGGFGQGNLLNAGGHLFGGAGMFFPGGWTKAGLINAPKGNNPGNWKNFGFPTRFFGDN

SEQ ID NO: 261434 - protein, 295 aa, Zea mays
  Clone ID: MRT4577_170041C.1.pep
MPIASNPSILSAVDTKREERMAEPNPELSDLITQTKKKNIVPKFTEIFPVEDTAYPYSAFITSVRKDVIKYCTNHTGIVQPVLPLEKNVPELWFYTELKTKTRSITLAIRMDNLYLVGFRTPGGVWWEFGKDGDTHLLDDNAKWLGFGGRYQDLIGSKGLETVTMGRAEMTTAVNYLAKKTTTTLAEAAEEELLLQAAADPKAEEKSNLAKLVIMVCEGLRFFTVSRKVDEGFKKPQAVTISALEGKQVQKWDRISKAVFRWAVDPTAEIPDMKDLGIKDKNAAAQIVALVKDQN

SEQ ID NO: 261435 - protein, 575 aa, Zea mays
  Clone ID: MRT4577_170042C.1.pep
MPIASNPSILSAVDTKREERMAEPNPELSDLITQTKKKNIVPKFTETFPVEDTAYPYSAFITSVRKDVIKYCTNHTGIVQPVLPLEKNVPELWFYTELKTKTRSITLAIRMDNLYLVGFRTPGGVWWEFGKDGDTHLLDDNAKWLGFGGRYQDLIGSKGLETVTMGRAEMTTAVNYLAKKTTTTLAEAAEEEEELLLLQAAADPKAEEKSNLAKLVIMVCEGLRFFTVSRKVDEGFKKPQAVTISALESSFNKDEWYDDFHHGNFTFDDASPLAAELQAIPWPQSYKTPQLPIYDGHSDPKKFLMSYEAQISSYGGNAAIMAKSFVMAVRSVAQTWYSSLRPGTITSWQKLKDMLVTSFQGFQMKPVTAQALFQCTQDHEEYIWAYVRRFLRLRAQAPTVPNEIVIEAMIKGFLPGPTAQYFARKPPQTLEKLLQKMGEYIRADNDFCQRREEAYRFSEMARGFGGRLHPRHVRSIHNSNANDERASNVQHNHHSSQSSSMQQTSFRPPTSRGRGRSFSGGSHSPASKPQLPPPPPLIHNQQPEGRNHTQQQRDLREESEARTVNNIVLESKHIY

SEQ ID NO: 261436 - protein, 92 aa, Zea mays
  unsure (1)..(92): unsure at all Xaa locations
  Clone ID: MRT4577_170043C.1.pep
MSLQGRSPRVSIVCTWLDAKATWDGKPTVAWLDDYCGGCGNKDVTKPPFNSMGACGNSRNLXDGLGCGYCXRSYNDETVKSFGKPKVVHMTD

SEQ ID NO: 261437 - protein, 69 aa, Zea mays
  unsure (1)..(69): unsure at all Xaa locations
  Clone ID: MRT4577_170044C.1.pep
LFAELPEAMDRXYKGTMRVLLVLLHDYPEFLCDYYFRFCDVISLSCIXMPNVIPSASPRYMRLADPFTP

SEQ ID NO: 261438 - protein, 412 aa, Zea mays
  Clone ID: MRT4577_170045C.1.pep
MDVLPVGSERESQTDSHPLLMEHAIGIPRHDVASTSTPHRDNNDGMDQLPRDSESSSGTTDASYSPNAPLARRDDNRLRRQQSLNSGFWISIELAVNLSQIIAAICVLSVSKNEHPHAPLFEWVIGYTIGCIATLPHLYWRYLQRNQLATVQGSNQNYVPDNSFESSSFTGISPPPVSEAGVVTVSNGVLRNNVVITNPRAQAFADHFKMALDCFFAVWFVVGNVWVFGGHSSAHDAPNLYRLCIAFLTFSCIGYAMPFILCALICCCLPCIISLMGFREDLDENRGATSDAINALGTYRFRSKKPRNGEANEGGGGVFAPGTDKERAVSAEDAVCCICLARYVDNDDLRLLPCGHFFHKDCVDKWLKINALCPLCKAEIDVVPRTAPPAIGFGRRDSHRRVGNDIESQRLP

SEQ ID NO: 261439 - protein, 52 aa, Zea mays
  Clone ID: MRT4577_170046C.1.pep
VKGDYLFDFLFLTQQEGHPSTKRLHGKLLVAVPRNRDDLVYDKGSVMHICTR

SEQ ID NO: 261440 - protein, 103 aa, Zea mays
  unsure (1)..(103): unsure at all Xaa locations
  Clone ID: MRT4577_170047C.1.pep
KRPRRRSRPLEXTPCRICEINAVPRIKRGQPSAGNKQRRLPRERSVPSREIKSEPLAPEGTGRFLVLAVHRESISRGEPRCGWPGHWLAQRWMQIGSSWWVRF

SEQ ID NO: 261441 - protein, 70 aa, Zea mays
  Clone ID: MRT4577_170048C.1.pep
YVDNDDLRLLPCGHFFHKDCVDKWLKINALCPLCKAEIDVVPRTAPPAIGFGRRDSHRRVGNDIESQRLP

SEQ ID NO: 261442 - protein, 179 aa, Zea mays
  Clone ID: MRT4577_170049C.1.pep
MDVLPVGSERESQTDSHPLLMEHAIGIPRHDVASTSTPHRDNNDGMDQLPRDSESSSGTTDASYSPNAPLARRDDNRLRRQQSLNSGFWISIELAVNLSQIIAAICVLSVSKNEHPHAPLFEWVIGYTIGCIATLPHLYWSYLQRNQLATGQGSNQNYVPDTALRRVLFTGISPPPVSE

SEQ ID NO: 261443 - protein, 387 aa, Zea mays
  unsure (1)..(387): unsure at all Xaa locations
  Clone ID: MRT4577_17004C.1.pep
LSRFDLLPWCGSFRRAGGVKVWFCGFLQYANIVGVAIGYTIAASISMLAIQRANCFHVEGHGDPCNISSTPYMIIFGVVQIFFSQIPDFDQISWLSILAAVMSFTYSTIGLGLGIAQVVSNKGVQGSLTXISVGAVTPVDKMWRSLQAFGDIAFAYSYSLILIEIQDTIRAPPPSESKVMRRATVVSVAVTTFFYMLCGCMGYAAFGDNAPGNLLTGFGFYEPFWLLDVANAAIAVHLVGAYQVYCQPLFAFVEKWARQRWPKSRYITGEXRRPAPARDRRPXYKLSLFRLTWRTAFVVATTVVSMLLPFFNDVVGLLGALGFWPLTVYFPVEMYIVQKKVPRWSTRWVCLQLLSVACLVITVASAAGSVAGIVSDLKVYKPFVTTS

SEQ ID NO: 261444 - protein, 118 aa, Zea mays
  Clone ID: MRT4577_170050C.1.pep
MAEATDTAAATPPPAPAMATLSPPPKSGIPPRYNLDAKWDACLDLSIRRVAYSSLAGALAGLLLFRSPTTRWASVTLGAGVGIGAAYTECSYLFSGGPPNWSPKVSTIPSAHSEGEDK

SEQ ID NO: 261445 - protein, 63 aa, Zea mays
  Clone ID: MRT4577_170051C.1.pep
APPRVKPCYRRVDPFILRPPQTTKACFFFPPCFNNPFLVKKKKKKKKPQKKKTPKKKKKKKKK

SEQ ID NO: 261446 - protein, 147 aa, Zea mays
  unsure (1)..(147): unsure at all Xaa locations
  Clone ID: MRT4577_170052C.1.pep
MSPPSVTYYLDDATYSKXFAGLLESETQNDTIXESSLEQYEEILPDDLLTDENTGRAXVYGVATFRYPHTAIIACSEPPPHTDGRRDSRSLASLVVPRSRLCLTPQHGGSINFRVMKSFSHYLIIQSGXINAIFPSXHATIPHYAVP

SEQ ID NO: 261447 - protein, 112 aa, Zea mays
  Clone ID: MRT4577_170053C.1.pep
NLPSFLLAGGEERGRKHADRVGSTGPRNGSRPPASSARVASRRRARNPRIGAAAPCRRPITRREGGGLSISRRELVNYLPICGFVCVLDFGACVVVLSRRRGVSELGFGRSG

SEQ ID NO: 261448 - protein, 59 aa, Zea mays
  Clone ID: MRT4577_170054C.1.pep
VNVLHAKTGSRLGTSSSHCARFKISITSIQLATSSMATTLSNIISLSTQRLHLQTPAIT

SEQ ID NO: 261449 - protein, 177 aa, Zea mays
  unsure (1)..(177): unsure at all Xaa locations
  Clone ID: MRT4577_170055C.1.pep
TNYEESGRARRLGSCIAGALHAFGDQLASYIAPGRPTLAAKIFSFLLLLRXSASDCTSTVGPQCXHAPIASFLPACLSPTVASVXGSPIFEPCTIQPATPAGVLPLSHLFLQQPGXLLTAVPLVHLLAHNMLAHHLRQLVLGNLAGYSYEQQFVPFIHLAALNSAAYLQQQLPFMKV

SEQ ID NO: 261450 - protein, 520 aa, Zea mays
  Clone ID: MRT4577_170056C.1.pep
MRATIPALSLLVTPRLPSLAVPLAGGRLRVGGRPRTRLRVAAPTSVPGEAAEQAEPSTSAPESGEKFSWRDHWYPVSLVEDLDPSRPTPFQLLNRDLVIWKEPKSGEWVALDDRCPHRLAPLSEGRIDETGCLQCSYHGWSFDGSGACTKIPQAMPEGPEARAVRSPKACAIKFPTLVSQGLLFVWPDENGWEKAAATKPPMLPKEFEDPAFSTVTIQRDLFYGYDTLMENVSDPSHIEFAHHKVTGRRDRARPLTFRMESSGAWGYSGANSGNPRITATFEAPCYALNKIEIDTKLPIFGDQKWVIWICSFNIPMAPGKTRSIVCSARNFFQFTMPGKAWWQLVPRWYEHWTSNLVYDGDMIVLQGQEKIFLAATKESSTDINQQYTKITFTPTQADRFVLAFRTWLRKFGNSQPEWFGNPTQEALPSTVLSKREMLDRYEQHTLKCSSCKGAYNAFQNLQKVFMGATVVCCAAAGIPPDVQLRLLIGAAALVSAAVAYAFHELQKNFVFVDYVHADID

SEQ ID NO: 261451 - protein, 38 aa, Zea mays
  Clone ID: MRT4577_170057C.1.pep
IERLDSGYCRRTGPVTRLQALLDERSLAAVVDILVVDE

SEQ ID NO: 261452 - protein, 227 aa, Zea mays
  unsure (1)..(227): unsure at all Xaa locations
  Clone ID: MRT4577_170058C.1.pep
KKHQCLIDGGPRSPLRTELLGRPVQAAVSRTPKKEGDRSIHRASSSPPGNQGDHRLLRFPLNESXLSYLHGTLPADYYFYPLGLSDPEATDGXFIKPKWLVYHXVINVRYAMLCALPDIVPQIFGKMGIIPPDTALSRILTDVIPPELTYHYCVDSYTIFVIXCWLMGFMEDRRLQDWYNPASHGKQYFLDLEKFLDGSGDRTNPXGPXLHPVDFVKTEKEMKELKL

SEQ ID NO: 261453 - protein, 155 aa, Zea mays
  unsure (1)..(155): unsure at all Xaa locations
  Clone ID: MRT4577_170059C.1.pep
PLCSDAVQHRCRWLLVKMGARTCYKADIDXHSSCGICKRDCYVAHIMCNCRADAICLCHEEEISKCSCNCDRVVFVRKDIFELXEISKKFEEIGILDEXDVLGYDLNKPYPTLSTITSAHGPHEYSTQSDECTSSKQRTYSSSCPDNGTSTLITL

SEQ ID NO: 261454 - protein, 785 aa, Zea mays
  Clone ID: MRT4577_170060C.1.pep
MAGKDGVSLKSVSYGARLRRSCDASLREAGSMRDPFLKHRVKKFDLSSLDWIDEIPDCPVFSPSTQEFEDPLVYLSKIAPVAAKYDICKIISPVSASVPAGTVLMKELGGIKFTTRVQPLRLAEWTKDDKFAFFMSGRKNTFREFEKQANIQFERRCSRAACLPSRYMEEEFWHEIAFGKMESVEYACDIDGSAFSSSSHDQLGRSKWNLKRFSRLPNSTLRLLRAAVPGITDPMLYIGMLFSMFAWHVEDHYLYSINYHHCGAPKTWYGIPGSAASDFEKVVREHVYDHEILSGEGESAAFDVLLGKTTIFPPNILLDHHVPVYRAIQKPGEFVVTFPRAYHSGFSHGFNCGEAVNFATGEWFPLGAVASQHYALLKRIPVLPYEELLCKEATFCANEFSLFEHGNVTLTGGTHIQSYMKGPFVQLMRFQHRVRWLLVKMGARTCYKADIDATVLCGICKRDCYVAHIMCNCRADAICLCHEEEISKCSCNCDRVVFVRKDIFELEEISKKFEEIGILDEVGKQMSQSDGYSTHPYLSNGIDHNAKYFPYCKILIDTSPELRTFSEVDVLGYDLNKPYPTLSTITSAHGPHEYSTQSDECTSSKQRTYSSSCPENGTLSVYPLCTSDQAFSTDKLAAQDTDDSDCEVFRVKRRSSIVMEKRCSEDLTITLTENQALRRLKKACSDDRQENATESHCLDFISGNTDNFINRSKQKMNVDQLDAKNVEDEVAFGQKSIGCSYLSPSVDLGPKRLKIRGPSFPSTVSEVEISYRFQEDIDLASQHTQ

SEQ ID NO: 261455 - protein, 272 aa, Zea mays
  Clone ID: MRT4577_170061C.1.pep
MSSLRAISSLLHIYSTSAAARRGAGRLGFAPSPGGRFRVPSNSGPPAFVLDEVARAAGGVRRRASTRAASWDSEKSPYETLELGRDADEETIKTAYRRLAKFYHPDVYDGKGTLEEGETAEARFIKIQAAYELLIDGERRRAYDREHHVNPMKASQAWMEWVMKKRKAFDQRGDMAVAAWAEQQQREMTLRARRLSRSKVDPEEERKLFAKEKKASMEFYSTTLKRHTLVLRKRDIMRKKAEEEKDKEISRLLAAEGLELDTDEDENKTFLG

SEQ ID NO: 261456 - protein, 195 aa, Zea mays
  Clone ID: MRT4577_170062C.1.pep
MAAHDASFHPRDALANTMSTMIQTTAVGAVVAGVQNTLRKQNVGAMGILTRSGGIIALYAGVGATYQFTLDATSNLRRKDDCYSEAIAGFAAGCALGVGRRSLPFMLGAGAVTSTALTAFRYTNGLRGVGDIREQVDDDGEVERREELKKLRRRPLSETLEQLGEGRGIYGPGYEERRRQRLLEKYGIDVKAAQQ

SEQ ID NO: 261457 - protein, 86 aa, Zea mays
  Clone ID: MRT4577_170063C.1.pep
FTVPLATEHPPIKQYLCTLSELKHLGRMCFISRCNAISDPCPRLRHFRTVTQHARFGSTACLRCPTIIGSAHLEQKMCWQYILEPN

SEQ ID NO: 261458 - protein, 266 aa, Zea mays
  unsure (1)..(266): unsure at all Xaa locations
  Clone ID: MRT4577_170064C.1.pep
IEIEIDKSTGKXCKSWSSYTSQRKETTSPIPSRRHSSGLRPGIRSSMEPPRRSLCVVASEVSSAAGSDAEDDRYCSANSALGTPSSIATLLPSSDFWDHQMDLLDDHPATAGFPKKHQLRCLQTLASAQSWPETVSPPATAGVDDLAPQGSSPASPYIPPLPRHNQVHGFGGNDLFDDMVQEMEHILLNSGEPHGNGSFMNDRRNNALQAHHFRDGSTTASTSGTDDAFVSPVPQYSSRIDWVXEVVGAKQGSGDVSFGERIGGVK

SEQ ID NO: 261459 - protein, 58 aa, Zea mays
  Clone ID: MRT4577_170065C.1.pep
GYKREHSLKCAFSKDVYSGFKIEQAKIFKEDTCCTTEYIISRFDEFLVYVCIYSIVHM

SEQ ID NO: 261460 - protein, 196 aa, Zea mays
  unsure (1)..(196): unsure at all Xaa locations
  Clone ID: MRT4577_170066C.1.pep
MTYVCILKTSNAELLHVGSVDDRAVNVAADLEKAVAGLVVDAARATQLGAPEAEHALVCPVLGPVLLARVPRTWFSAAYPAMQVSFPSSLAPSSSSPPPPHRNPIPNPNLNLNRRKTPPLLAVAPPPTQPPFPFSAVAAASPPPPQLAPPPQSPFPFSCCXRRGRGGTTYARHDGLVGMGVFSQLTIYVSSSTVVL

SEQ ID NO: 261461 - protein, 63 aa, Zea mays
  Clone ID: MRT4577_170067C.1.pep
SFLADVCGLLEIRSYISKKKKKKKKKKKKKKKKKKKKKKKKKKKKKKKKKKKKKKKKKKGGAL

SEQ ID NO: 261462 - protein, 156 aa, Zea mays
  Clone ID: MRT4577_170068C.1.pep
MDGCDCIESLWQADDLLMKYQYISDFFIALAYFSIPLELIYFVQKSAFFPYRWVLIQFGAFIVLCGATHLINMWTFTTHTKTIAVVLTVAKVATAVVSCITALMLVHIIPDLLSVKLRERFLKAKAEELDREMGIIRTQEETGRHVHMLTHEIRST

SEQ ID NO: 261463 - protein, 110 aa, Zea mays
  Clone ID: MRT4577_170069C.1.pep
SFPFVLKALPASVLLLGAAGVEKGSKGPPRQKVGKVTVVPVRAIARGKLPAFPCLGMGFGFGFFFGSAAYMGVVVVPPFLVKKGKVLLLFVFSGPPGAPFGFFCGRPPLF

SEQ ID NO: 261464 - protein, 239 aa, Zea mays
  Clone ID: MRT4577_17006C.1.pep
MATPAGLLLASPPVISGVAAVAACAAMAVFYVAVLYAPTVILRFPPPTSLRTFLHRRFACAAVASAASVLATASLLRVWSLSDFADMFAVFGIRKDHLIQAVAIPLLLTSLVYAGSFVARVWLLVSSWGGGDEVEIGCAQRLAQWIQAAVADVMVWRNYVVAPFTEELVFRACMIPLLLCGGFKMSTIIFLSPIFFSLAHLNHFFELHQQGCNFMRALLIVGIQLGYIILSFSCMPARL

SEQ ID NO: 261465 - protein, 58 aa, Zea mays
  Clone ID: MRT4577_170070C.1.pep
RQRPDGVRLLRRAAPDGRRERQDRAQGLRLQLARPRLPHQRQEASHAVALVEASHACL

SEQ ID NO: 261466 - protein, 64 aa, Zea mays
  Clone ID: MRT4577_170071C.1.pep
WPSGPAAVHHAHALARRRRRRRLHGSRTHVFFIFFFDRAEGKTPPRSRRRSSETPSGDGLTRPR

SEQ ID NO: 261467 - protein, 114 aa, Zea mays
  Clone ID: MRT4577_170072C.1.pep
TTCSSPSMSSCSATSISWSPGSSVTGASVHKERVDRSSEKHETNDGDPRIQRQSFSHRLRSDGWSACSHRHRLSCRDRRSPRSHRDKLQAPARSRPHLGHPRRELCMSWGLYEP

SEQ ID NO: 261468 - protein, 140 aa, Zea mays
  unsure (1)..(140): unsure at all Xaa locations
  Clone ID: MRT4577_170073C.1.pep
DKLKPAKRDREXDAAVATTAQSANHAGGGPASEPPPVDGYDALQATAVARCRSLFSLGISLAVGAVAWSADAPCLPLLAGLFAVVAVSMRSVSRLRRRAGDDGAVALLGLNWFLLGLLTSPMLPAALGPALTWLAATAPL

SEQ ID NO: 261469 - protein, 63 aa, Zea mays
  Clone ID: MRT4577_170074C.1.pep
EPRVEFETSHLFKASDQGDARHITQHSRPIIKPPLTRLLTQTCHTWPPPIWCEGATCITRIMC

SEQ ID NO: 261470 - protein, 56 aa, Zea mays
  unsure (1)..(56): unsure at all Xaa locations
  Clone ID: MRT4577_170075C.1.pep
MGLVFGKLFSRLFAKKEMRILMVGLNATGKTTIXLGEIITTIPTIGEPQPCLFNIV

SEQ ID NO: 261471 - protein, 82 aa, Zea mays
  Clone ID: MRT4577_170076C.1.pep
KVGGKPTRKIRRTPGEKGYPPFQYPPGKPGEKRNGKPMITTLCFDVKREKGGQRENPLDGDFGGETLGGHAGEKRKGGGGGP

SEQ ID NO: 261472 - protein, 58 aa, Zea mays
  Clone ID: MRT4577_170077C.1.pep
MSYKGGCLLMLLGTSACAVTATIIPKCSQAPIASFIFTNLLPVVFLHCVNPILKPFRI

SEQ ID NO: 261473 - protein, 407 aa, Zea mays
  Clone ID: MRT4577_170078C.1.pep
MQSAAWRRHLLDHHLSPSTSAAIAAFRSASQPGLAPQGLFGADGARCMSARAPAVKGSGHLVRKGTGGRSSVSGIVATVFGATGFLGRYLVQQLAKMGSQVLVPFRGCEDSPRHLKIMGDLGQIVPMKYHPRDVDSIKAVMAKSNVVINLIGREYETRNYSFEEVNHHMPEQLATIAKEHGGIIRFIQVSCLGASPSSESRMLRTKAAGEQSVFKEFPEATIMRPATMIGTEDRILNRWAQFAKNWGFLPLVGGGSTKIQPVYVIDVAAAIVNSLKDDGTSMGKIYELGGPEIYTVHELAELMYETIREWPRYVNVPLPVARAIASPREMLLNKVPFPLPTPSIFNLDQINAFAVDNLVSEDALTFEDLSIMPQKLKGYPVEYLVSYRKGGPSFGSTVSEKMRSSEM

SEQ ID NO: 261474 - protein, 110 aa, Zea mays
  Clone ID: MRT4577_170079C.1.pep
RDHYLVFEPKLDNSNVQQNIDFVNKQIASDLSAMTRPDGPLTFVGEWVAEWKVKGASKEDFQRCANAQMAVYRKATFGWAYWSYKHVSNHWSMEWMINNGYISLKNARGN

SEQ ID NO: 261475 - protein, 104 aa, Zea mays
  Clone ID: MRT4577_17007C.1.pep
HRVSPPARRGTPHPNLPPQPPPVRRPAGPLVGRSSSSPINLAMPLACLLPASASLDISFSSNIFNDHVPHFPLEELSSSPISMSVINYWLYFIHSGGVFKLQIN

SEQ ID NO: 261476 - protein, 245 aa, Zea mays
  Clone ID: MRT4577_170080C.1.pep
MSGYPFYPYGRGGVGEDASAMSGYPFYPYGRGGVGDDAAARYSSYEIDLIAARYAGDPSPYPYPSASGGFDPHVGARRPADVLYHQSIMGSHSTIGQSYAFYSPNTMVKRPRLESSLPIYPQRPGEKECAFYMRTRTCKYEETCKFDHPQWVPEGGIPNWKEGTKAGESYPERPGEPNCPFFVKTGDCKFGSKCKSNHSKKKDDGTVAGPGDKESLFSGNSTLPVKPSEPCPEPLISYSTLPGEF

SEQ ID NO: 261477 - protein, 262 aa, Zea mays
  unsure (1)..(262): unsure at all Xaa locations
  Clone ID: MRT4577_170081C.1.pep
MRGFSDSRGFLSFFLGAAVAAACIVLLQPSALCPFDGLTPADRQELAILSNRTHAAPCSKKLHMPATTSPDDVRLLALLRRASMDDNTIIMTFTNKAWTAPGSLMDLFLESFRVGVRTEPLLKHLVIVAVDDKAHERCGQVHPLCYRLRVRGVDYAAEQSFMEKDYLDMMWRRSRFQARVLRLGYSFVFTDMDIVWLRNPLLRVPVGADLAMSSDYFYGDNPYDLNXRPNGGFVYARASXRTVAFYXRWYEAREAYPERNEQ

SEQ ID NO: 261478 - protein, 36 aa, Zea mays
  Clone ID: MRT4577_170082C.1.pep
PWRIASWGCQAFAALASPMLSGQIPESCISVNVARA

SEQ ID NO: 261479 - protein, 249 aa, Zea mays
  Clone ID: MRT4577_170083C.1.pep
MSAAAQETTAGGGGDGKRQGPCRPGHLKLGYHIVVSNAVYVLLAPFAAALALRASRLTPSDLAAARAYLLANLHLAVSLVSVATALATVYLARRPRAVYLLDFACYKPGPDHVVTRETFMKQSSKAGVFTDDNLAFQRKILERSGLGQGTYFPAAVLNSPPNPCMAEARREAEAVMFGAIDSLLAKTGVRARDIGVVVVNCSLFNPTPSLSAMVVNHYKLRGNVASYNLGGMGCSARRISSFDLAKNLL

SEQ ID NO: 261480 - protein, 190 aa, Zea mays
  Clone ID: MRT4577_170084C.1.pep
RQDLLRALSAPRDRQTLLPLVSRFPAGQTLSPRRALGLSHSWTTSSVYCCRHASLALAHGFPAMELPACTRPDLPGPCRSLPVARVVPGFSSSSPAGCSTPSVPACRRVPAAQSAVVPCSTLAVPIAVLVKLCCRAALRDAGHVPVLLPRRSFPFAYLSSMGCATVNSLLQFVDSCALGHLYSLPRHRVS

SEQ ID NO: 261481 - protein, 96 aa, Zea mays
  Clone ID: MRT4577_170085C.1.pep
IVGDFHYCGYLGKPSHLYVVANFNCGFITKPMDGKRDPLIDSRGKNMDSNVHGDQLKGILGHYLHNLIIARTGSDKIDTINSIHSIPIDLNSLVNS

SEQ ID NO: 261482 - protein, 165 aa, Zea mays
  Clone ID: MRT4577_170086C.1.pep
RQDLLRALSAPLDRQTLLPLMSRFPAGRTLSPCRALGLSHSWTTSSVYCCRHASLALAHSFLAMELPACTRPDLPGPCWSLPVARVVPDFNSSSPAGCLTPSVPACRRVPAAQSAVVPCSTLAVSIAILVKLCCRAALRDAGHVPVLLSCHSFPFAYLSSMGVPP

SEQ ID NO: 261483 - protein, 73 aa, Zea mays
  Clone ID: MRT4577_170087C.1.pep
AYRVVRSQIIMRGRAYGFQDNSLGWRIHHHAGWCTSIILLHGNATSGWLVRSCSRQSAQQLVHSFHPRPCNGR

SEQ ID NO: 261484 - protein, 81 aa, Zea mays
  Clone ID: MRT4577_170088C.1.pep
MNSLSMVEARLPPGFRSHPRDDELVLDYLAKKLGGGGGGAAAAVASMYGCPTMVDVDLNKIEPWDLPEIACIGGKECYFYC

SEQ ID NO: 261485 - protein, 37 aa, Zea mays
  Clone ID: MRT4577_170089C.1.pep
SLNCMDGSPFMKGRIDERSRSPTDSHSAMSPQFFTLS

SEQ ID NO: 261486 - protein, 269 aa, Zea mays
  unsure (1)..(269): unsure at all Xaa locations
  Clone ID: MRT4577_17008C.1.pep
MSHCAPGGCASAAGGPEHAALERHVLAALRELMMLMKQGEPMWQPAALGGEVLDHQLYRATXPRLTRASPAGXFTANGTRDTGLVMCTGADLVRIFMDENVWSETFPDIVASVSADNIGHGCICQGGVILMKAGLRVLSPGVSSCDVKFVRQCQMIEQGVWAVVDVSLDANGXHLSSEHGTLAYRGXCRVLPSGCLIKDMNNGYCKVAMIVNAEYDKGFMRXPLHPLLSSGHTFSARRWLTSLQRRCEFLAQRLSPAYGISRGRWCYNA

SEQ ID NO: 261487 - protein, 55 aa, Zea mays
  Clone ID: MRT4577_170090C.1.pep
GGSGGSDACINLPISYGQAAVCPTPVVSMLAMVASRACCSLLVLLWALEIKIILL

SEQ ID NO: 261488 - protein, 300 aa, Zea mays
  unsure (1)..(300): unsure at all Xaa locations
  Clone ID: MRT4577_170091C.1.pep
MASVAPGPMQTSHASRRPIPTATGPVPVAVLLAAAAVGLLALLPSLAEAVWEVPHLFLLGAVISFGVFTQRNSDADGRNKDSSLAWSARCHPDAPLVVIADHTAPSDDDDNDDYGLELEEGARETPLSLPVRRLMKPXLRLRLRLRLWRRSPKPPAAMPAMVSXEETTDSRAASPSSGFRAGTRAVPSPPPSALDDDDDRGVSQPARPLFRKASTDWDVDAAADDGSSDEMTPVSSERSSVRADFAACASGYSDSDSDGDGTPVDLKLAEKAEAGGEEEVDRKADEFIAKFRQQIRLQRH

SEQ ID NO: 261489 - protein, 223 aa, Zea mays
  Clone ID: MRT4577_170092C.1.pep
PPESDPAAGARNPTPAAMEMGGMSDAERLFFFEMACKNSEVAYEQNPNDADNLTRWGGALLELSQVRTGPDSLKLLEDAEAKLEEALQIDPNKSDALWCLGNAQTSHGFFTPDNAIANEFFTKATGCFQKAVDVEPANELYRKSLDLSMKAPELHLEIQRQMVSQAATQASSASNPRQSRKKKDNDFWYDVCGWVILGAGIVAWVGLARASMPPPTPPARWSG

SEQ ID NO: 261490 - protein, 146 aa, Zea mays
  unsure (1)..(146): unsure at all Xaa locations
  Clone ID: MRT4577_170093C.1.pep
LANANGVAPSEPLTARERLRXARVLGKYAEPPASKPAKPSSGAACWTRCGEADAKKAGGWGRXARVALRMPEAPPRRATCSTTAGVGCPRRGGRLPRPRLLHAHHQRHVRHRLPRVEVEARRNTLQRVLASLLTDYRLGNKRAIMQ

SEQ ID NO: 261491 - protein, 109 aa, Zea mays
  Clone ID: MRT4577_170094C.1.pep
ATLSGCSSSRWPASGCFQKAVDVEPANELYRKSLDLSMKAPELHLEIQRQMVSQAATQASSASNPRQSRKKKHNDFWYDVCGWVILGAGIVAWVGLARASMPPPTPPAR

SEQ ID NO: 261492 - protein, 193 aa, Zea mays
  Clone ID: MRT4577_170095C.1.pep
MGSSERNRKEGRLIRVKEAMEHKEAGCQAPEGPILCINNCGFFGSAATMNMCSKCHKEMITKQDQAKLAASSIDSIVNGSDAVMEPVVAGSNTVVAVAQVELQTMNVQQPADVAGPSEGVAAISKGGKVGPNRCSACRKRVGLTGFNCRCGNLYCALHRYSDKHDCKFDYRTAARDAIAKANPVVKADKLDKI

SEQ ID NO: 261493 - protein, 220 aa, Zea mays
  Clone ID: MRT4577_170096C.1.pep
PPESDPAAGARNPTPAAMEMGGMSDAERLFFFEMACKNSEVAYEQNPNDADNLTRWGGALLELSQVRTGPDSLKLLEDAEAKLEEALQIDPNKSDALWCLGNAQTSHGFFTPDNAIANEFFTKATGCFQKAVDVEPANELYRKSLDLSMKAPELHLEIQRQMVSQAATQASSASNPRQSRKKKDNDFWYDVCGWVILGAGIVAWVGLARASMPPPTPPAR

SEQ ID NO: 261494 - protein, 224 aa, Zea mays
  Clone ID: MRT4577_170097C.1.pep
MLPFKVLVTFSPRGSSRGSSERNRKEGRLIRVKEAMEHKEAGCQAPEGPILCINNCGFFGSAATMNMCSKCHKEMITKQDQAKLAASSIDSIVNGSDAVMEPVVAGSNTVVAVAQVELQTMNVQQPADVAGPSEGVAAISKGGKVGPNRCSACRKRVGLTGFNCRCGNLYCALHRYSDKHDCKFDYRTAARDAIAKANPVVKADKLDKISYFPTVGCQEDCKPR

SEQ ID NO: 261495 - protein, 140 aa, Zea mays
  Clone ID: MRT4577_170098C.1.pep
MVSFEMNDLKKIGLGLTGFGIFFSFLGIVFFFDKGLIAMGNILFLSGLGLTIGLKSTMQFFTKPKNYKGTISFGAGFFLVLIGWPFFGMLLEAYGFIVLFSGFWPTLSVFLQRIPIIGWIFQQPFVTSFLDRYRGKRVPV

SEQ ID NO: 261496 - protein, 70 aa, Zea mays
  Clone ID: MRT4577_170099C.1.pep
TINRSLHDNVSLSFNDVSHVGKDFFSAYAVGHASLREQRFLLGPVTTAPPLSSSLFAMRQGLVGEEARAK

SEQ ID NO: 261497 - protein, 91 aa, Zea mays
  Clone ID: MRT4577_17009C.1.pep
VSRRLANLSFSLPVVTLRDDAPSLCSSLTPVQAGELGRFEDAHDVSLLCLFRPLHRCGRPGPWALTAGERVPMGGRVAVGQVPTSALRSVR

SEQ ID NO: 261498 - protein, 60 aa, Zea mays
  Clone ID: MRT4577_1700C.1.pep
TYNPSTRVPNHIYGESELTHGEDGTQTASHYMRWTLETYLAITLHGACTNLVCSQKNLIY

SEQ ID NO: 261499 - protein, 67 aa, Zea mays
  Clone ID: MRT4577_170100C.1.pep
FSENSTSKITFFHSLPQLGTYISGSPGGGPSLIKTNSRVLYLGVGIHHISPGLFPVSFEKPSFLLLK

SEQ ID NO: 261500 - protein, 94 aa, Zea mays
  unsure (1)..(94): unsure at all Xaa locations
  Clone ID: MRT4577_170101C.1.pep
MPLLWLPEPPYHIPPPMYMPAAFYLPPNHLAQICEYPTRPAGFSPXQSVGSCAWVDVLWPFLALXTMMLMHHLSLAQTLYVSPQCHTLDQQSCH

SEQ ID NO: 261501 - protein, 96 aa, Zea mays
  unsure (1)..(96): unsure at all Xaa locations
  Clone ID: MRT4577_170102C.1.pep
LIYHDSTGFDSLSMTXVLADRTERLHLWDTXGSVRXKSMIASYITDFYYDYIGLHAASRQPFLNTFARIHEACTVGGSDVIIVLVGNKGDLVYKRQ

SEQ ID NO: 261502 - protein, 41 aa, Zea mays
  unsure (1)..(41): unsure at all Xaa locations
  Clone ID: MRT4577_170103C.1.pep
TLNNIDLNXPFLYMVXGNNQTLLIPLPLGIPAKFTVWPYKR

SEQ ID NO: 261503 - protein, 502 aa, Zea mays
  Clone ID: MRT4577_170104C.1.pep
AAKGEKRKWFPDARWLPPTGVQVGTLYYGNGDPTTPLWPSCAAGDDCERLSMEELDGSEEMPGIPALPVSARDGETILKAMGGDVAPPKWQGGDGAPVYRLGPGPAVLNLTYIGNETLATIENVFAVIEGKEEPDRYVIIGNHRDAWTFGAVDPNSGTAAMLEIAERLSKLQAKGWRPRRTIILCSWDAEEFALIGSTEWAEENMDTLASRAIAYLNVDISVFGPGGLMPRATPQLDELIKEASKMVPDPDEPSQTLYDTMMRHHPPITRVAGAGTDFAAFVQHIGVPSLDMSYGLFEEYPVYHSLYDDYVWVERFGDPLFHRHVAVASVWGLIALKLADDEIIPFNYVSYASELEECTKDIVDKCKGFPVSFSPLQNSIKQLESAATKIYKEKKLLQAENWSLKTSKYTLKVREINDRLMMAERAFTNREGLVGRPWYKHMIYASSDQDDWGTKAFPGIVSAMDKAKKSNTTETWRLLQHEIYRVARAVSKASAVLDGKLT

SEQ ID NO: 261504 - protein, 170 aa, Zea mays
  unsure (1)..(170): unsure at all Xaa locations
  Clone ID: MRT4577_170105C.1.pep
GGGGGGRTLRDPGAPAWKNLWSRGKYPESCSRQTNRKKRPRRSRDGPNSVSETIRRWKEVNQQLEHDPQGAKRARKPPAKGSKKGCMQGKGGPENTQCGFRGVRQRTWGKWVAEIREPNRVSRLWLGTFPTAEDAARAYDEAARAMYGALARTNFPXSCTSSCCGCSSGN

SEQ ID NO: 261505 - protein, 38 aa, Zea mays
  Clone ID: MRT4577_170106C.1.pep
QYVVKACVERVVVIVSFEMEWNGMECNVLCVHHKHRRR

SEQ ID NO: 261506 - protein, 180 aa, Zea mays
  Clone ID: MRT4577_170107C.1.pep
TQVVDSISEEDLEAGECGELRSKGSTSLKGYVGDPEATAALFDERGWFCTGDGMKYDEEGYFYFVEKLSENIQCGGKAIPAKELEDVIRTHPGVRDVAVLGRPDPDDGEVPMAFVVLEPSVTATKQEIIQLVKDKLPESKQLRGGVEFLDALPRTTSGKLSGRQLRDRMPRRSVVGSLLM

SEQ ID NO: 261507 - protein, 99 aa, Zea mays
  Clone ID: MRT4577_170108C.1.pep
ARRPHRLVPILPLPPRPCLAVAASSPSRRRCLVSSHRRLEQQEFRPALELSLELPIGWRSPFSMFLKTPEDPRPHHSGPKIKILSASLEKVKVKSRDAS

SEQ ID NO: 261508 - protein, 59 aa, Zea mays
  Clone ID: MRT4577_170109C.1.pep
SNRATLSCPRCSLGFFSLHRKEGLATEIFLLGERYPLFFCCCTFVLGVPAEQRAFMCAI

SEQ ID NO: 261509 - protein, 102 aa, Zea mays
  Clone ID: MRT4577_17010C.1.pep
SDPWSLYMHACMVQGDVRARATPLVIHVRLRVANGSSSRPVTSRRENKSPCTHQAVGRCDTATATGRPAGRARSAVRLLQYYWRGLLYPEDRRSERWREARR

SEQ ID NO: 261510 - protein, 62 aa, Zea mays
  Clone ID: MRT4577_170110C.1.pep
WSENEFFITNRFQVSTWTSHNRITIYLIGVANKRNSFKKSTIGRYKPFIRFKNHATLRDHPQ

SEQ ID NO: 261511 - protein, 52 aa, Zea mays
  Clone ID: MRT4577_170111C.1.pep
SSRIFIWSRQKSCYMKQLLVSQDYDGARLFLGNVTFFMFSVIPRPQKYYVYI

SEQ ID NO: 261512 - protein, 155 aa, Zea mays
  Clone ID: MRT4577_170112C.1.pep
QLLLCAALAFAARTSSAEDPGGTYCAKNFTGAQTQASISQVLDALVQRASAAYYATVTAGGGGGSVTIWGLTQCRGDDRASILRALRGGGRASSGRVVPWPGRRPGLERLLVPPLQQPPLAGPWRTPGTRSSLSTPWNATDPAAFRPRRAQDSWR

SEQ ID NO: 261513 - protein, 63 aa, Zea mays
  Clone ID: MRT4577_170113C.1.pep
ICGDTQNRGGTKSQYISRPHGQEIPVNWGMVTTPIEAEPTTLSYHTRRELQRVSKIISQKTNS

SEQ ID NO: 261514 - protein, 127 aa, Zea mays
  Clone ID: MRT4577_170114C.1.pep
KFEWRSEGKKEKELANAAGKLAECQKTIASLDRQIKSLTDLDSVVLEPERLESSRDMPLPLDFRNGDAEFAMFADDLYDFDLPNNDTSFFSPPPSSIQPSSPPSEMSVFAGGLSTLSSYRSKRAIRR

SEQ ID NO: 261515 - protein, 77 aa, Zea mays
  Clone ID: MRT4577_170115C.1.pep
FPWGGAYLTKAVQERVGKGTRRNFANFYTIRKTGSSGQETGNTRPALFSPGATGPTRGGFKRMGVVLRKQTPRGREI

SEQ ID NO: 261516 - protein, 105 aa, Zea mays
  unsure (1)..(105): unsure at all Xaa locations
  Clone ID: MRT4577_170116C.1.pep
NWSGDFTPKKTWKNPDVSHLTGLPLKPPFSTYLNNREGPIGTALTVLISLKWRMNTLYCPALNTAGVGNTRRLPNLIALALSPVPXRFXPSFMPTSTAFPNNALY

SEQ ID NO: 261517 - protein, 122 aa, Zea mays
  unsure (1)..(122): unsure at all Xaa locations
  Clone ID: MRT4577_170117C.1.pep
TRPPTRPPTRASTRPVCPPPVRATTTCSLSSPTRXPPLPPSARSPFPCSTPLRSEMAQLVPSPRASSPPAPVPRSAPRRALWKTRRSSATGLATSKLTRSTSVSAAETKAMRRPPAGPRSAH

SEQ ID NO: 261518 - protein, 141 aa, Zea mays
  unsure (1)..(141): unsure at all Xaa locations
  Clone ID: MRT4577_170118C.1.pep
MAYGYVKPEVDAGAPYNRTFRKYCYGGSNLHGVLDTDHRALVXQLLPARDRRKVQIGLKRKTXARSLQKLRKCEYRXAPXGQKPEPVKTHLRKMIIVXDMIDXIAGAYHGKTFCQDEIKPEMIGQYLAKICISYHAAEYIT

SEQ ID NO: 261519 - protein, 273 aa, Zea mays
  unsure (1)..(273): unsure at all Xaa locations
  Clone ID: MRT4577_170119C.1.pep
MDPPSAAAASARMVDLAMAMQAPLGEGHSMQDFYETXRIDXADGQIAALFGVFDGHGAAKVAEYVKENLFNNLVSHPKFISDTKVAIDDAYKSTDSEFLESDSSQNQCGSTASTAVLVGDRLFVANVGDSRAIICREGNAIAVSKDHKPDQTDERQRIEDAGGFVMWAGTWRVGGVLAVSRAFGDKLLKQYVVVDPEIREEVVDDTLEFLILASDGLWDVVSNEEAVAMTRSIKDPEEAAKMLLQEAYKRESSDNITCVVVHFLHGQGSSGYA

SEQ ID NO: 261520 - protein, 181 aa, Zea mays
  Clone ID: MRT4577_17011C.1.pep
NVTPQQQGGGCGGAGGGGDTVSAWRNVDIAWLKAKEASIRRYEAANWLRRYVGVVCAKDLAEEPSEDEFLVGLRNGIILCTALNKIQPGAVPKVVEVPSDSTAPADATALCAFQYFENVRNFLTGLQGLGLPTFEASDLQKGGQGVRVVDCVLALKSFCDAKQVGKQSSFKFGGIVKPLSG

SEQ ID NO: 261521 - protein, 81 aa, Zea mays
  unsure (1)..(81): unsure at all Xaa locations
  Clone ID: MRT4577_170120C.1.pep
LMGLVWRARTRALVMTPEQITKLLFAVDGRRRIAPTLQRGYSRNGIVLTNPLATDGELLSAPVXRAEVLVQDAMRMETDDY

SEQ ID NO: 261522 - protein, 95 aa, Zea mays
  Clone ID: MRT4577_170121C.1.pep
RPMLLRLAVSWIIYRRWRRRQPHAQSGGAPAFRIPISFPPQIRGYAPQASLQDARREWRLVRLMRTGARTALATFGGGAMLVMAVACGGGDNKGP

SEQ ID NO: 261523 - protein, 59 aa, Zea mays
  Clone ID: MRT4577_170122C.1.pep
SGFLQARHGLRARGRSVVGPWDDKLRARRGLRPGRCSLLLWWLRRCLKIPPDWWRGWLG

SEQ ID NO: 261524 - protein, 52 aa, Zea mays
  Clone ID: MRT4577_170123C.1.pep
GYGIKNFFLSSKAIIPLGKVLKMGGRETEISFFNKIDFLLNIYYKKKNGGPF

SEQ ID NO: 261525 - protein, 102 aa, Zea mays
  unsure (1)..(102): unsure at all Xaa locations
  Clone ID: MRT4577_170124C.1.pep
AEISCSIAVETAAHRHPAVEELSIRXSADALHADPLASSENMVLDPIRSSHLVSAHHAKENHTDCCLDCNHVCTIDIKQHNAFETLIGKQDEILLPPQAVNM

SEQ ID NO: 261526 - protein, 178 aa, Zea mays
  Clone ID: MRT4577_170125C.1.pep
LAGGMTQEDIDQLAAASRSYHQAHASNGQFYDKAAVSIQKKYKGWKGRKHFLNMRRNAVKIQAHVRGHQVRKKYRTIVSTVSVLEKVILRWRRKGHGLRGFRAEQQSMVEAIEEDDEEEDDFDDDEAVKIFRRQKVDQAVKEAVSRVLSMVDSTEARMQYRRMLEEFRQATNWKDQMK

SEQ ID NO: 261527 - protein, 119 aa, Zea mays
  Clone ID: MRT4577_170126C.1.pep
AALEAAGLDNRDAILPLPRIFLFPDFNPNTNPDSANAAPHAETERATQVARLRQILWTSCRFPATASYGSSSRACSHSTLIGGVQSPYEPIRQPDLSPAHKDPNHRTVPPLPFLTSITP

SEQ ID NO: 261528 - protein, 619 aa, Zea mays
  unsure (1)..(619): unsure at all Xaa locations
  Clone ID: MRT4577_170127C.1.pep
RILLPCKTSSQGSQITELAIHGHFEPFSREDTTISLGQTNKFTIREVSPEWAFSYEITKVIITGDFLSDPSNLCWAVMFGDNEVPVEIVQPGVLRCHTPLHSNGNLRICITSGNREVCSEFKDFEFRSKPTSSSFTDIAPSSRHLKSSEELLLLAKFARMLLSGNGNREVPDGDPQSGQCPKLKTNEELWDRLINELKVGCENPLSSVDWIVEQLLKSNLQQWLSVXSSEDSMXTDFLSKQEQGIIHLISALGYEWALSPVLSAGVGLNFRDSNGWTALHWAAYFGREKMVAALLAAGASATAVTDPTAQDPVGKTAAFLASERGHTGLAGYLSEVSLTSYLASLTIEESDVSKGSAEVEAERAVEGISQRNAQRHGGTEDELSMKDSLAAVRNAAQAAARIQNAFRAFSFRKRQQKTARLRDVYGMTQEDIDELAAASRLYHQAHASSGQFYDRAAVSIQKKYKGWKGRKHFLNMRRNAVKIQAHVRGHQVRKKYRTIVSTVSVLEKVILRWRRKGHGLRGFRAEQQPMVEAIEEDDEEDDDFDDDEAVKVFRRQKVDQAVKEAVSRVLSMVDSTEARMQYRRMLEEFRQATAELEGSNEVTSIFDSDLELLGINNFM

SEQ ID NO: 261529 - protein, 78 aa, Zea mays
  Clone ID: MRT4577_170128C.1.pep
SRGQMMSALTHPFFQLDKRWISTTGVKRSINCFETCLAGPTKISVGDWGKTYSYLERSFIEPPGEREKSNNVPRGGTG

SEQ ID NO: 261530 - protein, 87 aa, Zea mays
  Clone ID: MRT4577_170129C.1.pep
ARRAAAPGGRGRDEDELDRAQDPPLQCHHRPLHARLVGALPLQYPSPDCFSGGRAPYPPEISWLIQRRAQSRCLFFTGFALLDVSKL

SEQ ID NO: 261531 - protein, 75 aa, Zea mays
  Clone ID: MRT4577_17012C.1.pep
MRFLEIINILIEIYLEKKKKKKKKKKKKKKKKKKNKKKKKKKKKKKKKKKQKKKKKNPPPGGPQRGKFPHLGGPY

SEQ ID NO: 261532 - protein, 105 aa, Zea mays
  unsure (1)..(105): unsure at all Xaa locations
  Clone ID: MRT4577_170130C.1.pep
GRXLFVRVLSPCRVWLXRLXLGPWSFFFVFCPXLXVXLGACCFPPRXXXLFRALRCRCGFLVLXRFLXFLWFXLCRSFXPLGLVVPLFLCVALCSPSLRFWPPPL

SEQ ID NO: 261533 - protein, 121 aa, Zea mays
  unsure (1)..(121): unsure at all Xaa locations
  Clone ID: MRT4577_170131C.1.pep
WCSICNCGYPSVKGAMLHVLPGHFEPAMPSSSKFKCLHSCPIICNFTSTVQTISANKTMSLQCPYFLDPKTVQEILQPLFSKLIIFICXFLYSINGKKVCLIHVQSLLMISSRFLEVWVLL

SEQ ID NO: 261534 - protein, 57 aa, Zea mays
  Clone ID: MRT4577_170132C.1.pep
KQSYYLIKDPTSVLTTYGQKGPYLWTCFDYAPFHSWAQFMVLKSIPLLKRSFHLIYT

SEQ ID NO: 261535 - protein, 48 aa, Zea mays
  Clone ID: MRT4577_170133C.1.pep
MAEIEGGATADDATAAAEATTTPEVAVPEAGAATEAKAPHKLHRQRTF

SEQ ID NO: 261536 - protein, 125 aa, Zea mays
  Clone ID: MRT4577_170134C.1.pep
PWGTTHLLLLASFCVLATCSLLLDASSDGLLIINLHTMRLDKEAMTGAIPPKIESHLRRPVGADHHLSASTDDIVPSDNYLDTQYFGQISMGAPPQNLTGIIYTGSSNVGGPSSKRYFLKAGYLH

SEQ ID NO: 261537 - protein, 85 aa, Zea mays
  unsure (1)..(85): unsure at all Xaa locations
  Clone ID: MRT4577_170135C.1.pep
KPQANPITSSXLSPSTQLHYLHFYHLTHSLPPLSQLHYSLIHHLTYSHKTFHFTTNPTNHKSYIFILPNPLPNTNYKTILFSFIT

SEQ ID NO: 261538 - protein, 71 aa, Zea mays
  unsure (1)..(71): unsure at all Xaa locations
  Clone ID: MRT4577_170136C.1.pep
MASKQIGVLTCFIAITDLAFRPCASAAPMDGVWTNGGATWDGPAKGAGSDGGAXGYHCADNQPPFSTMITD

SEQ ID NO: 261539 - protein, 63 aa, Zea mays
  Clone ID: MRT4577_170137C.1.pep
TLWMKRQYVLAKAANRWSLFFPLSRSNLAAWLLRCFCKILLPLALSGYLSIQGILGKTSELTT

SEQ ID NO: 261540 - protein, 186 aa, Zea mays
  unsure (1)..(186): unsure at all Xaa locations
  Clone ID: MRT4577_170138C.1.pep
LSIFHTHIAAVPAASTAAGGPVGCAPPATCNDAVVYKHIQKMVQLMRQEVHXKANEISDYIYEEFNIXEKMLLDEPVKKTIKQEYERKDKHVEIHKKIHYYMQFNAYRIKVLQTHDDLHDKLNDDAMNELLLESHIHHEYKNLFKDLIIAGLLQLKVPAVXLRCLLDDHHDEEXDLHSAQHESASE

SEQ ID NO: 261541 - protein, 150 aa, Zea mays
  unsure (1)..(150): unsure at all Xaa locations
  Clone ID: MRT4577_170139C.1.pep
MAAYTMAITSRRWLGTPIKWVAFSQGRITMRKTGANQVAASGTPLXYGPDRVKYLAPFSREPPSYLTGEFPXHYGWDTVVLSSYPETFTKNRELQVIHFLLAMLSALGCNLPELLSLIVVKFREGLWFKARSQIFRKSVLHYLGNPSLIH

SEQ ID NO: 261542 - protein, 89 aa, Zea mays
  Clone ID: MRT4577_17013C.1.pep
FPAGPGARGARVVAAFFSGPPSVLRPGLGFYPRHQRFCVGYPILVWENWRWGAVGVPFWGVVFVASRLWFYHFVLVWLGGPPGFYQAPH

SEQ ID NO: 261543 - protein, 34 aa, Zea mays
  Clone ID: MRT4577_170140C.1.pep
ARDAQKHPTLAANNLGHNTQGLELHIERSLSICE

SEQ ID NO: 261544 - protein, 238 aa, Zea mays
  unsure (1)..(238): unsure at all Xaa locations
  Clone ID: MRT4577_170141C.1.pep
YPPAGXHEFRGDWKGNATLLKTCDPHSRRLVVDSDSPQEVDANKEIIFTYDINFEESPIKWASRWDTYLLMADDQIHWFSIVNSLMIVLFLSGMVAMIMLRTLYRDISKYNQLEDQEDAQEETGWKLVHGDVFRPPVNADLLCVYVGTGVQFLGMLLVTLLFAILGLLSPANRGGLMTAMLLLWVFMGLFAGYASSRLYRMFKGSQWKNVTIKTALMFPGNRFAIFLGLDGLXIWGEK

SEQ ID NO: 261545 - protein, 84 aa, Zea mays
  unsure (1)..(84): unsure at all Xaa locations
  Clone ID: MRT4577_170142C.1.pep
SSDFIKQVGKFAVTVYKMAHMIPMSYLRTLQCWSSPAGGGANNYWMVLTATNWTGTAGSYVSTVWGIPGSESRTWKLLXFNGTM

SEQ ID NO: 261546 - protein, 86 aa, Zea mays
  Clone ID: MRT4577_170143C.1.pep
ASLMEHCSIIPTKLEVIGFLYIYLCARCSQLCDRGIFCLIGQWNYRRFTGRCFVHVCPGSIIPFRVRLKKFPVLCCFCAAQPCGHL

SEQ ID NO: 261547 - protein, 82 aa, Zea mays
  Clone ID: MRT4577_170144C.1.pep
LVFFFFFFPISPHFSSGSLHPPTTWGKKSDHTDASLPTYTRASKFTKGEKGGNRNPQENKNFFPRPRYIPPGAPKAQKVKDP

SEQ ID NO: 261548 - protein, 262 aa, Zea mays
  Clone ID: MRT4577_170145C.1.pep
MLAAARPLRRLSSSCSSSVGALRRVLLHPPAPPPSLQPPLSPLRTLTRALLPPLAAAHRFSTTSFSTSAPSRLGECVGVLGAPAIAEEEEGEETGALVRHDTDAYAAVELALDSVVKVFTVSSSPNYFLPWQNKAQRESMGSGFVIPGRRIVTNAHVVADHTFVLVRKHGSPTKYKAEVQAVGHECDLALLTVESEEFWDGVNSLELGDIPFLQEAVAVVGYPQGGDNISVTKGVVSRVEPTQYAHGATQLMAIQIDAAINP

SEQ ID NO: 261549 - protein, 55 aa, Zea mays
  Clone ID: MRT4577_170146C.1.pep
YDISDLQISVTLTDTGYDTHYFKFLRSLGRCLTDKFFSECYRCCEISFDKFFSEC

SEQ ID NO: 261550 - protein, 73 aa, Zea mays
  Clone ID: MRT4577_170147C.1.pep
KKKKKKKKKKKKKKKKKKKKKKKKKKKKKKKKKKKKKKKKKKKKKKKGPPLFKKPNLTPRACQQKTFFLGPQK

SEQ ID NO: 261551 - protein, 193 aa, Zea mays
  unsure (1)..(193): unsure at all Xaa locations
  Clone ID: MRT4577_170148C.1.pep
FFFPFFFLFSLFLFFFSFFFFSPPPXPPLIPAPSPPPSPPPPXGRAGPXPILPLPFPPVKFLSPPNSPPHPTPNPXSKPRGPQPVTPPPLIPLPPPPPFHSENPPSPPPXNPPPPRESPFPYWPPRWFSPSPLNPPPAXPPPPPAPKNFPQPPPPCLPPPXPKPPLXPPXPPDITLNPLPVPPFPPPEISPPP

SEQ ID NO: 261552 - protein, 207 aa, Zea mays
  Clone ID: MRT4577_170149C.1.pep
VSAELGDLTALRVLWLAGCNLVGSIPASLGRLANLTDLDLSLNALTGPIPPELAGLTSAVQIELYNNSLSGPIPKGFGKLAELRSIDISMNRLGGTIPHDLFEAPKLESLHLYLNSLTGPVPESAAKASSLVELRLFSNRLNGALPADLGKNTPLVCLDLSDNSISGEIPRGICDRGELEELLMLNNVLTGHIPEGLGRCHRLRRVR

SEQ ID NO: 261553 - protein, 84 aa, Zea mays
  unsure (1)..(84): unsure at all Xaa locations
  Clone ID: MRT4577_17014C.1.pep
GFQKFNIKRLLASLPGSQKIFFPPPIVVSGKTKIFVGGLIXTXKVVLSXRKDFGPLRPCPLRGASQKFKLXGKIPRPSVPRLFP

SEQ ID NO: 261554 - protein, 63 aa, Zea mays
  Clone ID: MRT4577_170150C.1.pep
STTYVRMYHDYSIANVLTTMESLSSGAITGPSFKVAPARTLDNWRSFIMSVSRRKATGRATLD

SEQ ID NO: 261555 - protein, 57 aa, Zea mays
  unsure (1)..(57): unsure at all Xaa locations
  Clone ID: MRT4577_170151C.1.pep
TRMVGYIVGIGPLRCVTTRCRVTDLQLTRLHPFTNSSQKGCQLKTQKNKKKKKKKKX

SEQ ID NO: 261556 - protein, 258 aa, Zea mays
  unsure (1)..(258): unsure at all Xaa locations
  Clone ID: MRT4577_170152C.1.pep
SNRNKEKNKKEENRKRLCFPNLLSRPSLTPGPLPRAGPXPAPFPLPFPRPSSSPSXSPPAAACSSPGRPTLRARPXPRARPSPAPRPCVPQATRXPQPLPQPSARVRVCPAPPLXATAPATLAGPRKPPGRPRLCPSPSTSPGLGPLASLSSPLSARPTSDPARGARPCCSHGRTRPDKVLSKSPSSAMRSPPPLPSATPAPSSMASSCARIAQVRPAAGQPAPAGVPSLRGRPAGHIASVSASLSRHDPVERLHPCS

SEQ ID NO: 261557 - protein, 197 aa, Zea mays
  Clone ID: MRT4577_170153C.1.pep
MASLSADLFYDILKRLDAAALARAGCACADFRAISNEEDLWENACTSLWPSMRRDDVRSLIASAGGFRKFYADCFTLILNKDVPVVQANETNFFAEEWAESDYYYYDDGGMDDSENSLPSDFVSLIDVWYKGHALYSKVIWGIPSSDSANGWFYNYPFRIDLSQHSAENIENNNGDVFLQDVPGEGGCPARWRNASC

SEQ ID NO: 261558 - protein, 221 aa, Zea mays
  unsure (1)..(221): unsure at all Xaa locations
  Clone ID: MRT4577_170154C.1.pep
MDDSENSLPSDFVSLVDVWYKGHALYSKVIWGIPSSDSANGWFYNYPFRIDLXNTRLKTTRTTTEMHSYPLSVACHRYPQWSKXKDGKLWRELNDGVKLSWIVVNKKMKRAVNLTSWHPLSGQRHWPTDADFVLRFGSVLPAKEVLPCQVAECILLMKFRVTGMGGEEAGEPSTLALTELSMQIQDMGGVHLNXRCSLLXLRGALSXHRSRNYDEVLESCN

SEQ ID NO: 261559 - protein, 189 aa, Zea mays
  Clone ID: MRT4577_170155C.1.pep
KKKKKKKKKKKKKKKKKKKKKKKTFKKKKNKEKKCPYKKKKKKKWVFPLAGPPLGGIFAIFLPLGGGLTFLLGGPFALLGGGFPFPGPRFSTWGLGKPGGSPPFFPLGHIPFSQGGLFGKGPYPFPFPKVCPPLWGMGPPFLGPFNRGGLGGFPQGARYFSRPLIPRPFPFFPFFFAQGRRFPRKIFKG

SEQ ID NO: 261560 - protein, 94 aa, Zea mays
  unsure (1)..(94): unsure at all Xaa locations
  Clone ID: MRT4577_170156C.1.pep
ETDKARLQQFSVMNKFKKHALRVKAEHLLDQEAADIKDMFEKMDFIHGSXLNFDELKLGLYKIGHQIPDADVHILMEAVSRHSFTPQPKLIAPL

SEQ ID NO: 261561 - protein, 149 aa, Zea mays
  Clone ID: MRT4577_170157C.1.pep
RLCDFSGHRLHAISAIPDTSTCISRAAIHLAHRVSHAQISYFYAPRSLGHPTAEQENPSVPTDHCWPTWHPGLWPHPSRRLARHTQHAAPPLPLLLPHRTIALSTTAHAAGAASLPVRAQPNTVVASTSAFGPPQEFRAPLGFEIKSGQ

SEQ ID NO: 261562 - protein, 98 aa, Zea mays
  Clone ID: MRT4577_170158C.1.pep
ARRCKSSRKLRFLRRHRHRRQLRLSITEELRRTTAASKFRGGNRPKRIGVAAYKGIPGEANLRMPSRNVNATPTPGTVHLHEHRSHGVTVSLAGSLHA

SEQ ID NO: 261563 - protein, 163 aa, Zea mays
  Clone ID: MRT4577_170159C.1.pep
SRSLRIVRGELFGSTSLCLGDRLGRGGLLGSSRRSSSSLLLGGCLVLDRRSLIGSSRSNSLPPRRAGHGRDGLLGSSSSRGLRLAGCLLLGLGKLLRDHQEQLASASASASAGGRLLGPCVPTPRVSDRGRLPRPPRRSGSGPRQWPLCAYQKPHADPKEWRG

SEQ ID NO: 261564 - protein, 60 aa, Zea mays
  Clone ID: MRT4577_17015C.1.pep
HYIQRVITHVCEASAERDHFYRGHIRLPTVYQLDWLEDRFSVTFTVPSWFGESVSIPDRV

SEQ ID NO: 261565 - protein, 120 aa, Zea mays
  Clone ID: MRT4577_170160C.1.pep
MASRSSILLATSMLAALFAVGLCTTPLTFQVGKGSKPGHLILTPNVATISDVEIKEHGGDDFSFTLKEGPTGTWTLDTKAPLKYPLCIRFAVKSGGYRIADDVIPADFKAGTTYKTTLSI

SEQ ID NO: 261566 - protein, 120 aa, Zea mays
  Clone ID: MRT4577_170161C.1.pep
MASRSSILLATAMLVALFAVGLCTTPLTFQVGKGSKPGHLILTPNVATISDVEIKEHGGDDFSFTLKEGPTGTWTLDTKAPLKYPLCIRFAVKSGGYRIADDVIPADFKAGTTYKTTLSI

SEQ ID NO: 261567 - protein, 120 aa, Zea mays; identical to SEQ ID NO: 261565
  Clone ID: MRT4577_170162C.1.pep

SEQ ID NO: 261568 - protein, 91 aa, Zea mays
  Clone ID: MRT4577_170163C.1.pep
VFYLKMKGDYHRYLAEFTSGAERTDAVEITMDAYKAAQDIALVDLAVRHPIRVVVALRFSVLYDVILDLPDIVFMLAIQVFYDAIPVVGSL

SEQ ID NO: 261569 - protein, 142 aa, Zea mays
  unsure (1)..(142): unsure at all Xaa locations
  Clone ID: MRT4577_170164C.1.pep
KQGLSXDAIDXRANLYXMEAGADASXFVEAPXRDDDELKEIGRRTKGYRLCNMLEGGRTPLHTPDELKEMGFHLIAHPLTSLYASTRALVDVLKILKEKGTTKDHLEKMITFEEFNRLVNLDSWYELETKYSNLRNALGETK

SEQ ID NO: 261570 - protein, 99 aa, Zea mays
  Clone ID: MRT4577_170165C.1.pep
SLSFRFWWPALSLWWSPAWASGPRVVSRLQGAVRSCRCRRLRVLPLWLLVLPGVSVVRAKGAALALRPPPRRVSVCGRGVVPVWPCPRARTRGAAPGFR

SEQ ID NO: 261571 - protein, 54 aa, Zea mays
  Clone ID: MRT4577_170166C.1.pep
PLYHGEQGEIESGGAIAVVKPHLHRRSVPDDPIPGVRVWAWIILGEESKCVGTR

SEQ ID NO: 261572 - protein, 23 aa, Zea mays
  Clone ID: MRT4577_170167C.1.pep
SPNLRSPSALYLGDANSGICPIP

SEQ ID NO: 261573 - protein, 97 aa, Zea mays
  Clone ID: MRT4577_170169C.1.pep
TAPRKCTSGKSATLYLPIHTAPPTLAAQRAGGLARWHPPHSQGFIPAGAFTAAGSSAAGLVTPGIVPALGPNEAGRPGDRVRSQDERRGKASRPDAW

SEQ ID NO: 261574 - protein, 43 aa, Zea mays
  Clone ID: MRT4577_17016C.1.pep
THKHHTPASFKHICPHTPYSLNTLHQPLITNSSYFNLIYYLSP

SEQ ID NO: 261575 - protein, 237 aa, Zea mays
  unsure (1)..(237): unsure at all Xaa locations
  Clone ID: MRT4577_170170C.1.pep
SVIEARWLWYTTLAKLVFNDRNIIKHFEXVYLWIHVPRXFAVEKLVGEVVFEPIXAADMSDHLPLHHVNRTISDXVTCKDVLPVLDDVWTEDRAECERFMEHLKDAAPDNSILLTTLSTTDAEAKHSSHAYDLPFLSREYICKVFQLCFGIAMKALNSEFLQTAKHIVEKCSGEPLDITVIARVLHGIKGTEEWRHICNRNVLDVQDDEHTGFACLLVXFAHLPDHPKPXLLHCSIF

SEQ ID NO: 261576 - protein, 721 aa, Zea mays
  unsure (1)..(721): unsure at all Xaa locations
  Clone ID: MRT4577_170171C.1.pep
MPPRRARGSPQVRSGDSMSPVAMLAVMQAMQQELAILRQAIPVAPIGAAQGAGGGGVSGGTVPAGAAPGGEAEVPLPVSGLCLMQWMGMKSDTFDGSGTPIETVDWLTYVEDKMNVFEIVYGDRVRFGTQLLKGEAQIWWRGVQATHSSSPGVLSWDVFVRQFEKRFYQVTFLEKMKIDLQSYKQEKKSVTEYEVGFNKMVRFVPHVAYNEMEKASQFHQGLKPSIRHALGAFQLVDFRTTVEQALGVEMQHQYTMESQKSSGVDQPRGQDARRGNTGEXSGMVGIXCSQDHKDVVCRRNXWEAQMGASDFLLFSGHCQXMMSSAEQQFLVSLPLQQFYVPGTSQLVPMQGFPQYLAAPTPALTTPLPSQFGAPCLPHPAAHWGSSVNFTSGASSSAGISGAYVLPAADAREQGDVRLGHPILVSSANGSISSCVVCPGCSVILADEVFSANLVVISLGAFDVILGMDWLSQYRAVISCFWKTVLLQAPSGREVVFLGSSLKCMLSLLAQLLPVRRSRKSGIFFSMVVEGEATLRVHDIHVVCDFADVFPAELPGIPPERDAAFEIKLIPGTQPIHKAPYRMAPKEQVELKRQLDDLLAKGFIRPSRSPWASPVLFVEKKDKSKRLCVDYRALNQVTIKNKYPLPRIEVLFEQLRGARVFSKIDLNSGYHQLRIHEEDIEKTAFCTRYGHYEFIVMSFGLTNAPGKEAEALDESESLGTDA

SEQ ID NO: 261577 - protein, 177 aa, Zea mays
  Clone ID: MRT4577_170172C.1.pep
IGSLEAGLQRCWKSCRLRWINYLRPDIRRGRFTAEEEKLIISLHAIVGNRWAHIASHLPGRTDNEIKNYWNSWIKKKIRKPAMSTTTSSAVTAASPPCSTAALDAALGRHLQTPFSAAEHRLDAILSQSLALPPPKLGSGRRAAAAKSPRRCPRTAPSSCSTRASASARRRRWRRPR

SEQ ID NO: 261578 - protein, 836 aa, Zea mays
  unsure (1)..(836): unsure at all Xaa locations
  Clone ID: MRT4577_170173C.1.pep
MPPRRARGSPQVPSGDSMSLATMLAAMQAMQQELAILRQAIPVAPVGAAQGAGGGGVPRGDVPAGAAPGGRAEVPLLVSGLSLMQWMGMKLDSFDGSGTPVEAADWLTYVEDKMNVFEIVYGDRVRFGTQLLKGEAQIWWRGVQEAHSSSPGVLSWDVFIRQFERRFYPVTFLEKMKIDLQSYKQEKKSVTEYEVGFNKMVRFVPHVAYNEMEKASQFRQGLKPSIRHALGAFPLVDFRTTVEQALGVEMQHQYTMESQKSSDVDQPRGQDARRGNMGGPAHKRGKSQHQRHHPYRGKSSDSECQWSGRCSICSQDHKDVVCRRNPNGKLRWEPVXLLFSGHYQHDXSAEQQFSVPLPPQQLYVPGSSQIVXDAGFSSVSGRPTPASSTPMXSVWSSVSASPGGSVGFXSINFTPGASSSAXRLGHPIFVSSANGSISSCSVCQGCSVILADEVFSANLVLISLGTFDVILGMDWLSQYRTVISCFWKTVLLQDIWVVCDFADVFLVELPGIPPERDAAFEIKLILGTQPIHKAPYRMAPKEQVELKRQLDDLLAKGFIRPSRSRWASPVLFVEKKDKSKRLYVDYRALNQVAIKNKYPLPRIEVLFEQLRGAQVFSKIDLNSGYHQLRIREEDIEKTAFCTRYGHYEFIVMYFGLTNAPATFMEAMNMMLHEFLDDFVVVFLDDILIYSKTKDEHEPHLRLILGALRKNQFYGKLKKCAFWLSEVAFLGHVINQQGIAVDPKNVAAVVKWKRPSSVSEIRSFLGLAGYYRRFVPNFSSIAKPLTRLLEKGVLFVWSGDCEEGKVIAHGSRQLRKHEGNYPTHDLELAAVVFALKS

SEQ ID NO: 261579 - protein, 455 aa, Zea mays
  Clone ID: MRT4577_170174C.1.pep
MQAMQQELAILRQAITVAPAGAAQGAGGGGVPGGAVPAGAAPGGGAEVPLLVSGLSLMQWMGMKLDSFDGSGTPVEAADWLTYVEDKMNVFEIVQFERRFYPVTFLEKMKIDLQSYKQEKKSVTEYEVGFNKMVRFVPHVAYNEMEKASQFHQGLKPSIRHALGAFPLVDFRTTVEQALGVEMQHQYTMESQKSSGVDQPRGQDVRRGNTGGPAHKRVKSQHQRHHPYRGKSSDSGTSGGSTQRFRAVPKPGLGLVCFRCGDAHRRVECQWSGRCSICSQDHKDVVCRRNPNGKLRWEPVTSSSSQGTINMMSSAEQQFSVPLPPQQLYVPRTSQFVPMQGFPQYLAAPTPAPSAPMLSQFGAPRLPHPTAQWGSSVNFTPGASSSAGISGAYVLPAADDREQGDMVTDCNLADGEYILVPEQGAAQEVAPDPAPEPAPKDLPTTALEGKPRFYA

SEQ ID NO: 261580 - protein, 759 aa, Zea mays
  unsure (1)..(759): unsure at all Xaa locations
  Clone ID: MRT4577_170175C.1.pep
MPPRRARGSPQGPSGDSMSPAAMLAVIQAMQQELAILRQAIPVAPTGAAQGAGGGGVSGGTVPAGAAPGGEAEVPLPVSGLCLMQWMGMKSDTFDGSGTPIETVDWLTYVEDKMNVFEIVYGDRVRFGTQLLKGEAQIWWRGVQATHSSSPGVLSWDVFIRQFEKRFYQVTFLEKMKIDLQSYKQEKKSVTEYEVGFNKMVRFVPHVAYNEMEKASQFHQGLKPSIRHALGAFQLVDFRTTVEQALGVEMQHQYTMESQKSSGVDQPRGQDARRGNTGEXSGMVGIXCSQDHKDVVCRRNXWEAQMGASDFLLFSGHCQXMMSSAEQQFLVSLPLQQFYVPGTSQLVPMQGFPQYLAAPTPALTTPLPSQFGAPCLPHPAAHWGSSVNFTSGASSSAGISGAYVLPAADAREQGDVVTGTVSVDSFVAHALFDSGASYSFVSENFVSWAGLSVQRLGHPILVSSANGSISSCVVCPGCSVILADEVFSANLVVISLGAFDVILGMDWLSQYRAVISCFWKTVLLQAPSGREVVFLGSSLKCTLSLLAQLLPVRWSRKSGIFFSMVVEGEAALRVHDIHVVCDFADVFPAELPGIPPERDAAFEIKLIPGTQPIHKAPYRMAPKEQVELKRQLDDLLAKGFIRPSRSPWASPVLFVEKKDKSKRLCVDYRALNQVTIKNKYPLPRIEVLFEQLRGARVFSKIDLNSGYHQLRIHEEDIEKTAFCTRYGHYEFIVMSFGLTNAPGKEAEALDESESLGTDA

SEQ ID NO: 261581 - protein, 319 aa, Zea mays
  Clone ID: MRT4577_170176C.1.pep
MPPRRAQGSPQAPSGDSMSPAAMLAAMQAMQQELALLRQAIPVAPAGAAQSVGGGEVPGVAVPACAVPGGGAEVPLPVSGLSLMQWMGMKLDSFDGSGTPVEAADWLTYVEDKMNVFEIAYGDRVRFGTQLLKGEAQIWWRGVQAAHSSSPGVLSWDVFIRQFERRFYPVTFLEKMKIDLQSYKQEKKSVTEYEVGFNKMVRFVPHVAYNEMEKASQFRQGLKPSIRHALGAFPLVDFRTTVEQALGVEMQHQYTMESQKSSGVDQPRSQDARRGSTGGLLGLCFVAEGLIERSDPRMKLFVQDSRRFLFVKLRHCKPT

SEQ ID NO: 261582 - protein, 65 aa, Zea mays
  Clone ID: MRT4577_170177C.1.pep
IISWSSRPSGHLSHVQVQRCVDNHQYRLHEALVTSISTRSEYNVVVEVFCWFASYLLDQAAMKLT

SEQ ID NO: 261583 - protein, 183 aa, Zea mays
  Clone ID: MRT4577_170178C.1.pep
PLLFGGIENRHKSGETWPHSKTFKVLNEESVATEGKKTSKYRTIKLCSIVEDLKIDMFTPSGWPTVSGDALRSLADKIPTEYSYTIDFIREDDHFTCRTQYGPGNSSYSERADINGGGKNGKEDVAMCAMLEIESNVRSLELGWRLLLQGDDEVILEGPSESAEVAKAKWWSVCPNLSTEPTS

SEQ ID NO: 261584 - protein, 60 aa, Zea mays
  Clone ID: MRT4577_170179C.1.pep
VPVFSLTSDNTLEFIKYNVRQLASLSPFIRLFASPDCRQVLSRAFYSRVILSYEDFTSIM

SEQ ID NO: 261585 - protein, 94 aa, Zea mays
  Clone ID: MRT4577_17017C.1.pep
KKKKKKKKKKEKKKKKKKKKKKKKKKKKKKKKKKKKKFFFLKKKKGKGGLKKPLFLKKKKKGGFCPKNPLTPPPLGKRGGGFLKSPTRGEFFLV

SEQ ID NO: 261586 - protein, 121 aa, Zea mays
  Clone ID: MRT4577_170180C.1.pep
VFDACSEYTVGWRYECRGRGTMPRHGGVVVRAGKSEDGGRQTTWVIDGKRSECIGERCRRAAASVVVVAWEDSVMSKEWGGNRVERRAWDGREAPDSEVLVWMLRRKRGDVGQSARVVGRF

SEQ ID NO: 261587 - protein, 95 aa, Zea mays
  unsure (1)..(95): unsure at all Xaa locations
  Clone ID: MRT4577_170181C.1.pep
AWQRPAPGQRRPGSAGGSGHRDGAXREGEPPPPPDRVLVGPGVLSDAAASAVVPAATGSDAMGHALVRGGRHGSPDRGEVGLTHDPVXLADAMCG

SEQ ID NO: 261588 - protein, 95 aa, Zea mays
  Clone ID: MRT4577_170182C.1.pep
PPGFTLCFSGLYCVGMCARITFSHRTPLCPFFPPVWSRAGIPLSRPPVLWFSPRGVSRPGVSYVFPFPIHESRARSPPLVRPKLSPSFPPVLFFA

SEQ ID NO: 261589 - protein, 70 aa, Zea mays
  Clone ID: MRT4577_170183C.1.pep
RLRATAGWFGACSRLIVASRMARSCYRLVPPPTVNCPPQCSLHIDVLLPVCVIKAQYRHSCVVTRLISPY

SEQ ID NO: 261590 - protein, 70 aa, Zea mays
  Clone ID: MRT4577_170184C.1.pep
NKLVTPLLRWGQGHISLISVSSFAWHKLLFPSRTSSSFVSHLCWEKHKDGGVYLKKNGELLKRSNNRYVG

SEQ ID NO: 261591 - protein, 43 aa, Zea mays
  Clone ID: MRT4577_170185C.1.pep
KRCSNISACKQDHVTETRVTRSQEIHCLTFETDFPSYVLLEAR

SEQ ID NO: 261592 - protein, 83 aa, Zea mays
  Clone ID: MRT4577_170186C.1.pep
RHAYYKRTGGGQERRRAEDTGPERKNNQDKNKNKTPKCRCAERRTNKDTTAQIRSASITRDMGRAQAYSHDLTRYGLKTGRTN

SEQ ID NO: 261593 - protein, 75 aa, Zea mays
  Clone ID: MRT4577_170187C.1.pep
MGEKERTEGGVVELEAVVALESMNQAMELGGDPSEEVSRVAKTTMLSGRGGGRSHNMRGESIGGGDGWPEVVEWP

SEQ ID NO: 261594 - protein, 163 aa, Zea mays
  unsure (1)..(163): unsure at all Xaa locations
  Clone ID: MRT4577_170188C.1.pep
SRRAWRWCRSGGQPRCQHGEQQRRRDAGAAAAEGAQERGWLWKGTRPSASGDLPSSKAVLRPPRHVPALLCTLIVALGPVQFGFTSGYSSPTQDAVIRDLNLSISEXFSAFGSLSNVXAMXVGAIASGQMAKYVGXRRGSLMIAAVPXIMGWLAISFARTLRF

SEQ ID NO: 261595 - protein, 112 aa, Zea mays
  unsure (1)..(112): unsure at all Xaa locations
  Clone ID: MRT4577_170189C.1.pep
LLDLLFFVGEKNKPPPRGVRGPQPGGGPXNTHPEKKKPPPRAWGPPPGPTLGDPPQGNKPGKGFPGLAPIFWPGREKRTQGGPGDQKGSHTGSRGPPGGIKGKNFWKKKKIF

SEQ ID NO: 261596 - protein, 44 aa, Zea mays
  Clone ID: MRT4577_17018C.1.pep
GRDLHVCPPYYSYLLPHFHDMGRTMLYLRHIIFHFIVNCNLDSR

SEQ ID NO: 261597 - protein, 108 aa, Zea mays
  Clone ID: MRT4577_170190C.1.pep
GAGNHARIRAQCLHSPCGARQTLLNQRSQYKGHSSLVCSHRSFMALCVIIQAASLDLRSISPIKCAAPSVALLLVRKKQSVFPKCAYTSCVSGSLHVRVHDKMAVAYP

SEQ ID NO: 261598 - protein, 58 aa, Zea mays
  Clone ID: MRT4577_170191C.1.pep
WRYGLVHRRVVLVDFGPMLVWYMIMHFPHAVVAVPLDQVTKEVLVHTIDHLLSSTYAC

SEQ ID NO: 261599 - protein, 79 aa, Zea mays
  Clone ID: MRT4577_170192C.1.pep
GSPHGPTSPMARAPCKQLTPRGAFRTPLMARGSPVGISHSAKQLMDGVMERPFLFFFFPSWAWKKKKRIRPGVNNCFPG

SEQ ID NO: 261600 - protein, 440 aa, Zea mays
  unsure (1)..(440): unsure at all Xaa locations
  Clone ID: MRT4577_170193C.1.pep
MATRRHILLLAAAFVSLLALEAVEGLEEGPRGRRLLVLLDDLAVRSSHSAFFGSLQARGFDLEFRLADDPKLSLHRYGQYLYDGLVLFAPSTPRFGGSVDQNAVLEFIDAGHDMILAADSSASDLIRGIATECGVDFDEDPEAMVIDHINYATMDVEGDHTLIVGDDLIQSDVILGSKKIEAPVLFRGIGHTANPSNSLVMKVLSASPSAYSANPKTKLSLPPSLTGSAISLVSVMQARNNARVLLSGSLDLFXSNRFLKSGVQKAGSKTRYERAGNEQFVTETSKWVFHERGHLKAVNVKHHKVGETNEPGMYRINDDLEYSVEIYEWSGTSWKPYVADDVQLQFFMMSPYVLKTMSNDNKGLYSTSFKVPDVYGVFQFKVEYQRLGYTGLSFTKQIPVRPYRHNEYERFITSAYPYYTASFSTMCAFFIFSLVYLYHK

SEQ ID NO: 261601 - protein, 53 aa, Zea mays
  Clone ID: MRT4577_170194C.1.pep
GVLLRVVPAGVPSAQLPPQPLWGFPCPSALLLIHDIWEISSIHPPLSIYVIIQ

SEQ ID NO: 261602 - protein, 440 aa, Zea mays
  Clone ID: MRT4577_170195C.1.pep
MATRRHVLLLLAAAFASLLALVAAEGGEEGPRGRRLLVLLDDLAVRSSHSAFFGSLQARGFDLDFRLADDPKLSLHRYGQYLYDGLVLFAPSTPRFGGSVDQNAVLEFIDAGHDMILAADSSASDLIRGIATECGVDFDEDPEAMVIDHMNYAVTDVEGDHTLIAGDDLIHSDVILGSEKIEAPVLFRGIGHMANPSNSLVLKVLSASPSAYSANPKTKLASPPSLTGSAISLVSVMQARNNARVLLSGSLDLFSNRFLKSGVQKADSKTRYERAGNEQFVAEISKWVFHERGHLKAVNVRHHKVGETNEPGMYRINDDLEYSVEIYEWSGTSWKPYVADDVQLQFFMMSPYVLKTMSTDNKGLYSTTFKVPDVYGVFQFKVEYQRLGYTGLSFTKQIPVRPYRHNEYERFITSAYPYYTASFSTMGAFFVFSFVYLYHK

SEQ ID NO: 261603 - protein, 184 aa, Zea mays
  Clone ID: MRT4577_170196C.1.pep
MGSSSSPSPPPPPMIGRAGNLTVFITPPSPASTPRGALRTPPPESPRSDFSTPTRQRIAPSPSPSPSPQKHESPFAAPAVVFTPPPPSAPVKVAPPPVQVPPPQYEKASAGGKHDGSAFGFFWDAVARVQEAHASLDEYMATWFGLDQSKYQWALNDYYEATGKDVDCVKGSKLKELTTKVQKV

SEQ ID NO: 261604 - protein, 84 aa, Zea mays
  unsure (1)..(84): unsure at all Xaa locations
  Clone ID: MRT4577_170197C.1.pep
RQRRRAGCTHRKLEHPRHGSLRSLTRQRSSRHRAQVKSSPREDPKKPRHITXFLGYTAGRTHIVRQAEKPASTLHNKEPRAALT

SEQ ID NO: 261605 - protein, 130 aa, Zea mays
  unsure (1)..(130): unsure at all Xaa locations
  Clone ID: MRT4577_170198C.1.pep
PAGPPPRQTRSRDRAQKNPDTRRXXXXAXXXQXXXASATXTXTSGGGGGQPPPAEQQPPPEXXPXPXHRPXPEXXPPAXHQPTTGHRPPPXQEPPPXQXPPXPXHXXXQPPRXQPQPQPHPXPXQQPQPS

SEQ ID NO: 261606 - protein, 53 aa, Zea mays
  Clone ID: MRT4577_170199C.1.pep
EWLVFNQVDREKVVGQQPGWVGGPWNLGGNIYATGHRARVSIILDHRQWMYGA

SEQ ID NO: 261607 - protein, 147 aa, Zea mays
  Clone ID: MRT4577_17019C.1.pep
ARARAAAPRSAPATALSDDYLSQSPENDASSGKLVMFGKGSPEFSAGGHALLNKDCELGRGGFGAVYKTVLARGQPVAIKKLTVSSLVKSKDDFERQVKTLSKVRHHNIVALRGFYWTSSLQLLIYDYLPGGNLHKHLHECNTDSLL

SEQ ID NO: 261608 - protein, 67 aa, Zea mays
  Clone ID: MRT4577_170200C.1.pep
YCPFQFAFTNQLLNSMVIEWTMQELVYCSLYICVFQLQWKALCFFFKKKQEIKHVQLVNLMKKKIEI

SEQ ID NO: 261609 - protein, 84 aa, Zea mays
  unsure (1)..(84): unsure at all Xaa locations
  Clone ID: MRT4577_170201C.1.pep
THHAKLIINNLTTGARKILSVLALLAXFASATNAFIIPHCSLAPSSIITQFLPPVTSMVFDHPAVQAYWLQHAFAASVLLHPIS

SEQ ID NO: 261610 - protein, 63 aa, Zea mays
  Clone ID: MRT4577_170202C.1.pep
ACEKWLPKRVISAWGIGGILSPLEGWAVPQCGGPMVHSYKAWSAVFWAGFVSFSKALKPVRNF

SEQ ID NO: 261611 - protein, 287 aa, Zea mays
  unsure (1)..(287): unsure at all Xaa locations
  Clone ID: MRT4577_170203C.1.pep
MGNSIGGRRKGAKVMQLDGTAFRVKPPASAGTVLRDHPGFQLLESEEVKLLGVRARPLAHDAQLRPGRLYFLVALPRPAAPPRRAWSGALHVGARERLESLMLTRRSTSDLSLAASAATGTGXAAVPALXASEGGGPVRLRMRLPKAEVDRLMAESRDAADAAARIMQLCAAATPDRTPRFVPTPDWGAGAAAFPQTPDRSPRFAATPDWGTGFMMPPGAAAAPTTPERWPALPRTPEYASTGVKASRKEVTHSATASIPPRRLLLWNVQFLDCTGISPFASVLFFF

SEQ ID NO: 261612 - protein, 100 aa, Zea mays
  unsure (1)..(100): unsure at all Xaa locations
  Clone ID: MRT4577_170204C.1.pep
PAPPPLSVSSVGLCRLLPLSPSCLVXALFFPFFGALFASXLPPPLSVALFGXLCAVPPFVCFFGFAPLCSASFVASPCCLLSLLLPAAGCGFSPPASRPF

SEQ ID NO: 261613 - protein, 281 aa, Zea mays
  Clone ID: MRT4577_170205C.1.pep
MGNSIGGRRKGAKVMQLDGTAFRVKPPASAGAVLRDHPGFQLLESEEVKLLGVRARPLAHDAQLRPGRLYFLVVLPRPSVPPRRAWSGALQVGARERLESLMLTRRSTSDLSLPASAVTATATAPASPLSESEGGPVRLRMRLPKAQVERLMAESRDGAEAAARIVQLCAAANNPASGAATPERGILRTPERSPRFVPTPDWGVGAASSPQTPERSPRFAATTPDWGTDGFMVPAGAATAPRTPERWPALPRTPEYASPNVRASRKEKRTRFVALPDEIIA

SEQ ID NO: 261614 - protein, 74 aa, Zea mays
  Clone ID: MRT4577_170206C.1.pep
CKNNIGLAAVTHASVHISRVLARKFCNGILDRISSFAMDARSDTGTRCYLTLQRRHTEMDRGLVHRKLRTNAVR

SEQ ID NO: 261615 - protein, 81 aa, Zea mays
  Clone ID: MRT4577_170207C.1.pep
VADVPDNGSSITCFHLSSPVSEYDSTAMLNWRVRTWYTTGQTCQCRYQDLQGKEEVRLEHLNSSHLDSNLLQQCDSEVNRF

SEQ ID NO: 261616 - protein, 69 aa, Zea mays
  Clone ID: MRT4577_170208C.1.pep
TEYQFFLGENVIETSLDNIQVIQLLMRTASTEAYGQYLLDAWKSPSCTYNVYVAYATTALCTDKDTKAG

SEQ ID NO: 261617 - protein, 93 aa, Zea mays
  unsure (1)..(93): unsure at all Xaa locations
  Clone ID: MRT4577_170209C.1.pep
QEAQKIFKANHPMDAEVTKAKLLGFGSAXLLDNVDPNPENFVGAGIIQTKALQVGCMLRLEPNAQAQMYRLTLRTSKEPVSRHLCELLAHSSE

SEQ ID NO: 261618 - protein, 81 aa, Zea mays
  Clone ID: MRT4577_17020C.1.pep
ETGRPIPTKTQWRARTEHDAPPHSHRGEAAGEAGFHQAGATAAHQERGSRLRTHKEMVTGREATPTANGTAPAPSGRKARV

SEQ ID NO: 261619 - protein, 89 aa, Zea mays
  Clone ID: MRT4577_170210C.1.pep
RRPVCFFFFFFFWCFFFFFFFLHKCLLERWRNYPTPLGLGDKKQRTWGPHSRGGGGGYPPKRKTATGAHTFSLLGSLKNGEDSCPGGVY

SEQ ID NO: 261620 - protein, 424 aa, Zea mays
  unsure (1)..(424): unsure at all Xaa locations
  Clone ID: MRT4577_170211C.1.pep
PPSLSSSPTTPLPCSSSRPPHRRVQRLQPLGPTPPQRPLPDRLPPNPCPRPVQQPACSVRLIWGLRDGKTKTISALLWSMLIENQRTVTCAPTNTAVAEVASRVLGVIEESSGGGAATKCFFGDVVLFGNEDRMAVDRKLENIFLDTRVRRLRQCLMPITGWTKSLSSMIALQEDSMVPYERYXRPYKVVYLDLVSEEIKLRNVTVVCSLRTMDDKKVKEMQKDLLGXKKAREVEREKMSFETYFQSNYKKLAKDLRTCVETFVDDLPRSATSEENFCCMAEVLLLLDAFGVLVQSEPVEQLQALFKRHSDVRFRLREAISSCLRKLWLLSSNFKLPEMYDSRTIDLEFLLQNAKIVLCTASSSYRLLYMQKAQPLEVPVVDEAAQLKECESLIPLQLPGVRHAVLIDDEYLLPALVKSKLNSC

SEQ ID NO: 261621 - protein, 65 aa, Zea mays
  Clone ID: MRT4577_170212C.1.pep
STAIPLCTFLSVVKSHHSVHSMVIKPIPGTVQDMVDGGIWPSTLPPGWTVESLAAATGEEQEQRE

SEQ ID NO: 261622 - protein, 237 aa, Zea mays
  Clone ID: MRT4577_170213C.1.pep
MSSSPLPTTSGGAHIFPSPPRPRHRRCCQVIVAAAASPRSYGVGRRAVSLAGVAAWLATIVGRADAASPFDKYVKRKKLEPLETYVPAVLLTIDQFVDLEKSLEFEKPRYDESRSLLRSGPASSLRVNIRAVAQYASSNGQGKAASDAVDECLRALEDLDSLLLHASRNDPSASVETMRSKISVALAALDNLLQTVPSAVLDKGKAIADAYRTPVDDYVEENAAELDPRLKQLEDIL

SEQ ID NO: 261623 - protein, 48 aa, Zea mays
  Clone ID: MRT4577_170214C.1.pep
FGPAKHSIRHFVLCMIHCSNPMLYFARYVPIPFLLSMAFPVFLFQIKT

SEQ ID NO: 261624 - protein, 151 aa, Zea mays
  Clone ID: MRT4577_170215C.1.pep
VLLCCTLLRIHTSTRLLLRRSSCPLVSVADLLRPKLPIAAGADAASPFDKYVKRKKLEPLETYVPAVLLTIDQFVDLEKSLEFEKPRYDESRSLLRSGPASSLRVNIRAVAQYASSNGQGKAASNAVDECLRALEDLDSLLLHASRNDPSA

SEQ ID NO: 261625 - protein, 76 aa, Zea mays
  Clone ID: MRT4577_170216C.1.pep
QGATITNHSMNMKAGRRGQRGKRSKGNITSRSIMQYPGRSKRRRPDADAPRSPSRRRRYWSNDRLAHAPRLFVIVT

SEQ ID NO: 261626 - protein, 119 aa, Zea mays
  Clone ID: MRT4577_170217C.1.pep
GLIWKATQRSKALQVRRVFWTQIKGPSSNGHSSARGKFLCGRIFQTSVGRMCAHLQWRALGVPGNVIFYHRCPDSVGMPIHKGPWCLILDASLPMGFGGPLPHRKFFFRPQIMTGDSKC

SEQ ID NO: 261627 - protein, 139 aa, Zea mays
  unsure (1)..(139): unsure at all Xaa locations
  Clone ID: MRT4577_170218C.1.pep
ENPRLDTSRLTQANTGSNIPRSPLLAQHWSAKCMNQSLXVQNIRPHDVHKLLLPVINQXLNKHLSPYSHQQQNLTFNQLSTLNPAAYLQQQLLPFRQLATAYSKQQQLVTFNQAARLNPAAYXLQQILLPFNQLAAANP

SEQ ID NO: 261628 - protein, 230 aa, Zea mays
  unsure (1)..(230): unsure at all Xaa locations
  Clone ID: MRT4577_170219C.1.pep
MGNDQKMGAYYAPKGGLPPQTQILTDRAMFTESYAVIPKGCFSDIVTSFLPFWEQTRLWVIARPLSGFAETFSQYIMEVSPGGGSDRAEMDDTAEGVLFVVEGEITVTVAGEAHTLDAGGYAFLPPKCGWTLRNNSSENASFHWVRKAYEYVPGLDAPEAFFANEKDIQAREMPDTNGAWSTTRFVDPTDVRHDMHVNIVTFXPGGLIPFAETHVMEHGLYVLEGKAVYR

SEQ ID NO: 261629 - protein, 135 aa, Zea mays
  Clone ID: MRT4577_17021C.1.pep
HEDPALHTTPPPHHQLSSPDGPTHLAVLRPHRRRTGSSPPMPSPPRPLASLCRALVLVPALRLLPTMAHSGGPNRRGRLASARSSWLRPCRCATAAGCTGSTGRARPRGTKSRMISYPASIPASFSIRLGDDWDW

SEQ ID NO: 261630 - protein, 256 aa, Zea mays
  Clone ID: MRT4577_170220C.1.pep
MASMVLRAAAAARLPSLRPRRNGSGVLTGLRIGTGHYGVRLALSSSAAASPKEFEVACLPVDDSRLGPGEDYVSDLRMADEEELDHFYRVLAIKTDMLFRAYPEHKPFAVSEEDKAVQERLKEFANECIDLLVDALRRIPAEKRRPLFSVFGNVYQVFASVKWYAEGGCAQWWMALQITEELEIMRKMVSSACGGTPLDRETVFDRKEALTGVDVQAALRGHGVESNLSLVIFELIDNIYSNVKSDIDDMVFAFTA

SEQ ID NO: 261631 - protein, 56 aa, Zea mays
  Clone ID: MRT4577_170221C.1.pep
MSTASFVTYLQRPRELPAPEFRAPPPSPVTGVLTGSSSSGSSGYGECQDDDDIGRF

SEQ ID NO: 261632 - protein, 52 aa, Zea mays
  Clone ID: MRT4577_170222C.1.pep
RGKVCLGYSLPRSHSCGSHQHSVCPFSWHRYAYAYLPNSGLPFLIASITVLK

SEQ ID NO: 261633 - protein, 64 aa, Zea mays
  Clone ID: MRT4577_170223C.1.pep
TGAHQSPVSTERYIATKYHTESFLAFIEHLEFWTTLYIKLNTCLDNQSSPPFIIAYVTYAICLK

SEQ ID NO: 261634 - protein, 72 aa, Zea mays
  Clone ID: MRT4577_170224C.1.pep
NKTAGGWAIYKLKFTFVRINTSMKPTANRNGIFKGNCDAIIYRNKVAKLYIYESQACVLVLRISRLQGHRDL

SEQ ID NO: 261635 - protein, 526 aa, Zea mays
  Clone ID: MRT4577_170225C.1.pep
QPFAYSSVAAGSFLSPLYPLHTSEPATLEAGRVYYQSSVMSLPPGFISSDGASNASGVKSETSYYPVSRQNLEIKTCHNASGDPEQNSYISSEDDRNKTSEPMGRISESEKKQQVDVEQSCLEPAACIGKEALSSHGDTILSKKEDAGALCYEPPCFRSFEFPFVSCELVNSSDLPEYSPLGIRELMRTSLNFPTPVRLWGSPTRDGSPDAVLKNAAKRFMCTPSIMKKRHRDLLSPVPDIRTDKKPNTERDFMSSGISSTRVGKSCMDSVDDSADLVSPKESAFQKKLKLCHENKENLNEIADQGENEANAKHSSGILTPSSVDNHNTHKNGPNFRIPELNTTVQALSNSKDIIFSRSKPSEHVEKSAACIDADYEYLNILADTPGIKRGLESPSAWKSPVFTPFQDAYFMSPASRAFDALGLVKQINEQSASAVEEAHEVLANGSPWKQHNKENSDKENIENTALKHEHVTSKPPSILMVEARVLDFNECSTPVRKKDDKKVEMVLGGPATSPVTSSHLWINMR

SEQ ID NO: 261636 - protein, 115 aa, Zea mays
  Clone ID: MRT4577_170226C.1.pep
MQAEWMAPEILRNEPSDEKCDVFSYGVILWELCTLLQPWEGMNPMQVVGAVGFQQRRLDIPGGVDPAVAEIIRRCWQTDPRMRPSFSEIMATLRPLLKNMPANQPTRKRAQQTDD

SEQ ID NO: 261637 - protein, 191 aa, Zea mays
  unsure (1)..(191): unsure at all Xaa locations
  Clone ID: MRT4577_170227C.1.pep
KPGVFYQPPPNGAKTSGPLPKFIRGGGAFKPPPHPPHKPPGGAAPXKPPPFKFLSGPPPWGGKKGGSPPNPXGNPKPGPPKPWPXNPRGPPKKPPPPPKNPPGGLFGKTYPGNPPFQIXDPGPDPPKGETPPPGGPVQGDPARDPTGGKPGQKRAPGENGIPPXPPKIRSRKPKGESPGGPKGGPPPLMGG

SEQ ID NO: 261638 - protein, 502 aa, Zea mays
  Clone ID: MRT4577_170228C.1.pep
MIRTMNELESTAHDGCAGLGPSLPPDPGHELQTKIVPYRMPPDLKPVQGLGVYHKFDFRDNINPSIPLYEPSPAPQENPLQLIKQMPVTAAAVATAAVVASSMVVAAAKSNSDIKLDVPVAAAATAAAVVATTAAVNQQYEYLDPGCQLLCLPSSSNKLIQKGRHDLVDDDQLETNHGQDNALEREKDLVQAPQEAERISDRSTGTESARSEISLDKIAEFEIQWEELTLGERVGLGSFGEVYRGEWHETEVAVKKFLQQDISSDALEEFRTEVGIMRRLRHPNVVLFMGAVTRVPHLSIVTEFLPRGSLFRLIHRPNNQLDQKRRLRMALDVARGMNYLHNCTPVIVHRDLKSPNLLVDKNWVVKVCDFGLSRLKHSTFLSSRSAAGTAEWMAPEILRNEPSDEKCDVFSYGVILWELCTLLQPWEGMNPMQVVGAVGFQQRRLDIPGGVDPAVAEIIRRCWQTDPRMRPSFSEIMATLRPLLKNMPANQPTRKRAQQTDD

SEQ ID NO: 261639 - protein, 64 aa, Zea mays
  Clone ID: MRT4577_170229C.1.pep
LCMAKNEVTLAPVLCAVHHCVNALTVLVGHTLRHLTPEDLVRQLVGHVHRLARDGHGYGCRSAH

SEQ ID NO: 261640 - protein, 53 aa, Zea mays
  Clone ID: MRT4577_17022C.1.pep
PRGGLLYYKKGGQETNGVFGLKNYIVHHLLTPHFFVGFGEWRELIHPHLIPHS

SEQ ID NO: 261641 - protein, 82 aa, Zea mays
  Clone ID: MRT4577_170230C.1.pep
PCQWPALLFRVQFGFSQPVGDLPVSVFIWFDPPPFGFPWYERKIQFPPPSSSLVWYLYQYSCVCLLMGLFACICWGLYPGIQ

SEQ ID NO: 261642 - protein, 89 aa, Zea mays
  Clone ID: MRT4577_170231C.1.pep
HDDDDDNNDDDEDDNYNDCRVECIEDCIDYVPGICYRHCVSYSCLYLPPYSYRRAACFRRCGHRCYHHGHHHHHHHHHHHEDDDDDDHH

SEQ ID NO: 261643 - protein, 103 aa, Zea mays
  unsure (1)..(103): unsure at all Xaa locations
  Clone ID: MRT4577_170232C.1.pep
MAPPWVXPQGYPLFPAKGDPVGISGVQVFRNIPGHPEVRVTKAGGAPGGLXNPKEGGGFPKQGLKSFVPAKTPGIMPAIPKFFSAPQGNKTALVGPPSPGFSP

SEQ ID NO: 261644 - protein, 203 aa, Zea mays
  unsure (1)..(203): unsure at all Xaa locations
  Clone ID: MRT4577_170233C.1.pep
MLACSFFALRLYTNSNTIASRIQDARAILSRIVGEQGLGLMMRREPAQRSDCVTRVQHDLRRPWCPDMIEHGRMMNLLLLDGISLPTACMVDTYGDFFGPVGSXNAATATYVKDKLGNDITEEAWLNTHGPNDRTLAHGLKGDPTYLVVEQDKTLATYGINAVCTHLXGCVGPGNGAENKFICPWRGFQYNNRGRGAPGTARP

SEQ ID NO: 261645 - protein, 122 aa, Zea mays
  Clone ID: MRT4577_170234C.1.pep
GPPTQPSPPGLCILPLLIQQMSSQAIRHEARSSAISSSTTPNLAELAAEGGGSLFCHGAGRAPPGLAAPAPRERGELAGSGDGYVFAVQHDAGITLLDACNTIVARLHRLLACLAVDLLFSS

SEQ ID NO: 261646 - protein, 82 aa, Zea mays
  Clone ID: MRT4577_170235C.1.pep
MPSSFWLVVLVSLRRDRPWIHIDKPHDEPHGRGDSGSRSRPNPATRSRRRESTSKVWLDFEEVTAMEEGKEIRIAAACPYCL

SEQ ID NO: 261647 - protein, 229 aa, Zea mays
  Clone ID: MRT4577_170236C.1.pep
MDPDSVKSTLSNLAFGNVIAAAARDLQKEMVAKDKAQAAPASHDEVDLDELLDDPELEKLHAERIAALKKEVEKREVLKRQGHGEYREITEGDFLGEVTGSEKVICHFYHREFYRCKIMDKHLKALAPVYVGTKFVKLDAENAPFFVAKLAIKTLPCVILFKKGIAVDRLVGFQDLRSKDDFPTRALENILKTKGIIDEKKKDDDDDDEESEAKNRRVRSSTAQDSDSD

SEQ ID NO: 261648 - protein, 68 aa, Zea mays
  Clone ID: MRT4577_170237C.1.pep
GHEPPGGDLPPGEHLPPAVHVPTPCYYLTKPPRSEPNPEPHLCPCQQPNTSPCQMEGTCGVGSTQILG

SEQ ID NO: 261649 - protein, 229 aa, Zea mays
  Clone ID: MRT4577_170238C.1.pep
MDPDAVKSTLSNLAFGNVIAAAARDLQKEMVAKDKAQAAPASHDEVDLDELMDDPELEKLHAERIAALKKEVEKREVLKRQGHGEYREVIEGDFLGEVTGSERVICHFYHREFYRCKIMDKHLKALAPVYVGTKFIKLDAENAPFFVAKLAIKTLPCVILFKKGIAVDRLVGFQDLGSKDDFSTRALENILKMKGIIDEKKKDDDDDDEESESKNRRIRSSTAQDSDSD

SEQ ID NO: 261650 - protein, 242 aa, Zea mays
  unsure (1)..(242): unsure at all Xaa locations
  Clone ID: MRT4577_170239C.1.pep
MDADAPATATPSRKPASHSLPPPPALFAARARSRVADLGAGAAFPAPPPDTPPRRSPITVPFLWEEAPGKPKALPAXPRHRLQPTPAPLPKSPVGXDRGHADLPRPLPLKLPPRLQQAASSFAAADTXLSPKTVLQGGRRRPRWARRGASAFRRTPSAGGGLFSRNWSKPTAAASNKNGDGDHERDAAGPDAPWCSPASSSSSSSASTCFGVDGHGHGGRARPADGREVCSEEDDGSPRGSD

SEQ ID NO: 261651 - protein, 64 aa, Zea mays
  Clone ID: MRT4577_17023C.1.pep
PCLCFQLPLSVLIPPAINQHVPQVYLARAPQIVAQHARTFSRQTTHNKNTKNNNNKKTPQQPQP

SEQ ID NO: 261652 - protein, 113 aa, Zea mays
  Clone ID: MRT4577_170240C.1.pep
GRVGLWGSLLAACRSHSCVELAELSVERLADLGADDSGVYVLLSNIYADEGMWGDVLRIRKLMSDEGMRKDIGRSVIEVDGEIHEFVNGVGSYICKDEMYLMLWNLSNMVASI

SEQ ID NO: 261653 - protein, 50 aa, Zea mays
  Clone ID: MRT4577_170241C.1.pep
AIVLGSVKGVKKAVSLTSVGKRVLSKVFYAESLLSVGTRVVVTAPQTSCS

SEQ ID NO: 261654 - protein, 108 aa, Zea mays
  unsure (1)..(108): unsure at all Xaa locations
  Clone ID: MRT4577_170242C.1.pep
LKLFHSMCMLTMFYAYSDCTVKLTLTHSHSNFXFSSVDEAVATRDAVYNLQWPPNNGNKLVAEFVDPQEVKLKVDPSPPPAAPVSPAAATRAPVQHTQTNVCHARLLH

SEQ ID NO: 261655 - protein, 131 aa, Zea mays
  unsure (1)..(131): unsure at all Xaa locations
  Clone ID: MRT4577_170243C.1.pep
MDASAARAGGKANKGAAWRKAGXSIKKSVTRFLRGGLQFPVXRIGRYLKKGQYPQRVCTGTPFYLAVVLXYLAPXVLDLAGNAAIDNKKTHIILIHLLLAILNYKNLGKLLVRVTINHGGVLPNINPVFLP

SEQ ID NO: 261656 - protein, 92 aa, Zea mays
  unsure (1)..(92): unsure at all Xaa locations
  Clone ID: MRT4577_170244C.1.pep
LKGGGGPPHPHPKKGRWYPPNFSKKRRGGPPPPPXGSTLPPRQGGGPPXPPPKXHAPPPQLPKTRFFTGPPKKSPPPAGTXPGRNTTPPPQG

SEQ ID NO: 261657 - protein, 47 aa, Zea mays
  unsure (1)..(47): unsure at all Xaa locations
  Clone ID: MRT4577_170245C.1.pep
IELVSTHDTNAYIQQPDCSILDWLVDRGSHTLCGQSWXQHXNYFFFS

SEQ ID NO: 261658 - protein, 46 aa, Zea mays
  Clone ID: MRT4577_170246C.1.pep
PLGSRLTNGDSQGRLSDPRGRITRQHQGVGNRCCVHQEKRTVHNDW

SEQ ID NO: 261659 - protein, 121 aa, Zea mays
  unsure (1)..(121): unsure at all Xaa locations
  Clone ID: MRT4577_170247C.1.pep
RDPPAGHGAAPDRLXGREGGSGRRATLTWVVSVLVDPSLFLSLSLFVMLRVADDDNVGRRKKHAIADSLTFLPPSPAFDLGGRIDVLDGIKSNAEGSAHGSGVGERRRKRRDTTRSPSLAA

SEQ ID NO: 261660 - protein, 97 aa, Zea mays
  Clone ID: MRT4577_170248C.1.pep
LLSSSPWNVVPRRASRLPTLGNTMTRLLTCYLLYNNERVTRTQTTPYLNGAHRHPIDLRTPSITPSCERYPMYYLTDDCLITGLRQILILRFYLSDT

SEQ ID NO: 261661 - protein, 123 aa, Zea mays
  unsure (1)..(123): unsure at all Xaa locations
  Clone ID: MRT4577_170249C.1.pep
SLPENGAKLPLQEVENGSVFLRFAQQNKAGEDKDFLFLTSIALKKVFPEKKIGKVIKTSFLANQKRPPMEKKVFKWKAQGFSAYKKVVWGGPLDPLKLVVXLGPMEIRPFFVSFFPTSAKPQL

SEQ ID NO: 261662 - protein, 76 aa, Zea mays
  Clone ID: MRT4577_17024C.1.pep
TLTFSLFGRNLRRTRCVSIVLGAHDDHRLSFRDGLFMGPHSRVGCSRTNIGLPLGGWQTKALGLGDVTLRPLLFVK

SEQ ID NO: 261663 - protein, 91 aa, Zea mays
  Clone ID: MRT4577_170250C.1.pep
SARARADSNDIFSLYQNKCQFEDILLEMDRILRPEGAIIIRDKVDVLVKVEKIANAMRWKTRLADHEGGPHVPEKILFAVKQYWTAEKTSS

SEQ ID NO: 261664 - protein, 65 aa, Zea mays
  Clone ID: MRT4577_170251C.1.pep
SDKYLYNKYTASLSQFYTNIVSVQINIHSATSDNTNGIEKLKYQLLQKLLVLTEVPKSLQYLWHL

SEQ ID NO: 261665 - protein, 78 aa, Zea mays
  Clone ID: MRT4577_170252C.1.pep
QKKKKKIKKSLKFTTKKTIKTFCYNRKRSSHKNNKNLSYTKSHKKKHPPPTYPNFIPPTFLLLLLFNTQPNFISLPPF

SEQ ID NO: 261666 - protein, 139 aa, Zea mays
  Clone ID: MRT4577_170253C.1.pep
LRGGKQIFVKTLNGKTITLEVESLDPIDNVKAKIQDQEGIPPDQQGLIFAGQQVEEGRPLTGFHIPKESPLPPGVRFRGGQLVMGWFNRPRAWVVWGPLSKRRVVKDFLVGFLIGAGVGLKRAGLCGGGVYPRIMPIHE

SEQ ID NO: 261667 - protein, 266 aa, Zea mays
  unsure (1)..(266): unsure at all Xaa locations
  Clone ID: MRT4577_170254C.1.pep
GLRDPSTMPPRIRIRPRALRACASHPTHPISLPAIATYASVAAASATTPAPPIQQTHKAAPPVLRYPPTQPPSHKPPEVRKTQLHRQYQSLLKSSPLILIFQHNNVKAVEWMSIRRELAIALRKLDAERAKNGQETLADEVKMQVIQTNIFASALRVVEFFNPEQFMLDHAQHPTDPRTPTSAQIPQTSNDAEDERFTHGLSRRAHEIANNRKLKLELEPLLSGPLAVVAFPDVAPQYLKAXLSILSPSKPDFPAPSRXGESRLLR

SEQ ID NO: 261668 - protein, 35 aa, Zea mays
  Clone ID: MRT4577_170255C.1.pep
PGAWSFVICHEFESSQISTELSCWLYEGYIRTYRL

SEQ ID NO: 261669 - protein, 84 aa, Zea mays
  unsure (1)..(84): unsure at all Xaa locations
  Clone ID: MRT4577_170256C.1.pep
LLLXXTHTPQGEHPAGGGANKHKANXAGRGNHSGPTGKATTPQKTTEQHKKEPXLSAAQKGDSTQAAKTKXRDPDPHKTRPPGK

SEQ ID NO: 261670 - protein, 51 aa, Zea mays
  Clone ID: MRT4577_170257C.1.pep
LHLGPPSLSHGGGSRCRLRMEWRSGRASRRRPLLRTSKNTYDKWGLTSTTC

SEQ ID NO: 261671 - protein, 122 aa, Zea mays
  Clone ID: MRT4577_170258C.1.pep
MRSPVLTRVLAAALLVASSSAALSQAAWVPVLDVNDLVIKQVAQFAVLVYGLAHHRDLAYVGVVRAQTEQAVGGGTNFRLVVVATRPDDGGSTARYDCLVWGVPGSRSDTWKLRRFRKIVQG

SEQ ID NO: 261672 - protein, 111 aa, Zea mays
  unsure (1)..(111): unsure at all Xaa locations
  Clone ID: MRT4577_170259C.1.pep
MWRRALAMVLFMAGAALLAGAARAGAQHVMWSIMTQTMLHSMLSHRCDSGCHSDYYTYDAFIEAASKFPSFGTTSDEQTLRRXLGDMFGQTSHETTTGWATAADGPVGWGY

SEQ ID NO: 261673 - protein, 180 aa, Zea mays
  Clone ID: MRT4577_17025C.1.pep
MDSARSWFTKLQTREKSIGKKKELPPNGKEPGDDAPSSATKQRVAAAKQYIEKHYKEQMKHLQDRKERRCSLEKKLADADVSEEEVNNILKQFEKKETEYMRLQRHKMSVEDFELLTMIGKGAFGEVRVCREKTTGNVYAMKKLKKSEMLRRGQVEHVRAERNLLAEVDHHCIVKLYCSS

SEQ ID NO: 261674 - protein, 96 aa, Zea mays
  Clone ID: MRT4577_170260C.1.pep
SDLAAKAVPEPLSLTTSSPPISLLPPSRRSLLRLCLPQSVRRGAWNIAMLDSSCNKLPHSTEYEATVATLSQMEKRAVMAETMLEATKQYQTMFLG

SEQ ID NO: 261675 - protein, 102 aa, Zea mays
  Clone ID: MRT4577_170261C.1.pep
FFFFFSETIKSIFSQNLILLEDNSIPSIYFEQDTTGPGLTDLLVDYSTTPRLVCMYGGGELSTAAVRLLAKVIQAPQAVLEILKKKFLQLQADHGAVLVVRA

SEQ ID NO: 261676 - protein, 64 aa, Zea mays
  unsure (1)..(64): unsure at all Xaa locations
  Clone ID: MRT4577_170262C.1.pep
MALNMKTLTQALEKASVVIEKTGSTTVHEVTGHSPLQDYXLMDQAGSPGPRRAWRTYTAQPQDG

SEQ ID NO: 261677 - protein, 313 aa, Zea mays
  unsure (1)..(313): unsure at all Xaa locations
  Clone ID: MRT4577_170263C.1.pep
WNDLSENDVIYPSDGVEYVLKGSEIFPGCSSSGADRFQHLRVXRPVADEAAAAXPPLALPRMSHNKQYPVDGYGDYDAVEDRDDDELGHSYHHRRTASGRPEKAAAAVSARAATNRARPVELPVEETSPPSSTSSDKPPPPAALQQQPGRRATSEVPEPSRPGSMLLQLIACGSTTAPSAAGGVPGXPRRAEAELRXVSRLSARGGADADADEDEDDVGAGTDLGRRFGRLAAEDKEYFSGSIVEGGGGRGTPLPASSLKRSNSYNEERSCRPGGVAGGAAIGEEAMDEGDGGVRGRCIPGRKKPPPQQQQQK

SEQ ID NO: 261678 - protein, 45 aa, Zea mays
  Clone ID: MRT4577_170264C.1.pep
KAPGSASCICLCVHLQQGAGRGRYVRVSYSLSSSPRTNIEWVCSY

SEQ ID NO: 261679 - protein, 99 aa, Zea mays
  Clone ID: MRT4577_170265C.1.pep
CAIRPGVLASAHGSGLLRLLVLRRRPEAEEAALSRGRSRLPESLSTGNRTTRRERGAPLPIYGTGQKLLPRPTPRLAAERAIGPIGDRRSICATGARRR

SEQ ID NO: 261680 - protein, 129 aa, Zea mays
  Clone ID: MRT4577_170266C.1.pep
CWALFGSFPRGFFPRFHQSPWARSLQGCFPLNPWSLISVPIFWPGPPFIYFTGWPRGPFPGFFWGRGPFFFFGWPQFFINSPVLGKFGIFCPGSFNFRCFVSAPRTVFQSFLGLEAPTPPGGSFSLNAQ

SEQ ID NO: 261681 - protein, 107 aa, Zea mays
  Clone ID: MRT4577_170267C.1.pep
RPFRDAPTGSSTLLRSPCPQSRILRDARAPVSDPCPPPTLPPSTPPLKMDQGENLLPQSLPADARSCAAPASTSPKRKYMNHHNFQLSRCSNLPSVTATENADTLFR

SEQ ID NO: 261682 - protein, 304 aa, Zea mays
  Clone ID: MRT4577_170268C.1.pep
MAFLNMEQQTWAFTFGILGNIVSLMVFLSPLPTFYRVYRNKSTEGFQSTPYVVTLFSCMLWILYALLKPGAELLVTINGVGCVVETVYLAMYLVYAPKAARVLAAKMLLGLNVAVFGLVALVTMLLSDAGLRVHVLGWICVSVSLSVFAAPLSIMRQVIRTKSVEFMPISLSFFLVLSAVVWFAYGALKKDVFVAFPNVLGFVFGLAQMALYMAYRKPAAALVIIPEQSKEEVAEGKASCGGAEVHPIDIAEVHDLQTVVVDVDVEPVTYAAASGMVDGSVGRPRAPEQLVIKPDMVTVIAAEA

SEQ ID NO: 261683 - protein, 84 aa, Zea mays
  Clone ID: MRT4577_170269C.1.pep
AERAHMPSLLSNESLDQNSEVDGHLDTLLHESALGIVGTQLGGAVEDDLVAAGVPGDLHEAGSGEVDAIWVGGTGHRVRYSDVK

SEQ ID NO: 261684 - protein, 78 aa, Zea mays
  unsure (1)..(78): unsure at all Xaa locations
  Clone ID: MRT4577_17026C.1.pep
ASTPYSLTPDRTIRLSVQDKVNCEIYTIYXIRAHTTLYYLISNNVYKVPIYDLYEKFVDLFFAVDGFSPLAXFTEVLV

SEQ ID NO: 261685 - protein, 41 aa, Zea mays
  Clone ID: MRT4577_170270C.1.pep
LDGITNSMDLSLSQLQETVKDQETWCAAVHGAAKSWMQLSD

SEQ ID NO: 261686 - protein, 163 aa, Zea mays
  Clone ID: MRT4577_170271C.1.pep
MASTSPEPAAADETIDTIHIRRLECSDHERGFVALLSQLSPCPDLTTSVFATRFAELAAQGDDHIILVAEDPSASDRRILATGCLFVERKFLRGCGKVGHVEDVVVDAAARGRGLGLRIVRRLVEISRDAGCYKVILDCTPELRAYYAKCGFVEKGVQMAVYF

SEQ ID NO: 261687 - protein, 69 aa, Zea mays
  Clone ID: MRT4577_170272C.1.pep
WSFFSFFLTSGERLPSAHVFLRRGQHPILKKRGPPNCRPQENCQSNLPYLFKNPTRVLALKIFSQPKKE

SEQ ID NO: 261688 - protein, 86 aa, Zea mays
  unsure (1)..(86): unsure at all Xaa locations
  Clone ID: MRT4577_170273C.1.pep
YKKLYKFDITGSGQGECGVDLEIQVPTPFYPFAXARESDAPVAXEYVHILIQQRNDKKSLTTAHGLNNEFSFEKILIVLKKEFCYN

SEQ ID NO: 261689 - protein, 65 aa, Zea mays
  Clone ID: MRT4577_170274C.1.pep
FFFNRDSCPPAGYFCMGMHTPLNMQPNATRRPSFNHSIIRTGASSSAKAAIDGHKGFGTSPYLDQ

SEQ ID NO: 261690 - protein, 92 aa, Zea mays
  Clone ID: MRT4577_170275C.1.pep
RDSTCFSEQRTHCLLQTNIYILIYSNCEVWHGSPGPLRLHPVQVLHFSYLNHHRRPSFFFFFFFFFFFFCNFFFFFFFFFVFFSRPASRYPM

SEQ ID NO: 261691 - protein, 60 aa, Zea mays
  unsure (1)..(60): unsure at all Xaa locations
  Clone ID: MRT4577_170276C.1.pep
RVRVYCGCDRLLICLAWFYPLINSCSGVYLRTCSLNPPFLGRPPPTXLVVPQVISGACTC

SEQ ID NO: 261692 - protein, 47 aa, Zea mays
  Clone ID: MRT4577_170277C.1.pep
SFNSYGEVSESRVITHWETGKSRGFGFVNYSNCDADNYLILQRMAWK

SEQ ID NO: 261693 - protein, 145 aa, Zea mays
  unsure (1)..(145): unsure at all Xaa locations
  Clone ID: MRT4577_170278C.1.pep
LRMHPPGPLLSWRHRAISDTYVDGHLVPAGTTAMVNQWAISRDPEVWDAPLEFRPERFLPGGEGQDVSVLGADXRLVPFGSGRRSCPGKSLAMTTVTSWMATLLHEFEWLPASDDTGDVDLSEVLRLSCEMAVPLEVRVRPRSSV

SEQ ID NO: 261694 - protein, 66 aa, Zea mays
  Clone ID: MRT4577_170279C.1.pep
IYEALAIAAAAAHSSFSIPSRCGAVCPSNMAPNMDKAPPQSSKPDNAAGSSVRKKTSETRKSYRRR

SEQ ID NO: 261695 - protein, 100 aa, Zea mays
  Clone ID: MRT4577_17027C.1.pep
GPQKGPSALGKTPPPKRGKSFFRAWSSPFGGKTSKKNQAFFPPPLFIILNPDKNPKIPTPLLLEKKIWTCPQASENVKAGVSLSPKVFNLTNPFFYSRPS

SEQ ID NO: 261696 - protein, 84 aa, Zea mays
  unsure (1)..(84): unsure at all Xaa locations
  Clone ID: MRT4577_170280C.1.pep
PDFSTFQHEDDEGYNWELADIHDLAREGATEDIVKYLAAGVEFNTKDSESSTALHWAGDPCHLRASXALTKANADLNANDKYRK

SEQ ID NO: 261697 - protein, 107 aa, Zea mays
  Clone ID: MRT4577_170281C.1.pep
RYRTAPAIRSSSGHGTLWAEHQYPRPPRWWARGRRQTDGGQRHAGHAAFGAAAISASAVAVHPLDTVKHSSSFQLGSGSWWTGSGRFWPCRFGRLLRDVGRKKIRRD

SEQ ID NO: 261698 - protein, 61 aa, Zea mays
  Clone ID: MRT4577_170282C.1.pep
GYVQITMIELHMHKPLGFGFVLGYNLSALQTYISLSTQGHIMSRILAYFSKFGGKNMMTHK

SEQ ID NO: 261699 - protein, 79 aa, Zea mays
  Clone ID: MRT4577_170283C.1.pep
YCGCMIACSKVKFLSQQCPMTYMCIMVLYEAVGRIPHAWYSEYSNFLHIGCGRLPAWYEWDLFFVLVDVFSQSHLCLSE

SEQ ID NO: 261700 - protein, 65 aa, Zea mays
  Clone ID: MRT4577_170284C.1.pep
IKKKTTPLRGEHNKQFYHRKMAQGGTLKLNINQLKNPSKNDFSKKLTLHIGGFLLVGEKKIKSAI

SEQ ID NO: 261701 - protein, 115 aa, Zea mays
  unsure (1)..(115): unsure at all Xaa locations
  Clone ID: MRT4577_170285C.1.pep
PGGSGPEFPGCPTRSGPVGSTGDKGTLCYLEREYMLTHKLTERSQRYXLGVVPLELLTGMKAIHDGKNIVREVXSLTRRGELCRIIXDSRMCSYRTECVKRFLCLKIRCMRDDTR

SEQ ID NO: 261702 - protein, 108 aa, Zea mays
  unsure (1)..(108): unsure at all Xaa locations
  Clone ID: MRT4577_170286C.1.pep
MATLRGPSSGPGGAKDCEQLHKAFEGWGTNEKLIIFILDHRNTAQRHAIRRGYAXAYGKELLRALSDKIHGKFQKAAILWTLDPAERDTELANDEAKKIHPGGRTLVE

SEQ ID NO: 261703 - protein, 147 aa, Zea mays
  Clone ID: MRT4577_170287C.1.pep
MAVDLMGCGYAPHGHAAEAEEQFQEAAAAGLRSLELVISSFSSRAGCAPPLGEMADQAVSRFRRVINILDRTGHARFRRGPVGDAADSLTPPPESSAPPRMPAQALAPAVSPQLAPQKSVTLDFTKPLKAPAAAPAAAPSVTSTSFF

SEQ ID NO: 261704 - protein, 174 aa, Zea mays
  unsure (1)..(174): unsure at all Xaa locations
  Clone ID: MRT4577_170288C.1.pep
RWSTAGQRGARSTELLNRPPGDQPRTAWRPNEDPEPHAPGRGGNPGRKRKQPQXRTTKPAKPRRRATPGLRRSPPRLMEMRPRAPEADKGRRAHHTRGXPAGRHGGGXRSTQTQCQRSSVGQRKGNRRKEGNPPPPRKGAGEAPCEGPRFVRPDKTRHQQGSTTRTKKXNPPAE

SEQ ID NO: 261705 - protein, 102 aa, Zea mays
  Clone ID: MRT4577_170289C.1.pep
NPLMLPVVFSKKIPKVFFPESLPQNPSGKILRKGFRARLPPGVPLGPYAAFFQTAPPLLRKKRRCNGGYPSFLEPAPQGARFPVGPLLPKKGFSLSVCWPRG

SEQ ID NO: 261706 - protein, 134 aa, Zea mays
  Clone ID: MRT4577_17028C.1.pep
VQQEYGHIQEVILQPHSPGQKQTDNISAYSPQKLVQVITLARAILPAEITLQIPPNLVPNFSDLLACLAAGVRDLGGIVPIDEVNPDYHHQSVNQLSQLLEENGYLLQPRFPVYPTYFSWLNCDLQQRLSVFIN

SEQ ID NO: 261707 - protein, 31 aa, Zea mays
  Clone ID: MRT4577_170290C.1.pep
DQGNPLCHIGLALELEHQLKHCPGNLHVSLC

SEQ ID NO: 261708 - protein, 115 aa, Zea mays
  Clone ID: MRT4577_170291C.1.pep
PGNIFPLFSGNPKTLGVQNLLEKLPNPKSRRFQPNNFCFSFPPPQKFEQAGSPFLRLKKFPGNFQRPPILVHFPRVPLTGGIWMALKKTRQNGFWPPQRPKQGPPPFLGKPPFPR

SEQ ID NO: 261709 - protein, 99 aa, Zea mays
  Clone ID: MRT4577_170292C.1.pep
QSSRVGEVSAPPPSVHGRDTKGSCRGRYISTGCAGSSTHVLCVARRGYGGILCRRVEASETSLESGAKAPVLGAAPRSKASWYTLSDSKPSSDDYQYPP

SEQ ID NO: 261710 - protein, 89 aa, Zea mays
  Clone ID: MRT4577_170293C.1.pep
AHSIRTPDRYSAIAVAIADVVLGIDSEQERSWLWIRLHVQGSELQGAGGDGCAELRAQTGAWTELDTWCFTARCPCICASERRCVRVGL

SEQ ID NO: 261711 - protein, 110 aa, Zea mays
  unsure (1)..(110): unsure at all Xaa locations
  Clone ID: MRT4577_170294C.1.pep
HKEXTTVYDRXFVIAQLRIDSCLIILWYWRRVTSLISFHFFFRPEPPIRALLCLGLKLLQVLFPHLSCPAESQGASSSSSPAARTAAATSCWEEERAAIVAGQSELLARC

SEQ ID NO: 261712 - protein, 131 aa, Zea mays
  Clone ID: MRT4577_170295C.1.pep
KSKKKVLLPFFFNLSHALAQSTKVSPLALPLLVREPPKQPRTSIKGVRRPQNLPEPNRKTMAARILTTWQDPGQKFLYRSWTPFPFPAGFSSSYPGFPVSRETGCGTPEEAVEQGILSNQNNQLGPCACVN

SEQ ID NO: 261713 - protein, 154 aa, Zea mays
  Clone ID: MRT4577_170296C.1.pep
TRQRWRLGAGDALGGVTHQQPRGHVPTSDREADKVEPGCTLALARRLRRRVSAMGPARAVAGDGGSELHGTGESASRVRAWGRTVSLDPAVEAHWASAIGAQPLTSSLTCRIPCLLISSLCIARGCGRTLEPVRFVLSPLVFGCYKNLEINYHS

SEQ ID NO: 261714 - protein, 63 aa, Zea mays
  unsure (1)..(63): unsure at all Xaa locations
  Clone ID: MRT4577_170297C.1.pep
QGLPAPSCSFLALASVACPVPLGVVFVAGALGGLLPAGCAGLARLVVGSLGCXVLNWLPPGVG

SEQ ID NO: 261715 - protein, 78 aa, Zea mays
  Clone ID: MRT4577_170298C.1.pep
TPFLVFYTIEGRWMTLAGTSSYITGKKTSPSQGWSLLIGTLTLVQACWWANQRWHRRLAGKEWGLGAGSPCSRGWNQG

SEQ ID NO: 261716 - protein, 444 aa, Zea mays
  unsure (1)..(444): unsure at all Xaa locations
  Clone ID: MRT4577_170299C.1.pep
PPAQVDVGLSDGSFARGAVPSXSGASTDDVIYEALELRDGGSDYLGKGVLKAVNNVNSIIGPAIVGKLDGTSNEWGWCKQKLGANAILAVSLAVCKAGAMVQKIPLYQHIANLAGNKTLVLPVPAFNVINGGSHAGNKLAMQEFMILPTGASFKEAMKMGVEVYHHLKSIIKKXKKYGQDATNVGDEGGFAPNIQENKKGLELLKAAIEKAGYTGKVHPLLTTWLTDRQTFVCIXFDLPVWQVFIGMDVAASEFFSEKDKTYDLNFKEENNDGSNKISGDSLKDLYKSFVSEYPIVSIEDPFDQDDWTTYAKLTGEIGQQVQIVGDDLLVTNPTRVAKAINEKTCNALLLKVNQIGSVTESIEAVRMSKRAGWGVMASHRSGETEDTFISDLSVGLATGQIKTGAPCRSERLAKYNQLXLRIEEELGVAAVYAGAKFRAPVEPY

SEQ ID NO: 261717 - protein, 192 aa, Zea mays
  Clone ID: MRT4577_17029C.1.pep
MNNKIAVLSNFTSYDDACSHHSRTPPTNSQWDTQYDKSVGWPSGANSSLPKVDFGLRKTSASPEPDLGYLLPVNPAGGHSFNCITHVFKSGSELDHYLRQTSASPEPCFSLDINNEKALDVTINNKSYVLLQGILLYSVLCRPLQHGQPPCKGGSSTRPSPRPWPRLSTEIGRLHQAKANNKYKTMLRPYRI

SEQ ID NO: 261718 - protein, 75 aa, Zea mays
  unsure (1)..(75): unsure at all Xaa locations
  Clone ID: MRT4577_1702C.1.pep
RCWLLLPHRFVFRFWFVGRERKSMACXSDGEYRCFVGGLCXATDDHYVYNDLRTYXGALDAXIILDRYTQRSIRC

SEQ ID NO: 261719 - protein, 143 aa, Zea mays
  unsure (1)..(143): unsure at all Xaa locations
  Clone ID: MRT4577_170300C.1.pep
SAGGAIPSWARFPLGGAPNQNQVGPVGGRQVFQNVPPAIFCIPKKGGPGGLSRGFGPSCIKVMPPPGIAFLCYGGGKKILVPKEGDXRGGXPGGGGDSKKKVEWSKFLAQKGAMLLRGRELETDGPGNLGFDGGFPGRGFVPR

SEQ ID NO: 261720 - protein, 85 aa, Zea mays
  Clone ID: MRT4577_170301C.1.pep
TLLVFFIKEVSRNSNRIPRKGNASIGSSLNSYYLMPHLRDKSFKTTRGGQMPPGLPGINPTLGVVIDHPLGGIFHSGAGLVPPQD

SEQ ID NO: 261721 - protein, 85 aa, Zea mays
  Clone ID: MRT4577_170302C.1.pep
SSSSMCASTVRCNQLAVFSLIALQRLMRLLSLHRLMSSSSWSSSSVAAAACASLSGDSLHVGQQSSKFCAYGVPSSTDMWISCAS

SEQ ID NO: 261722 - protein, 103 aa, Zea mays
  Clone ID: MRT4577_170303C.1.pep
SKVPKQQKNHISWLFHSGDMSYNDDEPIIHSPNSGPRPTPIEPRRAQLVSKNNNMAPLEENTHNELLELTGGDSTSHRTGLDLVAMLDANGNIQGEKIEKINT

SEQ ID NO: 261723 - protein, 93 aa, Zea mays
  Clone ID: MRT4577_170304C.1.pep
LDHILCGTFLFQPSCACFAFGFIDQGDSFLHLPRFSIEIDHFYNIFLLYVHSKASLSIYHHNTVITTCSITNLLLTLPIILYLANDLSILLSS

SEQ ID NO: 261724 - protein, 127 aa, Zea mays
  Clone ID: MRT4577_170305C.1.pep
MPTQAFDAHEPNDAILSAKAVAAGTPVSGGIMDKADEDFFSVRAGGAESVLRVALENRSTTLQPEVVVYDAAKAQIGSARNTTAGGDVSYSFRAQAKAVYYVRVRDYYRNAAGDYTLTVTALPPGDG

SEQ ID NO: 261725 - protein, 135 aa, Zea mays
  Clone ID: MRT4577_170306C.1.pep
AGRAGIPSFLPVLSRTLLLLQNPIRYVSRPRDNPHDRHTGRTSFSGAREALHQPHYFQNSSKLALPERALPRCIMSVAIPLALAASIMIMIEREIYNMSSRLWEERSSCHRVTTVSAWNGSHTGKTATPSSLAKD

SEQ ID NO: 261726 - protein, 101 aa, Zea mays
  unsure (1)..(101): unsure at all Xaa locations
  Clone ID: MRT4577_170307C.1.pep
TIACSVRSNRLELYLVLQLXXGMHIFVXTLTGKTITLEVESSDTIDNVKAKIQDKEXITPDQQRMIXXGHKSEDGRTLADYYIQKESTLHLVLRLRSGMQI

SEQ ID NO: 261727 - protein, 125 aa, Zea mays
  unsure (1)..(125): unsure at all Xaa locations
  Clone ID: MRT4577_170308C.1.pep
MTSPYASPFLLSLLLLISIPVVFLLAPRLLPPKTLPAIPDADESDDLALFRRAILSSSSXSHAHLRGLLLLPPPPXPKVAFLFLTNSDLVFSPLWEKFFRGHTHLFNLYVHADPYSVLELPPTPS

SEQ ID NO: 261728 - protein, 124 aa, Zea mays
  unsure (1)..(124): unsure at all Xaa locations
  Clone ID: MRT4577_170309C.1.pep
AHTFAFTAIYNDGDGXGKNLPQAFKFTVSNPFFILTIVRSFIDSTYSKASIHNHTESNPHMNPLDIDPDQQRTTTRLEADQHPLTLNSDIWNLYKQPIHIRTYXRIYNYLNHLLTSSYETGQTK

SEQ ID NO: 261729 - protein, 85 aa, Zea mays
  Clone ID: MRT4577_17030C.1.pep
HAYPRGARFSGPNPTWASRRGEDAGLADFDRAFVLQRRGRRETAPVFIRSALSSCSGVLHGRGLRRCSEATKASSEGSRPTRRVP

SEQ ID NO: 261730 - protein, 526 aa, Zea mays
  Clone ID: MRT4577_170310C.1.pep
MESFPRSNRLVTTHESRKQTMPPYLLAAGALIVFLYIIKNRRSRKLPPSPPSLPLIGHLHLIGRVAHRSLLELQVRYGGGGGLLFLQLGRRPTLVVSTAAAAADLFKNHDLAFASRPRSVGGDKLMYECSNVSFAPYGENWRRGKKIAVVHLLSPRRVESFAPVRAAEVAALVARTRRTAEAGEAVELRELLNGYANAVATRAATGAAGATAEKLKELMGNSEPEALMAGFQPEDVLPDAPARFVRWVTGLNKKLEDLVESWDKFLSDIVAAHKEKGGGDAEEDEDFLDVLLRLREEGADGLELTDDRIKATVKDMIAAATETSSQTLEWTMAELIANPRVMSKLQGEIARVVSADQTTIAEPDLNKMEYLRAVFKEVLRLHPPAPLLVPHESTTPAVVQGYEIPAKTALFVNVWAIGRDPAVWDAPDEFRPERFVGGSPSVDFRGTDYQLIPFGAGRRICPGINFALPVLELALVSLLHHFEWELPAGVGKADLDVGEAPGMTTPRRIPLVLVPKCRTLVQPALQ

SEQ ID NO: 261731 - protein, 70 aa, Zea mays
  unsure (1)..(70): unsure at all Xaa locations
  Clone ID: MRT4577_170311C.1.pep
QQQEGPQINYQKPTALDWIWICSKQDKGSRRGGGGIGHCFRGPNYFPPFHLHHLPFHEGSXGRIGPPDLX

SEQ ID NO: 261732 - protein, 74 aa, Zea mays
  Clone ID: MRT4577_170312C.1.pep
ISLTSYWRTRLHKCADRCRWCPGARCVRLLHYMPLLRLTNTFVISTASALYAVLRLSVVASSVLFMAIPHSSTS

SEQ ID NO: 261733 - protein, 102 aa, Zea mays
  Clone ID: MRT4577_170313C.1.pep
FSFLGRVGVAFFGPQPLFPFCHLAAVTPAAYLQQQILLPFSQLAAATRASFLPQHQLLPFSHQFAANPVPLFHLPQLLPFVPLALTDPGASSHQPIIGGALF

SEQ ID NO: 261734 - protein, 98 aa, Zea mays
  Clone ID: MRT4577_170314C.1.pep
SDHFWEGLSKMGGSLAFFPMVVFSPGFFFPLTLTPYCELKINVKPGNACLVSKVVVRAALKTSFAVSREDPDEGGHKEGSPPVGPVVLGSGEPFPSCR

SEQ ID NO: 261735 - protein, 99 aa, Zea mays
  Clone ID: MRT4577_170315C.1.pep
MEVQMAAQGPKSMGRRRSSTPCDSQHGGGADTKPVPGYLRPSAGSCHHVCKYGGTHTFEDHNRPQPRPPRKQQQPAAESHSHNRVLVKVRSGGFRRPSK

SEQ ID NO: 261736 - protein, 85 aa, Zea mays
  Clone ID: MRT4577_170316C.1.pep
RRVWVFFFFFFFFWVFFFFCGPPNFIHFKYTVKLQARSAMKPCSYLLPTKTRELGQPASEIHMPLSILLENPFILVRGPRGVHGP

SEQ ID NO: 261737 - protein, 190 aa, Zea mays
  Clone ID: MRT4577_170317C.1.pep
RALSPAKLPAPRLLSSPSSALPSTPASSALSSGSRRPSFASLLPAERLALHAPYASWIAQPTRACFPWPRQRPASPPDLARPPWFAGLRALAPSAGSPLALPSSSPPPVEFTPARSRRFRCAAFLLPSLRRARQQVIRNSCRSSSCEPLRRARQLESRVVDLCSSCLTIGSAYVDLLIVMDTESTSVDTF

SEQ ID NO: 261738 - protein, 60 aa, Zea mays
  Clone ID: MRT4577_170318C.1.pep
HEARRERCHTRDDKEKAAKRQKTVPPMGSALPVTAKPLLVPAPAVAWSIYTTIHRPLLNL

SEQ ID NO: 261739 - protein, 141 aa, Zea mays
  Clone ID: MRT4577_170319C.1.pep
MTMSSGQSSPMESSSKACPHSDAAAVCSNKLCRGMKAVYLVLVKKHQPKLAALGVHLHHLLSRSKRRSSLATREQNPALMSLSSSLSCRSMDPAAAVVHPYPRGQGHHRRGSSSRHAAPSLSCRSMDPAAAVCKYQYRPRE

SEQ ID NO: 261740 - protein, 64 aa, Zea mays
  Clone ID: MRT4577_17031C.1.pep
VTSITSICVGFTARTKSWAFWKMTTDWSCNLTAVVPTSTKMDERSSLGAHQSKDKSKKKNSCFH

SEQ ID NO: 261741 - protein, 114 aa, Zea mays
  Clone ID: MRT4577_170320C.1.pep
APGRGIRCVTHPHTHNVPYIVWQHSDQVLVPWGGDSGASGEAPLWVGAVPLPGRLVEEVRSWWLDPRYTIGIEPCHTDPVFASGALILWAMAQIGHGRTRLPGCLKAVRSRSEG

SEQ ID NO: 261742 - protein, 122 aa, Zea mays
  unsure (1)..(122): unsure at all Xaa locations
  Clone ID: MRT4577_170321C.1.pep
STHTSAHASAHASGTVRNPDDPKNAHLKALDGAAERLILCKADLLDYDAICRAVQGCXGVFHTASPVTDDPEQMVEPAVRGTEYVINAAAEAGTVRPVVFTSSIGAVTMDPKRGADLLVDES

SEQ ID NO: 261743 - protein, 258 aa, Zea mays
  unsure (1)..(258): unsure at all Xaa locations
  Clone ID: MRT4577_170322C.1.pep
MTVVDAVVSSTDAGAPAAAATAVPAGNGQTVCVTGAAGYIASWLVKLLLEKGYTVKGTVRNPGMHASCLLLYISSLLCRPARAWQQMERLTCLYMFMAADDPKNAHLKALDGAAERLILCKADLLDYDAICRAVQGCQGVFHTASPVTDDPXFRRPAGFQHSSTDWSVKXNKGPHAPCMCACVQEQMVEPAVRGTEYVINAAAEAGTVRRVVFTSSIGAVTMDPKRGPDVVVDESCWSDLEFCEKTRXWVCACLITFI

SEQ ID NO: 261744 - protein, 126 aa, Zea mays
  Clone ID: MRT4577_170323C.1.pep
PLLESTLYKHPQGGLQEQKRANTNPGQDTNSRNPDDLQKERAPDHTSTWEGKTTPEQKPTRATEPNARGAPRQKRRRATGADMHHPPHGKGHTPKGEKKARLARDRADSDARGTEPSGTKEKKTPV

SEQ ID NO: 261745 - protein, 111 aa, Zea mays
  Clone ID: MRT4577_170324C.1.pep
ACCSIPLSVGSPSQEHMRKSSHQEYQKAEFASENDISRYFSYSSYRIYESGVASAAARSGMVSESNLGRKCRDMEGSSHRSRPGALVGSQERASRRGSHASTRRRIKSTVL

SEQ ID NO: 261746 - protein, 83 aa, Zea mays
  Clone ID: MRT4577_170325C.1.pep
LPWACLHNFRSGIAVPLPNWGGVLLLRGGWLNLVLTRLNGFALHTSLCQLDGIMEKGPAVVLYEQWVRWFGEWCPLCLGALYG

SEQ ID NO: 261747 - protein, 79 aa, Zea mays
  unsure (1)..(79): unsure at all Xaa locations
  Clone ID: MRT4577_170326C.1.pep
EEGKXKTXXXNQKPKEKXXDTNGAXEXXXGGXXXQXXQGKGXEDXXRAXXXAANXXNQRPGXTNPEKXDXNKKNRTEAA

SEQ ID NO: 261748 - protein, 81 aa, Zea mays
  Clone ID: MRT4577_170327C.1.pep
FCWVFLSFFWVFTPTICLFFFFGTPKSGHPPGTTKKISKVVFHGNRIQNNEFRTTPFIQPICLGTRHSSSPRKLKGTPPPP

SEQ ID NO: 261749 - protein, 142 aa, Zea mays
  Clone ID: MRT4577_170328C.1.pep
PKKTGKGNFFFGGGHILVQKNFFLKYHLIAIQKRGPPKEGPPERRLGGWKNQVEQRPTLVEVKKGWGGNPKPGGKKAPPVVGQKRNPGLLNLPGPGVPPGISDPDLAGAPPSLKGRVIKAGGNKGKTCSRGKMVSRQNSPPK

SEQ ID NO: 261750 - protein, 189 aa, Zea mays
  unsure (1)..(189): unsure at all Xaa locations
  Clone ID: MRT4577_170329C.1.pep
SRCLHRASYPASPPHNTLCTLAGYDRASLXSAGGVAGVPEKTVAAQRVNIQMEHKKGADSSKNGRDXSXPLQRLDITRDADXVXRPLSSYIRQRGSRDYTXNNRGMCKRYTLCAVRDGLSETEKYGPLYNKASVYPYDKEPDKPNSCRARNRDDFRMRRERXRDSVXGAAEPQLVLAAADEHSEVTADC

SEQ ID NO: 261751 - protein, 75 aa, Zea mays
  Clone ID: MRT4577_17032C.1.pep
VCHFIYQGRLHLNKGGGVMEISMSKPRYIKLFWGKQLTNREPATRGLDNPKTYWVHQGFSKITGTEKHYEVDLHP

SEQ ID NO: 261752 - protein, 101 aa, Zea mays
  Clone ID: MRT4577_170330C.1.pep
GARKRRRRLELAGDYSLKTLQSHLRCEDATAEDDDPVGRRDSNGSAEDAANLTQMRASFNLQHIRDRWAGQRGNRYQIRTARTTDVDDRGAPSTKDSTAAG

SEQ ID NO: 261753 - protein, 71 aa, Zea mays
  Clone ID: MRT4577_170331C.1.pep
RPGARVRKKPPDLEETSTAEHVTVVLGVDQEKKAEHEFREAVWDCDRGRPRLKLLWQLASATPAAADHIER

SEQ ID NO: 261754 - protein, 53 aa, Zea mays
  Clone ID: MRT4577_170332C.1.pep
MNFSWVGRPSKFVTQKILLSKKKKKKKKKKKKKKKKKKKKKKKKKKKKKKKAA

SEQ ID NO: 261755 - protein, 265 aa, Zea mays
  Clone ID: MRT4577_170333C.1.pep
MQGDPGYGYGGYGAGAGGYGYDYDYDVAANCVGGGYYSAPNDRYPAAPPPAAAYEDPLGGRRQHDFPAPLTGLEFQPSDTCPKNYVIFDQTYDRSRVMFHPSLANNFGSSAGGYDYGNHCYGYDQTYPGESAYHGCGDDAGGAGGVSVRQKEDTDEIDALMSTEEGDEEDDVLSTGRTPGCRAGGSPDSTCSSGGYAGNSSGGRKHETGGGEKKKERMKKMVRTLKGIIPGGDRMDTPAVLDEAVRYLKSLKVEVKKAGARGSSS

SEQ ID NO: 261756 - protein, 44 aa, Zea mays
  Clone ID: MRT4577_170334C.1.pep
LTNNQNSIFLNLGCRILCNIKKITTLFFWHITASLTYFYTKQVY

SEQ ID NO: 261757 - protein, 95 aa, Zea mays
  Clone ID: MRT4577_170335C.1.pep
VQAWVNALVYALELGLYQVVYHLDDLHCCQHGWHRVRDWIKQRCRGSLNGSVNENGQHDIHVATLRYICRDLCHCRVPCRHACPQIQLHLKLLRQ

SEQ ID NO: 261758 - protein, 50 aa, Zea mays
  Clone ID: MRT4577_170336C.1.pep
MASFCTRTNWILNQKKKKKKKKKKKKKKKKKKKKKKKKKKKKKKKLEGGP

SEQ ID NO: 261759 - protein, 31 aa, Zea mays
  Clone ID: MRT4577_170337C.1.pep
VKLMSSKPIQLVKLNVAYTFSSCLLHVQTER

SEQ ID NO: 261760 - protein, 229 aa, Zea mays
  unsure (1)..(229): unsure at all Xaa locations
  Clone ID: MRT4577_170338C.1.pep
MATSPALLFPSPSSASSAPSSARVEAVVLFNVCDSYVRRPDQADRVIGTLLGSLLSDGTVHVRNSYVVPHXHLTVDTGFTRGEASIKAYISSNLSSXDSQLAAQFQEIPLDLKMIEAEKAGFEILKSTMVEKLPNDLEGMESSMGKLYILIDEIYKYVDDVVEGRVAPDNRIGRFISDSFASVPKLSPAAFDKLFNDKIQDNLALVYLSSITRTQISIAEKLNTAAQVL

SEQ ID NO: 261761 - protein, 287 aa, Zea mays
  Clone ID: MRT4577_170339C.1.pep
MATPPALLFPSPSSASSPPSSAQVEAVVLFNVCDSYVRRPDQADRVIGTLLGSLLPDGTVHVRNSYVVPHSESADQVAIDIDYHHNMYASHQKVNPKEVIVGWFSTGFGVSGGSTLIHEFYSREVQSPIHLTVDTGFTRGEASIKAYVSSNLSLGDRQLAAQFQEIPLDLRMIGAEKAGFEILKSTMVEKLPNDLEGMESSMEKLYILIDEIYKYVDDVVEGRVAPDNRIGRLVSESVASMPKLSPAAFDKLFNDKIQDNLALVYLSSITRTQISIAEKLNTAAQAL

SEQ ID NO: 261762 - protein, 40 aa, Zea mays
  Clone ID: MRT4577_17033C.1.pep
FFCLLKKKKKKKKKKKKKKKKKKKKKKKKKKKKKKNSRGG

SEQ ID NO: 261763 - protein, 287 aa, Zea mays
  Clone ID: MRT4577_170340C.1.pep
MATSPALLFPSPSSASSAPSSARVEAVVLFNVCDSYVRRPDQADRVIGTLLGSLLSDGTVHVRNSYVVPHSESADQVAIDIDYHHNMYASHQKVNPKEVIVGWFSTGFGVSGGSTLIHEFYSREVQNPIHLTVDTGFTRGEASIKAYISSNLSLRDSQLAAQFQEIPLDLKMIEAEKAGFEILKSTMVEKLPNDLEGMESSMGKLYILIDEIYKYVDDVVEGRVAPDNRIGRFISDSFASVPKLSPAAFDKLFIDKIQDNLALVYLSSITRTQISIAEKLNTAAQAL

SEQ ID NO: 261764 - protein, 210 aa, Zea mays
  unsure (1)..(210): unsure at all Xaa locations
  Clone ID: MRT4577_170341C.1.pep
MLSFLLLSFSLTTLFVALPRIPQVPQELGVHPLGGGLAVALGFLNAVLVRLERLVVRRVVLRLGHFFRMPKRWLARNGRGAGGGAEMAEKKRGAGTRKDEVVTREYTINLPKRLPGCPFKKKAPNAIKEIRKFAQKAMGTTDVRIDVKLNKHIWSSGIPSVPXRGVRVKIAPNRNDEENAKEELYSLVPVVEIPPEGFKGLGTKVVEDED

SEQ ID NO: 261765 - protein, 77 aa, Zea mays
  unsure (1)..(77): unsure at all Xaa locations
  Clone ID: MRT4577_170342C.1.pep
MQIFDKTLTGKTITLEVEGYDTIANCTAKTQDRECIRPYQQQIIFSDKQVXDGRTLADYIIQXESTLHLVLRLMTGM

SEQ ID NO: 261766 - protein, 79 aa, Zea mays
  Clone ID: MRT4577_170343C.1.pep
SRGRLRSTFRYLALELAPAAVRTLVILVGAREFVLHIPLALGSASCAFRPVFVRTYDRRSGGTLTESWVETTMAWPCPS

SEQ ID NO: 261767 - protein, 60 aa, Zea mays
  Clone ID: MRT4577_170344C.1.pep
MAKSKNHTAHNQSFKAHKNGIKKPKRHRQTSTKGMDPKFLRNLRYSRKGNKKSGEAEAEE

SEQ ID NO: 261768 - protein, 100 aa, Zea mays
  Clone ID: MRT4577_170345C.1.pep
KQKFNPKMGEKPLEGRAGTEANMGEKPGGGETQSPPRGEGLTTRPQKTREVRGRDRQNKNRKKRASNGRTPQKGIFISALRAGVKGVCRPPNGGENLKGG

SEQ ID NO: 261769 - protein, 450 aa, Zea mays
  Clone ID: MRT4577_170346C.1.pep
MRRVGTGVRMLCGAALSVLLLLAGGAAASHSRSSCPATPPDAGNTLQVSHAFGPCSPLGPGTAAPSWAGFLADQASRDASRLLYLDSLAVRGRARAYAPIASGRQLLQTLTYVVRASLGTPPQQLLLAVDTSNDASWIPCAGCAGCPTSSAAPFDPAASASYRTVPCGSPLCAQAPNAACPPGGKACGFSLTYADSSLQAALSQDSLAVAGNAVKGYTFGCLQRATGTAAPPQGLLGLGRGPLSFLSQTKDMYEATFSYCLPSFKSLNFSGTLRLGRNGQPQRIKTTPLLANPHRSSLYYVNMTGIRVGRKVVPIPAFDPATGAGTVLDSGTMFTRLVAPAYVAVRDEVRRRVGAPVSSLGGFDTCFNTTAVAWPPMTLLFDGMQVTLPEENVVIHSTYGTISCLAMAAAPDGVNTVLNVIASMQQQNHRVLFDVPNGRVGFARERCTAA

SEQ ID NO: 261770 - protein, 44 aa, Zea mays
  Clone ID: MRT4577_170347C.1.pep
SQTKCMLSHNLYIRCLNSQRFSILCSSAMGFWSCRPFLLSSVGG

SEQ ID NO: 261771 - protein, 61 aa, Zea mays
  Clone ID: MRT4577_170348C.1.pep
TSNSDTERTQGSTLHGFTIFGLLLSVLLLVYHTNLLQLQPFPVAYPNSYSKYYLQTGQFTV

SEQ ID NO: 261772 - protein, 161 aa, Zea mays
  unsure (1)..(161): unsure at all Xaa locations
  Clone ID: MRT4577_170349C.1.pep
GSSVYDKDSTPPPSPHAATAPFASSATTSADTERRKHELLHADQETXRGFSARSDQRAAIEEDAEVVQDRDAGKGTPIDLTALDDTXRLCYTSASDVLVLFXAFERLPLLQEGQIYRKFESIDRSDGGTVMNVGMCSIDNLLDEQEGATLMGSAKVVDLSK

SEQ ID NO: 261773 - protein, 94 aa, Zea mays
  unsure (1)..(94): unsure at all Xaa locations
  Clone ID: MRT4577_17034C.1.pep
KYSYRGVDLDALLDMSTDDRXPAHRRARQEFVQRGLKRKPMALIKKLRKAKKDAPAGEKPEPVKTHLRNMSIVPEMIGSIRGAYYGETYHQAEI

SEQ ID NO: 261774 - protein, 181 aa, Zea mays
  Clone ID: MRT4577_170350C.1.pep
MAAAAAQQKIRWGELEEDDGGDLDFLLPPRVVVGPDENGLKKVIEYRFDDDGNKVRVTTTTRVRKLARARLSRSAIERRQWPKFGDALKEDAGSRLTMVSTEEILLERPRAPGSKAEEPAASGDPLAMASKGGAVLMVCRTCGKKGDHWTSKCPYKDLAPPTETTDRPPTSDGPPVTNVFF

SEQ ID NO: 261775 - protein, 287 aa, Zea mays
  Clone ID: MRT4577_170351C.1.pep
MAAQQKIRWGELEEDDGGDLDFLLPPRVVVGPDENGLKKVIEYRFDDDGNKVRVTTTTRVRKLARARLSRSAIERRQWPKFGDALKEDAGSRLTMVSTEEILLERPRAPGSKAEESAASGDPLAMASKGGAVLMVCRTCGKKGDHWTSKCPYKDLAPPTETFTDRPPTSDGPPAPGGPAKGAYVPPTMRGGADRTGDSMRRRNDENSVRVTNLSEDTREPDLLELFRAFGPVSRVYVAVDQKTGSSRGFGFVNFVHREDAEKAINKLNGYGYDNLILRVEWATPRPN

SEQ ID NO: 261776 - protein, 149 aa, Zea mays
  Clone ID: MRT4577_170352C.1.pep
MFTGFQGPTPGTVQGFGRKKTVGAVPYTKPGGGLIKGNGAPIEFIRPEMLRLKAFEPILLGGGSRFKDIDMRIRVRGGGKTSKIYAIPQAVAKGFVPYYQKNVNEAAKKEVKDIFTRNNRTLFVADPRGCEPKKFGGRGARARFQKSYR

SEQ ID NO: 261777 - protein, 134 aa, Zea mays
  unsure (1)..(134): unsure at all Xaa locations
  Clone ID: MRT4577_170353C.1.pep
MKRGTASWKMERRVSAFCTTLTLVWAMTRTFEEAMMHLSPLIEQLEEPIKSTLHNVHDRNLRGTLMRXLKLNNGSCTNDHIMLMNXLXNCNIHNEIDFAIAKHIVALYLYRVIKHTLLGALIEYFMQLQPVYAL

SEQ ID NO: 261778 - protein, 62 aa, Zea mays
  Clone ID: MRT4577_170354C.1.pep
PGSAPGKKKKKKKKKKKKKKKKKKKKKKKKKKKKKKKKKKKKKKKKLVQKKSLTLPVAVPLE

SEQ ID NO: 261779 - protein, 56 aa, Zea mays
  Clone ID: MRT4577_170355C.1.pep
AVSCEGSSPPIEARSSRVLLKCTRKWFSQCILMIQKKRQILLERSFSKKGSAARKE

SEQ ID NO: 261780 - protein, 449 aa, Zea mays
  Clone ID: MRT4577_170356C.1.pep
MEGLTLIDVSVEDDLLFDIASPPHAGSLVGAVATSSGAFPSAAGRAPDPDSVMEEQALPERTDSPEQRKAKKGVNLRKSLAWDSAFFTSEGVLDTEELAIVNSTFRKTQGSRLPGIVEEMSRSGESATSTLESESWVMESVETELFDNVRASIQRSLGKPDKVPGRPVAGSNHPKATANVPRVAVAARKGVDRMPQPKIRAPVSTSQGAGVRQRAQVTTKEPVAARVNLLGAAEAKISSKPPRALPRVAMMRSSTTTAVTSGVSDKRSSTGGAANRQAAGKTASTSAGLRSGGGTKSSSISKSGPFTSAATSHGVSMDTKPEAKTKSATLSNKNRTAQRVPVHPPSKSGISKTIPSRSSGNRIPAKGHADRASPSISPSSSMDSMSSVISGASTASTVGKMSHTSESLNGLSPSLRKSNDCPPTPKLRPPVVTEGHSSGTAAPGWYFQK

SEQ ID NO: 261781 - protein, 132 aa, Zea mays
  unsure (1)..(132): unsure at all Xaa locations
  Clone ID: MRT4577_170357C.1.pep
SVKSWTWLDSIQIFLLLVVSGNDHFGIARREGRRNIQIRSKRQPGTRKSVWPTLVFCASGAGMLLSFGAVSIRLASVRRCILRRPSASPASDCSSSGRPDPGCPXARWGRLISAQIRCAPMWSRKIRAAHAL

SEQ ID NO: 261782 - protein, 89 aa, Zea mays
  Clone ID: MRT4577_170358C.1.pep
LMLGDVDAASEHSVRYGKPGVSLLDVLYQRITRSTPTLGISVTRRSTSICLSTRIGPLCRGCIILNNANKGSQIQKSQFKEDIVYWELG

SEQ ID NO: 261783 - protein, 175 aa, Zea mays
  unsure (1)..(175): unsure at all Xaa locations
  Clone ID: MRT4577_170359C.1.pep
MGGGSGPRFWNPVSVCRAMGKGRAPPWKGPTHQFILGGGLSVSVFLPLFGPGGETGVGAGAEGGGKHLGAGKDKGKLAAEGDAGGGGLGEENEFGGGLGSLDRMLKGAIGNSDPENLKKGAVDGQKLFANKLLEGGKEIKGWREKXKMPSNAALRKIAMEDXNNSSFSLEDRQRP

SEQ ID NO: 261784 - protein, 355 aa, Zea mays
  unsure (1)..(355): unsure at all Xaa locations
  Clone ID: MRT4577_17035C.1.pep
MGNGITKNPCFSGDSYAAAVASDPLPDDSHGHSFTYVPSGAAFDQPQTSAATSSESSFFSLSGAAISANPATSASMPSFRLFNELTWPPSTACTFESSRSFSAVPLQAAPPRLSMSGPVQFTSGRFSETSGSASTISGTPSDRPFMSGPLDHSLSISSSSAGLLQPSVSQLIAERRAARSRLRDERSLLRFFVRTASKLWLGSPRYGRRPQEPADPIKFSFSDGDYRSPPNSNVEWAQGMAGEDRFHVAVSEEHGWVFVGIYDGFNGPDATDYLFANLYVAVHNELKGLLXDGIQAGDSARCGEQEAGAGNAERLCIAQADDGAEAKRRRTGSAHARAQRHASAPRRPEGAGAGT

SEQ ID NO: 261785 - protein, 109 aa, Zea mays
  Clone ID: MRT4577_170360C.1.pep
VLSRFCLVSIFFRKYRNSRVKYRKRYGSGCDFFGPFSTLAGASRRRLLLDIHCSVTRVAARLAQRTPSGEKVPPSTSARPEPLNFPTFPFPFLLQSTGSPHPVFTPYKF

SEQ ID NO: 261786 - protein, 71 aa, Zea mays
  Clone ID: MRT4577_170361C.1.pep
TYIFDYPHTLSDLASLKEYMANTQHFINIQLYNVPNQLIQFELILTTATFVITIFNFVSTLFCINFKVPLF

SEQ ID NO: 261787 - protein, 86 aa, Zea mays
  Clone ID: MRT4577_170362C.1.pep
EFQGFFEGQKPFFLVVSEPPPFGFKCQFSSPPYFLNPPKIGPVWFLPPPKNFSPGEISRKMKNVLKFGPPPHKKKGMGLPPKPVPA

SEQ ID NO: 261788 - protein, 121 aa, Zea mays
  unsure (1)..(121): unsure at all Xaa locations
  Clone ID: MRT4577_170363C.1.pep
SAMXLASXXCXSLLXGSAXTXRLHLAVXSXSTACSIRFPRXXGDGRATDSLRXPAPQDTWYSIAPECDPKSLLFHDWNRSVTTATHSLVEASLFIIXTHQNLWVRHIFRDWHXIRGCSKRX

SEQ ID NO: 261789 - protein, 83 aa, Zea mays
  Clone ID: MRT4577_170364C.1.pep
LTKGARAAKLERDHLLLQRLCGRHGKRLRGIQILGVHQFMRGGQGYILKIQQLESELMLQNLSNACRHGLHDQLDIGPRHFSK

SEQ ID NO: 261790 - protein, 225 aa, Zea mays
  unsure (1)..(225): unsure at all Xaa locations
  Clone ID: MRT4577_170365C.1.pep
GNIRRARELFDAATVADAKHIAAWHGXKAERFEQARTLFEQASQSNPKSCASWLAWAQVEMRAGNNTMARKLFEKAVQASPKNRFSWHVWALFEANEGNIDRARKLLKIGHAVNPRDPVILQSLALLEYNFSSANVARVLFRKASQIDPRHQPVWIAWGWMEWKERNARTARALYQRALSVNSTNECAARCLQAWGVLEQRAGNYTAARRLLRSXSLSINSQSEA

SEQ ID NO: 261791 - protein, 76 aa, Zea mays
  Clone ID: MRT4577_170366C.1.pep
FLEPNRSNTLKGRAAVFSRNDCVQNSHCCKVGSYQFDTTFTFTKKIQMTCKIMPDSLRRSFKNQSHNCCLTCPFIT

SEQ ID NO: 261792 - protein, 84 aa, Zea mays
  Clone ID: MRT4577_170367C.1.pep
RYRNCRVSGSTRLQHAFRGRTLTDRSPTLTSTSAHTNSSAHANKLGFDYPMLSCLGYCGSRYTLHLSVGCCGTKQVNSTSVVVG

SEQ ID NO: 261793 - protein, 163 aa, Zea mays
  unsure (1)..(163): unsure at all Xaa locations
  Clone ID: MRT4577_170368C.1.pep
YDSNTKAYRVFNKSLGLVEFTSDVVFDETNGSLREXXVDLDEIDENEVPTVAMRTMVICDVRPQEQQEEDQPPSSMTVQPPTQDAEXVPRDDCMDQGEHKNXEDQEEEVPKAPPIQIXATIQRDHLVDQILGDISKRVTTRSRIGNFCEHYSFLSYIEPFRVE

SEQ ID NO: 261794 - protein, 81 aa, Zea mays
  unsure (1)..(81): unsure at all Xaa locations
  Clone ID: MRT4577_170369C.1.pep
FFIFFIXXYAQKKGYKGTCKHALAVSGFWLKGGADFSQQFIVVMKSWITDKYKGKLGNNVPIFCQDYSLYYSTINARDNFP

SEQ ID NO: 261795 - protein, 147 aa, Zea mays
  unsure (1)..(147): unsure at all Xaa locations
  Clone ID: MRT4577_17036C.1.pep
RHIERTIVPLLWHTIYCVIIRSVLSVRAAPASILPQCSHTPIAHLLSPYLSPTMSSVCENPILLPYTIQQAIAAGILPLSPLCLQQSSALLQQLPLVHISXHNITAQQLQQLVLANXLAVYSQQQQLHFGHLLAHNIRXQKLQQLVL

SEQ ID NO: 261796 - protein, 85 aa, Zea mays
  Clone ID: MRT4577_170370C.1.pep
PRIRTITCRLFSSPLTNPSLWPPSNRSLARSLLSPLYTLVVGGPLISLTIICAASPTPSGFSRWALIVSSHPTILFLSFIYCVII

SEQ ID NO: 261797 - protein, 131 aa, Zea mays
  Clone ID: MRT4577_170371C.1.pep
PLLTYDIPSFYNPSLYSITCFFFIHPHFWGGGGVKHLNLLTKLPFSNISLFTKNALSKSPSKNLSHPQWRMLQTFWHPIYPGGLTVYPHINPYTCQFPIARSFSFFPFLFPHFFLFSPSVFTPGALFWGPI

SEQ ID NO: 261798 - protein, 114 aa, Zea mays
  Clone ID: MRT4577_170372C.1.pep
FLISSSNSRLLAAPPLRQFPVFKGETNVGPWKCLCCSPEIWLFCHQNPRIAFLPARNPFFWVLWGGLGFMSSFMGLIMGPWPVWQCHPVFLFLALAFAWGGTEFSLMEGPLVPG

SEQ ID NO: 261799 - protein, 70 aa, Zea mays
  Clone ID: MRT4577_170373C.1.pep
MSATTAAVPFWRAAGMTYIGYSNICAALVRNCLKEPFKSEAASREKVHFSISKWTDGKQEKPTVRTESDD

SEQ ID NO: 261800 - protein, 52 aa, Zea mays
  Clone ID: MRT4577_170374C.1.pep
EGWFTLLCFQEKSTNNCFVDTQTKRGTANSNHLPNARSPQIKQLMGLKNKNF

SEQ ID NO: 261801 - protein, 117 aa, Zea mays
  Clone ID: MRT4577_170375C.1.pep
MNVVFLEKKKKKKNLVSVASSPFPFGHSPPSNQPPAAAQGKRRGINAMSATTAAVPFWRAAGMTYIGYSNICAALVRNCLKEPFKSEAASREKVHFSISKWTDGKQEKPTVRTESDE

SEQ ID NO: 261802 - protein, 51 aa, Zea mays
  Clone ID: MRT4577_170376C.1.pep
ALDIAGFDRAATYQVSPVEPSASRSTSSSRPSMSRIPHRCEPPQGLQHPVP

SEQ ID NO: 261803 - protein, 244 aa, Zea mays
  Clone ID: MRT4577_170377C.1.pep
LPGQCSVVGYWEHIDLEDVMTPAEVYSTLRDKGYCIEYKRIPLTREREALAADVDAIQSSIDESARYYLFISHTGYGGVAYAMAITCLGLSADAKFVMEETAETHFVSTSLAKNVSIKTKTDIALKQGDYRDILNLTRVLVHGPKSKEEVDTVIDRCSGAGHLREDIMHYRKALQDCSHDDDDDCDEEHSYLTDMGTKALRRYFFLITFRSYLYSTTSCKTTFTSWMKARPELGHLCDNLKLDK

SEQ ID NO: 261804 - protein, 121 aa, Zea mays
  Clone ID: MRT4577_170378C.1.pep
VSQQKETMRKSICLHLRTAGRTQQHDCTRVNRHIAAEQRRSYLCCSAQQPNRPTTRTVVRQASSGYVQLGQSRGTYTRCQPAGCSSAKDAHGDPSCSSWHADTLAGHSYFYFFFSDNCFLQ

SEQ ID NO: 261805 - protein, 59 aa, Zea mays
  Clone ID: MRT4577_170379C.1.pep
APGSGDPSCPASSPDPTKWSGAGAGPFPHARRAGWSLDLCVCLDPLPAPPPHGYHSQSA

SEQ ID NO: 261806 - protein, 63 aa, Zea mays
  Clone ID: MRT4577_17037C.1.pep
CYFPPPCNLGESLLTGSLLGSSFGAHTELNWAGQKRLSRRVQRGLCLLRPSAVVVGSLSWGGG

SEQ ID NO: 261807 - protein, 40 aa, Zea mays
  Clone ID: MRT4577_170380C.1.pep
FVFLYTGSRLQPYTSRERGVTPPTRNSVDPINGTHNVRRV

SEQ ID NO: 261808 - protein, 70 aa, Zea mays
  unsure (1)..(70): unsure at all Xaa locations
  Clone ID: MRT4577_170381C.1.pep
VLLHDEISGGGDDLSXRMHSLSYECLKSTTIISFSAPICFAHLAAAHVGQFIKCAWKSQTSSTHRGAYFI

SEQ ID NO: 261809 - protein, 201 aa, Zea mays
  Clone ID: MRT4577_170382C.1.pep
MSAAARVLPKAVTFVTGNAKKLEEVRAILGSSVPFQSLKLDLPELQGEPEYISKEKARIAASQVNGPVLVEDTCLCFNALKGLPGPYIKWFLEKIGHEGLNNLLKAYEDKSAFAMCIFSLALGPGEEPITFVGKTAGKIVPARGPNYFGWDPVFQPDGFEQTYAEMPKSVKNNISHRGKALALVKEHFASASYTVQSNDST

SEQ ID NO: 261810 - protein, 96 aa, Zea mays
  Clone ID: MRT4577_170383C.1.pep
GAFFFFFFLFFFFFFFFFFFRTNGWMTRTYIWPFRFHSFIRNGCSVETGSKPYASQGNQSAAVWIHKGGGSRACHKARASSAHASDDSLRMAELWG

SEQ ID NO: 261811 - protein, 144 aa, Zea mays
  unsure (1)..(144): unsure at all Xaa locations
  Clone ID: MRT4577_170384C.1.pep
MAQQPPHRHAKTDSEATSSMAAAYYVQSPSHDDGENKTAASSFHSSPAASPPRLLGRASRDSSSSSRFSSGHRGGGSPRHVRRRXGDGTSRGALSAIPKRARYALGFAGAFLALFFLFALVLWGASRAQRPVVTLRSVNFHRFV

SEQ ID NO: 261812 - protein, 335 aa, Zea mays
  unsure (1)..(335): unsure at all Xaa locations
  Clone ID: MRT4577_170385C.1.pep
MAQQPPHRHAKTDSEATSSMAAAYYVQSPSHDDGENKTAASSFHSSPAASPPRSLGRASRDSSSSSRFSSAKAASSSVAVPVPGAGAGGRRRGSPWMKEAAIEEEGLLGMSDDDDGDGTSRGALSAIPKRARYALGFAGAFLALFFLFALVLWGASRAQRPVVTLRSVTFHRFVVQAGTDASLVPTEMASLNATVALAFRNAGTFFGVHVSADPVTLHYTQLQLASGDIKYFYQPRKSQRGLAVAVVGDKVPLYGGGSGLSXRDDAAAAQEARAGGGGAAXPVPLQLAVRLRSRAFVLGRLVAPKFYTEARCRVTMDQTRLGRPVSLAKACTYTH

SEQ ID NO: 261813 - protein, 118 aa, Zea mays
  unsure (1)..(118): unsure at all Xaa locations
  Clone ID: MRT4577_170386C.1.pep
HEAPVRAERGTGGVAGYDTNYAVDGPRRRXLRPVARVWDGATGRAMELWADQPGVQFYTSNGLAGVRGKGGSVYRRYAALCLETQGFPDAVNHPSFPSQIVRPGKVYSHDMLFKFSFA

SEQ ID NO: 261814 - protein, 367 aa, Zea mays
  unsure (1)..(367): unsure at all Xaa locations
  Clone ID: MRT4577_170387C.1.pep
MPPPQPPHRHAKTDSEVTSSMAASSPPRAAYYVQSPSHDDGENKTAASSFHSSPAASPPRSASRHSSSSSRFSASAKGTASVAGGVPTGGGRRRGSAWAKEAAIEEEGLLGVDDGGGGDGDGRGGIPRRARYLLGFAGAFLGLFLLFALVLWGASRNQRPVVALRAVTFHRFVVQAGTDASLVPTEMASLNATVSLTFRNAGTFFGVHVSADPVTLHYAQLQLASGNXLRIKRRSVIIRPDRCLRERERELLHYVLSRXMKYFYQPGRSQRSLAVAVVGDKVPLYGGGAGLSSXDDAAAAEEARAAGGGAAAXPVPLRLAVRVRSRAFVLGSLVKPKFYSEAQCSVTMDQARLGKPVSLNKACTYTH

SEQ ID NO: 261815 - protein, 59 aa, Zea mays
  Clone ID: MRT4577_170388C.1.pep
PKHCMWNHPGLLVCVGQTICPEPADDVSHPLKANLSSGLLPAQAVARRSPIMTPLWNRD

SEQ ID NO: 261816 - protein, 104 aa, Zea mays
  unsure (1)..(104): unsure at all Xaa locations
  Clone ID: MRT4577_170389C.1.pep
TTAAAAASLLLLLLVSLAAAEDMSIVSYGXERSLMEALRMYAELIAALGRSYNAVGYEERRYXVVRDNLRYIDAHYAAADAGVHSFRLGLNRFADLTNDEYRVT

SEQ ID NO: 261817 - protein, 70 aa, Zea mays
  Clone ID: MRT4577_17038C.1.pep
GHDSRGSPGGISRTTRGLKGSGLAGSRYMGWGWSSALTTLQGHVTALRLRHALGFDVNKRGRVRGLYWQR

SEQ ID NO: 261818 - protein, 96 aa, Zea mays
  Clone ID: MRT4577_170390C.1.pep
EGVLEFGTCIYTFTSTISTYLSSVWGSTSRPITHSSLPYTPILIAVSADWLPELILIILPLGQSIMASSRMIAYEQMLALRLYLCEDAPRPTCSYH

SEQ ID NO: 261819 - protein, 236 aa, Zea mays
  unsure (1)..(236): unsure at all Xaa locations
  Clone ID: MRT4577_170391C.1.pep
KKIFLFSPPPPRRGPKKKXVFFSPPPXGCFFFSPPXPPTRGGPPRFFFFFPPPPXFKKISPPPPVFXFPHTPVYFFFSPPPPFXPPFFFGIPPPPPLRKKSXGGPFFLPPPPFPRIFSPRGSFFRISNSFFRKTPEXPPKKGKKKKTPTPPKPPPPQXPKNPEEFFRGGFLEGPPANFFSPGKKPPPLFFFFFLGPLLFFFFFFPPRGGFFGKKGVVGGRRDGSFFFQDTASRLTS

SEQ ID NO: 261820 - protein, 99 aa, Zea mays
  Clone ID: MRT4577_170392C.1.pep
KKGGAEGFNGRSHLGRRWTNSAARMVFSRDKSIYEAMECAFPPSLLECAYNSVGSQSGKMIAHMRDELIGLCARASYIYGTQAEYLEDSNGINYMQLSH

SEQ ID NO: 261821 - protein, 84 aa, Zea mays
  Clone ID: MRT4577_170393C.1.pep
IIDITPTNHRLQRPRKVLPGKGCDKFSRKIAIISVGLGRSGAQHGSIYRDRAVVPKINHWVLQVAKKNCMRQQRMLPPASFSFF

SEQ ID NO: 261822 - protein, 72 aa, Zea mays
  Clone ID: MRT4577_170394C.1.pep
CTPAIYHILRPTCVLHKNGYTARGHHIRSGSLLKELDVPDNGRYRFQYQRTLHCKHDRPATQILVWFVARIN

SEQ ID NO: 261823 - protein, 165 aa, Zea mays
  Clone ID: MRT4577_170395C.1.pep
YSCRSITAFLNAMLLYVCMYGLLETDPYLDRATMITGRGSSADELPEFSPTYVAFSTLGLVILTIFTNVMFNLYIKPSVDGVDPPPLDIASRIFSTGRVRVGRPGPPEAAAGAAGAIVKRSTLPAEGDVASPRGLHVAMNWNAPGRRLALPCHRRDLEGDGRVPA

SEQ ID NO: 261824 - protein, 110 aa, Zea mays
  unsure (1)..(110): unsure at all Xaa locations
  Clone ID: MRT4577_170396C.1.pep
MGARILALLALLVFXRSAGTLTFISQCXSQQYLSSATAVGFQYPTLHSYMVHEAIQASILRSLALTLQQPYALLQQPSLVHLYLQRIAVQQLQQQLLPTINQVGGADLAG

SEQ ID NO: 261825 - protein, 301 aa, Zea mays
  unsure (1)..(301): unsure at all Xaa locations
  Clone ID: MRT4577_170397C.1.pep
DYLSYIFMFLSVATSNMVATSLAKXYHTQDEELTQHQVSMLLFLALACGIGMFLFTKVFGTQVLTAFTGSGNYELISSANTYAQIRGFAWPAVLVGLVAQSASLGMKDSWGPLKALAAASVINGVGDIFLCSVCDYGIAGAAWATMVSQVVAAFMMMQNLSNKGFRAFSFTIPSVRELLQIFEIAAPVFVTMTSKVAFYALLTYSATSMGAITLAAHQVMINVLCMCTVWGEPLSQTAQSFMPELVYGANRNLTKARMLLKSLVIIGAITGLTLGVVGTLVPWLFPSVFTNDQRVIQQMHR

SEQ ID NO: 261826 - protein, 144 aa, Zea mays
  unsure (1)..(144): unsure at all Xaa locations
  Clone ID: MRT4577_170398C.1.pep
VDSCLQREIRDKTHNVTQLNSLAHHAPSVRWLISEQAHIDCPSHXVRFLNGKCDAPCRLIFSATGVESTLTYCATLCIVLSPARLAIFDCFLSDVSPGYTRKGVKRWLALGFQFTALWRLKPKILISWIGYVVCHYPDIRIFAL

SEQ ID NO: 261827 - protein, 73 aa, Zea mays
  Clone ID: MRT4577_170399C.1.pep
IFSSLSTGFGVSQKAPPWATLPFKGGGGSIRQTYKNLGLFLKSQKGLVQKTNVVCTLGFFWSERLFFSFWLKK

SEQ ID NO: 261828 - protein, 214 aa, Zea mays
  Clone ID: MRT4577_17039C.1.pep
MEDLSAMTTTTVIRKIAAFEISQKMGQEEPTSSRPYAFACDEKKKGKKKAPTPRSLSEEEEEEERKSKEREDVLHVGRRVTSGTTVQICPNAQKRGAKARHSQVSKLGMILQAKMILHGLTATNPHHSYHGHHTSALWQEDNTTAEVNKPGEGETMVCRLCYKECHKSYQCKVKTEDKQKQKLKQKPTSKISNTYINKVDKKVATPYLIKKKKN

SEQ ID NO: 261829 - protein, 205 aa, Zea mays
  unsure (1)..(205): unsure at all Xaa locations
  Clone ID: MRT4577_1703C.1.pep
MLRHGAGRIMSARRRYRPAASPMIATSDVPGDVAEDYTVVEAWKEVPPNIEPRRRPSXYVGXRSPTLATIPTKVTVKFSLPDKSEIYNVDADMSIVPATXGQMSVLAAHDATIAELITGVSPRYTEGNYVISYFVRTAXAFAHANSIADIVTADGIHCXRSTHDVVHKGLXEFTDELXSFSTDLXKDDVQMVVHVHSVLHVGLTG

SEQ ID NO: 261830 - protein, 59 aa, Zea mays
  Clone ID: MRT4577_170400C.1.pep
LSHHRLESELESMVPSRFLVDINAPLEVAKIRDTCMGNETDIPPSAAQAQRRITGRMRA

SEQ ID NO: 261831 - protein, 113 aa, Zea mays
  Clone ID: MRT4577_170401C.1.pep
GANGGATGGGVGATPAGFGRNNRGGPRAQVIRFAPGLFPPPQGGYFRSGRVCFCPPGVLIPRPPWVSKSRVHPGPPRTPGSTSMGWGPRDLVTPARVCFRLTPRKKGGFWGPP

SEQ ID NO: 261832 - protein, 83 aa, Zea mays
  Clone ID: MRT4577_170402C.1.pep
LMFIWLVPERERSMVPEIVSKKFFPCLRKCPDHHPVLNVVRKNSFHYVVKVSPNCLEWLPIKRRFARRFFSLPLVSLCSTVLH

SEQ ID NO: 261833 - protein, 98 aa, Zea mays
  Clone ID: MRT4577_170403C.1.pep
KGGTPHPPGYTLDVTREGTLWNQSKRGGCLNHLGVNHFKRGGGKNLCSTKVTFPKKKYFKTTHWFMIIHPGENWLKLKKLGCPQGGHQQPCLRVPFCL

SEQ ID NO: 261834 - protein, 95 aa, Zea mays
  unsure (1)..(95): unsure at all Xaa locations
  Clone ID: MRT4577_170404C.1.pep
VCDRLWFLTRGGLSNASRVLNISEHIFAGFNCTLRGGNVSPHEYIQVGKGRDVGLNQISMVAAXVSSGDGAQALSRDVYRLGPRLEFLRMLSCVY

SEQ ID NO: 261835 - protein, 57 aa, Zea mays
  Clone ID: MRT4577_170405C.1.pep
SGLFTNLAPKHVCLRDLCGVLLHSVGRLSPIGCLATSPAIVPVEVGITEGTGALEPN

SEQ ID NO: 261836 - protein, 58 aa, Zea mays
  Clone ID: MRT4577_170406C.1.pep
ARSKVLGPPKFMRLRPILEPVCFMTPVTITRSEPSFVNFISSAFGSSTGLSQFLLSPP

SEQ ID NO: 261837 - protein, 54 aa, Zea mays
  Clone ID: MRT4577_170407C.1.pep
RTGPCATRFLLYHTFPTARAGSPTLPSLAPKHYANGAPRITVREIGLDLEASTP

SEQ ID NO: 261838 - protein, 82 aa, Zea mays
  Clone ID: MRT4577_170408C.1.pep
LPFHLFFGRNAHQNTATCWETHARRGAPFMGTLTTRSKGAAPHNYRGPTFTRQGHSSQTGETATILASQPRQSPPGFPPSGD

SEQ ID NO: 261839 - protein, 72 aa, Zea mays
  Clone ID: MRT4577_170409C.1.pep
AKSSPLPPPSSRLFPSWSQRLHPLPLQIPVGCYLSVSSSSGQGLDPRSADFHPALRALSGVPSPAGFAVRGG

SEQ ID NO: 261840 - protein, 77 aa, Zea mays
  Clone ID: MRT4577_17040C.1.pep
QRSNLKRNCFLSLYYILQFTNWVVQVLGERPFKALEPTNCDLFKQGFQDDDDKSQAPAKDAKLPDDSSPPLGEAVPT

SEQ ID NO: 261841 - protein, 47 aa, Zea mays
  Clone ID: MRT4577_170410C.1.pep
MDPQVNLSVLFKLIARPGPRGQVPPVRVKFLDAQNRFFFRNVKGPFF

SEQ ID NO: 261842 - protein, 75 aa, Zea mays
  unsure (1)..(75): unsure at all Xaa locations
  Clone ID: MRT4577_170412C.1.pep
MRIATSLPISMSTAEKMVCVPNSASSALGLNSGNSAPRCLPLSRXTRAMASSPTSGQPTICLLLPAVFLCCVDYM

SEQ ID NO: 261843 - protein, 145 aa, Zea mays
  Clone ID: MRT4577_170413C.1.pep
KPGRTTPVRWSTIRCPRTTGRSSWKTAGRKAGPCSGLRGKDYFRTALSFRGRINQFVRLKAKGLGPDLGLYGLKGITRVLKSGLNATPVIQGRRGPFARSLLFQFYFWAGGNGPLMDCPGPKKSTCSRGILFHPLKKGLLKQQFN

SEQ ID NO: 261844 - protein, 66 aa, Zea mays
  Clone ID: MRT4577_170414C.1.pep
PSALQAILALTILHPRICYRKKRGGGGETHPHRSFTSVQMWPRWPRSKRTCRFHPHRSGPTEYHAV

SEQ ID NO: 261845 - protein, 103 aa, Zea mays
  Clone ID: MRT4577_170415C.1.pep
SKARSRHKEEAERRLKAANATLESEVSVTEDKRRKSFTEGERLSHALAAPNAAPEVPAAQSNSENEPVTLTSVDVTTTLADLLPITDLSDSETDMLPCRGSDR

SEQ ID NO: 261846 - protein, 141 aa, Zea mays
  unsure (1)..(141): unsure at all Xaa locations
  Clone ID: MRT4577_170416C.1.pep
MGPTTHTARKFTQGKAPNNXLAINAARXSSPTTGGVNKPYRYRPATAALREIHMYXRGTDLLIRXKLPFQRRRTRNTAQDLETXDWRYQIHAXLVLHEAAEAXLVGLFEDTNLCPIHAKPVTXIMPKDIQLAERIRXGERA

SEQ ID NO: 261847 - protein, 91 aa, Zea mays
  Clone ID: MRT4577_170417C.1.pep
VMQRHGYIGEFEYVDDHRSGKIVVELNGRLNKCGVISPRFDVGVKEIEGWTARLLPSRQFGYIVLTTSAGIMDHEEARRKNVGGKVLGFFY

SEQ ID NO: 261848 - protein, 553 aa, Zea mays
  unsure (1)..(553): unsure at all Xaa locations
  Clone ID: MRT4577_170418C.1.pep
MRAAMAAAVLRPTAATLRFLSTPPHQRRRVLVGHLPFARRRRHSSTATAPALEDSSPRSGEGKAVRRRRARESPQGLLRHQLDMCSRNADLTTALRLYDDALSPDNPIPLSLHHYNCLLYLCSNAAATDSXAISPPPPLXRGFDIFARMEADGVQPNEATLTSVARLAAATRDPAMAFSVVRRMAAAGTPPRLRTYGPALFAYCDAKDADGAKQVEAHMDASGVVPEEPELAALLRVNADTXRGDEVYRLLHRTRVLVRQVCDTTAQVVEAWFRSDAASQAGVDSWDPTKVKEGVVKGGGGWHGQGWLGKGAWSVGWTEMGKDGTCQRCGERLVCIDIDPAETDNFANSLTELAIKLEAREDFLSFQSWLRRHGPFDAVIDAANVGLYKSKDFCFSQVNSVVNAIQRVTKSKKLPLIVLHRSRVNVGPAKAPYNQKILDSWRNAGALYATPPGSNDDWYWLYAAVSCRSLLVTNDEMRDHLFQLLGTSFFPRWKEKHQVRLTFSGHGPTLHLPPPYSIVIQESEDGSWHVPTTTGDDIEKPRQWLCTTRKSLR

SEQ ID NO: 261849 - protein, 99 aa, Zea mays
  Clone ID: MRT4577_170419C.1.pep
FILPPLFMPWAISRHLGPRGFLRAFYPPGGGKSSQKGVKFILPPPWGFLIPPRVFPKGGPLFFRQRGPHYVFPPPFPSVFPAWPFCRPPPETPWRPHLF

SEQ ID NO: 261850 - protein, 91 aa, Zea mays
  Clone ID: MRT4577_17041C.1.pep
FVPKRFVGAPRNFKGNDLEFIQLGTGRRICLGMSFGLANVELGLASLLFYFDWSLPAGVLPAEMDMAETMGITARRKADLFLSATLSVKLP

SEQ ID NO: 261851 - protein, 73 aa, Zea mays
  Clone ID: MRT4577_170420C.1.pep
TKINHVPQKRPFWGENQTRQLESAQQYTSLLNSGYNCILTTNEKDDPHRLTVLSSGGSGVSPVLNDKDAVKEL

SEQ ID NO: 261852 - protein, 132 aa, Zea mays
  Clone ID: MRT4577_170421C.1.pep
GLWSLLLKPAPANMFCVGSDCLTSRKPRSGGEATSDLRRRVVRDADAFLRWRKTPYGVLPAYTSERCLSTYSCALTSSIEVMAWLLSYTAQFLISAHRLWTGRGICPRGGEWSKNCYYLTIPHSLRMSTRRA

SEQ ID NO: 261853 - protein, 83 aa, Zea mays
  unsure (1)..(83): unsure at all Xaa locations
  Clone ID: MRT4577_170422C.1.pep
LIKLPTVWVLVXDPHHRQHVCLCPKYNNTFFTGFRKSPKEPSKLGFSPPXRVSXIYPNQLQLMLVQPLSGLPVTTSVVPWAYL

SEQ ID NO: 261854 - protein, 75 aa, Zea mays
  Clone ID: MRT4577_170423C.1.pep
FAWRPLSGQQNNPKVRQPLSLIIHGGHVFVFQCCICNLAWCTYISASIFPHRMYAVLCCDLLTLHSQSIKSNFLS

SEQ ID NO: 261855 - protein, 62 aa, Zea mays
  Clone ID: MRT4577_170424C.1.pep
CGFVPRYFFFFFFFFFFFFFLGTQQFYLLAVSRMSLRIQSFQSSIQLFTLCGIGRPKGRLLI

SEQ ID NO: 261856 - protein, 92 aa, Zea mays
  Clone ID: MRT4577_170425C.1.pep
TLIKILREKKTSYRTSPQKIWGRVPKTTGLFFRKKNCFENSKHPGGVFPSLERIQGPKKKEPLQDPWNYNDPGFLKGTSLSFGKKIREGVPN

SEQ ID NO: 261857 - protein, 36 aa, Zea mays
  Clone ID: MRT4577_170426C.1.pep
LQKKKKKKKKKKKKKKKKKKKKKKKKKKKKKKKKKG

SEQ ID NO: 261858 - protein, 96 aa, Zea mays
  Clone ID: MRT4577_170427C.1.pep
NSLFYPLFLKKKKKKKKKKNFKKKKKKKKKNENFAVYKSDSPSLLLSSFLTSFFLVTLLSFNSPSFYNIFPLLNSFLTQITLLSPLLTYFLFIHLY

SEQ ID NO: 261859 - protein, 140 aa, Zea mays
  unsure (1)..(140): unsure at all Xaa locations
  Clone ID: MRT4577_170428C.1.pep
MMPSFDPLPMFSMTFSLTRRLKAILMMSMIRRPTSRDAFSLHSWDPFEGFPFGSGHSSVSXSCPTTRSATAPLTGATPRXKATPQDILFTAHLPRLHNDPAKGHHELSCKHHSNGERSHALVFNTXPRHRVERCTGKYLR

SEQ ID NO: 261860 - protein, 120 aa, Zea mays
  Clone ID: MRT4577_170429C.1.pep
MFSKVAVVSSLAILAAANSVPTKTVTVTAPGPTVTTISQCNTGDAQCCNTVQSASSSAVSSLLGLMGIVLSDVTGLVGLGCTPITVIGNGQGANCAQQPVCCTNNQFNGHINIGCTPISL

SEQ ID NO: 261861 - protein, 74 aa, Zea mays
  Clone ID: MRT4577_170430C.1.pep
RAGPSRKSTSTIFLNLLASMYAFAGVLDTRRGAMRITTFPRALQDCRDQHEDHRISMNGMPDSPASTDSARLMS

SEQ ID NO: 261862 - protein, 110 aa, Zea mays
  unsure (1)..(110): unsure at all Xaa locations
  Clone ID: MRT4577_170431C.1.pep
GRKFFFFFFGGTPEPASFHRLNWTWIPKEKGSIIDLNTTMGQTQSGRPGEGQWRMQQPPDLGGGGAEPSVLQRTSWRRGASWRXYGTARRVRRRRRPTAGAGVSGAPGPP

SEQ ID NO: 261863 - protein, 74 aa, Zea mays
  Clone ID: MRT4577_170432C.1.pep
FAIFTLSSRCTRDRFLLVLPLCCSACFHHGLQTRGDVRPIHLPRASVSFSVESIVAFLQRFITRCPHMQHRHAR

SEQ ID NO: 261864 - protein, 36 aa, Zea mays
  Clone ID: MRT4577_170433C.1.pep
RRVDQTSERSPETTSGVHVGYKPSSTNMFRPLFMRS

SEQ ID NO: 261865 - protein, 297 aa, Zea mays
  Clone ID: MRT4577_170434C.1.pep
MATGSSLVPLLLIAVAVAQTVGSQAGSISIYWGQNGGEGTLADTCATGNYRFVNLAFLAAFGNGQPPVLNLAGHCDPTNGGCASLSGDIKSCQSSGVKVMLSIGGGAGSYYLSSAADAKDVATYLWNNFLGGQSSSRPLGDAVLDGIDFDIEGGTNQHWDDLAKYLKGYSNSGRRVYLTAAPQCPFPDAWVGGALNTGLFDYVWVQFYNNPPCQYSSGSTTDLADAWKQWLSIPAKQIFLGLPASPQAAGSGFIPADDLKSQVLPLIKSSGKYGGIMLWSKYYDDQDGYSSSVKSDV

SEQ ID NO: 261866 - protein, 160 aa, Zea mays
  Clone ID: MRT4577_170435C.1.pep
MTTNSASFLLRVTSRFTPYRAAAATNVVDVTTTPRIQHEGSDRAIFYDELLRWSDMTEMSEISISPAEKKQACAIPLPQLRYPWHSHAHDGVSLILPGYEPSHGFHVCSASTLRASTGDAEPPPPPHDQVLNIPFTDHFMKHPPVVRASERITNDADALQ

SEQ ID NO: 261867 - protein, 69 aa, Zea mays
  Clone ID: MRT4577_170436C.1.pep
GGEDDSGAGGGEGGPLGRSAEDGGDVPVHAEPWRRTWDNLERYPTTLRDRPSHRRTSPAAHLDEILSLL

SEQ ID NO: 261868 - protein, 62 aa, Zea mays
  Clone ID: MRT4577_170437C.1.pep
KLRKKQGNGVLKRARVKRLFYKNRLGNLRDDPGRPILLIYGHLSLKGPHFLGGTPMGGTQGF

SEQ ID NO: 261869 - protein, 61 aa, Zea mays
  Clone ID: MRT4577_170438C.1.pep
QRNINLVYDLVAVNWQIICFDIKTSYMFRFICIFHHKVSCSAMIILVFIHCQQTVIVSTTL

SEQ ID NO: 261870 - protein, 59 aa, Zea mays
  unsure (1)..(59): unsure at all Xaa locations
  Clone ID: MRT4577_170439C.1.pep
LPGATQDRPRSVICNVHGVNPKFIEVGKPKLRQXECEESLHRMGIXYIKKMVWSKVYSE

SEQ ID NO: 261871 - protein, 41 aa, Zea mays
  unsure (1)..(41): unsure at all Xaa locations
  Clone ID: MRT4577_17043C.1.pep
PKKLRFFFPSNFGFQGCWLLCSENNCVLMLNAQLINQAXAW

SEQ ID NO: 261872 - protein, 48 aa, Zea mays
  Clone ID: MRT4577_170440C.1.pep
NLLGIVHKNNSHLLGLMLIRCGIHVRGGVKRLTPLPAKIISMKGYRQL

SEQ ID NO: 261873 - protein, 42 aa, Zea mays
  Clone ID: MRT4577_170441C.1.pep
LMCVSVRYVSVCSLSREQATHGWPGGLAFPLHNMLMKNALLI

SEQ ID NO: 261874 - protein, 59 aa, Zea mays
  Clone ID: MRT4577_170442C.1.pep
PSKDRELANVAAVRAAINYEIANMITHAVSTVGRKVLVTLVQGRRSEHFLYVVEGMQFD

SEQ ID NO: 261875 - protein, 26 aa, Zea mays
  Clone ID: MRT4577_170443C.1.pep
MGTKACEMQSPNHDYAIPEFQVSPWC

SEQ ID NO: 261876 - protein, 65 aa, Zea mays
  unsure (1)..(65): unsure at all Xaa locations
  Clone ID: MRT4577_170444C.1.pep
MPIXXIALGXPXEVFHPGALXAAFAGWGGGPLFXFAGPGSGVGFGXLPGGGPSSSCGLVAAFVVF

SEQ ID NO: 261877 - protein, 231 aa, Zea mays
  Clone ID: MRT4577_170445C.1.pep
GRVWIEGSSGQSFCSLSRRPSLSLFPLDFSCRRSVPGSKSRRRRLASSQPSPFPTRSSISLCRRSPLHTSFLCWPSSSSAWWPTPVGAQSECRVAPPVSSARSAPISYGAWQPLPLCSPPHALELQSSRPRLPLAVRVVAAIRPRSSPRHGAPYLTATSPESSRGAPPLLALAMPSAMDAVGLDSLWPRHPSYSLLDPVSLPSTSDGLARLAPTRKGHRDIVLVASLLCAP

SEQ ID NO: 261878 - protein, 51 aa, Zea mays
  Clone ID: MRT4577_170446C.1.pep
VCLLCHIISVTLLCFYCPGDVNGWISLKLSLMILDMNFVCKKGLLLQNCHH

SEQ ID NO: 261879 - protein, 59 aa, Zea mays
  Clone ID: MRT4577_170447C.1.pep
PNLGNKQGAWVFHSCDEKEKKSLHLNGAEKNPIQRSSSARGGRKLSWGLLNIVWPSLWP

SEQ ID NO: 261880 - protein, 147 aa, Zea mays
  unsure (1)..(147): unsure at all Xaa locations
  Clone ID: MRT4577_170448C.1.pep
GYLEAGRFAKCSGLXIAGNVALCGGVPQLGLPRCPAAAASARDTHRFRLLLRVVAPVLSVALLSAAILLLAXCSVGGRRRXQAKTAAPDVLEGKNYQRVSYAELAKATNGFAYTNLIGAGKFGSVYLGALPLTTTKTKSRDSDSEPD

SEQ ID NO: 261881 - protein, 118 aa, Zea mays
  unsure (1)..(118): unsure at all Xaa locations
  Clone ID: MRT4577_170449C.1.pep
MVDRYFFEEGTILSVVWGGMNIXLVPENDTKERKATKHRQGEAVKGHKASGTRTGPAPQEENRLHLKAEPLEGSEEAKNTEAEVKEPPMETTRKLAHHPNNAYRGHEGKNIAHVEKLQ

SEQ ID NO: 261882 - protein, 86 aa, Zea mays
  unsure (1)..(86): unsure at all Xaa locations
  Clone ID: MRT4577_17044C.1.pep
FVLDMTTVTIKLTMPLEVNAVKYNMRNEYPDNDEYSAICXLTDQMTXLKEFIVFPLLKPVLWFTVGTKHYRDMILYRTAGTVNTLC

SEQ ID NO: 261883 - protein, 99 aa, Zea mays
  Clone ID: MRT4577_170450C.1.pep
EGHVLTSKYSIYNFVHMLKCFMPDDLNLSVLRILLALTALAKPLDTVVSVIRENYRGHSIIELMGSPTEVLSLAATRLLITLSPHIGHTIVERLCKTQG

SEQ ID NO: 261884 - protein, 383 aa, Zea mays
  Clone ID: MRT4577_170451C.1.pep
MAAGAASTGNWSRATGAMRAAMVLWVCLAYMRGVCEDWSPLRLLVLLVAATLVARWFLNAVRPPPSTPCGTPGGPPVTAPRVRLRDGRYLAYAQSGVSRDRARFKVVYSHGFSGSRMDSPRASQELLEELGVYMVAFDRAGYGESDPDPRRSPESAALDIQDLADALGLGDKFHLVCSSLGSHAGWAAVRYIPHRLAGLAMMAPVINYRWRGLPRGLARQLYGRQPVGDQWSLRVAYYAPWLLHWWMSQPWLPTSTVVDGSAPFPNALDEKNRVMALSNGMFHSRARLATQQGVQESFYRDMTVMFGRWTDFEPTDLEKPPFPVHLFQGDEDGVVPVQLQRHICNKLGWVSYHELPGAGHFLSAVPGLGDRILSTLLSSPASA

SEQ ID NO: 261885 - protein, 72 aa, Zea mays
  Clone ID: MRT4577_170452C.1.pep
IFLLVFFLFSFLFFFFFVFFLFFNSPSFLGLIVLYHSDVQGILCNIIEVNKPLMKVHLTHNYCPAAGVLLSH

SEQ ID NO: 261886 - protein, 126 aa, Zea mays
  Clone ID: MRT4577_170453C.1.pep
PSSRIPLSNRYKGSSIHSSFKQQPEVESHTCARGIEQEQDPDPAINGPHITGVGEWKHGNTTRSRTSKGTPHGELTLAGPRSQRPLKRLFLGIEAQVDLERDIGGHAADEEDEREGHAQHSPTQLL

SEQ ID NO: 261887 - protein, 192 aa, Zea mays
  unsure (1)..(192): unsure at all Xaa locations
  Clone ID: MRT4577_170454C.1.pep
QTPSTVPNTHASSQPRQSAPVTRGPVHMPQLVLLPVLLPPSQSATSSTDNRVLGTLSRPPRLHKXTLSRLHKRSRSRPPSQTRRYNGFAKPLRVMLRSSPVARATLTLPLMTSMPYGRSNGDEVDSIVREAYDENATVLGKGDMSLVTAHQTWDVITKHMSRIADLAGDASQQNHGXPPTTEGEVGRNIDKL

SEQ ID NO: 261888 - protein, 98 aa, Zea mays
  unsure (1)..(98): unsure at all Xaa locations
  Clone ID: MRT4577_170455C.1.pep
AVQPVSLARRSGSSRAFGRLGVSRSHPPSRAVVSRRTQSAFARSAYSRIDASPSSSGILLVDAGGLFARVGSECGXRRCPPPGSGGGEVRGRGKRKGA

SEQ ID NO: 261889 - protein, 58 aa, Zea mays
  Clone ID: MRT4577_170456C.1.pep
DQLSFPALDQSPFLGPWSKLDVPSKIPGAVNSGALDIGRNSRRWVQRNNKGPAARDLE

SEQ ID NO: 261890 - protein, 130 aa, Zea mays
  Clone ID: MRT4577_170457C.1.pep
MVVRNCSSFLIKSNTQTYSTEPNNLKARNSFRYNGLTHRKTVGVEPAADGKGVVVVIKRRSGQRKPATSYVRTTINKNARATLSSIRHMIRKNKYRPDLRMAAIRRASAILRSQKPVMVKTTRTRSTKSS

SEQ ID NO: 261891 - protein, 58 aa, Zea mays
  Clone ID: MRT4577_170458C.1.pep
WGVKSFCTQEAFELGCWTWYHASWALLRLWLRALVKNPVHSFKWHTYCKTYTKRVIIK

SEQ ID NO: 261892 - protein, 56 aa, Zea mays
  Clone ID: MRT4577_170459C.1.pep
TLGFFKAQTLGLLVYAFPFIFFFLVFPFIFFLMASVFFFYLIFFFFFFFFFFFFFI

SEQ ID NO: 261893 - protein, 197 aa, Zea mays
  unsure (1)..(197): unsure at all Xaa locations
  Clone ID: MRT4577_17045C.1.pep
ILCRRLKTRRGNYPGNRLQLGPRNPVLFTSSERAFGPPQHPFLANPVNHRNIRILPPEQHATIMDFSRLYEVSNTVDEHRDMRLDIDSMTYEELLALEEQIGDVNTGLTKSHIVDKLRTSLYVPGISSMSDQPSKSSLENDAXCIICQEEYQAXDCVGTLDCGHRYHAECVKQWLMVKNLCPICKTTALSANRRQGQ

SEQ ID NO: 261894 - protein, 248 aa, Zea mays
  unsure (1)..(248): unsure at all Xaa locations
  Clone ID: MRT4577_170460C.1.pep
RPAGRKGFAVRHYAGEVAYDTSGFLEKNRDLLHMDSIQLLAKCKTSLPKMFASKMLVQPDDSMSVPYRSSAADSQKLSVAMKFKGQLFQLMQRLESTTPHFIRCIKPNNLQLPAIYEQGLVLQQLKCCGVLEVVRISRSGYPTRMTHQKFARXDVASQGPXXSVSVAILHQFNILPEMYQVXYTKLFFRTGQIGKLEDTRNRTLHGILRVQSCFRGHQARHHARERIRGVLALQTCNFSQDYLKYFTF

SEQ ID NO: 261895 - protein, 142 aa, Zea mays
  unsure (1)..(142): unsure at all Xaa locations
  Clone ID: MRT4577_170461C.1.pep
MPAAAFASAFASPPPPWAPRPPPRHASLRLPPPRSSSNNSGGGGGDKPTTSWVSPDWLTSLSRSVLGRGNDDSGIPVASAKLDDVQDLLGGALFLPLFKWFREEGPVYRLAAXPRDFVIVSDPAVAKHVLRGYGTRYEKGLV

SEQ ID NO: 261896 - protein, 214 aa, Zea mays
  unsure (1)..(214): unsure at all Xaa locations
  Clone ID: MRT4577_170462C.1.pep
GFLLLEDVASQDPLSVSVAILHQFNILPEMYQVGYTKLFFRTGQXFYLFNFLPMATLETKSIAFITCLXPFIVLDFYLYMYVLFYFCFKHLVKLILCYFVLRYWAXIGKLEDTRNRTLHGILRVQSCFRGHQARHHARERIRGVLALQTXFLPRLPEIFYLLSLLNFSSXSLLYGMDPPLTCXIRGEKARQXYSSLLRKHRAAVILQSNLRCWL

SEQ ID NO: 261897 - protein, 67 aa, Zea mays
  Clone ID: MRT4577_170463C.1.pep
VLLNSPFMLVRSLEGERTLTAQAIAHDQYYPSLVLKADADYADSLCLTADRDGLLSSGGTRLIGTVS

SEQ ID NO: 261898 - protein, 75 aa, Zea mays
  Clone ID: MRT4577_170464C.1.pep
MADVETTDDSMKLSIRCTFNDVHVNDMSLNDYLAVTAGKHATFLSHYAGRYSKKRLRKAQCAIDERLTNYLMMHG

SEQ ID NO: 261899 - protein, 55 aa, Zea mays
  Clone ID: MRT4577_170465C.1.pep
LNINEDTFQAILPLFSCCRPAIKELKKSHHVLSYIWLRFSCNLNRFNFVEEHHIK

SEQ ID NO: 261900 - protein, 144 aa, Zea mays
  unsure (1)..(144): unsure at all Xaa locations
  Clone ID: MRT4577_170466C.1.pep
GQVEGAFIQGVGFFPTGGAPPTSGGLVIPDGPWGDKIPPGDPLPKQFNVXLIKRARDQKGVLFFKASGEPPLFLNAPGPWPKRGAPKTPRKEFSVCPGPPKFPLPFKKDGPGPMPLVKKLFGLDFLERDLEKMSPAGPTTPAKK

SEQ ID NO: 261901 - protein, 345 aa, Zea mays
  Clone ID: MRT4577_170467C.1.pep
MLLTKPYLSNSLLPVPSPPPSGPTLSSNHASPLAAPTCRRSRLRISATSTAAPSPSSAAAATASLSRVDVLSEALPFIQRFKGKTVVVKYGGAAMKSPELQASVIRDLVLLSCVGLRPVLVHGGGPEINSWLLRVGVEPQFRDGLRVTDALTMEVVEMVLVGKVNKNLVSLINIAGGTAIGLCGKDARLITARPSPNAAALGFVGEVSRVDATVLHPIIAAGHIPVIATVAADETGQAYNINADTAAGEIAAAVGAEKLLLLTDVSGILADRNDPGSLVKVVDIAGVRKMVADGKVAGGMIPKVECCVHALAQGVHTASIIDGRVPHSLLLEILTDEGTGTMITG

SEQ ID NO: 261902 - protein, 46 aa, Zea mays
  Clone ID: MRT4577_170468C.1.pep
SSIRKRPILTINITQTNLHHRLNLILLLNTNLVLIYELSSITLNSF

SEQ ID NO: 261903 - protein, 49 aa, Zea mays
  Clone ID: MRT4577_170469C.1.pep
DHACAGPGNALTPRTLVSRPVKRPQRPGLCRPQGVVPLPLQRRRGLCGP

SEQ ID NO: 261904 - protein, 106 aa, Zea mays
  Clone ID: MRT4577_170470C.1.pep
PRLRPRVRASVRSAHRVARHLTFQWAYRCMEASGGCACAYRRRSLCSASALQRTGVEHAPAGCGHEQVASRECVRGSGGAEARHHGRCEEADGELVSADSVNYVGC

SEQ ID NO: 261905 - protein, 99 aa, Zea mays
  Clone ID: MRT4577_170471C.1.pep
PSDRERHVKTRALTEIHPKPHPEMWSSIIPNLDGHCRFHHAGLNTVADRNLISLQSYLLGCGLQRGTNCGRNWSDLRPLENQHTMVRYFAPAGHGYHEK

SEQ ID NO: 261906 - protein, 57 aa, Zea mays
  Clone ID: MRT4577_170472C.1.pep
MHGKPPHKKKKKKKKKKKKKKKKKKKKKKKKKKKKKKKKKKKIKKKKKKKKKAKAES

SEQ ID NO: 261907 - protein, 189 aa, Zea mays
  Clone ID: MRT4577_170473C.1.pep
MGKVRSFFCRARSGKRGGSRPGSSSSSLSSPCPSARRASPPAGDETERVFRKFDANGDGQISRSELAALFESVGHAATDDEVSRMMEEADADGDGYISLPEFAALMDSASGDADAVEEDLRHAFSVFDADGNGLITPAELARVLRGLGESASVAQCRRMIQGVDRNGDGLVSFDEFKLMMAGGFGRIGA

SEQ ID NO: 261908 - protein, 80 aa, Zea mays
  Clone ID: MRT4577_170474C.1.pep
MAAFCSLAVNGDGNGAAGGPVGSGVEVARARRMLHVVLVSPLIPGNTGSIARTCAASAVGLHLVGPLGYKVDDTKLKRAG

SEQ ID NO: 261909 - protein, 221 aa, Zea mays
  Clone ID: MRT4577_170475C.1.pep
SPATSTSIHSLSSPAPLPWARFGPSSPAPAAASAAAPGEQARPRRTPPRRARRRPRPHSRGGRRRRRQPTRDETERVFRKFDANGDGQISRSELAALFEGVGHAVTDDEVSRMMEEADADGDGCISLPEFAALMESASADAAAVEEDLRHAFMVFDADGNGLITPAELARVLRGLGESATVAQCRRMIQGVDRNGDGLVSFDEFKLMMAAGGGGGFGRIGA

SEQ ID NO: 261910 - protein, 56 aa, Zea mays
  Clone ID: MRT4577_170476C.1.pep
TAQANIRIFCLPTAVTHVKAFAPQEGVPLARPVRAPRSSGPLRISLLCGRRLACMS

SEQ ID NO: 261911 - protein, 111 aa, Zea mays
  Clone ID: MRT4577_170477C.1.pep
TLRSLLPIRLFLSTSINSVPYEDILSFSSTSAGPSLTYLRARCGEHRRACALRAPWARVLVILGVAAPLPLAPRPRPRQPSSIGPGARSAGPDGGPPGGAGGAPGSSLSRL

SEQ ID NO: 261912 - protein, 112 aa, Zea mays
  unsure (1)..(112): unsure at all Xaa locations
  Clone ID: MRT4577_170478C.1.pep
RGVLCPFGARAAVLFRSPLRVLXCSRLPALLARPLLASRGXLCWVXXPPPRXLFGRRSVPGFSAVLGPAAPVPAGGLARXVASARXRSLAPAAGRWPAAPPPPSGGPPQKVV

SEQ ID NO: 261913 - protein, 119 aa, Zea mays
  unsure (1)..(119): unsure at all Xaa locations
  Clone ID: MRT4577_170479C.1.pep
LPWHQLSPWQRGRKFRVAMQLKAILPMHEKTKRRXVAEPNAQDADDFXISDSQPTLDPAMNKGLLISPSQKXYIFGAMSSGSALTLTHNIRDMNIINXVGVQXICRYLTVMEQALVAIP

SEQ ID NO: 261914 - protein, 61 aa, Zea mays
  unsure (1)..(61): unsure at all Xaa locations
  Clone ID: MRT4577_17047C.1.pep
SGSCLPISTQHRPRXTCSGLXVRFLRLALXPWGQCQPPQVGATPKPQRRLCHSDLRLPKRG

SEQ ID NO: 261915 - protein, 62 aa, Zea mays
  Clone ID: MRT4577_170480C.1.pep
HRRPLHCLFILASCSARALQCNSVDRQQAIGVFRCVSRPFYSPCFKIACFIFCRLHQKNRCF

SEQ ID NO: 261916 - protein, 118 aa, Zea mays
  Clone ID: MRT4577_170481C.1.pep
GAPCGQFFPSGGLQGWGGLKKGGPSWRGSLPPGLKGVWFFFKKGPKVGCPAFPRGGDLCSKRGGPHCVKTFTQPVEKFFFFFFQRFFFGPNRGSSLPPKNCPSPPQRVFLLEALACYP

SEQ ID NO: 261917 - protein, 324 aa, Zea mays
  Clone ID: MRT4577_170482C.1.pep
MRPSSRAQPQMPPPARLTPARRLRVDVDRARRPRSRDPWPSPARSPASPARRGSLSPQRRVSPSQSPKQQQQSSFRKTSGFDSAGARTRIARRAAYNGIALSPDDEASTTFSDGGSSSSASSRWDFDTQLDPRTDRGLLERCGKLLSSIHAFTRGDASGADQQPSPVSVLDAAAFLADEDSPSALSASKRAIDFRSSSVGHPKPASAVSDPEHDEYVDPEASGCPDPDYAYVAELVRHLGGARARARDPAAAYRAAEQRRRERGGDPDTWHLRRLLCGAVTEALERQRSACPWEPRAWLRGAKLVGHVWAEVRRAGEPVAPCRV

SEQ ID NO: 261918 - protein, 53 aa, Zea mays
  Clone ID: MRT4577_170483C.1.pep
TSTKNCRKREPWVSIPRVAGPSPPRKGVFWPKWLKGFLLKLKQPQLWFQCCHV

SEQ ID NO: 261919 - protein, 61 aa, Zea mays
  Clone ID: MRT4577_170484C.1.pep
SDPEILLGGIIKPQVASQPQTGLHRLLPLTSDLRATPSHTTPVDSTTTLERCNEQAPRSHI

SEQ ID NO: 261920 - protein, 170 aa, Zea mays
  Clone ID: MRT4577_170485C.1.pep
MDGICPEISIGSKRKKQRKPKKKNKPSNSEGGPLARVRWFRVVLDEAQTIKNYRTQVSRACCGLRAQRRWCLSGTPIQNKIDDLYSYFCFLKYEPYSKFSNFKYMIKHQITRDSVRGYKKLQAILRIILLRRTKETLIDGEPILKLPPKTIQLNKIDFTQEERAFYLTLE

SEQ ID NO: 261921 - protein, 281 aa, Zea mays
  Clone ID: MRT4577_170486C.1.pep
MAPRSLLAVLAVAALAFLHAASAKSSWLDRRFTTDGTVRTGYDDSGQQVVMLRLDQHSGAAGFNSKEQYLYGEFSVEMKLIRGNSAGTVSCFYLSSGDGDGRDEIDMEFMGNSSGQPVVLNTNVWASGDGKKEHQFDLWFDPSADYHTYTIIWNPTNILFKVDDLFIRSFKRYADLPYPSSRPMTLHATLWDGSYWATEKGRVGIDWSDAPFVVSYRSYYASACVSGGACRAAGSGGWMNRQLDSAEWGTVRWAERNFMRYNYCQDGWRFPQGLPAECARH

SEQ ID NO: 261922 - protein, 73 aa, Zea mays
  unsure (1)..(73): unsure at all Xaa locations
  Clone ID: MRT4577_170487C.1.pep
MSDSQEHHFYLKADTTLDNTYPHETGTVHKNDFIPIKNRPFKVVEFPTXSKTGKQCHAKCHFVDIDICNGKKL

SEQ ID NO: 261923 - protein, 169 aa, Zea mays
  unsure (1)..(169): unsure at all Xaa locations
  Clone ID: MRT4577_170488C.1.pep
RLERTRIGMMDYGGSIVVTSXELHTYLTPQYRFVXVRSTLDDITAQIMXAKIAADXILASAYSPEMTLYGLERGLTNYAAVYCTGLLSSRLVLEIXACDQDVXGNXTSLWEDFSVEPGDDMRLFRXALLHGGLITTTXTYPRLXAVLTVILQGGLYIPHSDMRLAGFDT

SEQ ID NO: 261924 - protein, 101 aa, Zea mays
  unsure (1)..(101): unsure at all Xaa locations
  Clone ID: MRT4577_170489C.1.pep
SLEASGHESDSRAWSRRLESVLSRFLRLALVSCLPPPPPPLDRRSGHDERRDAERARXQEVLLRHAHARGPPXLPGGGGRSAPRPTASASGXXAAGRPAGG

SEQ ID NO: 261925 - protein, 88 aa, Zea mays
  Clone ID: MRT4577_17048C.1.pep
HAYGVRAARVGLAKEQHRSPCLQRLRLYEHEQTRGLYSIQIQCNMPTRADNATLGRQFRQAEIMPLKRLYRCPAGWSARWLPELRTSH

SEQ ID NO: 261926 - protein, 93 aa, Zea mays
  Clone ID: MRT4577_170490C.1.pep
PTVHTSKTWRLKRRGKNLSLGALTRNLFTKVAAAGRERPLDSDPTEVPPSAGQITGKFEKYVHQGAKPPGGKLAPQQGAGPLYAGPHPRAPLG

SEQ ID NO: 261927 - protein, 39 aa, Zea mays
  Clone ID: MRT4577_170491C.1.pep
NPQGSLNCVCANDPLLSSFISDIFLSLSFSEWFILCFCY

SEQ ID NO: 261928 - protein, 90 aa, Zea mays
  unsure (1)..(90): unsure at all Xaa locations
  Clone ID: MRT4577_170492C.1.pep
TDKQIKGGRKRKQEKHKKEQEKRRRSTTRLKDSEQPPGPKQTNQARRKKKLQKISEVEQINQDENXKQAQNTACTFPPPHKEAPKKSEGL

SEQ ID NO: 261929 - protein, 114 aa, Zea mays
  Clone ID: MRT4577_170493C.1.pep
RKKNPPCTGRRRAGSDLHCPLLRMLGVGDLCLSQLAEPMAATRLRGAQCDQTTFTENTGSSREEAFCCKKPGCSLLRTLIRPVRALLTLRQGRDPAQEAISMLTKAEAWLRVIH

SEQ ID NO: 261930 - protein, 157 aa, Zea mays
  unsure (1)..(157): unsure at all Xaa locations
  Clone ID: MRT4577_170494C.1.pep
WATKVTDXERLEAQIHALAKKAKSSPGTSSSSQNLSDVEVAVFGSRAHLEKQALATXFHLVVLLTAGPGIKDTQCGFKMFTRAAARKLFTNIRLKRWCFDVELVYLCKRLRIPMVEVSVNWTEIPGSKVRMTSIMHMVFELLLIKVGYGLGIWKIGS

SEQ ID NO: 261931 - protein, 114 aa, Zea mays
  Clone ID: MRT4577_170495C.1.pep
QAFFFFFFFFFSFFFFSFFFFFFIFFFFPRALVPWGSVPGTGGRGPGGGAVSPGYAVSGPNPPPPPSCGPVALRPERPASDLSGKTGGAPAGNPPSLAPVRPPPIRLPPTPGGR

SEQ ID NO: 261932 - protein, 350 aa, Zea mays
  Clone ID: MRT4577_170496C.1.pep
MAAAWPLSAIAGILPASLSLTLLLATLVSILVLGAAAFFFEHIRKIGCMHSLERSAVSDAFFEDPNSLKKVPCPSVLDPPEKYISLIVPAYNEEYRLPEALTETLNYLKRRSTADKSFSYEVLIVDDGSTDGTSKVAFSFVKQHKIDNVRVLLLGRNHGKGEAVRKGMLHSRGELLLMLDADGATKVTDLEKLEAQIHALAKKAKSSPGTSTSSSQNLSDVEVAVFGSRAHLEKQALATRKWYRNFLMKGFHLVVLLTAGPGIKDTQCGFKMFTRAAARKLFTNIRLKRWCFDVELVYLCKRLRIPMVEVSVNWTEIPGSKVRMTSIMHMVFELLLIKVGYGLGIWKIGS

SEQ ID NO: 261933 - protein, 99 aa, Zea mays
  Clone ID: MRT4577_170497C.1.pep
HSGIVTSTDDRTWAHGPTLTGGPTSTGGPTFTDAPKLTGDPKFTDARTSVDDRGSLPHTPIVCLYVSISRSHRKPREPSHPPTSSWCLLGSFEFRNILI

SEQ ID NO: 261934 - protein, 65 aa, Zea mays
  Clone ID: MRT4577_170498C.1.pep
LKTVGVAHAILERTLTHKDSASSTTTKSKFVLTNSLNSTIGTLHYISDLLEDATTESHDIELIFN

SEQ ID NO: 261935 - protein, 122 aa, Zea mays
  Clone ID: MRT4577_170499C.1.pep
FIKKKKPTFFKQPTPPRSRAAHPCPLLIAGGFPRRGEAGRKTKGRGSTHHAGASRDEEQLGDACFLRPARNGMSAQCPTIESYSLGRSTNHPPGQNTAGPRHRGNTPACRLLLETATEGRPP

SEQ ID NO: 261936 - protein, 176 aa, Zea mays
  Clone ID: MRT4577_17049C.1.pep
MVENGVEQPLLQGGGPPNNAGHAKPPPGARPPRRFRRCRTAPSTDAAQESPPQSQDQDPSLQRGTTQLAPPKELLRGARPSFRLVGVLLLAYLLAGTVAFYLAMDHMSGDRTGSRVVDALYFSVVTMTTVGYGDLVPSSDAAKLLACAFAFAGVALVGTFLSKAADYLVEEQEALL

SEQ ID NO: 261937 - protein, 56 aa, Zea mays
  Clone ID: MRT4577_1704C.1.pep
GGYRKRVWFTCPCKRQTHLEFSHPLCVFKPVDPSPVVLYNCVKALFGNQWLIIKRG

SEQ ID NO: 261938 - protein, 56 aa, Zea mays
  Clone ID: MRT4577_170500C.1.pep
TPFYPNLSKKSFFNPFLWLLISTGYPITSFFIIPFFLYFLTQFPHLVFIHLTLLSN

SEQ ID NO: 261939 - protein, 69 aa, Zea mays
  Clone ID: MRT4577_170501C.1.pep
HACSDSWSHFFGLYQDFGSGFNSIRISRLHKCQPYVHTSITYHYNHKNGDRIYGLLYRDFNMINFMLLL

SEQ ID NO: 261940 - protein, 55 aa, Zea mays
  unsure (1)..(55): unsure at all Xaa locations
  Clone ID: MRT4577_170502C.1.pep
PTINEPVENAYPSYGXEILDYKVITXDRXTEMSRNFALATFSCENSMLDAVENMN

SEQ ID NO: 261941 - protein, 141 aa, Zea mays
  Clone ID: MRT4577_170503C.1.pep
DRPYQPPPPAVSAATFASSSSAVPCCRACVPASRSAAERRPRRMQRPRRCRPAAPSPRAASHRSPRHRRRGEGAGSACAVLEPLRPDQLPHRRRRRETAVNKLGSCSAARTRLPSSKGGRKFHLYPLAPTPSKAKNHQPLL

SEQ ID NO: 261942 - protein, 66 aa, Zea mays
  Clone ID: MRT4577_170504C.1.pep
SVWESECRPISTVNTCSLLLTWHGLEVFDGSEEVWHGETNTDGTNFLETLDLVDDGDMRIRYKDGD

SEQ ID NO: 261943 - protein, 94 aa, Zea mays
  Clone ID: MRT4577_170505C.1.pep
IPGGGHSSGHGDWHFQGRSLHVPHQGAGAHRGGGYPSITVVNVTGGGATALRKGKNGWKPGTYTGFWAEPFWRFILVTLSVLKVSAKGCGEGGS

SEQ ID NO: 261944 - protein, 66 aa, Zea mays
  Clone ID: MRT4577_170506C.1.pep
NIHETTQDRKTILGTDYLHKVFPIGYDYTAGARRPGIVQTIRIIARRDSLVVGTTNINSNYKYHYY

SEQ ID NO: 261945 - protein, 110 aa, Zea mays
  Clone ID: MRT4577_170507C.1.pep
HPHSLISLALRLLLDPAKPGIAMSDSEEHHFESKADAGASKTYPQQALHRPHDRVGRIHQPPPIVLACTVYSTAPAVAFLVWGCSDTYPVWFFFTLSPSSREFVDDTCRP

SEQ ID NO: 261946 - protein, 63 aa, Zea mays
  Clone ID: MRT4577_170508C.1.pep
HTHKKKMMVTRSSQLAPPPGPISATPPPACSRSAPYCTRSTSPRSTTFTPTPLMIASCITCLH

SEQ ID NO: 261947 - protein, 62 aa, Zea mays
  Clone ID: MRT4577_170509C.1.pep
YKYPRTVPVRGQMNRAIAPEHVLSSVGSWWVDWVRARALPFLAASSAAFAASSSFGLALLGA

SEQ ID NO: 261948 - protein, 360 aa, Zea mays
  unsure (1)..(360): unsure at all Xaa locations
  Clone ID: MRT4577_17050C.1.pep
MVENGVEQPLLXAAALLITPGTRSRLRELGRXRFRRCRTAPSTDAAQESPPRSQQDPSLQRGTTQLAPPKELLRGARPSFRVVGVLLLAYLLAGTVAFYLAMDHMSGDRTGSRVVDALYFSVVTMTTVGYGDLVPSSDAAKLLACAFAFAGVALVGTFLSKAADYLVEKQEALLFRALHARNRKALRVVEANRVRYKLYTAAALLAAALASGTAFMVEVEGMRPVDAFYCVCATVTTLGYGDQSFSSGGXGRAFAAAWITVSTVVVALFFLYAAELGAERRQRALARWVLRRRTTCTDLEAADIFGTRRVGAADFVLYKLKELGKISQEEIAEFLEEFDELDADNSGTLSPHDLIVAQPG

SEQ ID NO: 261949 - protein, 42 aa, Zea mays
  unsure (1)..(42): unsure at all Xaa locations
  Clone ID: MRT4577_170510C.1.pep
RSDSALSFILPGPPLHRNYGTSSVPAXLLTHGAPLILLTCPV

SEQ ID NO: 261950 - protein, 44 aa, Zea mays
  Clone ID: MRT4577_170511C.1.pep
DFFAISGLAHSLEVQHRRRSNIYKPGGCSFYSLVSHTIISKTNI

SEQ ID NO: 261951 - protein, 188 aa, Zea mays
  Clone ID: MRT4577_170512C.1.pep
MNGTHPWASMSGGPCSNLGYARDMNGNVPISTTNSSGPSIGVSSLVTDANSSLSGGAQLQPSTSMNGDSLMRVPASPISFSSNNISGSSVIDGCIMQQSPPQEQVQKQRSSSVTSQPVIDAGGALHAQKKSRIDVCQGGITEQQLIQQLLHGQNSLHYQGPQNPQLQALMQHHKLAQLQQRQQQHPFS

SEQ ID NO: 261952 - protein, 78 aa, Zea mays
  Clone ID: MRT4577_170513C.1.pep
PLYCTALRPFFFFFFFTPPQLFGVGFYLFLLLNRNGKNSKFLTPAPPDKKIPLFPLLRSTRAWRKKKLPKPLQRKNLV

SEQ ID NO: 261953 - protein, 102 aa, Zea mays
  Clone ID: MRT4577_170514C.1.pep
NSVRELQGRVQKGAGGHSGGATSNRPEEKGQGHGQVAGPLKKPRPWHWHGEGGQGLRKARGGGNPCLGVGTGLGFWGPGFPGSKSPAFGMRREPISHFFFPP

SEQ ID NO: 261954 - protein, 65 aa, Zea mays
  Clone ID: MRT4577_170515C.1.pep
GCAHTYSSFNIFHPLHYMSNQQMSFIDHKCYPCSYNNVNKAPFNNMSACCNLPIFKDCLSCISCF

SEQ ID NO: 261955 - protein, 54 aa, Zea mays
  Clone ID: MRT4577_170516C.1.pep
KGVGRRSFLKQQPQGEPPALMAAPGAPHPPAMCGPQLQQPGPCPFKAAPGGVFF

SEQ ID NO: 261956 - protein, 73 aa, Zea mays
  Clone ID: MRT4577_170517C.1.pep
IYTRNKMNGTLTAVESFLTIHSGPEGLSIHDGTWKSAIYGFGDQSNLRKLRNVSNLKPVPLIGPKLKRRWPIS

SEQ ID NO: 261957 - protein, 57 aa, Zea mays
  Clone ID: MRT4577_170518C.1.pep
VHAPKILPGQRDPLGGGPPFFSFLAKSYLNASRKKMVRLIITILFKSHDAPMSRWGL

SEQ ID NO: 261958 - protein, 48 aa, Zea mays
  Clone ID: MRT4577_170519C.1.pep
VFSTVYALNIAMCSSSRPSFGMSPAMDAKGGQKAWIRVGLGFGITFWT

SEQ ID NO: 261959 - protein, 75 aa, Zea mays
  Clone ID: MRT4577_17051C.1.pep
PQEKRPKRFLDGSFKVAEMFKTMAFGGGKRACSGSIQAVKIGGPTLPRFVQKFEWTLKEGHQDKEDTNQVSTKRL

SEQ ID NO: 261960 - protein, 79 aa, Zea mays
  Clone ID: MRT4577_170520C.1.pep
HSSAHAFADAWARCEPAASNRSQRMGSKTDRPQPSCKPTVDLPPLQPERKMETIKTILIAALLVIAVSATAVLTYTDVD

SEQ ID NO: 261961 - protein, 162 aa, Zea mays
  unsure (1)..(162): unsure at all Xaa locations
  Clone ID: MRT4577_170521C.1.pep
ASTSVFGXKLREQVEERLEFYDKGVAPRKNLDVMKAAIDSMVNDTLMDDDGTADNEKADTSAKKSKKKKTKTETDGDAMDVDKPSNVADGEAELGTKKKKKKKHKLEEAHEENGAAHANGDAEETQTPKKKKKKSREISEEAEPKTATEGKKKKKKAVKADE

SEQ ID NO: 261962 - protein, 545 aa, Zea mays
  Clone ID: MRT4577_170522C.1.pep
MALYLLFESASGYGLFHAYGIDEIGQSVEAVRSSVLDLDRFGKAVKLTAFNPFSSAVDALNQCNAISEGIMTDELRSFLELNLPKPKEGKKAKYSLGVVEPKVGSHISEVTGIPCQSNEFVQELLRGVRLHFDRFINELKDSDLEKAQLGLGHSYSRAKVKFNVNRVDNMVIQAIFLLDTLDKDINSFSMRVREWFSWHFPELVKIVNDNYLYAKLAKFIVNKSDLTEKDIPALADIVGDEDKAKEIVEAAKASMGQDLSPVDLINVQQFAQRVMNLSEYRKNLYEYLVTKMNDIAPNLTSLIGEVVGARLISHAGSLSNLAKCAASTLQILGAEKALFRALKTRGNTPKYGLIFHSSFIGRASTKNKGRMARYLANKCSIASRIDCYSEASTSVFGQKLREQVEERLEFYDKGVAPRKNLDVMKAAIDSMVNGTSMDDDDIEKTDASPKKSKKKKTKTKADGDAMDVDKPSNVAGGEAEPGTEKKKKKKKHKLEEEAQEENGAADTTPKKKKKKSREASEEAEPKTATDGKKKKKKKAKAEDDE

SEQ ID NO: 261963 - protein, 97 aa, Zea mays
  Clone ID: MRT4577_170523C.1.pep
NAKVVAKKLGSKCKGDKTCIWVPKVILTNLVGPNKTWVYASWGSSWIIDSGCTNHMTGEKKTFTSYVKNKDSQDTIIFGDGNQGKVKGLGKIAITSE

SEQ ID NO: 261964 - protein, 569 aa, Zea mays
  Clone ID: MRT4577_170524C.1.pep
MALYLLFESASGYGLFHAYGIDEIGQSVEAVRSSVLDLDRFGKAVKLTAFNPFSSAVDALNQCNAISEGIMTDELRSFLELNLPKPKEGKKAKYSLGVVEPKVGSHISEVTGIPCQSNEFVQELLRGVRLHFDRFINELKDSDLEKAQLGLGHSYSRAKVKFNVNRVDNMVIQAIFLLDTLDKDINSFSMRVREWFSWHFPELVKIVNDNYLYAKLAKFIVNKSDLAEKDIPALADIVGDEDKAKEIVEAAKASMGQDLSPVDLINVQQFAQRVMNLSEYRKNLYEYLVTKMNDIAPNLTSLIGEVVGARLISHAGSLSNLAKCAASTLQILGAEKALFRALKTRGNTPKYGLIFHSSFIGRASTKNKGRMARYLANKCSIASRIDCYSEASTSVFGQKLREQVEERLEFYDKGVAPRKNLDVMKAAIDSMVNDTLMDDDGKADNEKADTSAKKSKKKKTKTETDGDAMDVDKPSNVADGEAELGTEKKKKKKKHKLEEAQEENGAAHANGDAEETQTPKKKKKKSREISEEAEPKTATEGKKKKNEEAEPKTATEGKKKKKKAVKADE

SEQ ID NO: 261965 - protein, 94 aa, Zea mays
  unsure (1)..(94): unsure at all Xaa locations
  Clone ID: MRT4577_170525C.1.pep
MEQADMPDVPRVKLGIQRLEVSKLAFGCMGLTGTYNTPLGDEAMADVFAHSFRRGITCLDTCYSYGPRTNXTLLGKALKHLPREQLHVATKFVI

SEQ ID NO: 261966 - protein, 545 aa, Zea mays
  unsure (1)..(545): unsure at all Xaa locations
  Clone ID: MRT4577_170526C.1.pep
MALYLLFESASGYGLFHAYGIDEIGQSVEAVRSSVLDLDRFGKAVKLTAFNPFSSAVDALNQCNAISEGIMTDELRSFLELNLPKPKEGKKAKYSLGVVEPKVGSHISEVTGIPCQSNEFVQELLRGVRLHFDRFINELKDSDLEKAQLGLGHSYSRAKVKFNVNRVDNMVIQAIFLLDTLDKDINSFSMRVREWFSWHFPELVKIVNDNYLYAKLXKFIVNKSDLTEKDIPALADIVGDEDKAKEIVEAAKASMGQDLSPVDLINVQQFAQRVMNLSEYRKNLYEYLVTKMNDIAPNLTSLIGEVVGARLISHAGSLSNLAKCAASTLQILGAEKALFRALKTRGNTPKYGLIFHSSFIGRASTKNKGRMARYLANKCSIASRIDCYSEASTSVFGQKLREQVEERLEFYDKGVAPRKNLDVMKAAIDSMVNGTSMDDDDIEKTDASPKKSKKKKTKTKADGDAMDVDKPSNVAGGEAEPGTEKKKKKKKHKLEEEAQEENGAADTTPKKKKKKSREASEEAEPKTATDGKKKKKKKAKAEDDE

SEQ ID NO: 261967 - protein, 48 aa, Zea mays
  Clone ID: MRT4577_170527C.1.pep
STHVYPTLLIALICAFMSITFHVKKPARSRAPVSIAKPLISFAQSKLK

SEQ ID NO: 261968 - protein, 412 aa, Zea mays
  Clone ID: MRT4577_170528C.1.pep
MNELCDLEVHINGHHTLHLHQSVMCAFSGRLRTLVKQEKKKKGGGRKEAVSINLAGGFPGGADGFELVARFCYNDGRVLLCPSNLPLLHCAAVSLEMTEEVCACNLLAQAEAFVNGLYYWTWADVLAAVRSCEPFAAAADASGLLDRLISALFSKITGATPGPGPGTPNRSSSSCSSSPDTAGLRRSSSSANKTPESMRPCAGREWWFDDMTSLSPPTVEKMMRVLGCYGVENKNLILTRFLLHYLRAATRRPPALEREGAALAGLADTAVHGVALVGGTAFSCRGLFWVLRIVSAVGLSRECRHKLERLMGLMLDQATLDDLLVSGDDGGGVYDVNLVMRLVRVFVASEEEADAPSERMRKVGRLVDKYLGEISPDQGLKVSKFLAVAESLPDSARDCYDGVYRALDIYLE

SEQ ID NO: 261969 - protein, 117 aa, Zea mays
  Clone ID: MRT4577_170529C.1.pep
VTFAAPRVGNQAFCDELVAGQRHVSVQRVIVDRDVVPTLPPTFFGYADAGTNVRLLSSGGSGRFPLPFLTLLEPLRFHSIKQYLRLLDPAPAPPQARAPVPADHLVPVPEAELDNMI

SEQ ID NO: 261970 - protein, 108 aa, Zea mays
  unsure (1)..(108): unsure at all Xaa locations
  Clone ID: MRT4577_17052C.1.pep
RRXRXLAXXRXPASRRPXKRPPPLPDXTTPXLAXXRRVPRSXXAPXXPXXPPRKVGVXLGSKWRXRRXGSKAWSLDERPXXGPPSHVGTCXRRRXRXLGRGRGAXXMP

SEQ ID NO: 261971 - protein, 55 aa, Zea mays
  Clone ID: MRT4577_170530C.1.pep
FQNQHGVVRTVTINADGVNRNFYPGDKLPLWHDELEPQNSLLDILAAGNPDPMVQ

SEQ ID NO: 261972 - protein, 245 aa, Zea mays
  unsure (1)..(245): unsure at all Xaa locations
  Clone ID: MRT4577_170531C.1.pep
MDVSHAGSSVAGEAPTTGEHRMGTTIVGVCYEGGVVLGADSRTSTGMYVANRASDKITQLTDNVYVCRSGSAADTQVISDYVRYFLHQHTIQLGQPATVKVAANLIRLLAYQNKNMLQAGMIVGGWDKYEGGQIFSVPLGGTILKQPFAIGGSGSXSYLYALLDHEWKEGMSQEEAEKFVVKVVSLAMARDGASGGVVRTVTINADGVKRNFYPGDKLPLWHDELEPQNSLLDILAAGNPDPMVQ

SEQ ID NO: 261973 - protein, 45 aa, Zea mays
  Clone ID: MRT4577_170532C.1.pep
EEGGWTLYKLNFRAYPMFLAYNRSTKLGTLICFAHARTVRPKSAD

SEQ ID NO: 261974 - protein, 252 aa, Zea mays
  Clone ID: MRT4577_170533C.1.pep
MNQLIQQHCVLHHLIRCNKFCFLVLRYPESICLICVLITKRWCTSSHVRQGRYHVVVTAERARSNEWFVLVSESCIPIFDFNTTYRYFRNSNQSFLMAFDDPGPYGRGRYNWNMTPEVELDQWRKGSQWFEVHRELAIEIVKDTVYYPKFKEFCRPHCYVDEHYFPTMLTIEAPNRLANRSVTWVDWSRGGAHPATFGRRDITLEFLRRVREGRTCLHNNQNSTMCFLFARKFAPSTLEPLLELAPTVLGFG

SEQ ID NO: 261975 - protein, 491 aa, Zea mays
  unsure (1)..(491): unsure at all Xaa locations
  Clone ID: MRT4577_170534C.1.pep
MDASHTGSSAAAGDAPTTGEHRMGTTIVGVCYEGGVVLGADSRTSTGMYVANRASDKITQLTDNVYVCRSGSAADTQVISDYVRYFLHQHTIRDGQRSTGFSTPSRPGSFFLVREAKRYRNTIRRSPESRPPPLPLCLTSPTRVFAAADLAVPAMDTSGSSAAAGDAPTTGEHRMGTTIVGVCYEGGVVLGADSRTSTGMYVANRASDKITQLTDNVYVCRSGSXCCCLLMLLLYYDVWXNFLLTLPFHKLLMNIPCRYXSVKRYMSXVILIAVFMLPRLILSLLESNSSFAWCQRWHIHFCKFQIHMQNSCYFNLSQAADTQVISDYVRYFLHQHTIQLGQPATVKVAANLIRLLAYQNKNMLQAGMIVGGWDKYEGGQIFSVPLGGTILKQPFAIGGSGSSYLYALLDHEWKEGMSQEEAEKFVVKVVSLAMARDGASGGVVRTVTINADGVKRNFYPGDKLPLWHDELEPQNSLLDILAAGNPDPMVQ

SEQ ID NO: 261976 - protein, 163 aa, Zea mays
  unsure (1)..(163): unsure at all Xaa locations
  Clone ID: MRT4577_170535C.1.pep
MLNALAVSHATDVKGTIFFSQGCYGPTTVXTASISXLLPGXVLLHCXAALLHHHRSGLAVLGPRSDDSSNACVGKGKCKHRQHDHRHAGDLVNVTSXNNXVGNGNITDRQIPLAVPQSIIDRLDDDHVDPQDLGEXNLNLSKSTGNGAXMMHCGIIGLPGYRA

SEQ ID NO: 261977 - protein, 92 aa, Zea mays
  unsure (1)..(92): unsure at all Xaa locations
  Clone ID: MRT4577_170536C.1.pep
PNFVGGGGXIXXHLHSYFXIYNKLHPXCLVFRFLFSSLCSGDVSLLCVLGSSWLHLILAVRASXLVTFCVSVSFLVCFFLRACALLLGRLCF

SEQ ID NO: 261978 - protein, 66 aa, Zea mays
  unsure (1)..(66): unsure at all Xaa locations
  Clone ID: MRT4577_170537C.1.pep
MAPKKDKAPPPSSKPAKSGGGKQKKKKWSKGKLXDKXXKGVLXXXXTYYNLLSEGPKHKQITPSMF

SEQ ID NO: 261979 - protein, 84 aa, Zea mays
  unsure (1)..(84): unsure at all Xaa locations
  Clone ID: MRT4577_170538C.1.pep
AVQKIVFMLHXKKWPNSLVLKSFTFXSKTNWHTSHXMVNLSVKFSKKLQSLDKAPPXRNMIXNVVCQIGNKPLGDAVSNLMSAP

SEQ ID NO: 261980 - protein, 68 aa, Zea mays
  unsure (1)..(68): unsure at all Xaa locations
  Clone ID: MRT4577_170539C.1.pep
FSLFILXKKKKKKKKKKKKKKKKLKKKKKKKKKKKKKKKKKKGGAVLGDPSLLPRACNVIVFFWGPLN

SEQ ID NO: 261981 - protein, 90 aa, Zea mays
  Clone ID: MRT4577_17053C.1.pep
QEHIGAESQVPKQDNINFLAGTNLGFTCSNHYFLTFYRFRNKKKGNFFGNHNLSHLANFQIKGFFFFLSLLEPFDKRVQSFYKKLAGLWG

SEQ ID NO: 261982 - protein, 120 aa, Zea mays
  Clone ID: MRT4577_170540C.1.pep
RKITRDSQEQRKQRFETTNKVEFCLQSEYPPSLWTISSKYSFNWLTTQNYITGHSGPLSFTITVRARSLCLGPIVFMSSDVACICHWMPDIPPFLRFGLPSSQKHHELEVEDHSARIPWS

SEQ ID NO: 261983 - protein, 451 aa, Zea mays
  Clone ID: MRT4577_170541C.1.pep
HRVHRALALAAALGPATARAQLRRDHQAPPGPRPHSVTITEFGAVGDGRTLNTVPFQNAVFYVRSFADKGGAQLYVPRGRWLTGSFNLTSHLTLYLEEGAVIVGAKDSSQWLIVEPLPSYGQGLDLPGPRHQSLISGYNLTDVVITGNNGVIDGQGLVWWQWLRSHELNHSRPNLLEFLYSEDIVISNLTFLNSPAWSIHPVYCSNVKVHNVTIKTSLDAPLTDGIVPDSCSNLCIEDSTISVSHEAISLKSGWDRYGISFGRPTSDIRISRVDLLSSSGAALAFGSEMSGGISDIHVNHLRIHDSSKGISFKTSPGRGGYIEDVVISEVQMENVHVGIEFTGNCSTHPDDSFDPSDLPAIDHVTMKNMAGTNISVAGVLSGIEGAPFTAICLSNLNFSMAAGSGPSYWSCSDVSGYSEAVFPEPCTELRDPSSSSSVCYSLASYSAIETA

SEQ ID NO: 261984 - protein, 87 aa, Zea mays
  Clone ID: MRT4577_170542C.1.pep
HNEDPIRPPCVQSRLHAGKHVSRAFFQYLKPTVIDEARTGTYLQLFHPEPLIPANQDAHHIFVLDLYTNHMVIVLLRPDRILMLVPN

SEQ ID NO: 261985 - protein, 156 aa, Zea mays
  Clone ID: MRT4577_170543C.1.pep
MAAAGAALLRSVATKMARAPPRLPSALERHRRLSTSSRFSTSTGSTPQPANQGPQTHNQEVPSSLWYRAIVAFNEAASVVTFFLLGGIAFMHFSVSPALDRMEADLDAQRKSWATIREEIKKSHERTRAILVFNKESQIEATDVFEGKRITGIGTK

SEQ ID NO: 261986 - protein, 143 aa, Zea mays
  unsure (1)..(143): unsure at all Xaa locations
  Clone ID: MRT4577_170544C.1.pep
REAEMPGVDVXKKESRESSTIIETPALVIVALVAYVKTSRGLRTLNSDWAQHXLTNXVRRWYYKNWCKSKKKAFTKYALKYENDAWQEEIQLQLEKMKKYASVLRVIVDTQIRKMKGLKHKKAHLIEIQANGGTIVDKGDSRF

SEQ ID NO: 261987 - protein, 175 aa, Zea mays
  Clone ID: MRT4577_170545C.1.pep
GGALQKVPVPVVLSPIARFGVLEMVAPFVDPDIWGVSSLPPKVATKLRIQWEKFVQARQFWNGLDLGVLPVEVTKMVSLLKTAGNNGLLTSQSVGTAYKLLWLSSYQMHRPAMGSPGRVGSPFVPVNKQLPLQQTTIVPPAGPLCICREIFNFYKLKLVVFSASLFVFVLGGAPG

SEQ ID NO: 261988 - protein, 200 aa, Zea mays
  unsure (1)..(200): unsure at all Xaa locations
  Clone ID: MRT4577_170546C.1.pep
LTPPPPTXVPNAAAAHQSPASSVRPEDQNSKPPVQPSRAPRPRSSTPRTTAPTRQLASQLLACSNSHHQSSQRTGGNRGIPTHGLPAAVPHIHSSPGVRRPAARVQDRPSPAAGRPRPGSRQPASRPRPRLQATATPPAVSQVRRRCRCLRRYRLRRAHSPQRTVTMTQALGQQPHPLLYRFRQXDVSSSPETTNSDTAR

SEQ ID NO: 261989 - protein, 81 aa, Zea mays
  Clone ID: MRT4577_170547C.1.pep
MTQGLVRKNIWVFRGGKIPRGWPGYYKAQAEGAPQKRGFFLNKQGWGEKNFNPFWGMSPQFIKAGPLGTGGPLGYIENFVF

SEQ ID NO: 261990 - protein, 303 aa, Zea mays
  Clone ID: MRT4577_170548C.1.pep
MARHLAPSSGSLHRLLASCHYPPTSQAPPPRPLLLPKTRSAAMQLPRRGRRDVVAAAAASAPSPSSPGTEVAVWGKVSAVLFDMDGVLCNSEEPSRQAGVDVFAEMGVEVAVDDFVPFMGTGEANFLGGVARAKGVKDFNPESAKKRFFEIYLDKYAKPNSGIGFPGALELILECKNSGLKVAVASSADRIKVDANLAAAGLSVFLFDAIVSADAFEKLKPAPDIFLAASKSLGVDTNECIVIEDALAGVQAANAAEMRCIAVTTTLEEIALRQGSPSFIRKNIGDISINDILYGGSNARHSM

SEQ ID NO: 261991 - protein, 167 aa, Zea mays
  Clone ID: MRT4577_170549C.1.pep
PRGRPGCPEHDTRTPPPGTTTNRPIEAGRQSMDGQGNSGSAGASDCDAVARAFVDYYYRTFDASRAALAVLYGQTSMLSFEGHAVAGAEEIGRKLAQLPLEQCRHAVCTLDSQPSPSFPGSVLVFVSGTLQLAGEEHQLRFSQMFQLVPNEQGSFFVQNDIFRLNYG

SEQ ID NO: 261992 - protein, 199 aa, Zea mays
  unsure (1)..(199): unsure at all Xaa locations
  Clone ID: MRT4577_17054C.1.pep
MGARCRSFSALLLLLQVSSWLCQELEPESCSPGFSSEVYTFPVPERHLERGHVLGRVRFEGCTGRPRTAFFSEDSRFKVATDGTITVKRHLKLHKLETSFLVRARDSSHRELSTKVTLKSMGHHHHRHHHRDPASESNPELLMFPSVYPGLRRQKRDXVIPPISCPENEKGEFPKNLGQIXSNRDKETKGFYSITGQGA

SEQ ID NO: 261993 - protein, 58 aa, Zea mays
  Clone ID: MRT4577_170550C.1.pep
LYKESCFQRKVKWGYGEISRHYGLDCLEPWSGNLLSGNFQIQRNPELKYGQSCSLSLF

SEQ ID NO: 261994 - protein, 234 aa, Zea mays
  unsure (1)..(234): unsure at all Xaa locations
  Clone ID: MRT4577_170551C.1.pep
MSATQLLRRSRKLQSLQNAVGCENFFLFRHFSSGSGSFIAKENGVGKRTRGTRFSQQYQPTKEVEPFSLGVNGNCTWRKASNSLTPSAASWLNGSFSCGQVVSARTFSSSADLPPHQEIGMPSLSPTMTEGNIAKWLKKEGDKVSPGEVLCEVETDKATVEMECMEEGYLAKIIHGDGAKEIKVGEVIAITVEEEGDIEKFKDYKPSSSAEPVAPAESKLQPETSQXKVEEKSL

SEQ ID NO: 261995 - protein, 62 aa, Zea mays
  Clone ID: MRT4577_170552C.1.pep
SLLLLPPREGHAAYRRATTAVLATVTAESDVPVDAAHCVRCNSAAAGPTDCSHDYYRMTTTR

SEQ ID NO: 261996 - protein, 164 aa, Zea mays
  unsure (1)..(164): unsure at all Xaa locations
  Clone ID: MRT4577_170553C.1.pep
ACVSGRLYRIPLRRLAHHEPHSTDAKRDPGGQAPTVCLHXAESATDDTLRRADXARDLEHEIALMQCEGHLVVQQGPPVQHRAQVDDLYLPERSQSIPHAMACRGVCYLDERSPLAPHLRVSTWPNNFKARTYPMYIGRTDPSQYIMRYQVSHVLSGGEDSTMV

SEQ ID NO: 261997 - protein, 128 aa, Zea mays
  Clone ID: MRT4577_170554C.1.pep
VALEKKKKKKKKKKKKKKKKKKKKKKKKKNCTCPDVQLERAKYLNILHCAARSILKAKGHTYLIRNQIKSQWPKNNKDWESENPAKTKLNCLQYHSPFPRCGKKEKARTRLPSLTVPKSERETHMPCT

SEQ ID NO: 261998 - protein, 74 aa, Zea mays
  Clone ID: MRT4577_170555C.1.pep
NKTEGRGGHEAKPVTCSWDTKQISLDQGFPYAQDIQGCHVSSNLHPLRLMTTYESRQKLMPDPTPKQQQLLKHV

SEQ ID NO: 261999 - protein, 261 aa, Zea mays
  unsure (1)..(261): unsure at all Xaa locations
  Clone ID: MRT4577_170556C.1.pep
DPRGLSGDAXRALLLLLDILRTAYAHRGSFLVGTINSLAAVVKIRPIYYDRVLPVLLDFDPGLETAKGAHSASLRYAVRAAFLGFLRSPHQAMIESKDILVRRLRVLSPGEAMEQNIRQAEKMSRNIERASRASKDESTSWEMPYGDINRKKPAVRSSDTFTTSDGIAKRARFDMSATSNLPVLGLSDYSDMQADNDASVGHSSDPAILNNEVSPVEKMIEMIGALLAEGERGAESLGILVSTVEADVMADIVIETMXHLP

SEQ ID NO: 262000 - protein, 108 aa, Zea mays
  Clone ID: MRT4577_170557C.1.pep
GTAKSPKGGGWKMLSIQIVQSTREDEDLKHESMSETVEMSDMSCRHFIFYPLMYGFFLSFAYFVPQRRRRKEPRRSCLVISSSLSNIHTRCVSQRRRQLVHIAAFFLV

SEQ ID NO: 262001 - protein, 78 aa, Zea mays
  Clone ID: MRT4577_170558C.1.pep
KKKKKKKKKTITKYKNKGVGEQLLVRRTASVVLPDSGYRTAPFLGLFFMWGDLTSVAVWRLAIVTTSYLLGRTNFSVL

SEQ ID NO: 262002 - protein, 82 aa, Zea mays
  Clone ID: MRT4577_170559C.1.pep
GTGGDNLGAHTVGVHVSLVAMCSHRLHVRHAVCISQSSPQLSSTRIELMHLVSFITGSIRYRSWRSRAGSLASVTGLSYSTS

SEQ ID NO: 262003 - protein, 636 aa, Zea mays
  Clone ID: MRT4577_17055C.1.pep
MMTRCGVQLLVARGISSSPCLSRRINQTESEIVRMFHPPIRQSEEAIATIVPRYTYSMRVLDERFIRILKIFKWGPDAEKALEVLMLRVDHWLVREVMKTDVGVNVKMQFFRWAAKRRNYEHDTSTYMALIHCLEVVEQYGEMWKMIQEMVRNPICVVTPTELSDVVRKLGNAKMVSKAIAIFYQIKTRKCQPTAQAYNSMIIMLMHEGQYEKVHQLYNEMSTEGHCFPDTMTYSALISAFCKLGRRDSAIQLLNEMKEIGMQPTTKIYTMLIALFFKFNDAHGALSLFEEMRHQYCRPDVFTYTELIRGLGKAGRIDEAYHFFCEMQREGCRPDTVFMNNMINFLGKAGRLNDATKLFQEMETLRCIPSVVTYNTIIKALFESKSRASEVPSWFERMKASGISPSSFTYSILIDGFCKTNRMEKAMMLLEEMDEKGFPPCPAAYCSLIDALGKAKRYDLACELFQELKENCGSSSARVYAVMIKHLGKAGRLDDAINMFDEMNKLGCAPDVYAYNALMSGLARTGMIDEALSTMRRMQEHGCIPDINSYNIILNGLAKTGGPHRAMEMLSNMKQSTVRPDVVSYNTVLGALSHAGMFEEASKLMKEMNTLGFEYDLITYSSILEAIGKVDHECDP

SEQ ID NO: 262004 - protein, 53 aa, Zea mays
  Clone ID: MRT4577_170560C.1.pep
QHLTRLHGYTGKIVWPMTRCCEADLDDPAVLKRAGRSGAPPQSVMVQHPAVWR

SEQ ID NO: 262005 - protein, 69 aa, Zea mays
  Clone ID: MRT4577_170561C.1.pep
GRTDWRTSMSAYNPFRSEKCGYDLLGIVPIAEHSLRKLLHEDRGNNALFSYSIEKILCVSNEHLATKTG

SEQ ID NO: 262006 - protein, 140 aa, Zea mays
  Clone ID: MRT4577_170562C.1.pep
PPPGSGLPSGPLGVEPVLSPPPPVPSFHPGPPPPLNPSGPGWPKAPPPFFPSNSGPGYSNIGFIFYKKPSPGSLGPLVVSWFFPGGRLPRLFPFVGLRLTLPIDLGPIRGSVRFWFRSWSPFFWGPLRFCVVWVLVGFCL

SEQ ID NO: 262007 - protein, 149 aa, Zea mays
  Clone ID: MRT4577_170563C.1.pep
MAGSKDHTDISPDNILKPTIESLTVDEQQQYEDYMRQAKEKFLSQYTVDRHQKVVKHGETDVASLLSSLHVPNYIGDKWGFTAPTIIWYADELISRANTTTAVPAWQIGPWTWSDRPSFCPDSPALTQTIRLSLPDSPGPHQRYRVAPQ

SEQ ID NO: 262008 - protein, 67 aa, Zea mays
  Clone ID: MRT4577_170564C.1.pep
NSHRRHRREHSYLPRPQRNPSPTYHRHLKIEMEMNRILFSVLVVISVSATELLASTDAASAYSPTVS

SEQ ID NO: 262009 - protein, 76 aa, Zea mays
  Clone ID: MRT4577_170565C.1.pep
LLLFNRSHKGTSKKKQGVCTSRIITFFLATSNMKWLITYTNLGRLQHPKSGLSPTLELLCKHQAILLANPRSAQTF

SEQ ID NO: 262010 - protein, 80 aa, Zea mays
  Clone ID: MRT4577_170566C.1.pep
RYNHIGEITSLPGGINTITQLVLSIFGQSEHGFARSYYYNKTEKIVEKNAGRAYAMLRSAYIINGCGPGVLNLLKHCTKI

SEQ ID NO: 262011 - protein, 255 aa, Zea mays
  Clone ID: MRT4577_170567C.1.pep
MATAAVTMTMATHNPRARAPLRVCAAWDMNPGAATVATPKPSKAKAKPPPPPATTTPARPPPLTHADLFARSSEAQGGVKKSTYMGFEKWWLPPAPVVKKPRSLYSAVSLAYLGDCIYELYARRHFFFPPLSINEYNKRVMDVVKCESQDLLLNKLLGEDFLTEEERDILRWGRNIVSSKTRTRKRAGIAVYNRASSLETLIGYLYLTNFKRLEQLMFQLGFTSGASSQHIADELRSSFQKTTPASATPPQPATQ

SEQ ID NO: 262012 - protein, 65 aa, Zea mays
  Clone ID: MRT4577_170568C.1.pep
DWVPRGRPGSSPQTSTTITPFLNNFLPTTKQSSQWLATVAALVPLLATAALAALALAAANKQLDL

SEQ ID NO: 262013 - protein, 148 aa, Zea mays
  Clone ID: MRT4577_170569C.1.pep
NLVLFILKMKSVRFPNFFCHSKAFALHALQPPENFFTAKGFSSTEHPSRIWALQIDDIPVHSSVLNADCNCKQKRSLEGVRRQHLRPLVAPAPARRQGRLEEAGRAGPGQRRRRLPGAATASGGGGGGGVAPYGQRPRDVLDGLGGGG

SEQ ID NO: 262014 - protein, 74 aa, Zea mays
  unsure (1)..(74): unsure at all Xaa locations
  Clone ID: MRT4577_17056C.1.pep
MGQSSVLAINHHTLSGLIFSSIGQXLAHFPTPPPVTSQFCLWLVKWHLDLFLVFTCGQIAFKLRAEVYFEKCTG

SEQ ID NO: 262015 - protein, 76 aa, Zea mays
  Clone ID: MRT4577_170570C.1.pep
MSAAPFFWRAPLKYCRWAARERPALFWSVIIGAAGPVAMPIVPPIRHYFGDIDAPPVPVTYPIPNTPRKQPTGYDD

SEQ ID NO: 262016 - protein, 80 aa, Zea mays
  Clone ID: MRT4577_170571C.1.pep
VDECVTVSEPGGHMLESAVRSDSPVSSDMVIRLWYDSTSGIVFKVHLTRIRWYAWFSWKSCAFLYRLNDVVDIQDHVSEQ

SEQ ID NO: 262017 - protein, 79 aa, Zea mays
  unsure (1)..(79): unsure at all Xaa locations
  Clone ID: MRT4577_170572C.1.pep
ALPPPLRGCPPPAQVLQPRWKKPQLLFQLPPGLFFLLAPQLXFQKFKFQINGPPRLGKGGQEVLFGNCSPGQAEMFFLE

SEQ ID NO: 262018 - protein, 189 aa, Zea mays
  Clone ID: MRT4577_170573C.1.pep
MLDKEDRTRMVPKSSSQTKTLLAAMEEERASTANRRFLCKDDASSVSNPSFRVYYGVASAGSVPFMWESAPGTPKHAMSSATLPPLTPPPSYYKGAAKTKFAKSQSSKKLLSSKPPSSFVQSILPKLRRSHTMPVPSRSPSAPAPAPPRESAQVQCARSRGNRLLLASPRSSFSSNSRGDDDNDDEDAG

SEQ ID NO: 262019 - protein, 100 aa, Zea mays
  unsure (1)..(100): unsure at all Xaa locations
  Clone ID: MRT4577_170574C.1.pep
LVRFWAWVGLKVQRHVILPRLKVGSDRSRSSRQPHAVRAAPGPQSPQRPLEPPXRPPTWDAXXPARVTTRRGPEPMAKHSGHLNAPAGVTSSRLEPNSEL

SEQ ID NO: 262020 - protein, 260 aa, Zea mays
  unsure (1)..(260): unsure at all Xaa locations
  Clone ID: MRT4577_170575C.1.pep
MGRSPCCEKAHTNRGAWTKEEDERLVAYIRAHGEGCWRSLPKAAGLLRCGKSCRLRWINYLRPDLKRGNFTADEDDLIVKLHSLLGNKYVRDASAAALLRTVVHCTRTCLPLEVXGWLVACLAFVGLDATQPNQAERTSGPIASALCRWSLIAARLPGRTDNEIKNYWNTHVRRKLLGRGIDPVTHRPIAADAVTVTTVSFQPSPSAAAAAAAEAEATAAKAPRCPDLNLDLCISPPCQSGEEEEVDLKPSAAVVKREVL

SEQ ID NO: 262021 - protein, 91 aa, Zea mays
  unsure (1)..(91): unsure at all Xaa locations
  Clone ID: MRT4577_170576C.1.pep
SPQVQQLLLAKDAAYSQNQEFLPVLLLAALNYDAYKQQQLGLPFKQSYDVYPQXFVTFNQLPAWNYQVYVQAXQLLPFRQLNDGSPDAFLT

SEQ ID NO: 262022 - protein, 67 aa, Zea mays
  Clone ID: MRT4577_170577C.1.pep
GLPNEPARGPGNGKFPPENEAAGKTLNGHGLHENAAKEAHAAKLTNLTARIGKSRPRGRPRGRDQGV

SEQ ID NO: 262023 - protein, 165 aa, Zea mays
  Clone ID: MRT4577_170578C.1.pep
PPPFLNPNRKKKPPQKKGVSLPQSSQAWPPPRLRRWVPKWQRGPQCLAALKGGSAPKTSTPGSPSFCRARGFFPHFPAFRACFSRPRTLWGGSNLPGAFFGPLLFLGGNFGAQMGFYPVFSRLTPLPWVHGLVFSPPFGGFFFPFYFGFYFFRGDSWGGSGHKMF

SEQ ID NO: 262024 - protein, 122 aa, Zea mays
  unsure (1)..(122): unsure at all Xaa locations
  Clone ID: MRT4577_170579C.1.pep
RERRTRNACNLYKPPKRTPTTPNLTSFEAIILRLRALFPFEANPAHAFITPEGSLAPNHNKLQSLVPVXDRXFEHANLHVYRLPLALLTSALQQTVPQELQQSSDHVNLQTVASQQRSQYLP

SEQ ID NO: 262025 - protein, 62 aa, Zea mays
  Clone ID: MRT4577_17057C.1.pep
MQISVMRACGHWQEDSCGRKRADEHDHHGCGHHGKGGRVLGYHLCRPIGGGRLDERCVVITI

SEQ ID NO: 262026 - protein, 169 aa, Zea mays
  unsure (1)..(169): unsure at all Xaa locations
  Clone ID: MRT4577_170580C.1.pep
RTHHVRRSNDRTTRXTKXGARRAPRALXGSATNAXXXPQXXRAPRARTPQXRPPXTXRGXEQGAXQANTQQQAXAASXXQQPXAQXQQQAXPXRTRQATTTQQQQQTQPARSHXARGNPAAXXQEQXXATNPPAXANGXANQQQQQXQQXGPTRRQPARGNPAAHGQQQ

SEQ ID NO: 262027 - protein, 45 aa, Zea mays
  Clone ID: MRT4577_170581C.1.pep
RQLHGLSWGDFSGLLTSIKGYDQVHYQDNIFDFSTAYMYRCYAWG

SEQ ID NO: 262028 - protein, 82 aa, Zea mays
  Clone ID: MRT4577_170582C.1.pep
KERRHATRCHGCPFSTNFNGDGEQLGGNEWKHHMNHSAHDLTQLAHQQQQRDLGNQLLAGLIAGNSFNYLQYDWKPSQQSEL

SEQ ID NO: 262029 - protein, 151 aa, Zea mays
  Clone ID: MRT4577_170583C.1.pep
APGQKGGYIYMRAYPTMVYNCKTSGGDHPKKQGHWTGWGPQKGMGLKGNSFKGKKELGNNFKIPPNLAPFKSPKLSRPGRGSLKKEKKPFAKTSSRKRMRRKVTAHSLIWNKKGKNWARVPTLQHKTIIGKDPPLPMVSVGEMQTCFMHTF

SEQ ID NO: 262030 - protein, 175 aa, Zea mays
  unsure (1)..(175): unsure at all Xaa locations
  Clone ID: MRT4577_170584C.1.pep
IPCFSPRYAIRNLPEGCFATLPSVPSNGVVGTDLRCRRRRRRHGRAGRGRFLLRDACSGGGGXGVGQRSLPTPFLNKTYQLVDDPAVDDVISWSEDGSAFIVWRPAEFARDLLPKYFKHNNFSSFVRQLNTYGFRKIVPDRWEFANDCFRRGEKRLLCDIHRRKVTPTVSPLHPL

SEQ ID NO: 262031 - protein, 86 aa, Zea mays
  unsure (1)..(86): unsure at all Xaa locations
  Clone ID: MRT4577_170585C.1.pep
MASEKKQSNPMREIKVQKLVLNISVGESGDRLTRAAKXRYTVRSFGIRRNEKIACYVTVRGEKAMQLLESGLKVKEYELLRRNFSD

SEQ ID NO: 262032 - protein, 182 aa, Zea mays
  Clone ID: MRT4577_170586C.1.pep
MASEKKQPNPMREIKVQKLVLNISVGESGDRLTRAAKVLEQLSGQSPVFSKARYTVRSFGIRRNEKIACYVTVRGEKAMQLLESGLKVKEYELLRRNFSDTGCFGFGIQEHIDLGIKYDPSTGIYGMDFYVVLERAGYRVARRRRCKSRVGIQHRVTKEDAMKWFQVKYEGVILNKAQGNTS

SEQ ID NO: 262033 - protein, 35 aa, Zea mays
  Clone ID: MRT4577_170587C.1.pep
HHSVPWVINYTPKYKTLATIITYCFHLWAPKTLNS

SEQ ID NO: 262034 - protein, 50 aa, Zea mays
  Clone ID: MRT4577_170588C.1.pep
LLFFFFYSAYGGVFFYKIWAQSIHATSQASQWLALSSYMMTSLSTKIGLF

SEQ ID NO: 262035 - protein, 75 aa, Zea mays
  Clone ID: MRT4577_170589C.1.pep
QRMMLKKVRFIHALGFQSDDSKLGEIVKGYCCFSGGEATLDADLDSDSPQALITASFCDKTLQNITRLSGRNAGS

SEQ ID NO: 262036 - protein, 79 aa, Zea mays
  Clone ID: MRT4577_17058C.1.pep
GAKVKMKRAHPSEKNIGAICHLDVFFFHLKKGNFFYSYERPAHKDSKNLRHHFLSFSGKLKTVVTKGCIKYRISWIFLN

SEQ ID NO: 262037 - protein, 71 aa, Zea mays
  Clone ID: MRT4577_170590C.1.pep
MFFFFGFLFTNLLGAYFNWFCLPYCKPNGHSSLEDAATFASTDIKHGGGNRKPGHTPRMDSKTGPWSLGKG

SEQ ID NO: 262038 - protein, 89 aa, Zea mays
  unsure (1)..(89): unsure at all Xaa locations
  Clone ID: MRT4577_170591C.1.pep
MGQKINPLGFRLGTTQNHHSFWFAQPKNYSEGLQEDKKIRNCIKNYIQKNRKKXGSNRKMESDSSSEVITHIKKKKKKKKKVLCVVTTA

SEQ ID NO: 262039 - protein, 75 aa, Zea mays
  Clone ID: MRT4577_170592C.1.pep
SLKFSKQKLCVPNQSSQFPPWRFSSYRSDFEIFFCVPQVIIICQPNIGIQASPLKWPIMSAIVKCETLGTTLSSK

SEQ ID NO: 262040 - protein, 125 aa, Zea mays
  unsure (1)..(125): unsure at all Xaa locations
  Clone ID: MRT4577_170593C.1.pep
LLVAVSSGATVSQLYXWXFXKXWGLLQPNSKXPWXRNALILXRXSIYSLXMGLTLVXRXAWLKPXIHPNFGXLDSRVTSFFLAALXVIRRXHWXFYRLEXXXXNKXGKFRAVKTVQLPFHXVDDD

SEQ ID NO: 262041 - protein, 93 aa, Zea mays
  Clone ID: MRT4577_170594C.1.pep
DPSSRPGSDCLQAPPTSASLTLRLTPPPPPQPVAMAAVSAAPRPSMPPQTRPPSPPHLLRLSGPNARAPLTPQTIPLLDHGLQCLARHDPLDS

SEQ ID NO: 262042 - protein, 267 aa, Zea mays
  Clone ID: MRT4577_170595C.1.pep
MDRQVNGSGTASVPLKRNPGSHIRTLELWGLSGDVMGKLACSALLGFVVFSTLKLTRFQFGHVRYTDPSRESASMLSLNEASAKEGSFITSRVRKHFENISKFLWLSDRPNSNSKGSDKHPAVNDITAAVCKQKMDIQEAETLVKQWQDIKSEALGPDYQTDMLPEILDGSMLSKWEDLALLAKDQSCYWRFVLLNLNVVRAEIILDEIGAGEAAEIDAVLEEAAELVDDSQPKKPSYYSTYEVQYVLRRQNDGSWKISEAAVRDLT

SEQ ID NO: 262043 - protein, 120 aa, Zea mays
  unsure (1)..(120): unsure at all Xaa locations
  Clone ID: MRT4577_170596C.1.pep
KKVPARVFFFYPGGTILFPFFGGPLSPFIQKNGWAGIFFNGCIRDVPKINGFPFGFRVFNSPPFKSNKKGVVXKHFPFPFPGPKIFNGKWFFPDSDGFFFSKSKFSVWPCSFFMFDLVKM

SEQ ID NO: 262044 - protein, 167 aa, Zea mays
  Clone ID: MRT4577_170597C.1.pep
MGTCRRRVLGVWFFFWFLLTLEQCTSLNREGAALLRFKAAIEADPYGALLDWNQESLSPCTWFGVECSDDGLVMSLSLANLGLKGVLSPELGKLMQMKSLILHNNSFYGTIPREIGDLQDLKMLDLGYNNFSGPIPSELQHILSLEFLFLEGNRLSGRSPVGVHQLT

SEQ ID NO: 262045 - protein, 196 aa, Zea mays
  Clone ID: MRT4577_170598C.1.pep
MALETAPSPSLKPHVDGGSKCPPHGHGGGNRRWDMLTRFHAGYFRISLALSGQALLWRTLISSDSSSTTAATEPPLPLPLPLLLRSLPSVAFLLLWTLALLALLALAALYAARCLLRFPAVRAEFRHHVAMNYLFAPWISCLLLLALMRTTHPLQLAAMMVTKQLQMMMTMMSSGRLTLQLTLRTAHARAAECSNC

SEQ ID NO: 262046 - protein, 37 aa, Zea mays
  unsure (1)..(37): unsure at all Xaa locations
  Clone ID: MRT4577_170599C.1.pep
TACTLRRSCDEIXDPDKERGIHAPCTWTQVIIAHSYQ

SEQ ID NO: 262047 - protein, 191 aa, Zea mays
  Clone ID: MRT4577_17059C.1.pep
AGKRTGSTSSAPVPRDVPRKYHGPLFDFPSFTRRHDSMGSANYNSNLSLGYDVKDLLAQEGMIVLGRKREDNLKKISGLLAINLERKRIRPDLVLRLQIEEKKLKLLEHQARLRDEVEHEQQEIMAMPDRIYRKFVRQCERQRVELVRQVQQMQRASREKQLKSIFQWRKKLLEAHWAIRDARITRNRGVA

SEQ ID NO: 262048 - protein, 88 aa, Zea mays
  unsure (1)..(88): unsure at all Xaa locations
  Clone ID: MRT4577_1705C.1.pep
ITLEATTPGLTPGCGAVKEQKIIAHAGKMSDGYRWRTYGQXKFLTXKPNPMSYYLCTHGGCPVLKQFNKAPDDDNNIFVTYXSKHNHH

SEQ ID NO: 262049 - protein, 46 aa, Zea mays
  unsure (1)..(46): unsure at all Xaa locations
  Clone ID: MRT4577_170600C.1.pep
QXFIVTDNITTYKQHSRLSVSSHESSRVRTPAGAELTNKQRLCTSE

SEQ ID NO: 262050 - protein, 70 aa, Zea mays
  Clone ID: MRT4577_170601C.1.pep
IITNHPSNPSTPFYISFTHSYRLIIDAATNHLAINPINTTFYATHLIIRRIINASAHQNIKLPPPNNISP

SEQ ID NO: 262051 - protein, 132 aa, Zea mays
  Clone ID: MRT4577_170602C.1.pep
PRVRGRVGLLGSNHVSVTPAVQKSKGNLINGTPTMQPSSKTTNTTPVVQLSQGNPTNASLAVQRCQGNTRAIPASLPLHTELIGKDVILYAILRDHPVAKGTIISTNPSSVLGGVALGKQYCEVVVNVVLKR

SEQ ID NO: 262052 - protein, 68 aa, Zea mays
  Clone ID: MRT4577_170603C.1.pep
RPRVRSPLAVFDERHHGRMTGLRNHNIKTFTCKTIVKDLSSYNKVCSKDAAKTPDLIKYAADTYYLLQ

SEQ ID NO: 262053 - protein, 137 aa, Zea mays
  Clone ID: MRT4577_170604C.1.pep
GTLRVRPEANPFGARAVRLYLREVRDSQAKARGIAYEKKRRKRHPPAHRQPKQQQQQDGQHQHPSHAAPGTVAEPPAPHFLIPHAHFLHGHFLAPATEPIDPAAGGGGGTGDDIALAMAAAAEAHAAGFLMPLSVFN

SEQ ID NO: 262054 - protein, 84 aa, Zea mays
  Clone ID: MRT4577_170605C.1.pep
IIFFIKKKKKKVCSLAVSSLGGIFRDMHHTGGGWSMLLGGPIGPIVGRFPVDWPGFYNAWAGKTLAFPCLMVLCGCPFGQLGFS

SEQ ID NO: 262055 - protein, 117 aa, Zea mays
  unsure (1)..(117): unsure at all Xaa locations
  Clone ID: MRT4577_170606C.1.pep
MFWINIGLCFKTPSPPPSRDQSSPRGPXGDANKVYVNLSWGVDNLALANLFTXARTIYDSENKSRGFXFVMYGSTEEPENALSNLNGAMSSETLFSSPCCSRHSIWKLKYNLSFRIY

SEQ ID NO: 262056 - protein, 93 aa, Zea mays
  Clone ID: MRT4577_170607C.1.pep
SSRSDSVSMAMGARTVHKAISRRLFNCSNSSAKEGSCAASKISSKKATRDNKPDKGRNMFWINIGLCFKTPSPPPSRDQSSPRGPGVMPTRCT

SEQ ID NO: 262057 - protein, 72 aa, Zea mays
  Clone ID: MRT4577_170608C.1.pep
VQQQPPQLVPPVEHALTDPCLRIVDCRTTCCRCSMFHLRQGCCSLTLPATPVARVMKLSVRQVLSVAVSLTA

SEQ ID NO: 262058 - protein, 77 aa, Zea mays
  Clone ID: MRT4577_170609C.1.pep
SIHLLTWINIFSLLHLQAKEGSCAASKISSKKATRDNKPDKGRNMFWINIGLCFKTPSPPPSRDQSSPRGPGVMPTR

SEQ ID NO: 262059 - protein, 61 aa, Zea mays
  Clone ID: MRT4577_17060C.1.pep
GGNVIASQVIVSPPPGSPPHQWTLMLCFHLRLISHDCGGRAVLPCNSKGVCFGEKSGELGC

SEQ ID NO: 262060 - protein, 100 aa, Zea mays
  Clone ID: MRT4577_170610C.1.pep
NLPTPPPPLPGINIFSLLHLQAKEGSCAASKISSKKATRDNKPDKGRNMFWINIGLCFKTPSPPPSRDQSSPRGPGVMPTRLRTSQEGLIFCHVWFHRRA

SEQ ID NO: 262061 - protein, 45 aa, Zea mays
  Clone ID: MRT4577_170611C.1.pep
LDRRRITGPYQHHCCSGVCLLDCGMPIGLGHWLTVVPTEPKCALR

SEQ ID NO: 262062 - protein, 154 aa, Zea mays
  unsure (1)..(154): unsure at all Xaa locations
  Clone ID: MRT4577_170612C.1.pep
MPLFHTFFLFFKEGSCAASKISSKKATRDNKPDKGRNMFWINIGLCFKTPSPPPSRDQSSPRGPXGDANKVYVNLSWGVDNLALANLFTXARTIYDSENKSRGFXFVMYGSTEEPENALSNLNGAMSSETLFSSPCCSRHSIWKLKYNLSFTIY

SEQ ID NO: 262063 - protein, 41 aa, Zea mays
  Clone ID: MRT4577_170613C.1.pep
GPPGSSIFGISCKIIYPHLVLALACMYFVPALLFCVISSTL

SEQ ID NO: 262064 - protein, 103 aa, Zea mays
  unsure (1)..(103): unsure at all Xaa locations
  Clone ID: MRT4577_170614C.1.pep
VDSRSTTRPATRYCWCSDCLLTSVPVLAAAAAATTEHVEVVTQDAEYQNLQREXSHQDLSQKIADRLGLELGEVVTKKFSNQETCVEIGESVRGEDVYIVHSG

SEQ ID NO: 262065 - protein, 48 aa, Zea mays
  Clone ID: MRT4577_170615C.1.pep
PHGCLRISSPIPKLTDRSPALRRLDRENFPQNEPWTTHCCKMKSILYK

SEQ ID NO: 262066 - protein, 117 aa, Zea mays
  Clone ID: MRT4577_170616C.1.pep
RASPGGLRKTKSLPTRSFLPIHLLCYRVCDYSTPQRMLATLQPAAATVSPSLVRTHITKPLHITSGFLAESVSLRQYTSARHGLLVWYAARRLRLAAPCHGLRRRSRSTGERGPARR

SEQ ID NO: 262067 - protein, 91 aa, Zea mays
  unsure (1)..(91): unsure at all Xaa locations
  Clone ID: MRT4577_170617C.1.pep
KKKKKKKKKKKIKKKKKKKDANNQNRTEPPPKKKKMKKKFRYNXKTRGVRRNKRKKKKLGAPFKKKKILLATLGTLTVFFCSPKKKKKSGV

SEQ ID NO: 262068 - protein, 104 aa, Zea mays
  unsure (1)..(104): unsure at all Xaa locations
  Clone ID: MRT4577_170618C.1.pep
PTRPPTRPKLVNYHSSVAAXGNNDTSAQEDEQHTIRSILDQGKTTTTIGKVNNDNLSRLLTEYLGMDNMLALVCKTYDGVKGLEKYDKDDIIDKTSGIHGLGRS

SEQ ID NO: 262069 - protein, 174 aa, Zea mays
  unsure (1)..(174): unsure at all Xaa locations
  Clone ID: MRT4577_170619C.1.pep
IRVPRPKKKRAKEPTGAEQGGPPNPGRRTQKRGGPKPPHPPTGPEPKDPPGGNQSXQKPHPRTNAPXHTPPPTTQGEKKQGPPPGGRPGKPGPAPEKKPAPPKGGRPKTPDRHXGRETTCAKKGPANNSPQHKNQKPKGEKRGGPPREPNDPNGGVQRGHTGGRKPGKPTAKTK

SEQ ID NO: 262070 - protein, 78 aa, Zea mays
  unsure (1)..(78): unsure at all Xaa locations
  Clone ID: MRT4577_17061C.1.pep
IEIVLYQARQLSSLAFTRRKALAHFTANSDEYGRYKFRGFLKREGFWGIWCEVGGGGETSGGVKKAPPLWAPXRVRRK

SEQ ID NO: 262071 - protein, 151 aa, Zea mays
  Clone ID: MRT4577_170620C.1.pep
ARNRATKSGYWKATDKDHVIHTPCSWPAAAAGHHRTVVGMYKTLVFYRGRAPNGVKTSWVMHEFRMENPHTPPKEDWVLCRVFYKKKADAMDYADCSDQDAIAVHMACGSADPRGAAVAASDRGGRQQGGGEAPTATARGGRPRDGVATRG

SEQ ID NO: 262072 - protein, 108 aa, Zea mays
  unsure (1)..(108): unsure at all Xaa locations
  Clone ID: MRT4577_170621C.1.pep
MASNGDGPAIGINLCTTYSCVSVWQHXRVDIIANDDRNGTTPSXVAFTYSARLIRHAAKDHVAMNTINTVFDAKRRNGMMFISDSVQSDITLWPFSVNPPPGENPMTL

SEQ ID NO: 262073 - protein, 111 aa, Zea mays
  unsure (1)..(111): unsure at all Xaa locations
  Clone ID: MRT4577_170622C.1.pep
SPKKFLSQVNYXLXKAXYSXKTNSKSEFXTGAXATTNLLYISTPXIYFNHYYSXSILTIXXNYYNYXXHQLISSXXSNXNLYIYNXXSXXNTXFNYSTKKIKKTTXXFNIT

SEQ ID NO: 262074 - protein, 145 aa, Zea mays
  Clone ID: MRT4577_170623C.1.pep
KAIINTSNHAFSSNGGRFHFHRNDRHHQLHHLYQVVVVCFGFARTELRYACSSSSSPPRPSCSSSPTRAWLASSARPQISSLRLPCRRVERVRTKAGCANANKDCIEVDRAEASCGLGDGGASSAEEEHRDSGARTGPVFQLQFL

SEQ ID NO: 262075 - protein, 36 aa, Zea mays
  Clone ID: MRT4577_170624C.1.pep
LPPFEETLLRPLFFKPNPNSIVSIYSPAGGFLIKSR

SEQ ID NO: 262076 - protein, 184 aa, Zea mays
  unsure (1)..(184): unsure at all Xaa locations
  Clone ID: MRT4577_170625C.1.pep
GVGLANIAXGSMRRRSCNSRATNIAMVVKGQGXLHMACTPVXGARCFXRREPGHGVEQDQHRQHEQHVVGGRNARSYNQVQYRIRQVAVMVIPQGQPTGVVGAEHENLAVLCLXXVRAAVVDKVFLAGAQSVLLNMDSPWHLVAXGAAEKXQVARVIAAHKVNVYINGXQTHRVSPVSSRQDIK

SEQ ID NO: 262077 - protein, 79 aa, Zea mays
  Clone ID: MRT4577_170626C.1.pep
TRHQGPTGTTKAGISKHHKLNGTVPIQTQGLKMHKPPSYLPLKSHPQGKFLGMGVRVRGVCIRNREKERMPNFLTLGIS

SEQ ID NO: 262078 - protein, 71 aa, Zea mays
  unsure (1)..(71): unsure at all Xaa locations
  Clone ID: MRT4577_170627C.1.pep
CXXFPARFSRXLRXXXSXCXFGPXXXSRGCXWXXXXRPPLVXPLLXXWLGXCLSLPXGXASFLPGWCSSAA

SEQ ID NO: 262079 - protein, 79 aa, Zea mays
  Clone ID: MRT4577_170628C.1.pep
HHAHWDQRHALECEQGHQDASIDTSTCLLYIMHAFELALLNRALHECIRSRMGVTSSRPRRHGSSMSSTILLIIDDPYH

SEQ ID NO: 262080 - protein, 439 aa, Zea mays
  unsure (1)..(439): unsure at all Xaa locations
  Clone ID: MRT4577_170629C.1.pep
RLVLVLVPPWPTWRPAVGGSSSEKRRGRRVTEDWCCACAEGLFLGPNPMVARYLYALIFLVTNLLAWTLRDYGDSALAELQRLKVCQGARHCLGAEGVLRVSLGCFVFFFVMFLSTVNARKVHDCRNSWHCEWWPAKLALWLGLTAVTFLAPSPLVQLYGKVAHFGAGAFLVIQLISVTRFIMWLNDWCRAEMTQKRYHLQIQAVSIVTYVGSLLGIVLMYVWYAPSPACRLNILFITVTLALVQLMTFVSMSSKVKAGYVAPGLMGIYVVFLCWSAIRSEPHTEVCNRKAEVATSADWVNIASFVIAVVVIVAATFSTGIDSKCLQFKQAEGESESEEEDDIPYGLGFFHLVFSMGAMYFAMIFVGWNANXHTMERWTIDVGWASTWVRVGNEWLAAVVYSESPSTQLPCPSLARGHPAMAAMHALRLLMDERTDENE

SEQ ID NO: 262081 - protein, 105 aa, Zea mays
  Clone ID: MRT4577_17062C.1.pep
SISTAFGSMKWPKSNAAKGYFYTIPQLEDIIEYILKKSASVAYKHELRGIQFIKGLVMNLVPFYIQSHLVILTMRKKRQNHGVLSSVSDCYNIPKFVGAQKRCQI

SEQ ID NO: 262082 - protein, 88 aa, Zea mays
  Clone ID: MRT4577_170630C.1.pep
KPTTQGGHKIDTTLPGPGHDYARTMTTQFIKPIDNTRVYTTHSLFLGARHKGGGGIRTDTETVAGSFGPYLRQRAGTYPETACRRIPS

SEQ ID NO: 262083 - protein, 89 aa, Zea mays
  Clone ID: MRT4577_170631C.1.pep
RHEACTTCIRSSNSASGERHACFRAGYCSASPACSRRRDASPPRRTLSVRTISQTGRWHWRQVFYAGEVVHYAPWWAQGLRERRHQHQP

SEQ ID NO: 262084 - protein, 107 aa, Zea mays
  Clone ID: MRT4577_170632C.1.pep
SVERNAEPGEEGGRTGDCRSRTGGGVEEGAESMRGSADAVVVARDVVASSSPSKAASALDMTRYPRLSPDGLPLPNGSGSGASKKCPKKQQKHRGLKGMESIDSDSD

SEQ ID NO: 262085 - protein, 339 aa, Zea mays
  Clone ID: MRT4577_170633C.1.pep
MRGSADAVVVARDVVASSSPSKAASALDMTRYPRLSPDGLPLPNGSGSGASKKPAAPVPPAPRSSKDDVAPAVATDSSRIAAFLASTSLEPKPRARAPQPQPTAPNSAPTAAVAANRSPARDHGHGHCSDHSDPASPSSTGARELLLRWGQNKRMRCRRDCASASPQRRQAGGKIPRRSSSPAADNLMPPPSAAPYARGSNLRYATPRPPRSGASDAHHGRGALPNPLSNRSTGASRAWRASTATPTDHRPTAAGRRACGGSNAARRRRRRRFGDSEGCVSTATRSRRLTLSRWVKGCQKEQEEGGFSRKKTILFRVNHSGAVLYSRRFVYLGSDETMS

SEQ ID NO: 262086 - protein, 73 aa, Zea mays
  Clone ID: MRT4577_170634C.1.pep
LKLFVHIPSVHRSASKAGIILLSGGGGHVIVIFFGAAWSTTLSFRKALKPSSSVEVAAYSYQLLEAVLVGAYP

SEQ ID NO: 262087 - protein, 241 aa, Zea mays
  Clone ID: MRT4577_170635C.1.pep
AGHGGNRCGPEEVPAGDGERGCRRREALQSTIGCPFGEGCHFLHFVPGGYPAVAKMLNLSSSAVSAPSRTHVDHAALTGASHPASTVKTRMCTKYNTTEGCKFGDKCHFAHSERELAKPAYMSQEGPPMGGRYGRAEPMQPAAMGPPAGNFGASATAKISVDASLAGGIIGKGGVNTKQISRITGVKLSIRDHESNPNLKNIELEGNFDQIKQASDLVRDLIATISASMPAKNPSAAAAPA

SEQ ID NO: 262088 - protein, 121 aa, Zea mays
  Clone ID: MRT4577_170636C.1.pep
WPGSPSPTAPFPPIQYLFSLILQRTKKYHFCYLHSSPSQHSFSIQFREFSLFFCFALVLLAVYSASYPLLSTEEECMCSSCKDIFFSPHLLPRCCWCPRWRQLPKCLGFLNVRLFWGGGRA

SEQ ID NO: 262089 - protein, 158 aa, Zea mays
  Clone ID: MRT4577_170637C.1.pep
AGHGGNRDGPKESRPETANGAAAAGKRSKDTESFQTGLSSKSKPCTKFFSVDTSLAGGIIDKGEVNTKQISRVTGVKLSIRDHQSNPNLKNIELEGNFDQIKQVSDLVCDLIATISASMPAKNPSSTVVPAGGGRGSGPGGTSSNYKTKLCEDFLKLC

SEQ ID NO: 262090 - protein, 52 aa, Zea mays
  Clone ID: MRT4577_170638C.1.pep
RPARRQPCTCLPIYRTILPVAYTLHIPPYSLIHDITKIYSIHPSLSIYAIMH

SEQ ID NO: 262091 - protein, 144 aa, Zea mays
  unsure (1)..(144): unsure at all Xaa locations
  Clone ID: MRT4577_170639C.1.pep
AGHGGNRHGLKEVPAGDDERGCSRREALQSVDASLAGCIIDKGGVNTKXRVTGVKLSIRDHESNPNLKNIELEGNFDQIKQASDLLRDLIATISASMPAKNPSSAVAPAGGGQGSGPGGTSSNYKTKLCENFLKLCENFQHDYV

SEQ ID NO: 262092 - protein, 86 aa, Zea mays
  Clone ID: MRT4577_17063C.1.pep
GTSSKQQQQQFIFLLLGDPSGAPVSRDKEASVQISRLPHWNNQADGYLACLRADKKPAADHTPFSPLDSKLNTVVKDAHLAGAMFA

SEQ ID NO: 262093 - protein, 144 aa, Zea mays
  unsure (1)..(144): unsure at all Xaa locations
  Clone ID: MRT4577_170640C.1.pep
AGHGGNRHGLKEVLAGDDERGCSRREALQSLDASLAGGIIDKGGVNTKXRVTSVKLSIRDHESNHNLKNIELEGNFDQIKQASDLLRDLIATISASMPAKNPSSAVAPAGGGRGSGPGGTSSNYKTKLCENFLKLCENFQHDYV

SEQ ID NO: 262094 - protein, 94 aa, Zea mays
  Clone ID: MRT4577_170641C.1.pep
PNQHPKGPSWGRGPVPPPRRKIKTLSPPRKGVPNPYVPVEMEAGATLVHSFRPSPPPPNLSMSLYSPLDPRGPALWWGRLGSCPQNSPPPPKLC

SEQ ID NO: 262095 - protein, 64 aa, Zea mays
  Clone ID: MRT4577_170643C.1.pep
KCWLSSNSCTRKLLTKILNMLPSGELLWHVSPLAQDLSTRIDIMHHRGVLEILFRHTEGIAGCW

SEQ ID NO: 262096 - protein, 73 aa, Zea mays
  Clone ID: MRT4577_170644C.1.pep
GPQPQGVTKGHRLKGPPLGGGTSFGGQKTYKKGEKQHRGGGLQPKGGKTLNNIPNLGPGRAPTRKPGLTTQKN

SEQ ID NO: 262097 - protein, 136 aa, Zea mays
  Clone ID: MRT4577_170645C.1.pep
LEAGRHPISSSTLSNDWLLQCVSASVEQQIHSSIQSTETISSQTTGLLPTMSEISFETLIPMVYPMIHSFGYSEHESSPNTDIQAANLSLGSDDVSQYYQVASFFDPGVPDTELGASFFNDTPPETSFLNQQKQVS

SEQ ID NO: 262098 - protein, 57 aa, Zea mays
  Clone ID: MRT4577_170646C.1.pep
AVQPVHMLGSAIGTGPLCYHESCSKCNVKHPDLVRQYKGTHSNDTLRLIPVVVISGS

SEQ ID NO: 262099 - protein, 101 aa, Zea mays
  Clone ID: MRT4577_170647C.1.pep
MAKPSQVLVSALAAWAVVLLLLCAAAPRGADAATACDAAQLTPCAGAIIGSSPPTAACCSRLREQQPCLCTYARDPKLQRYVSSPNGKNAMAACKVPVPSC

SEQ ID NO: 262100 - protein, 101 aa, Zea mays
  Clone ID: MRT4577_170648C.1.pep
MTKPSQVLLAALAAWAVVLLLLCAAAPRGADAATACDATQLTPCAGAIIIGRSPSAACCSRLKEQQPCLCTYARDPNLQRYVNSPNGKKAMAACKVPVPSC

SEQ ID NO: 262101 - protein, 209 aa, Zea mays
  Clone ID: MRT4577_170649C.1.pep
IRHEGKEGAFVPYRDSKLTRLLQDSLGGNSKTVMIACISPADINAEETINTLKYANRARNIQNKAVVNRDPATAEMQKLRSQLEQLQTELLFSRSGSAALEELQLLQKKVSLLELKNSELNNELKEKELSYEQLAERARAAQLERDQLMLKIESVRNGKSLDDIENIDNDQDMDLLKGYISKIQQLESELMRQNFSNACRHGLHDQLAM

SEQ ID NO: 262102 - protein, 78 aa, Zea mays
  Clone ID: MRT4577_17064C.1.pep
PESHALPGPFHHCTTQFPSKQRLRGSHTPQEPPIKPESIILVYHYFAGRWQHNRDLRCRTRGRTRGRTSGRTRGRTRG

SEQ ID NO: 262103 - protein, 71 aa, Zea mays
  unsure (1)..(71): unsure at all Xaa locations
  Clone ID: MRT4577_170650C.1.pep
TERVESCSHSVXISLGCTQVAEEILXCAPVWADQAWDSYCNWDPKETWAFITWTVPAIXKNNRKNPPWQGP

SEQ ID NO: 262104 - protein, 116 aa, Zea mays
  unsure (1)..(116): unsure at all Xaa locations
  Clone ID: MRT4577_170651C.1.pep
GGEKKKNGGLIGGGPPSTIIGLNTSIXFFLRGAHVVINIRNTEAASEARKYFLEKNQTALIDVFKLDLSSLKSVRFFKDQFNWMKLDVNILINNGSVMLCRFQLSKNGVEMQFDTN

SEQ ID NO: 262105 - protein, 56 aa, Zea mays
  Clone ID: MRT4577_170652C.1.pep
TWPLNQRGAHTTLPTRHQEGRKGGVLLPVQQRHNRNEGEEAAAEEGRRQAPDREDP

SEQ ID NO: 262106 - protein, 62 aa, Zea mays
  Clone ID: MRT4577_170653C.1.pep
WLPLFHIPFNKQGFHFMNTQCLNLPDSTRHVYMDYNINNPVNLKTDQPNTNTFIKSIYRPKL

SEQ ID NO: 262107 - protein, 82 aa, Zea mays
  Clone ID: MRT4577_170654C.1.pep
GGGGGGGAASPAGGSGVWEPTPPVVPTHGDSTGLLGTHNWRDSLSRYSSRLRHARLKNYIRREEVHAKGRVKEVLSTYDKDE

SEQ ID NO: 262108 - protein, 59 aa, Zea mays
  Clone ID: MRT4577_170655C.1.pep
SRALPTLPRKNIQINPNFLIIHQYQSLIFFQNCMSLTSIKSSTIAYHAHNTLPNIAITF

SEQ ID NO: 262109 - protein, 48 aa, Zea mays
  Clone ID: MRT4577_170656C.1.pep
EKGLKIYKQGTVTFRMTTRTIKKLLAIPSRDPLILSSPLGRRVRSGCT

SEQ ID NO: 262110 - protein, 92 aa, Zea mays
  Clone ID: MRT4577_170657C.1.pep
SSMTMKFCTQDDYNRHLTSRKMQHFPLSMIPVIIPILFPEKSGTSPAFQKWCKQMYHVFCELYPAGSRILLYLISSWTMNDEYICTLEKKKK

SEQ ID NO: 262111 - protein, 94 aa, Zea mays
  Clone ID: MRT4577_170658C.1.pep
FSLVLALPIRCYPLVTHSSRASDIRRLSYVGRCNPLNLRVYNLFSKCQPYSGVASCLSLSLFPFSLGVSELGPGLIICFAPPYVKQPPLHHAVP

SEQ ID NO: 262112 - protein, 53 aa, Zea mays
  unsure (1)..(53): unsure at all Xaa locations
  Clone ID: MRT4577_170659C.1.pep
IRLKTTSAGPRXSLAAKAGAFIEKMIEDPHVNARLQQDLLADEGETPSLFVVS

SEQ ID NO: 262113 - protein, 82 aa, Zea mays
  Clone ID: MRT4577_17065C.1.pep
TTNSFFRLYSLEYKRLNRERDPLLPRNEALTPCLTPHNHHGQLPSQLPGGYMAQYALSMRTKRARPSPLHAQPTTDRATDFS

SEQ ID NO: 262114 - protein, 64 aa, Zea mays
  unsure (1)..(64): unsure at all Xaa locations
  Clone ID: MRT4577_170660C.1.pep
PTMAYHRLLAAPLALTFSFQVRRNNVXFIYFTHASRCLLMAIMFTRVLPSSYNRMVHRNTTIGA

SEQ ID NO: 262115 - protein, 107 aa, Zea mays
  Clone ID: MRT4577_170661C.1.pep
PRGGGAPHSGRKGALPWPPSGGGGRVAPPEEERSPTPKGTSSERDVDLELEAAFGHTKTNMSPATRCKRSQRRSPKPLQSPRISAARHLHIRAALIRRPKLHGFCVT

SEQ ID NO: 262116 - protein, 60 aa, Zea mays
  Clone ID: MRT4577_170662C.1.pep
NGSNLGGWSGSPPPGRESMARATICPLLFSLVRGAVVGPWWFVLPWSLPVLNPCSRLCSH

SEQ ID NO: 262117 - protein, 142 aa, Zea mays
  unsure (1)..(142): unsure at all Xaa locations
  Clone ID: MRT4577_170663C.1.pep
KMVFIVKGKLESISANGNKAPLHYGNVXGKELLPWDLEPFSTNKNGGKIKFQGMRLGAIRPVKCLTNVXAFVLKTNDLEKVPSQFARFLGNPRVQGAIRYESPYWGTIAATCIQVARRYRKRRLKRAEKSRLSEETYASLGS

SEQ ID NO: 262118 - protein, 126 aa, Zea mays
  Clone ID: MRT4577_170664C.1.pep
ATPSPVVNVEDSPTKRPTGKKKAKEERFGKRKAPEAISAIGEKLEKFIEASSKVEKMAQVQQCLADKKLEVAKINHKAAQEQTKCKMIDLYKDLLCGSTAGLSEEALAERSKALECMRLSLFAPDN

SEQ ID NO: 262119 - protein, 40 aa, Zea mays
  unsure (1)..(40): unsure at all Xaa locations
  Clone ID: MRT4577_170665C.1.pep
PXYTEVQATSPSQAIRYKPHFLSVCVCVCVCVCVCVYFPF

SEQ ID NO: 262120 - protein, 45 aa, Zea mays
  Clone ID: MRT4577_170666C.1.pep
KNFVNGSCSCPPVEHDIGLSLVQCIILGRPDPKLFRVVPFFFASS

SEQ ID NO: 262121 - protein, 71 aa, Zea mays
  unsure (1)..(71): unsure at all Xaa locations
  Clone ID: MRT4577_170667C.1.pep
KFVCFYFFDLKNKLKNLNFFFFGRKXFCGGVFYFFXXXLVMLGGKFYFGGNVQPIGVERVMCLMILEVVSR

SEQ ID NO: 262122 - protein, 126 aa, Zea mays
  Clone ID: MRT4577_170668C.1.pep
VVLFYFFFVFVLSVCRFFFLPFFSTGEPTKENEGLILERPGPNILNNANGPAGTGPPKHRVQQNNKIFLLWAERYANGKAPGIYGTLGERLSFKKLARLFLEANPLVFCWNWRGKKQSSPPLHLWP

SEQ ID NO: 262123 - protein, 114 aa, Zea mays
  Clone ID: MRT4577_170669C.1.pep
SQALCHKSSRAQSFRANAGCIVSPPTVQRPTSYISCSPHSRSQYGSSYLIAPQEPVHARRRAHRERLGPDTTAIHVSGSIVALGRGLNAGVARVNLTLSPTGCGSFLARTAASA

SEQ ID NO: 262124 - protein, 71 aa, Zea mays
  Clone ID: MRT4577_17066C.1.pep
RRIKAWAAAWAGIWIKDHVRDFLVKDSSRPVNIRCAMIQIDCTHTKGGLCVDSVVVKPQQLSQNRAPWTYV

SEQ ID NO: 262125 - protein, 147 aa, Zea mays
  Clone ID: MRT4577_170670C.1.pep
KGIHGSCRQTRTGVDCWRPASSVSAAAEDLCKLMSLLDAGVIFLLSRGKASLEMSDLRGVQVVGNVWQRHVRGSEPLRIFPCSGCRGRLPRGVGSQLRPGPSPPRSSSPRLGSKANGEIPVVGSIYRRTVSTSIVLCKEVGLMRGIP

SEQ ID NO: 262126 - protein, 46 aa, Zea mays
  Clone ID: MRT4577_170671C.1.pep
IRPPKPPLAVFTGTGPPPWDDPRAGPSQHQPCPEHVGRGGPLSAWP

SEQ ID NO: 262127 - protein, 184 aa, Zea mays
  unsure (1)..(184): unsure at all Xaa locations
  Clone ID: MRT4577_170672C.1.pep
MAATKILDRLKVGASPPAPGGALPLTFFDVPWLFTGPVERVFFYPYAHTADHFAAHLLPSLVSSLSATLRAFYPLLGRVRPCPDGGGGYEFFCSDGGEAVELIVAESSDDFDELSAGGPRDVARLYALVPRLPSPGADGSFALAAAQVTVFPARGVAVGGSXHHVACDDSRYADFVRTWAAQCR

SEQ ID NO: 262128 - protein, 89 aa, Zea mays
  Clone ID: MRT4577_170673C.1.pep
IVGRGPGRRRRRDQLRRGGMGVSALSPTAVIEPWPCSGESPIGGRGALGPRSGRLEVGGVRGARDGPRSRPGGRYLGGLVDSVGGPPRG

SEQ ID NO: 262129 - protein, 60 aa, Zea mays
  Clone ID: MRT4577_170674C.1.pep
FVDTTHRLKGWDRFTGRTQIYDHYRFVLHLMLGSLDILKLGPDSGSWGALSRVLISIAGA

SEQ ID NO: 262130 - protein, 89 aa, Zea mays
  unsure (1)..(89): unsure at all Xaa locations
  Clone ID: MRT4577_170675C.1.pep
VVDAGTGCDGCDDAAHSGEADVASLPRVPPLKNITATYGKDWLDAKATWYGKPTGAGPDDNGGXCGYKDVNKAPFNXMYXCXNIPIFKD

SEQ ID NO: 262131 - protein, 44 aa, Zea mays
  Clone ID: MRT4577_170676C.1.pep
RHHRGEEHDHGLVSELEAPHCRIETYKAGLSLLWERGPRGASAA

SEQ ID NO: 262132 - protein, 72 aa, Zea mays
  Clone ID: MRT4577_170677C.1.pep
CAQLNERAHMIHVPSELIYKIGPNRSFLPTVCANLNGEWDAPFNEPLSADDAGVWQWDAPLIGALNAAVVVV

SEQ ID NO: 262133 - protein, 103 aa, Zea mays
  unsure (1)..(103): unsure at all Xaa locations
  Clone ID: MRT4577_170678C.1.pep
GRAHGSDGESMRPSTQNSNGELIPSICPPPWIFTATHPQGKCEWVEGXPPSTPRXXXKKQRRNXGETAGVGDGRGGPMGGRSLFGSRERVSDGGGKYGASCRI

SEQ ID NO: 262134 - protein, 97 aa, Zea mays
  Clone ID: MRT4577_170679C.1.pep
NKRATTRTATRGGGLDGTHPPPQPTEKKQRETEASTNGTKQQTRSEKTSRETQQKTRQTEKTSRQQQHQPRTRSEATRHQHERRESKPRRKSTKART

SEQ ID NO: 262135 - protein, 138 aa, Zea mays
  unsure (1)..(138): unsure at all Xaa locations
  Clone ID: MRT4577_17067C.1.pep
SARIASAVSILVLATYPFMTYLSGVKLSLALCSAAMMRSALAITVTTGISLLQNNAVVRXNQCQEQRGTANGISTTAMSFFKSIAPVGAGALFSWAQKRQDVAFLPGDQVVFMVLNLVQLLGLISTFEPFLVLPALPE

SEQ ID NO: 262136 - protein, 369 aa, Zea mays
  Clone ID: MRT4577_170680C.1.pep
MARVRSTTRVEREGSETEASETVPISEAMQRSGLVTSEKIPSDDAEQAEQAIAEAEEEDIEETDPEDDYRIAMPSKPIHLDFGKSTVSKADLSKMAGLRFPLHGIIAEVLKRFDIYFHQLTPNAIIRLSVCIWALRSQAVEPFADSFCRVHELHYQTKARKDGLHDNFGCYNFAYRKTTKFPVISYRSKWAAGWKSEWFYVKVDDDKEKLVQSPLELIFGETRPRCNMTPEGPTQQAMNEFRIIAEHISTRDLVQEFLAFKVFPSVKEWEMPKLKGEKKEGELVRLPYYFKFKKYFKTPCQEWLDTIEVMCNEILGNYSKKEDQLMTAAFGTRPKRRLNRVLDALGFEYPDYENLNKGTGGQKRYRRDL

SEQ ID NO: 262137 - protein, 859 aa, Zea mays
  Clone ID: MRT4577_170681C.1.pep
MARVRSTARVEREGDETEASESVPISEAMQRSGLVTSEKIPSDDAEQAIAEAEGEDTEETDPEDDYHLATPSKPSHLDFGKSTVSKTDLAKMVKSGYFTENQKKLLRFGGEETTPKPEKDEIVIFKSFLKAGLRFPLHGIIAEVLKKFGIYFHQLTPNAIVGLSVYIWALRSQAMEPFADSFCRVHELHYQTKARKDGLHDNFGCYNFAYRKTTKYPVISYRSKWAAGWKSEWFYVKVDDDKEKLVQSPLELIFGETRPQCHMLPEGSTQKAMYEFKIIAENISTRDLVQEFLAFKVFPSVKEWEMPKLKGEKKKGELVRLPYYFKFKKYFKTPCQEWLDTIEVMCNEILGNYSKKEDQLMTAAFGTRPKRRLNRVLDALGFEYPDYENLNKGAGGQKRKRITEALDEGEKEPIKKKIPKKRKAPSPKRQVPEAEETPASPSAAVVEEILKVMTESLPAKLSPLGPQLTKFFQKDKEPEKPKKTIKAKKQRIITVTEVIDKTPPRASAQKTPAAAEGTDIEIAPSEAAAAEAASAEDLNLESTIEHIDQILLDMAAEEATTAAEEAVIAVSKKGKEIVDEASENETFVFQNLIGEHLSKAEIEELREYAKSCGYKPGALLFGGVDDEKLECIRDQTGAKSMLLSKALQMQQDLEDKKHEVIIENLESKIKEQSNAFEKKNFELQATEGLLAEAEAKITELNTKLLRQSEQFEREKQDFIAKLEAEAQQNSDLRKLLTIGASSEKFTPSAEDLPKTFEHIEGEIDELDEVIAGHGDFCAWVASRGTAAAFLKAGCDHGKIVNRPNFTLSPSILDDIPDLARSISNRFIKMIWTKGGREKAGDEARSHLDPDDEAEADDQK

SEQ ID NO: 262138 - protein, 152 aa, Zea mays
  unsure (1)..(152): unsure at all Xaa locations
  Clone ID: MRT4577_170682C.1.pep
SYPPSAPLAIKRTKAEMTIACDXKLCSLLYEYTKVLIGLADNVXSKQFQXIRRSLMVDLARAHGLXTLIRRCIKAYAXKTGNHTFDPIMDLLLRNVGLIFTKVDLYEAHEEVLNNNGVAPARVCLVDPADVAVPTDNTGLDPCQTYFFQGLN

SEQ ID NO: 262139 - protein, 867 aa, Zea mays
  Clone ID: MRT4577_170684C.1.pep
MARVRSTARVEREGDETEASETVPISEAMQRSGLVTSEKIPSDDADQAIAEAEEEDIEETDPEDDYRIAMPSKPSHLDFGKSTVSKADLSKMVKSGFFTENQKKLLRFGGEETTPKPEKDEIVIFKSFLKAGLRFPLHGIIAEVLNKFGIYFHQLTPNAIVRLIVYIWALRSQAVEPFADSFCRVHELHYQTKARKDGLHDNFGCYNFAYRKTTKFPVISYRSKWAAGWKSEWFYVKVDDDKEKLVQSPLELIFGETRPRCNMTPEGPTQQAMSEFRIIAEHISTRDLVQEFLAFKVFPSLKEWDMPKLQGEKKEGELVRLPYYFKFKKCWGQKRKRITEAMNEEKEPLKKKIPKKRKASSPKQQISEAEETPASPSAAVVEEILKVMTESLPAKLSPLGPQLTKFFQKDKEPEKSKKTIKAKKQRIITVTEVIDKTPPRASAQKTPAAAEETDTEIAPSEAAAAEAGSAEGLNLESTIEHIDQILLDMAAEEATTAAEEVVTAASGKGKEIADEASENETFMFQNLVGEQLSKAEIEELREYAKSCGYKPGALLFGGVDDEKLDCIRDQTGAKIISTLSKSIGFPKLETDISRYRRQHVVGSLFYSNFKSMLLSKALQMQQDFEDKKHEVIIENLESRIKEQSDVIEKKNFELQAAEGSLAEAEAKITELNTKLLRQAEQFEREKLELNAKLEAEAQQNSDLRKLLTSLQEKCLEFSNKCIQRLRKKFHSVGASSEKFTPSAEDLPKTFEHIEGEIDELDEVIAGHGDFCAWVASRGTAAAFLKAGCDHGKIVNRPNFTLSPSILDDIPDVARSISNRFVKMIWTKGGREKAGDEARSHLKPVRNHTLCLPFLARSISTNDVIHVG

SEQ ID NO: 262140 - protein, 86 aa, Zea mays
  Clone ID: MRT4577_170685C.1.pep
VKNYIYTHVTYKYTDSLTLWHTSFSNNKHEICSNSCQGQQTFILSKSKTYTELALPFNNFMYLTARPVGTGQLQPQRLVQPHHFKS

SEQ ID NO: 262141 - protein, 203 aa, Zea mays
  unsure (1)..(203): unsure at all Xaa locations
  Clone ID: MRT4577_170686C.1.pep
MEDGSAPRRSTPPTRRSRSAEFHNFSERRRRDKINEKLKALQELLPNCNKTDKVSMLDEAIDYLKSLQLQLQXRYYGCYSRSSHCHICTQMLVMGKGMSPVVPLELQQYMHYITADPAQLPPLRPSGQQHRQFQITQANPQRQSNVESDFLSQMQNLHSSEPPQNFLRPPKLQLYTPEQRGGLPNTSHNTGWISGSSSYNFME

SEQ ID NO: 262142 - protein, 931 aa, Zea mays
  Clone ID: MRT4577_170687C.1.pep
MARVRSTARVEREGGEAEGSETVPISEAMQRSGLVTPEEIPTAEAEQATAEAEEGNIEETDPEDDYRIAMPSKPSHLDFGKSTVSKADLSKMVKSGYFSESQKKLLRFGGEETTPKPEKDEIVIFKSFLKAGLRFPLHGIIADVLKRFGIYFHQLTPNAIVRLSVYIWALRSQAVEPFADSFCRVHELHYQTKARKDGLHDNFGCYNFAYRKTTKFPVISYRSKWPAGWKSEWFYVKVDDDKEKLVQSPLELIFGETRPRCNMTPEGPTQQALAEFRIISEHISTRDLVQEFLAFRGFPTLKEWEMPKLEGEKKEGELVRLPYYFKFKKYFKTPCQEWLDTIEVMCNEILGNYSKKEDQLMTAAFGTRPKRRLNRVLDALGFEYPDYENLNKSVEGRKRKKVAEASDKDEKEPAKKKNIPKKKKVLSAKQKISDKEETPASPSATDVEEILKVMTESLPMKLSPLGPQLTKFFQKEKEPEQTKKSIKTKRQRIIAVIEVIDKTPPRASAQKIPEAEGLTNIEVVPSEMAATEAASTEDLNLESTIEHIDKILLDMAIEEATTAAEEAMAAASGKEKEIADEASEDEAFMFQNLIGQELSEAEMEELKEYAKSCGYKPGALLFGGIDDEKLNCIRDQTGAKIIGTLSKSIGFPKLETDISRYRRQHIVGSLFYSNFKSMLLSKALKMQQDLEDKKHEVIIESLESKIKEQSAIVEKKDFELRTTEGLLAEAEAKEKQELSVKLKAEVQQNSDLKKLLANLQEKCLEFSNKCIQRLRKIFHSVGASSEKFTPSAEDLPKIFEHIEGEIDELDEVIAGHGDFCAWVASRGTAAAFLKAGCDHGKIVNRPNFTLSPSILDDIPDLARSISNRFVKMIWTKGGREKAGDEARSHLEPLGFDPQQLNLCRMTKLRPMLKKHDAEAEAPRRSIGVDCR

SEQ ID NO: 262143 - protein, 753 aa, Zea mays
  Clone ID: MRT4577_170688C.1.pep
MARVHSTARVEREGGEAEGSETIPISKVMQRSGLVTSEKIPSADAEQATAEVEEENIEETDPEDDYRIAMPSKPSHLDFGKSTVSKADLSKMVKSGFFSESQKKLLRFGGEETTPKPEKDEIVIFKSFLKAGLRFPLHGIIAEGFPSLKEWEMPKLEGEKKEGELVRLPYYFKFKKYFKTPCQEWLDTIEVMCNEILGNYSKKEDQLMTAAFGTRPKRRLNRVLDALSFEYPDYENLNKGVEGRKRKRIAEALNEDEKEPSKEKKIPKKRKVTSPKQKVSDEEETPASHSATDVEEILKVMTEFLPAKLSPLGPQLTKFFQKEKEPEKTKKTTKTKRQRIIAVTEVIDKTPPRASAQKIPADEEITNIEITPSEVAAAEATSIEDLNLESTIEHIDKMLLDMATEEATTAAEEAMAAVPRKEKEIADEADEASEDEAFMFQNLVGEKLSKSEIEELKEYAKSCGYKPGALLFGGIDDEKLDCIRNQTGAKSMLLSKALKMQQDLEDKKHEVIIENLEGKIKEQSATIEKKNFELQATEGLLAEAEAKITELNTKLLCQSEQFEQEKQELNAKLEAEVQQNSDLKKLLAGLQDKCLEFSNKCIQRLRKIFHSVGASSEKFTPSAEDLPKTFEHIEGEIDELDEVIAGHGDFCAWVASRGIAAAFLKAGCDHGKIVNRPNFTLSPSILDDIPDLARSISNRFVKMVWTKGGREKAGDEARSHLEPLDFDLQQLNSCRMTKPKLMLKENDAEAEVP

SEQ ID NO: 262144 - protein, 214 aa, Zea mays
  unsure (1)..(214): unsure at all Xaa locations
  Clone ID: MRT4577_170689C.1.pep
RDLVQEFLAFRVFPSLKEWEMPKLEGEKKEGELVRLPYYYKFKKYFETPCQEWLDTIEIMCNEILGNYSKKEDQLMTAAFGTRPKRILNRVLDALGFEYPDYENLNKGVGGQKRKRITEALNEDEKEPSKKKIPKKRKVSSSKQKVSDEEETPASRPATDVEEILKVMTESLPAKLSPLWPQLTKFFQKEKEPEKTKXTTKAKRQRIITVTEVI

SEQ ID NO: 262145 - protein, 71 aa, Zea mays
  Clone ID: MRT4577_17068C.1.pep
VGSPGFGHILRVGDLASVRLQQGPLSLRIGAVSAASFAPCSPYGGVRRGEGSYVDLGPWSRAAAAVASRRR

SEQ ID NO: 262146 - protein, 254 aa, Zea mays
  Clone ID: MRT4577_170690C.1.pep
MSGEAAAVGGGEGEANGIPPNVTIYINNLNEKIKLEELKKSLTAVFSQFGKILDVLAFKTLKHKGQAWVVFEDVASATEALKRMQGFPFYDKTMRIQYAKTKSDIIAKADGTFVPRERRKRTDEKSEKKQKREHHHDAGASQIGMGVTAYPGVYGAPQLTQIPIAGGQRVMMPEIIVPNNILFVQNLPHETTPMMLQMLFCQYPGFKEVRMIEAKPGIAFVEYGDETQATAAMNNLQSFKITKENQMVITYAKK

SEQ ID NO: 262147 - protein, 532 aa, Zea mays
  Clone ID: MRT4577_170691C.1.pep
MARVRSTARVEREGSETEASETVPISEAMQRSGLVTSEKIPSDDAEQAEQAIAEAEEEDIEETDPEDDYRIAMPSKPSHLDFGKSTVSKADLSKMVKSGFFNENQKKLLRFGGGGGEETTPKPEKDEIVIFKSFLKAGLRFPLHGIIAEVLKRFGIYFHQLTPNAIVRLSVYIWALRSQAVEPFADSFCRVHELHYQTKARKDGLHDNFGCYNFAYRKTTKFPVISYRSKWAAGWKSEWFYVKVDDDKEKLVQSPLELIFGETRPRCNMTPEGPTQQAMNEFRIIAEHISTRDLVQEFLAFKVFPSVKEWEMPKLKGEKKEGELVRLPYYFKFKKYFKTPCQEWLDTIEVMCNEILGNYSKKEDQLMTAAFGTRPKRRLNRVLDALGFEYPDYENLNKGTGGQKRKRITEALNEDEKELPKKKIPKKKKASSPKRKIPDKEETPASPSTTDVEEILKVMTETLPAKLSPLRPQLIKFFQKEKEPEKMKKTTKVKRQRIIGVTEVIDKTPPRASAQKTPAAEERTDIEITPSE

SEQ ID NO: 262148 - protein, 83 aa, Zea mays
  Clone ID: MRT4577_170692C.1.pep
ALGLGKLSVGAPYFDAVMAPLLLPALLLMIPATRLRWGRDEGPALWRRLRPVVLVMGPAAVALPLLLEAGFARISWGAALTLW

SEQ ID NO: 262149 - protein, 78 aa, Zea mays
  Clone ID: MRT4577_170693C.1.pep
MARDRTIHVPPASAPASSRILKVQGKEIVGEDGKPVILRGAGLGGHLNMENFITGYPGHEKYMRKALKNALGEEKYDY

SEQ ID NO: 262150 - protein, 927 aa, Zea mays
  Clone ID: MRT4577_170694C.1.pep
MARVRSTARVEREGDETEASETLPISEAMQRSGLVTSEKIPHDDAEQAEQAIAEAEEEDIEETDSEDDYRIAMLSKSSHLDFGKSTVSKADLSKMVKSGFFTENQKKLLRFGGEETTPKPEKDEIVIFKSFLKAGLRFPLHGIIAEVLKRFGIYFHQLTPNAIVRLIVYIWALRSQAVEPFADSFCRVHELHYQTKARRDGLHDNFGCYNFAYRKTTKFPVISYRSKWAAGWKSEWFYVKVDDDKEKLVQSPLELIFGETRPRCNMTPEGPTQQAMSEFRIIAEHISTRDLVQEFLAFKVFPSLKEWEMPKLQEEKKEGELVRLPYYFKFKKYFKAPCQEWLDTIEAMCNEILGNYSKKEDQLMTAAFGTRPKRRLNRVLDALGFDYPDYENLNKGAGGQKRKRITEAISEEKEPLKKKIPKKRKTSSPKHQISEAEETPASPSAAVVEEILKVMTETLPAKLSPLDPQLTKFFQKDKEPEKSKKTIKAKKQRIITVTEVIDKTPPRASVQKTPAAAEKIDIEIAPSEATAAEAASAEDLNLESTIEHIDQILLDMAAEEATTAAEEAVTAASGKGKEIADEALENEAFMFQNLVGEQLSKAEIEELREYAKSCGYKPGALLFGGVDDEKLDCIRDQTGAKIIGTLSKSIGFPKLETDISRYRRQHVVGSLFYSNFKSMLLSKALQMQQDFEDKKHEVIIGNLENRIKEQSNVIEKKNFELQAAEGSLAEAEAKITELNTKLLRQSEQFEREKLELTAKLEAEAQQNSDLRKLLTSLQEKCLEFSNKCIQRLRKIFYSVGASSEKFTPSAEDLPKTFEHIEGEIDELDEVIAGHGDFCAWVASRGTAAAFLKAGCDHAKIVNRPNFTLSPSILDDIPDLARSISNRFVKMIWTKGGREKAGDEARSHLEPVRNHTLCLPLPVNLILT

SEQ ID NO: 262151 - protein, 885 aa, Zea mays
  Clone ID: MRT4577_170695C.1.pep
MARVRSTARVEREGGEAEEQATAEAEEENIEETDPEDDYRIAMPSKPSHLDFGKSTVSKADLSKMVKSGYFSESQKKLLRFGGEETTPKPEKDEIVIFKSFLKAGLRFPLHGIIAEVLKRFGIYFHQLTPNAIVRLSVYIWALRSQAVEPFADSFCRVHELHYQTKARKDGLHDNFGCYNFAYRKTTKFPVISYRSKWAAGWKSEWFYVNVDDDKEKLVQSPLELIFGETRPHCNMTPEGPTQQALDEFRIIAEHISTRDLVQEFLAFRVFPSLKEWEMPKLEGEKKEGELVRLPYYYKFKKYFKTPCQEWLDTIEIMCNEILGNYSKKEDQLMTAAFGTRPKRRLNRVLDALGFEYPDYENLNKGVGGRKRKRIAEALNEDEKELSKEKKIPKKRKVSSLKQKVSDEEETPASRSATDVEEILKVMTESLPAKLSPLGPQLTKFFQKEKEPEKTKKTTKTKRQRIIAVTEVFDKTPPRASAQKIPAAEEITNIEITLLEVAAAEATSIEDLNLESTIEHIDKMLLDMATEEATTAAKEAMAAVSRKEKEIADEASEDEAFMFQNLVGEKLSKTEIEELKEYAKSCGYKPGALLFGGIDDEKLDCIRDQTGAKVIGTLSKSIGFPKLETDISRYRRQHIVESKIKEQSATIEKKNFELQATEGLLAEAEAKITELNTKLFCQSEQFEQEKQELNAKLEAEVQQNSDLKKLLASLQDKCLEFSNKCIQRLRKIFHSVGASSEKFTPSAEDLPKTFEHIEGEIDELDEVIAGHGDFCAWVASRGTAVAFLKAGCDHGKIVNRPNFALSPSILDDIPDLARSISNRFVKMIWTKGGREKAGDEARSHLEPLGFDLQQLNSCRMTKPRPMLKENDVEAEAPWRSKRSRL

SEQ ID NO: 262152 - protein, 66 aa, Zea mays
  Clone ID: MRT4577_170696C.1.pep
FPLFVAHGLSHLLVSFFYSFCFGVHFRLVSLDSVISVYVSLVSLDLVPRWIPLFLATVKQFLKFRI

SEQ ID NO: 262153 - protein, 46 aa, Zea mays
  Clone ID: MRT4577_170697C.1.pep
EMRIIRKSKSSSYNSKTTVTNPQFADYNTKTHPCTRTLGCYHLIQR

SEQ ID NO: 262154 - protein, 191 aa, Zea mays
  unsure (1)..(191): unsure at all Xaa locations
  Clone ID: MRT4577_170698C.1.pep
XFGSVYKGXILGRDDDGSAVTTIAVKRLLDGARQGEKQFRAEVSSIGLIQHINLVKLVGFCCESDKRLLVYEHMVNGSLDVHLFNSNGGGGGGKDGVVVLDWSTRYQIAVGVARGLAYLHEGCRERIIHCDIKPENILLDASLVPKIADFGMAAIVPRDFSRVLTTFRGTIGYLAPEWIGGEAITEKVDAY

SEQ ID NO: 262155 - protein, 103 aa, Zea mays
  unsure (1)..(103): unsure at all Xaa locations
  Clone ID: MRT4577_170699C.1.pep
MGRTLFIRGNWKCNGTTDHVANIVKTLNERQVPPSDLDQVVASPTYVFLPVLKSQLCQEFHDAAHNCWVKKGRAFTGELRSEMLLNLGDPXVILGHSETRTLL

SEQ ID NO: 262156 - protein, 40 aa, Zea mays
  Clone ID: MRT4577_17069C.1.pep
YTKETMHSNDYFATKNDSFPASFIVLLNMFVHRVFFKTSS

SEQ ID NO: 262157 - protein, 70 aa, Zea mays
  Clone ID: MRT4577_1706C.1.pep
ENHETVKLLLVTYACTKISYMDDFEACHGLLRIVLLSITESTMLVFWGKIINVTIYINLWMIKKKKRNRA

SEQ ID NO: 262158 - protein, 88 aa, Zea mays
  Clone ID: MRT4577_170700C.1.pep
LYSYGDGRARGGVIKNKPRPHPDPEDDGIPNILNSRQPRGMAWGSLPVRDGQRDLPRHYEQTIEINTDAHVRQMLRYDTPPESGTRPG

SEQ ID NO: 262159 - protein, 129 aa, Zea mays
  Clone ID: MRT4577_170701C.1.pep
LIFRGPSYGYRGRVMLAFEDNGSSKIGVRFDKQIPDGNDLGGLCDEDHGFFCSAELLCPDFSAGEEVERLAMTELIEVISEENKSGPLIVLLKDVEKSFTGVTESLSSLWSKLESLPSGVLIIGSHTQI

SEQ ID NO: 262160 - protein, 88 aa, Zea mays
  Clone ID: MRT4577_170702C.1.pep
AHGLCSMQYGRGALKWGALTGVAPEGQSIRVVSLHCLHSVSGERHRAHGRRPAGRAGSRANMVVRGWWTVGWRPDRFESREIQANSSP

SEQ ID NO: 262161 - protein, 90 aa, Zea mays
  unsure (1)..(90): unsure at all Xaa locations
  Clone ID: MRT4577_170703C.1.pep
RRGGWCWRCYGXPPXXPSXXPSPSXLXXXCPPXXXXPSLXPSTXTTTITINXXQIYIYTPXHSFTYXYHITTINHLLPHFITPILITNSK

SEQ ID NO: 262162 - protein, 66 aa, Zea mays
  Clone ID: MRT4577_170704C.1.pep
GWVSQSTNSRAKVKKIGARENMTGGRNYRQAGEQTERLIDPPILSKVTIFQLRGPISSPRGPGPPG

SEQ ID NO: 262163 - protein, 155 aa, Zea mays
  unsure (1)..(155): unsure at all Xaa locations
  Clone ID: MRT4577_170705C.1.pep
MAAQLAVAFLALMSSSAFLAASGQKFNAIFSFGDSMFDIGNLSVNGPPVVLTLTQSSYGETFFGRATCRXSDRRLGVDFLAEKFXDGDDENGKXGGSDFEYGANMAIIGATTMDSGFLQTLGISDKICNNGPLNTQIQWMQQMMTSICGSTHACK

SEQ ID NO: 262164 - protein, 203 aa, Zea mays
  unsure (1)..(203): unsure at all Xaa locations
  Clone ID: MRT4577_170706C.1.pep
HSRSPSVRENIQFVFVGMXAPKXLSSLVELQTLETVEASKDLAEQLKKLMQLRTLWIDNITNADCANIFASLSSMPLLSNLLLSAKDENEPLHIEALKPGSTGLHRLIIRGQWAQRTLQCPIFQGHGRHLKYLALSWCHLSEDPLEMLAPHLPNLTNLRLNNMRSSNILVLPPGSFPNLKLLVLMHMPNVKQLVIGEGALQCI

SEQ ID NO: 262165 - protein, 65 aa, Zea mays
  Clone ID: MRT4577_170707C.1.pep
GDFSFLIVRSLGLIFLYGAATSGCTKASAAGESVARTTMSMACSSKGRSMTRGVSRPLEPARTHS

SEQ ID NO: 262166 - protein, 79 aa, Zea mays
  unsure (1)..(79): unsure at all Xaa locations
  Clone ID: MRT4577_170708C.1.pep
MFYTCSVQVPMTLVFXCDKRKKKKNGGRKPEENVETFQGLIREYLEAAPPWIMTSSVTNQGRDEILLHMSQLRNYWLKH

SEQ ID NO: 262167 - protein, 177 aa, Zea mays
  unsure (1)..(177): unsure at all Xaa locations
  Clone ID: MRT4577_170709C.1.pep
MPTDDGGGCDVSGTDEPGDIPGPHVPDAPNAKNEHNDKKEHSDXKLYAFNKPEAHPPYSLMFDDCIADLXIKKSXSSEVISHHLERKDEGXLPTNFQIQLTVHLKNVDARCQLTXRRTTNCCQLPTTNPKPTSPKHPGPKARPKPQPSPKAKALTTPKPNAPNPKPKAKAKVXPVAP

SEQ ID NO: 262168 - protein, 83 aa, Zea mays
  Clone ID: MRT4577_17070C.1.pep
GGQEPGTNEEIVQFACPRFKVGSPFFPKVFVTGSNVAPFSKFFKFSKGGLLGDSIKWNFSKFLVNKKGRFLVCFVPTLSPLSF

SEQ ID NO: 262169 - protein, 55 aa, Zea mays
  Clone ID: MRT4577_170710C.1.pep
SSLIYEYAKTTFVWIVISYTQISIQLFNTPWKFSDFSQSFRGIRHIVHSNTSSFL

SEQ ID NO: 262170 - protein, 176 aa, Zea mays
  Clone ID: MRT4577_170711C.1.pep
VPSPSSQNHPRWPSVAVDATSDAMPHRYGREEKEAPGAASGSWRSAASTDGGEHKIDLRVPGVALDLGIPGAALDLGLTSATSPHAPRRRDCATGDWGEDRDELGRKRTCWKRATKKKLAQTGDIQLLASLPSRRTWLAMGGGMVPIGERRKMMAARCRGGKWETKKRGRYLGSRP

SEQ ID NO: 262171 - protein, 82 aa, Zea mays
  Clone ID: MRT4577_170712C.1.pep
GPGTSGLNHTVRTKTEARLATLPPSCLRAPRPAAPAEDVGPDGGAAAHPHAGLTPPLQDEVPRRYGHGHQLLRAIDRRIDMH

SEQ ID NO: 262172 - protein, 55 aa, Zea mays
  unsure (1)..(55): unsure at all Xaa locations
  Clone ID: MRT4577_170713C.1.pep
TWVWGSYMQVSVVEERSPERSICFAFQLKKHAGREESTTXGRSANDGSIIFCPYL

SEQ ID NO: 262173 - protein, 41 aa, Zea mays
  Clone ID: MRT4577_170714C.1.pep
YTGRSGASFGFRSACVLRLDLSTSLSRHECAIYLFGQSHAR

SEQ ID NO: 262174 - protein, 108 aa, Zea mays
  Clone ID: MRT4577_170715C.1.pep
SVPGMPAPLRWRWTSSACYYTASCLRHGRTLFAYRWGCSCNTMQLNTRGKCPETGTDSCSGKTHWRQNWWPVNASPDKCYIAAMLHRALTTTKRADYVEAQPQLLHQY

SEQ ID NO: 262175 - protein, 74 aa, Zea mays
  Clone ID: MRT4577_170716C.1.pep
SSQRFGQERGQLVNQSRVSLPIWVVESFPSTIIGNLRWVYMWSLVSIIEVFQPQWHEAFPRRPISGGTHCGTPP

SEQ ID NO: 262176 - protein, 115 aa, Zea mays
  Clone ID: MRT4577_170717C.1.pep
VLILQAQEHGDAAAHDVEPGPLRLHQARQPARHRAAGRGPGPPALEPRRRAARAPRRGPPPPLLALVVHYSLRLSRLCTPSPFLLISARIVEHRRWWWQTGDGSSFAVVRLACCC

SEQ ID NO: 262177 - protein, 131 aa, Zea mays
  unsure (1)..(131): unsure at all Xaa locations
  Clone ID: MRT4577_170718C.1.pep
QTAPPLLTXQIVKNGAQELKRPHLDCYSALGRAGSTPQGIDSRARREREGCTLMCNIGQGYEKPAMHYLXPAGPRRLEVHNXITELELIMMHNRTYRDELAHNVYTKKRKEIVKRAAQLDNVGTEEFATLT

SEQ ID NO: 262178 - protein, 93 aa, Zea mays
  Clone ID: MRT4577_170719C.1.pep
AVSTGVDSLMLPVRICVCIVCPSHLSYIISKRVRARCSVYVYIPQRADEGHAILSESGSDGPCVLQPHVLSLMDYGLVGTEFSRYDRSYVVPI

SEQ ID NO: 262179 - protein, 55 aa, Zea mays
  Clone ID: MRT4577_17071C.1.pep
GHGLVPFFIFLSVYSYWNTMGGSPHPHPNQTSSLNNSMHQRFIVCVLLDQLIYKV

SEQ ID NO: 262180 - protein, 153 aa, Zea mays
  unsure (1)..(153): unsure at all Xaa locations
  Clone ID: MRT4577_170720C.1.pep
MRWRFRRALLPRRHRGRSSVNENARGSHQYSARXYSLNEDMGLGRYLSSDDFGVGGXYHWGDYLYTDGKNXXEDNSYYGCGFGALTSDSLHGRVLFELLLLQHLGQGCHKGDSDFERSLEVHPYLLEDRELLRPHYSFXDRPVLQHSDFLGND

SEQ ID NO: 262181 - protein, 54 aa, Zea mays
  Clone ID: MRT4577_170721C.1.pep
TLIGLSPGGPSQNKFYKGRELIHKRGRTPPRKETPPGGFWTVINQPPDPGVDPG

SEQ ID NO: 262182 - protein, 77 aa, Zea mays
  Clone ID: MRT4577_170722C.1.pep
PRGRPGRLFVESASILFKLAPLIRSLFTGASWVTSAFNKVAKTATDVGTMTKEKMAAEEHHKGSGPSSGGHSYTPIR

SEQ ID NO: 262183 - protein, 238 aa, Zea mays
  Clone ID: MRT4577_170723C.1.pep
MPVMAPTGGAPYNATSRSVPAPRLLLETPSSRLPLIAGQTAPSGSVAASTSSANPIVSPVVTESSGIAQASQPILVDSEPVNIKDDDDEHGAKRQKKCTSEVWQYFTRETKTVTINCKNYTEKWASCNFPRCKTKYRCESTKGTTGFWTHLRTTHSVVKGQQQLAVGKDHEKDINIVEPYKYDPEVSSRKFYLAIIMHEYPSNIVEHEYLIDFLKSLRPSFPIKSRIIVRKEILSIYS

SEQ ID NO: 262184 - protein, 273 aa, Zea mays
  Clone ID: MRT4577_170724C.1.pep
DSPAMSATAVKFPVEAPPRTVKVTNVSLSATVQDIKEFFSFSGDIEHVEMQSGDEWSQIAYVTFKDAQGAETALLLSGATIVDLSVIIGPAPEYQPPPIASAPPMSGTRVPVGGDNNVVHKAEDVVSTMLAKGFVLGKDAVGKAKAFDEKHGFTSTAGAKVASIDKKIGLSNKITTGTSLVSGKVKEMDQKFQVSDKTKSAFAAAEQKVSSAGSAIMKNRYVFTGASWVTSAFNKVAKTATDVGTMTKEKMAAEEHHKGSGPSSGGHSYTPIR

SEQ ID NO: 262185 - protein, 240 aa, Zea mays
  unsure (1)..(240): unsure at all Xaa locations
  Clone ID: MRT4577_170725C.1.pep
DSPAMSATAVKFPVEAPPRTVKVTNVSLSATVQDXKEFFSFSGDIEHVEMQSLFLXYFGSGDEWSQIAYVTFKDAQGAETALLLSGATIVDLSVIIGPAPEYQPPPIASAPPMSGTRVPVGGDNNVVHKAEDVVSTMLAKGFVLGKDAVGKAKAFDEKHGFTSTAGAKVASIDKKIGLSNKITTGTSLVSGKVKEMDQKFQVSDKTXSAFAAAEQKVSSAGSAIMKXRYVFTGASWVTGA

SEQ ID NO: 262186 - protein, 269 aa, Zea mays
  Clone ID: MRT4577_170726C.1.pep
MATAVEVPVEAPVRTVKVTNVSLSATVQDIKEFFSFSGDIDHVEMQSGDEWSQVAYVTFKDAQGAETALLLSGATIVDLSVIIAPAPEYQPPPTASAPPMSGTRVPVGGGDNNVVHKAEDVVSTMLAKGFVLGKDAVGKAKAFDEKHGFTSTAGATVASIDKKIGLTDKITTGTSLVSGKVKEMDQKFQVSDKTKSALAAAEQKVSSAGSAIMKNRYVFTGASWVTSAFNKVAKTATDVGTMTKEKMAAEEHHKGSGPSSGGHSYTPIR

SEQ ID NO: 262187 - protein, 48 aa, Zea mays
  Clone ID: MRT4577_170727C.1.pep
RLYPLIRLHLFPHLVLLTHHISHKPDHYIKYLPPKPSNNYNTYIHIPI

SEQ ID NO: 262188 - protein, 71 aa, Zea mays
  Clone ID: MRT4577_170728C.1.pep
SASEHATQGTVGDYFITAAPVECAGCCIYGEIPCYIVRGCSRSWRTRKLWHAKSSAREQRSCPIRSSSYHI

SEQ ID NO: 262189 - protein, 94 aa, Zea mays
  Clone ID: MRT4577_170729C.1.pep
PQPKGGAIKKTRFLEKKGWGGMGFNMGKVPPQGFFTKEVGVPPPLNPNFENISCEKKNGPGPPPLEKDPGLKQTFYPNLCSKWNPFAPACPKVQ

SEQ ID NO: 262190 - protein, 102 aa, Zea mays
  unsure (1)..(102): unsure at all Xaa locations
  Clone ID: MRT4577_17072C.1.pep
GGAVDHECMLKIGELWSKRRCRFLTFXMGDKFSEIVVDHVGERATSYDDFSNSLPANDCRYATYDFDFVTAEDGQKSRIFYVLWCASSAPAESKMLYACSTQ

SEQ ID NO: 262191 - protein, 64 aa, Zea mays
  Clone ID: MRT4577_170730C.1.pep
LASLNSTNPQHIEGFLLISIRSTQAVVNLGCYVQLVLCHTIQGIQSGSCVSFCQVCVCECGIYK

SEQ ID NO: 262192 - protein, 65 aa, Zea mays
  Clone ID: MRT4577_170731C.1.pep
TEAGNFRCDGTHGERISFPHSKLMHIYNCTKEANAIHNLSFPLFTCYPPQPVMFTDPGFSYLILC

SEQ ID NO: 262193 - protein, 99 aa, Zea mays
  unsure (1)..(99): unsure at all Xaa locations
  Clone ID: MRT4577_170732C.1.pep
HNIEMDDKTFLSNMERAVDYLNSVEKELASYQYLNWNPENRIIGRIMLARAYHSLFMHNMCIRPTDEXLDDFGTPYFTIYYARLILCIRYTHYMTSLTS

SEQ ID NO: 262194 - protein, 75 aa, Zea mays
  Clone ID: MRT4577_170733C.1.pep
ASPPNVLHTLTCQSTMAGLSVRVYGHGIICLPLSCYETTFATWNYNDPEHSGAPITCATCWHIRISDDGFGCWQC

SEQ ID NO: 262195 - protein, 59 aa, Zea mays
  Clone ID: MRT4577_170734C.1.pep
NISTMKIALGKKSKVKKHAVFVSTIPCLPFGAACDNYEVETEVKSHAYTHCPVTYPVET

SEQ ID NO: 262196 - protein, 89 aa, Zea mays
  Clone ID: MRT4577_170735C.1.pep
GHLCGNQRVLTKHKHIPGLIHNMTARCCDLPFPEQACCAEEEKLTFINDLCCPRRNIWRDPALCCYLSPGDEQVNCFNINYLRNVALVS

SEQ ID NO: 262197 - protein, 101 aa, Zea mays
  unsure (1)..(101): unsure at all Xaa locations
  Clone ID: MRT4577_170736C.1.pep
FLFFFFFFFFYGFFSFFSCFFSFFLGPTKPFFGQIGGLYPLLRGGPQGASKQPRCIVGGGAPLAREETFQGALKRGPYEPRTPAGTFXKENGAPLGLPKPF

SEQ ID NO: 262198 - protein, 148 aa, Zea mays
  unsure (1)..(148): unsure at all Xaa locations
  Clone ID: MRT4577_170737C.1.pep
QQCFEELATKGDTQGGGEDFYHRIKKYFIRGIIFILEMDIKRDTFLIGKLRREAEGKMXVLTTLYQNRVEKNFFFDGTDXSKPLTKTRFEELNNDLLRKTMIHVKKAMEDTALEKSHIQEIALPGGSTRIPRVQQLLKDYFIGKEPYM

SEQ ID NO: 262199 - protein, 118 aa, Zea mays
  Clone ID: MRT4577_170738C.1.pep
HMLPSIRLLAKFDHIHIPRKQTTAVLASAADICDNNGGHTQTSADVGDPRLSDEFSHKNYGGHTMARPLGGYPLVYKRGVSVHLVDCITSEGQACIGRTVRAQLGVILLHERGVNMIH

SEQ ID NO: 262200 - protein, 143 aa, Zea mays
  Clone ID: MRT4577_170739C.1.pep
MQTILNISGNAVKFTKEGHITLVASIMKADSLREFRTPEFHPTASDEHFYLKVQVKDTGCGVSPQDLPHVFTKFAHPQSGGNRGVNGSGLGLAICKRFVSLMGGHIWIDNEGTGRGCTATFVIKLGVCDNTNTYQQQLIMKCI

SEQ ID NO: 262201 - protein, 67 aa, Zea mays
  Clone ID: MRT4577_17073C.1.pep
PFYMLTRMFCFGFYGNKWRPDPGFRAPSRPPEKNPPCPCGVSVVKMTPGVFDFYRPPAKWTDILLRA

SEQ ID NO: 262202 - protein, 78 aa, Zea mays
  unsure (1)..(78): unsure at all Xaa locations
  Clone ID: MRT4577_170740C.1.pep
RPNRHLRLLLLCPSPSAPSTPKTAKLSGSAXRLMIDSHLDHTMDDHNDQVNLFLLTSGALRQSLYCEDSLLEFSTCTI

SEQ ID NO: 262203 - protein, 86 aa, Zea mays
  Clone ID: MRT4577_170741C.1.pep
TPKRGAGAGAFPSIHYIYMIASRQQANSSSFWTPHTHSFPLFHSSISHPVNKGGASQWQELARRLIRPSSVQHEEGVRQPTQRGRP

SEQ ID NO: 262204 - protein, 151 aa, Zea mays
  Clone ID: MRT4577_170742C.1.pep
FPANLFFFGLPVPSVLVPFFFTPFLLWPVFFLGPLGPGAPYPLLPMVSFPSFGPFALRPPLSFLCQFSGGGGALSVFAPAWVVAPAVVGVLWPFRLAFSFLWSPVLLLPPCCFAGPFPPLSGSPPPPPPFCVCAPLSLGLPLRPLTPLRRE

SEQ ID NO: 262205 - protein, 60 aa, Zea mays
  unsure (1)..(60): unsure at all Xaa locations
  Clone ID: MRT4577_170743C.1.pep
VDLSCRSGSSSLSGGPPGFGFRAERAKIPALDAEYRXFVGGLAWGTDDHCLHNAFSTYGE

SEQ ID NO: 262206 - protein, 84 aa, Zea mays
  unsure (1)..(84): unsure at all Xaa locations
  Clone ID: MRT4577_170744C.1.pep
VFTGGGALSDVDPRRRGATHSSPKAKSMLQKMQMFNSYLEEICAVXSDWVIADEQLPADVKSAIVDSVMPAYRGLIGRLRSSPE

SEQ ID NO: 262207 - protein, 48 aa, Zea mays
  unsure (1)..(48): unsure at all Xaa locations
  Clone ID: MRT4577_170745C.1.pep
MPLTNQQAVDYRRFNPLIFADGGTGITTFVKRHITGXFGKKFEPTIPA

SEQ ID NO: 262208 - protein, 43 aa, Zea mays
  Clone ID: MRT4577_170746C.1.pep
PAMSNAMYNKMWHQTQESLGAVLDKGAQKMIEPQRNPGFTLQH

SEQ ID NO: 262209 - protein, 114 aa, Zea mays
  Clone ID: MRT4577_170747C.1.pep
GSWRIRFSPAPREEQGPQVGRGVRRPEETPLLGLIGPSGIVVPRGVGPACAPLWVRPCRRAAPRAPGPSCGGTGGGGACPPPWIMMRARRGMSGLSLLEGEQVAIGSMVGRTKG

SEQ ID NO: 262210 - protein, 143 aa, Zea mays
  unsure (1)..(143): unsure at all Xaa locations
  Clone ID: MRT4577_170748C.1.pep
RFYITEVLLALEYLPPLGIIYRDFKPENVLXREDGPIMLSDFDLSFCCAVSPTLIRSSNPDAKXKALRKNNQGFCVXTLCLXPSCITQPLWAAPTPWFGPRLFSSKSKTKKDRXPKPKVAPPISPWPELKTEPTQARSKSFVC

SEQ ID NO: 262211 - protein, 136 aa, Zea mays
  Clone ID: MRT4577_170749C.1.pep
FWGGNKGPSSPRLGWVFKEGSPWFWACPPWWGPFWGSPFCPPQDPVGVWFPFWAHPFAHPREIPLFFRGGSFGGSLMPKSSFSGLFLGIPPSPASRGFSRALFLCVGGLSLGGISKGLFPRVVPCFPPQLCIPFWV

SEQ ID NO: 262212 - protein, 197 aa, Zea mays
  Clone ID: MRT4577_17074C.1.pep
MAKIAAAAAAAAALCFAALVAVAVCQGEVERQRLRDLQCWQEVQESPLDACRQVLDRQLTGGGVGGPFRWGTGLRMRCCQQLQDVSRECRCAAIRSMVRGYEEAMPPLEKGWWPWGRQQQPPPQGGGGGQGGYYYPCSRAGEGYQTQMYPPCRPGTTGPRIGRVRLTKAREYAAGLPMMCRLSEPQECSIFSGGDQY

SEQ ID NO: 262213 - protein, 76 aa, Zea mays
  Clone ID: MRT4577_170750C.1.pep
SFPLLWGPELIRRSRATLHISDEWTFQFSRCRTKKKKKKKKKKKKTNKKIKLKKKKTKKKKKKKIKKGGPVLKDQT

SEQ ID NO: 262214 - protein, 66 aa, Zea mays
  Clone ID: MRT4577_170751C.1.pep
IEIFFKRGERIVIKVKLKKRNCLVKWVYKIRVYKGGPILLNFKIIRKFCLAIGSVPMPYKASSPEK

SEQ ID NO: 262215 - protein, 110 aa, Zea mays
  unsure (1)..(110): unsure at all Xaa locations
  Clone ID: MRT4577_170752C.1.pep
SVLALIALFASATHAVIITXCSLATSSIITQIXSPGTSMGFEHPTVQAYRLQQAISASVLHQPSFQLQQQSLVHLTVQTIATHQQQPFLPALNHLAIANPAGYLQQQMLA

SEQ ID NO: 262216 - protein, 174 aa, Zea mays
  unsure (1)..(174): unsure at all Xaa locations
  Clone ID: MRT4577_170753C.1.pep
QGIRPSPPTTRAQGNSKTPGAKGWEAFRNRRGSGTKIWGAPPRRGGQRAIPEGGGAXVREGPGKKAPGTPHPEKEHQPWGNGPTQTRQSPKARGPSCTRFKQATPTDSCPPRLEETRVECXIPPPPPFSPKVLTKKTNFWKEAEIEIGQGKKKKIHPPQKKKKKQKKKKKKKKK

SEQ ID NO: 262217 - protein, 59 aa, Zea mays
  unsure (1)..(59): unsure at all Xaa locations
  Clone ID: MRT4577_170754C.1.pep
MVNLSFGSVGDSFSATSIKAYVAXFIATLLFVFAGVSSAIAYGQLTNGGALDPAGLVAI

SEQ ID NO: 262218 - protein, 250 aa, Zea mays
  Clone ID: MRT4577_170755C.1.pep
RDHARHPKGNRVKISRAGTWRQTATLGSPAKTPFLPSLPRPVSPRRAAAAFAFSPAAAAAPIAASLLQGPVLVWAGRLCIYYALLHVGLAGSPRNPFLSHEIGGEDGAGDSDLGFSKWAEKLRGGASGEKDAQHKGKLTSKWKPTTKGTLKRTYRVRSTDEGRRVLKEIASVLSQDDHFVDASSHKGCQVRRESAHGESVCCYNVRALFDELPTPHLLLEITPFPAGQLTDNDYRKAERLEMVLRLSTSI

SEQ ID NO: 262219 - protein, 276 aa, Zea mays
  Clone ID: MRT4577_170756C.1.pep
PRVRSARARRAAAARAHCSLQLARIANRHARLPPPRPSRRRRRRRGALCLLSPLTPAGEDPVPPLAPAPGLAEARRRRFRLLPRRRGGPHRGVAAPGPLWAGRLCIYYALLHVGLAGSPRNPFLSHEIGGEDGAGDSDLGFSKWAEKLRGGASGEKDAQHKGKLTSKWKPTTKGTLKRTYRVRSTDEGRRVLKEIASVLSQDDHFVDASSHKGCQVRRESAHGESVCCYNVRALFDELPTPHLLLEITPFPAGQLTDNDYRKAERLEMVLRLSASI

SEQ ID NO: 262220 - protein, 250 aa, Zea mays
  unsure (1)..(250): unsure at all Xaa locations
  Clone ID: MRT4577_170757C.1.pep
MLAYLLNGPAAAIAAAPSAFLLRSLPPAKTPFLSSLPRPVSPRRAAAAAFAFNPAAAAAPIVASLLEGPVLVWAGRLCLYYALLHVGLAGSPRNPFLSXRDXGGEDGAGDSDLGFSKWAEKLRGGASGEKDAQHKRKLTSKWKPTTKGTLKRTYRVRSTDEGRRILKEIASVLSQDDHFVDASSHKGCQIRRESAHGESVCCYNVRALFDELPTPHLLLEITPFPAGQLTDNDYRKAERLEMVLRLSTSI

SEQ ID NO: 262221 - protein, 211 aa, Zea mays
  Clone ID: MRT4577_170758C.1.pep
MAGQSDPHLSIFSPSEVEFVAEDEIVEIVPNIRMDALNMICGDFGPFFPQIPTKVPLWLAVALKKRSKCTIRTPDWMTVDRLTQVLEAERESPREFQPLPFHYIEISKLLFDHARDDISDAYLVRSLIEDIRDVRFHKVETGLETISGRTHAVKLKNLSAMEVNIVRPFMVRTLQAFYKHDSAQMIQQADNIGSRATLVTDRGPRRDLRRR

SEQ ID NO: 262222 - protein, 73 aa, Zea mays
  Clone ID: MRT4577_17075C.1.pep
QNFPELFSTCNYIRATQQLHPHHTSSCNYNTPAVAIILFTFFNRYLDRIIQQLQSHLMQGCNHTTPVVGIIFV

SEQ ID NO: 262223 - protein, 726 aa, Zea mays
  Clone ID: MRT4577_170760C.1.pep
MDGRKRKGKFRNSLRRMAMECLCSGEQLKASDETMRSSDSTITKDFSASGYSSRNGEIEQYLDNGNIEEAELSLREGICLNYEEARALLGRLEYQRGHVEAALRVFDGIDISALVPKMKISIARKTDRRKTHSQWDSPPMPLHAVSLLMEAIYLKARALHDLGKDKEAAQECRMILDIVEAAVPEGLPAGFGKGCKLNEIICKAVELLPELWKSGGFSLETISSYRRSLLNNWNLDGETIARIQKKFAVFLLYSGCEARPPNLHSQLDGSFVPRNNIEEAILLLMILLRKSNLKRIEQDPSVMHHLTFALSMSGQLIPLAGQFEELLPGVLDKKEWLYSVALCYLAEEDDLSALNLLKIILKSGEDSVQLIELLLASKACIEMSIHTEGAFYARRAIANMQGGCKPMAGLANLLLGVALSNQARSAISDTDRASWQCEALEALGNAEKNIHGKDSRALYSLSLENAVQRKLELAAFYAKRLVKLEAGSELRSWLLLARILSAQKLFADAETVVDAALDQTGKWCQGDLLRTKARIQAAQGQFREAVETYTQLLAIIQLRTKSLTAGVCLPKGNKDDKGLETETWYDLALLYLGMAQWRDAEVCVLKIRSISPYSALAWHATGKIYEAKGLRKEALGAFFRALDLDPKHVPSLISTATVLQQLGDRPLPSIRCFLTDALQLDRTNHVAWFNLGLLYKEEGGRSAAEAAECFQAAAFLKETAPSEPFR

SEQ ID NO: 262224 - protein, 228 aa, Zea mays
  unsure (1)..(228): unsure at all Xaa locations
  Clone ID: MRT4577_170761C.1.pep
MAGQSDPHLSIFSPSEVTNPFPSTLHRQGLSSSVLLQVEFVAEDEIVEIVLNIRMDALNMICGDFGPFFPQIPTKVPLWLAVALKKRSKCTIRTPDWMTVXVLEAERESPREFQPLPFHYIEISKLLFDHAGDDISDAYLVRSLIEDIRDVRFHKVKNGLETISGRTYAVKLKNLSAMEVNIVRPFXMVRTLQAFYKHDSPQMIQQADNVGTRATLVTDRGPQNKLPL

SEQ ID NO: 262225 - protein, 62 aa, Zea mays
  unsure (1)..(62): unsure at all Xaa locations
  Clone ID: MRT4577_170762C.1.pep
RXFVVRLLXXRFCFRGSRFSAGLALLRAXFAVVMCLLCRXGDXWCLSLXAACRPVFSGVLVV

SEQ ID NO: 262226 - protein, 90 aa, Zea mays
  unsure (1)..(90): unsure at all Xaa locations
  Clone ID: MRT4577_170763C.1.pep
LLSFYLVGTPVAVYLAFGARAGFRGLWYGLLSAQXATCVALVLVAVVWRTDWRVEAMRAKKLAGLELTNDAEEESRRLVAAPGEQAEDTS

SEQ ID NO: 262227 - protein, 45 aa, Zea mays
  Clone ID: MRT4577_170764C.1.pep
RVGPCVFFSYKMIVLIIEEAVKQQADLPIIIERSLIRNRTSGSTV

SEQ ID NO: 262228 - protein, 44 aa, Zea mays
  Clone ID: MRT4577_170765C.1.pep
SNLSFVVKTPGGRVCVLVHRDASSYLKKVGFYPDKFAFFPPYAF

SEQ ID NO: 262229 - protein, 50 aa, Zea mays
  Clone ID: MRT4577_170766C.1.pep
TDKNGMLVVRVSLHGDLEQCCYQCKKGMLVRWYAMLKDSPAWWFVLQMTQ

SEQ ID NO: 262230 - protein, 233 aa, Zea mays
  Clone ID: MRT4577_170767C.1.pep
MAQAVEEWYRQMPIITRSYLTAAVVTTVGCTLEHYEIWRLVTNFLYFRKMDLDFLFHMFFLARYCKLLEENSFRGRTADFFYMLLFGATVLTGIVLIGGMIPYISETFARILFLSNSLTFMMVYVWSKHNPFIHMSFLGLFTFTAAYLPWVLLGFSILVGSSTWVDLLGMIAGHVYYFLEDVYPRMTGRRPLKTPSFIKALFADDNVVVAQPPNAGIGAGARFGAIGVDPQAQ

SEQ ID NO: 262231 - protein, 129 aa, Zea mays
  unsure (1)..(129): unsure at all Xaa locations
  Clone ID: MRT4577_170768C.1.pep
MSWEDNAYLHKLDAQVERHEXMVDHMENVAKTVYVEELTVDEHNLLSVDYHNVIGDRRASWSIISSIXHKEDSRNNEEPVIQIKEYRGKIGAEMSNICDGILKVIDSHLVTSSTGAEAKVVYLLMKGDY

SEQ ID NO: 262232 - protein, 249 aa, Zea mays
  Clone ID: MRT4577_170769C.1.pep
MAQAVEEWYRQMPIITRSYLTAAVVTTVGCTLEIISPYHLYLNPKLVVQHYEIWRLVTNFLYFRKMDLDFLFHMFFLARYCKLLEENSFRGRTADFFYMLLFGATVLTGIVLIGGMIPYISETFARILFLSNSLTFMMVYVWSKHNPFIHMSFLGLFTFTAAYLPWVLLGFSILVGSSTWVDLLGMIAGHVYYFLEDVYPRMTGRRPLKTPSFIKALFADDNVVVAQPPNAGIGAGARFGAIGVDPQAQ

SEQ ID NO: 262233 - protein, 199 aa, Zea mays
  Clone ID: MRT4577_17076C.1.pep
MGRGRGAAAAAAALCFAALVAVAVCQGEVERQRLRDLQCWQEVQESPLDACRQVLDRQLTGGGGGGPFRWGTGLRMRCCQQLQDVSRECRCAAIRSMVRGYEEAMPPLEKGWWPWGRQQQPPPQGGGGGQGGYYYPCSRAGEGYQTQMYPPCRPGTTGGGPRIGRVRLTKAREYAAGLPMMCRLSEPQECSIFSGGDQY

SEQ ID NO: 262234 - protein, 247 aa, Zea mays
  Clone ID: MRT4577_170770C.1.pep
MAQAVEEWYRQMPIITRSYLTAAVVTTVGCTLEIISPYHLYLNPKLVVQHYEIWRLVTNFLYFRKMDLDFLFHMFFLARYCKLLEENSFRGRTADFFYMLLFGATVLTSIVLIGGMIPYISETFARILFLSNSLTFMMVYVWSKHNPFIHMSFLGLFTFTAAYLPWVLLGFSILVGSSTWVDLLGMIAGHVYYFLEDVYPRMTGRRPLKTPSFIKALFADASTRTTMLWWHSHPMLELVLVQGLRGK

SEQ ID NO: 262235 - protein, 73 aa, Zea mays
  Clone ID: MRT4577_170771C.1.pep
TIQFDSKNENSMAHSSVFLQLKIIMALLPIHSGYTTVSTSSNSFCMSIRPDKKIITICLRKKDQSKPSSWIGL

SEQ ID NO: 262236 - protein, 47 aa, Zea mays
  Clone ID: MRT4577_170772C.1.pep
QGHRRSGLGFHSCGTSQGALMRGARFVTPSSSGSAWQDNPSSGGVGI

SEQ ID NO: 262237 - protein, 122 aa, Zea mays
  unsure (1)..(122): unsure at all Xaa locations
  Clone ID: MRT4577_170774C.1.pep
MAPTTADCEASLLLNAGVRACDANEVADATNTCMPTASHFDXAAKEHAATKHKDRHAXDIRNVHKVKKIVVDNVNITDRQIPRAGPHSIVERGVVDHDDSHDLGKGEHELTRTSGNGGERVA

SEQ ID NO: 262238 - protein, 76 aa, Zea mays
  Clone ID: MRT4577_170775C.1.pep
FSARGAKLLHNPGARRCPPSGDRYPTVVNNAVTEDHEAVPPDPVENIGDIAPRQPDDLTDAVLEEGTTTIDEIAPC

SEQ ID NO: 262239 - protein, 58 aa, Zea mays
  Clone ID: MRT4577_170776C.1.pep
MRQEGHETLYVQAFVVKPYADARIKEGYLLFTLRRHHRLIKRHGHWGVAATLSIKGPA

SEQ ID NO: 262240 - protein, 60 aa, Zea mays
  Clone ID: MRT4577_170777C.1.pep
SSLSPYTVRISQSIHKVHHSTFYSESPWYPVHSVFLQYDVRIYSLSITMCVSVLNGITLV

SEQ ID NO: 262241 - protein, 101 aa, Zea mays
  unsure (1)..(101): unsure at all Xaa locations
  Clone ID: MRT4577_170778C.1.pep
RRRWVHPDAVLFVHLFQPGSGLPLVIGRTVPLAPVPSVDGELVGLCLCRVFTLPTGWVVAVLLLGPGSTHRECEVWFRVXVGFQKIILAPPLFDVRSRKIA

SEQ ID NO: 262242 - protein, 122 aa, Zea mays
  Clone ID: MRT4577_170779C.1.pep
MGFEGPAPPAVPHAEPLRAGQLYFVLPAAARRRGLRREEVAALAVRASAALSSRASASASASAAPGRRRRGAVAPLVFAPPPEDEEREQHKTTALAAPPVRRPARPGRRLVRFASDLTAIPE

SEQ ID NO: 262243 - protein, 110 aa, Zea mays
  Clone ID: MRT4577_17077C.1.pep
MDSKVCVFQLALLGVALAALAGPNIAGGIMEVGLASSRATGAAHAARQMMAQATTTMSVMELEVRRRILDSISSSSSLNPDRAACLGACPGRGRPYTSRSCQHVYQCPSS

SEQ ID NO: 262244 - protein, 79 aa, Zea mays
  Clone ID: MRT4577_170780C.1.pep
PFILLEHKFAGFAGLNPQEACPPLYPIMGPRGPIKQRPRPGRPFQPLTFVCPPLSPLVANFPLCSLQFLKCCISSVLFP

SEQ ID NO: 262245 - protein, 114 aa, Zea mays
  unsure (1)..(114): unsure at all Xaa locations
  Clone ID: MRT4577_170781C.1.pep
MGRTPAMXPGELGFGSMYATTALYRRRRHRPWAAGRRHGRNAAVRARLWATGSAPILSRRWGWRLTYVWWPRRGARLIGVRAPNRPGCCLPAHLAPRTLSSPSGTLARTGECPT

SEQ ID NO: 262246 - protein, 76 aa, Zea mays
  Clone ID: MRT4577_170782C.1.pep
NLPHPSLVGQNPSFAPERVQSKVRPPLWPSGNKPAANFVGNSWGFIPGPGAPDYELTGQPVFRYDESSFCPKHLDH

SEQ ID NO: 262247 - protein, 73 aa, Zea mays
  Clone ID: MRT4577_170783C.1.pep
SWKYINFLYILYIFSFSLLHNISKTLKCNFGFNSNIHLIIVFLLLLLYHQVHKQAKLHHDAQFSGMSLINRFF

SEQ ID NO: 262248 - protein, 74 aa, Zea mays
  Clone ID: MRT4577_170784C.1.pep
KPSPPSTSAPISAPLPLQHLPSPSSRLCSSPRRQPWVTPRSRPAPRVGVFHLLLLAAPSCSVLRLRSDQSCFAD

SEQ ID NO: 262249 - protein, 69 aa, Zea mays
  Clone ID: MRT4577_170785C.1.pep
FLKGSHREFSELQPRHKLYHFLSTLQQYLHFHLSDISWRRFQHSLKNQVRDILDLEYVHICYITDALDM

SEQ ID NO: 262250 - protein, 92 aa, Zea mays
  unsure (1)..(92): unsure at all Xaa locations
  Clone ID: MRT4577_170786C.1.pep
VCVLSVSAGIQEHEYPYGVIAARDTTVADTTRFIARRCGGVGPVGTSEFLAEALLSVVSPAALPGRQLRGFHGHQKTILSYNTKDRGRIVXK

SEQ ID NO: 262251 - protein, 84 aa, Zea mays
  Clone ID: MRT4577_170787C.1.pep
PPEPSYSRWCPPRVHASQGIVMPQTRHPTRSSFYSVVPPGPLAEAGVPETLRLAWWAGPAQPSSEQDGQVTTAGHQASDHAVGR

SEQ ID NO: 262252 - protein, 58 aa, Zea mays
  Clone ID: MRT4577_170788C.1.pep
MMVFKMCVNSRVEYETPHILLAIRLYTKFAACQCAIYIANPERHLTSTKRSRSTAVNI

SEQ ID NO: 262253 - protein, 48 aa, Zea mays
  Clone ID: MRT4577_170789C.1.pep
MFFFVKTHNTNAYFKRFQVKFKKKRAGKTDYRARILLINQDKNKFNTP

SEQ ID NO: 262254 - protein, 70 aa, Zea mays
  Clone ID: MRT4577_17078C.1.pep
SVYIKKKILVVNLHIRTAHNTHIYNIFKESKLTEFNPNSLIENYWPMMFSNFIHTLSHLITLLNTSKYTY

SEQ ID NO: 262255 - protein, 629 aa, Zea mays
  unsure (1)..(629): unsure at all Xaa locations
  Clone ID: MRT4577_170790C.1.pep
MMFRLRDAAKAKDVVSHYWVKMCSCMASTFGATSTVGLMAAPTGKNVRLQRRVNFRVRAAKELYFNKDGSAIKKLQTGVNKLADLVGVTLGPKGRNVVLESKYGSPKIVNDGVTVAREVELEDPVENIGAKLVRQAAAKTNDLAGDGTTTSVVLAQGLIAEGVKVVAAGANPVQITRGIEKTAKALVEELRKLSKEVEDSELADVAAVSAGNNYEIGNMIAEAMSKVGRKGVVTLEEGRSSENFLYVVEGMQFDRGYISPYFVTDSEKMSAEYENCKLLXVDKKITNARDLINVLEEAIRGGYPILIIAEDIEQEALATLVVNKLRGSLKIAAIKAPGFGERKTQYLDDIAILTGGQLNFRSRASLXHVCSLFISILCFXATVIRDEVGLSLDKADKSVLGTAAKVVLTKESTTIVGDGSTQDEVTKRVAQIKNLIEAAEQEYEKEKLNERIAKLAGGVAVIQVGAQTETELKEKKLRVEDALNATKAAVEEGIVVGGGCTLLRLAAKVDAIKDTLENDEQKVGAEIVRRALSYPLKLIAKNAGVNGSVVTEKVLSNDNFKYGYNAATGQYEDLMAAGIIDPTKVVRCCLEHAASVAKTFLTSDVVVVDIKEPESAPLANPMDNSGYGY

SEQ ID NO: 262256 - protein, 579 aa, Zea mays
  Clone ID: MRT4577_170791C.1.pep
MASTFGATSTVGLMAAPTGKNVRLQRRVNFRVRAAKELYFNKDGSAIKKLQTGVNKLADLVGVTLGPKGRNVVLESKYGSPKIVNDGVTVAREVELEDPVENIGAKLVRQAAAKTNDLAGDGTTTSVVLAQGLIAEGVKVVAAGANPVQITRGIEKTAKALVEELRKLSKEVEDSELADVAAVSAGNNYEIGNMIAEAMSKVGRKGVVTLEEGRSSENFLYVVEGMQFDRGYISPYFVTDSEKMSAEYENCKLLLVDKKITNARDLINVLEEAIRGGYPILIIAEDIEQEALATLVVNKLRGSLKIAAIKAPGFGERKTQYLDDIAILTGATVIRDEVGLSLDKADKSVLGTAAKVVLTKESTTIVGDGSTQDEVTKRVAQIKNLIEAAEQEYEKEKLNERIAKLAGGVAVIQVGAQTETELKEKKLRVEDALNATKAAVEEGIVVGGGCTLLRLAAKVDAIKDTLENDEQKVGAEIVRRALSYPLKLIAKNAGVNGSVVTEKVLSNDNFKYGYNAATGQYEDLMAAGIIDPTKVVRCCLEHAASVAKTFLTSDVVVVDIKEPEAAPLANPMDNSGYGY

SEQ ID NO: 262257 - protein, 134 aa, Zea mays
  Clone ID: MRT4577_170792C.1.pep
PLLPRNKRYTLAGLDEGPEHTQREPRRASTAAAATAGPTPATTTTEEATTRPALKTTAAAKEATTSTARKTTTAAAAAMGTAGPAATTTGADTAEGATTSPGAATTTAEAPPAPVATSTETTATTAGTTDRAPP

SEQ ID NO: 262258 - protein, 45 aa, Zea mays
  Clone ID: MRT4577_170793C.1.pep
NHGLHPTVWRTIIARVKLMPLKHTTWSPDQPQPDQRGKDMLDPQQ

SEQ ID NO: 262259 - protein, 57 aa, Zea mays
  Clone ID: MRT4577_170794C.1.pep
LLRQAPSRSRGAGLPPTHDLRAPRGIAPHPHPSDKKMPVVERDVFSIYIPMEKKLLH

SEQ ID NO: 262260 - protein, 77 aa, Zea mays
  unsure (1)..(77): unsure at all Xaa locations
  Clone ID: MRT4577_170795C.1.pep
AIAIHCXCPAPIIRKXRREHSEEXVPKHXEXKPPDKPTGXGGAQEXAXXXSXSPXSGCGWRCAASXRWXAPPGSSSP

SEQ ID NO: 262261 - protein, 30 aa, Zea mays
  unsure (1)..(30): unsure at all Xaa locations
  Clone ID: MRT4577_170796C.1.pep
EIYYMTRLXVGRKWHNHLLESACLANTIGL

SEQ ID NO: 262262 - protein, 121 aa, Zea mays
  Clone ID: MRT4577_170797C.1.pep
HPSEQDSKAFFVLEKSDVALEGKVVGHFWLVPNANQAFFWVTLRRVFLGRVGTPARLAVRGFFLVLKKGQGFGLLGPIGAGKPSSIILWMGLIKPTFGPAFVPGWVLILALGAFFPILGGG

SEQ ID NO: 262263 - protein, 173 aa, Zea mays
  Clone ID: MRT4577_170798C.1.pep
LGTSRPAGIPSCRHWILREIAHCAAAIPNVETLSAAAPSRRQRHLRRTASNRAFYGSSAPSTAPSPMHPIAGCFFNASSSPSAASSTRHRRLRRTTHDRALLASSVPSIVLRNLSVPASSTRRHPRPTVGSGELYTKLRWNFCATQISQNSSWSQTDEELDYLQCMLLPFVLL

SEQ ID NO: 262264 - protein, 54 aa, Zea mays
  Clone ID: MRT4577_170799C.1.pep
SARAKAKESFVFACCCASVREDEVKRAGLAIGQDYDLPRLHVKSTTGTLQADLG

SEQ ID NO: 262265 - protein, 40 aa, Zea mays
  unsure (1)..(40): unsure at all Xaa locations
  Clone ID: MRT4577_17079C.1.pep
PMMYLALTYDHRXIXGKKXVFFXRRIKNVVKXPRRXLLNI

SEQ ID NO: 262266 - protein, 330 aa, Zea mays
  Clone ID: MRT4577_1707C.1.pep
MAAASFARALCLHMLLLFLVVGSARCKTVKRDVKALNEIKSSLGWRVVYSWVGDDPCGHGDLPPWSGVTCSQQGDYRVVTELEVYAVSIVGPFPTAVTNLLDLRRLDLHNNKLTGPIPPQIGRLKHLRILNLRWNKLQDVLPPEIGELKKLTHLYLSFNNFKGEIPVELANLPELRYLYLHENRFTGRIPPELGTLKNLRHLDVGNNHLTGTLRDFIGNGNGFPSLRNLYLNNNELTGVLPDQIANLTNLEILHLSNNKMIGSISPKLVHIPRLIYLYLDNNNFIGRIPEGLYRHPFLKELYIEGNHFRPGTRSKGTHKVLELPDADILV

SEQ ID NO: 262267 - protein, 79 aa, Zea mays
  Clone ID: MRT4577_170800C.1.pep
MGASIAPARLRDVGTNDFTGSVTKENSVPLALERESDLRKVVCSMEGTKRQASTGGRMEEACTVDSLAPRRFETRSYSG

SEQ ID NO: 262268 - protein, 138 aa, Zea mays
  Clone ID: MRT4577_170801C.1.pep
AQSHSSLRASCRCRHHTMAPAAPAATGAASPAVTKGGGKVAARSVRLGLPALPPLPGLSLAAQGQTRAASSLYKRLARDVVAMAAGEPAAPQAANEELTEFVDALKKEWFAYRNLLFKPDRDAFFAKVREIYEDIISA

SEQ ID NO: 262269 - protein, 98 aa, Zea mays
  Clone ID: MRT4577_170802C.1.pep
RRRLCLRSIDRRLRSSTSPLALLPPRGPRIPSLATASARRGNGARPRIPRRPFSRSAAFRLPVAALALAVAQGSLLPLFIMTFLFGCVSLVWASECSG

SEQ ID NO: 262270 - protein, 74 aa, Zea mays
  Clone ID: MRT4577_170803C.1.pep
PRNVDPRNPQPLKLCALVPIKALSQPPVFSVVFFPAGKKIKNVGGGINREIFFKIFFQKGTFPGGPFIVFYPIG

SEQ ID NO: 262271 - protein, 232 aa, Zea mays
  Clone ID: MRT4577_170804C.1.pep
ILSSSPGERVAPVPHFIRARVRDSEPKHRRAPSAARGDVTRARDTPQRPQFTARASCRHHTMAPAAPAATGAASPAVTKGGGKVAARSVRLGLPALPPLPGLSLAAQGQTRAASSLCKRLARDVVAMAAGEPAAPQAANEELTEFVDALKKEWDRIEDKYAVTTLAVAATLGMWSAGGVVSAIDRLPVVPGLMQAVGIGYSGWFAYRNLLFKPDRDAFFAKVREIYEDIISA

SEQ ID NO: 262272 - protein, 158 aa, Zea mays
  Clone ID: MRT4577_170805C.1.pep
SSGDFSSVVLPASSSKSMGSFPSGSPPSSSLGLEGAMGFPSSGSLLETFSPTVSAALLSSSALISSTALVSSCSTAVGSGRSASSSTSSLSSEGSDCPASSSSSSASAAPSASAVPSSSSETAGSFSASSLSFQCSFSSSYPPGPPLQALQMVQVIDR

SEQ ID NO: 262273 - protein, 63 aa, Zea mays
  Clone ID: MRT4577_170806C.1.pep
RTTPFRSHYFTKSLMSFFLVWLTKQTEANGVDDQGRHLPNGGGQNPVFGPGWGRHRLCQGKPL

SEQ ID NO: 262274 - protein, 37 aa, Zea mays
  Clone ID: MRT4577_170807C.1.pep
RPLDRSLRRGQEKEDAGSERERLRESATVAHGPRTRG

SEQ ID NO: 262275 - protein, 135 aa, Zea mays
  unsure (1)..(135): unsure at all Xaa locations
  Clone ID: MRT4577_170808C.1.pep
NLQGSKKKKRVYTWGPPPHRAFFTTKPGQRWDEHTWEQLQFYLVLVHTTAQHPAGRPFLFNSAASVTGVDPAEGPLXRRRAAVGLGWRXRSSGPRGAWRSPPPRLNLGAVVXRPGLGGLGVVGRLAPWLGGAGVN

SEQ ID NO: 262276 - protein, 60 aa, Zea mays
  Clone ID: MRT4577_170809C.1.pep
LKALRKPDRTKKLERIGTNYQGGQYKQICLAVSIVINTTMWSSVSPQVGACCSKTSQQLN

SEQ ID NO: 262277 - protein, 764 aa, Zea mays
  unsure (1)..(764): unsure at all Xaa locations
  Clone ID: MRT4577_17080C.1.pep
IDLTFHIYHFSPFYIGRDLSYNRFTGPIPFNIGFLQVATLSLQGNKFTGPIPSVIGLMQALAVLDLSYNQLSGPIPSILGNLTYTEKLYMQGNRLTGSIPPELGNMSTLHYLELNDNQLTGSIPPELGRLTGLFDLNLANNHLEGPIPDNLSSCVNLNSFNAYGNKLNGTIPRSLRKLESMTYLNLSSNFISGSIPIELSRINNLDTLDLSCNMMTGPIPSSIGNLEHLLRLNLSKNDLVGFIPAEFGNLRSVMEIDLSYNHLGGLIPQELGMLQNLMLLKLENNNITGDVSSLMNCFSLNILNVSYNNLAGAVPTDNNFTRFSHDSFLGNPGLCGYWLGSSCRSTGHRDKPPISKAAIIGVAVGGLVILLMILVAVCRPHHPPAFKDATVSKPVSNGPPKLVILHMNMALHVFDDIMRMTENLSEKYIIGYGASSTVYKCVLKNCKPVAIKKLYAHYPQSLKEFETELETVGSIKHRNLVSLQGYSLSPVGNLLFYDYMESGSLWDVLHEGSSKKNKLDWVTRLRIALGAAQGLAYLHHDCSPRIIHRDVKSKNILLDKDYEAHLTDFGIAKSLCVSKTHTSTYVMGTIGYIDPEYARTSRLNEKSDVYXLRHRSAGAADRQEASGQRXNLHHLILSKTASNEVMETVDPDVGDTCKDLGEVKKLFQLALLCTKRQPSDRPTMHEVVRVLDCLVNPEPPPQPQQQQQKAHAHHQLPPQPSPPAYVDEYVSLRGTGALSCANSSSTSDAELFLKFGEAISQNMV

SEQ ID NO: 262278 - protein, 69 aa, Zea mays
  unsure (1)..(69): unsure at all Xaa locations
  Clone ID: MRT4577_170810C.1.pep
SPFCPPIPTQGKSSSLTRRFVYPLTXGNRVLDTMSAGWTDERHMLYISCMEACFVDQLYNHGNHAHDAN

SEQ ID NO: 262279 - protein, 94 aa, Zea mays
  unsure (1)..(94): unsure at all Xaa locations
  Clone ID: MRT4577_170811C.1.pep
WRVGVVVLPRSSGHVXGGARAGELIAALRAVRADAVEPGRVPVRPGVGAGSGQAGAAGTTSRPLSPAPVPLRAPRVGRSVARAALAGPAPRARL

SEQ ID NO: 262280 - protein, 103 aa, Zea mays
  unsure (1)..(103): unsure at all Xaa locations
  Clone ID: MRT4577_170812C.1.pep
VLFGPELCLHSAXVTLSLPSSSXILPIFPXLFSPPSITPSGRGNSXXSPLXXSASLIFQECHSHSLGLWKLSSGXSSLFPPLSXLCLCFVXFFFLSFSLRTTL

SEQ ID NO: 262281 - protein, 97 aa, Zea mays
  unsure (1)..(97): unsure at all Xaa locations
  Clone ID: MRT4577_170813C.1.pep
VKLGCAGFRKKMFTGLERKRDGGKVCLVWMGHKKXTVALGGGGEGNVNGVGVLGXKGTWALCIDPSRTGKVSVXKRLYNHXLSXLQREVEEALEVSA

SEQ ID NO: 262282 - protein, 60 aa, Zea mays
  Clone ID: MRT4577_170814C.1.pep
CAHRTSTRTQTQTLTPPTPTLTPTPTPAPAFRSRHSSTTSETRPRCTPAYRHCHKQPRTL

SEQ ID NO: 262283 - protein, 111 aa, Zea mays
  Clone ID: MRT4577_170815C.1.pep
CKSSATRDLAVRLLHAVRQLRAIVIAPFRRKLSGRSHLGHGYETLIKQSTRTNKRPRDGRRGQIASNGSESPVRHGFRTESGRRNGWQRKSGEDWQRKRGEGCRRMTTWKG

SEQ ID NO: 262284 - protein, 50 aa, Zea mays
  Clone ID: MRT4577_170816C.1.pep
RRTSRAMDVPTNPPSPPLGGVRSPPVGEARLNATIQLKDSPVHASNGERK

SEQ ID NO: 262285 - protein, 115 aa, Zea mays
  Clone ID: MRT4577_170817C.1.pep
LRTRGQTTGGGTEKTDPPGPRTTRRERKTGQRADERARHANDDEATHHDRDKGQHKEKKPERPDDEEPDHNHKDDEEETQNQEARHSTQSNPKERPKTTEEERKQEGEGQAERRE

SEQ ID NO: 262286 - protein, 299 aa, Zea mays
  Clone ID: MRT4577_170818C.1.pep
MSSKKIELDHKDMVHDSAIDYYGKRLATASSDFTVKIVNIGAANAPSQVLATLSGHYGPVWRVAWAHPKYGAILASCSYDGRVIIWKEDARGNWSQVHVFSDNKSSVNSIAWAPYEVGLCLACASSGGRISILTMQADGGWDTATIERAHPVGATAISWAPATASLAGAGELVYKLVSGGFDSVVKVWGFNNGSWKLESALISDMHTDCVRDVAWAPVLGLSKSTIASGSQDGKVVIWTKGKDGDKWEGKLMRDFGSPVWRVSWSLTGNILCIAAGENNITLWKEGSDGQWEEAMKVEP

SEQ ID NO: 262287 - protein, 109 aa, Zea mays
  Clone ID: MRT4577_170819C.1.pep
STLYQKISTTIEAQVPHNTRYSARVHSNKATFKAFANYMRQAQRARPSSFFLYMPPLKGMRMRPPITTTTTKLPSPTKGRKAPSFCTDDDKSLTIKTPFMTMVMQTMAS

SEQ ID NO: 262288 - protein, 77 aa, Zea mays
  Clone ID: MRT4577_17081C.1.pep
HDDYCDPTSTPLTLQLSTALYNNSSSIRSTINAKAKVHECSICGAEFSSGQALGGHMRKHRNFLSAPIIGQLILQWW

SEQ ID NO: 262289 - protein, 60 aa, Zea mays
  Clone ID: MRT4577_170820C.1.pep
LRLPDWPDMRTHNCTSLMSIYASLYLANAESECPEDGLPRGLSIHVGLIRDAKLPFFMSN

SEQ ID NO: 262290 - protein, 299 aa, Zea mays; identical to SEQ ID NO: 262286
  Clone ID: MRT4577_170821C.1.pep

SEQ ID NO: 262291 - protein, 166 aa, Zea mays
  unsure (1)..(166): unsure at all Xaa locations
  Clone ID: MRT4577_170822C.1.pep
MSSKKIELDHKDMVHDSAIDYYGKRLATASSDFTVKIVNIGAANAPSQVLATLSGHYGPVWRVAWAHPKYGAILASCSYDGRVIIWKEDARGNWSQVHVFSDNKSSVNSIAWAPYEVGLCLACASSGGRISILTMQADGGXWDTATIERAHPVGATAISWAPEQRH

SEQ ID NO: 262292 - protein, 86 aa, Zea mays
  Clone ID: MRT4577_170823C.1.pep
FVFFFFFFFFFFFFFFFFFFFFFFFKKGDLVGLPILGELLADFGSIPPRGGGVFFYRPPFFISFLRGSYRGSAPPGAQLLHGVLVQ

SEQ ID NO: 262293 - protein, 299 aa, Zea mays; identical to SEQ ID NO: 262286
  Clone ID: MRT4577_170824C.1.pep

SEQ ID NO: 262294 - protein, 51 aa, Zea mays
  Clone ID: MRT4577_170825C.1.pep
CIRRNRVTLPTKHTICLEIRPKDEKLYCPKYSLCEENIIGNLLWEILGCKF

SEQ ID NO: 262295 - protein, 341 aa, Zea mays
  Clone ID: MRT4577_170826C.1.pep
MKPPVSRAAFASVLIGPRTLGASLVAARCASSSAAAAVTAYDHASFVKEIAATDPPEHLNSLLNVLQARGEKIVSPGAKRGLIPCVVPLSESPAGDLTSLLRWPTAPTGMEMPVVEVRKHGLWFLAKNVKQYIHRILVEADLTGDDLWAAVGEAGKNLYAKGEFKESQVADLDVYLLKKVGLFPDVIERKTLRHLEKGDNVSALITGEFYTRDKFPGFGRPFVFNAEIFKRVGRTSEAKDSARVALKSPWWTLGCSYEEAAELAGWEDEQLEFIREKVTEEGKREDLKRGKAPEQVILDEAAFLMDLASVDGNWDEVVDRIAECYREAGLHDIANFIAYRE

SEQ ID NO: 262296 - protein, 189 aa, Zea mays
  unsure (1)..(189): unsure at all Xaa locations
  Clone ID: MRT4577_170827C.1.pep
AASSPVAPPPPPDSEAKAAFQREKLXAELPRPPTVPFQPRVANAVHLVGTICAPVHMQRLPDGRFSAVSVLVHDRGINSPKFWVPIVFKDNWAQIAASHLKENDLVYVSGKLTCDGPPFKLADGEANIQVLANSLKFVDSKAVEMDAILDEDEGFLEIVEAEKKVEAKKXTSTFPPGTVSGYKNRADKL

SEQ ID NO: 262297 - protein, 468 aa, Zea mays
  unsure (1)..(468): unsure at all Xaa locations
  Clone ID: MRT4577_170828C.1.pep
MEVEAAGPDKLAPPSPVEGPGENGAATKVQKVYRSYRTRRKLADSAVVVEELWWQALDYARLEHSTVSFFDEPKPETAASRWNRVSLNASKVGQGLSRDGKALKLAFQHWIEAIDPRHRYGHNLHFYYDEWCKSQAGQPFFYWLDIGEGKDLDLPECPRALLKQQCIRYLGPQEREHYEYIISEGKVIHKQSGEPLDTRRPKGTKWIFVMSTAKKLYAGKKQRGVFQHSSFLAGGATIAAGRFTAESGVIKSIWAYSGHYKPSAENLHNFMNFLEENGVDLKEVEVRSSTKEDYNEDPXQCRYLTTHGVPLQLPWKRADLPQVAVPVPALNSTEGDEGDSPPEDEGRGRPSYQRTLSGGLQSPRATQVPQRAILERMKSKGELSKSYQLGHRLSLKWSTGAGPRIGCVKDYPMELRMQALEMVDLSPRGLSSTPSPSRRLPPPCFSPTKVASPTSPLAPVQASLPQPS

SEQ ID NO: 262298 - protein, 111 aa, Zea mays
  unsure (1)..(111): unsure at all Xaa locations
  Clone ID: MRT4577_170829C.1.pep
MFRKSFSNGQDTKAAPAGWANGTSKISSKEQQPYNVIAIGSQDRTITVWTTASARPLFVAKHFFSQSVVDLSWSPDGYSLFACSLDGSXANFHFEAKELGYKXSDSDLDEL

SEQ ID NO: 262299 - protein, 157 aa, Zea mays
  Clone ID: MRT4577_17082C.1.pep
NAGKTSVLIGRQIPSQALIIYERALEPQILSKTASNEVMETVDPDVGDTCKDLGEVKKLFQLALLCTKRQPSDRPTMHEVVRVLDCLVNPEPPPQPQQQQQKAHAHHQLPPQPSPPAYVDEYVSLRGTGALSCANSSSTSDAELFLKFGEAISQNMV

SEQ ID NO: 262300 - protein, 90 aa, Zea mays
  Clone ID: MRT4577_170830C.1.pep
YSEQEIIITLNRRSTAQLLATFSSYKDQFTHAINNDLQADPTEEFRSSLRAIIPCFTCPDRYFDKVSQQALGGMGTEYDDVTMVVTTHTD

SEQ ID NO: 262301 - protein, 29 aa, Zea mays
  Clone ID: MRT4577_170831C.1.pep
VKHQLLLCDPDKYVYEPRAVVMVIRGHSF

SEQ ID NO: 262302 - protein, 51 aa, Zea mays
  Clone ID: MRT4577_170832C.1.pep
VTGIVDVLSAQPTSLETAEQDDLTSGYMVQSPIECLDRACCPPEYVFLDHV

SEQ ID NO: 262303 - protein, 77 aa, Zea mays
  Clone ID: MRT4577_170833C.1.pep
IIFLQIQLLVTRIKKGNQEFFKLVTLRCTQGQTNVRVSGVRAPTFFFWFSGPSNSFTVITKTHLLVTLYQGPTHILG

SEQ ID NO: 262304 - protein, 214 aa, Zea mays
  Clone ID: MRT4577_170834C.1.pep
MDDQENENEHEKHADAGTDVEEEEEDEDGHKRVVVLGPQVPLKEQLELDKDDESLRRWKEQLLGQVDTEQLGETAEPEVKVLNLTILSPGRPDLVLPIPFEADDKGYAFTLKDGSLYSFRFSFTVSNNIVSGLKYTNTVWKTGVKVENQKMMLGTFSPQQEPYVYEGEEETTPAGIFARGSYSAKLKFFDDDGKCYLETSYYFEIRKEWPGPAT

SEQ ID NO: 262305 - protein, 191 aa, Zea mays
  unsure (1)..(191): unsure at all Xaa locations
  Clone ID: MRT4577_170835C.1.pep
SEFASQRHXSYNQRPXTPXLPINESASGAGETKYHPSAASXLPPIPSAAAIXXLRLPPYPSFLXLPTSPLVVPFPSDADQNXNQQLPGXTLFPSLSTCCCFRVSISLPPLLIPPGFPLPSXFASPEXAXCHPGSTAYPRVGKPFLGCSWXGHGDGSLHARGIWGIDPLPSGHPRRWRAASERACVRGERSA

SEQ ID NO: 262306 - protein, 62 aa, Zea mays
  Clone ID: MRT4577_170836C.1.pep
NLCSSRGNSTSNADAKEIHTTWRRGCLSHPIPSLTSPPTLMSLVVDSSSCCHCLTLVAQRLG

SEQ ID NO: 262307 - protein, 155 aa, Zea mays
  unsure (1)..(155): unsure at all Xaa locations
  Clone ID: MRT4577_170838C.1.pep
MEKTKLPLPLVHGERLWARPWRWAKTAFFIVAMLASLLLVCAPPLLVVLLDLLLPPALLSSFLRAQPPSSASLAAALAAQARSFRFASSLADLPAVSAARSLLILCAYAAAGGGGAAYXWXAVACSAASVCYVLAKAXRRLRRRARVAGQRPARR

SEQ ID NO: 262308 - protein, 100 aa, Zea mays
  Clone ID: MRT4577_170839C.1.pep
KNRADRRVRPDPLHFTIPFYSYPLPLTLPAWLSFYAVPTITLRCLSIAMSDTALPPIHKLLPTVSLPLLTSSTRASPLLLYARRHLPLAPLITSSDAVEA

SEQ ID NO: 262309 - protein, 139 aa, Zea mays
  unsure (1)..(139): unsure at all Xaa locations
  Clone ID: MRT4577_17083C.1.pep
LSKNDLVGFIPAEFGNLRSVMEMXYLTLFMXPFIEYSLHYILNDLTVFSSDLSYNHLGGLIPQELGMLQNLMLLKLENNNITGDVSSLMNCFSLNILNVSYNNLAGAVPTDNNFTRFSHDSFLGNPGLCGYWLGSSCRS

SEQ ID NO: 262310 - protein, 216 aa, Zea mays
  Clone ID: MRT4577_170840C.1.pep
MEKTKLPLPLPLPLVHGERLWARPWRWLKTAFFIVAMLASLLLVCAPPLLVVLLDLLLPPALLSSFLRAQPPSSASFAAALAAQARPFRFASSLADLPALSAARSLLILCAYAAGGGGGAAYRWVAVACSAASVCYVLAKAVAVFGAAPVWRGNGQLVAVEAMFLMSLALAVAHLAMAYRASCRERRRLQLVYRIDVEAVRLKGGQTPKALKQCMI

SEQ ID NO: 262311 - protein, 173 aa, Zea mays
  unsure (1)..(173): unsure at all Xaa locations
  Clone ID: MRT4577_170841C.1.pep
VPRGRPGTHLISSDCWELVQLPELLGFLXEIQVLDLSCCSQLFALPESVTKLTNLEHLNLSCCISLEKMPGDYGSLKKLKLLNISYCFKVRIPNGIANMSNLKCLMAVGLDGYSCGNKDDFNIVSSLLCMPRIDLSKKDSPIADFHGILKHKRLHLFGLGNVQSIDDFENLGL

SEQ ID NO: 262312 - protein, 102 aa, Zea mays
  Clone ID: MRT4577_170842C.1.pep
RWPDRVRSLRDVFWLITPGWPQGGPLRVPGQVRQPLGGGLPLPEFVSSRPWCCHQCGACLRFHLAGFGLPYPPGARSHTVSDERSWTVVAIKAMSSWEFGWR

SEQ ID NO: 262313 - protein, 59 aa, Zea mays
  unsure (1)..(59): unsure at all Xaa locations
  Clone ID: MRT4577_170843C.1.pep
PAPKRYPCSKRFLFPPFKKWVLKQQPTREVAPFQLPGVXWPIYTRAGGPGLGFCQGGVE

SEQ ID NO: 262314 - protein, 57 aa, Zea mays
  Clone ID: MRT4577_170844C.1.pep
WSNVWSREVEHRGCGNVMFFPHSRHLASGCQGFRDCMAWGVSVRDDHYHGWDSERVW

SEQ ID NO: 262315 - protein, 114 aa, Zea mays
  Clone ID: MRT4577_170845C.1.pep
RRLGPPDTLLWGHFQNITVKHRTETPPMVEITPIERKELPLTNLDETKHLQVGMHRGGPAIGGIDTSSHDVVVYILESVVGVSEYTSTGRCYSGFTRKGGSTFVVRRTTDPVTA

SEQ ID NO: 262316 - protein, 279 aa, Zea mays
  unsure (1)..(279): unsure at all Xaa locations
  Clone ID: MRT4577_170846C.1.pep
MFLRTALLSLSALAVAKEMPKDELRAAQLYDSGIRHENNMALKKESWAKQEAAGMYNSAQFAEVKNKVECINGTAITDTDVFKCKNIDLLHFLSHAELGSTRGVGSSSWGWTSDDGREFVAIGQQDGAAFAEINKEGKLVYLGRLPAYSTPSTWREIRGQNNLMIIGSEAQGHGIQIFDMKKLLTVNPASPKVFSNSKDLTGHFKGLPSGRAHNVVTNPETNFIYAVGAQPRTDKCKSGIIFIDITDPSNPXTPGCASQDGYVHDAQWLIYHGPDKQFE

SEQ ID NO: 262317 - protein, 107 aa, Zea mays
  Clone ID: MRT4577_170847C.1.pep
NFSSPSVKLSTGPAVSDPISPPKFAGGGGGPKNFWPKVVGLNVEAPQKVFLKDKPDPHILVFPLGPLVPPDFPPTRGRIFVEILPPTPPIGLKKKNKPLFPFPAPDL

SEQ ID NO: 262318 - protein, 138 aa, Zea mays
  unsure (1)..(138): unsure at all Xaa locations
  Clone ID: MRT4577_170848C.1.pep
SAVNHFHIQGSSPETPERRRDPSIVTSISSMVQRAVIVRHERDSAAVPPGDQATTETTAAREVKRRRRLADSMAANQAPDPCGATRPRPTTTTCRAAGSSAATAPPAAAPSTPPASTLPALFAPRRARXLLSAVSIIL

SEQ ID NO: 262319 - protein, 85 aa, Zea mays
  Clone ID: MRT4577_170849C.1.pep
PPGQTSCDPHWRSPINRCWSPEPSKRPSFPKGCKSLGNLVFPTKGQQSKKMVYPCLSGLFVNKMVSVFKTRRGPQGGPAFWKRIV

SEQ ID NO: 262320 - protein, 54 aa, Zea mays
  Clone ID: MRT4577_17084C.1.pep
QLENKKYIHLNHALKKALGNSLVMVFRILQKSFSNYQSRRCWTFFRRIISVLLQ

SEQ ID NO: 262321 - protein, 196 aa, Zea mays
  unsure (1)..(196): unsure at all Xaa locations
  Clone ID: MRT4577_170850C.1.pep
PCSYFAYLRDSKLVTFTTAAGADSTAISGRHHEGRASLYPRSGQDRRSEVGNACWELYCLEHGIQADGQMPGDKTIGGGEEAFNTFLXESTAGKHVPRAVFGDLEPTVIEEARTGTYRQLLHPEQIIRGKDDAGNNLTRGHYTIGTEEVEPXLDRIRKXLADNCTEQRGFLGFNAVEGRTDSGLGDLLLERWPDDY

SEQ ID NO: 262322 - protein, 83 aa, Zea mays
  Clone ID: MRT4577_170851C.1.pep
VPATLVHRFPGRRSFSCPLECARVHARRRLKALLAPSQGVRHPQRVPEPCPGGDTPGDGAPERCPPTQVLNPLISSPFHPSSR

SEQ ID NO: 262323 - protein, 93 aa, Zea mays
  unsure (1)..(93): unsure at all Xaa locations
  Clone ID: MRT4577_170852C.1.pep
SRKARFMFSLLRRLSEEFVIVSMLGLLLSLRLRRRRSYARRNRAYYRSRHGARYGQRYGIIGSRRRTRLLDYLVRDRRSRSRRRRFRFXSDER

SEQ ID NO: 262324 - protein, 154 aa, Zea mays
  Clone ID: MRT4577_170853C.1.pep
MRICFLSSLQVHTIVLLSLSLKSLHATPYTNCRGRSMAGLQRSSQTFRRSGSSGLVWDERLTSQDDDQSGPEDADAATDLKELRHSRSVGSVGLQPQPQPQPQRRRSDDSGQGFRTRRVAPALDPPSPKVPGCIFCGIFRKAGASEPKSKPRRY

SEQ ID NO: 262325 - protein, 102 aa, Zea mays
  Clone ID: MRT4577_170854C.1.pep
KVLVYQFMHRGDPLDQPPLASPLGGVSFCNADSSLPDIFCPEWSFLFGSYVYSYEACCASKRRQVGMLPVIPMLLFPPTRWQITKNMNWKGGRKLRSSSSRE

SEQ ID NO: 262326 - protein, 188 aa, Zea mays
  unsure (1)..(188): unsure at all Xaa locations
  Clone ID: MRT4577_170855C.1.pep
AHXXGPXFGXSGWXAARXXSLLPXXRGGXXXIXHCLLGPSRFVGFPXAPXXATTYLXRATLXVGDLPRFDXRSXSLGRARXGVPXXFEVXXSSGTXEPXAKNGGAVRHXFGTRCRGSSRSQVRPXVAALTARGVXXLXXGSAXGASXXPRPLGSICSPXPRRPSFRRGGLQPXXHLGRXTPARVXXLV

SEQ ID NO: 262327 - protein, 195 aa, Zea mays
  Clone ID: MRT4577_170856C.1.pep
MATVDATTPPESGGKQQAPSLPACRSFSGANLALRVLLFAVTLAGLILLATAKQTVRVPVPQFPGLLLSRPAKFTDSPALIYLLVALVVTCFYSLTALTSLKLVSGSSPATRTLFLLVLLDVLYAAIMASATGSGGGVAWIGLKGNSHTNWNKICNIYGKFCRHIGSSVFLGLVASIILVLLAILNAHSLYRRSR

SEQ ID NO: 262328 - protein, 261 aa, Zea mays
  unsure (1)..(261): unsure at all Xaa locations
  Clone ID: MRT4577_170857C.1.pep
MAMALLQLLLSLLIVSCAAQSPYASKAPPLSASAPGGSVAPPTTAVSAPQASAQPPTTVAASGPQASAAAPTKAALAPQASAAPPTTAASPQLAATLAPVSSPPLAAAAPPASATPPTTPPSATQTQPPVASPPTAMPPAAALPPATLPPAMAPTPLLAAPVMPPAAPPATAPAPAPVSPAPTPXVSPPDPXPTEAPAPSPTTEAPIPTPSPALAPLSSVSVSPSLSPGPALAQDESAASGSRTALAALVSLVAVGLVVLF

SEQ ID NO: 262329 - protein, 215 aa, Zea mays
  Clone ID: MRT4577_170858C.1.pep
MSRKATQEMMCMVCLKIQPVGPFCQTPSCNRLSMAKYYCNICKFFDDERTVYHCPFCNLCRLGKGLGVDFFHCMKCNCCLGMKLTEHKCREKGLETNCPICCDFLFTSSAAVRALPCGHFMHSACFQAYTCSHYTCPICCKSLGDMAVYFGMLDALLAAEELPEEYRDRCQDILCNDCERKGRCRFHWLYHKCGSCGSYNTRVIKTDTADCSTPN

SEQ ID NO: 262330 - protein, 81 aa, Zea mays
  Clone ID: MRT4577_170859C.1.pep
IFYPHRETSSSSAFSSLYSSFPFCRSLVTLGSSLPTVTGEIRIRIIGAREDYVSSGRGVGLLSRESSDRPTVRPLYRNPSA

SEQ ID NO: 262331 - protein, 135 aa, Zea mays
  Clone ID: MRT4577_17085C.1.pep
MDVVESSPSSSPISSPAGSSESIDLNFLPFLKREPKSEPASPELGPLPLPAPPTQTPQQQHAAAPAPEATAPLSPATPDLSSAPVMAPLQSLPPNLDEDALLREYYRLAGLYLSSARSGAIIPALAPKAAAVMRA

SEQ ID NO: 262332 - protein, 128 aa, Zea mays
  Clone ID: MRT4577_170860C.1.pep
RLARASRRAGGRACGDYITIIRISIIAGVQAFEIMAIAAVGNNLITYVFGEMHFPLSQAANVVTNFVGTIFLLALLGGFLSDSYLGCFWTMLIFGFVELSVRQRARSLVRSIRSCCASKPCDCSSSSS

SEQ ID NO: 262333 - protein, 55 aa, Zea mays
  Clone ID: MRT4577_170861C.1.pep
KLNEKESDGRIYSRQVLTIRKLGNRINIRHRILRKEIKLLWKKRIPKTQYHIDNI

SEQ ID NO: 262334 - protein, 206 aa, Zea mays
  unsure (1)..(206): unsure at all Xaa locations
  Clone ID: MRT4577_170862C.1.pep
MSSAQIVPADHVCYVHCNFCNTVLAVSVPGNSMLSMVTVRCGHCTNLLSVNLRALMHSVPEQDQLQXNIRVHGTLREHHQCGGGHHLELGSSSSSRFRLPMMMSYAPQNEHLLQEQTLNNARPAPEKRQRVPSAYNRFIKEEIRRIKANNPDISHREAFSTAAKNWAHYPNIHFGLNSGREGGKNKLVDEAVAAVAVAPKKIQGFY

SEQ ID NO: 262335 - protein, 109 aa, Zea mays
  Clone ID: MRT4577_170863C.1.pep
AAPPCRRCVPRAVVCVHPFSSTTNEVGCPLPPWGSVRRCLVGGFGVCSKPGRKWVLCSAPVFLYPSPPKWGMFCSAFIFPRVSFFYKKKKKKKKKKKKKKKLEEGRRYP

SEQ ID NO: 262336 - protein, 222 aa, Zea mays
  unsure (1)..(222): unsure at all Xaa locations
  Clone ID: MRT4577_170864C.1.pep
VPGNSMLSMVTVRCGHCTNLLSVNLRALMHSVPEQDQLQQENIRVHGTLREHHQCGGGHHLELGSSSSSRFRLPMMMSYAPQNEHLLQEQTLNNARRKFRFLFCLLYINYMQSCMRKSMRAXTALFHIFFCNLLVEMRXAPEKRQRVPSAYNRFIKEEIRRIKANNPDISHREAFSTAAKNWAHYPNIHFGLNSGREGGKNKLVDEAVAAVAVAPKKIQGFY

SEQ ID NO: 262337 - protein, 106 aa, Zea mays
  Clone ID: MRT4577_170865C.1.pep
LLWAIGFLEAGRGPGGKAFARPRPATQLRRVSSPTRSTPCPGRPGSAAHTMAAIPRASEGMERSEFVRVGSEPPSNLQMHQSKMNPGILRKDHRRPEQEGVAGFTS

SEQ ID NO: 262338 - protein, 69 aa, Zea mays
  Clone ID: MRT4577_170866C.1.pep
DNQELGILVEHLASILRRENERCGMAISERCNGTNERHGTSPCKIHIALPFLSSYLMNLAKMCLRISLL

SEQ ID NO: 262339 - protein, 113 aa, Zea mays
  Clone ID: MRT4577_170867C.1.pep
PPQSKSTGKKVSQGGALGFFGGKEQGFPAQQFLVQKKNGQKRVTKGPTAGGSRGQGPFFLGRGKKKRGGVVIASPKGGPLNNNRLRGGAPLVKGGGTGQEGGFNYEGRPPGGA

SEQ ID NO: 262340 - protein, 118 aa, Zea mays
  Clone ID: MRT4577_170868C.1.pep
CPFRRRLPPSARVRHRCPVPAVKPKAKAHSGSGTRRPSRGDAMRGAGVRAGYWSPPARCALPWSPPPRTGPRPPPPAVPLGLRSELSCRWDCEMTRRAPRKNHWASSHFRAWQWHRLT

SEQ ID NO: 262341 - protein, 118 aa, Zea mays
  unsure (1)..(118): unsure at all Xaa locations
  Clone ID: MRT4577_170869C.1.pep
LGAMCGVXLXKGCQXAPTSTGAGGGPTXSAPATPAGPASXLPRSGXVWXLXYTGFXNTHPKRNGRDSHVPGLAPLPMGFGGFMVHLGTIPGTGTGINPXRGGGXXXIYNKDKGWDHHW

SEQ ID NO: 262342 - protein, 118 aa, Zea mays
  unsure (1)..(118): unsure at all Xaa locations
  Clone ID: MRT4577_17086C.1.pep
LRWPQGGKKPSANKPAEEEPATDNAENASAXKKPNAEKRLPAGKFVAKEGGEGMTGTKKANNSVVTYKIYIFKVLKQVHLDIGILTNAMSIMNSFINDIFKKLAVESGKLARYNKKPT

SEQ ID NO: 262343 - protein, 121 aa, Zea mays
  Clone ID: MRT4577_170870C.1.pep
YHSSISAYMTGEDEKLYLWLSSQVSRFHPWPSSTWHPITRSHTTYHQDWGWKTTGTRPTGRPRRPRRAGRRGCRSRGTSRLRCRRHCPPGQGGETSPPPKGRSLVGNGMGTFVPTRPPTRP

SEQ ID NO: 262344 - protein, 59 aa, Zea mays
  Clone ID: MRT4577_170871C.1.pep
YTGKKNKHNITIKIPQTRQYPCIIHKLYHSTSLLIGLYLYNFLGRVGGRVGGRVGGRVG

SEQ ID NO: 262345 - protein, 253 aa, Zea mays
  Clone ID: MRT4577_170872C.1.pep
MSLPPGPADSGAGTGDDWFLDCGILDDLPAAACGAFPWDASPSSSNPSVEVGSYVNANDAFKEPNDVFKEPGSSKRLRSGSSDMPTSKACRERMRRNKLNDRFLELGSALEPGKPVKADKAAILSDATRMVIQLRSESQQLKETNGSLEEKIKELKAEKDELRDEKQKLKLEKESLEHQMKLMASAPAYMPHPTLMPAPFAQAPLAPFHAQGQAAGQKLMMPFVGYPGYPMWQFMPPSEVDTSKDSEACPPVA

SEQ ID NO: 262346 - protein, 426 aa, Zea mays
  unsure (1)..(426): unsure at all Xaa locations
  Clone ID: MRT4577_170873C.1.pep
MEAQAHTSCNQRAGYYVRETAPPLAPVPRLLDYGTGAATRGNPAHGPTVPTEHIGHGSVSRGRRRDGRYGQKWAGSNGGGRRAKAAVKSTAGSRPLLEQQESPLPRREDDAPVFRSSNGTGKGDTPKGILPCEGSGPRALLLIRGSKAGPSEGFDSRLRALGLRAHYWSGVQRLDPRKGSTAASGHSGSAPTTDQGFVGWPPKGSTAASEHAERGMTLGAIGSSASPDPRARTPPRPRKTVSASPDPRXARTQPRPRTTDSASPDPRARTQPRLRKTVSASPNPRAQTQPRLQKTVSASPDPRARTQPRPWTTVSVSPDPRARTQPRPRTTXLRLARPQGSDSTSTSDDGLRLARPQGSDSTSTSEDGLRLARPRARTQPRPRTTVSASPDPELGLSLDLEGITASLDLRLGPTTSQGGHHYPTPS

SEQ ID NO: 262347 - protein, 114 aa, Zea mays
  Clone ID: MRT4577_170874C.1.pep
MSLPPGPADSGTGTGDDWFLDCGILDDLPAAACGAFPWDASPSSSNPRSAQIDRPIPPFPTPPPISGRHGCFVWRTVLATGPVTPAFRIFAMSILWNRDGRMNCFGQHGGVVVY

SEQ ID NO: 262348 - protein, 327 aa, Zea mays
  Clone ID: MRT4577_170875C.1.pep
MAERYQLPRSCIPPTTRRKDYGYPPSGGSEGGKTRCIREREDMVAFQGGHPPFKGDSPYLRPQPSWAESSPTRSKVLPLWCGGWVPRVMQAGPEQKKPNRRARCMQPPSGYEHSSAFAQTSGRKGGQPCRRHATAPSGRAPPTSNAPSMGAHAHASCNRRAGRYVQATAPPLAPLPRLLDCGTSTATRGNPAYDPAVPARPDGQYGQKWADSNGGGRRAGATVMSSAKLTSHPGAGPGKGDTPKRTLLREGNRLRASILIRGSKAGPSEGSNSRLRARGLHTHYWSEVRRPAPRKGSTTASGHSGSAPTTDQRFEGWPSKGSQPPRT

SEQ ID NO: 262349 - protein, 446 aa, Zea mays
  Clone ID: MRT4577_170876C.1.pep
GREFGRHFAALGLNFDFESRTKDKSELWFMSTRGIKYEEMYIPKLEKERIVAILEWDRSLLPQYRLEAICAAMVEAWGYKDLLHEIRKFYAWLLEMQPFSSLAKEGSAPYIAESALKNLYTGTKVSEDELNVYARQFFKDLPDYLEDEVIDVKHQAGENVDAGQKTEAQKEAEKKAAEEKKAKEAEAKQKEVKEKTTEKTGDGTSTGKDKDVDAGTSGSVSVPKLKAMSKKMRLPQAKGKNILHLDFLLKYKPQQQDLSNTRATRAEFDRWYEAVQKEYELDDTQMTVVMSGLMVWCIENGCSPNINGVWTMMDGDEQRTFPLKPVIENASPTFRQIMHHFSDAAEAYIEYRNSTEKYMPRYGLQRNLTDFSLARYAFDFYEISSRTPVRAKEAHMQMKAAAVRGSNTRMFGLDGNVGEAHENTERHTAGDVSRNMHSLLGVQQGH

SEQ ID NO: 262350 - protein, 203 aa, Zea mays
  unsure (1)..(203): unsure at all Xaa locations
  Clone ID: MRT4577_170877C.1.pep
EQVLAKYEKKVHVQLELLITLIFHSVEVGSYVNANDAFKEPNDVFKEPGSSKRLRSGSSDMPTSKACRERMRRNKLNDRFLELGSALEPGKPVKADKAAILSDATRMVIQLRSESQQLKETNGSLEEKIKELKAEKDELRDEKQKLKLEKESLEHQMKLMASAPAYMPHPTLMPAPFRPXPLAPFHAXGQAAGQKLMMPFVGY

SEQ ID NO: 262351 - protein, 176 aa, Zea mays
  Clone ID: MRT4577_170878C.1.pep
MQAACNRTKGAHPFDFNVSSMEAQTHTSCNRRADCYVQETAPPLAPLPCILDCRTSTATRGNPAHDPTVPTRHIGHGSVSRGRRRDGRYGQKWAGSNGDGRRAEAAVKTSASSRPLLGQRENPLPRREDNAPVFRSSNGSRTRNGCPANHSSRRINSAAGHATPLAGEAGDASLPP

SEQ ID NO: 262352 - protein, 149 aa, Zea mays
  unsure (1)..(149): unsure at all Xaa locations
  Clone ID: MRT4577_170879C.1.pep
SSYQQTAVRYRGSFFFFFLKPNLFSEAAFIGHPPPAMGCTCPCLFTFLDGLGWAGAILTTLIGTGGVDRYAEHLRGSQGSPLAGAPYCAXGRPRTSSFYQSLWPQGXHPQMTMMDVQSCSQQLQMMMLLERAAAASSILYXPALMQQQQ

SEQ ID NO: 262353 - protein, 111 aa, Zea mays
  Clone ID: MRT4577_17087C.1.pep
KKGQSKKEGAGNHQLGPGPQQNNQKKGQGGTGVQQKEKGARHQKGRQGHNEGFKGVFDLWPTPPGGKPLGAWPTPPGGRPRKKQKRPWGPSKPHNGLLFTGGTDLKQRGGG

SEQ ID NO: 262354 - protein, 75 aa, Zea mays
  Clone ID: MRT4577_170880C.1.pep
NLRFGIILRVTWFLKRVLQLFPSFFLARDCVLPLYKWGFCFPCIRACLWSSQCDTNTTFLNEKPKCALIKAPEQK

SEQ ID NO: 262355 - protein, 806 aa, Zea mays
  unsure (1)..(806): unsure at all Xaa locations
  Clone ID: MRT4577_170881C.1.pep
TRCPGQLVTKHVVKGPCPHFALYLSTHEDAEKFFRPLMGKYDKSRLNKAAFVKDLTKYAKPTYIGEVNTALFERAVEHVIRILRDVGIQTCEYITDEDEIFKSLNMNAAVGALYTGKKREYFSEYTQEDKAEIIKQSCERVYEGKLGIWNGSLKAEIRPIEKTEANKTRTFTAAPLETLLAGKVCVDDFNGQFYSQHLNGPWTVGITKFYGGWNKLLEKPPDGWIYCDADGSQFDSSLTPYLINAVLNIRLRFMEPWNIGEQMLRNLYTEIVFTPIATPDGSVIKKFKGNNSGQPSTVVDNTLMVIIAFNYTLLSCGIDLEKADEVCRMYANGDDLLLAVNPTHVNILNEFGKHFAALGLNFDFESRTKDKSELWFMSTRGIKHEGMYIPKLEKERIVAILEWDRSLLPQYRLEAICAAXVEAWGYKDLLHEIRKFYAWLLEMQPFSNLAKEGSAPYIAESALRNLYTGAKVSEDELNVYARQFFDDLPNYLADEVIDVKHQAGENVDVGQKTEAQKEAEKKAAEEKKAKEAEAKQKENKEKANEKTGDGASKEKTTEKTGDGTSTGKDKDVDAGTSGSVSVPKLKAMSKKMRLPQAKGKNILHLDFLLKYKPQQQDLSNTRATRAEFDRWYEAVQKEYELDDTQMTVVMSGLMVWCIENGCSPNINGVWTMMDGDEQRTFPLKPVIENASPTFRQIMHHFSDAAEAYIEYRNSTEKYMPRYGLQRNLTDFSLARYAFDFYEISSRTPVRAKEAHMQMKAAAVRGSNTRMFGLDGNVGEAHENTERHTAGDVSRNMHSLLGVQQGH

SEQ ID NO: 262356 - protein, 287 aa, Zea mays
  Clone ID: MRT4577_170882C.1.pep
MAEGYQLRRSCIPPTTRRKDCRRPPSGGSEGGKTRCIREREDMAAFQGGHPPFKGDSPYLLPQPSWAESSPTHSKVLPLRRGGWAPRVMQAGPGQKEPNRRAQACNCPAVTSIPPLSPRPTGERVDSRAVGMQPRQVGAPLRLQRAQHGGPGPRVMQPARRLLRASNCTATRTTTAPPRLQNQYRDSRQPCGPGKGDTPKGILLCEGNRPRASLLIRGSKAGPPEGFNGRLRALGFCAHYWSEVRWPAPRKGSTAASGHSGSTPTTDQGFVGWPSKGSQSPQTQSEG

SEQ ID NO: 262357 - protein, 151 aa, Zea mays
  Clone ID: MRT4577_170883C.1.pep
MQAACNRTKWAHPFDSNASSMEAQAHTSCNRRAGCYTQETAPPLAPLPCLLECGTSTATRGNPAYDPTVPTRHIGHGDRERGYPERDPSPRRKRAPSPPTDQRFEGWPLGGVRQPPQSARAPRPLLVRGSRAGPSEGFNGRLRPLSLRAHY

SEQ ID NO: 262358 - protein, 99 aa, Zea mays
  Clone ID: MRT4577_170884C.1.pep
ANNLVGCPITTLLVLLCRYTSKQISFGTFLSPYTILQPNIKPALASSLTNLTRSLGSRSLIISNCHNSTHGPIGGRTCSTARRQTSVNSIFAGDQHSNR

SEQ ID NO: 262359 - protein, 189 aa, Zea mays
  Clone ID: MRT4577_170885C.1.pep
MNRHRHSRCHYKRNPGSTSAGTNNPPRLEGLRSNRRSTDGWLTAARSSSDDDNFCSERPNSSSDDLRADVAAIRPSPTSPLEGRGRAEGRRVGGTRKGDTPKGILLHEGNGPRAPVLIRGSKAGPSEGFNSRLRALGLRAHYWSEVRRPAPRKGSTVASGHSGSAPTTDQGFVGWPSKGSQPPQTHSEG

SEQ ID NO: 262360 - protein, 100 aa, Zea mays
  Clone ID: MRT4577_170886C.1.pep
MQAACNRTKGAHPFDFDASSMEAQAHTSCNRRAGYYVQETAPPLMPLPCLLDCGTSTATRGNPAHDPTVPNQAHRPRGPGKGIPRKGSFFAKEAGPEPPY

SEQ ID NO: 262361 - protein, 84 aa, Zea mays
  Clone ID: MRT4577_170887C.1.pep
GRDDQARKEIRSCAKIAFGCGRPQKLKGEFYRMTIRHAMLLDVECWPKKRRQVQYISVTECLCYVGFMAIQEGIKSRTTIYVIG

SEQ ID NO: 262362 - protein, 176 aa, Zea mays
  Clone ID: MRT4577_170888C.1.pep
MQAACNCTTGMHPFDFDASNMKAQAHTSCNRCAGYYVRKTAPPLAPVPRLLDCGTGAATRGNPALSPTVPTKRIGHGSVSRGRRRDGRYGQKWAGSNDGGRRAEAAVKSPAGSRPLPEQQESSLPRREDDVPVFRPMNGSRTHNGCPANHSSRRINSAARQATPLAGEAGDASPPP

SEQ ID NO: 262363 - protein, 127 aa, Zea mays
  Clone ID: MRT4577_170889C.1.pep
MQAACNRTKWAHPFVSNASSMEAQAHTSCNRRAGCYMQETAPPLAPLPCLLDYGTSTATRGNPVYDPTVPTRHIGHGSVSRGRRRDGRYGQKWAGSNGGGRRAEAAVTSSAKLTSPPGTAREPSPTA

SEQ ID NO: 262364 - protein, 38 aa, Zea mays
  Clone ID: MRT4577_17088C.1.pep
AGQEEQRYKGVEHCRRFWNPWLDIRILLQLYRLRITTT

SEQ ID NO: 262365 - protein, 37 aa, Zea mays
  Clone ID: MRT4577_170890C.1.pep
NPGPHGGFTKALFYTFLRQNNGDTNGICGYLNYTTVT

SEQ ID NO: 262366 - protein, 182 aa, Zea mays
  Clone ID: MRT4577_170891C.1.pep
AGGMLPRQVGALLRLPTRPTWSPRPTRHATGAPNSACEQLHRRPRLLDCGTNTATRGDPAHDPAAPAWRDGQCGQKWAGSNGSGRRGPGKGDTPKRILPREGTRLRASLLIRGLKAGPSEGFNSRLRACGLHTHYWSEVRRLAPRKGSTAASGYSGSAPTTDQGFEGWPPKGSQPPQTRSEG

SEQ ID NO: 262367 - protein, 66 aa, Zea mays
  unsure (1)..(66): unsure at all Xaa locations
  Clone ID: MRT4577_170892C.1.pep
VPRPLSGVLGCFTRSAQAFSRSVTFLYESLMRMWLSGSSGAFLLGPVDRPTLRYLLSFVMVXXGHG

SEQ ID NO: 262368 - protein, 150 aa, Zea mays
  Clone ID: MRT4577_170893C.1.pep
NACNVRARAELFFGRFCTALSARAPEIFIGGCLVSSCCARRILFFFLCPVASTLQGSQRFFYFFFSVRSLQLCRGASDSFFLPSRFRSTTTARTFFWSQPQSSAVRAAFCFCVRSLSAHLFQSHSNFFVTGRCVARAARKIFFCHFRTEV

SEQ ID NO: 262369 - protein, 122 aa, Zea mays
  Clone ID: MRT4577_170894C.1.pep
ISSKRARLYVIMLIFAEVGALKIYLKALQVRNDGQFGLEVDDLAPFSPMHQKHSRCRRSCFSASYSRCSSHSRRQSRSNSRARCFAQKSYVLDMVFQEVILLPHHVSDVDLVEDEIGGRCCH

SEQ ID NO: 262370 - protein, 50 aa, Zea mays
  Clone ID: MRT4577_170895C.1.pep
LVWSSTCLISIATHSCKKIHACMDTVEQSRVSNNLGQICTDTLSKKYSAS

SEQ ID NO: 262371 - protein, 59 aa, Zea mays
  Clone ID: MRT4577_170896C.1.pep
GTLGQAEKRKTDQFLRDAVETRLRMLIPYIEHWPRALSILMLPHNIPSSLSLLTSMVDD

SEQ ID NO: 262372 - protein, 63 aa, Zea mays
  Clone ID: MRT4577_170897C.1.pep
TTMRTWMRMVVATQTPPLEVYLGYSQLREKMPDHIYDIKDLLLTGWRKDSRSVNNKRSTCVGY

SEQ ID NO: 262373 - protein, 112 aa, Zea mays
  Clone ID: MRT4577_170898C.1.pep
FSCAVCSSCRQIFFLSCMSAHSLISLLSQHSPLAMDISAAARGRGPPTSELTSGRRRFSSPQLDVLLCRGLPLLLTRVPPLRWAMVTASREFPCARAPMPSSQRCPPSLCSL

SEQ ID NO: 262374 - protein, 94 aa, Zea mays
  Clone ID: MRT4577_170899C.1.pep
QQCCHHQIRFMDVQSVAQQLQIFIQLEGAASPSSSLFEPAFMQQQQQLLAAQGFTPMAIMMAQNIPAMGGLSQYQLPSYRPNPCGVSAALPPYY

SEQ ID NO: 262375 - protein, 486 aa, Zea mays
  Clone ID: MRT4577_17089C.1.pep
MALAHASAMFPPSSPSHKTWEDPSFFKWRKREAHVPLRSQDTLEAALKYWHERRNVNYHNADTAVWNDDAVRGALESAAFWSKGLPYAKSLSGYWKFLLSPSAESIPERFYYAHFDDSNWSGLPVPSNWQMHGFDRPIYTNVTYPFPLNPPFVPADNPTGCYRTVFHIPKEWKGRRILLHFEAVDSAFFAWVNGVLVGYSQDSRLPAEFEITDCCHPCDSDKENVLAVQVMRWSDGSYLEDQDHWRLSGIHRDVLLLSKPQIFITDYFFKATLDENFSLADIEVEVEIDSHKQDQEHVPTLSIEATLIDNSGLSNSIDADLSSANAVNLKPKPKRTRSPCLGFHGYVLGGKIENPKLWSSEHPNLYTLVVLLKDANGKLIDCESCQVGIRNVVMAHKQMLVNGCPVVLRGVNRHEHHPRLGKTNLEACMIKDLILMRQNNINAVRNSHYPQHPRWYELCDIFGLYVIDEANIETHGFDESNTFKHP

SEQ ID NO: 262376 - protein, 58 aa, Zea mays
  Clone ID: MRT4577_1708C.1.pep
SSRPSTQKPFPRSSAMSNGVSPLTMGGSLSHYLNAPFKWKGIIYREKDVWKKKKKKSL

SEQ ID NO: 262377 - protein, 90 aa, Zea mays
  unsure (1)..(90): unsure at all Xaa locations
  Clone ID: MRT4577_170900C.1.pep
MTKRTKKARIRGKDGTMYGASXQKHIMTMEASQHSXTYAXMCGKFACNRKANRIWGRKDCGKGKACGAYTKNTAKSDTVRHTIRPLEEHT

SEQ ID NO: 262378 - protein, 94 aa, Zea mays
  Clone ID: MRT4577_170901C.1.pep
APPRVFFFFFFFFFFFFFFFFFGGKTYLFSLQTTSPFFFYKQIIKPLKRKPLKKFGGTGLSNHKKKSCGTFGSPKNKNLKPGLLYKNFIFRFHS

SEQ ID NO: 262379 - protein, 142 aa, Zea mays
  Clone ID: MRT4577_170902C.1.pep
DGTITVNVFDDPASSTTLPMTEGGPSINAVQVPLLTLDSALVKLGLPQPQVIKIDTQGNELSILRGAAQTLAKVDVLFLECWLYRGYGPKTPLLTEIAHWLLPFNFRLWDVSEPYRGPQGELTTLDCIFINTAAGLVPNWYY

SEQ ID NO: 262380 - protein, 45 aa, Zea mays
  Clone ID: MRT4577_170903C.1.pep
CVFLSVYWSRPALSDARAALASYPVSTDGEREDRRHFPSLRLEIT

SEQ ID NO: 262381 - protein, 139 aa, Zea mays
  Clone ID: MRT4577_170904C.1.pep
IQGWLDLASARHSMGTSRVSSTLFDHKEQSAATKLQVVDHDGLKSSESIPHFALSKWSLQEECHSTYDLSERDFTEPKMRHRGSVTTPEKGNHESANTTTLSTGADASNRVSLVQKFLSSKALECQIVKYCLEGAKIYD

SEQ ID NO: 262382 - protein, 394 aa, Zea mays
  unsure (1)..(394): unsure at all Xaa locations
  Clone ID: MRT4577_170905C.1.pep
MASEAKEMKYRRRGRVPGPPEHGQRSDRSGALDWAALKHDPAELLRKLDEVRDQITRSCELMGPPPPDRHRAMSRRTVSLRPSYAEPPHAAGRAPDHYRSRYADRVGTSLPGSSYDHRSQRSVPDDEAYSRQPFRQQYYHERQRESHGFGHGRRHHSSCQCAHWLQSQRAPVVAPPKDHVPMARYFAGQGSFRFDRSQPISSELDRRSVASSLYSHLSVSKRRVEYFRKKXEKFCRPTRGAAPFLVCTSCSHLLQLPQGKFAGRKKDQVQCGSCSEIIALEPKQVKVHPVITPPSFPVSKGVRSKGSSHRDTKSSGWYQHQDDDNFNFYKPQAQKKDFADNMSPSSTASYGRTDSEHGSNRSVQLKSVPASRSRFSNDPKDILCQGDTGGQVEA

SEQ ID NO: 262383 - protein, 180 aa, Zea mays
  Clone ID: MRT4577_170906C.1.pep
WRQQAAGGSSQIICRLTSAPGAAGEPSPTRVKTTRPCSVPRTVHATAAPRTTRPVALTPRQGRRHLWQAKRAMLHLRHDDRVKKKGVPHRLIVYPFPLPLSLSCYRDRERGYSERDPSLRRKRALSPPTDQRFEGWPLGRVRQPPQSTRAPRPLLVRGSKAGPSEGFDDLLSLLGLRAHY

SEQ ID NO: 262384 - protein, 139 aa, Zea mays
  Clone ID: MRT4577_170907C.1.pep
MQAACNRAKWARPFDSNEPSMEVQAHASCNRHVGCYVTGGASGGRSKRRFAFAIITASKKGPGKGDTPKRTLLREGNRLRASLLIRGSKAGPSEGFNGRLRSIGFCAHYWSEVRWPAPRMVQRPPQATRAPRPLLIMGS

SEQ ID NO: 262385 - protein, 133 aa, Zea mays
  Clone ID: MRT4577_170908C.1.pep
RSKQPKKPCRWPAQFLFAQPVAPGFTVRVPAIPVGSARRRPSGAHQLRGKEVWWSIRTQRPQLSTCISQCRCHPMRPSCSTALLDHAGPLGPTGAPLMPLRWSVPFFDQLWRLSLFFLRWWYLNVATRHYDPS

SEQ ID NO: 262386 - protein, 184 aa, Zea mays
  unsure (1)..(184): unsure at all Xaa locations
  Clone ID: MRT4577_170909C.1.pep
PTDSKDKERGKDPDAEAKAXEEHNXRTNDTNRAAXXGRKQETNXXTNEGRGGXGPXAXAGKHGTQTEQASEHQNDTXDXQPTGPQGGKHDTRTGXNRTGPEEHPNKXTQATQXPTAEETPDGQKDRXRQNKGKKTDENAGEEKKRRGPKETKKTNRSRKHQAPTEPPTGGEKKEKTKKTPAQGS

SEQ ID NO: 262387 - protein, 75 aa, Zea mays
  Clone ID: MRT4577_17090C.1.pep
YTYASGILDFVANENSGRMVEGQTFTIEPILTMEKTECVTWEDGWTTVTADGSWAAQFEHTILVTRDGAEILTKV

SEQ ID NO: 262388 - protein, 227 aa, Zea mays
  Clone ID: MRT4577_170910C.1.pep
MQAVCNRTKGAHPFDFDASSMEPQAHTSCNWRAGYYVQETALPIAPVPRLLDCGTGAATRGDPAHDPTVPTEHIGHGDRERGYSKRDPSPQRKRASSPLLIRGSKAGPSERFNSRLRALGLRAHYWSEVRRLAPRKGSTAASGHSGSAPTTDQGFVGWPQKGSTAASEHAEQGMTLGSGAALANPAPAKPLTASTYQPENLGLDYAPRLWPVHMREQPDRPKHHETR

SEQ ID NO: 262389 - protein, 262 aa, Zea mays
  Clone ID: MRT4577_170911C.1.pep
MVAFQGGHPPFKGNSPHLRPQPSRTESSPTRSKVFPLRHGGWVPRVMQAGPGQKEPKPPCAVRVTAQRLQALLHFRPDQRMKERTTMHAACNRTKGAHPFDFDASSMEAQAHTSCNRRAGYYVRETAPPPTPVPRLLDCGTGAATRGDPAHDPTVPTGHIGHGSVSRGRRLDGRYGQKWAGSNGGDRRAEAAVKSSASSRPLLGQRENPLPRREDDAPGFRSSNGSCTHNGCPANHSSRRINSAAGQAAPLAGEAGNASPPP

SEQ ID NO: 262390 - protein, 275 aa, Zea mays
  Clone ID: MRT4577_170912C.1.pep
MDGSSFRANSVSVHADTATPGTGTESSPTRSKVLPQRRGDWVPHVMQAGPEQKKPNRRARCVQPPSGYKRLSTFAQTSGRKGGQPCRRHATAPSGRTSPSPNTPSMEAQAHASCNRRAECFVHATAPPLAPPPRLLDCGTNTTTRGDPTHDPAAPAWRDGQCGQKWADSNGGGRRAGAAGPGKGDTPKRILPREGTRLRASLLIRGSKAGPSEGFDSRLRSRGLYTHYWSEVRRSAPRKGSTTASGYSGSAPITDQGFEGWPPKGSQPPQTQSEG

SEQ ID NO: 262391 - protein, 171 aa, Zea mays
  Clone ID: MRT4577_170913C.1.pep
MAERYQLPRSCVPPTTRRKDCGHPPSGGSEGGKIRCIREQKDMVAFQGGHPPFKGDSPYLRPQPSRAESSPTRSKEPGKGDNPKRILLREGNRLRASLLIRGSKAGPSEGFNSRLRARGLHTHYCSEVRRPAPRKGSTAASGHSGSAPTTDQGFVGWPSKGSQPPQTQSEG

SEQ ID NO: 262392 - protein, 44 aa, Zea mays
  Clone ID: MRT4577_170914C.1.pep
SSKTTHIIIYMIDRDGWIRCPNHHQSLIRRNGMATRHRAGGGAN

SEQ ID NO: 262393 - protein, 158 aa, Zea mays
  Clone ID: MRT4577_170915C.1.pep
MEAQAHALCNRRAGCCVRATAPPPAPLPRLLDCGTNTATQGGASGRGSGRRFAFAIMTASKKGPGKGDTPKRILPREGTRLRASLLIRGSKAGPSEGFNSRLRARGLHTHYWSEVRRPAPRKGSTTASGYSGFAPTTDQGFEGWPSKGSQPPQTQSEG

SEQ ID NO: 262394 - protein, 388 aa, Zea mays
  unsure (1)..(388): unsure at all Xaa locations
  Clone ID: MRT4577_170916C.1.pep
MLRALAARCCGHWPPGAAAADGMLWQAELRPHAAGEFSMAAAQANLAMEDQAQVLASPAATLVGVYDGHGGADASRFLRSRLFPHVQRVVQEQGGMSAEAIRSAFGAAEEEFHRQVRQEWRSRPRLAAVGSCCLLGAISGDTLYVANAGDSRAVLGRRVPGGGAAVAERLSAEHNAACEEVRRELAALNPDDAQIVVHARGAWRVKGIIQVSRSIGDFYLKKPEYSLDPLFRQVGAPIALKRPALSAEPSVQVRKLKPNDLFLIFASDGLWEHLSDDAAVQIVFKNPRTGIASRLVKAALKEATRKREVRYRDLRTIERGVRRHFHDDISVVVVYLDGHRERRHTRVVDSSSNCTSAPVDIHSSNSXSFRSPLQRELNSGWEVRWVQP

SEQ ID NO: 262395 - protein, 127 aa, Zea mays
  Clone ID: MRT4577_170917C.1.pep
MQAACNRTKGAHPFDFDASSMEAQAHTSCNRRAGCYVQATAPPLAPLPRLLDCGTSTTTRGNPAYDPTVPVRRIGHGSVSRGRRRDGRYGQKWAGSNGGGRRAEAAVKSSAKLTSPPGTAREPSLTA

SEQ ID NO: 262396 - protein, 86 aa, Zea mays
  Clone ID: MRT4577_170918C.1.pep
SSPEDGAFALAPRRVMRLDVLICEFEHHWHGWGFHIPAGDIDQRHPRHLLRPYWRGRIYSVYPLPRRGYESPAERRAQKKPAAALP

SEQ ID NO: 262397 - protein, 188 aa, Zea mays
  unsure (1)..(188): unsure at all Xaa locations
  Clone ID: MRT4577_170919C.1.pep
CQVSRSIGDFYLKKPEYSLDPLFRQVGAPIALKRPALSAEPSVQVRKLKPNDLFLIFASDGLWEHLSDDAAVQIVFKNPRTVSDPHYYKVFISTLTLFAAXNHVCWQTLXGIASRLVKAALKEATRKREVRYRDLRTIERGVRRHFHDDISVVVVYLDGHRERRHTRVVDSSSNCTSAPVDIHSSNSR

SEQ ID NO: 262398 - protein, 39 aa, Zea mays
  Clone ID: MRT4577_17091C.1.pep
ALSAFYVKNFSCTVKSVLCIHVHYANHLGTFIDCVMWKP

SEQ ID NO: 262399 - protein, 174 aa, Zea mays
  Clone ID: MRT4577_170920C.1.pep
MQAACNCTTGTHPFDFDASSVAAQAHTSCNRRVGYYMRKTAPSLAPVPRLLDYGTGVATRGNPAHSPTVPTERNGHGSVSRGRRRDGRYGQKWADSNGGGKRAEAAVKSSAGSRPLLEQQGSPLSRREDDAPVFCPSNGSRNGCPANHSFRRINSAAGQATPLAGEAGDASPPP

SEQ ID NO: 262400 - protein, 213 aa, Zea mays
  Clone ID: MRT4577_170921C.1.pep
GAGAGSHTSCKLAQGRRSQTAVRGACNRPAVTSVPPLSPRPAGERAGSHAGGTQPRQVGAPLRLPTHPAWRPRPTRHATGASVAACEQLHRHSHHCHASSTVEPVPRLEATLRTTQQCQPGATVNTAKSGPAVMTVAGGREQRSRRQPSSRPIRGQQENPLSRREDNAPVIRSSNGSRTRNGRPENHSPRHINSAAGQAALLAGAAGDASPSP

SEQ ID NO: 262401 - protein, 62 aa, Zea mays
  Clone ID: MRT4577_170922C.1.pep
HSHKVFFLTQKCNYLSVLIPDRLNTQAGSLKNLHIHHYKRWRRTYYFRGYTLQLIGSRWARN

SEQ ID NO: 262402 - protein, 125 aa, Zea mays
  Clone ID: MRT4577_170923C.1.pep
MPDARCDDDGDDCVILDGDPDKPVAVAKEEGGPPRDAPEDELQIVAEKGELACRDFPHPRHLCAALPFSTSSHASHCSMCHCYVCDCPAPCALWDKHCHATDKDRKWKRLREISKNKSQRQQRNS

SEQ ID NO: 262403 - protein, 79 aa, Zea mays
  unsure (1)..(79): unsure at all Xaa locations
  Clone ID: MRT4577_170924C.1.pep
LFVNKGGSMALPEVSGVFQGDACLDVDTSGILYLADVXQACLAFSPNTDDTNLAIVGNTQQKTHCVLNDIGKNIVGFAP

SEQ ID NO: 262404 - protein, 68 aa, Zea mays
  Clone ID: MRT4577_170925C.1.pep
LKADRATPQPKASNATGTGSAAAPFLEPCGLVTAPPPPTFRPPAPAPAAPPAAPPPALPPLCPVVILP

SEQ ID NO: 262405 - protein, 81 aa, Zea mays
  Clone ID: MRT4577_170926C.1.pep
FSLSCSTVRAPIAQLSSPAKLHGRRENRQISWPRHASHSSTVTLTSRGNRRAAAPRGSARAWLHRRPGWTSSSTPKSGRSL

SEQ ID NO: 262406 - protein, 557 aa, Zea mays
  unsure (1)..(557): unsure at all Xaa locations
  Clone ID: MRT4577_170927C.1.pep
MKIAQNLYEGINLSSEETTGLITYIRTDGFHISDGAVEDIRSLVKERYGQKYVSEDIRKYLKKVKNAQEAHEAIRPTSIRRPPSSLVGILDDDSLKLYTLIWKRTMACQMEASRTVDDSSGCLAXPEGEMNFHSTASKLNFKGYRAVYEDDQXVHALTALYGDSVHEXLRGLVEINGCSDNSISLSSFFLRLLQIICYHLTTPLRNSSPYQVKDLVFPVNVHLGQHFTKPPPRYSEGALIKKLEELGIGRPSTYASIMKVLLDRKYVTAKSRVLHPEFRGRMVSAFLLHHFSEVSDYNFTANMETELDNVSAGSTEWKGLLKDYWERFSKYCADVSKLDGRKVERMLEEKFGPILFSDVYKDCRICPSCSEGTLRFKVSRYGEGYFVGCDRHPKCKYIARSLSQQEDETEPIEENAKSFEPRLLGVMPDSDQKVFLKQGPYGYYVQVGEDKKGLFPKRVSLSKVKDIDSVTLEDAIELLQYPKILGKHPEDDNLVLITHSKVGYNIKHRRFIAQVPKNMDPKKMTLERALKLLSSKSVRRIGRLKGKVEKKEPIEWH

SEQ ID NO: 262407 - protein, 242 aa, Zea mays
  Clone ID: MRT4577_170928C.1.pep
MALQLRRLLPHGYAQRHRAVIHALSLLPPPPAMIQVDVGIPEGEMNFHSTASKLDFKGYRAVYEDDQASPCIDSSEGDCVHECNFEALSKLMVKDLVFPVNVHLGQHFTKPPPRYSEGALIKKLEELGIGRPSTYASIMKVLLDRKYVTAKSRVLHPEFRGRMVSAFLLHHFSEVSDYNFTANMETELDNVSAGSTEWKGLLKDYWERFSKYCADVSKLDGRKVERMLDYVFCALLLFQFMP

SEQ ID NO: 262408 - protein, 132 aa, Zea mays
  Clone ID: MRT4577_170929C.1.pep
IWVRRSLRKHIKNLRVSTVGVGAIGYIGNKGSISVSMSVHETPLGEELLHLTAGEKDGGDLKGYFHTRGVSLHFLITALSLQSTWLRLKFHKRIICRRDHHYRINESLVGQQGRRTTQDSASSTSAISGREQ

SEQ ID NO: 262409 - protein, 183 aa, Zea mays
  unsure (1)..(183): unsure at all Xaa locations
  Clone ID: MRT4577_17092C.1.pep
MVMMSGLAAYGSLSMTTTGNAPLSWNTRAPPARLAFQRRRRMSTITATVTCRREAAMTAPEKADVLRSLDGWAESNLLPLLKPVERAWQPHDLLPDSASPGFREAVDELRARAREIPDDYYVCLVGNMVTEEALPTYHAALKQLRGLRQPLXAPMXGARWSRGWTAEENRHGDLLNRYLYLCG

SEQ ID NO: 262410 - protein, 67 aa, Zea mays
  Clone ID: MRT4577_170930C.1.pep
ESSNSGIEGADSSNTCYGGTTTILNCVNWIESNSWDDRHGLVVCPHRVVLSSILLFKYQICNCFFLF

SEQ ID NO: 262411 - protein, 236 aa, Zea mays
  unsure (1)..(236): unsure at all Xaa locations
  Clone ID: MRT4577_170931C.1.pep
LDNVSAGSTEWKGLLKDYWERFSKYCADVSKLDGRKVERMLEEKFGPILFSDVYKDCRICPSCSEGTLRFKVSRYGEGYFVGCDRHPKCRYIARSLSQQEDETEPIEENAKSFEPRLLGVMPDSDQKVFLKQGPYGYYVQVGEDKKGLFPKRVSLSKVKDIDSVTLEDAIELLQYPXNLGKHPEDDNLVLITHSKVGYNIKHRRFIAQVPKVCYVHFRNQTNISVYNHPVPCVGEI

SEQ ID NO: 262412 - protein, 58 aa, Zea mays
  Clone ID: MRT4577_170932C.1.pep
SPPMYGVSGQNSRSKPCSILLEYTCQFVTTALPLNSKTARVFLPPTIITPPPKKIKKK

SEQ ID NO: 262413 - protein, 114 aa, Zea mays
  Clone ID: MRT4577_170933C.1.pep
MADWTSLPSDLLRRVGDDLLTEHDIDCFMNMRAVCRNWRSATAKPGRDDLRFCPGQWVMLEEASKVDGDSTRLFINVSTGRFLRRRLPLLRDHTLMLTYYTPLLPEKVCVPRAL

SEQ ID NO: 262414 - protein, 46 aa, Zea mays
  Clone ID: MRT4577_170934C.1.pep
ERGVWCKARKLGESRVFPCWRIIIDVQWIGFAGTFSKMYEIVCMVT

SEQ ID NO: 262415 - protein, 57 aa, Zea mays
  Clone ID: MRT4577_170935C.1.pep
SQLRPASLLCWLDSHHRFLVYFCILQFWMLAIATGFSYYYLKLRTWKITLSALAVWC

SEQ ID NO: 262416 - protein, 78 aa, Zea mays
  Clone ID: MRT4577_170936C.1.pep
MGGFPPYGIVKGDYLMIKGSCVGPKKRVVPPPSPPLKQTSRLALEEIKLKFIDPSSKFGPGGFQPPDEKQRFFGNLKP

SEQ ID NO: 262417 - protein, 39 aa, Zea mays
  Clone ID: MRT4577_170937C.1.pep
KFFQKQFFFTPMVPYLRIGLEPRLQDVKKPGISQPSCRI

SEQ ID NO: 262418 - protein, 126 aa, Zea mays
  Clone ID: MRT4577_170938C.1.pep
PTRPRTRGQFQLHHQVSNFQQSSSPHSYQQSLKMSVFNGTYNIRSALSQRKPVDLEASNPTGRLIEYTFHGGPNQQWRFAHVQNDEFSIQNVATGTYAVAPSGNDATIKAARTDPKSNSAARWKIV

SEQ ID NO: 262419 - protein, 103 aa, Zea mays
  Clone ID: MRT4577_170939C.1.pep
RVAVRGRTSPRPPCAQASSCSSPSTGLPSPSPSSRILMRLPLPYRNSSTAQPYAHAETPPGSGALQTLPEPADPLGRFVDREALRLGLCSWWWPEETREMEEV

SEQ ID NO: 262420 - protein, 78 aa, Zea mays
  Clone ID: MRT4577_17093C.1.pep
DVPQFYFAWCSGWPVSSVKLPSRTTPQTQACYLPVLLQEHSSITLMGYLPSGGHRQSTYARSRVPSWTADFIAPLRPG

SEQ ID NO: 262421 - protein, 238 aa, Zea mays
  Clone ID: MRT4577_170940C.1.pep
QRPHLNKEAEVKHAQKLLQNASGLIASAVDINSARKNSKPLESSGRNSQQQSLQLRIDAETSQPSPRLSDPQNAKRWEHYFRSVTIDDGGEAFSLMNRNLPIYMRCPHCKVSERKEHQDVKFAGVVSQLQRIFIVTPDFPVLLASCPLVQFEGSCLPSNVSDHDREGSFSIGCRVILPPESFLTMRLPFVYGVETKEGSKFPLKYFERQPELTAWLVAGTALQIVSVGDVTEKETVMK

SEQ ID NO: 262422 - protein, 162 aa, Zea mays
  unsure (1)..(162): unsure at all Xaa locations
  Clone ID: MRT4577_170941C.1.pep
IPSLIRRRRLLYAAVAGGEAPARCYRQIKNKPYPKARYCRDRPDPTIRIYDVGMKRKGGVEFHYCVHLASWEKENVSSEALEAARIAVNKHMTKSGGKDALHLRVRVXHPFHVLRINEMLSCAAADRLQTVMRGAFGKPHGTCARVAIGQGLLXARRKDNNA

SEQ ID NO: 262423 - protein, 176 aa, Zea mays
  Clone ID: MRT4577_170942C.1.pep
MQAACNYTKGAHPFDFDASIMESQAHTSYIRCTGYYMRETALPLAPVPRLLDCGTGAATRGNPAHGPTVPTEHIGHGSVSRGRRRDGRYGQKWTDSNGGGRRAEAAVKSSAGSRPLLGQRENPLPRHEDDAPVFRSSNGSRTHNGCPAKHSSRRINSATGQAAPLAGEAGDASPPP

SEQ ID NO: 262424 - protein, 148 aa, Zea mays
  Clone ID: MRT4577_170943C.1.pep
MQAACDRTKGAHSFDFDASSMEAQAHTSCNQFAGCYVQETAPPLPCLLDCGTSTAARGNPAHDLTVPTRHIGHGDRERGYPKRDPSPRRKRAPSPPTDQRFEGWPLGGVQQPPQSARALRPLLVRGSKAGPSERFNGRLRPLGLRAHY

SEQ ID NO: 262425 - protein, 77 aa, Zea mays
  unsure (1)..(77): unsure at all Xaa locations
  Clone ID: MRT4577_170944C.1.pep
TKHTPTQAPXPTEQGPGPTQRTXXHTTXRAARPPDSQXGXXPERTPXQGEXXXXXSXPXXXXXKXSGQXRRPXXRPA

SEQ ID NO: 262426 - protein, 109 aa, Zea mays
  Clone ID: MRT4577_170945C.1.pep
LCNHCIRDTNPNTYMVRIRLPSKISCEPLISEAALHSTYESIATELSSLHFPFTYPYHPLCPCGYPCRPLNGTETAVQAQLFIAEVGSQRMGIAGFAAPSLLLAELGDP

SEQ ID NO: 262427 - protein, 161 aa, Zea mays
  Clone ID: MRT4577_170946C.1.pep
MQAACKPRQVGALLRLPTCPAWRPRPTRHATDAPDAACERLHRHPRHYRASSTAEPMPQLEATQQRQPGATVNAAKNGPAIIAVAGRQEQRSRRQPGLRPIQGQRENPLSRREDDAPVFRSSNGPRTRNGRPANHSPRRINSAAGQATPLAGEASDASPSP

SEQ ID NO: 262428 - protein, 86 aa, Zea mays
  unsure (1)..(86): unsure at all Xaa locations
  Clone ID: MRT4577_170947C.1.pep
PACKEVNLSSLETPTXRKFSGNEMDARLCSICGEEHFASSSDHIREKHGXWAVLAWXSITAFKNNDPLGGDKLVTVYDIVRHHWIT

SEQ ID NO: 262429 - protein, 209 aa, Zea mays
  Clone ID: MRT4577_170948C.1.pep
MPKIHTCSGPDSRNEQDTGTQGAITNGTPVPPPQVRTTPTIGGPAEQQKADGWLAAARSSSSDNDFCSERPNSSSDDLRADAAAIRPSPTSPLEGRGRAEGRRVGGTGRGDTPKGILLREGNGPRAPLLIRGSKAGPSEGFNSCLRALGLRAHYWSGVRRSAPRKGSTAASGHSGSAPTTDQGFVGWPSKGSAAASDAELGMTLGTFDT

SEQ ID NO: 262430 - protein, 229 aa, Zea mays
  Clone ID: MRT4577_170949C.1.pep
MAERYRLLWSCVPPTTRRKDCGHPPSGGLEGGKTRCIREREDMVAFQGGHPPFKGDSPYLRPQPSWAESSPTRSKVLPLRRGGWVPHVMQAVLGQKKPNRHARCMQPPSGYKQFSTFAQTSRRKGGQPCRRRATAPSGRTSLTSNAPSMEAHAHASCNRRAGRYVQATAPPLAPLPRLLDCGTSTATQGNPAYDPAVPARRDGQCGQKRADSDGGGTGKGGYPEKDPSP

SEQ ID NO: 262431 - protein, 171 aa, Zea mays
  Clone ID: MRT4577_17094C.1.pep
MNQFRLMQNSQVTDNVSNHATIPQCAPDAQLTGDNRATIPNKAQVVEPAHAEQVPMQSERAVEKTWQVRLNQLSPIPSFAPGEQLTDEKVVEPAHAEQVHLARLSPSPSRERAHLSQFAPGAQLTDEEAATLKEEDRPQIDLLDGLPRLVEAVARTPVSYKNSKRKKSLKL

SEQ ID NO: 262432 - protein, 59 aa, Zea mays
  Clone ID: MRT4577_170950C.1.pep
SCSIGRRAGSGSGLSIRLDRRVYDQAHVLVHSRPFTLPIWVCTRYLHTKSHAVVRGRVG

SEQ ID NO: 262433 - protein, 164 aa, Zea mays
  Clone ID: MRT4577_170951C.1.pep
MQAACSRAKWARPSDFQRTQHGGPGPRVMQPAPDATCKQLHRHSHHYHASSTAEPVPRLEATLRTTQQCQPGATVNTAKNGPAVMAVAGGQEQRSRRQPSSRPIQGQRESPLSRREDGAPVFRSSNGSRTRNGRLANHSPRRINSAAGQAAPLAGEASDASPSP

SEQ ID NO: 262434 - protein, 106 aa, Zea mays
  Clone ID: MRT4577_170952C.1.pep
MQAACNRTKGAHPFDFDASGMATWAHTSCNRRAGYYVQETAPPLAPVLRPLDCGTDTATRGDPAHDPTVPTGHIGHGDQERGYPERDPSPRRKRAPSPPTDQRFEG

SEQ ID NO: 262435 - protein, 64 aa, Zea mays
  unsure (1)..(64): unsure at all Xaa locations
  Clone ID: MRT4577_170953C.1.pep
MPASHGMSTRTRDLFERTFRKXSNIPLNNYLRTYKIGDYVDVTVNGAVQKGMPHEFYDGRTVRV

SEQ ID NO: 262436 - protein, 232 aa, Zea mays
  Clone ID: MRT4577_170954C.1.pep
MPRLLDYGTGVATRGNPAHGPKVPTKHIGHRDQERGYSERDPSLRRKRAPSPPTDQGFEGWPLGRVRQPPQSTWAPRPLLIRSSKAGPSEGFDSRLRALGLRAHYWSEVLLERASSPLADPYRTGHGRPLGSPVSNSLETPCSAPSEGNMVLFPPPPCGKATKGRMKKAESVLDRPLALCRGSGAALANLAPAKPLTASTYQPENSEPDYAPGLRPVRMREQPDRPRRYERH

SEQ ID NO: 262437 - protein, 184 aa, Zea mays
  Clone ID: MRT4577_170955C.1.pep
MEAQAHMSCNRRVGYHVRKTAPPLTPMPRLLDCGIGAATRGNPAHGPAVPTRCIDHGDRERGYSERDPSMRRKRAPSPPTDQRFEGWPLGRVRQPPQSTRAPRPLLVRGSKAGPSKGFDSRLRPLGLRAHYRSGVRRLAPEGFDSRLRTCRARDNSGYVRYMVEARATLPRYPRTFPRPAGAIL

SEQ ID NO: 262438 - protein, 172 aa, Zea mays
  Clone ID: MRT4577_170956C.1.pep
MRAACNRAKWARFADSQHAQPRGPGPRVMQLARRLLRACNCTATCATTAPPRLRNQYRDSRRPSARLSSASLARQTGSASGRKSGRRFAFAIMTAPVKGPGKGDTPKRVLPREGTRLRASLLIRGSKAGPPKGSTAASDRVGPTPTTGQRFEGRPPEGFHGRLRLLGFRAHY

SEQ ID NO: 262439 - protein, 163 aa, Zea mays
  unsure (1)..(163): unsure at all Xaa locations
  Clone ID: MRT4577_170957C.1.pep
VLPPVDNLGALGGFLAGFLIGFVGVMGPPLGWMGGXGLPAGGPWPARKYLGDQWALLAVAIIILLVGFPAGMGMVFPGANANGSCPWGPYPRWGAPPRWDCPPLWSLHSSRSPGWGCPPFFFSGPESLVSGERFFVLPSAPHPPGGFPVLWFLFLQNDAMPFF

SEQ ID NO: 262440 - protein, 253 aa, Zea mays
  unsure (1)..(253): unsure at all Xaa locations
  Clone ID: MRT4577_170958C.1.pep
MQQHLSTTTSPSPSPTQKLGLTNMAYSVRKVAAANTLEHRVFIEKDGQPISAWHDIPLYANEQQTVLNMIVEVPRWSNAKMEISKEETLNPIKQDIKKGKLRFVRNCFPHKGYLWNYGAFPQTWEDPNVTHPETKANGDNDPLDVCEIGELVNKPGDVIQVKVLGVMALLDEGETDWKIIVVNVNDPLAPKLXDVEDVERHLPGLLRATNEWFRIYKIPDGKPENQFAFSGECKNKKYAMDIVRECAEAWEKL

SEQ ID NO: 262441 - protein, 63 aa, Zea mays
  unsure (1)..(63): unsure at all Xaa locations
  Clone ID: MRT4577_170959C.1.pep
MSDIIPEMAICDFNLQPCGYSMNAVHGHALSTIHVTPKDRFXSYARYKVLGSNPDSFSYGDLV

SEQ ID NO: 262442 - protein, 99 aa, Zea mays
  unsure (1)..(99): unsure at all Xaa locations
  Clone ID: MRT4577_17095C.1.pep
XQXEARVLFFSKDQQNFLFHQNKERQTTLRREQTTTRQNLNRLKKKDPFLLMMPPQQNHLISSRANTTIHLLRPYKHCNKRQQRANIAPQKNILILFLF

SEQ ID NO: 262443 - protein, 54 aa, Zea mays
  unsure (1)..(54): unsure at all Xaa locations
  Clone ID: MRT4577_170960C.1.pep
MSLDAIPGDQSWLIYASLIGKPRAILHTRVPVQGLALLSISMKVPVRAAQLXXV

SEQ ID NO: 262444 - protein, 89 aa, Zea mays
  Clone ID: MRT4577_170961C.1.pep
PQNFFPFSHREALNSPAILKEHQLFPFSQLVGVSPASFLIQPRLFRFNQHVGPNGGTLCQWKQLWPFNQLALSNPEGFYHHPTMGGAPF

SEQ ID NO: 262445 - protein, 96 aa, Zea mays
  Clone ID: MRT4577_170962C.1.pep
CHSFDGVDEKCLAPRAGLVRGVRAVVLVGGGFHYQCLREHYLLHVSLAFHSLRAVSLLLVTSFFVLGLHVFFLFYFFFVFFSFYFYFYFIFIFFFF

SEQ ID NO: 262446 - protein, 75 aa, Zea mays
  Clone ID: MRT4577_170963C.1.pep
GVEPRHQSTSTSNCSDLGNECPPPLPWTPSSCHGEAPRALCWSLSGHVGRIHYGGFPLVFVRSIEVADPRGAWCP

SEQ ID NO: 262447 - protein, 225 aa, Zea mays
  Clone ID: MRT4577_170964C.1.pep
MAASSYFLLAAFLAVVASHATASDPSPLQDFCVADMHSPVKVNGFVCKDSMAVTADDFFKAANLDKARDTMKSKVGSNVTLINVIQLPGLNTLGISLARIDYAPLGENPPHTHPRATEILTVLEGTLYVGFVTSNPNKLFAKVLNKGDVFVFPQGLIHFQFNPVYNKPAVAIAALSSQNPGVITIANAVFGSKPPISDDVLAKAFQVEKGTIDWLQAQFWENNHY

SEQ ID NO: 262448 - protein, 225 aa, Zea mays
  Clone ID: MRT4577_170965C.1.pep
MAASSYFLLAAFLAVTASHATASDPSPLQDFCVADIHSPVKVNGFVCKDPMAVTPDDFFKAANLDKARDTMKSKVGSNVTLINVIQLPGLNTLGISLARIDYAPLGENPPHTHPRATEILTVLEGTLYVGFVTSNPNKLFAKVLNKGDVFVFPQGLIHFQFNPVYDKPAVAIAALSSQNPGVITIANAVFGSKPPISDDVLAKAFQVEKGTIDWLQAQFWENNHY

SEQ ID NO: 262449 - protein, 121 aa, Zea mays
  unsure (1)..(121): unsure at all Xaa locations
  Clone ID: MRT4577_170966C.1.pep
VRALEGLSLLVCIISLKVVMEVVNNLRNIHCKGVADLVTDXETTYCFNLLFYILFNIDKLSEPVILKVVTXTKNFKDHLIHGEEGDLVEDSLLEYLWCIDRLGLVPHSVCTSNLMNIYLIL

SEQ ID NO: 262450 - protein, 62 aa, Zea mays
  Clone ID: MRT4577_170967C.1.pep
PTTLSLVSSALAGCAFKTTRTRLANTGTQKGATYIHVCPGVKRHLNTGSTDRITAITFDPCL

SEQ ID NO: 262451 - protein, 424 aa, Zea mays
  unsure (1)..(424): unsure at all Xaa locations
  Clone ID: MRT4577_170968C.1.pep
MPMSSHAHAGHRRLFLLTSTSTSLAFVAAVLLLIVDACAASRQFSTVAISHAPNATLVCALVTSADDAGAGPPGSSKLRCTSLPDGXVRLPLRXDIPYNAIAAGTDFLCGLMAPXSAATPPWRWWXLLRGVRRQPLXAPSAGRLYWGPSLXSLSAGGSHACGLSDDHGPXCWEWPRLALPQGLDFSRIALGHDFLCGIDKLDNTSMSCYGAMAAPSLAPDPAALRTVAAGHRHACAVDAEGGFACWGDGDGDVPEVPAHELPDDMLAMALGNGTTCILSGSGRVRCWGAVQVPDQYRTADFLAIEADGDAVCGILNSNYSVACWGRSDRFGAGGSLVYNSTMPGACARKKSCPCDIISGSGALCGTGGAEGGEELAVCRACATPLNASRILIANGRAGPAAGGDAGKKKAKTLAVAVGVGAAVL

SEQ ID NO: 262452 - protein, 68 aa, Zea mays
  Clone ID: MRT4577_170969C.1.pep
LAELMDKVLKNRRFVMAYMPGYSAWAILTGKGPLKNLADNIAKKAYNNAWGYANNFVPRKRGTHRRGP

SEQ ID NO: 262453 - protein, 28 aa, Zea mays
  Clone ID: MRT4577_17096C.1.pep
YGSCPVAWRGPRSKRKVSDTVDHSGLGS

SEQ ID NO: 262454 - protein, 73 aa, Zea mays
  Clone ID: MRT4577_170970C.1.pep
RTLLVTKVLMALAKFKPFESRLPCMETVCSGTFQGPFWVLAISLPRFYKKSVSLWFSHKCKIKHVSFKKKLKG

SEQ ID NO: 262455 - protein, 120 aa, Zea mays; identical to SEQ ID NO: 261565
  Clone ID: MRT4577_170971C.1.pep

SEQ ID NO: 262456 - protein, 135 aa, Zea mays
  Clone ID: MRT4577_170972C.1.pep
IHNETAHKNKYLAANNGSMSSILLATAMLVVMFAVGLCTTPLTFQVGKGSKPGHLILTPNVATISNVEIKEHGGNDFSFTLKEGPTGTWTLDTKASLKYPLCICFAVKSGGYCIADDVIPADFKAGTTYKTTLNI

SEQ ID NO: 262457 - protein, 222 aa, Zea mays
  Clone ID: MRT4577_170973C.1.pep
MQAACNRTKGAHPFDSDTSGIGAQAHTSCNRRPGYYVRETAPPLAPVSRLFDCRTGAATRGNPVHGPTVPTEHIDHGTGGTFGKRRFTSAIMTASKKVRHAVRFRILFLFLFLSLATWTGKGDTLKGILLREGSGPRALLLIRSSKAGPSEGFNSRLRALGLRAHYWSEVRRLAPRKGSTAASGPSGSAPTTGQRFEGWPLGRVRQPPQATRAPRPLLIKGS

SEQ ID NO: 262458 - protein, 120 aa, Zea mays
  unsure (1)..(120): unsure at all Xaa locations
  Clone ID: MRT4577_170974C.1.pep
MASMSSILLATAMLAALFAVGLCTTPLTFQVGKGSKPGHLILTPNVATISDVEIKEHGGDDFSFTLKEGPTGTWTLDTKASLKXPFASGFAVKSGGYRIADDVIPADFKAGTTYKTTLSI

SEQ ID NO: 262459 - protein, 151 aa, Zea mays
  Clone ID: MRT4577_170975C.1.pep
MPRLEATQRTTQQRQPGATVNAAKNGPTVMTVAGGTSGRRSGRRFAFAIMTASVKGSGKGDTPKRILPREGTRLRASLLIRGSKAGPSEGFDSRLRSRGPYTHYWSEVRRPAPRKGSTTASGYSGSAPTTDQGFEGWPPKDSQPPQTQSEG

SEQ ID NO: 262460 - protein, 120 aa, Zea mays
  Clone ID: MRT4577_170976C.1.pep
MASRSSILLAMVMLAALFAVGLCTTPLTFQVGKGSKPGHPILTPNVATISDVEIKEHGGDDFSFTLKECPTGTWTLDTKAPLKYPLCIRFAVKSGGYRIADDVIPADFKAGTTYKTTLSI

SEQ ID NO: 262461 - protein, 159 aa, Zea mays
  Clone ID: MRT4577_170977C.1.pep
MMTASKRGTGKGDTLKGILLRKGSGPRTLLLIRGSKAGPSEGFDSHPRALRLRAHYLSEVRRLAPRKGSTAASEHSGSAPTTDQGFEGWPPEGFDSRPRTHRARDDSGGSGAALANPAPVKPLTVSTYQPENLEPDHAPGLRSDRMREQPDRPRHHERQ

SEQ ID NO: 262462 - protein, 84 aa, Zea mays
  Clone ID: MRT4577_170978C.1.pep
NGVIAPKGICMMLVQTIPDKGIAVHVTRTLNTIRKRGFLSREGLQRLTSPFGWWFPPRQIYLPPILRVITGHKQPRPVIVLETN

SEQ ID NO: 262463 - protein, 197 aa, Zea mays
  Clone ID: MRT4577_170979C.1.pep
MQRGYLSGALVSSVQVPVGPSLSVKEKSSPPCSLISTSDMVATLGVRIRWPGLDPLPTWNVRGVVHNPTTNSAASITMASRSSILLATAMLAALFAVGSCTTPLTFQVGKGSKPGHLILTPNVATISDVEIKEHGGDDFSFTLKEGPTGTWTLDTKAPLKYPLCIRFAVKSGGYRIADDVIPADFKAGTTYKTTLSI

SEQ ID NO: 262464 - protein, 73 aa, Zea mays
  Clone ID: MRT4577_17097C.1.pep
RVFLGAPFPLMGGRFKLLWAVFYSGGWGNPLVSPILILLENIPFSPCGIIQKGPPPIPFQKLCPPYVERAPPF

SEQ ID NO: 262465 - protein, 151 aa, Zea mays
  Clone ID: MRT4577_170980C.1.pep
MQAACNCTKVAHPFDFDASSMEAQAHTSCNRCAGYYVRETAPPLAPVPRLLDCGTGAATRGDPAHDPTVPTENIVHGDRERGYSERDPSPRRKRAPSPHTDQRFEGWPLGRVQQPPQSTRAPRPLLVRGSKAGPSEGFNGRLRPLGLRAHY

SEQ ID NO: 262466 - protein, 92 aa, Zea mays
  Clone ID: MRT4577_170981C.1.pep
GLPLLLFFIFKFHFNLQIQIKSNLVLRLQYKLHVHHKFFSLNANIYIYILYLSYLILLYMIPNHIIENRYLKNVICSLYFSLVNKYKYILIK

SEQ ID NO: 262467 - protein, 97 aa, Zea mays
  Clone ID: MRT4577_170982C.1.pep
PSNSFLLAHKCTCAPCSLLIALLLVRSKGSTPPLSLPVYGVVATMYWGFRFKIWTQEQLHACVLFVAPNYVLHKAQLGFVYGSLHQKYVVCWGVLQK

SEQ ID NO: 262468 - protein, 120 aa, Zea mays; identical to SEQ ID NO: 261566
  Clone ID: MRT4577_170983C.1.pep

SEQ ID NO: 262469 - protein, 225 aa, Zea mays
  Clone ID: MRT4577_170984C.1.pep
MQAACNRAKWAHPFNSNAPSMETQAHTSCNRRAGCYVRATAPPLAPLPRLLDCGTSTVTRGNPAYDPTVPARRIGHGSVSCGRRRNGRYDQKWAGSNGSGRRAEAADMRHLWQEKRATLRLRHNDRVKKGTGKGDTTKGILLREGNGPRAPLLIRGSKAGPSKGFNSRLRALGLRARYCSEVRRPAPRKGSTAALGHSGSAPTTDQGFVGWPSKVSQPPQTKSEG

SEQ ID NO: 262470 - protein, 120 aa, Zea mays; identical to SEQ ID NO: 261565
  Clone ID: MRT4577_170985C.1.pep

SEQ ID NO: 262471 - protein, 314 aa, Zea mays
  unsure (1)..(314): unsure at all Xaa locations
  Clone ID: MRT4577_170986C.1.pep
MAERYQLPRSCVPPTMRRKDGGYPPSGGLEGGKTRCIREREDMVAFQGGHPPFKGDYPYSRPQPSRAESSPTRSKALPCGAGAGSHMSYKPAQSRRSQTAARGTHDHPAVTSDPPLLPRPTGERGGQPCGQHATALRGHASPTPDTPSMEAQAHASRNRRAGCFMQETAPPLAPPPRLLDCGTNTATRGDPAHDPTAPAWRDGQCGQKWAGSNDGGRRGPGKGDTLKRILPREGTRLRASLLIRGSKTGPPKGSTAASDRVGPTPTTGQRFEGRPPPKGSTXPQATRAPRPLLIRGSKAGPRRVHSRLRRRARD

SEQ ID NO: 262472 - protein, 47 aa, Zea mays
  Clone ID: MRT4577_170987C.1.pep
GALCTMCCLYYQWSTLCIKRITSDCFLVHSSDYIVVRPHGICPPRRC

SEQ ID NO: 262473 - protein, 120 aa, Zea mays
  Clone ID: MRT4577_170988C.1.pep
MASRSSIVLATVMLAALFAVGFCTTPLTFQVGKGSKPGHLILTPNVATISDVEIKEHGGDDFSFTLKEGPTGTWTLDTKAPLKYPLCIRFAVKSGGYRIADDVIPADFKAGTTYKTTLSI

SEQ ID NO: 262474 - protein, 176 aa, Zea mays
  Clone ID: MRT4577_170989C.1.pep
MQAACNRTKGVHPFDSDASSVEARAHTSRNRRAGYYVRETAPPLAPVPCLLDCGTGAATRGNPAHGPTVLTEHIGHGSISRGRRRDSRYGQKWAGSNSGGRRAEAAVKSSAGSRPLLGQRESPLPRREDDTPVFRSSNGSCTHNGCPTNHTSRRINSAAGQAAPLAGEARDASPPP

SEQ ID NO: 262475 - protein, 80 aa, Zea mays
  Clone ID: MRT4577_17098C.1.pep
LRVKFLPLVRDSPRGMAMPVSCSPVLHRWAPTACQRSRGFSALPGSCLYSQRADTGVGSPAPWLTHAPSEAWSCAWVTAW

SEQ ID NO: 262476 - protein, 82 aa, Zea mays
  unsure (1)..(82): unsure at all Xaa locations
  Clone ID: MRT4577_170990C.1.pep
MASTIMVATSRXVADKTPFLGQGRSAAAASNASPLRDVAAAAAGGRITMGNDLWYGPARVKXYLGSFSAQTXPSVLTGEFPG

SEQ ID NO: 262477 - protein, 70 aa, Zea mays
  Clone ID: MRT4577_170991C.1.pep
RSGGKFGDRSGGPRGGGKFGEKSWGRDGGGKFGGPRGGKDGGPGPGGRGFGNKHSAGPPSAGKKTPFGDD

SEQ ID NO: 262478 - protein, 120 aa, Zea mays
  Clone ID: MRT4577_170992C.1.pep
MASRSSILLAMVMLAALFAVGLCTTPLTFQVGKGSKPGHLILTPNVATISDVEIKEHGGDDFSFTLKEGPTGTWTLDTKAPLKYPLCIRFAVKSGGYRIADDVIPADFKAGTTYKTTLSI

SEQ ID NO: 262479 - protein, 374 aa, Zea mays
  Clone ID: MRT4577_170993C.1.pep
MRRKDGGYPPSRGLEGGKTRCIRECEDMVAFRRGGHPPFKGDSPYLRPQPSWAESSPTHSKVPPVARGLGPTRHTNRLRAEEAKPPRAVRTTTQRLQVTLHFCPDQRAKGAGSHAGGVQPRQVDSLLRLPTRPAWRPRSTRHATGASNASCMQLHRHSRHYRASSTAEPIPRLEATQRTTQQRQPGATVNAAKNGPAVMAVAGGQEQQSRPRPIRGSERTLSHGMKTMRPCSVPRTARACATIAPPTTRPVALTPRRDRRHLRQEKRATLRLRHNDRVSKGKGDTPKRILPREGTRLRASLLIRGSKAGPPEGFDSRLRSRGPYTHYWSEVRRPAPRKGTTAASGYSGSAPITDQGFEGWPPKGSQPPQTPSEG

SEQ ID NO: 262480 - protein, 176 aa, Zea mays
  Clone ID: MRT4577_170994C.1.pep
CSRHATAPSGRTPPTPTHPAWRPRPTRHATSAPVATCEQLHRPSRHYRASSTAEPVPRLEATLRMTQQRQAGALVTGQSAAGEGATVDAAKNGPAVMTVAGGREQRSRRQPSSRPIQGQQENPLSRREDDAPVIRSSNGSRTRDDRPANHSPRRINSAAGQAAPMAGEAGDASPSP

SEQ ID NO: 262481 - protein, 258 aa, Zea mays
  Clone ID: MRT4577_170995C.1.pep
MGDTRRVSASSLEERNSAGVGTFQPSFGFKDFHQPARLYPPPPRRRSPKTATTSPWVGRSKPGCDFGPTLSFKDVHHPCWGGGRAEPELYLPRGFVGYPLLRRLRERALAGPAGGSDFDNAGLADGGRRQPQRVELVGLAPGGPSCRKAAAAPCAREDRPRRRATLGRRSCSGRSCLCTGMAPPRGGWCPARPGGFEWGSAGGLMAPVVGAEVEAAREVPVAVGITATIRASGLRLFVLVLAPRASVWARARLQQHPP

SEQ ID NO: 262482 - protein, 84 aa, Zea mays
  Clone ID: MRT4577_170996C.1.pep
STLGFSYPAMTDLAWAWDAETKTVSSRDGYCTIFELESEELGQHHILLGSKEVDNGNLTHETKTPVCAQRKKGDNILNRLKMDA

SEQ ID NO: 262483 - protein, 71 aa, Zea mays
  unsure (1)..(71): unsure at all Xaa locations
  Clone ID: MRT4577_170997C.1.pep
MALPNQGTADYPSFELVIVGAGGTGKTTFVTRHLTGEVGXEVDPPIGVPAHPVDFAAACGGVRLLCWPAVR

SEQ ID NO: 262484 - protein, 47 aa, Zea mays
  Clone ID: MRT4577_170998C.1.pep
KLAHKVRQDGVAKHFVHLDVYSDFDSDHIKLSDRPSLSLYRAPHMDA

SEQ ID NO: 262485 - protein, 91 aa, Zea mays
  Clone ID: MRT4577_170999C.1.pep
EEQLFPSVLVQAMSLEKLVIAPDLAIIRKHINDGVNGLLFPRKNIGMLAQVLLRAVSNSKVSLSGQKIASAGKAHAKNLMASETIEGYASY

SEQ ID NO: 262486 - protein, 46 aa, Zea mays
  unsure (1)..(46): unsure at all Xaa locations
  Clone ID: MRT4577_17099C.1.pep
CQFPYNFTGCQDLAKQKKVPFISDDLQIECQGXEKFKCGANVFWKW

SEQ ID NO: 262487 - protein, 70 aa, Zea mays
  Clone ID: MRT4577_1709C.1.pep
SPFYLMGGGGLFFIVYSKNQKEWSQQTMTTPGERSQTHHGEHIASVAHTEKGRNVPKLLRRITWVSRDEH

SEQ ID NO: 262488 - protein, 183 aa, Zea mays
  Clone ID: MRT4577_170C.1.pep
PPRPHAEPVAPSGWLKPTAPPRMPVPPPAPLPTSAMPPPTTGSTASLARAAANAQVTRPDPAPLPAGFEPVRPRPTAARPATAALKQATPRATVTPRPVGTQPPRPPVRPVAGTGATGTAPDPARRRPSPPTPARAPLYAWTEKPAAPITPAPSVHDTLRSIEASTAQWATLGSGQPSDSTHA

SEQ ID NO: 262489 - protein, 182 aa, Zea mays
  Clone ID: MRT4577_171000C.1.pep
MSHNHGDTIPLHPSSAQSDMDEIESLIHAAPSPATVLPARPPSPTRASIPVSSSPALAPAPVPTKPPLPAASIPISVSVSPVLTSVSVPIGADGFGPPPNTLTEPVWDTVKRDLARIVSNLKLVVFPNPFFFIVFLGLTLSWSASAKKSEVFAVAFAVLAAGAIILTLNGLLLGGHIIFFQA

SEQ ID NO: 262490 - protein, 89 aa, Zea mays
  Clone ID: MRT4577_171001C.1.pep
FEAGSITLFSFPRHMPSRLYGCTTCWHYSLPSNGSLRSAASDHAVQNRALNLPYRSRSAGGKGVAVCTWFCNASYNLQHADMQMQFASP

SEQ ID NO: 262491 - protein, 276 aa, Zea mays
  Clone ID: MRT4577_171002C.1.pep
MSHNHGDTIPLHPSSAQSDMDEIESLIHAAPSPATVLPARPPSPTRASIPVSSSPALAPAPVPTKPPLPAASIPISVSVSPVLTSVSVPIGADGFGPPPNTLTEPVWDTVKRDLARIVSNLKLVVFPNPYREDPGKALRDWDLWGPFFFIVFLGLTLSWSASVKKSEVFAVAFAVLAAGAIILTLNVLLLGGHIIFFQSLSLLGYCLFPLDVGALLCMLKDNVILKIVVVTITLAWSSWAAYPFMSAAVNPRRKALALYPVFLMYISVGFLIIAID

SEQ ID NO: 262492 - protein, 276 aa, Zea mays
  Clone ID: MRT4577_171003C.1.pep
MSHNHGDTIPLHPSSAQSDMDEIESLIHAAPSPATVLPARPPSPTRASIPVSSSPAPSPVPTKPPFPAASIPISVSVSPVPVPASVSVPIGADGFGSPPNTLTEPVWDTIKRDLARIVSNLKLVVFPNPYREDPGKALRDWDLWGPFFFIVFLGLTLSWSASVKKSEVFAVAFAVLAAGAIILTLNVLLLGGHIIFFQSLSLLGYCLFPLDVGALVCMLKDNVILKIVVVTITLAWSSWAAYPFMSAAVNPRRKALALYPVFLMYISVGFLIIAID

SEQ ID NO: 262493 - protein, 76 aa, Zea mays
  Clone ID: MRT4577_171004C.1.pep
FFQSGHTLGCDGLSPTVGSQTGMGLAPILAASPSIFRGGVHSSFVGLAKLQELCSLGGPWILPAPVELSWLLEPQV

SEQ ID NO: 262494 - protein, 160 aa, Zea mays
  unsure (1)..(160): unsure at all Xaa locations
  Clone ID: MRT4577_171005C.1.pep
KPKGGGGGQGPAGGKKPRRKPNKNKLGEKGGGPPKTLWGGGARARERPPPPGDPKKGPPXGGPRGVVLPAPPXGKPRGFKKFGKGGPPPLKDVEGPKKLGQKKXPPGPPPPFGGATVCSRARVGPFPARGNKKGGEKTGPPLRRERVREKTPGAGKKLGA

SEQ ID NO: 262495 - protein, 149 aa, Zea mays
  Clone ID: MRT4577_171006C.1.pep
KRCLWTRFLIYDKKWLKLPDANKVCGSLTFQNIGADSLDPVELLGQLMSFSSSKKSLRAHSHLAPGAYGDHLPEVSWCRATNNRVNLRGRTPLGAEPRHLLLDKAPWRKTFLFWPAPWRNVPVIPALVDRRTVLYSDSALVQEHKTMVR

SEQ ID NO: 262496 - protein, 255 aa, Zea mays
  unsure (1)..(255): unsure at all Xaa locations
  Clone ID: MRT4577_171007C.1.pep
MATAVASQPRHFTLGGEPRAAICAASTSKICTLDKVYGFRFVCRSVVDLRSQKFHSQISKRKCYLTSSPSEFEKIILSARWLEFRRQRIAFQRTGRWVHSIPLASQDDGSGVSVNGVPQVDPASQMKEIRVKLDKALQNEDISTGLVQSIHDAARSIELAFLDHSKSSINSWFPKMWLGVDNNAWIKSLSYQAAVSSLLQAVIDVSSRGXNGRDRDINVFVQRSLSXPSXSLDGVIQNELAKRNPSXYQWYSSNQ

SEQ ID NO: 262497 - protein, 105 aa, Zea mays
  Clone ID: MRT4577_171008C.1.pep
DGVPVVELFLIDAVVGFGGDPGSVDGRTDEVFWTRTTEIIHPSTIAPAAAVANPNFLVRKKEQAAVYEQDGQFRRRQGERTADVADERESFGLSLPYQPYILLSR

SEQ ID NO: 262498 - protein, 57 aa, Zea mays
  Clone ID: MRT4577_171009C.1.pep
TNLSSFVSCGSIAKIFNNATTLDLFFGTISELIDSKSITMFSFFIFLVMLSHTIPEF

SEQ ID NO: 262499 - protein, 103 aa, Zea mays
  unsure (1)..(103): unsure at all Xaa locations
  Clone ID: MRT4577_17100C.1.pep
QHNHFSVLTXAAKIWGLLILNGLSANTTTXTIFPQCSQTPITSFLPPYLSPSFSSVCENPILXPYIIQHAISTIILPLLPLFLQQPSSLLQQLPFVHFLAQNI

SEQ ID NO: 262500 - protein, 64 aa, Zea mays
  unsure (1)..(64): unsure at all Xaa locations
  Clone ID: MRT4577_171010C.1.pep
MILKPIRHMSTIMDGQVAQRQILLPTDVXHVAHIGRNGPGYTINIDLISNYNSCRAPNWIKDYH

SEQ ID NO: 262501 - protein, 53 aa, Zea mays
  Clone ID: MRT4577_171011C.1.pep
LYRERRLIASPSDTRWRLGVCCLQSPYSRATSPDTMVSSVSNDTGGISPVGWD

SEQ ID NO: 262502 - protein, 111 aa, Zea mays
  unsure (1)..(111): unsure at all Xaa locations
  Clone ID: MRT4577_171012C.1.pep
VWRLSIWHGSTVAVIAANVPAVYEAHLAVPMSGAAANCVNISLTTETIAFLLEHCVPQAVKVDQEFFTLADQXLQILGNKKTSDVTRAPTLIEIDDPTCDPNSVHHALGKG

SEQ ID NO: 262503 - protein, 262 aa, Zea mays
  unsure (1)..(262): unsure at all Xaa locations
  Clone ID: MRT4577_171013C.1.pep
PPTAQTSPPRGRSAAARPGLTSLSPSPRLRDREREDATLTWRRRPSLPRARRRXAAMHAGIRRSRSEPHLRCPRRAGAELTTSRSIGVFPFQLGAAPLRPPPLPDGGADGSRLLTVADDDPPEEPGPEMPPARRPEAHWLGRLLELRSRFHDPTKRDVLDDDDDDLYRLDADHHDGGCGVSYDDEEEDARWDRHSFAKLLARXPLGDARLFAQLAFLCNMAYVIPEIKVEELKKHYGLRFVTSSLEKKAEAGIISAKLDADS

SEQ ID NO: 262504 - protein, 221 aa, Zea mays
  Clone ID: MRT4577_171014C.1.pep
MAERSSPYGAGAGSHASCKLAQGRRSQTAAHGACNRPAVTSVPPLSPRPAGERVDSRAGGMQPRQVGAPLRLPTHPAWRPRPTRHATGAPVATCKQLHRHSHHYHASSTAKLVPRLEATLRTTQQCQPGATVNTTKNGPAVMAVAGGQEQRSRRQPSLRPIQGQREKPLSRREEGAPAFRSSNGSRTRNGRPVNYSPRRINSAAGQAAPLAGEASDASPSP

SEQ ID NO: 262505 - protein, 211 aa, Zea mays
  Clone ID: MRT4577_171015C.1.pep
MSSRSLMHRVFPPSKPPDGGYPPSFRLFVGGTQLRGSWYLSAIVRLQGFSSASPAAPPRRWSPKTVTTSPWVGRSKPGYDLGPTLSFKDVHHPCWGGGRAEPELYLPRGFVGHPLLRCSRERALAGPVGGSDFDNAGLVDGGRRQPQRVELVGLAPGGPSCRKAAAAPCARENRPRCRALLGRRSCSGAVLPLHRYGASARRSVPHSSGRI

SEQ ID NO: 262506 - protein, 253 aa, Zea mays
  Clone ID: MRT4577_171016C.1.pep
MQAACNRTKGAHPFDFDASSMEAQAHTSCNQRAGYYVQETAPPLAPVPRLLDCGTGAATRGDPAHDPTVPTEHIGHGSDSCGRRRDGRYGQKWAGSNGGGRRAEAAVKSSASSRPLLGQRENPLPRDRERGYFERDPSPRRKRAPSPLLIRGSKAGPSEGFNSRLRALGLRAHYWSEVRSLAPRKGSTTASGHSGSAPTTDQGFVGWPPKGSDSRLRARRARDDPGYVRYITKARATLLRYPRTFLRPTGTIL

SEQ ID NO: 262507 - protein, 144 aa, Zea mays
  unsure (1)..(144): unsure at all Xaa locations
  Clone ID: MRT4577_171017C.1.pep
RPYACYHDPVAMAHIREYILKPLSEPAVAPVCTRNNSVPGFLFSNGGFSGNLXHGYTDVLVPXLFIRSQDAPVPGRVQLLLSGMKVCWVGKXLYSSSDVDNDQKVHCFQQIVVGATLHRDMGVDPRRSPGHLNFSSHATYLWKL

SEQ ID NO: 262508 - protein, 243 aa, Zea mays
  Clone ID: MRT4577_171018C.1.pep
MAERYQLPRSCVPPMTRWKDCGRPPSGGSEGGKTRWIREREDMAAFQGGHPPFKGDSPDSRPQPSRAEPSPTRSKVLPLTARGLGPMRHASRSRAEEAKPPRAGHATAQRLQAFLHFRPDQRVKGWTAMQSTCNCAKWTRPFDSNAPSMEAQAHTSCNRLADCYVRATAPPLAPLPRLLDCGTSTATRGNPACDPAAPARRDGQCGHKWAGSNGGGRRAGAAVTSSAKLTSHPGAAREPSLTA

SEQ ID NO: 262509 - protein, 97 aa, Zea mays
  Clone ID: MRT4577_171019C.1.pep
CFFFFFFFFFFFFFFFFFFFFFFLAKKKNLFVFSFHRGGPIYQKGKHPPPTQFGGNKLFPLGKNSSPGKPAPLKPNRPPYLGEKKWGEKKSPPAPGF

SEQ ID NO: 262510 - protein, 55 aa, Zea mays
  Clone ID: MRT4577_17101C.1.pep
VVGHALPHFLEDLCSWEVLGPEMWGWRDCANRRADPPPWLAGVKTTRPFLRPLGR

SEQ ID NO: 262511 - protein, 214 aa, Zea mays
  Clone ID: MRT4577_171020C.1.pep
MQAACNRTTRMHPFDFDASSMEAQAHTSRNRRAGYYVRKTAPPLAPVPRLLGYGTGADSRRPCAWPNGANQAHRSRVSQPREKASRDRERGYFERDPSPRRKRAPSPPTDQRFEGWPLGRVRQPPQSTRALSPPTGQRFEGWPLGRVRQPPQATRASRPLLIRGSKAGPPEGLDSRLRTCRARDDSWYVRYMAEARATLPRYPRTFPRLAGAIL

SEQ ID NO: 262512 - protein, 141 aa, Zea mays
  Clone ID: MRT4577_171021C.1.pep
MEAQAHASCNRRAKCFVHATAPPLAPLPRLLDCGTNTATRGDPADRERGIPRKGSFPEKEPGSEPPPLLIRGSKAGPSEGFDSHLRSRGPYTHYWSEVRRPAPRKGSTAASGYSGSAPTTDQGFEGWPPKGSQPPQTPSEG

SEQ ID NO: 262513 - protein, 222 aa, Zea mays
  Clone ID: MRT4577_171022C.1.pep
MQATCNRTKGARPFDFDASNMEAQAHTSCNRHAGYYVRETAPPLAPVPRLLDCGTGAATRGDPAHDPKVPTEHIGHGSAKHATLHLRHNDRDKKGTGKGDTPKGILLREGSGPRAPLLIRCSKAGPLEGFNRRLRALGLRAHYWSEVRRLAPRKGSTVASDHSGSAPTTDQGFVGWPPKGSDSRLRARRARDDPGYVRYITKARATLPRYPRTFPRPTGTIL

SEQ ID NO: 262514 - protein, 148 aa, Zea mays
  Clone ID: MRT4577_171023C.1.pep
MAGGRLLRRAGGWLPPPEAGRRGGQPARAGGGAPGRRSGQRFTFAIMTASEKGPGKGDTPKRILPREGTWLRASLLIRGSKAGPSEGFNSRLRARGLHTHYWSEVRRPAPRKGSTVASGYSGSAPTTDQGFEGWPPKGSQPPQTQSEG

SEQ ID NO: 262515 - protein, 92 aa, Zea mays
  Clone ID: MRT4577_171024C.1.pep
PYVGGCQHGCFRAEQVRAHKSTPVLVGSACTFSISWGLSWVVGSMAIFAMHKDGHVCCPCCIGSRFEVMFHLAAGKKKRKSGGRPLFRIRAY

SEQ ID NO: 262516 - protein, 163 aa, Zea mays
  Clone ID: MRT4577_171025C.1.pep
MQAACNRAKWAHPSDSNAPSMKAQAHTLCNRRAGCYVRATAPPLAPLPRLLDCGTSTATRGNPAYDPTVPARRDSQYGQKWVGSNGGGRDRERGYPERDPSPRRKRAPSPPTDQRFEGWPLGGVQQPPQSARAPRPLLVRGSRADPSEGFNGHLRPLGLRAHY

SEQ ID NO: 262517 - protein, 188 aa, Zea mays
  Clone ID: MRT4577_171026C.1.pep
MLPRPSQRSIFYLGEEGGDDHSVAEEHVKNIDTRRSHGARQDDGCQWRKRDAAVDAVGVGLQILVQNRHHTKVPPSHSHIVLKQVVVLTTVAPHRRVPCSSFLSACSRCRKELSGKDDVFMYRGDQGFCSEECRCEQILVDEAREREAMFGGKQRMRRGLPRRLHHGPRSAMGAIGGGASRRLVATAY

SEQ ID NO: 262518 - protein, 81 aa, Zea mays
  Clone ID: MRT4577_171027C.1.pep
HTIRSSRPLSTSSALADACRPDTAPSGCTTTPRRGRWRRHGCRGRVAARLTLAPKTTDDVPQVYSNRTDEADADACAFGTV

SEQ ID NO: 262519 - protein, 191 aa, Zea mays
  Clone ID: MRT4577_171028C.1.pep
MQSTCNRAKWAHPFDSNAPSMEAPDHTSCNRRAGCYVRATAPPLAPLSRLLDCGTSIVTRGNPAYDPTVPVRRIGHGPVSRGRRRDGRCGQKWAGRTGKGDTPKGILLREGNGPRAPLLIRGSKAGPSEGFNSRLRALGLRAHYWSEVRGPAPRKGSTAASGHSGSTPTTDQGFVGWPSKGSQPPQTQSEG

SEQ ID NO: 262520 - protein, 108 aa, Zea mays
  unsure (1)..(108): unsure at all Xaa locations
  Clone ID: MRT4577_171029C.1.pep
SSATXIPQALFYLSEXTNXFXFLILLLQYKLLXCIQSYPSYFSFHPPLFLLLIPTKSPSPPMKNSTFIICTFFNLIKKISSNSINAKIIMFKYTRKFITLYNLILLPS

SEQ ID NO: 262521 - protein, 88 aa, Zea mays
  unsure (1)..(88): unsure at all Xaa locations
  Clone ID: MRT4577_17102C.1.pep
MQSSIVSRIKADGCQTRDAGSSASGAIIVCDRLRVANVAEATAVISIGGQGIAVSTDXKADQTDYTQRSEQAXGPALWPAIWRLGGVL

SEQ ID NO: 262522 - protein, 105 aa, Zea mays
  Clone ID: MRT4577_171030C.1.pep
AKQRINRRSGRRLYTQLASFLEAADSSILQAGQLSCAGKRTAVSSLLLWASPLISRPRRFCILFGLVGCLEFCADNNFSQESAKTTIIPTVQATKPWKGESTWGP

SEQ ID NO: 262523 - protein, 122 aa, Zea mays
  Clone ID: MRT4577_171031C.1.pep
MHFTLPLLALAASVSASNPIEAAWNVTRSYRDISQQVVAYDLTAVFVSEEYPKGLESKCNWSQKGMQFNVVCDPNTFSVEPQTDGTLKIQQTIEKPTEQVVYGQGDVPAKGHVVIPVTARVA

SEQ ID NO: 262524 - protein, 45 aa, Zea mays
  Clone ID: MRT4577_171032C.1.pep
QMKKIKGVPLKPKTGGNKKPKKLKVPPLRGQRAGPFNSCRIPFPF

SEQ ID NO: 262525 - protein, 609 aa, Zea mays
  Clone ID: MRT4577_171033C.1.pep
MEPKGESGQKPIEEAIDSLKTDASMKANNVNLPAKKDASSSDAVSCISSGDAASTVKDREMNQETSFGDQGMHYYGYYYPGAYGGWDENGYFVGYNGLEVHPAVVQADNGSYLCYPLGYENGYASYIPVVPGGIASVDGQYVSKEPYYSSALPIQDPSTPGIFAQPIAYGTELVPAYSWDPFVLLDGVQGHPVGVHHTNYAPRPKYSSNKHVVPSLKASHSAKSTADTVKGSSSALETVPNAANSSTSSKGANKAPGASITKGYLPSSKFVMHSNNQAKSSVYQSKGINLKESGRSWHSSEKLKARSKLNGHGDSESNENNHTDNSKYSLSSQSDVVGLSSVGDANASIPSPVVIRKTAYNLSDFVTKYEQALFFVIKSYSEDDIHKSIKYNVWASTPNGNKRLDNAYRLAQERMAEKGTKCPVFLFFSVNASGQFCGVAEMVGPVDFNRNMNFWQQDKWNGFFSVKWHIIKDVPNPQFRHIILENNENKPVTNSRDTQEVKFSQGTEMLNIFKNFTCKASILDDFDFYENRQKVMQDRRGKPLTSFGHPLPKAEKTAEVKRQTQLISATEVGRADTTKENEEKSSSVPEILNAACSNKEKPNKIATDG

SEQ ID NO: 262526 - protein, 72 aa, Zea mays
  unsure (1)..(72): unsure at all Xaa locations
  Clone ID: MRT4577_171034C.1.pep
GQLQQQLLLXLIHRVSVSPVAFLTQPQLLPLXQHAARSVVTLSQALPVLPFNXLGLAHPXAFYQQPIIGGAL

SEQ ID NO: 262527 - protein, 73 aa, Zea mays
  Clone ID: MRT4577_171035C.1.pep
HAGGSSGSQRTQGFVYVTAPVRVCVSSMGRPVSYRAGPCVERPQRRRDAALRRHHRHQLVLRGNDQRPTRTTN

SEQ ID NO: 262528 - protein, 115 aa, Zea mays
  Clone ID: MRT4577_171036C.1.pep
SSVFDIEEQKCWKIGNSSNSCIPLLHTTMFYILSHLEPGFITPYATDWLVLYTAKTKSHHEHVCLVYPPTPMKVVISKGTLMPTIASAATAKLLVPRNYRVGNSVRATDKVDRIV

SEQ ID NO: 262529 - protein, 99 aa, Zea mays
  Clone ID: MRT4577_171037C.1.pep
REFPGASPHCSSAGHDPRPSRSTSCPHTSLKQAPTAISSTATQKTALHEEKLGLDTRTPAGHRRRSGPRRLLQDNPRTADKNITGGGQEAAGTILGPEP

SEQ ID NO: 262530 - protein, 61 aa, Zea mays
  Clone ID: MRT4577_171038C.1.pep
GGHDRPVGVNYFYFQAVCLRARNKANPHWMERTDGSNGDAVGDAPPHDSRVGEGSFALTKQ

SEQ ID NO: 262531 - protein, 71 aa, Zea mays
  Clone ID: MRT4577_171039C.1.pep
KGITHCPNQIYVPLPLLYTPTHTGSEKMHTGKVQQPFFFSSLNLNWSWFPQKYKTIYFISPPPLKIGGKRV

SEQ ID NO: 262532 - protein, 590 aa, Zea mays
  Clone ID: MRT4577_17103C.1.pep
MAKPLNLTPAFLSPMMATSCRFSSGGHAQCFPSSLPCRRRTPTPRTTSSSTRPAAQVSPGRSKQHDEAASETTIRQQLQQVDVLENMGISRHFAGEIKCILDRTYRCWLQRHEEIMQDTTTCAMAFRILRMNGYNVSSDELYHVVEASGLHNSLGGYLNDTRTLLELHKASTVSISEDESILDSIGSRSSTLLREQLESGGALRNPSLFKEVEHALDGPFYTTLDRLHHRWNIENFNIIEQHMLETPYLSNQHTSRDILALSIRDFSSSQFTYQQELQHLESWVKECRLDQLQFARQKLAYFYLSAAGTMFSPELSDARTLWAKNGVLTTIVDDFFDVAGSKEELENLVMLVEMWDEHHKVEFYSEQVEIIFSSIYDSVNQLGEKASLVQDRSITKHLVEIWLDLLKSMMTEVEWRLSKYVPTEKEYMINASLTFGLGPIVLPALYFVGPKISESIVKDPEYDELFKLMSTCGRLLNDVQTFEREYNEGKLNSVSLLVLHGGSMSISDAKRKLQKPIDTCRRDLLSLVLREESVVPRPCKELFWKMCKVCYFFYSTTDGFSSQVERAKEVDAVINEPLKLQGSHTLVSDV

SEQ ID NO: 262533 - protein, 69 aa, Zea mays
  unsure (1)..(69): unsure at all Xaa locations
  Clone ID: MRT4577_171040C.1.pep
WCFQAKVKGCSVAHSDPFNGSKGGKAGRHTGSHAVFHFFHIFQQVSQCQYLYISEQFLESCTRXCLFCN

SEQ ID NO: 262534 - protein, 47 aa, Zea mays
  unsure (1)..(47): unsure at all Xaa locations
  Clone ID: MRT4577_171041C.1.pep
LFPPSPDTIRCDLYNTERGLGHTMLKHPRVRPRVRPRRSPTRSXTRG

SEQ ID NO: 262535 - protein, 77 aa, Zea mays
  Clone ID: MRT4577_171042C.1.pep
GVNADGTPPSERRTRPRDVAVGLWTTMDIETKVVETSAGYMYAIGYRGCGKSSACGSALAEGTLPQRMVRWEIIFSW

SEQ ID NO: 262536 - protein, 83 aa, Zea mays
  Clone ID: MRT4577_171043C.1.pep
GIRLMKHTIKLGVARRRRVLRGARRRVAAGAWASCLGGGASARTTEDRARVWWRRGGYGRGVVGSSWSGHSRRSSEVAASCRI

SEQ ID NO: 262537 - protein, 227 aa, Zea mays
  unsure (1)..(227): unsure at all Xaa locations
  Clone ID: MRT4577_171044C.1.pep
MPSFLYPFTVAVFILXDKTGVKSSYLTLVLTWLSVRLLHLWLRYQSISVLKFRTVXNLKRGRILVKSHVAQHTVPGYVACNEEENILTWERYLRPQVSFGVPMERMLGGDKSSDMVNRLLKLYKNEKYILFFEQFGSRELTFLVTFKESATSMSVLRSLWQAHWLHKNQLRQEEVFPWLEESIVALENGFTDFLEQLGSAGWDQDLIILKVPKKPVLVLEHLEDQKV

SEQ ID NO: 262538 - protein, 90 aa, Zea mays
  Clone ID: MRT4577_171045C.1.pep
AFEHIEGVVPCWDATGPQWAGAPQTYIECAVQPPSGERVDSRLDVSNRRSLHMDRSPQKNLSRVDQIRCAITGWAACAISPSERHGNTAC

SEQ ID NO: 262539 - protein, 43 aa, Zea mays
  Clone ID: MRT4577_171046C.1.pep
SLVYECHVVFRFLGVGWFLEFRTGRKSWGLCSECTISVCHKRW

SEQ ID NO: 262540 - protein, 90 aa, Zea mays
  Clone ID: MRT4577_171047C.1.pep
HGGKKKNYKLTRGKTKNRHEWGGQVNSVIGGGGTTHIEIFPPPSSGGGTMHLFFTQGAGERCFTLGRKLVLRGAPRRGSLFVGGAPAPRG

SEQ ID NO: 262541 - protein, 176 aa, Zea mays
  Clone ID: MRT4577_171048C.1.pep
MQAACNRTKGAHPFDFDASSMEAQTHTSCNRRAGYYKRETAPPLAPVPRLLDCGTGAATRGDPAHDPIVPTEHIGHGSFSRGRRRDDRYGQKWADSNGGGRRAEAAVKSSASSRPLLGQRESPLPQREDDAPVFRSPNGSRTHNGCPANHLSHRIHSAAGQAAPLAGEAGDASPPP

SEQ ID NO: 262542 - protein, 87 aa, Zea mays
  Clone ID: MRT4577_171049C.1.pep
MLSLAVDLLNPSAEKTAQTHKLKRLVQSPNSYFMDVKCPGCFNITTDFSHAQTVALCGSCSTILCTPTDGKTPLTDGCSFRCKEQYL

SEQ ID NO: 262543 - protein, 69 aa, Zea mays
  Clone ID: MRT4577_17104C.1.pep
ISARVGFMLLALIWEFDFPPLSGLIMAILNDSTIMTIFKDRVMPSSILDSWKLSVIVTTGIVLVGYLAY

SEQ ID NO: 262544 - protein, 151 aa, Zea mays
  Clone ID: MRT4577_171050C.1.pep
MQAACNRAKWAHPFDSNAPSMEAQAHTSCNRRAGCYVQATAPPLAPLPRLLDCGTSTATRGNPAYDPTVPARHIGHGDRERGYPERDPSPRRKRAPSPPTDQRFEGWPLGGVQQPPQSARAPRPLLVRGSRAGPSEGSNGRLRPLGLRAHY

SEQ ID NO: 262545 - protein, 69 aa, Zea mays
  Clone ID: MRT4577_171051C.1.pep
GSVPVRWMDSVALFGIRALEIPNRLRMVRCKLPLAAPAPALDCSFGRGWFAGAHFGSEAELVLPLCSSF

SEQ ID NO: 262546 - protein, 177 aa, Zea mays
  Clone ID: MRT4577_171052C.1.pep
MAERYQLPWSCVPPTTRQKDGGYPPSGGLEGGKTRCIREREDMVAFQGSHPPFKGGSPYLRPQPSWAESPPTHSKVLPYGAGAGSHTSCKPAQSGRSQTAVRGNGKGGYPEKDPSPRRNRAPSPPTDQRFEGWPLGRVRQPPQIAWALHPLLVRSSKAGPSEGFHGSLRLLGLRAHY

SEQ ID NO: 262547 - protein, 149 aa, Zea mays
  Clone ID: MRT4577_171053C.1.pep
MQSACNRAKWAHPFNSNAPSMEAQAHTSCNRRAGCYVRVTAPPLAPLPRLLDYGTSTATRGNPAHDPTVPARRIDHRPVSRERRRDGRCCQKWAGSNGGGRRAEAAVASSAKLTSPHGTAREPSPTGPGKGIPRKGSFFVKETGPKPPY

SEQ ID NO: 262548 - protein, 292 aa, Zea mays
  Clone ID: MRT4577_171054C.1.pep
MAERYQLPRSYVPPTTRRKDCGCPPSGGSEGGKTRCIREREDMVAFQGGHPPFKGDSPYLRPQPSWAESSPTHSKVLPLRRGGWVPRVMQAGPEQKKPNRRARCMQPSSGYEHSSAFAQTSERKGGQPCRRHATAPSGRAPPTSNAPSMGAHAHASCNRRAGRYVQATAPPLAPLPRLLDCRTSTATRGNPAYDPAVPARRDGHYDQKWAGSNGGGRRAGAAVTSSAKLTSHPGAVREPSLTREDGAPVFRSSNGSRTRNGCPANCSPRRINSAAGQAAPLAGEASDASPLP

SEQ ID NO: 262549 - protein, 306 aa, Zea mays
  Clone ID: MRT4577_171055C.1.pep
MAGGRLRRRAGGRLPPPEAGRRGGPPTRAGGRAPARLAPPPARMTNTLDAEGGIGITARLAFPHPGAGGNSPYLRPQPSRAESSPTRSKALPCGAGAGSRMSCKPARSRRSQTAARGAHNRPAVTSDPPLLPRPTGERGGQPCRRHATTPSGRASPTPDTPAWRPRPKRHAAGAPDAACKRLHRHLRHHRASSVAEPILRLEATQHMTQQRQPGAAVNAAESGPAVMTVAGGREQRSRRQPSSRPIRGQQENPLSRREDNTPVIRSSNGSRTRDDHPANHSPRRINSAAGQAALLAGEAGDASLSP

SEQ ID NO: 262550 - protein, 147 aa, Zea mays
  Clone ID: MRT4577_171056C.1.pep
QCQPGTPVTGLSAAGEGATGPGKGDTPKGILLREGSGTRALLLIRGSKAGPPEGFDSRLRALGLRAHYWSEVRRLAPRKGSTAALGHSGSTPTTDQGFKGWSPEGFDNRLRTRRARDDSGYVRYMAEARATLPRYPRTFPRLAGAIL

SEQ ID NO: 262551 - protein, 92 aa, Zea mays
  Clone ID: MRT4577_171057C.1.pep
MRPARTPAGGGAGPGGAPARRIESTSELGKTDNPPPVAKAPAATREYDVDKPFVADMIPVHENVVTLDDIGAVDDMKESLHELEMLPLIRTY

SEQ ID NO: 262552 - protein, 322 aa, Zea mays
  Clone ID: MRT4577_171058C.1.pep
MVAFQGGHPPFKGNSRHLRPQPSRTESSPTCSKVLPLRHGGWVPRIVQAGPGQKEPKPPRAMRATAQRLRAFFHFRPDQRVKGWTAMQATCNHTKGAHPFDFDASSVEAQTHTSCNRRAGYYKRETAPPLAPVPRLLDCGTGAATRGDPAHDPIVPTEHIGHGSFSRGRRRDDRYGQKWADSNGGGRRAEAAVKSDRERGYSERDPSPRRKRAPSPLLIRGSKASPSEGFNSRLRALGLHAHYWSEVRRLAPQKGSTAASGHSGSAPTTDQGFVGWPPKGSDSCLRARRARDDPGYVRYITKVRATLPRYPRTFPRPTGTVL

SEQ ID NO: 262553 - protein, 52 aa, Zea mays
  Clone ID: MRT4577_171059C.1.pep
SIHFLPIQNADRALLEHDGARSRGHTGFVGAPQWRIRAAGRREADKGRGGGG

SEQ ID NO: 262554 - protein, 90 aa, Zea mays
  Clone ID: MRT4577_17105C.1.pep
PLLGGGGTGTQGGNIKPISCQGLGKPPSPQRGPYVPDPSNPPHTLPCLEGQFPVYPPFWAGPPPTTRGGPLCMSKDRAPPSRGGMGGGPP

SEQ ID NO: 262555 - protein, 176 aa, Zea mays
  Clone ID: MRT4577_171060C.1.pep
MQAACNRTKGAHPFDFDAFSMRAQAHTSCNQRAGYYVQETAPPLAPLPRLLECGTGTVTRGNPAHDPTVPTKHISHGSVSRGRRRDGRYVQKCADSNGGGRRAEAAVTSSASSRPLLGQREDPLPRREDDASAFLSSNGSRTHNGRPVNHSSRRINSAAGQATPLAGEAGDASPPP

SEQ ID NO: 262556 - protein, 267 aa, Zea mays
  Clone ID: MRT4577_171061C.1.pep
MECEDMVAIQGGHPPFKGDSPHLRPQPARTESSPTRSKVLPLRHGGWVPRVMQAGPGQKEPKPPRAVRATAQQLQAFLHYRLDQRVKGRTAMQAACNRTKGAHPFDFDASSMEAQAHTSCNRRAGYYVRETAPPLAPVSRLLDCGTGAATRGDPAHDPTVPTKHIGHGSVNRGRGRDGRYDQKWGGSNGGGRRAEAAVKSSASSRPLLGQRENPLPRREDDAPVFRSSNGSRTHNGCPANHSSCRINSAAGQAAPLAGKAGDASPPP

SEQ ID NO: 262557 - protein, 58 aa, Zea mays
  Clone ID: MRT4577_171062C.1.pep
VLVFFFTNYIIHLQTKPLANYINKCPKMLSGTKPATMPLPHWTGLPGDAGILVRRMTR

SEQ ID NO: 262558 - protein, 174 aa, Zea mays
  Clone ID: MRT4577_171063C.1.pep
MHLQQSDETPMVWEILLYMYVLYSPDWHYRSTMPTFLFLYGAAFAVVHFFARFQFVFKLHYIGLCFLCIPRMYKYYIQTKDVAAKRLAKLWVLTLTLGTLCWLVDRIFCKKLSHWYVNPQGHAWWHVLMGLNSYYANTFLMFCRAQQRGWEARITYLLGFLPYVKVQKPEKKRE

SEQ ID NO: 262559 - protein, 70 aa, Zea mays
  Clone ID: MRT4577_171064C.1.pep
FGTRQTLALSIAQHAHACLPLLDPGPAILSRFRGNQSLSCFLAACPGGGLASGFELTNQTGCAETPAAPH

SEQ ID NO: 262560 - protein, 264 aa, Zea mays
  Clone ID: MRT4577_171065C.1.pep
MADSMVASFWGPVTSTTELCEENYAHSSYIAEFYNTISNVPCVLLALIGLVNAFRQGFEKRFSVLHISNMILAIGSMIFHATLQLVLQQSDETPMVWEILLYMYVLYSPDWHYRSTMPTFLFLYGAAFAVVHFFARFQFVFKLHYIGLCFLCIPRMFKYYIQTKDVAAKRLAKLWVLPLTLGTLCWLVDRIFCKKLLHWYVNPQGHAWWHVLMGLNSYYANPFLMFCRAHQRGWEAKIPSLLGFLPYVKVQKPKKRELFVFVEP

SEQ ID NO: 262561 - protein, 81 aa, Zea mays
  Clone ID: MRT4577_171066C.1.pep
MANPGNVAGGLKATINNPNVSEQAKSNAEHRLATEEFPSVADETNQSKNPGNVIGGIKAAINNPNVSEEKKSELRAKLDDA

SEQ ID NO: 262562 - protein, 56 aa, Zea mays
  Clone ID: MRT4577_171067C.1.pep
NPQGHAWWHVLMGLNSYYANTFLMFCRAQQRGWEARITYLLGFLPYVKVQKPEKRE

SEQ ID NO: 262563 - protein, 71 aa, Zea mays
  Clone ID: MRT4577_171068C.1.pep
NCNPSVLGLLMCRNGKTVFFLKNKITYFWIQKRFMCSNSTLHSREYLYQRGLFIYNLLFFGAPLLVTVVPF

SEQ ID NO: 262564 - protein, 118 aa, Zea mays
  unsure (1)..(118): unsure at all Xaa locations
  Clone ID: MRT4577_171069C.1.pep
MGEKQEDGKSKXSVDLPKTTFELRANSVQRELELQKLWGDNQVLKRVFEEHXGDLHMGHALNKILKDFINRYKLLQNHKVSFVPGWDCHGLLIELKGGLCEQGVAIDEQWQTQKSSKA

SEQ ID NO: 262565 - protein, 72 aa, Zea mays
  unsure (1)..(72): unsure at all Xaa locations
  Clone ID: MRT4577_17106C.1.pep
MARTQXLAVVATAVVALVLLAAATSEAAISCGQVASVSRPXISYARGXGYGPRGAERVGAKTRRPRAACAEC

SEQ ID NO: 262566 - protein, 52 aa, Zea mays
  Clone ID: MRT4577_171070C.1.pep
SCTPLEIDVNETKLDSGISLSLLLLPKRLLRLMHLLRHWLVKRMRLTYDSKC

SEQ ID NO: 262567 - protein, 107 aa, Zea mays
  Clone ID: MRT4577_171071C.1.pep
MPAGHCLRSRTLDLFARPLRKKGYIPLTTYLRTYKIGDFVDVKVNGAIHMGMPHKFYHGRSGRVCNVSKRATCVHVIMLVNGLIFCKFFMLFSEYFFAFSYYVLNNS

SEQ ID NO: 262568 - protein, 90 aa, Zea mays
  unsure (1)..(90): unsure at all Xaa locations
  Clone ID: MRT4577_171072C.1.pep
RAXXRXAXFYQDTXMXWXDXRGKVVDGGXGLDLTLDRTSGSGFQSKXXXXXGXXXMQIKLVPGNSAGXVXXCYLSSXXXAXXEIXFEFLG

SEQ ID NO: 262569 - protein, 62 aa, Zea mays
  Clone ID: MRT4577_171073C.1.pep
HAMEQALDHTWGRMNTGDQQELRWLSVPQKIHLETAHDVVHKNEHTYMGVWRRQNCIHTVRE

SEQ ID NO: 262570 - protein, 125 aa, Zea mays
  unsure (1)..(125): unsure at all Xaa locations
  Clone ID: MRT4577_171074C.1.pep
MRALLDALGLLALAASAASTXHTSGGCCCQPPPTVHIPSXVHLSPPVHLXPAVHLAPTVQLPTPARLTTPVHVPSHXHLPSSPCHYHTXHGRPQSDTQPHTCSCQQTYTNPCQLHGTCSVSSTPI

SEQ ID NO: 262571 - protein, 38 aa, Zea mays
  Clone ID: MRT4577_171075C.1.pep
IKPPMGTCYLKNHFLPTIQDPGPSGNLNCTPMLKLKRH

SEQ ID NO: 262572 - protein, 38 aa, Zea mays
  Clone ID: MRT4577_171076C.1.pep
ITYYFQYLRMPKIPRNYLTIVATTTTIVLIRCIAKRSL

SEQ ID NO: 262573 - protein, 172 aa, Zea mays
  Clone ID: MRT4577_171077C.1.pep
MGAQAHASCNRRAECFVHATAPPLAPLPRLLDCGTNTATRGDPARDPAAPAWRDGQCGQKWAGSNGDGRSSGPVVSQAHVPSGGSKRTLSHGVKTTRPCSVPRTARARATAAPPTTRPVALTPWRDRRHLWQEKRATLRPRHNDRVKKGTGKGGIPRKGPFSVKEPGSEPPY

SEQ ID NO: 262574 - protein, 130 aa, Zea mays
  Clone ID: MRT4577_171078C.1.pep
MPRLEATQRATRQCQPDAAANAAKSGSAVMTVAGAREQRSRRQPSSRPIRGQQKNPPSHGVKTTRPWSVPRTARARATAAPPTTRPVALTPRLDRRRFWQEQRATLRLRRNNRAKKGTGKGGYPERDPSP

SEQ ID NO: 262575 - protein, 176 aa, Zea mays
  Clone ID: MRT4577_171079C.1.pep
MQAACNRTKGAHPFDSDTSSVEAQAHTSCNRHAGYYVRETAPPLAPIPRLLDCGTSAATRGDPAHGPTVPTEHIDHGSVSRGRRRDGQYGQKWAGSNGGDRRAEAAVKSSAGSRPLLGQRESPHPWSEDDAPVFRSSNGSRTHNGCPANHTSRRINLAAGQATPLAGEAGDASPPP

SEQ ID NO: 262576 - protein, 157 aa, Zea mays
  unsure (1)..(157): unsure at all Xaa locations
  Clone ID: MRT4577_17107C.1.pep
FCTREKAIMRIKAAVDARNESGSDIVIVARTDSRQALSLNEALWRVRAFADAGADVLFIDALASREEMKAFCAIAPGVPKMANMLEGGGKTPIXLSPVELEEIGYKIIAYPLSLIGVSMRAMEVCFSFIYVNRMFFIYICKQYDCFSFIHVSISLHD

SEQ ID NO: 262577 - protein, 350 aa, Zea mays
  Clone ID: MRT4577_171080C.1.pep
MGDSGGSVVSVDVERISFGGKEHHIQTNHGPVSVAVYGDHDKPALVTYPDIALNYMSCFQGLLFCPEAASLLLHNFCIYHISPPGHELGAAPISPNAPIPSVDDLADQVVDVLDFFGLGSVMCFGVTAGAYILTLFAAKYRERVLGLILVSPLCKGPTWTEWLYSKVTSNLLYYYGMCGLVKECLLQRYFSKEVRGFSEVPESDIVQACKSLLDQRQSMNVWRFVQTMNERYDLSEHIKRLQCRTLIFVGDNSQFHTEAVHLTSKLDRRYCALVEVQACGSLVTEEQPHAMLIPMEYFLMGYGLYRPPSQVVECSPRSPLSPFCISPDLLSPESMGVKLKPIRTRVRLEV

SEQ ID NO: 262578 - protein, 219 aa, Zea mays
  Clone ID: MRT4577_171081C.1.pep
MSSCSLMHRVFPPSKPPDGGHLQSFRLVVGGTQLRGSWYLSAIVRLQGFSSYSPAAPPRRWSPKTVTTSPWMGRSKPGCDLGPALSFKDVHHPRWGGGRAEPELYLPRRFVGQPLLQHSRERALTGPASGADFDNAGLADDGRRQLQRVGLAGLAPGAPSCRKGGCRAARTGGPPKTSHAARAAFVFWGGPAFAPVRRLRAEVGAPLVREDLSGDLPEG

SEQ ID NO: 262579 - protein, 42 aa, Zea mays
  Clone ID: MRT4577_171082C.1.pep
LDYPSMTNSFSFAWRILLGAQLFLSRDNYNDYLNDEWTFLET

SEQ ID NO: 262580 - protein, 392 aa, Zea mays
  unsure (1)..(392): unsure at all Xaa locations
  Clone ID: MRT4577_171083C.1.pep
EPSVDDLAEQVADVLDFFGLGSVMCFGVTAGAYILTLFAAKYRERVLGLILVSPLCKGPTWTEWLYSKVTSNLLYYYGMCGLVKECLLQRYFSKVDKSACLDHGSIIIIGIMDLGWFLSEXPYFILYSLASWIXIRGNXTLSIYNPFXWFHLDHYDHXSGYHNWRGIQTWAKLFRFYPTRISLFFQPNSDFFGFSYLNLTSVRKCEDSLXPESDIVQACKSXYHRAYTSLVVLFLSFFLKNVVKRXLFCDMCXLLEQRQSMNVWRFVQTMNERYDLSEHIKRLQCRTLIFVGDNSQFHTEAVHLTSKLDRRYCALVEVQACGSLVTEEQPHAMLIPMEYFLMGYGLYRPPSQVVECSPRSPLSPFCISPDLLSPESMGVKLKPIRTRVRLEV

SEQ ID NO: 262581 - protein, 320 aa, Zea mays
  Clone ID: MRT4577_171084C.1.pep
MAERYQLPRSCVPPTTRRKDGEYPPSGGLEGGKTRCIREREDMVAFQGGHPPFKGGSPYLRPQPSWAESSPTHSKVLPYGTGAGSHTSCKPAQSRRSQTAARGAYNRPAVTSDSPLLPRPTGERGGRPCRRHATAPSGRTSPTPNTPSMEAQAHASCNRRAECFVHATAPPLAPLPRLLDCGTNTATRGDPAHDPAAPAWRGGGASGRRSRRRFAFAIITAPKKGPGKGDTPKRILPCEGTRLRATLLIRGSKAGPPEGFDSRLRSRGPYTHYWSEVRRSAPRKGSTAASGYSGSAPITDQGFEGWPPKGSQSPQTPSEG

SEQ ID NO: 262582 - protein, 66 aa, Zea mays
  unsure (1)..(66): unsure at all Xaa locations
  Clone ID: MRT4577_171085C.1.pep
LAAKSFMNIASADLKHGSLRTLSNPAEQLKNSQPAHSRFMRAAAGTASASLLSICQLXNALEGHPG

SEQ ID NO: 262583 - protein, 285 aa, Zea mays
  Clone ID: MRT4577_171086C.1.pep
SCRLGSSRWKGAVAPSASTIPSARPDLASDGDAVRGSPLRRTTSSPRPGNRCQGLLRESGPSRRLGRLPLRPRLINSGIGPADGQPGCSGLDSQDEQKTLAFKVPLQTELRFPLRRYEQTPLHGGRPAEQRKTDERRAVTCSSSGDDDDFCPGGPNNGSTDLRADAAARRPPPMPKLVRQGRAEGRRVGGGASGRRSGRRFAFAIMTAPKKGPGKGDTPKRILPREGTRLRASLLIRGSKAGPPRGSTAASDRVGPTPTTGQRFEGRPPEGFHGRLRLLGLRAHY

SEQ ID NO: 262584 - protein, 91 aa, Zea mays
  Clone ID: MRT4577_171087C.1.pep
WSSLGWVHQHGHTLFDGEAEFPLANSYLKTLWGKTGFSLFFVSASYKSVTLSMKVFPPLFTSTGSRKASILSCCDNKSTCNMIISSCCFQF

SEQ ID NO: 262585 - protein, 366 aa, Zea mays
  Clone ID: MRT4577_171088C.1.pep
KATMSSRSLMHRVFPPSEPPDGGCPQSFRLVVGGTQLRGSWYLSAIVRLQGFSLVSPAASPRRWSPETVTTSPWVGRSKPGCDLCPTLSFKDVHHPRWGGGRVEPELYLPRGFVGQPLLQRSRERALTGPARGADFDNAGLVDDGRRQPQRVGLAGLAPGAPSYREGGCRAVRTGGPPKMSRAARAAFVFWGGPAFAPALPIEWGCSYLRRWNRSSVCNGTLSAVKGTPRPLFDEPKPGVAVSARTEAELARKEDLVGQSLAGLSVSGTDAGVDLPRPRAGLMSSGDSWPRPRGDKPSRLLGPDSRRRPWRRWPGRGDDVVLQSGDPRTTSPSEARSDLAEGVVDAEGAAAPFSRQDPSLQDRIIL

SEQ ID NO: 262586 - protein, 66 aa, Zea mays
  Clone ID: MRT4577_171089C.1.pep
CPHHRMSYDSLSGGRFFLFFSCWGLSCAFFIMMSSIRTRALFKVGEQSHARASCSPCRPWCALSMI

SEQ ID NO: 262587 - protein, 131 aa, Zea mays
  unsure (1)..(131): unsure at all Xaa locations
  Clone ID: MRT4577_17108C.1.pep
GPLISFPGGFFSTVVDWETPGVPHLIRLGALPLFPRWFIGEGAPPVPPSQHLPSLIGDWPPPCGGPLTAGGVVFSPSFSVPFARAFPPALSVFFLSFLAXFSGFPLNFFIGGFLLGSRFGVFRALSPRILV

SEQ ID NO: 262588 - protein, 141 aa, Zea mays
  Clone ID: MRT4577_171090C.1.pep
MIASQPRRVRPLAAVSLVLFLLLLSRSDGGSPRAARLLGSGFYPVHRRFLSDAPAGPASSAANPSASGTVPFNGEQPEDPSVACAGIALHEGFGTPCEFLRAHPQCCSAGFVDYLGFFYCRCERFRVLGFAALGVCLAALF

SEQ ID NO: 262589 - protein, 168 aa, Zea mays
  unsure (1)..(168): unsure at all Xaa locations
  Clone ID: MRT4577_171091C.1.pep
ALAGWFGCPSSALGTSGSFTLSVATSFICLIPSMFPFSFFPAPFLFSSLNFXLLFLPLLFSGAGGQTKLWSSLGSSACVCPFLSPAGLLAVLLRLGSLASALGLCLALRXLPRRCARRRVSPRFGLLRVTLLRGVPCRRLRLRLRRAACPPRAFGVYRLPAVSLVSGG

SEQ ID NO: 262590 - protein, 62 aa, Zea mays
  Clone ID: MRT4577_171092C.1.pep
GNKGYVGFLIKFSEVIVFLFLMKKLKVVLLKIVFVAIVIVLYWSFWVCYVKWCDKGLWLLVI

SEQ ID NO: 262591 - protein, 129 aa, Zea mays
  Clone ID: MRT4577_171093C.1.pep
GAQADTSGRRLSARREWISYTWRGTLCMSLGVPRQVQLLISCSPRVSRRSDPWPSCWTWWRMIGWRGQRAYRYRSPRRSPRCGACGCGRRDGRSRRGDTRPLLVRAVVRLRVVTHVVVAGCVRCTARAH

SEQ ID NO: 262592 - protein, 392 aa, Zea mays
  unsure (1)..(392): unsure at all Xaa locations
  Clone ID: MRT4577_171094C.1.pep
MESREDPGYPLLKKLIGESGAKALVREFLFEGVGSLGTKSFLEYFAEYAQEDGTVNKKRSMAGKSFGTLPLLSTEMSGGGGLGSGCSYQKFVHFALEQTRHRSTLVPHPSQEKFRFIKANEDNTVLNALSFSTSKIRLLRSLTIEQKNSVQVLDFAXFSRPEYDLPIFCANAFSSPARSIVVLDLNPLYDTTEHKDYREKYYRALMPLVHKYSELXSLIDEMQLLPWGGKITSESLRFFSPIVIWTVFEPSEANHQALYSAFVDYYMVWLEFLDGAVRESSKAKIDRNREAQHKYLTWRALGTPTDCSSATLWMDSGQAGAVLLLHKQFHLNPRCLFTEDLGSGFSCCFKWFCLGKSTGRFCWLRFQIIFNLSPMAFHGRPATISVVSLLLL

SEQ ID NO: 262593 - protein, 174 aa, Zea mays
  unsure (1)..(174): unsure at all Xaa locations
  Clone ID: MRT4577_171095C.1.pep
MESLYFKLSLRLRVLIPCVLLVTSIVAEELTRTAGDDELRTFIVYVQPPEKHVFATPDDRTSWYRSFLPDDGRLLHAYHHVANGFAARLTQRELDEVSVMPGFLAAXPNVAYELLTTHTPRFLGLDVAPQEGASATNHSATGFGDGVIICVIDTGVFPYHPSYSGDGMPPPSAK

SEQ ID NO: 262594 - protein, 72 aa, Zea mays
  Clone ID: MRT4577_171096C.1.pep
SADALTWDGLDYLALLQYPQHYLCLSNPLLHTHKHVLLKPTQITHYLEKLLSNYTCTDDSVPITQYPHTHYS

SEQ ID NO: 262595 - protein, 135 aa, Zea mays
  Clone ID: MRT4577_171097C.1.pep
QKAPRPWNCWKIWPPGMALHRGSKSRRWQVSADSKNFCETCAKPGVIDENTLEFEDARTAQTSRCASAYCMNTAIADLSGRIIDSPIDRAHVTLTDIALHTSPLSYVLVHQNVSSSSWIATLITRYMLIFRRVYR

SEQ ID NO: 262596 - protein, 96 aa, Zea mays
  Clone ID: MRT4577_171098C.1.pep
NTHACGRSRDMGGNDDMDRPRPRHEEKPEHTTEAKGQKNDTDHTATDHKELADQNTEDYPTSQGTPNTQDPTKHQQPAAQAGSNPRDSPKAKKDKS

SEQ ID NO: 262597 - protein, 82 aa, Zea mays
  Clone ID: MRT4577_171099C.1.pep
LLGKKAIRGVVTMPATGNVRFTHANVSHAGRTLGYRPATSLEAGLRHFVDWFVRYYKVDVRGGNVLAGKTAKRKSMAMSSAS

SEQ ID NO: 262598 - protein, 63 aa, Zea mays
  unsure (1)..(63): unsure at all Xaa locations
  Clone ID: MRT4577_17109C.1.pep
MNHDKEGICTDQQLLIFVXKQLEDGRTLADYNIQKESTLHLVVRLKGGMQILEKTLNGKTITL

SEQ ID NO: 262599 - protein, 42 aa, Zea mays
  Clone ID: MRT4577_1710C.1.pep
VLELKPVIFYAVKALNEIKSSLGWRVVYSWVGDDPCGHGDLP

SEQ ID NO: 262600 - protein, 165 aa, Zea mays
  Clone ID: MRT4577_171100C.1.pep
MAPKAPANNGAVVVAGGHHGGSTDVVGVAGDATTTTVPTSVAANGNGKQHGTRKQRRRPAAAVVSPMDKYWTPVDDKEAAEAVEDGGEDGRRPLQFRTYKVKGILLHPYRLLTLLRLIAIILFFIWRIRHPDADGMWLWWISIGRDFWFGVTWLLNQGAKLNPTK

SEQ ID NO: 262601 - protein, 179 aa, Zea mays
  unsure (1)..(179): unsure at all Xaa locations
  Clone ID: MRT4577_171101C.1.pep
GPKTSPTPAQNKPPPPKKKKYFFSQKIKSPYPXPKKKSFPQKXYTQGKKPPRAPPTKPXGPSWXPNTNPPGDTPQPPPGGGSIKAPPATKEGAKTPTPPKTQALPQTPGTPPPTLFPRFYXTTPNPPPPIYCXTPKGPHKPSKXKTQPPQKKPKFLKPPQTKKTHPTALKKTPLSKKHS

SEQ ID NO: 262602 - protein, 51 aa, Zea mays
  Clone ID: MRT4577_171102C.1.pep
AARRTDTRDRLRCVPGGQHHAGGGLPRRELPQPRDRRSLGRTDRHSPRRVP

SEQ ID NO: 262603 - protein, 48 aa, Zea mays
  unsure (1)..(48): unsure at all Xaa locations
  Clone ID: MRT4577_171103C.1.pep
GAHDKDMFATTANMFQHTPPCRRTETXDLATKNKMCSTAPAVKNPEGP

SEQ ID NO: 262604 - protein, 38 aa, Zea mays
  Clone ID: MRT4577_171104C.1.pep
FARCGYHCVSLALTGLTHDLMAGQCRSEQKAHIDTYIP

SEQ ID NO: 262605 - protein, 123 aa, Zea mays
  Clone ID: MRT4577_171105C.1.pep
LAYKCKFRHVMIPNATATPFHQLVALRAAGDGTLAAMPPCTLGIGMIPVSPSAGGVFVRFGVGTGLIGDGTSGPEPTNGSCWGPGAATGAWPAGAADGAWPGGAAMCLALGGGNGLGTLMPGG

SEQ ID NO: 262606 - protein, 98 aa, Zea mays
  Clone ID: MRT4577_171106C.1.pep
ATTLIVSTSKPVEPISQGPQSTGTYYNSCRTTPSVKVVSFSHVTHKSQLNRFNPTLGFFIITAKPESAKTNSLTLHRYTNNGTRLRGLILVRTSRSTL

SEQ ID NO: 262607 - protein, 138 aa, Zea mays
  Clone ID: MRT4577_171107C.1.pep
WVPRGRPGPCRCCTYQGSRLGLICRHSPLHSAEGVIRRRRLLDSHASVRYGSHDNLPAPASRAWDRNLPSTSRERGVALSRYSRTTSKGGETVQHAKAKPNLAWSGFHYPASNLMLTIHKTRRPYNSSQRLYRLRTRQ

SEQ ID NO: 262608 - protein, 107 aa, Zea mays
  Clone ID: MRT4577_171108C.1.pep
QVTTRNHIYFAIHRTSFRQAAAFRPIRCFSTTPRVMTEGATGAPRPTGGSGDAFQRREKASEDYAIRQREKEKLIELKKKLQEQQQHLDRLSKHIDEITKEQGGEQH

SEQ ID NO: 262609 - protein, 40 aa, Zea mays
  Clone ID: MRT4577_171109C.1.pep
YSTPSIIFLLLRHITQLGITNYSLNKLILRLQVLGGTNDS

SEQ ID NO: 262610 - protein, 52 aa, Zea mays
  unsure (1)..(52): unsure at all Xaa locations
  Clone ID: MRT4577_17110C.1.pep
RSVTSISPXGSTLSRHRSVKEHLSCRVLLRSYLNLRHVYLQPKSYVADPLPL

SEQ ID NO: 262611 - protein, 123 aa, Zea mays
  unsure (1)..(123): unsure at all Xaa locations
  Clone ID: MRT4577_171110C.1.pep
NPSETHVNYVTQHVETYDDTDIYNGAGLHDEQHNHVARATTSDLKINLLLECLTXADIHNKIYQKDFTICYRKCQRKTMQRTTECVKATKITSLIGSIALVMKFVHTSFMKYTVMGNTTLHQI

SEQ ID NO: 262612 - protein, 45 aa, Zea mays
  Clone ID: MRT4577_171111C.1.pep
MIEVVLNDRLGKKVRVKRTEDDTFGDLKKLVAGQTETRPEKIRIQ

SEQ ID NO: 262613 - protein, 133 aa, Zea mays
  Clone ID: MRT4577_171112C.1.pep
CTVAEEHYPLPSAAETRYIPCRSGPLIRREPSPPARTPASVDHRPLTFPRHHGGFDGGVLFLFSMQCLVPPTPKVAVAPSALFSPCRCILDGYHGTGRRYFIPCSFRICPHLTQSRMLYTLGGATVCHLQHQN

SEQ ID NO: 262614 - protein, 94 aa, Zea mays
  Clone ID: MRT4577_171113C.1.pep
GKLQLRKPSLFSMTNIIYRLAERAHLTPCLKAHTAVWLSGYYVGKDGCFLHLLLLHADTGQRALQTFHLLLKNEEPPLQWLTSFLLAPLSGSCC

SEQ ID NO: 262615 - protein, 74 aa, Zea mays
  Clone ID: MRT4577_171114C.1.pep
GVFKILQAAPLLVVKGLLLPIPRKTNAHHFSLSLVPSRTPLAEHALPHRLNPGKRLSPPSYPKPVICRGSFYRE

SEQ ID NO: 262616 - protein, 325 aa, Zea mays
  unsure (1)..(325): unsure at all Xaa locations
  Clone ID: MRT4577_171115C.1.pep
MLGIRRIPKLRSKQSKHHGSSQSSSSPREARSNLPRPTTAMAPTVPSAAKSASPSQPSGKSEVADLKQQLRQLAGSRAPDADDQRRDVFKRVISCMTAGIDVSAAFGEMVLCSATSDVVTKKMCYLYVGSHARAHPDLALLTINFLQRDCRDQDPTIRGLALRSLCSLRVPNLVEYLVTPLTTGLKDPSAYVRMIAAVGAAKLYHISATACIDADLPASLKALMLSDPDAQVVANCLHALQEIWTLEAANSEAAAREIETLHSKPVVFYLLNKIKEFSEWAQCIVLELASKXLPSDNNEXFDIMNLXEDKLQHAKGASVLATIKV

SEQ ID NO: 262617 - protein, 120 aa, Zea mays
  unsure (1)..(120): unsure at all Xaa locations
  Clone ID: MRT4577_171116C.1.pep
SLPVQHGHKIGGIETGSDGRVLTAGIKPGMGVTYSPTGLTTDAKSVEMHHEALSXAPSGDNGXLNDYNVXVNDLRRXYTGLHYEQYSAYEAGSVNCQGIINNHHAQKDNGYDTELDCHTY

SEQ ID NO: 262618 - protein, 64 aa, Zea mays
  Clone ID: MRT4577_171117C.1.pep
EIVFIIFFLVGAFIIQRDRGEVPFKREFFGAVPEGGHTIFLPYYYRISHVYHVRESAAQPKKPE

SEQ ID NO: 262619 - protein, 105 aa, Zea mays
  Clone ID: MRT4577_171118C.1.pep
YSNQPSPAWSPNVNPDATHPVRSKSNGLDTPWPPTIVNILRLQISLQFSHGFQGYRPRGLVQVSDSISLVVHAPWSTQGQCPCNPCGYTLAVIVVQPVAHSVLSS

SEQ ID NO: 262620 - protein, 31 aa, Zea mays
  Clone ID: MRT4577_171119C.1.pep
QGDRAVHLSRKKNDPNHLVVKKNMVRCLIGS

SEQ ID NO: 262621 - protein, 55 aa, Zea mays
  Clone ID: MRT4577_17111C.1.pep
HPRSEVRSVRAFWFIPATLAEMVLYVARRCLCKIRVNHQGFPQSMDPVISTVPLI

SEQ ID NO: 262622 - protein, 121 aa, Zea mays
  Clone ID: MRT4577_171120C.1.pep
RGRPGRAVGHPGFQLLESEEVKLLGARARPLASDAPLRRGRLYLLVALPRRAPAGPMRRAWSGNLNVGARERLESLKLARRSTSDLSSLSAHASASAPTSASRRRRLPSSSHRQRRHARAR

SEQ ID NO: 262623 - protein, 186 aa, Zea mays
  Clone ID: MRT4577_171121C.1.pep
YLAYFNTTPPNQQSRCVPSPSLLASPPLPLLLPSTRLTLLPLPLPRLPLSTRPTPPRPLQPLPTRLPPALLSTQPTPLRPPPLDTRLPSPTTRPASLPTRPAPLAPSTAPPSPLTPPPRLSTPPATSALSPPPSPTEPAPTPSAAAPPSASLSSLLPTCTPLSPRFRLVPCTLSSLRCLPFSKLST

SEQ ID NO: 262624 - protein, 57 aa, Zea mays
  Clone ID: MRT4577_171122C.1.pep
FRAPCRQHVQSSGAMDGSMALTVFRARRHGDKGLGQGARPFARRAAEMGSGRWLSFS

SEQ ID NO: 262625 - protein, 342 aa, Zea mays
  Clone ID: MRT4577_171123C.1.pep
LANLSIPHTESKLRLTSLSLHGLLDYTAKDIEESVFELSLFAESFSEMLQHRMGCVILSFLEKLHRRYVVKRNQRKRQREEDLKKEENQSSEKRSKTNHETITESVDNPGGSVELTKEDEEKMSKDQSANVHAELSKEGQIKLGTDHPIANHGEPAKGGDENMEEDPEYEEDPEEVEVYEDDEDMDDAHAEEQIAEQNENTNDREIKPKEVATTDGGNNKSTRQPEVENVTNIHERAASMEEKQSVPEIGDLVGGGEKVVSKEIKPAKDEVIDKDLLQAFRYFDINGAGYLKVDDLKCILHNMGKFLSSRDVKDLVQIALVESNSARDNRIIYPKLVKIVDL

SEQ ID NO: 262626 - protein, 55 aa, Zea mays
  Clone ID: MRT4577_171124C.1.pep
GAGFFFFNTTTKDVGHFILSHRSTETQPYICRHLPSDIVLDIIPALDAEVFGVVR

SEQ ID NO: 262627 - protein, 66 aa, Zea mays
  Clone ID: MRT4577_171125C.1.pep
KRGGYKGISGFIFQEAPGGVKIFFEDVIYEAVTNIEYGAVKSVSPMEIVYAIKHPGTDLLGLVRVG

SEQ ID NO: 262628 - protein, 293 aa, Zea mays
  unsure (1)..(293): unsure at all Xaa locations
  Clone ID: MRT4577_171126C.1.pep
MSAGRQAYWCYQCRQRVRPRGREMVCPYCDSGFVAEMDDVDALMSHFVGTDPDFHRDPRFGIMDAISAXRRHEEGQHRRLLRXGPGLDDFIEQLTQKDRRGPPLVFRSSIPAMLTEENSLRCFRQXRRGGGGGGGSRRDPNIADYFVGPGLDDLIEQLTQNDRRGPPPAAQSSIDAMPTVKITQRHLSGDSHCPICKEKFEMGSEEAREMPCKHLYHSDCIVPWLEQHNSCPVCRYELPPQGSATGASCSRARSTDQSQSSSSSSSSGRTSGRQRRRNPFSFLWPFRSSSSSR

SEQ ID NO: 262629 - protein, 261 aa, Zea mays
  Clone ID: MRT4577_171127C.1.pep
MSAGRQAYWCYQCRQRVRPRGREMVCPYCDSGFVAEMDDVDALMSHFVGTDPDFHRDPRFGIMEAISAVMRHGMAGMNREFDVRGRPNFFSDLEMEFGSGPWLLFRGQLPGHLTEDNGFDVFVNGRRGGGGGMRRANIADYFVGPGLDDLIEQLTQNDRRGPPPAAQSSIDAMPTVKITQRHLSGDSHCPICKEKFEMGSEAREMPCKHLYHSDCIVPWLEQHNSCPVCRYELPPQGSATGASCSRARSTDQSQSSSSSSS

SEQ ID NO: 262630 - protein, 460 aa, Zea mays
  unsure (1)..(460): unsure at all Xaa locations
  Clone ID: MRT4577_171128C.1.pep
GRDPRLPAASRPLLDDTHKPIPSPNTSAGPPQSLPLPAPTGTAAARDPSSPSPAPTARRNGCGLVRGVGRATPRLQRRQVPPPVAVPLPLPPAPRPPDAARAPRETERRLPAARQPRRRRACGGGEDGFGGGRVRGGAAAGGTRGGRXHRGAGRGSRGGRRKRXERVLGWGLLGDAYDRCGEVCAEYAKTFYLGTQLMTPERRKAVWAIYVWCRRTDELVDGPNASYITPTALDRWEKRLEDLFEGRPYDMYDAALSDTVSKFPVDIQPFKDMVQGMRLDLWKSRYMTFDELYLYCYYVAGTVGLMTVPVMGIAPDSKASTESVYNAALALGIANQLTNILRDVGEDARRGRIYLPLDELAQAGLTEEDIFRGKVTGKWRRFMKGQIQRARLFFDEAEKGVTHLDSASRWPVLASLWLYRQILDAIEANDYNNFTKRAYVGKAKKLLSLPLAYARAAVAP

SEQ ID NO: 262631 - protein, 294 aa, Zea mays
  unsure (1)..(294): unsure at all Xaa locations
  Clone ID: MRT4577_171129C.1.pep
MSAGRQAYWCYQCRQRVRPRGREMVCPYCDSGFVAEMDDVDALMSHFVGTDPDFHRDPRFGIMEAISAVMRHGMAGMNREVDVRGRPNFFSDLEMEFGSGPWLLFRGQLPGHLTEDNGFDVFVNGRRGGGGGGGGVGXRRANIADYFVGPGLDDLIEQLTQNDRRGPPPAAQSSIDAMPTVKITQRHLSGDSHCPICKEKFEMVSEEAREMPCKHLYHSDCIVPWLEQHNSCPVCRYELPSQGSATGASCSRARSTDQSQSSSSSSSSGRTSGRQRRKDPFSFLWPFRSSSSSR

SEQ ID NO: 262632 - protein, 58 aa, Zea mays
  Clone ID: MRT4577_17112C.1.pep
MFVVILINVCFYCKVEERLVSVDELLDADEVFCTGTAVVVSPVGSITYQGKRLNIIFA

SEQ ID NO: 262633 - protein, 77 aa, Zea mays
  unsure (1)..(77): unsure at all Xaa locations
  Clone ID: MRT4577_171130C.1.pep
GDVGKGFRCIRMVNNIRLNFDAFHGYKGXGRLQDCTSVVLSELANGDNQSLKILPWGDEAYAAGCSSAGNGPRFRGR

SEQ ID NO: 262634 - protein, 123 aa, Zea mays
  Clone ID: MRT4577_171131C.1.pep
SRAVRSVNLANHMHAIISFSNKLILYYNQIKRTRPTRHGSRARSGGYLAPAPAPAPAGAPARTCAVWPGLFSNRFAIHRRLSMWFCVEGAFPMGSDGRFRAKTANQAAALGGMMARDGSIPAG

SEQ ID NO: 262635 - protein, 46 aa, Zea mays
  Clone ID: MRT4577_171132C.1.pep
SVPLPVGAPVHGVPCACTAYPCRGAGRWRAQLPGRARLRGAATAAS

SEQ ID NO: 262636 - protein, 107 aa, Zea mays
  unsure (1)..(107): unsure at all Xaa locations
  Clone ID: MRT4577_171133C.1.pep
KQKVLNECSEPKTWLMEKRPQQDVFPKHVNPVPLAAGLKKKAETLDRFCNPFISKPKPVLXPQTPPPAKTQAPEPQTPEQQRSNGESPPPEGAAKEPPPHPMETAKP

SEQ ID NO: 262637 - protein, 116 aa, Zea mays
  unsure (1)..(116): unsure at all Xaa locations
  Clone ID: MRT4577_171134C.1.pep
HTKGVLADFPLVGPIDCKXIWHYHRLNPTQYIMYCMKVYDKILNNNNVXSCTQTKSTLDSQKVXKELYPDEPYESDFTRTYDTDADVNPXIXDDITYDLVSTVKRQSYFYHQAGTP

SEQ ID NO: 262638 - protein, 42 aa, Zea mays
  Clone ID: MRT4577_171135C.1.pep
DQQKFIFILANHNSTTPPRVYFFGPKARAIQAQFKNLKAHAY

SEQ ID NO: 262639 - protein, 78 aa, Zea mays
  Clone ID: MRT4577_171136C.1.pep
EPTPQELAEAALAGESAEQRNRFLVLRLYEALGFCDTRRARKLLAPDLEWWFHGPPTRQDMMRLLTGADHQRHMSGSG

SEQ ID NO: 262640 - protein, 92 aa, Zea mays
  Clone ID: MRT4577_171137C.1.pep
SVNSYIIYGQSLVCHINLYSTQCNSISGCSITRSHCTYFNNSYKSIVSQASWDNFSQQFSVQSTHSRSVYVNILCRAQAAILMQDDKGNCGL

SEQ ID NO: 262641 - protein, 63 aa, Zea mays
  unsure (1)..(63): unsure at all Xaa locations
  Clone ID: MRT4577_171138C.1.pep
LVLPCVNQRGVXDFSAYSXQQMFVFNQHHRLNPAIYLQQLLLPFSQLASAYSXAHQLFSFNQL

SEQ ID NO: 262642 - protein, 66 aa, Zea mays
  Clone ID: MRT4577_171139C.1.pep
LRARKCTVLLRPTRGHRSRAGHEHVQTRPSDQFLGVACADLLKSCSCFLFLCMSFKLLCFYFILWP

SEQ ID NO: 262643 - protein, 176 aa, Zea mays
  unsure (1)..(176): unsure at all Xaa locations
  Clone ID: MRT4577_17113C.1.pep
QRALRFAKVLSRVVAKNHRKVLLENIRGLPKPTILYLLQIGEMNTIIATILIEXTRVGIKIFSDNVXDAVTYNKIRPLRTDYFLNTHYLIFGEDRXQRTRRLSASXQILRMLKEDTRTLIAVXLMVANNPDXPMLFLSNEINXKLMLPSYGQSGRNIESLCAXTKEGLYAGLDCLF

SEQ ID NO: 262644 - protein, 75 aa, Zea mays
  unsure (1)..(75): unsure at all Xaa locations
  Clone ID: MRT4577_171140C.1.pep
MSGREGGKKKPLKQPKKQAKEMDEEDMAFKQKQKEEQKKLXEELKAKAAGKGPLATGGIKXIWQKVSCSLCLRRW

SEQ ID NO: 262645 - protein, 56 aa, Zea mays
  Clone ID: MRT4577_171141C.1.pep
PIPPPKLRAKNIKSWGYCYSGPLVGPYKRGFFCGSQVFLLHRVAPPFRVLLLRAKP

SEQ ID NO: 262646 - protein, 41 aa, Zea mays
  unsure (1)..(41): unsure at all Xaa locations
  Clone ID: MRT4577_171142C.1.pep
GSDLXDSPLTSPDAIARRCLHSPGLDAKEVPSPGAQRSRVT

SEQ ID NO: 262647 - protein, 96 aa, Zea mays
  unsure (1)..(96): unsure at all Xaa locations
  Clone ID: MRT4577_171143C.1.pep
MAMETCFRAWALHAPAGSKDRLLVGNLVLPSKRALAPLSVGRVATRRPCPACPSTNSVNAVLGVGADHWDGYSXARETPVHVPGRETGEVTWGVMD

SEQ ID NO: 262648 - protein, 113 aa, Zea mays
  Clone ID: MRT4577_171144C.1.pep
LKHGDFYDFNVSDGSFPNSVSIVITCCNSLAPCYASLYCNLYCLVSMHVIFHSCRIYLRIIQLETFFFACWLVILLFIVVLYHFTSKCLFTRDNQIMHQGTVCTIVTNTRWPR

SEQ ID NO: 262649 - protein, 95 aa, Zea mays
  Clone ID: MRT4577_171145C.1.pep
APECRADYNFTPLHTVEPVVTLLSSSPPAVQQLAAELLSHLLLVDHLQDVTVTDQATTPLIQVLSSGLPYLHQIAIEALASRAIALPNTIASECG

SEQ ID NO: 262650 - protein, 58 aa, Zea mays
  Clone ID: MRT4577_171146C.1.pep
NRWTVLDDHMHDITMNDYLTLNTTNHAMYMPHTSLHRYSKKRLTKAQETDRRAPDKLH

SEQ ID NO: 262651 - protein, 105 aa, Zea mays
  Clone ID: MRT4577_171147C.1.pep
SARAATEDLFLPDREERVDRGDGTGAMAAAYWAIGLIIQTATVLALYALTSATEGMVSIARTCGKGPSNLTSILNHALTEECLKRSFDGEGCLSWTSTTAASELT

SEQ ID NO: 262652 - protein, 225 aa, Zea mays
  unsure (1)..(225): unsure at all Xaa locations
  Clone ID: MRT4577_171148C.1.pep
MELEAIGKRLRISSGSSSLAGDRLTSLPDCLIHHIMSFLKARQVVQTCVLSTRWRHLWRSVPCLDIDQDEFKAAGSNRITEKEQEDFEDFTDHLLIPNNISIALLDTLRLHVSDDEYYHRGASVRWIRHGIKYXPESWHYAQGIEXLAFWRLKKLHLSGVYLDGSFMKHVSSGCPYLEVLELKDCPCTFEEVTSHTLKNLILENCGCNELSGITSPYAEEFNNYC

SEQ ID NO: 262653 - protein, 51 aa, Zea mays
  Clone ID: MRT4577_171149C.1.pep
LHHHSHFLSLLSFLFNPCTTPLIKFDHSNPTLIFYKGSKHLKLKIVNFISY

SEQ ID NO: 262654 - protein, 70 aa, Zea mays
  Clone ID: MRT4577_17114C.1.pep
GLLLWHQTRQQWIGKRRHNSQGQQSQGPKISCNATYESLLGSSKPFPQPIPLGEMVDFLVVSWEQEGLYG

SEQ ID NO: 262655 - protein, 74 aa, Zea mays
  Clone ID: MRT4577_171150C.1.pep
CRLLYSITRYSEGADQSKVEYRLIDEDYVLCKEEFKDSNFDLDVDIDDRMKVVISVRLVNLVINHRCIKDANGA

SEQ ID NO: 262656 - protein, 29 aa, Zea mays
  Clone ID: MRT4577_171151C.1.pep
MYKARVYADVNVLRPKEYWDYEALTVQWG

SEQ ID NO: 262657 - protein, 42 aa, Zea mays
  unsure (1)..(42): unsure at all Xaa locations
  Clone ID: MRT4577_171152C.1.pep
AWMVFVRNLPVSFSYIFSCVGYLGFYTQRTHFIYLGLHQALX

SEQ ID NO: 262658 - protein, 66 aa, Zea mays
  Clone ID: MRT4577_171153C.1.pep
VLRKQVHLGGFLHVFHRAEGNNLLPFKLVFLSVSVLIVQALALVHPCMVSCGSSINCIIIGNCLFE

SEQ ID NO: 262659 - protein, 441 aa, Zea mays
  unsure (1)..(441): unsure at all Xaa locations
  Clone ID: MRT4577_171154C.1.pep
MALRGNLPVLLLLFAAAATASGKSASLDLFPAAPGASVAARARGDRRRHAYISAQLPSRRGGRQRVAAEVASSSAVSLPMSSGAYAGTGQYFVKVLVGTPAQEFTLVADTGSELTWVKCTGGASPPGLVFRPEASKSWAPVPCSSDTCKLDVPLPSQXCSSSASPCSYDYRYKEGSAGAPGVAATDSATIALPGGKFPPFQDVVLGCSPRPDGPKFKSLAGVLSLGKPQMPLASSDAVRVDGGLSYIVFQQGAPRSASGIGNFMQGQVPRTPATQTKLFLDPAMPFYGVKVDAVHVAGQALDIPAEVWDPKSGGVILDSGTTLTVLATPAYKAVVAALTKLLAGVPKVDFPPFEHCYNWTAPRPGAPEIPKLAVQFTGCARLEPPAKSYVIDVKPGVKCIGLQEGEWPGVSVIGNIMQQEHLWEFDLKNMEVRFMQSTCTR

SEQ ID NO: 262660 - protein, 176 aa, Zea mays
  unsure (1)..(176): unsure at all Xaa locations
  Clone ID: MRT4577_171155C.1.pep
MRANLKXDPVLDLLVSDAAMDVTTRADNIXLHCLQNCNQRSHGDTASXTGLYAYLNIMLLTNFRNEHTPDLNLDAHCEPISGSCTVHSTYIHIWQSLGIIALLSIVAASGRYHLSSTXYADKEDDXCCHNFLGRRGSSRYLXGGVIXGSXFYIENRQSWHYYNLLNAFNCNGSVLL

SEQ ID NO: 262661 - protein, 111 aa, Zea mays
  Clone ID: MRT4577_171156C.1.pep
VHRQQNSNQHKHKGGGAEKKITNTLPSSEGQPLAKSSLTLDSQIIFAPYPKVFFSQIPHHRTNHGEGGRPKKSPQGGPVTGSRRPGEQPSLGPPPSSLGGLAPTEKNPGMT

SEQ ID NO: 262662 - protein, 122 aa, Zea mays
  Clone ID: MRT4577_171157C.1.pep
RFWRLASPQRLASEAQLQREGPAYRAQPNLTLGGRAATSARCSAGITRSARGTSDRCHRRLQRCHFFFLVSPRLPSLTPMLLLAFRGYHSQLTWAVEATSPALRRSKGSTFLRRRKSRRLLL

SEQ ID NO: 262663 - protein, 220 aa, Zea mays
  unsure (1)..(220): unsure at all Xaa locations
  Clone ID: MRT4577_171158C.1.pep
MDSECDRPRDDELLKVQAYIWRLSLSYLTILSVRXVVKVDIPTTIYRHGGYASGAELPTALSLPSNKMTFLRRLLRILSASGVSHRATSKAXEERKRISPACYLLVNGIPRKDHMNHTDLELTCNTTRYIEAAIGLWHLLKRDVPTTPXEELXHETTLIQESMSSLYVHFHDMSREDLDAHDNFCIEIPMRDFKNLFEGIQTMTYCXGTYXDDKDARAIV

SEQ ID NO: 262664 - protein, 68 aa, Zea mays
  Clone ID: MRT4577_171159C.1.pep
LDIAAYLDDQTAMSFPPSNMCLTLPVLSQIIPTVIAINLSTTPCNKQHLRVRPCHTPMKSSHCHLQMA

SEQ ID NO: 262665 - protein, 57 aa, Zea mays
  Clone ID: MRT4577_17115C.1.pep
GKDTRGLAKAAIYQHHKFPFIGQLEGDYDHGLVTMEKPIFYYLLKGREGWGTSIFPL

SEQ ID NO: 262666 - protein, 71 aa, Zea mays
  Clone ID: MRT4577_171160C.1.pep
DRVPVGFWPRGSVRSPFGLGWGPHGVRLGVPPLFCRVKGSLTRVFVACLVTQNCLKKPPPKKKKKKKKKIK

SEQ ID NO: 262667 - protein, 64 aa, Zea mays
  Clone ID: MRT4577_171161C.1.pep
RQSPKLKKSGPSAVQPSLKRKVLPPSKLIFCKQFHSPFLTFTKLQVVPPLKLVFLKGLGIIGKP

SEQ ID NO: 262668 - protein, 126 aa, Zea mays
  Clone ID: MRT4577_171162C.1.pep
APTGRCGNSRFMGHREYTCKWRTAGAAGIVRASFTHADAALPYPTSPTKPRFKDKIITNFKMVTAEHQTKFEALLRPQALCNCMGQTPMKPALLDSALRRKSKGCLPHCSEPYPQGLFHSKHSPNE

SEQ ID NO: 262669 - protein, 127 aa, Zea mays
  Clone ID: MRT4577_171163C.1.pep
AWFMFQKNPKILSSHILPITLLFILSQTIHSSLFSPTVNFAVLHHIHPAINTPSYPLPLHTHATPSAKANTPLTQLLRSASYTHSVASSPVHPPVIGAFVPSRGGQIYKPTPGARSQFRELSFPFAG

SEQ ID NO: 262670 - protein, 145 aa, Zea mays
  unsure (1)..(145): unsure at all Xaa locations
  Clone ID: MRT4577_171164C.1.pep
FSGQVPVVXAELVAAGSRTPAPKTKASQLWWRFLAASDPDVSVQLXPLXHLAYSHTNQALLRLMTFMPSDEWFCLIDSVLNNLAXRLVQQHDLSXGRXDVLLIIKDYNNVHDRAPYPGRFMLTQLSXCYCLFLLRQHTSSLLSSS

SEQ ID NO: 262671 - protein, 139 aa, Zea mays
  Clone ID: MRT4577_171165C.1.pep
ILIELFPIQPCHPLSMVHIPENSQSTLVPYSAYNSPVHTKSDDSFVIILTNSELRCATPHTPSYPLPLHTHTQHPQPRQTPHSLSYSALPATRIVSLRLQSTLLLSKRSCHLVEARSASLRKAVEPEASSASSPSPFAE

SEQ ID NO: 262672 - protein, 142 aa, Zea mays
  Clone ID: MRT4577_171166C.1.pep
MSSLKHGSYSRKTPKILLSYILPITLLFILSQTIHSSLFSPTVNFTVLHHIHPAINTPSYPLPLHTHSTPSAKANTPPTQLLCSAGYTHSVASPPVHPPVIGAFVPSRGGQIRKSTLGGGARSQFRELPFPLHRISTKKEIG

SEQ ID NO: 262673 - protein, 210 aa, Zea mays
  Clone ID: MRT4577_171167C.1.pep
VLKPPRRATGTQPAENLLLYISCTTHVVSTGLVVERVEEGHAYPVQHPVYFISEVLGPSKKKYPQVQKLLYAVLLTARKLRHYFDDHKVIVVTGFPIGDILHNKEAIGRIAKWACELGSHDIEFRPRTAIKTQALVDFVSEWTEQQVPDNPVKRPNPLGLKCDTITSPRRLVNTFIQQMISDLLKQDKPIKVAINFKSWSTTRDISSEWG

SEQ ID NO: 262674 - protein, 39 aa, Zea mays
  Clone ID: MRT4577_171168C.1.pep
YLFVYRSSSLIYQSFCFQIETPKDVQQKFGRTVVESYLL

SEQ ID NO: 262675 - protein, 50 aa, Zea mays
  Clone ID: MRT4577_171169C.1.pep
ELVLLPQCRYTECSTKAVNLVTVYPQQELCSEKPAQELLPRRTIFSPQGH

SEQ ID NO: 262676 - protein, 173 aa, Zea mays
  Clone ID: MRT4577_17116C.1.pep
MLLSCGSLSSWVRRFVACVGGCFGCAQPTPIIAVDKPTKGLRIQGRSVKRRNVSDDFWSSSPHEMENSALQSRHSMSSISTAAQPNDQHVSGTSSSPNEFVNQGLLLWHQTRQQWIGNRRLNSQGQQSQEPKISCNATYESLLGSSKPFPQPTPLGEMVDFLVVSWEQEGLYG

SEQ ID NO: 262677 - protein, 90 aa, Zea mays
  Clone ID: MRT4577_171170C.1.pep
AEGLSPHIRTGLSSFTTCTHDKYNHSRLYGQSLNLNSYGSNPRVKKAEEHHKKEEGEHHKKDGGEHKEGIVEKIKDKITGEHGDKSGDHK

SEQ ID NO: 262678 - protein, 101 aa, Zea mays
  unsure (1)..(101): unsure at all Xaa locations
  Clone ID: MRT4577_171171C.1.pep
TDASIDDMFLDIVVDHFEEGANNYXDLTNILPENDCLYAIYDCDFVTAEDDHNSMILYILWSPFFANVKSKNLYSSSNQXSRMCSNGIHVELHATDACEIS

SEQ ID NO: 262679 - protein, 80 aa, Zea mays
  Clone ID: MRT4577_171172C.1.pep
PASQQNQPLCICGESLPHVCGKKRLPQFISFIDPTISTPLNLGLLRLSPTIHSISHPTIRSHVRGFRGKLPFNSSSRLPI

SEQ ID NO: 262680 - protein, 241 aa, Zea mays
  unsure (1)..(241): unsure at all Xaa locations
  Clone ID: MRT4577_171173C.1.pep
MADVLVGSERRVLISGYGYGLPPQPPPPPPPAESQLLGRLDQIDLRLRQLEEQXAPPVARRPGPGPGPXAPAAQHQHTKSLPAALQHVQVRSDLMDRLNLLESRIRQLSSELDLDVGGKAAGHAAHQLVLGTSSSVPPVEDPATWSDXRRWRWWTRPLLRRSAAAAAATRAXKPAAAAAGGSWSAVEILQRGARQLHRSTSSKPNAPTKVKKLQETKCACQKEKRKAERSKTSRRWFMVGC

SEQ ID NO: 262681 - protein, 37 aa, Zea mays
  unsure (1)..(37): unsure at all Xaa locations
  Clone ID: MRT4577_171174C.1.pep
FHSPLXQPLTQHLARPLHCVYGSCFPMPSLSSAITRP

SEQ ID NO: 262682 - protein, 159 aa, Zea mays
  unsure (1)..(159): unsure at all Xaa locations
  Clone ID: MRT4577_171175C.1.pep
MEENQEKFAPESSGGDGGGSVRTICVFCGSRPGNRPSFSAAALDLGKQLVERQMNLVXXXXXXXXXGLVSKAVYEGGRHVLGVIPTALLPEEVSGETLGEVKVVRDMHQRKAEMXXXXXXXXXXXGQSLASNTVYQQYCIVLDFVLAKTTTAIAFVVAS

SEQ ID NO: 262683 - protein, 195 aa, Zea mays
  unsure (1)..(195): unsure at all Xaa locations
  Clone ID: MRT4577_171176C.1.pep
VAVLECSRLSVCLAWEKGPRHSTSKGMLMAVNDVEKYTATSXSASSGADDMXRWXATIMAPADSAYAGAVFLWNIDFPSDYAFIPLHVLFRDKXVFHSNIHTQXSICTXFIKRAQLHLNLTISXKYCVSICSLLSDXNMNDPLVPETTDMHNTNRSKNNATSRSWTREHSDGMTKASCSSASHCALAFADGPMYP

SEQ ID NO: 262684 - protein, 125 aa, Zea mays
  unsure (1)..(125): unsure at all Xaa locations
  Clone ID: MRT4577_171177C.1.pep
PRRTTTRGRVVTXWNRPPELLLGATDNGAGVDLRSSFCFPAGELVGRGGVPGRTKVEPLXKLFKLVGLPNRTIWXKKSKLPDAPKFKPXRSRAESXLKKTFKDFPHSALELNGDTNSQLDPAESV

SEQ ID NO: 262685 - protein, 103 aa, Zea mays
  unsure (1)..(103): unsure at all Xaa locations
  Clone ID: MRT4577_171178C.1.pep
AGCSRACQNGLRFRPHCPLHCHTLCTTSTGSGYILFYLHQKDHSKFKRKGXDHLYDPTLNMTESLCGFELVLTHWDNRQLLIKSHRGEVAKPDQSKAINDEGM

SEQ ID NO: 262686 - protein, 171 aa, Zea mays
  Clone ID: MRT4577_171179C.1.pep
VSEFPGRPTRPRTRGRTRGRDTPDSFKFFTGSPWVILNRRFVEYCIFGWENLPRTLLMYFTNVMLPLEGYFHSVACNSDFRNFTVNNDLRYMIWDNPPQMEPHFLNVTHYDELVGSGVPFARKFTENAPLLDKIDDQVLWPVPLFIDLMELLVLPYKIAKMKSGGMLLIGW

SEQ ID NO: 262687 - protein, 137 aa, Zea mays
  unsure (1)..(137): unsure at all Xaa locations
  Clone ID: MRT4577_17117C.1.pep
VIKKGRLVIEGXXREMELXEXNGKEIVFVXNXFRKLIFXXXKKXXLVGGGVXXEEIFXXXFGGGCXLKLNNFVLEKKVYVVGEDGXLEEFKLXGFECFGGXEDGKKXIKLEGDFYFXNEKSVGVVIVGIDKYFNYYK

SEQ ID NO: 262688 - protein, 147 aa, Zea mays
  unsure (1)..(147): unsure at all Xaa locations
  Clone ID: MRT4577_171180C.1.pep
HLLGVLEFRVHDSLFSFCLLSLAADLIHVFSSVPRHLNFIDHTSDIGWKESQRVQPIIVDAGVYLAGRNQFFQATEKRDTPDSFKFFTGSPWVIXNRRXXEYCIFGWENLPRTLFMYLTNVMLPLEGYFHSVACNSDFRNXTVNNDL

SEQ ID NO: 262689 - protein, 76 aa, Zea mays
  Clone ID: MRT4577_171181C.1.pep
VYFFFMGLHFSLVDCLIMDLANFWLPIITLFGVVHDLVGKCLIITLHLISLLKELGWGALYFCSGALVVISSLDFY

SEQ ID NO: 262690 - protein, 326 aa, Zea mays
  Clone ID: MRT4577_171182C.1.pep
ARAAPAVRAFGNVHVVGRPTAGTPMGSSGLAATLRAAAAMLRLDAEWDWFITLSAADYPLLTQDDLIHVFSSVPRHLNFIDHTSDIGWKESQRVQPVIVDAGIYLAGRNQFFQATEKRDTPDSFKFFTGICLNLHFVFHPVDEKWFLNTCTPFLLGSPWVILNRHFVEYCVFGWENLPRTLLMYFTNVMLPLEGYFHSVACNSDFHNFTVNNDLRYVVWDDPPQMEPHFLNVTHYDELVGTGVPFARKFKEDEPLLDMIDDKVLRRWRHRPVPGAWCTGKRRWFSDPCSQWSNVNIVRPGPQAEKFRTYINQIMEESKSSNNSCKQ

SEQ ID NO: 262691 - protein, 61 aa, Zea mays
  Clone ID: MRT4577_171183C.1.pep
DWYLTGLGSLATTQREHVALHAFRRLSVQMQNAILQPSPEHFPKYQEQPPVLPDCVTPNFA

SEQ ID NO: 262692 - protein, 96 aa, Zea mays
  Clone ID: MRT4577_171184C.1.pep
LLKNSSFYLPLGLAVVRVLPARAGGTRQGGARGAPPPSSSSSQMANLGGYPVSMGFGTLMTRFHSSKSNCYGKKGFILSLFGQNWRDSRKRARRVV

SEQ ID NO: 262693 - protein, 32 aa, Zea mays
  Clone ID: MRT4577_171185C.1.pep
QSYEENGAIRLFQVYGIFLALGPMLFYVLSLN

SEQ ID NO: 262694 - protein, 73 aa, Zea mays
  Clone ID: MRT4577_171186C.1.pep
KKSILPLNKGPAQAVTKPEGPKFEPKHYQPTLQTKTKGTLLPGLQPCAQVQRLIKLGATVIHSFACKFTVRQP

SEQ ID NO: 262695 - protein, 69 aa, Zea mays
  Clone ID: MRT4577_171187C.1.pep
MKSMGFPIFRGSALKQGREYVQPLFCCPRRLVALGYLVSDSLVPFQVGRCRGLSGFGELLLFSWQVNFG

SEQ ID NO: 262696 - protein, 52 aa, Zea mays
  Clone ID: MRT4577_171188C.1.pep
FFFYYTCSNKNILHTTRKLKQTWTHTLPTTKDTEVMDHDPNPSQNSRTLNKF

SEQ ID NO: 262697 - protein, 136 aa, Zea mays
  unsure (1)..(136): unsure at all Xaa locations
  Clone ID: MRT4577_171189C.1.pep
PNSQKYRKFTWSNQHANPVLVKLDRVFCSSDWEAIFPNVLLQSSVSHASDHCPLLLGLHDNAXEKKRFHFEAFWPKIDGFLDTVQSAWDSMGSLHCPLVTLDRKLKETCKRLQSWSTKKVGHVASQLALQRSSFIN

SEQ ID NO: 262698 - protein, 78 aa, Zea mays
  Clone ID: MRT4577_17118C.1.pep
MSLICTNIGLLLWHQTRQQWIGKRRHNSQGQQSQGPKISCNATYESLLGSSKPFPQPIPLGEMVGFLVISWEQEGLYD

SEQ ID NO: 262699 - protein, 199 aa, Zea mays
  Clone ID: MRT4577_171190C.1.pep
MLPNMEEPLVGGKSEKTGGPGESLLVIEVKKQLYLAGPLVVGSLLQNVVQMISVMFVGHLGELDLSSASIATSFAGVTGFSLLAGMSSSLDTLCGQAFGAKQYHLLGIYKQRAILVLTPLSVVVAVIWAYTGQILLFFGQDPEIAMGAGSYIRWMIPALFVYGPLQCHVRFLQTQNIVLPVMLSSGVSALNHILVCWLL

SEQ ID NO: 262700 - protein, 73 aa, Zea mays
  Clone ID: MRT4577_171191C.1.pep
PLTEGKVAKPGESGSPGGEKSPGGPGPRAPFQLKKKGTPQKDDQFGLTHLCHAGSVSLKALFVCSGLVGGNHW

SEQ ID NO: 262701 - protein, 358 aa, Zea mays
  Clone ID: MRT4577_171192C.1.pep
MAEAGEKARVVVVGGGVAGSLLAKTMQGHADVVLLDPKDYLEIPWAELRSMVEPSFAERSLIYHKDYLSDATIVTSSAVNITEHAVLTADGHSLPYDYLIIATGHALASPASRAERIKEFQRDNGKIESSESVLIIGGGPTGVELAGEIVVDYPGKRVTLIHRGPRLLEFIGDKASKKCLDWLTSKKVDVLLQQSVELDSLSDTENVYKTSGGETVTADCHFVCIGKPLSSSWLRDTILKESLDSKGRVMVEKDLRVKGFNNIFAIGDITDIPEIKQGYLAQKHALLVAKNLKLLTKGLPNSKLATYSTGYPLALVSLGRKEGLAQFPLLTLSGCLPGMIKSGDLFVSKTRKQMGLNG

SEQ ID NO: 262702 - protein, 146 aa, Zea mays
  Clone ID: MRT4577_171193C.1.pep
GRIDPGLKSQRRDYTITGGHPNQHKHHQNLYFSHSGQMQPTGSRGLKITIPAYGFWEGNRIPLFELGAIDVGGDVVGQGKAPIAGKFLAPGKDKGDLNVGPLEGPARGLPVGPGVPPPVQGPKPGPKLGGGLAGVGCLALQEGEAR

SEQ ID NO: 262703 - protein, 40 aa, Zea mays
  Clone ID: MRT4577_171194C.1.pep
DRSSIFTVIVRDNISNYDRSSIFTVNEVAICYTIDSEYAG

SEQ ID NO: 262704 - protein, 71 aa, Zea mays
  Clone ID: MRT4577_171195C.1.pep
KKKNSTPKGTENRCGFIKRPPPKKRFCIVPGYFLGLVAAVHFHFFLVRKLVFFIFFCLAGKPFTFLHLTIS

SEQ ID NO: 262705 - protein, 130 aa, Zea mays
  Clone ID: MRT4577_171196C.1.pep
LRCPVPSLFVWSKPTKQGGVSGGKEAVTPNLSETGVGINTDGDTLVDKHTRGLHTAHIDAKTVAGASHAPAGNIEDIQATTRRCVMLTNHPTLFEDATGTGTKQTYANGPTRKGTSIGAWPPPGRLSKPN

SEQ ID NO: 262706 - protein, 123 aa, Zea mays
  unsure (1)..(123): unsure at all Xaa locations
  Clone ID: MRT4577_171197C.1.pep
VRHGQNGYXHCNHMNIKVYNNGKPCKESLHASTQFIRPNKXLLPMGDXPHYGIVKGSALMIKEFCVGPKYRVVTQCQSVVNHFSRAGVGGDLAQVLHTXSSKFRQGXYNTNDDKHSFFGKLHM

SEQ ID NO: 262707 - protein, 59 aa, Zea mays
  Clone ID: MRT4577_171198C.1.pep
RFVQIPGGQGKTPGRGGERRILFPKGLAGASQSIKLVGNRHSQGQCPWRTGGPRDRKEG

SEQ ID NO: 262708 - protein, 61 aa, Zea mays
  unsure (1)..(61): unsure at all Xaa locations
  Clone ID: MRT4577_171199C.1.pep
SKTLLEVNRFQPLLRVQTLDIHITSSYPRVLCSCAPYKEPLLLILMLKNLSXRPETYYAPP

SEQ ID NO: 262709 - protein, 141 aa, Zea mays
  Clone ID: MRT4577_17119C.1.pep
YYNRLPVGKLSSWALLTVALSISLFRLHLRCTKDFPFGKTDRELAPFFLPLSVRLPERCSSPRLNWALLLSPRRARDCSVLPALAGAPDSSVAPLAGAPDCPTRNSWYYPTEESEACCQKTDSKEEDERCLENKDRCHVLN

SEQ ID NO: 262710 - protein, 54 aa, Zea mays
  Clone ID: MRT4577_1711C.1.pep
SLGTCSSPRSQHAVAIDSRDARRRRMVCHGAGRRPWYRARQGCPVWCLVGSSSP

SEQ ID NO: 262711 - protein, 146 aa, Zea mays
  Clone ID: MRT4577_171200C.1.pep
MHVRKAKLKTHFISAKAKLKHNVTPRRVVLLAAAATSAFLLLFTLRTLHYAARVLARRAPCSLLVLGLGPDSALWAALNHGGRTLFLEADAGRIASARAAHSAGIDLQAHPVAFQQEAMTPSDDLLALRNSSDCAASPPKPLTVDH

SEQ ID NO: 262712 - protein, 68 aa, Zea mays
  Clone ID: MRT4577_171201C.1.pep
VRPPGSESGNLCTSMRPLQKILLTLAVDVEVQLVQVHGFLAPAPIETVMGRRHAGGRSVECQDEPVAR

SEQ ID NO: 262713 - protein, 57 aa, Zea mays
  Clone ID: MRT4577_171202C.1.pep
LNCMHASLDIRTVMDRYTLDKHALKTKLQRRHRGTQDNIQNGGGGGAISIGHQIDAF

SEQ ID NO: 262714 - protein, 75 aa, Zea mays
  Clone ID: MRT4577_171203C.1.pep
ELLKKRKGWKSKTWPGTVEEVQLLLALIDVKVVSRVLRVGKLSREQLLWCEEKLSKVGLTENRLRRDGSPILFTC

SEQ ID NO: 262715 - protein, 72 aa, Zea mays
  Clone ID: MRT4577_171204C.1.pep
HPSCSGLWLGHLRSPSCGRSRQRQRRMPGFAGLSMQQQSEPADPAGRALPPPAVPAPAPCVARAVHHRRARS

SEQ ID NO: 262716 - protein, 175 aa, Zea mays
  unsure (1)..(175): unsure at all Xaa locations
  Clone ID: MRT4577_171205C.1.pep
PTRFLGQIYSPEINWILMLICLGVTVGFRDTDLIGNAYGMACAGVMVVTTLLMALVMVFVWQQGFILAAMFLLAFGSVESVYLSVGLMKVPQGGWLPLALSLVVVAIMYVWHYGTRRKHLFDVQNKVSLKWLHALGPSLGIARVPGIGLIYYELGTGVPAIFSHXGTNLPAFHQV

SEQ ID NO: 262717 - protein, 81 aa, Zea mays
  unsure (1)..(81): unsure at all Xaa locations
  Clone ID: MRT4577_171206C.1.pep
HKGEIKVVVRPVFSLPKGGGKELRGPLRDILGENKTFLVEQKFASSFLGGLVFXFGQKVFYFSIRNRGKQMGGFFGQPLVF

SEQ ID NO: 262718 - protein, 79 aa, Zea mays
  Clone ID: MRT4577_171207C.1.pep
MISPLIPQHRSQPVSTQPEARWVMGRWVGRGRAHLLGCGQARQPLPSSLMVHHRPVMLPVSPEPLLSRMGSLRAPVDED

SEQ ID NO: 262719 - protein, 50 aa, Zea mays
  Clone ID: MRT4577_171208C.1.pep
GVAKTFRIKKKLAKKMRQNRPIPYWIRMRTDNTIRDNAKRRHWRRTKLGF

SEQ ID NO: 262720 - protein, 51 aa, Zea mays; identical to SEQ ID NO: 190028
  Clone ID: MRT4577_171209C.1.pep

SEQ ID NO: 262721 - protein, 43 aa, Zea mays
  Clone ID: MRT4577_17120C.1.pep
KPGTVGHSEGAESCVGGHCAAPLPSTAGWDRMGGRPARFPSGE

SEQ ID NO: 262722 - protein, 51 aa, Zea mays; identical to SEQ ID NO: 190028
  Clone ID: MRT4577_171210C.1.pep

SEQ ID NO: 262723 - protein, 118 aa, Zea mays
  Clone ID: MRT4577_171211C.1.pep
MLSKEPFILLKKKKKKKKKKKTYPTVSAEYSEAVEKARRKLRALIAEKSCAPLMLRLAWHSGGTFDVSSRTGGPFGTMKHQSELAHGANAGLDIAVRLLEPIKEEFPILSYADFYQLA

SEQ ID NO: 262724 - protein, 66 aa, Zea mays
  Clone ID: MRT4577_171212C.1.pep
MNSCSWYFSCLCTDDIHNVFVHVGPVDQSIILLVLHGVYFEVKLNFHIKRSPAEVEAVAMMRRNTF

SEQ ID NO: 262725 - protein, 276 aa, Zea mays
  unsure (1)..(276): unsure at all Xaa locations
  Clone ID: MRT4577_171213C.1.pep
MALQLQLPRPLAAARPSILLPSPAHGASASATPLHARAGGVAFSLQTNVRLLKPNRRVRRSRDPYYDLDEDDEEEAEFDEDDDDDDEGYESDDDLSGLEYPGVLYSNSPRASSKKPGLQTPMVXKKTGKEDKPKPMTNTVVQEEVSPCIXRSKVGRSSTDLKNMDREVELKNASISRSLFQKLQEEYDFDDKWLPLIDYLCTFGLKESHFTYIYERHMACFQISQASAEERLDFLLNAXVKSKDMKRILVRQPQIXGYTLWHLKSQXDFLGEHWSS

SEQ ID NO: 262726 - protein, 84 aa, Zea mays
  Clone ID: MRT4577_171214C.1.pep
MAAAVMGMEDGTYSSCSQCLFLSSFLCTQKACVSMIRLYGLGLTCSLYYLCCGSKLQRPGAEACRQHELMNEQMLLLIFTLLLF

SEQ ID NO: 262727 - protein, 84 aa, Zea mays
  unsure (1)..(84): unsure at all Xaa locations
  Clone ID: MRT4577_171215C.1.pep
WRTSLFAQPSHKTFRIKKKLAKKMRQNRPIPYWIRMRTDNTIRXGRANSCSSGLDSAVADPAAPFRAVXYNAKRRHWRRTKLGF

SEQ ID NO: 262728 - protein, 113 aa, Zea mays
  Clone ID: MRT4577_171216C.1.pep
NETTSQLQTVPETTEIKPEPETAVPQEQMETMPSVAIDNPVQDTLINNLAEQKPDAPQEPENKERSDKDEKEIPKVPGLIVTSWKPECVQISLAGLLDYNLADKNDKTSRCPY

SEQ ID NO: 262729 - protein, 51 aa, Zea mays; identical to SEQ ID NO: 190028
  Clone ID: MRT4577_171217C.1.pep

SEQ ID NO: 262730 - protein, 158 aa, Zea mays
  unsure (1)..(158): unsure at all Xaa locations
  Clone ID: MRT4577_171219C.1.pep
LPSXSXRPGPWPPWXWSXPXCCRRPSSACPXGCXXXXXAPGSGXPXXXRPXXXXVVXSXLXXXXXXAXXGXRXXVLXXVAXSXGXXXXXXXLGGLXLPPRPXXGXXSLXLXLXLVXXXXXLXXPFVLXXRLPSXXSXXXACXCLXACXSAWPVGGCLA

SEQ ID NO: 262731 - protein, 145 aa, Zea mays
  Clone ID: MRT4577_17121C.1.pep
MPKIKTSRVKYPEGWELIEPTLRDLEAKMREAENDTHDGKRKCEALWPIFRISHQKSRYIYDLYYRRKEIKRELYEFCLDQGYADKNLIAKWKKPGYERLCCLRCIQTRDHNFATTCVCRVPKHLREETVIECVHCGCKGCASGD

SEQ ID NO: 262732 - protein, 121 aa, Zea mays
  Clone ID: MRT4577_171220C.1.pep
PAGKYDSCHTYTRHRRIILVVYLAIISLKKKKKKKKKKKRRKESSSLTLATSTPLASFSPIVPAPVRVGEDEPPPSWVLVPDPFSQGSLEDMVAGVTWPSILPPGWTVEWDPTSAEEEHEE

SEQ ID NO: 262733 - protein, 51 aa, Zea mays; identical to SEQ ID NO: 190028
  Clone ID: MRT4577_171221C.1.pep

SEQ ID NO: 262734 - protein, 90 aa, Zea mays
  Clone ID: MRT4577_171222C.1.pep
SVVVVVVDHYRGTLATCGSASSNSGSNVAPKGMGASLFDRPQPNSSHRLRLCLHVQDQEQPLLDRPICMGSQESMSVGHCGDIKRTHVIL

SEQ ID NO: 262735 - protein, 141 aa, Zea mays
  Clone ID: MRT4577_171223C.1.pep
INREMGKPVPSLLMLLLSRGRVPLDCPTRWQDGRPSHSSNHVLQRTGVCLPKLGQADPPGQALVLDPGLPPEQLLAPARGCILRQLEKMGQAPTPKMGEARPRLLLLEQGQSERSLSAVSTLPALERKTPYAAAGPLGQEV

SEQ ID NO: 262736 - protein, 51 aa, Zea mays; identical to SEQ ID NO: 190028
  Clone ID: MRT4577_171224C.1.pep

SEQ ID NO: 262737 - protein, 401 aa, Zea mays
  Clone ID: MRT4577_171225C.1.pep
MDARITTLCDELCKLNIEVVSFGALSYISVEPTLHEQIVMAQIGDKGVQVIKEMIEQKNPKLRKKILDEAHLSKFSMHPCSNKMYHDLRSLYWWTRMKREIAKYISECDTCQRVKASHLKVGGTLQPLPIPSWKWEDICMDFIMGLPNTSRHHDSIWVIVDRLTKTTHFLPVHTTHRAEKYAEIYIDQIVRLHGIPRTIVSDRGAPFMARFWEQLQESLGTHDWDKCLSLAEFSYNNSYQSSLKMAPFEALYGRRCRTPLNWSQAGEREIFGPDLVLEAEEKVRVIKKNLEAAQARQKSYHDKRRKPLQFEVGAHVYLKVSPTKGVHRFGIKGKLAPRYIGPYEIIEICGPVAYQLKLPPHMSAVHDVFHVSQLRKCVRLPTEVLLKGKCALGPFLSILVI

SEQ ID NO: 262738 - protein, 79 aa, Zea mays
  Clone ID: MRT4577_171226C.1.pep
NISLNKTFFLGWGETKNSRGWQIKKKKRVFILPICPKPFHPQLPLHQHHLSIVFILILFASASLWLLLVHPYSFSPPLQ

SEQ ID NO: 262739 - protein, 197 aa, Zea mays
  Clone ID: MRT4577_171227C.1.pep
CIVSKCWKQERSNWNCLGSSSQDSAQSGSTGLSGGALDSVRCARLARANWPLSRIHRRRTAIIHRTVRCAPDCPVSQRSAGPTVGRTICAGHVAEPTTRRGHRTCPVRQRLSGCQRSTAPVKERNRAPDSVRCAPDCPVRQTTEGKICLPRLLSTTSSCLGAIKGTPRRMKEHIKHPLSTFDHSHSILAHLFDILVI

SEQ ID NO: 262740 - protein, 70 aa, Zea mays
  Clone ID: MRT4577_171228C.1.pep
PPKRLFFNVSGPEKAGIFSQFFQGGFKPPGFLEPFVFKAPQIRRFWVWKNPFSKSAFSGGALGFSGGQIV

SEQ ID NO: 262741 - protein, 59 aa, Zea mays
  unsure (1)..(59): unsure at all Xaa locations
  Clone ID: MRT4577_171229C.1.pep
FVLPSKKYADVIIPRGGDNRVAVDLIVQHIHTKLGXHDLCIIYLKGKCALGPFLSILVI

SEQ ID NO: 262742 - protein, 47 aa, Zea mays
  Clone ID: MRT4577_17122C.1.pep
RKRVQTRMQHTSIWTMIVIVQCLCNRCFKSVKEHWMDFSIFIHDGKL

SEQ ID NO: 262743 - protein, 356 aa, Zea mays
  Clone ID: MRT4577_171230C.1.pep
MTPAPSNAAGDLFAANLTGALLAVASSAFIGVSFIVKKKGLRRAATAGARAGVGGYGYLLEPLWWIGMVTMLIGEIANFVAYMFAPAILVTPLGALSIIVSAVLAHFTLNEKLQRMGVLGCVLCIIGSTIIILHAPEEETPSSVTQIWQLATQPAFLCYAASALTISLILIFHCAPRYGQTNIVVYVGICSVIGSLTVMSIKAVGIAIKLTIEGINQAGYFQTWLFATVSATCIIIQLIYLNKALDTFNTAVVSPIYYAMFTSLTILASAIMFKDWSGQSISSIASEICGFLTVLTGTVVLHSTREHDPTLTSDLYAPLSPIYWHIQGNGETGGKLKEDDLLSGNFITVVRQDYFV

SEQ ID NO: 262744 - protein, 1353 aa, Zea mays
  Clone ID: MRT4577_171231C.1.pep
MKILSIHNDELTTKLENIGSTSVASLVKIPEIIKKDASTSCFDLINDTNPCNQVLVENIVIETCSDEVAKENEQLRQEVARLGKALYEKKGKAKQIQPPQDNTTAGVNKPMEGETVICRLCHKEGHKSFQCKKMTGDKQKQKLKQKPSSKIFNTYIKKVDKKTATPYLIKKKKNGKVIAIKANKQANKGKGAKRIWVPKEIISTMKSTKKVSLLILGLDSVDIILGTDWLTRHQAVIDVAARAIEVHSPTYGETTLYLPDQGCTRSCAFTMIESPVERIPIVCDYRDVFPDELPGMPPDRDIEFAIELQPGTAPISKRPYRMHPAELAELKKQLQELLDKGFICPSTSPWGCPALFVKKKDESLRLCVDYRPLNAVTIKNKYPMPHIDVLFDQLVGAQVFSKIDLHSGYHQIKIRASDIPKTAFSTRYGLYEYLVMSFGLTNALAYFMYLMNSVFMPELDKFVVVFIDDILVYSKNEVEHAEHLHIVLQRLRDHRLYAKLSKCDFWLKEIKFLGHTISQNGVSFDPEKVEEVMDWKPPTTVRQIRSFLGLAGYYRRFIPDFSRIAKPMTELLKKGVKYEWSQKCEDAFHALRQHLTTAPVLAHPDNTKPFEVYCDASGTGLGCVLMQDNRVIAYASRALRPHEQNYPTHDLELAAVVHALKIWRHYLMGAHCNIYTDHKSLKYIFTQADLNMRQRRWLELIKDYDLEVHYHPGKANVVADALSWKAQCNCVSMDAKITTLCDELCKLNIEVVSSGALSYISVEPTLHEQIVMAQIGDKGVQVIKEMIKQKVDKYKCFRQDSKGILWFGDRLVIPKNPELRKKILDEAHLSKFSMHPGSNKMYHDLRSLYWWTRMKREIAKYISECNTCQRITASHLKVAVTLQPLPIPSWKWEDICMDFIVGLPNTSRHHDSIWVIVDRLTKTTHFLLVHTTHQTEKYAESYIDQIVRLHGIPRTIVSDRGAPFVARFWEQLQESLGTHVIRSSAYHPQTDGQIERVNQILEDMWRACVLHYGKDWDKCLSLAEFSYNNSYQSSLKMAPFEALYGRRCRTQLNWSQAGEREIFGPDLVLEAEEKVRVIKRNLEAAQARQKSYHDKRRKPLQFEVGDHVYLKVSPTKGVQRFGIKGKLAPRYIGPYEIKETCGPVAYQLKLPPHMSAVHDVFHVSQLRKCVHLPTEVLPEPELEIDPDLSYQEHPVKVLDQKERSTRARSIRMYKVQWSHHSVEEATWETEEFLRSRFPNFLPKGVDCNLADREYVLIPEQGVDRERVQDPAPEPALEDLPAPALEGKPRRLYPSRDLRRGLPFRLWWVQVRSLHDGSRGSLEDMVAGVTWPSILPPGWTVEWDPTSAEEEHEE

SEQ ID NO: 262745 - protein, 209 aa, Zea mays
  unsure (1)..(209): unsure at all Xaa locations
  Clone ID: MRT4577_171232C.1.pep
VDGHGLPPQQQQQRPRARGSGAAVDQGGGLQPQQQRPRGGATGGXPAAARPWNRAEDKVFESALVAWPEHTPDRWALVAAQLPGRTPRDAWEHYEALVADVDLIERGAVDAPSCWDDDDGDHQVRGAGADRARREARRPGIPWSEEEHRLFLQGLEKYGRGDWRNISRFSVRTRTPTQVASHAQKYFNRQFNPASRNSKRKSIHDITTP

SEQ ID NO: 262746 - protein, 124 aa, Zea mays
  Clone ID: MRT4577_171233C.1.pep
TTPVRPFLVGWQLAFSKSWLAVLALPTDRLARASFSLAAVTALSLAEQGQARAGVRRGSLTGRAFFRRATGTAAVAWVASSLLAGGARAKEGFLAHGIGGLVLCPSIIYLYGRLLFKFNISPVF

SEQ ID NO: 262747 - protein, 67 aa, Zea mays
  Clone ID: MRT4577_171234C.1.pep
CAMNDSHQLDVAPWFHSCYTFPQFLMLTIRINRQTQNVNEFESHYDDHRSSQSLSAMIVCYLSLWKL

SEQ ID NO: 262748 - protein, 94 aa, Zea mays
  unsure (1)..(94): unsure at all Xaa locations
  Clone ID: MRT4577_171235C.1.pep
RPTHSWPAGTMSYLTIEVMDGDRLGSTMLRSVIRAATTLTSCPSFRLLKSVLASIDLCFTMCEPVPERALLNLVPPPNMLEHAPLRXLLRLQPF

SEQ ID NO: 262749 - protein, 79 aa, Zea mays
  unsure (1)..(79): unsure at all Xaa locations
  Clone ID: MRT4577_171236C.1.pep
PPFKVGPSNXXGSQNESVWWTENPDLGPGFPGVPMVNNISSNXDPFPGDKDPGGVGEGPNFFFXKWCEGPTQPWKIVPW

SEQ ID NO: 262750 - protein, 203 aa, Zea mays
  unsure (1)..(203): unsure at all Xaa locations
  Clone ID: MRT4577_171237C.1.pep
KESLSIHIGQAAIQLANGAXRMNCLENALQADGQXMTGDQPLGEEDEAFKTFFRETATXKHPPRAAPVDPEATDNHEASNATYRHLFHAEQHIPGHEDGAYNFDLGHYTIAKDIGDLRLDRLTKLEHXCTALQGCLHHRPXDAGTPLXLGSLLLXERLSVDYEKKSKLAVIADPSPQVYTSLVQPYDSXVLPHRSLLEHTDVA

SEQ ID NO: 262751 - protein, 34 aa, Zea mays
  Clone ID: MRT4577_171238C.1.pep
GESRMLIYLTVAQVCAFPMAQNLVTNVNQSGHHE

SEQ ID NO: 262752 - protein, 85 aa, Zea mays
  Clone ID: MRT4577_171239C.1.pep
FISRPWEASSMVAIGNYKGATVQQEIHTDDDDQRCTVWTEREPGKSPRGLTLHIVPTDQHLSGQAANYTAQAHGEPRGAPGRCGR

SEQ ID NO: 262753 - protein, 48 aa, Zea mays
  Clone ID: MRT4577_17123C.1.pep
MPPKKAPAPGAGTLQPLDPNQDVLSLREARSQKRKATSPTHPEDDLES

SEQ ID NO: 262754 - protein, 147 aa, Zea mays
  unsure (1)..(147): unsure at all Xaa locations
  Clone ID: MRT4577_171240C.1.pep
RLKVRESFLRTKARQLDRDLATVRHREETVWRVVRAVTHHIRDSIDARTILRTTMLQLAAALGLSNCAIWMPQPGXRPRXLQLMDQLLPDRDDEGDKVLHHSGGTRAISVRDPDVAAVLASKDAKVLSRPGSALKAASCRSVPLAGA

SEQ ID NO: 262755 - protein, 100 aa, Zea mays
  Clone ID: MRT4577_171241C.1.pep
QGGERCHTITCPNTSPTKPTPNMHGGEPESNQTRGPSFIFDTPQAQSRQEKKGTSMHAGNETTQQDQQLQGLHLQLSPQLQPGGGFPKSPPALNWAAFFV

SEQ ID NO: 262756 - protein, 121 aa, Zea mays
  Clone ID: MRT4577_171242C.1.pep
MELLAGLSLRPSPGPARIRTTLQPVDVGGRFFFRRFGGRQPPRPPLFLEARGGRGCSKRKMQKKPRPPLLPKMEDNGNPGLVILIRTANVYFWYPLNIITGGTTGKIMLAAKDNFLGGYIY

SEQ ID NO: 262757 - protein, 127 aa, Zea mays
  unsure (1)..(127): unsure at all Xaa locations
  Clone ID: MRT4577_171243C.1.pep
MPIQIHPADPNNLQAPSDMSSYCGTNSVELVTNAXYIASXGKGVLAAHKSTGTXIGKRLSTINVDNLDDNRRALRELLFCCPGALQFISGVILFDETLYQKTKDGKPFDDVLTEGGDLPGINVNKDT

SEQ ID NO: 262758 - protein, 193 aa, Zea mays
  Clone ID: MRT4577_171244C.1.pep
TQKNPNGGPKGFKKNGGRGPPWGKTVDIRKNTQPRGGGHPPPRVRGGYPPPPPNRKKKPGLKSTKRGLFSLKSPPNNGKKPPTFPKKEQKKKGGGPKKKNFLSNPGAFRVGEKPPAQIPGPGGTHYFKGAPPRGGPPLFVPLRGGKWPPGGKRGKRGPRGKIVTPPNFPKKNNRETKRENPGAPKGGPNPNKW

SEQ ID NO: 262759 - protein, 94 aa, Zea mays
  Clone ID: MRT4577_171245C.1.pep
MVSFGTGSIAMRWSELQGKKKGKVLLEPLDTNLRTTIICYGELVGITGDGLNNKHYSLNVGLCKNRHDNLLTKAVEAADKHYKESKLEYAREES

SEQ ID NO: 262760 - protein, 163 aa, Zea mays
  unsure (1)..(163): unsure at all Xaa locations
  Clone ID: MRT4577_171246C.1.pep
MAEDHFSSAPSAPSAAATAAAAAAAAVGSSVIPIVNKLQDIFAQLGSSSTIDLPQVAVVGSQSSGKSSVLEALVGRDFLPRGSDICTRRPLVLQLVHQPRRPADAEADEWGEFLHLSGRRFYDFREIRREIQAETDREAGGNKGVSXRQIQLKIFCANVVNIT

SEQ ID NO: 262761 - protein, 101 aa, Zea mays
  Clone ID: MRT4577_171247C.1.pep
GPGCIYPAHRGGGGICRRNLGDCFNMGFYNRSTRGGRQKHVHLCLAPLGVPLNLRFHLWVAAGGPRILISRRVRGLLRFRDCSDNSSLTKVGLRSLFLKLL

SEQ ID NO: 262762 - protein, 53 aa, Zea mays
  Clone ID: MRT4577_171248C.1.pep
PDAKPPEMMVILMKSHDIACTAILAFYPFEHPPFFFFFFFFFLFFFFFYQKRG

SEQ ID NO: 262763 - protein, 172 aa, Zea mays
  Clone ID: MRT4577_171249C.1.pep
MADGRERGGSPLRVLAVNDGSEVDKVATEDDKLDGTSKASMEDEKMEDLTLTERAIKGSANVKHAPADNGGVEEEEVKNLSKGEETQVYQELREKVSPGSKPDGVGEVEKNEKREAVGASGERGHVGVGEPKGRHRLENMTLGEWFVQIEKYLLAKNEEAAEKAIAEVQEKH

SEQ ID NO: 262764 - protein, 279 aa, Zea mays
  Clone ID: MRT4577_17124C.1.pep
STWKTLSNHVFEDLRRTKAPNIQRTGGQVGNHLRKWKRIYAKIEKLKNLDGAVWDEHNCVISLDAEHYNNHIKDHREDANYLNIPVEHYHEMAIISGNSSATAAAYVQGSNEPLGVEVTETDSAPAVTETGNAPTVTGTDNNAPKPTCSVPSEQFGGDDGTHSSGNNGAEESSDTKQPPPSKKQRVYTDDDLVVIMSRSLGELASAIKRLSEQPDLPVPKGLYEELKSIPGFEEAHLEHYYAYLCENPPLARAFYALPQLSSKVTWVARYVKNHSSELM

SEQ ID NO: 262765 - protein, 137 aa, Zea mays
  Clone ID: MRT4577_171250C.1.pep
MSHHYKTCVDEQCPVCSVVRKFLRQSTEQASKQKTLESRKLAQQNVPQRIMNGIEGDRMDVDPMSAEAFEDQPSVPKRLKMHLPSLSGPENDISVVSNHHVNPGFLLQEAQPEQLEHNNRTTYLKREVDAKADIRAP

SEQ ID NO: 262766 - protein, 74 aa, Zea mays
  Clone ID: MRT4577_171251C.1.pep
HARTDALLSHCGWNYELQSLIDGAPMVEWMLYAELRQNILMVCGRHRRCAQGARVEQAEGDYRVHSARGDARAK

SEQ ID NO: 262767 - protein, 88 aa, Zea mays
  Clone ID: MRT4577_171252C.1.pep
FNCRLALLLSAGPPFFFFFFFFFGPIGQYNGVKMDRGHIVFTIKELGTLRKQTQDSSRRYLVVPVTHRVSSLQLLTPEREPVFITVKH

SEQ ID NO: 262768 - protein, 100 aa, Zea mays
  unsure (1)..(100): unsure at all Xaa locations
  Clone ID: MRT4577_171253C.1.pep
GDDGRKRNGSAHGNGSAKVWAPKTIRIDDVDKVARSSIWSLVGVRGDRXAAGRSRAGDKLGTVFEPRGLQATKKAMATSSPLLHANPVALTRSVAFHEGS

SEQ ID NO: 262769 - protein, 53 aa, Zea mays
  Clone ID: MRT4577_171254C.1.pep
WCPTSQTLRARSSPILVPKFSVSSTRPLSYGGLFAIMMISELLIFLYFPCDAD

SEQ ID NO: 262770 - protein, 195 aa, Zea mays
  unsure (1)..(195): unsure at all Xaa locations
  Clone ID: MRT4577_171255C.1.pep
LQIAAAFQESWRVEGHKKDTQAPIGKEFRCLRRKDLIETMAKNIPAGSIRFGCHVVAIQQDPGTHGPILTTVDGGTIRAKVLIGCDGGSSAVARYLGLSPPKVIPRTVLRGFTAYPHGHPFGAEFLRIRGGXEFVVGRNNARHQRRERHDDEGFHAGEAARLLRSRDRPDGPGLGPRVPQRREQHPVPGLRGRSR

SEQ ID NO: 262771 - protein, 130 aa, Zea mays
  Clone ID: MRT4577_171256C.1.pep
RNTRCFLIIHILVPQIKQVEEERETKESHFIQARRLNLAKENPEKKKQSNLDVFNRKKKKKRERERGAEAAAFLHVSERSNTGQWHWPVQYSHSSGSSMSRNAPPPTTSSSTAHDGGGPQPRVLCVVTTA

SEQ ID NO: 262772 - protein, 397 aa, Zea mays
  unsure (1)..(397): unsure at all Xaa locations
  Clone ID: MRT4577_171257C.1.pep
MEEEGHDIVIVGGGICGLATALALHRKGIASLVLERSEALRSDGAAIGVHANGWRALEQLGVAAELRETADLXHRRESWRVEGHKKDYXAPIGKEFRCLRRKDLIETMAKNIPAGSIRFGCHVVAIQQDPGTHHGPILTTVDGGTIRAKVLIGCDGASSAVARYLGLSPPKAIPRTVLRGFTAYPHGHPFGAEFLRIRGGGEFVVGRLPVTRNLVHFFVTMXSSNRNNARHQRRERHXTKDFMLEKLRDCCAPEIVKMVQDSDPESLNVVNSIRYRPPWQVALAAFHRGAVTVAGDAMHAMGPFIGQGGSAGLEDAVVLARSLSRAAAAAAGGGHGAAVREYVRERRLRVALLSLESFVAGTLLRARSLVGKLACVAVLALLGTRSLRHADFDCGRL

SEQ ID NO: 262773 - protein, 111 aa, Zea mays
  unsure (1)..(111): unsure at all Xaa locations
  Clone ID: MRT4577_171258C.1.pep
ATAWEDQYRLSCRDXNVCLGRTDRDDNAHXWIKVMNYSSWVKDQEGYPDTLLGNKSCVYDVNHCLGQXHYGHQTWHNPYCLYKSATWTKIRDVNDTFRYVTIFDIIYVNFN

SEQ ID NO: 262774 - protein, 258 aa, Zea mays
  Clone ID: MRT4577_171259C.1.pep
MLIRRPLQTLTLPLLRRHFSAATVEAFVSPDQATDPLSPPYDYLPGHPRPDAKHNEVILAVPRASSGRHVAAKERKAGRVPAIVFEQENGQEGGNKRLISVRANQIRKLVDHLGRSFFLSRLFSLQVWSEHAGQGELIESVRVLPRKVHLHAGTDEPLNITFMRAPSSALLKIDVPLMFIGEDASPGLRKGAYFNTIKRTAKYLCPADIVPPYIEVDLSELDVGQKLLMRDLKVHPALKLLHSPDQPICNFTGSRSPE

SEQ ID NO: 262775 - protein, 100 aa, Zea mays
  Clone ID: MRT4577_17125C.1.pep
EKVKSTSVTQKQMPSQREQYGSTVHLFIDAGRSPRKITFMSITFVNDLWKSDKAHVVFSSLSRFPSLLSRRSFPAHSFGCAPSFVELGNQPVLRLVQASS

SEQ ID NO: 262776 - protein, 182 aa, Zea mays
  Clone ID: MRT4577_171260C.1.pep
ALGFRLYLQLSIMVCIAEHRGETSESFSMEEEDASSTPQSSGHPTLGVAAMHPARRHTPEWASQTPTRDTPARALSVARELLRHLPSLTASPGAMRQWRGDVDRLLGMALSGSVRPRPRSSWHRREASTPERTSSVRIAPTGDLRDELNRRRTGRDAYASLGKTRGRCGNLGQDSAAVPPWV

SEQ ID NO: 262777 - protein, 88 aa, Zea mays
  Clone ID: MRT4577_171261C.1.pep
STLKPVPLIPPSPDPSKVAKLLASTFLRTTSSRQSSPFPPLDFTYNASVRSLCRPLVHLELRTRARHDLGPFYGDHPRYLTGLTPRWT

SEQ ID NO: 262778 - protein, 91 aa, Zea mays
  Clone ID: MRT4577_171262C.1.pep
RCITRLKVLYLSTRAAKHFHWDIVRPVKVSIIARSITARNTTCLADDSHGIVLGSLVPVGRLCSSVLLMSGRHAPPWKMSAAIWWKRSSPT

SEQ ID NO: 262779 - protein, 72 aa, Zea mays
  unsure (1)..(72): unsure at all Xaa locations
  Clone ID: MRT4577_171263C.1.pep
RTRVLGQRGFGKVYIRALGGVTIISVXRFTYFESPGGEAAFLPEVDLISVAAHRNLLRLMGVRTTHTDRLLV

SEQ ID NO: 262780 - protein, 316 aa, Zea mays
  Clone ID: MRT4577_171264C.1.pep
MYLIFLQLEAPGERDWEPSKPHAPRATGAAPFPCTPQRPNPAGSLLLCSSGDRVMPLPTMTHSSAYLLPAPTAPSDPSGAAPTTYALVVLNQRLPRFAPLLWSRARLRVCADGGANRVFDGMPELLAGEDPAEVRTRYKPDVIKGDMDSIRPEVKEYYSKLGTNIVDESHDQDTTDLHKCVSFITSNLPIPEKSNLCILVLGALGGRFDHEMGNINVLYRFSSIKIILLSDDCSIFLLPKTHSHEIHIEKSVEGPHCGLIPMGGPSATTTTTGLRWNLDNTNMMYGGLISTSNIVDDDKVTVTSDSDLVWTISLRN

SEQ ID NO: 262781 - protein, 112 aa, Zea mays
  unsure (1)..(112): unsure at all Xaa locations
  Clone ID: MRT4577_171265C.1.pep
EYNPFEGQXARAVMYDPXILAMTNLISAYHKNDVISFEKILXSYTLTILDHPFIRNYIADLFQNIITQVLLKLNKTYISDMIPFISQELNFSEKDDLTDFFVIPFFTTLFKA

SEQ ID NO: 262782 - protein, 270 aa, Zea mays
  unsure (1)..(270): unsure at all Xaa locations
  Clone ID: MRT4577_171266C.1.pep
AGIHLFRCPDAVDIVAKLSECIASRGGNIHSVDVFVPDDKPVFYSRSEFTYNPRLWPRHELHKDFLNLSRCFNAQTSTVRVPDLDPKYNISILASKQDHCLFDLLYRWQEGRLPVHINCVIXRHGIPYHYLPTAPANKREKEILELIQGTDFVVLARYMQILSENLLKAYGKDIINIHHGLLPSFKGGNPSRQAFSAGVKLIGATSHFVTPELDAGPIIEQMVERVSHRDTLQSFVVKSENLEKQCLAEAIKSYCELRVLPYELRKTVVF

SEQ ID NO: 262783 - protein, 303 aa, Zea mays
  Clone ID: MRT4577_171267C.1.pep
MVSLARRPLSAAVPAGNLLGIHLFRCPDAVGIVAKLSECIASRGGNIHSVDVFVPDDKPVFYSRSEFTYNPRLWPRHELHKDFLNLSRCFNAQTSTVRVPDLDPKYNISILASKQDHCLFDLLYRWQEGRLPVHINCVISNHDRPQDNHVRRFLQRHGIPYHYLPTAPANKREKEILELIQGTDFVVLARYMQILSENLLKAYGKDIINIHHGLLPSFKGGNPSRQAFSAGVKLIGATSHFVTPELDAGPIIEQMVERVSHRDTLQSFVVKSENLEKQCLAEAIKSYCELRVLPYELRKTVVF

SEQ ID NO: 262784 - protein, 464 aa, Zea mays
  Clone ID: MRT4577_171268C.1.pep
EIDGTVRKGRRKNPNVGGSRKNLEVSLSESSRKFITCIRKYMILYLNLLEKNTDLWTLEKAYTYLRTDKRFALCLGDIVPVGLGKYILVLTAAIHNPEIRRASGDASVEQLLEKMFTVFMDHANMWADISNIPEVNSPELSESNLYSYIHQYIHLLESDVRLDVLEGLNEKIRKRFKTPKLSNSNFAKICKHASLAWCRCILIKLASITPLPESADATNQPAPLSNGLLLYVDLQPDELLISSPDGPAQFKGLDMNWFETLNRIKNIPVKQTSEDNLETAVTLMKSTYNFYRESPCGTFPSGINLYTVTPSQAPIEGLPPTAAVVETLDLSIPRKLLLWVYTLVHGRYSNISSVVKYCDEMKLRSKRGTPAASASSQVVQPVSHSTVSSQVVSKEKSSQVEPAEAAQNPSDLAATCVPAYQEVGGASASQSAIEAQKATAAASQLTRSGSSRAMENAQDGGERK

SEQ ID NO: 262785 - protein, 99 aa, Zea mays
  Clone ID: MRT4577_171269C.1.pep
MKPQKLGASNFQEHQDNGTEQKSPKETDERDQLLVAKKEILTREMDEHETLDRAQQADESPQQTVSITSYEDHELVESKVHARDLNVVSPREASEAEEN

SEQ ID NO: 262786 - protein, 33 aa, Zea mays
  Clone ID: MRT4577_17126C.1.pep
TQVYYEQIKIHTYQIYYFNNSLLFEQMRFSSQD

SEQ ID NO: 262787 - protein, 47 aa, Zea mays
  unsure (1)..(47): unsure at all Xaa locations
  Clone ID: MRT4577_171270C.1.pep
NKKKKKKKKKKKKKKKKKKKKKKKKKKKKKKKKKKKKXXGPPFAIKN

SEQ ID NO: 262788 - protein, 52 aa, Zea mays
  unsure (1)..(52): unsure at all Xaa locations
  Clone ID: MRT4577_171271C.1.pep
RRRWYEVGGALRWRRTXTRVMVYVQGPDAGVDLMVAGLQVFPVDRKARVKHL

SEQ ID NO: 262789 - protein, 118 aa, Zea mays
  unsure (1)..(118): unsure at all Xaa locations
  Clone ID: MRT4577_171272C.1.pep
KSFIIXPLPFFLFTLXTYSRPVFIKRPAPHKLTHHLHLPLPSPYSSSHIHFSITFFFFNLFSIYPSFSPPHSFIYLHIIYHSPINFNFLFFFLYILYSPFFFLIQSIFPKFNPTLFIF

SEQ ID NO: 262790 - protein, 74 aa, Zea mays
  Clone ID: MRT4577_171273C.1.pep
MLTILPSTLICRNEGSHYKLVIQDHDNHMAPKEGINRLAVCCRKDAYGLADERMMTDGSDVYLCIVVHVCPFHY

SEQ ID NO: 262791 - protein, 149 aa, Zea mays
  unsure (1)..(149): unsure at all Xaa locations
  Clone ID: MRT4577_171274C.1.pep
FGTRLNFPSNSKRRSAVAKAAPRVDEDENENENGGGGALPDRSCQGMSAAPGDGAAVDLCVELGGASKRARTEPQEEAQAREKVAPALAPSDDSADTLLMDAFMFGDPFSFFDGGVCXACRDDGLXLGGDAVFCDDSVGLWSFDDSVCF

SEQ ID NO: 262792 - protein, 98 aa, Zea mays
  unsure (1)..(98): unsure at all Xaa locations
  Clone ID: MRT4577_171275C.1.pep
SVGDCYYELSVEIIEVCLALKHRNGXLXSLEELHQQVLKGRGKFAQDVSQDDLIRAIEKLKALGTGFGIIPVGSTYLIQSMPAELSKDHTVELQLAEK

SEQ ID NO: 262793 - protein, 130 aa, Zea mays
  Clone ID: MRT4577_171276C.1.pep
ELRRRNSLLLSELAHMRRLYNDIIYFLQNHVEPAVPPPPVGTTTTAASCRLVELGSADDASAAQTWRPRRGDDEAPVKLFGVRLNDGKKRRAQQVVPLEEKGGGNDQDEGLADGDRNMAMALVTSVRNYW

SEQ ID NO: 262794 - protein, 76 aa, Zea mays
  Clone ID: MRT4577_171277C.1.pep
FMTRRRFNPQRSNLDTSLSLSVHYLPPKKNARPLQYTSVGVQHDFHNAAVAAGCSVLFIEGKKKSGRSIYGVKKKK

SEQ ID NO: 262795 - protein, 117 aa, Zea mays
  unsure (1)..(117): unsure at all Xaa locations
  Clone ID: MRT4577_171278C.1.pep
YLYSLSVLEHQIVGTLVPVLKDVVMNISRVQKLTPAVQCSLFKAFVDVGDXGTXHLSLGVKCSNEVITDIRGAIMLPKLSRVPXVRMRYWGNLIGHPDTVLCKVTXGKCWSNIVRIV

SEQ ID NO: 262796 - protein, 99 aa, Zea mays
  unsure (1)..(99): unsure at all Xaa locations
  Clone ID: MRT4577_171279C.1.pep
MLLILRDALTTKNGVSVPXKIYLVDAGYRTQPGLLPPFCGERTHLNDWCNNPGQNEXDLLNHKHSSFKHTVHRAFGSLXKRQSKILDXAIPYFPFPTQV

SEQ ID NO: 262797 - protein, 89 aa, Zea mays
  Clone ID: MRT4577_17127C.1.pep
IPSEANPTLFSSPWDTFFSGWVTIYPLLGTKRHPNKNLKIFGGVNNRNCFGWGPKTDSSPSFKFTTPTGFLPLFCPWGTWKRNFPPTRG

SEQ ID NO: 262798 - protein, 67 aa, Zea mays
  Clone ID: MRT4577_171280C.1.pep
ECKSAVSISVVGGSASIGGSGGIGLGLGSGFGSGSCSGSGFGFGGGIYGSSGTKITSSATITKRSPR

SEQ ID NO: 262799 - protein, 63 aa, Zea mays
  Clone ID: MRT4577_171281C.1.pep
HHRHVPLCGVIHLEALSICYSNAWTAVQLAEMVRPSEPLVLKLEDTLIDNALPSRAQGKPMSS

SEQ ID NO: 262800 - protein, 66 aa, Zea mays
  Clone ID: MRT4577_171282C.1.pep
PRHVLLAIPNHEELGKFLTGVTIARGGVLPNINPVLLPKKTAEKASTGGSKEAKSPKKPAQSPKKA

SEQ ID NO: 262801 - protein, 61 aa, Zea mays
  Clone ID: MRT4577_171283C.1.pep
CIFVMDIGLLCAKLGACRGNIRQSYQHNTSYPCPRREGTRDRMACGSTDSWDMQRVRELRL

SEQ ID NO: 262802 - protein, 40 aa, Zea mays
  Clone ID: MRT4577_171284C.1.pep
ATRYWSESVMTSTCHRYRAMIEQDLDGATEDVHVTGHLAR

SEQ ID NO: 262803 - protein, 66 aa, Zea mays
  Clone ID: MRT4577_171285C.1.pep
QELRKLTAMHKHEIPATMRLSLLIVIVAAISARTAGDTPLAGGGCGALKPDFYSQSCPRADRIIAE

SEQ ID NO: 262804 - protein, 38 aa, Zea mays
  Clone ID: MRT4577_171288C.1.pep
PLLKHLSFQKNVRPVLHERFLMPEWFPKHGVPPTKQSV

SEQ ID NO: 262805 - protein, 215 aa, Zea mays
  Clone ID: MRT4577_171289C.1.pep
MGMRDKKRNQKRVLARRTAAPRPGEGKDFLPLEGGPGKKHLKVQQPEEPENTATIVYIGHIPHGFYEDEMKGFFKQFGDIKRLRIARNRKTGKSKHYGFIEFENPAVAKVVADEMNNYLLFERTLQVALVEPEKVHPKLWKGVRRGFIPVDRVAIERKRHNKDKTVAEHKKMVEGIVKRDGKRRKRIKAAGIDYECPALIGSIQPSAKKIKFDEA

SEQ ID NO: 262806 - protein, 38 aa, Zea mays
  Clone ID: MRT4577_17128C.1.pep
LTSRGQQALGGHSKAGGGPLPEHQPPISHGNHLVNINI

SEQ ID NO: 262807 - protein, 125 aa, Zea mays
  Clone ID: MRT4577_171290C.1.pep
MIAMSSTPILLTILLAYLAFSANCNGERGNDEDTPAAGGHRRWQPNGDKTISGGSSDDEAATCVSSECEGSTCYCCPTMPTSPCFLDLDACLRVCHGRRRRRRPAAPLPEVTSSSGRGSGPSRFP

SEQ ID NO: 262808 - protein, 215 aa, Zea mays
  unsure (1)..(215): unsure at all Xaa locations
  Clone ID: MRT4577_171291C.1.pep
MGMRDKKRNQKRVLARRTAVPRPGEGKDFLPLEGGPGKKLLKVQQPEEPENTATVVYIGHIPHGFYEDEMKGFFKQFGDIKRLRIARNRKTGKSKHYGFIEFENPAVAKVVADEMNNYLLFERTLQVALVEPEKVHPKLWKGVRRGFIPVDRVAIERKRHNKDKTVAEHKKMVEGIVKRDGKRRKRIKAAGIDYECPALIGSIHXSAKKIKFDEA

SEQ ID NO: 262809 - protein, 132 aa, Zea mays
  Clone ID: MRT4577_171292C.1.pep
WVPRGRPGVLFHTCTKRSGALGRGRTHGIYARMTCSSTVSTNSHLCGVCTSSILDECSKCRSNMHQMARILQDDWSLEREMYEVWSTSSPTAKLVSWSHSELVHQDAHQILIAVIAYIPARQRYMMLSIPST

SEQ ID NO: 262810 - protein, 121 aa, Zea mays
  Clone ID: MRT4577_171293C.1.pep
LAPRVSTRVRPRVRSFNTATAPAPAAPAENCNLELTLATGPSSSGSCDAGRWQGKRLKASPNSGSAATAVSSTSTDSELARFGDIDVVATPVARFHGEVTRRMDEVAQGPWMYRCLSLKTA

SEQ ID NO: 262811 - protein, 85 aa, Zea mays
  Clone ID: MRT4577_171294C.1.pep
EPKTPKLNPGGGGGKKFFQPKVQTPQRPIGENPPKHNPLGAPQGKSPDFRGPPAPLGVHEGKLGGHAGENPHNPGGRGEIMPTGR

SEQ ID NO: 262812 - protein, 65 aa, Zea mays
  unsure (1)..(65): unsure at all Xaa locations
  Clone ID: MRT4577_171295C.1.pep
HLQVPDSIPLEGEFRVWLKNPLAVPRPLPSYVMRSTLQLGRYRVDGDSLXSGIFRSGPCFGLFLI

SEQ ID NO: 262813 - protein, 58 aa, Zea mays
  Clone ID: MRT4577_171296C.1.pep
PSSYADTSDPDSLAALDSRAPRRALLRGTLPTTRTRRGGRMSEHSRLLPGHVRGAETQ

SEQ ID NO: 262814 - protein, 230 aa, Zea mays
  unsure (1)..(230): unsure at all Xaa locations
  Clone ID: MRT4577_171297C.1.pep
TGYCTSEIQKEDAWGRRTMALSSTACAGKGVNGPPPPAFGDALVTIRNTAAXVKPAPACGSHRYRPERMVYLGSLPAEPRATCRGEITVDNGWDSARLGXTPETLAKNRXXLQVIHSRWAMLGWFCCMFSAMLAXHGPDRQDRVXSQGQFPDLQTVRAXTTSADPILITIREHXAYLNLPAPAHEPIFKSXRIAGGPVRVVREPLYPXEIFDPLDVXRERDAFGELRMMR

SEQ ID NO: 262815 - protein, 78 aa, Zea mays
  Clone ID: MRT4577_171298C.1.pep
KKKKKKKKKKKKKKKKKKKKKKKKILKKFKKKKKKKKKSFFPFPGGPFKRFIFPNIHNTGGAFYLSFRGPNFPFRGSF

SEQ ID NO: 262816 - protein, 55 aa, Zea mays
  Clone ID: MRT4577_171299C.1.pep
KKSGDQQYSAYEYGPDTTDGSPYFGAGFTVQISQAHFDHQAEDDTHHKHGMRHHV

SEQ ID NO: 262817 - protein, 68 aa, Zea mays
  unsure (1)..(68): unsure at all Xaa locations
  Clone ID: MRT4577_17129C.1.pep
DGWHSTQTVQKSKILFIAWSPSTFRMRGEMLYCTSKDRIKYELDGFHYEIHATDPLXVDMDVLRERAH

SEQ ID NO: 262818 - protein, 61 aa, Zea mays
  Clone ID: MRT4577_1712C.1.pep
GEKERKKKQKDRGFKALTSEAVTLGVNKTRAELNDHIEGGPYFLLGVQNCWKGRWVEPFEI

SEQ ID NO: 262819 - protein, 85 aa, Zea mays
  Clone ID: MRT4577_171301C.1.pep
HARGAQAVVNRNPLFDGESIKAPLSSKQNQSWVDTSISIPSNRHDHSGQMSLTSKAQNNSLSNNVFRGLSDTGIQNSWKSRAEQP

SEQ ID NO: 262820 - protein, 383 aa, Zea mays
  unsure (1)..(383): unsure at all Xaa locations
  Clone ID: MRT4577_171302C.1.pep
RFGREDEDNEFYRLNKXNICVGCGEKSHYIRYRIIPSCYRMHFPEHLKSHRSHDIVLLCVDCHEIAHSAAEKYKRRIAEEFGIPLFVQKIMNSGDISLITNTSVSEDKLNGTGVSPLQLRTAAMALLRHGSTMPLKRCEELMQIVKSYYGGRDVTPEDLEMALLVGMSPHERRRLEKKKGYSFRAQAQXLLERAAAIPSQKTVDMDQKIVMPYLRDFLRLELVVMVSKSXETGNQNQLENLTLSQGSSSLPVSMEDTTSDHDTVTLETDTEQQARGACTPGNSHDDKEQSICDNSSQVISKNAEKISLLGHGHHGKQVVELLFSNGGEEFVNQFCQRWRQIFVEAVHPRYLPSGWNINHSGRRDFGDFSVYKPPRKDPQSARD

SEQ ID NO: 262821 - protein, 151 aa, Zea mays
  unsure (1)..(151): unsure at all Xaa locations
  Clone ID: MRT4577_171303C.1.pep
CSFLSFLSDIRSSGITALTTLVRERQMXGDCRAVLCWKGITVEMSKDHKPTYDAERQRXIKDGYLNGVLPVTXALGDWDLKLHQGSPSPLIAKPEIRXMILMEDDEFLIIGYDGIFMMTSQNVMSXVRKGLRRHDDLCSVATYGLSIITYI

SEQ ID NO: 262822 - protein, 136 aa, Zea mays
  unsure (1)..(136): unsure at all Xaa locations
  Clone ID: MRT4577_171304C.1.pep
TILIFVHILQANVGDCRAVLCWKGITVEMSKDHKPTYDAERQRXIKDGYLNGVLPVTXALGDWDLKLHQGSPSPLIAKPEIRXMILMEDDEFLIIGYDGIFMMTSQNVMSXVRKGLRRHDDLCSVATYGHSIITYI

SEQ ID NO: 262823 - protein, 90 aa, Zea mays
  unsure (1)..(90): unsure at all Xaa locations
  Clone ID: MRT4577_171305C.1.pep
AAVADNLKWACARFLLAGCAAMGGTTRAGSIVVNWGQNGNPGSLANGCDSWFYTYGCIAFLTTSRNIHTPDLNLCGHCXPASGRCTGQSC

SEQ ID NO: 262824 - protein, 186 aa, Zea mays
  unsure (1)..(186): unsure at all Xaa locations
  Clone ID: MRT4577_171306C.1.pep
MKGGARSARERVLDMDPEAVQQGWVHYMRGCRAPAACCGQDFGCRQCHNDANNSVEDDPGDRHXIPRHEIKKAICSLCXTXEQDVQQNWSSCGACMFKYLCKVCKFFNDDVSKEQNDCDECGIXITGDGYNFFHWEKCARCYSNALKDSHHCVERAMHRNCTGCFEHLLNSTQDISVMQXVHTIHL

SEQ ID NO: 262825 - protein, 118 aa, Zea mays
  Clone ID: MRT4577_171307C.1.pep
VWEGFWFFPVVVVVKGSVCEFKFRFLYSNFFCFCLFFFFFFFFFFFFFPRHEPYSSVERGNHRLPPQHSIRDASKKKKTVSTGDILYSGTELWSAYPVFVSLLHLLPGVLRTPPPPPG

SEQ ID NO: 262826 - protein, 58 aa, Zea mays
  Clone ID: MRT4577_171308C.1.pep
LKRRLFFILGGFWGGQTKPFYHIRTKTLACSPIRAAYRLTIFSNLPGTLSVLPGVTYL

SEQ ID NO: 262827 - protein, 208 aa, Zea mays
  unsure (1)..(208): unsure at all Xaa locations
  Clone ID: MRT4577_17130C.1.pep
YQKIDESKLKAFTRYQLRGYIEDSQDLEIYLIRYNAKHETVNVPGTGSLWPLSAQSPIGKCGEPNRCAPHLEWNPDLDCSCRDGEKCAHHSHHFSLDIDVGCTDLNEDLGVWVIFKIKTQDGHARLGNLEFLEEKPLVGEALARVKRAEKKWRDKREKLEWETNIVYKEAKESVDALFVNSQXNQLQADTNIAMIHAADKRVLFSRST

SEQ ID NO: 262828 - protein, 117 aa, Zea mays
  unsure (1)..(117): unsure at all Xaa locations
  Clone ID: MRT4577_171310C.1.pep
FIATLXLFLYTTXATGIGDXNHTDAXAAGPHAARGEDEILGITWGFRRMIFIVVYCTTVISGXDINPAVIFLLFLASKRALDLRMIYSSSNVWEPSCPMKLEEAFKIAYYMTLLPSH

SEQ ID NO: 262829 - protein, 105 aa, Zea mays
  Clone ID: MRT4577_171311C.1.pep
SHRAKEAILKGSSNRRTRDPTMASDKDQLILTVITALFEHGTASRTAWHHPPDRSLVTPRNKSLYEQRLLFSNLKNSIALLSLFHICVKKKKKGGPDAGRRGSGP

SEQ ID NO: 262830 - protein, 119 aa, Zea mays
  unsure (1)..(119): unsure at all Xaa locations
  Clone ID: MRT4577_171312C.1.pep
LAASDDPLVREAALSGLLELSQXQTSGNALPDQDKLKRDPXLKSRIEGVSAMDSDDLHAAREERQLVDSLWKECYSEPPLREKSLVVLPGEDAXXXXXXXXTVKMFEPPLGALGGCKTC

SEQ ID NO: 262831 - protein, 103 aa, Zea mays
  unsure (1)..(103): unsure at all Xaa locations
  Clone ID: MRT4577_171313C.1.pep
APHGAGAPGGPFSAPSPSIFLPKTGPKGGMLQKGFVFGRVKGSKKAPGAFFFFLAGVKRNLRVVFPPEKKKRGKRVGVVYRKGLFLGSXQKMFCKTEVGNCGQ

SEQ ID NO: 262832 - protein, 100 aa, Zea mays
  Clone ID: MRT4577_171314C.1.pep
PREFLSQVDYLVGRQAFGGKASSEGGFETGSVAPPNVLESPPPVIGGNQYFPVSVLPRTGDGDEGGKPQLFSAPVFAGKLFIFKAQAGAKRWFKGPRKGV

SEQ ID NO: 262833 - protein, 50 aa, Zea mays
  Clone ID: MRT4577_171315C.1.pep
FYIFYFLKKYAIAKRVRTNNLASHSKYLSIMKKLNIYTNFLCSTFNTCIF

SEQ ID NO: 262834 - protein, 252 aa, Zea mays
  unsure (1)..(252): unsure at all Xaa locations
  Clone ID: MRT4577_171316C.1.pep
IRHEALAIANMVLGLKEIQIRGEIRTNVXYTVDLLNATEYRENKIHTGWLDSRIAMRVRAERPPWYLSVVGGALYEASSRSSSVITDYVGYLSKGQIPPKHISLVNLTVTLNIEGSKYTIETVRGGPRSYKLRMNGSEIETEIHSLRDGGLLMQLDGNSHVIYAETEAAGTRLLINGRTCLLQKEHDPSKLLADTPCKLLRFLVADGSHVDADTPYAEVGVMKMCMPLLLPASGVIHFXMPXGQAMKANDLI

SEQ ID NO: 262835 - protein, 91 aa, Zea mays
  Clone ID: MRT4577_171317C.1.pep
MCVLYPVALFCGQCCPCPGAPPTFGFYKAGFCFFCQFAPPPPGVINNYKAVLSRWGWLKKKKKKKKKKKKKKKKKKKKKKKKKKKKKTPPP

SEQ ID NO: 262836 - protein, 442 aa, Zea mays
  unsure (1)..(442): unsure at all Xaa locations
  Clone ID: MRT4577_171318C.1.pep
MSTPIFPSPRLLAVAPFLSPISARVRSSRQVAMMQQPPQPQPGMALPPPPQAGGGQPPQWGGIPPPMAQQYGAPPPQQPPAMWGQPPSQAHYGQAPPPQQYYAAPPVPAAPAAADEVRTLWIGDLQYGMDDNYVFGCFSNTGEVQNVKLIRDKNSGQLQGYGFVEFTSRAAAERVLQTYNGQMMPNVDLTFRLNWASAGEKRDDTPEYTIFVGDLAADVTDYLLQETFRVHYPSVKGAKVVTDKLTMRTKGYGFVKFGDPTEQARAMTEMNGMPCSSRPMRIGPAASRKNTGGVVQXREIFVGGLDPNVTEDTLKQVFSPYGEVVHVKIPVGKRCGFVQFVTRPSAEQALLMLQGALIGAQNVRLSWGRSLSNKQAQPQQESNQWGAAAGAGGYYGGYGQGYEAYGSGYAQPQDPNMYGYGAYGGYPNYQQQPAAQQQQQQQ

SEQ ID NO: 262837 - protein, 85 aa, Zea mays
  Clone ID: MRT4577_171319C.1.pep
TCSIKMLHFVFQFLFLLQISAAVDLMSLENTPFQITTHFVFSRYTVVTMRLVIIYIQLRSKSYVSRKAKTSYNLECSSIQLSGFF

SEQ ID NO: 262838 - protein, 72 aa, Zea mays
  Clone ID: MRT4577_17131C.1.pep
SFPFQNIYLINTRGNSPHRIYICLRAELLKWTRLLPSTKFYPGPQRAFKGKGFPQHIEFPAKGKIHLCMFFF

SEQ ID NO: 262839 - protein, 190 aa, Zea mays
  Clone ID: MRT4577_171320C.1.pep
VVSPSRHDAAAPAAAAAPAAADEVRTLWIGDLQYWMDENYVFGCFSNTGEVQNVKLIRDKNSGQLQGYGFVEFTSRAAAERVLQTYNGQMMPNVDLTFRLNWASAGEKRDDTPEYTIFVGDLAADVTDYLLQETFRVHYPSVKGAKVVTDKLTMRTKGYGFVKFGDPTEQARAMTEMNGMPCSSRPMRIG

SEQ ID NO: 262840 - protein, 44 aa, Zea mays
  Clone ID: MRT4577_171321C.1.pep
KKKGETPGKTLSLKIFQGLFFKKKGGPGKRLPLILETENKPGVV

SEQ ID NO: 262841 - protein, 284 aa, Zea mays
  unsure (1)..(284): unsure at all Xaa locations
  Clone ID: MRT4577_171322C.1.pep
SSLTPDGTYRAPLIGGVPSTGYVDSTYGYDTTGAHYAWYDGSAYTNAQQRPTTANYTPSSAYNSNGSSARATGDQRLQQGQLLLHTQTGCTRAPSLTTSXNSVKTGLMYGNTGYGSTGYGSTGYGSSGYGGSGYGSNGYDSRLYGRWGVSMDSRYNRPRGRGNGYYGFGNESQDGTIELNRGPRSGRFKNQKAFGHTVTIAVKGQTLPSSENKNASDVPDKAQFNLEDFPVQYDDAKFFVIKSYSEDDIHKSIKYNVXASTTNGNXKLDAAYQEAQAKGSSCPY

SEQ ID NO: 262842 - protein, 428 aa, Zea mays
  unsure (1)..(428): unsure at all Xaa locations
  Clone ID: MRT4577_171323C.1.pep
MMQQPPQPQPGMALPPPPQTGGGQPPQWGAIPPPMTQQYGAPPPQQPPAMWGQPPSQAHYGQAPPPQPYYAAPPVPAAPAAADEVRTLWIGDLQYWMDDNYVFGCFSNTGEVQNVKLIRDKNSGQLQGYGFVEFTSRAAAERVLQTYNGQMMPNVDLTFRLNWASAGEKRDDTPDYTIFVGDLAADVTDYLLQETFRVHYPSVKGAKVVTDKLTMRTKGYGFVKFGDPTEQAXXXXXXXXXPCSSRPMRIGPAASRXXAGGVVQERVPNSQGAQSENDPNNTTIFVGGLDPNVTEDVLKQAFSPYGEVIHVKIPVGKRCGFVQFVTRPSAEQALLMLQGALIGAQNVRLSWGRSLSNKQTQPQQESMQWGAGAPAGVGDYYGGYGQGYEAYGSGYAQPQDPNMYGYGAYVGYPNYQQQPAAQQPQQQQ

SEQ ID NO: 262843 - protein, 60 aa, Zea mays
  Clone ID: MRT4577_171324C.1.pep
GMVKKIPPKPMGGERFSGYPPLGRFAVRDQSQRVAVGVFKSVEKKDPPGPKVTKGAPKKK

SEQ ID NO: 262844 - protein, 80 aa, Zea mays
  Clone ID: MRT4577_171325C.1.pep
METLLISEERNHQLHHFSGRRKKALAASPQSTRSYHAGNCRAFHSGITVGILPSPPAQRVALTHSSPEPKTPEHQLHHGI

SEQ ID NO: 262845 - protein, 432 aa, Zea mays
  Clone ID: MRT4577_171326C.1.pep
MMQQPPPQQPQPGMAPPPPPQAAGGQPPQWGGIPPPMAQQYGAPPPQQPPAMWGQPPPQAHYGQAPTPQQYYAAPPVPVQAPAAPAAADEVRTLWIGDLQYWMDENYVFGCFSNTGEVQNVKLIRDKNSGQLQGYGFVEFTSRAAAERVLQTYNGQMMPNVDLTFRLNWASAGEKRDDTPEYTIFVGDLAADVTDYLLQETFRVHYPSVKGAKVVTDKLTMRTKGYGFVKFGDPTEQARAMTEMNGMPCSSRPMRIGPAASRKNTGGVVQERVPNSQGAQSENDPNNTTIFVGGLDPNVTEDTLKQVFSPYGEVVHVKIPVGKRCGFVQFVTRPSAEQALLMLQGALIGAQNVRLSWGRSLSNKQAQPQQESNQWGAAAGAGGYYGGYGQGYEAYGSGYAQPQDPNMYGYGAYGGYPNYQQQPAAQQQQQQQ

SEQ ID NO: 262846 - protein, 47 aa, Zea mays
  Clone ID: MRT4577_171327C.1.pep
QPTVMPLKKVTVRHALWCGYGVTLLPYHPREYASVREREAGGLTSTR

SEQ ID NO: 262847 - protein, 186 aa, Zea mays
  Clone ID: MRT4577_171328C.1.pep
METLLISEERNHQLHHFSGRRKKALAASPQSTRSYHAGNCRAFHSGITVGILPSPPAQRVALTHSSPEPKTPKHQLHHGKKRSRAISINLSTSPPSRPELWAGPGFCNSPPPSSLPIPKFSLHQKRSVSLEFPPADRSDDEEVPVHAKSAPSSPTAGSGVTFFSGTDATIATENLRRILNLKIEDN

SEQ ID NO: 262848 - protein, 81 aa, Zea mays
  Clone ID: MRT4577_171329C.1.pep
MALCRRMAAPFFLVLLIIVAAETATARVVVEEKHCLSQSHSFSGMCFSHTNCDNVCKTEKFTGGKCKMDGTSRKCFCLKFC

SEQ ID NO: 262849 - protein, 76 aa, Zea mays
  unsure (1)..(76): unsure at all Xaa locations
  Clone ID: MRT4577_17132C.1.pep
EVXLEEXRLDQSXXXNSVHXQHGARSPRQXFCDAXSLSXLLAVVXHDFSDLXKGXXXSVLQVXRSVIVXXICEXXV

SEQ ID NO: 262850 - protein, 86 aa, Zea mays
  unsure (1)..(86): unsure at all Xaa locations
  Clone ID: MRT4577_171330C.1.pep
ASAVSLAPRRLLVARAVAPWVLVFRWCAGAWLCRCPXGRVVGRVRAPPPPCLXRVSFPAAVAPCRAXVAPRFLPASRWPVVPLFSS

SEQ ID NO: 262851 - protein, 78 aa, Zea mays
  unsure (1)..(78): unsure at all Xaa locations
  Clone ID: MRT4577_171331C.1.pep
PGEDRHDHLQQGGXMXGYLSSVSPPPPPGPSTLSGFLTAPSMRSMLXFVVXVRSCVESSERYAYIYCLVLLCDKLPLR

SEQ ID NO: 262852 - protein, 99 aa, Zea mays
  unsure (1)..(99): unsure at all Xaa locations
  Clone ID: MRT4577_171332C.1.pep
XXHPASLTRPLTEARRGVAGTGCPSAEPADHGRFLLHESRKNNTDIKQVIFSREQQHRFDLPFRRILGQFIVETSTCSRPLSSHQYIILHPWKLWSEPT

SEQ ID NO: 262853 - protein, 49 aa, Zea mays
  unsure (1)..(49): unsure at all Xaa locations
  Clone ID: MRT4577_171333C.1.pep
QVPIFDGSAIEWVDAIQGXGINAAQNHDGESVEKMVXHVNKPVYVCKNY

SEQ ID NO: 262854 - protein, 77 aa, Zea mays
  Clone ID: MRT4577_171334C.1.pep
SPRCLSRPVGPWGRPCLRLVARGVLLALARPLWWRPWAPRRLVVWPPVSFARPPLRSAVCGRGLTLFGPSSCRLPCF

SEQ ID NO: 262855 - protein, 83 aa, Zea mays
  Clone ID: MRT4577_171335C.1.pep
RVSASRSARRPLAGGRARQRKPPERKKQRAVGPEAELLGGRGSAQRIDRPLLGERGKASLAVGQVTLLRGGGMRMAPGEGNRK

SEQ ID NO: 262856 - protein, 242 aa, Zea mays
  unsure (1)..(242): unsure at all Xaa locations
  Clone ID: MRT4577_171336C.1.pep
MSKPADQQPSDMQVDSSVAEEKPAIRFSINVLELMREAQMQHGLRQSDYTRYRRYCSARLRRLYKSLKFLHGRGKYNRRNITESTVTDVRXVSSADNMLYSMLLVFIFLFAVLYKPCLMFGVGLLQFVXLEKTYEAIXCGSRFLHVVFYMAERAWSHAMEKKTAGTNAKQRIYMLGRFRKAVKWASLFSQLCSVXGDSRTSLEAEAYASYMKGXXXFEQDKNIDAAMINXKNTRAIYEELGE

SEQ ID NO: 262857 - protein, 117 aa, Zea mays
  Clone ID: MRT4577_171337C.1.pep
RFLEALHYYSAIFDSLDATFPADSAQRMKVEQCLLAPEIRNVVACEGAERVARHERLDRWRRIMEGRGFEPVPLSPAAVAQSQVLLGLYGAGDGYRLTEDRGCLLLGWQDRATIAAS

SEQ ID NO: 262858 - protein, 176 aa, Zea mays
  Clone ID: MRT4577_171338C.1.pep
MSYYRLGDREEGDEELFETASSVSSADADSDSDDEGDRFPSAGAGADAAGAEGPCDQQDRRRPVPQPLRRMNSDSIYDMASMVSQQLPAKKGLSRHYEGKAQSFACMSEVRCLDDLRKKDSPYKQKKVKSSCKGYVALGGMMMANKPPSSGSCAGLGLAAANGFRTSPIQNGYQYQ

SEQ ID NO: 262859 - protein, 145 aa, Zea mays
  unsure (1)..(145): unsure at all Xaa locations
  Clone ID: MRT4577_171339C.1.pep
MRSPRAWAGSRMGRLACGAPYPGTACCARPAAPGDAWCVAPRVLSPAPLPGLPPSYLAGXLPGSFGCDTAGLSADPETFARNRXLGVIHCRWALLGALGCVFPELLARNGVXFGEALWFRAWSQIFXGAGLVFLVLPSLIHAQSI

SEQ ID NO: 262860 - protein, 67 aa, Zea mays
  Clone ID: MRT4577_17133C.1.pep
QRLCICKQCPRPTAGLNTIGSPSAAIWISSIVVRKTSSGEGTLHRLVPCRREDCVTQIISPLLPRRS

SEQ ID NO: 262861 - protein, 75 aa, Zea mays
  unsure (1)..(75): unsure at all Xaa locations
  Clone ID: MRT4577_171340C.1.pep
PPPPRGGAAGPPFFPRPPXPGGGKPPPLPPGPTSFPGPPGPFKPGXGPGGQFXAGAPPTGFPPPPPKTNRAGGVS

SEQ ID NO: 262862 - protein, 469 aa, Zea mays
  unsure (1)..(469): unsure at all Xaa locations
  Clone ID: MRT4577_171341C.1.pep
MASPDDESAQPPSKRPRRDAEPEVDAAEPSPRVVLNPAFCDLDFDVGGGGLRGSALHEGGFAYCWSGARAMVGARGGGRYCIGCRIVAEQPVEMDPTTSGERHLCRIGVSRGDDPVGALGESQHSFGFGGTGKFSHQRRFVNYGVKFGVGDTVVCAVDLDSKPMASIGFARNGEWLGIARHFDAGEKGLGLVDAPLRPMRWGSALFPHVLLKNVIVEMQFSREDGLLPVDGYEPWASAFSQRNSVFGPSFEQNKCEVMMMVGLPASGKSTWAEKWVKEHQEKRYILLGTNLVLEQMKVPGLLRKNNYGERFERLMDCATWIFNKLLTRAANTPRNFIIDQTNVYKNARIRKLRPFANYRKXELKSRAAKRFNEMGKEIPAEAVNEMTANFVLPLSKDMPHSKEPFDEVIFTELSRDEAQRTLDDMQRVLPRNVTPSYGNSGNQKHVMVPLLLFLKQCLVCFMSSWIRLV

SEQ ID NO: 262863 - protein, 145 aa, Zea mays
  unsure (1)..(145): unsure at all Xaa locations
  Clone ID: MRT4577_171342C.1.pep
GTIRYTSHRIEKYTVFSHQSDIINPNLCGWLLPPPRSPPRRPSSKTTPPPXRPPPAVPSSCRLHQARSNPAPPPAPPARPPVSQLPPPPPPPPSPARPSDPAVSRAPAAPRPAKRVRFAFTTSTMPPRIHYPSPXIPQPXLPPPR

SEQ ID NO: 262864 - protein, 91 aa, Zea mays
  Clone ID: MRT4577_171343C.1.pep
PIGQQPGVSPGRAIGTGPLEIKPGGQKRTPARRFRWVKPGVPPGAPPLFSAILFYLGFSILYYFFCMLAFLVWFFYIVRPCFFFFFFKNAG

SEQ ID NO: 262865 - protein, 63 aa, Zea mays
  Clone ID: MRT4577_171344C.1.pep
RGYDTLPFFHARFMRPFLGKKQAVAKNFWGTKKPPWRGGFKDLPKTIPLPRSLGTWRKGSTPT

SEQ ID NO: 262866 - protein, 66 aa, Zea mays
  unsure (1)..(66): unsure at all Xaa locations
  Clone ID: MRT4577_171345C.1.pep
RGRFSTVFSSFSLNRNCEPAWNACLLTAFYCMXYWSFVLNMXMYVCLRSHRERSGRRTRRTRRRSP

SEQ ID NO: 262867 - protein, 112 aa, Zea mays
  Clone ID: MRT4577_171346C.1.pep
PLGAPRAPPGPLGGAPGFPGAPGNGRPPHIPFYRVPRNQNKVVFPAPIWARVLCSTNPPCFFSPGGVGNIKPGGAGPPPMPHPQVLEGGGSPGSQCNGSAPAVLGAPESPGV

SEQ ID NO: 262868 - protein, 94 aa, Zea mays
  unsure (1)..(94): unsure at all Xaa locations
  Clone ID: MRT4577_171347C.1.pep
MEYRHVAMSNQIFMCTLNHVCLYALASHSTFLSHRMNVSTGAARLNPQGSFHYGSINVSQVYKMRNEPPVIINGKKQTTLSGXSYXPTRHSXRL

SEQ ID NO: 262869 - protein, 53 aa, Zea mays
  Clone ID: MRT4577_171348C.1.pep
MAAVAVLDSFIKRCTASKEDFGGQPSQKACFLLGIGFEFDIRGLLATHQSPHP

SEQ ID NO: 262870 - protein, 108 aa, Zea mays
  Clone ID: MRT4577_171349C.1.pep
KMPILKMSLLYPTCLAYVISGALSNTQCFRSFFHLKKSKIFPHLPNFSGPACQATPRICRSIQRSINVSCTPVSVCTPLPCVSPELFSSGVVRWITCSIFEFLAVVVP

SEQ ID NO: 262871 - protein, 250 aa, Zea mays
  unsure (1)..(250): unsure at all Xaa locations
  Clone ID: MRT4577_17134C.1.pep
IQKGNHGFLLPQFKVLEVPPIVQELVGAGVQEPPSQYVLPEQDRPAAAVSEMPEPIPIIDLSRLSAGSAEEFDKLRSALENWDLFLAVGHGMEPSFLAEAMKATREFFNLPLEEKQKYSNIVDGEKLGMDGYGNDMVVKENQVLDWNDRLNLLVEPEALRTYRLWPTQPPSFRDILSEYTVRCKAAANLVFRNMAKILNLQEEHLVNMIGENSITQAIFNYYPQCXRPDHVLGLRXHTDGSXITVTSPML

SEQ ID NO: 262872 - protein, 80 aa, Zea mays
  Clone ID: MRT4577_171350C.1.pep
RDLEKKKKKKKKKKKEKKIKKKKIIIRIKNNKQNKRGLRLWCVCREKAALFCQGVLGYGVGAVAFAYGVSGVAANLVVEW

SEQ ID NO: 262873 - protein, 61 aa, Zea mays
  Clone ID: MRT4577_171351C.1.pep
QNYEDFFYYIYIFLQSVADTKKPPEMISGNMTGVLCVYSALFVRFAWMVRPRNYFLMVTHS

SEQ ID NO: 262874 - protein, 61 aa, Zea mays
  unsure (1)..(61): unsure at all Xaa locations
  Clone ID: MRT4577_171352C.1.pep
PRVAYLLKKHQCXPCDIALTRMGHWAHDLATIPXTTKANNLHSNADSLNVNLTRDDLKQIV

SEQ ID NO: 262875 - protein, 123 aa, Zea mays
  unsure (1)..(123): unsure at all Xaa locations
  Clone ID: MRT4577_171353C.1.pep
HTNIDPPNSTIQIPGGGTNYVVXYTXDHQHNTNEITTXWHLIPKNTNFLKHTCTGTNHDNNTKNNMFFRSNPSILYILHYLRAEPXLFFAXYDXNWNLVHLXELAIDASHAHSSNVHNKMPNN

SEQ ID NO: 262876 - protein, 53 aa, Zea mays
  Clone ID: MRT4577_171354C.1.pep
TERQASPLFKSRVKSRMLAEQFFPPTSRFLLNLFFHFPIDIMGFHCNLWVSCM

SEQ ID NO: 262877 - protein, 328 aa, Zea mays
  Clone ID: MRT4577_171355C.1.pep
MAAASSPTFPPPATDVAAPGVPDLSIPYDLATRGQWQALFSHLSHPAHTPHPHHRLLLSALSALCLAKLRRFPDAAALLASLHPDPACPPPPFLIRLLHALLPLFLPDRPLALDRLYTLLSSVRARPNAGHPEWRRRDALVASVLAADHLAHREFDVALALLADIAGRDPGNPVLLSRLAYAHLQIGNLGAASAAFRHVESVAAASEDPTRHANLLARNRALECIVGKDYAAAVREYERCIEADPADAVALNNKALCLMYSRDLGDAIKVLEGALERVPTAALNETVVVNLCSMYELAFVNHGEVKRSLAEWIARVAPDDFDTSCTRM

SEQ ID NO: 262878 - protein, 55 aa, Zea mays
  Clone ID: MRT4577_171356C.1.pep
PLRRHHLVQTFVCHHGALPHLILVAPLPSVCSAVRAAVCFSRFTPILAARTSFAS

SEQ ID NO: 262879 - protein, 40 aa, Zea mays
  Clone ID: MRT4577_171357C.1.pep
PSFGFSGPNKTVGVHKLVGVVFLIVTGGSPVRFPSSPPPE

SEQ ID NO: 262880 - protein, 61 aa, Zea mays
  unsure (1)..(61): unsure at all Xaa locations
  Clone ID: MRT4577_171358C.1.pep
XCRXSXPPPPFFGKIXXKKLEXXXVXNXXXSXXIFXXGDXXVXKSGERXXNRVIVXRPPGV

SEQ ID NO: 262881 - protein, 105 aa, Zea mays
  Clone ID: MRT4577_171359C.1.pep
CPSKSPGSRLEVPCTSVANFDKHGGPVAVLISAVTRPGSALRNSVQSGNVRGQGVQPKRSPQGGGCASVHSDLPGGLYLHMQAAGSHVFADATSAGHLALYRAAI

SEQ ID NO: 262882 - protein, 239 aa, Zea mays
  Clone ID: MRT4577_17135C.1.pep
EASDDLEEEEEDSDSSDSDVDPELEKIIAQRERARNGGRRHRQEEKSLSHRYRSSSSKRKSKHTRSWRSDDTEDEEEEGRRGRDRKKRSSRSKKHERSDEASSDDSDSDRQRHRKSRKNRSSEASSDDSDSDRHRRRKGRKDRKRRRSHRRRDDSSDEVSGGEERRRQCHRKRSHHQRDASDCDKGGSDYADEKKRASRRRRHRQSESSGLDEDERRDPRGAKRSEEKNRTARGAKEEH

SEQ ID NO: 262883 - protein, 58 aa, Zea mays
  unsure (1)..(58): unsure at all Xaa locations
  Clone ID: MRT4577_171360C.1.pep
KYPDLEERSTPAQAPVVLGXVAPKKKAAPKFVEAPAESGEAAHGCSWGGNCKCDPCNC

SEQ ID NO: 262884 - protein, 85 aa, Zea mays
  Clone ID: MRT4577_171361C.1.pep
SASTFQPASMYSGYNFCQSQNAAGLELLFTRNQAEKILTLHYRCHGYMQRARLQWSSAARTEQGMSHPESTAPVAGEEASAELQK

SEQ ID NO: 262885 - protein, 43 aa, Zea mays
  Clone ID: MRT4577_171362C.1.pep
KSSTTEETSQLNHGKKSKGSSSIRFSLSYSIMKRHMSSKQFVI

SEQ ID NO: 262886 - protein, 151 aa, Zea mays
  unsure (1)..(151): unsure at all Xaa locations
  Clone ID: MRT4577_171363C.1.pep
MFLLYVVNCHVLVVTWLKKKKKKKKKKKKKKKKKKKKKKKKKKKKKKKKKTPPRXPPPPKPKKRPPKKTSRKKKNWEKKRPKNPPTPNGTPRPIKKTIRKNPKPMNGPPTNFVFKASKLPACSPKRKGQKKNLRLNNGPGSEKKKRKAGRF

SEQ ID NO: 262887 - protein, 41 aa, Zea mays
  Clone ID: MRT4577_171364C.1.pep
FPLEFLSVCVVYSRPFPPIVSLCRSPSRKMFLLPAFARWVN

SEQ ID NO: 262888 - protein, 51 aa, Zea mays
  Clone ID: MRT4577_171365C.1.pep
VTGSGLTYSLDGTPTHSGTSPSTLILIACSPIIILLLNTYFYNTRPIIDIS

SEQ ID NO: 262889 - protein, 96 aa, Zea mays
  unsure (1)..(96): unsure at all Xaa locations
  Clone ID: MRT4577_171366C.1.pep
GGRHILXLITQRAFLAYPRFGGSSDWPVSCFCCCFFFICERSICEGAGHFFAXPVLGFLGVLKVAICCCFPAWGHWQCSLSRVLALRPSFGRVVLG

SEQ ID NO: 262890 - protein, 114 aa, Zea mays
  Clone ID: MRT4577_171367C.1.pep
VVGTVKWLMKRLAVPEPGGRLGKVGGNWDGDGDGDGDGRRRPRPAGGSKRNESPRGTARQRRSGQSLRGNATGGASLDSIRAALSVLAARTPQRYTASSARATSAEAAQLPRAE

SEQ ID NO: 262891 - protein, 65 aa, Zea mays
  Clone ID: MRT4577_171368C.1.pep
PAGSATLTRHARVCTSKPYATSAAALVFSKKEYKDSNKRQAASDAPTNGTAKGYVMSETTERADA

SEQ ID NO: 262892 - protein, 79 aa, Zea mays
  unsure (1)..(79): unsure at all Xaa locations
  Clone ID: MRT4577_171369C.1.pep
RLIRAKPIHHSTPPRYECPSLLPYSPRPRSRSSSSSSSSSSSSRPRTTATCSTPRLCTTPPRXTTRTTPMCTTPMPPPS

SEQ ID NO: 262893 - protein, 57 aa, Zea mays
  Clone ID: MRT4577_17136C.1.pep
WQELILLIKKKGIDLFLRKTKSEIYTGCTSNQNNGGPTHKVPYRVGCLDLNTKDKQL

SEQ ID NO: 262894 - protein, 82 aa, Zea mays
  Clone ID: MRT4577_171370C.1.pep
LSSSLAPNKLRGLCPNTMNIGKVLDSEPSITLHYRLTPREAHHIREPPLTRTRNSGAHTKCCAGLVLPVPVVMLEPKQTPIL

SEQ ID NO: 262895 - protein, 321 aa, Zea mays
  unsure (1)..(321): unsure at all Xaa locations
  Clone ID: MRT4577_171371C.1.pep
MMRPTSTLAMVVPSLAVAILCILVRSASAEFWLDEFTTDGDVRRDYDRSGRQVASLVLDQRSGAGFNSTRKYLFGEFSVEMKLVGGNSAGTVTSFYXPSFPSIFLDESLLLYNSSSGDYIALSALVQLTSGEGDEHDEIDMEFMGNSSGSPTVLNTNVWANGDGKKEHQFYLWFDPAADFHKYKIVWNDKNIIFQVDDVTVRVFKRYDDLPYPDAKPMAVHATLWDGSYWATRKGEVKIDWSSAPFVVSYRDYTANACAVDGRNGGGSSSCXAGSGEWMDRQSDSTEWGTVRWAERNFMRYNYCQDGWRFPQGLPAECARH

SEQ ID NO: 262896 - protein, 71 aa, Zea mays
  unsure (1)..(71): unsure at all Xaa locations
  Clone ID: MRT4577_171372C.1.pep
DVYDNVAHALVKILRDEGRVEFYRPLTPSLTGVEPFALCNLYHYHTLKRLYRRATGRCPXGADLGPVATLL

SEQ ID NO: 262897 - protein, 290 aa, Zea mays
  unsure (1)..(290): unsure at all Xaa locations
  Clone ID: MRT4577_171373C.1.pep
MMRPTSTLAMVVPSLAVAILCILVRSASAEFWLDEFTTDGDVRRDYDRSGRQVASLVLDQRSGAGFNSTRKYLFGEFSVEMKLVGGNSAGTVTSFYLTSGEGDEHDEIDMEFMGNSSGSPTVLNTNVWANGDGKKEHQFYLWFDPAADFHKYKIVWNDKNIIFQVDDVTVRVFKRYDDLPYPDAKPMXVHATLWDGSYWATRKGEVKIDWSSAPFVVSYRDYTANACAVDGRNGGGSSSCPAGANEWMDRQSDDTDRLTVAWARRNCLQYNYCDDGWRFPQGFPGECARN

SEQ ID NO: 262898 - protein, 64 aa, Zea mays
  Clone ID: MRT4577_171374C.1.pep
RCQELHRWLGDTFTHSRLDYFYWLLAVLSVVNLVAYLVCAMWATAPASSQAEQPQPAMVADDKC

SEQ ID NO: 262899 - protein, 85 aa, Zea mays
  Clone ID: MRT4577_171375C.1.pep
IFSPWAPRFGTGQAGRDPSSLVSQKNCPCPNTLGSLWGCVFISLIFLASCGRNLNPYFSPPTPSDLFYPAWCKPVSLNPKCCGFF

SEQ ID NO: 262900 - protein, 84 aa, Zea mays
  Clone ID: MRT4577_171376C.1.pep
SGSSADDSAAAGSSAEAAASGSEDAGSASVSAAEVTQPPSPIQPPPDPDDDPHPLQSIDRLASLPPPPRGPHRDQQRQLAGRVG

SEQ ID NO: 262901 - protein, 127 aa, Zea mays
  Clone ID: MRT4577_171377C.1.pep
PAGDRGQSRRRIFNRGAPELNVTSMNILAIGTHAADAALTLGLCDCISGFPLRPLGSHTCALGPGPLHTDRRHLRASLSPPAFGGSITAPVPNGSAARVPRAVMATSRCSTKAAAFRNPELWGIRRH

SEQ ID NO: 262902 - protein, 93 aa, Zea mays
  Clone ID: MRT4577_171378C.1.pep
KFFRLFFLVKRRPIFKRIFGCTRATAQLGGGQIPPLTRRLTHTYLLATCLQVQDRDPLAKGKGRGPSTSGRPRGPWKRGAARGGRSCFALGGS

SEQ ID NO: 262903 - protein, 81 aa, Zea mays
  Clone ID: MRT4577_171379C.1.pep
TTTGGRCTYYYSCSPVRALGGDGGKRPCRRWRAKCAQHTSSRRFHAPEICRQGRRRWPSAHASALRLIRSPRIVTAAPART

SEQ ID NO: 262904 - protein, 71 aa, Zea mays
  Clone ID: MRT4577_17137C.1.pep
KGLKNDVLQAFIYILARCTIIVLTSELCSFLYLIFKSVVRSYNEFRKLCCNLVCSLFGGCKSHPFYKFYTF

SEQ ID NO: 262905 - protein, 80 aa, Zea mays
  Clone ID: MRT4577_171380C.1.pep
MELIKSRATVCALLLALLLLSHYDGGTTMVAEARVCMGKSQHHSFPCISDRLCSNECVKEDGGWTAGYCHLRYCRCQKAC

SEQ ID NO: 262906 - protein, 82 aa, Zea mays
  Clone ID: MRT4577_171381C.1.pep
MELIKSRATVCALLLALLLLSHYDGGTTTTMVAEARVCMGKSQHHSFPCISDRLCSNECVKEDGGWTAGYCHLRYCRCQKAC

SEQ ID NO: 262907 - protein, 61 aa, Zea mays
  Clone ID: MRT4577_171382C.1.pep
CTKKSIERPSTGELMALSSSSIHRRLILAAVVLLSELATASASPDTSCVPRWSISHNPLLS

SEQ ID NO: 262908 - protein, 109 aa, Zea mays
  Clone ID: MRT4577_171383C.1.pep
HEDDLTFMTKTTRLLRHHGCEKDEPRLRRPGRGGKAVGRGGRAGRNGREAWLFSFLFIFSFLFSLSFFYFLLFNFKLKHKLTDEKNSQQANSSIKRNMYSSMMQQSKLP

SEQ ID NO: 262909 - protein, 65 aa, Zea mays
  Clone ID: MRT4577_171384C.1.pep
KNPLLLESEKVMVHHCNWEALRAERNMQEKDIGSTEVTNKSKCKNIVIGRGCRRREQGRERRAPG

SEQ ID NO: 262910 - protein, 57 aa, Zea mays
  Clone ID: MRT4577_171385C.1.pep
QMYCSSLHFCDFIISLLLYYESKNTGRSYKDMMKSQKCSQMYCSSLLHCTNVKITSS

SEQ ID NO: 262911 - protein, 85 aa, Zea mays
  Clone ID: MRT4577_171386C.1.pep
KRLALPYFLPVFYWKVKYKFFFYRAWHLIYITSGVLYFKGKKARALFYCFVGKPTPLRKTFHLNPCCGVWLACRPEQKNSVLYLF

SEQ ID NO: 262912 - protein, 125 aa, Zea mays
  Clone ID: MRT4577_171387C.1.pep
PSYILRNSCELWRCFQPEKLINVHHGHRMMTAENGRRAGRVVEFVLLVDDDDFAAVLVRRRLRTAAVDDDPPPPGDVALGPALRAAGAGPRRRTEAAGATTGTATVNTARVAVLADVSSRGLLLQ

SEQ ID NO: 262913 - protein, 61 aa, Zea mays
  Clone ID: MRT4577_171388C.1.pep
MDYHHVLLAAAPFTNDVLLLTTLGVCGVTTLNESYKMLVTTFLYDAHGIENLLLPTKDYLY

SEQ ID NO: 262914 - protein, 55 aa, Zea mays
  Clone ID: MRT4577_171389C.1.pep
MSYSRHILLSLIPFSITILVDLLHRLHPTTLNCLFIQITAITHPLSRLLIHKFQT

SEQ ID NO: 262915 - protein, 51 aa, Zea mays
  Clone ID: MRT4577_17138C.1.pep
GRQKIELPYQLPQVKGGTQTVEQKFYTNPRGVLLVPNFRIPVTSPTGAEEV

SEQ ID NO: 262916 - protein, 212 aa, Zea mays
  Clone ID: MRT4577_171390C.1.pep
IYLLPSVCLSVSSFCRNIIQSGGPYYDVLLGRRDGLVANQSGANSGAGSPFEPIDSIIQKFAAVDLNTTDVVVLSGAHTIGRARCALFSNRLSNFSATESVDPTLDAGLAESLQSLCAGGDGNQTSALDVSTPNAFDNAYYKNLLLEKGLLSSDQGLFSSPEGVARTKALVETYSQDSEHFFCHFASSMIKMGNIPLTASDGEIRKNCRVAN

SEQ ID NO: 262917 - protein, 66 aa, Zea mays
  unsure (1)..(66): unsure at all Xaa locations
  Clone ID: MRT4577_171391C.1.pep
RLGFLTLAATPHGFAKMGLMGCLGLVGPHRPFRTPKFIIFVSDFLQLQSDEHCVHLNYCFXTVLSI

SEQ ID NO: 262918 - protein, 75 aa, Zea mays
  Clone ID: MRT4577_171392C.1.pep
KNPVRPHPSANPSVFKPQFSSSNFNTPSCGVFLTLGRDNNSFKNPLTTYFNFFNSKIILNPKTHYFPLFSLHNFF

SEQ ID NO: 262919 - protein, 83 aa, Zea mays
  Clone ID: MRT4577_171393C.1.pep
ADVQLDACYRSFVAVATDRLVLVVVFVKVIVLKYYYNSVDSCGFALLRAFPDYFNGSGRLVFDIGDKQQGKDRGQLYDSPRGP

SEQ ID NO: 262920 - protein, 72 aa, Zea mays
  Clone ID: MRT4577_171394C.1.pep
VGSAGHPQLIRRSRTGISTLTSSSFNAISSGPSACQPSSTCTPYAKCCLLFYSRFTRLMCPSLNSNYYLPNT

SEQ ID NO: 262921 - protein, 86 aa, Zea mays
  unsure (1)..(86): unsure at all Xaa locations
  Clone ID: MRT4577_171395C.1.pep
WGSFNWVHVSRSILILXWGGGISYLICVRQKAVHKLQLSCTXTCINYLISSFYYPQMFFPPKKKKKKNQKKKKKKKKKKYSALLPL

SEQ ID NO: 262922 - protein, 97 aa, Zea mays
  Clone ID: MRT4577_171396C.1.pep
SISLKEAGFVSLFNLKTSPFPKPPFRYGTFFLTGAPPVLYQESSCPENRLTLGVRPLFWCCFPCVSIKVYLGPWFSAPFDMPPLNANAWCFWFLYSA

SEQ ID NO: 262923 - protein, 63 aa, Zea mays
  unsure (1)..(63): unsure at all Xaa locations
  Clone ID: MRT4577_171397C.1.pep
LKYYKATPETFKFFRNTTKQXNQINIPPLLLTNTNXYINKQPFPLNIYNLPASKKIAFTLKIF

SEQ ID NO: 262924 - protein, 156 aa, Zea mays
  Clone ID: MRT4577_171398C.1.pep
MVARHGKADAGREERRSIVPCSQPDGKPHAATLMGTMRTRGGIMNSGSLISPISWCRRQLEYEQKPKNVLVLLTLKFLVALSVSKVVMNVSLNRAWNPGIVSREQEVVKFLNSELQDNAGYNEAGSLTMLRARFTRHNAYERKVGSSKILDYLVPA

SEQ ID NO: 262925 - protein, 73 aa, Zea mays
  Clone ID: MRT4577_171399C.1.pep
MSSGSESTTASRWPELATLRALARDAAEQLRLPRAGTSASASASSSPWRGREDHLHGHGKTAKVMHLLLWGPK

SEQ ID NO: 262926 - protein, 71 aa, Zea mays
  unsure (1)..(71): unsure at all Xaa locations
  Clone ID: MRT4577_17139C.1.pep
RSVRTITPLVMWITTIINRPSISPSQIGTILPLSIVHTMVKLFTNMSLWQITLKHTHTINAXEPFFSAILS

SEQ ID NO: 262927 - protein, 74 aa, Zea mays
  Clone ID: MRT4577_1713C.1.pep
QSAVGLRSHLCGESNRAPNARNNRSKVHSKCTDLMRRESHSYKDCMQRHKQSSLFWSYSYKRVNHRCIWSSTVL

SEQ ID NO: 262928 - protein, 85 aa, Zea mays
  Clone ID: MRT4577_171400C.1.pep
CTLGAHSDCPMGAMRLAALALRTDAASSSSYSGANRDGGGCVLLSVASSPDGVELRSAVDSPTATPSSPGPGCRPKLRLTRRRWG

SEQ ID NO: 262929 - protein, 128 aa, Zea mays
  Clone ID: MRT4577_171401C.1.pep
SPVMLNGDASTAERWRVVVKPSVSSLDSLLFHTRLPCFSVRALGMSTKTLAHDDQWIHGAEGTLVSNPPARDDPLDWTKPCAHPPCLGESPRLLHRGSSTTKARVDAGYFTLCLLLLGGRALGASCRI

SEQ ID NO: 262930 - protein, 73 aa, Zea mays
  Clone ID: MRT4577_171402C.1.pep
MSSGSESTTASRWLELATLRALARDAAEQLRLPRAGTSASASSSSSPWRGREDHLHGHGKTAKVMHLLLWGPK

SEQ ID NO: 262931 - protein, 73 aa, Zea mays
  Clone ID: MRT4577_171403C.1.pep
MSSGSESTTASRWPELATLRALARDAAEQLRLPRAGTSAASSSSSSPWRGREDHLHGHGKTAKVMHLLLWGPK

SEQ ID NO: 262932 - protein, 72 aa, Zea mays
  Clone ID: MRT4577_171404C.1.pep
MSSGSESTTASRWLELATLRALARDAAEQLRLPRAGTSASASSSSPWRGREDHLHGHGKTAKVMHLLLWGPK

SEQ ID NO: 262933 - protein, 136 aa, Zea mays
  Clone ID: MRT4577_171405C.1.pep
SYSWGFRKYPIPKIETIGTFRRLAAVTNARPGRNGGDEKWRAPRAGLVRGYGRSGAAAAAAMSSGSESTTASRWPELATLRALARDAAEQLRLPRAGTSASASASASSSPWRGREDHLHGHGKTAKVMHLLLWGPK

SEQ ID NO: 262934 - protein, 78 aa, Zea mays
  Clone ID: MRT4577_171406C.1.pep
CYTFSSYKEAFEGSTSKPCFLQGVVSKPQLSSYRAGLTMMGHRLSFIPSAAKVSSSSPLSRFGHEQAWLCVLGAAHAA

SEQ ID NO: 262935 - protein, 54 aa, Zea mays
  unsure (1)..(54): unsure at all Xaa locations
  Clone ID: MRT4577_171407C.1.pep
QNKTLTPPPPRLPHPSIPYHTIPXAGRLLSRHLRPVLRSPSCLCLIXXSVLPGD

SEQ ID NO: 262936 - protein, 108 aa, Zea mays
  Clone ID: MRT4577_171408C.1.pep
NSNYRAHKREVFSSRSPGDPDAGRPHTSSSLSSFLFPTIKMRRGGSARGGQSSLRYLFGSAEPPKPAVTAPVSAPHAAAGAPPAEKTPAAKPDGTSQIAADFTRQTHN

SEQ ID NO: 262937 - protein, 41 aa, Zea mays
  Clone ID: MRT4577_171409C.1.pep
HYKYTFNVDRTTTLECLTFTLRPTFNNTSSLVKGVLFPNRG

SEQ ID NO: 262938 - protein, 97 aa, Zea mays
  unsure (1)..(97): unsure at all Xaa locations
  Clone ID: MRT4577_17140C.1.pep
GAHAFDQAKLTITFYNKATKGWLFFHFSLFANATYSFXISQCSLAPSSIIHISSYHYLMFFNTHFAILYATTSDCTSVFINQFLNCSTILGTFNNTN

SEQ ID NO: 262939 - protein, 55 aa, Zea mays
  Clone ID: MRT4577_171410C.1.pep
AAFFFFFFFFFFFFFFFFFFFFFFFWGKGFWFDFWGSPRLSSYRQGCPRNRKGLI

SEQ ID NO: 262940 - protein, 70 aa, Zea mays
  Clone ID: MRT4577_171411C.1.pep
QHQQFLPFSQVAVVGPAAFLPQQHLLPFYLHPGPNVGPLLPLHQLVPFGPLTLPNPPVFFQHPIIGGALF

SEQ ID NO: 262941 - protein, 60 aa, Zea mays
  Clone ID: MRT4577_171412C.1.pep
GYFFKILSKKSFPGVVVNQGGWVRVFPLFLYIFFFLKKNFFLNVPPQFSINLLFPFEKKK

SEQ ID NO: 262942 - protein, 120 aa, Zea mays
  Clone ID: MRT4577_171413C.1.pep
FGSRSTSCPVLSAPPTAPSGRTPSSTSSPAMYTALAATRNAMPVTVAQMYYQPWNHETLLLNQRVALPGLLDELEGCYSYPFGFSRAKLHIYWDCTEYFSRGCGLWTWVVHHRMNTNWVC

SEQ ID NO: 262943 - protein, 104 aa, Zea mays
  Clone ID: MRT4577_171414C.1.pep
FLKKNTVSAGLKWRKILSNKNSLLPVQPSKDLAKFFPFKSKKLIIYVGEFFQHLFWGKTLISKHWEIVLIGGGMGPQKMVKGWVKLTLCCNRAIFLTKIAFFAG

SEQ ID NO: 262944 - protein, 105 aa, Zea mays
  Clone ID: MRT4577_171415C.1.pep
SLARVDHVTPISPTVPYGDSHVSYEPYELDALGSRRLSWMICAIAATAATAGRESRTTPAHPVSRLSSLASFPSFRSISSRSARTATSSSRSSRHRVDLMMLSPK

SEQ ID NO: 262945 - protein, 80 aa, Zea mays
  Clone ID: MRT4577_171416C.1.pep
MDGDRILDPLLSGAEQQIPPPSPVLIPPQPRPLQQRSATDTACSASPRPHPSVRSVLSIPDAKESGFISEFIGKVVQAGV

SEQ ID NO: 262946 - protein, 74 aa, Zea mays
  Clone ID: MRT4577_171417C.1.pep
DCLIHFCPPQVKIASNGPAGPGKTCAQRYNTDRVNKSWGRNNPLFSQKKGKRPPHIPRPKVIPTTPKGLPPRDP

SEQ ID NO: 262947 - protein, 212 aa, Zea mays
  unsure (1)..(212): unsure at all Xaa locations
  Clone ID: MRT4577_171419C.1.pep
QKTSKSNIWIRNITGQTRNSAGLAFGSEMSGGISDVRAEGVRIVNSVHGIRIKTAPGRGGYVKNVYVADVSFDNVSIAIRITGNYGEHPDDGYDRNALPTISNITIKDVVGVKIGVAGMLQGIPGDSFSGICLSNVSLSVRSTDPWNCSLVEGYSSSVSPEVCEQLRATPXPGQMCYGGNYPAAAAQPQPPQKSGASRLVSPFLSIDWFLRR

SEQ ID NO: 262948 - protein, 99 aa, Zea mays
  Clone ID: MRT4577_17141C.1.pep
PVFFPPLPPVVHHGVPTGAVVATRVLTGINTACTFLWDTLRNPVSFPATASLHFLGTDQRVDGRSAACRAMLGGASVRGWVTRSDDSEIDALLFVLVPN

SEQ ID NO: 262949 - protein, 41 aa, Zea mays
  unsure (1)..(41): unsure at all Xaa locations
  Clone ID: MRT4577_171420C.1.pep
QEATWFLDIFYYXRRLVEAPYSRNPEIVSPFGLKCRTSNTG

SEQ ID NO: 262950 - protein, 80 aa, Zea mays
  Clone ID: MRT4577_171421C.1.pep
FKLYYCGPINIGYSIRNWINQHSCGHTCMSTNTDAKHAQRDSKLKNSVSFSLTDTPHNTYVWQSAPPRLLLFNHHPKLDR

SEQ ID NO: 262951 - protein, 184 aa, Zea mays
  Clone ID: MRT4577_171423C.1.pep
MGIFTHIIKNGRNFSSKATDADTLNFTQVLQVLLVSATIVVAQTQWASGVWGMYCEDLTASVERPHRASVTDFGAVGDGATLNTKAFQNALFHLDSFAKKGGAQLFVPAGRWLTGSFSLISHLTLSLDKDAVILGSPDSSDWPVIDALPSYGRGRELPGKRHQSLIFGSNLTDVIITGANGTVD

SEQ ID NO: 262952 - protein, 38 aa, Zea mays
  Clone ID: MRT4577_171424C.1.pep
HWVPRGRPGYFISITKSTLPNPEKIKISQPTPNPILRC

SEQ ID NO: 262953 - protein, 72 aa, Zea mays
  Clone ID: MRT4577_171425C.1.pep
MKRADCCTARYKRRQSPSVKCKGDNLPSKAQILHRAMRPASRLSDILRSIAASTEFIWSKTLVTFSTKLKLQ

SEQ ID NO: 262954 - protein, 157 aa, Zea mays
  Clone ID: MRT4577_171426C.1.pep
ISYDIYKDFLTGDEMMSDSYPIKEVDDVIFEVDCDAIYPESVAGDDEPVEFNNVIYSFRLQPTTYDKKTYVSSLRPYLKIVKNRLKKIGKNPEYIANFEKNAQDFLKTKLLPNFDDLEFYTGESMDLDGMIAVMGYREDGTTPYFMFWKDGLKEMRI

SEQ ID NO: 262955 - protein, 103 aa, Zea mays
  Clone ID: MRT4577_171427C.1.pep
FYSLPIYCMQIWVCSKTRWLRFCQYGSIYCSLSLVENVTRVLLQVSFHLASEPEMLLDSLFWRQQPYLTPSFLFHNLYEQMNSVDAAIDRRISESRLAGRMAL

SEQ ID NO: 262956 - protein, 74 aa, Zea mays
  Clone ID: MRT4577_171428C.1.pep
TGLSARHSTCLRLTGSFREGTFADPCPCAAPARPRREIRRAKGPAEHSEDSTRPQAPSHVAMPTDTRTKRVCTR

SEQ ID NO: 262957 - protein, 84 aa, Zea mays
  Clone ID: MRT4577_171429C.1.pep
SLSRSSLGFTARFPVLVSPTPWVTSIRSSSQWPPVPGGLDPPYSYSWARASFLACFYPPALVLCAPQAAYSWPFSALGFALKIG

SEQ ID NO: 262958 - protein, 117 aa, Zea mays
  unsure (1)..(117): unsure at all Xaa locations
  Clone ID: MRT4577_17142C.1.pep
MQYARIXQKLGFPAKFKDFKIQNIVRSCDVXQNIVRSCDVKSPIRLEGLAYSHGAFSSYETELFSGLIYRMKRQKIMLLIFVSGKIVLTRAKVRDETYTAFENIYPVLTKFRKVRQC

SEQ ID NO: 262959 - protein, 77 aa, Zea mays
  Clone ID: MRT4577_171430C.1.pep
GKFTAGPWKHAHATFYRGRDGSGITAGSCGYKDTRTQGYGVHTVAVSTVLYGDGTACRWCYDVCCVNSPSGCKPTGA

SEQ ID NO: 262960 - protein, 144 aa, Zea mays
  Clone ID: MRT4577_171431C.1.pep
LFPPLLTLCPLGLVGSLLEKNFSPEPWAFLWEGWFFFPPKIFFCFSQRFFHPFRRGPFGVIQFPLAPPLTFFPFLGIFFWVAFSPQCFGPVGPLPMWAGLCPLALFPPAFPIPRVVPSPPLVLRSIPSPQSPFFFFSPPGGGLF

SEQ ID NO: 262961 - protein, 100 aa, Zea mays
  Clone ID: MRT4577_171432C.1.pep
LSSVLGPFSSAVPPPWQFFAPLLLPDLPLSFFVWFASRSYFSAHTALPVECCFPRVRPSVSSPSLCLRLSFLPSLLMLAMHPCSSGSLSSSLGLVLSLIA

SEQ ID NO: 262962 - protein, 64 aa, Zea mays
  unsure (1)..(64): unsure at all Xaa locations
  Clone ID: MRT4577_171433C.1.pep
STLTLPIPNSFTTNHFFFLTIXHITSPPTFTISVHHTSHTSQSPHSLPLTHTSTLNSNHTYNIN

SEQ ID NO: 262963 - protein, 82 aa, Zea mays
  unsure (1)..(82): unsure at all Xaa locations
  Clone ID: MRT4577_171434C.1.pep
LAPPTQLVWGPHGLCSLKASQNSAQMCRISLALGAQPSRESSSXSPNNHPPPNRGQPHPPYSPFKAQPVPLKPKRGYPPPLP

SEQ ID NO: 262964 - protein, 146 aa, Zea mays
  unsure (1)..(146): unsure at all Xaa locations
  Clone ID: MRT4577_171435C.1.pep
WCCWAVLPLPQXGASARRLVLARPEGSEWGSAGGQMASVIGAEVVAAXEVLVVDGITATIRAPGLRLFGFDSLSSPLEWGHGRGPCCSSVRPEAIAAAVWPPRAEVVVAAAGAGVGEPPGVSSPRRPSNVGVVRTCGGETGVPFVM

SEQ ID NO: 262965 - protein, 100 aa, Zea mays
  unsure (1)..(100): unsure at all Xaa locations
  Clone ID: MRT4577_171436C.1.pep
RAGSASRSPRRRAGCGACGETEEGREWPREWSRGRGGSREGGWHQVARKAAPTTGGEENPRRYRPGTGALRESRXDQKSADLLIRKLPCQRHARELARYT

SEQ ID NO: 262966 - protein, 124 aa, Zea mays
  Clone ID: MRT4577_171437C.1.pep
LSVSVGLDPCAAHVVWPSGFGLLPFLVQAISPGVLRFSQWVVVSLLAFSWPSGLSVLVVSVGSLPASAGWLAPGSLCRVLFASSPVARGCRVGFPSFGAVPPLWPYVGLSLLALVQASIRRVSV

SEQ ID NO: 262967 - protein, 361 aa, Zea mays
  Clone ID: MRT4577_171438C.1.pep
MWMISAGRMEQWAPTAAMVATNVVIAVMTALIKQALSLGMNRLVLITFRQMVATLFLGPIAYFKERRMRPKFTSEIFVYMFLSGILGPVLLQYTLFVGLDYTTATFAATFGNMLPVVTFLISLAFRFEALEVKSKSGSAKISGTLISLGGAMMLTFYKGSALTQTTTAATSSPASSGGGHIRQQAGEHGTVRWVLGSVSMLANVVGFALWLLLQRKFTRKYPAVYSATAFMSLFSFVQAGALALSIQRTSLAVWALRGTVEIATVVYCGVVASGIGYLLLTYCVEKRGPVFTAAFSPLAQIFVAGIDLFILHEPLYLGSVLGSVLVILGLYLVLWGKREEAAAAAASAKPVQAEVEQQEKV

SEQ ID NO: 262968 - protein, 124 aa, Zea mays
  Clone ID: MRT4577_171439C.1.pep
GPHRPQCPPPSSSPPPPRAADEEYVSETKEVIGKVRSTIGLDKSDPSVADAVAELRDLSNSWVAKYRREKSLLGRPSFREMYSALNAVSGHYISFGPTAPIPAKRRARILEEMDTAEKALQRGR

SEQ ID NO: 262969 - protein, 104 aa, Zea mays
  Clone ID: MRT4577_17143C.1.pep
RLARALRSQGLCGTSYRSLAGDAPLTEELNREARSRPLPLGCHDVAPRAMPLFHQTMKEHGKTSFTWFGPVPRVTITKPELVREVLSNKFGHYKKLKLRKLQRM

SEQ ID NO: 262970 - protein, 114 aa, Zea mays
  unsure (1)..(114): unsure at all Xaa locations
  Clone ID: MRT4577_171440C.1.pep
MDETPTSSGRSEATSCEPSWWPPDFLEKIESVALAREQEVLAEKESRSSLSNSRSSSXKASQLLWSTGTYSGFIPXXFYSIIPDKKLKEXFPTIPSLTDLQSLEADGLSLEILL

SEQ ID NO: 262971 - protein, 168 aa, Zea mays
  unsure (1)..(168): unsure at all Xaa locations
  Clone ID: MRT4577_171441C.1.pep
GPHRPQCPPPSSSPPPPPPXRRSSETSCRSEWRRRQHSXRRDVLAAGTGLGAALLLALGPARAADEEYVSETKEVIGKVRSTIGLDKSDPSVADAVAELRDLSNSWVAKYRREKSLLGRPSFREMYSALNAVSGHYISFGPTAPIPAKRRARILEEMDTAEKALQRGR

SEQ ID NO: 262972 - protein, 103 aa, Zea mays
  Clone ID: MRT4577_171442C.1.pep
KAQKGPVFTGSFKGTLFFKPPSKYHVGGGVFAPSSKVRGPLWADRKLFKVGPFSGLDPVFGSYESLACVRGPAPQPVKGHFCFKVPSDGDADLNPGLGVSFAD

SEQ ID NO: 262973 - protein, 170 aa, Zea mays
  Clone ID: MRT4577_171443C.1.pep
MRATSSPVAAAVLAAPSSAAAVVVKPLPRGAANGGSTGRRDVLAGTGLGAALLLALGPVCGAARAADEEYVSETKEVIGKVRSTINLDKSDPSVADAVAELRELSNSWVAKYRREKSLLGRPSFREMYSALNAVSGHYISFGPTAPIPAKRRARILEEMDTAEKALLRGR

SEQ ID NO: 262974 - protein, 68 aa, Zea mays
  Clone ID: MRT4577_171444C.1.pep
EQQEQQPKLELHHGARGGQILVAKRQAAGSPSTGASWTATAVGCIALGQWPLVAIRRLMPTRRSGAAS

SEQ ID NO: 262975 - protein, 47 aa, Zea mays
  Clone ID: MRT4577_171445C.1.pep
GTCPQHVTCWILMLKSTHGTAKGKSLIYNKQLHRHFGRHKSTRFRHG

SEQ ID NO: 262976 - protein, 88 aa, Zea mays
  Clone ID: MRT4577_171446C.1.pep
YKLRTDVLPVPKTPADARMSKITSLCWDTAPRCTLFFYVRPAWTDISRINILPSHREYTSSSNRRDGLSLPNYILLVNAFAEDYFSQF

SEQ ID NO: 262977 - protein, 245 aa, Zea mays
  Clone ID: MRT4577_171447C.1.pep
MGGASKLLSSFLLTSSPLRLRPATAAAAALFLSPPAAASRRLFLLSLPSPHRTLYTSSASASLPHGSSSACPPPPLRAPFPEWSRLVDRLAATGYGSGVPFSADDLALVSGCVLSDGEQAAVSTCLAFARDRPDLLSSLQRKDVEVLVGNVAPSLFKDGEASGQRLRRYLAGEETDVTVSERAGTVDIVRYLLSYTYGSSDICSEDKELTDLAVRNIMVELVSFSALSQSSTFVELTPDQICSSQ

SEQ ID NO: 262978 - protein, 63 aa, Zea mays
  Clone ID: MRT4577_171448C.1.pep
FRRAVKALVVGGCGRVGYHFLRQHDGSFVTVHTAALIFLILVSFMLNRRSASAASGVMGTCES

SEQ ID NO: 262979 - protein, 54 aa, Zea mays
  Clone ID: MRT4577_171449C.1.pep
VRRGSHRRCYVYSLEGDSVHCSLCFERWDPGLISRNQFKGSCLLSRYNGCRAIF

SEQ ID NO: 262980 - protein, 87 aa, Zea mays
  Clone ID: MRT4577_17144C.1.pep
MEQGTVGDRGIPWHGQCTGKGSGSRAATLKVRELSNSKVFQEIRQPKLTDPIIVESLQASPQTLDFGVGCPHGGTSYTQIPLEIFHQ

SEQ ID NO: 262981 - protein, 55 aa, Zea mays
  Clone ID: MRT4577_171450C.1.pep
ASTRSKSLHDKSHLSSRQVQYDPQNHKHCSHYCKLPHIHCPRMNPSIFCIPQRHL

SEQ ID NO: 262982 - protein, 86 aa, Zea mays
  Clone ID: MRT4577_171451C.1.pep
LGNDGLNLSRTHHRILQAPNPGGPVLDISLHSAKSGGYELIPHTTMGFLAGPFCPCCVGRHPTAGAGGPRRGLAPVIGEKGIHPVV

SEQ ID NO: 262983 - protein, 70 aa, Zea mays
  Clone ID: MRT4577_171452C.1.pep
SLPVSRLLSLLDHLFQWWLVAPQRPWPMHQMLTAVSPLAMVKAKCYLPHGPLVVWSGACCALCSEIAAAE

SEQ ID NO: 262984 - protein, 128 aa, Zea mays
  unsure (1)..(128): unsure at all Xaa locations
  Clone ID: MRT4577_171453C.1.pep
SLFLSLCXEKSLPPWGEVGGRVIXKVQQVXKFPCLLQXWSRSEEEREGALRSAPDMNAAPAEPAGAAVSQQRSPSSPPCSSPSASSSSPRSHTAPPPSLSRYDHPPGAYCPPPSAMDTHAHPPSVAPP

SEQ ID NO: 262985 - protein, 74 aa, Zea mays
  Clone ID: MRT4577_171454C.1.pep
EGPQHVTSVRGVWAGKVNATAPPHAVCFFVPTFEFPTLSSWFLCRGDDSEMQDFSVSKHQVSNETVTKKNIKYW

SEQ ID NO: 262986 - protein, 90 aa, Zea mays
  Clone ID: MRT4577_171455C.1.pep
SLLIFPVDANKTGAAQEAINGIRRASKAMTEQEARQILGISENSTWEEIVQKYDTMFERNNKNGSFYLQSKVHRAKECLEPLYQKPDVLN

SEQ ID NO: 262987 - protein, 48 aa, Zea mays
  Clone ID: MRT4577_171456C.1.pep
LDVYDWSIPDDLLAKFSEIKQDRLLRGNFIVNPESVYKTHEELWDGEL

SEQ ID NO: 262988 - protein, 152 aa, Zea mays
  Clone ID: MRT4577_171457C.1.pep
GSTDQAKAEHHQQGSSRTPNKGAAATTSLRESEPVAVASAFAIRRRCPRARLPPLRRRRRRRGKRINCHDANKTGAAQEAINGIRRASKAMTEQEARQILGISENSTWEEIVQKYDTMFERNNKNGSFYLQSKVHRAKECLEPLYQKPDVLN

SEQ ID NO: 262989 - protein, 40 aa, Zea mays
  Clone ID: MRT4577_171458C.1.pep
TCHPRQCDRRRRESDPRDAGRVHSMCSVYFVCNWLGCELI

SEQ ID NO: 262990 - protein, 113 aa, Zea mays
  Clone ID: MRT4577_171459C.1.pep
MAGRLLANLIVMGGTVVGRAMLQAYRQAIVNANKTGAAQEAINGIRRASKAMTEQEARQILGISENSTWEEIVQKYDTMFERNNKNGSFYLQSKVHRAKECLEPLYQKPDVLN

SEQ ID NO: 262991 - protein, 130 aa, Zea mays
  unsure (1)..(130): unsure at all Xaa locations
  Clone ID: MRT4577_17145C.1.pep
QAATSTRASVFQQAICQXQLQSVTHQPIQSLSSQQLHQIVPAIQQVEVMNPMAFRHTQXLAYHTLAVAAGTCMSMHHQXCNSFLPAIQSTEPMERPXAVIMANITCLHSSXPLAGGNARAFTHQQLLWQK

SEQ ID NO: 262992 - protein, 55 aa, Zea mays
  unsure (1)..(55): unsure at all Xaa locations
  Clone ID: MRT4577_171460C.1.pep
PGPPPRATPPPPPPPYNKNGRKWLNKNNHLGRLITTLTAAYGGGGGGGXXNITCY

SEQ ID NO: 262993 - protein, 179 aa, Zea mays
  unsure (1)..(179): unsure at all Xaa locations
  Clone ID: MRT4577_171461C.1.pep
MPEKKHKWLILYHLLYLSILNFTSFIIAGDEFVYSSFREANLSLDGTAXIKPDGLLELTNGSFNLKGHAFYPTPLHFRKSSGENVKSFSVTFIFSILSAYPDKSADGMTFLVTTNKNFSDAFPAQYLGLLNDQNNGNPNNHIFAVELDTIQNSEFEDINDNHIGININGIHSRPASRDP

SEQ ID NO: 262994 - protein, 105 aa, Zea mays
  Clone ID: MRT4577_171462C.1.pep
VEDAGCKGLVAKRKIKQEKKDEWMDNGSCFLFYVWTRCFCRRQVTDKDNNGMKKTWFCGMKLHQVKKIKGAGSRVAGASVDKEHEVAGVVDGTLEQALHGKAWQC

SEQ ID NO: 262995 - protein, 179 aa, Zea mays
  unsure (1)..(179): unsure at all Xaa locations
  Clone ID: MRT4577_171463C.1.pep
SEIQRRRYVRDLTPREPPLRTPDGPHNHGEEDTMEPMDDNVTLAPTAREGXHVFGDTHILASLNDTFIHITDLAGRKTRVQISGVMXAKADRDEATAYAAMXLVVKTATQRXKELGITELHIKLRAAGXYESKSPXPGAQSDLRILALSGMKIGRXIEDATPVPTDSTLRKGVTRLRKL

SEQ ID NO: 262996 - protein, 56 aa, Zea mays
  Clone ID: MRT4577_171464C.1.pep
HRRLFYLGRNDFFIVSKPRSIKVDKLINIYRYFHVIHIILTVILHFDDHLHNLYAF

SEQ ID NO: 262997 - protein, 54 aa, Zea mays
  Clone ID: MRT4577_171465C.1.pep
GPTSSGGKISTSLRAPISRKNIGPSPMEAARNGPKNHPLDGHFPAGHGQPSKSC

SEQ ID NO: 262998 - protein, 108 aa, Zea mays
  unsure (1)..(108): unsure at all Xaa locations
  Clone ID: MRT4577_171466C.1.pep
FELLADLPWQRXFKKGLLDLTAAKESLDQDHYGLXKVTQRTIEYLAAAELKPAYRGPVLGPGGPTGAGKTSLSCSIGTATNSKSIXKIYLERVHDEAPYVRLSVQSIH

SEQ ID NO: 262999 - protein, 79 aa, Zea mays
  Clone ID: MRT4577_171467C.1.pep
MAGATAEEPLVGDGAGASAASATVAEAATRTAQAIFFISIPGCGGLLATVETAAAGWDGGEEVSLCFEGGHVLGKESSV

SEQ ID NO: 263000 - protein, 133 aa, Zea mays
  unsure (1)..(133): unsure at all Xaa locations
  Clone ID: MRT4577_171468C.1.pep
MSASVLIAHGGGRVTPSSSFWLLTLPFHDIVDLRLDNSKKXATTXTGRHGFLAFHAVGEGTRSDVGSLLLERLSVDYGMKSKLGFTVHPSPQVATSIDEPYNSGLYTHSLLEHTDVGILLDNEAIYDICRRSL

SEQ ID NO: 263001 - protein, 65 aa, Zea mays
  unsure (1)..(65): unsure at all Xaa locations
  Clone ID: MRT4577_171469C.1.pep
MLTMEIERHIHQLFVRCIXRSGHRXIDFREDPALPVLDDLIAMEKNHGTIDFLFGDCEXDNYLNY

SEQ ID NO: 263002 - protein, 786 aa, Zea mays
  unsure (1)..(786): unsure at all Xaa locations
  Clone ID: MRT4577_17146C.1.pep
HADARAPDCFXETKLITVHSCAGRLGDARKVFEGMACRDLLAWSAMIGAYAIRGLYEEVVTLAVAMVREGVIPDRFLITRILQACAYTEDLELGTAMHSMAIRRGFMAEGARDVPVGNSVLAMYVKCGELGRARAAFDMMGQRDLCTWNSMIFGCCRSNEWEEARRLLDDMRRQGTEPGLVTWNTLVSSYARSGELDVAMEMLEQMEESGVAPDVVTWTSLVSGFVHGDRGGEALRCFARMRLAGVEPNGMTIASAISACASLRLLSQGMELHCHAVKVGSVNNVLSGNSLVDMYAKCGEIIAAKRVFDEIPEKDIFSWNSMVAGYAHAGYCGKAYELFCEMESLGVRRNVITWNIMISGYIRNGDDERAFELFQMMESCGVKRDTASWNALIAGSVHNGHSDRALRIFWQMQSLLVRPDFITILSIIPAFANLAGFWKVREIHACIYHNNLEMDGKIANALINAYSKSGDLAGACAVFDRHSSRNIISWNCIILAHLLHGSPSEALDRFCEMKQEGVLPDHTTLTAVIKAYGLQGKVSEAKRIFHNMTHDHNITPDLDHYTAIVDLLGRSGSLQEAYEFIDNMPLIPNLAVWEALLTAATIHGNARLANLTARELSSLDPSDPRIQRLVFNYWGLTGKSVDVPLMTVYNGGRELEDVDSCSVEIKNNVYLFSTGDNLALESTVAELKLIMIQIRMSLLNISNETNAEEEKEELSGIHCEKLAIAFAISNSPPFRSIRIIKTLRMCSHCHIFAKLVSEKYERQILIKDSNCLHKFEDGKCSCEGYW

SEQ ID NO: 263003 - protein, 61 aa, Zea mays
  Clone ID: MRT4577_171470C.1.pep
PSRKKKKKKKKKKKKKKKKKKKKMEEKTKKRKIKINIKKKKGAAPQGGQFIPPVSAKFKFF

SEQ ID NO: 263004 - protein, 96 aa, Zea mays
  Clone ID: MRT4577_171471C.1.pep
GEACVLLNDGCHYLRGLGLITATATTAAAKPTSTCPAAGKANAAGDTSCDPAKDYPGEACVLLNDGCHYLRGLGLDTATATTAAAKPTSTCPAAGK

SEQ ID NO: 263005 - protein, 54 aa, Zea mays
  Clone ID: MRT4577_171472C.1.pep
MEMKKIACAVLVAASATVALAAEAPAPSPTSGSSAVRAAMVGAAVGSFFAYYIH

SEQ ID NO: 263006 - protein, 162 aa, Zea mays
  Clone ID: MRT4577_171473C.1.pep
HVTQVDTRTDGQRSKRTVKALHSHREKQSELVHASAMPGSSRAGQRIQVCWCALVYSLRLRLVVRRLSECSTRRRSSTAAPTMAGATAEEPLVGDGAGASAASATVAEAATRTAQAIFFISIPGCGGLLATVETAAAGWDGGEEVSLCSDDRLPGLVRTPGR

SEQ ID NO: 263007 - protein, 640 aa, Zea mays
  unsure (1)..(640): unsure at all Xaa locations
  Clone ID: MRT4577_171474C.1.pep
MRRLISDRRDGGGGMGWRRGSLSLLRRSLAWVVRTSWKNDELTTDALPIHGYEHYKAKDYALAHAPFSGSSNAGGQWAAGDEPLYYIVSPKDIVVAKPRDAEDHIAWLLQHGCHEKALAAVEAGQGRTELLDEVGSRYLDHLIIERKYAEAAQRCPKLLRGSPSAERWXFHFAHLRQLPVLVPYIPTENPQLSDTAYEVALVALTTNPSFHELLLTTIKNWPPTLYSASPVISAIEPQLNSSSMADSLKESLAELYVINGQYEKALSLYAELLKPEVFEFIEKYNLHDAIHDKIVNLMIVDNKRTVHLLIQHRDIIPPYEVVEQLLHTSKKCDKRYLLHLYLHALFEIDIHAGKDFHDMQVELYADYETRMLLPFLRTSQHYRLDKAYEIFAQKELVREQVFVLGRMGNAKEALSTIINKLEDMQEAVEFVTEQHDDELWEELIRQCLQKPEMVGNLLEHTVGNLDPLYIVSLVPDGLEIPRLRDRLVKIVTDYRTETSLRNGCNDILKADCVNLLVKYYHEARRGVYMVSMDEEVHGNRADDGSSRGHERSSSVRALDIKSRTRCGARCCLCFDPLPIQDISVIVFYCCHAYHLSCLEGGLDSMRSNSGQDSDGGMDDEDGSPSGQSRMRCVLCTTAAS

SEQ ID NO: 263008 - protein, 74 aa, Zea mays
  Clone ID: MRT4577_171475C.1.pep
RSQSRLQDLHHGAANQQNAAHQKAQDNPNQEAEDRRQIMLAQILSSEAGKRLSGLALVKPDKPGGGEDVLLKAA

SEQ ID NO: 263009 - protein, 98 aa, Zea mays
  Clone ID: MRT4577_171476C.1.pep
GMDRREETQLDRNKVRRDSRPVVLSPGVKRPSKCLMKRVHLSCLIKTKHFRGPGVIVKRCDMRKSALHVSAPSLSGMAYPASLASCADACFEQRMGRR

SEQ ID NO: 263010 - protein, 274 aa, Zea mays
  unsure (1)..(274): unsure at all Xaa locations
  Clone ID: MRT4577_171477C.1.pep
MPLRLDIKRKLAQRSERVKSVDLHPTEPWILSSLYSGSVCVWNYQTQTMVKSFEVTDLPVRSAKFIARKQWVVAGADDMFIRVYNYNTMDKVKVFEAHTDYIRCVAVHPTQPFVISSSDDMLIKLWDWDKGWVCTQIFEGHSHYVMQVTFNPKDTNTFASASLDRTIKIWSLXGLNXPNFTLDGHSKGVNCVDYFTGGDRPYLITGSDDQTAKVWDYQTKSCVQTLEGHAHNVSAVCFHPELPIIITGSEDGTVRMWHSTTYRLENTLNYGLER

SEQ ID NO: 263011 - protein, 118 aa, Zea mays
  Clone ID: MRT4577_171478C.1.pep
ARFFQGGKVAPDGTTLNPLFGGGICSPRFSIQTPLSLGPPKVGGCPFDFKIGNFSGGVFFSPPGDCKKRQKRGEKDFAFQKGFSFRVGGGKPLKWEGGKSLFVKPVVKEKTLLNKFFP

SEQ ID NO: 263012 - protein, 81 aa, Zea mays
  Clone ID: MRT4577_171479C.1.pep
RQAYIPFYRIPEKQNKVVIPARMWARVLCSTNQPCFLTHQDVEGAGLQEEEPQMPLVEGENALVRNPSMCNGNGHLCSGAA

SEQ ID NO: 263013 - protein, 345 aa, Zea mays
  Clone ID: MRT4577_17147C.1.pep
MAVERDIFGISGPTYLKSIDWNCEHNRRSVAASLVQAVYVLERDRQLNHQSFEALAPAWWEFLHFELIRKLIDDADMSIFGAIFEFNPPREEASGANAPRFVIAFRGTITEKDTISRDLSLDLHLVQNGLHRTSRFNIAMQAVQNVASVFPGSTIWLAGHSLGAGLAILTGRNMVKKGVLLESFLFNPPFVAAPVERIRDERVKHGFRIARSVITAGLTIAMKAKTEGSSQRSVAEESFSILSSWTPYLFVNPGDHICSEYIGYFQHRKNMEDLGAGFIEKLATQNSIGDLFFKALGWESEPLHLLPSADLIVNVSPSSDFKYAHGISQWWQPELNLQCSKYRYS

SEQ ID NO: 263014 - protein, 48 aa, Zea mays
  Clone ID: MRT4577_171480C.1.pep
MGKQATALALLCAVLLAATADAAAAASCNPSALSACAPALFGRAVTLG

SEQ ID NO: 263015 - protein, 71 aa, Zea mays
  unsure (1)..(71): unsure at all Xaa locations
  Clone ID: MRT4577_171481C.1.pep
KTASHPKSKRGHSVIMNLXXXWPYWDCLSTLWRRIALIRYDLRMLVYLIIVYKNAHRAHDHKDAIPMLCST

SEQ ID NO: 263016 - protein, 100 aa, Zea mays
  Clone ID: MRT4577_171482C.1.pep
RTARRAPVAALRGVTARLERLLLLLQRAPVDHTPNCICLLVYSTSSSPNSPSVLLPPPSLHAAHVTVDNLNVHLILRTWQLGRWICAMVMYGMIKAVVFV

SEQ ID NO: 263017 - protein, 249 aa, Zea mays
  unsure (1)..(249): unsure at all Xaa locations
  Clone ID: MRT4577_171483C.1.pep
MAGDDCDSSKPKPPPPAAEGAGEVVEGPVAADKALHALGFEFTRIGAREVAGRLPVTDTCCQPFGVLNGGVSALVAESTASVGAFMASGYRRVAGVQLSINHLRPARLGDVVRAQAVPVQLGRSIQVWEVQIWRADPSTGECRDLVSTARVTMLXNQPIKTRGDVDSPSKHQEIRKAVERERERNKINRFHLITPPSTRNTKPTSSPDISLSNYSMLKDERRTCVSFLIGQLCQCPSVLSKTIDYYPVF

SEQ ID NO: 263018 - protein, 186 aa, Zea mays
  Clone ID: MRT4577_171484C.1.pep
MAGDDCDSSKPKPPPPAAEGAGEVVEGPVAADKALHALGFEFTRIGAREVAGRLPVTDTCCQPFGVLNGGVSALVAESTASVGAFMASGYRRVAGVQLSINHLRPARLGDVVRAQAVPVQLGRSIQVSQHVWFGLPDQSYIVISSMRPIQMLLACSSGRCGRSRYGERTLPQGSAEIWCQQPELPC

SEQ ID NO: 263019 - protein, 56 aa, Zea mays
  Clone ID: MRT4577_171485C.1.pep
NITQHEKLLVRIFVISIKVAIALESAWMFIYSIDSCAKIIIQLNDFKVSLYKIRRI

SEQ ID NO: 263020 - protein, 49 aa, Zea mays
  Clone ID: MRT4577_171486C.1.pep
VGVCHCSRFQLECEDDVFAILPSLIWYAYNTLINFCKHYHLQARRHIHL

SEQ ID NO: 263021 - protein, 109 aa, Zea mays
  Clone ID: MRT4577_171487C.1.pep
GLGSPQNPIGRGVVYAYHAGGVVRFFEGWGPPQVGALDGPRSDVVWKAGVQPGPAPGLSNCLVGAPPAPGFFFPGFLPNRLWFPGRGSPPPVWGACLPPPRRPGGSVGG

SEQ ID NO: 263022 - protein, 668 aa, Zea mays
  Clone ID: MRT4577_171488C.1.pep
MEKISVAVRFRPPNLVAANTSPASSGGGGDREWRIDDTRVSLLHRAAGPITGASFAFDHVFDGAANNERIYGTVVRELIGAVVGGFNGTAFAYGQTSSGKTFTMNGSDADPGIIPRAVRDVFDTVRQADDREFLIRVSYMEIYNEEINDLLTLEGQKLKIHESLDRGVYVSGLREEIVNSAEQVFELLQLGEANRHFGETNMNMRSSRSHTIFRMVIESSGKDQTDGGDAIRVSVLNLVDLAGSERIIKTGAEGVRLNEGKYINKSLMILGNVINKLSENGKQRGHIPYRDSKLTRILQPALGGNAKTSIICTAAPEEIHIEETRGTLQFASRAKCVSNCAQVNEILTDAALLGRQKLEIEELRKKLQGSHSEGLEQVVLKLRNDMHKSELERDRLAMELEDERKLRMTLEQHLTEQQKLEAISSDHFTDSIQLDLLKTPDSKSVPDGFVACRSRYSQDVEFSPIPENLDNIAEEDLWTRLNKGCVTDLDMLEMTPNLKRESSFLQEKSSAAPLEEPTNAICQRLAKECIYDQQQLEESKARCANLEKDCDVLRDENLSLQQELSESKLEADSLVAEKQAQLDDLRMRCVALERDLSSSRQEAHRLATEKQELAGQLGTERQKMDELKQDIRVICGDLLQREGQLTSIYTKSKAIIESCKASQVATLL

SEQ ID NO: 263023 - protein, 147 aa, Zea mays
  Clone ID: MRT4577_171489C.1.pep
LLAGRRAGGGTGSCKRAARWRRTGELASQRTGGSEVGGGDRRSQLCAYREIDRGGKDRERDWGEWRRSVAAANVEGEHEIGGRGYRLSARRWNGGAISTCAMAIRHRLAPDGEFGVGGERGGPEGRDATDAWGSRGGEHRGRRIGRG

SEQ ID NO: 263024 - protein, 105 aa, Zea mays
  Clone ID: MRT4577_17148C.1.pep
PPPPPGPPPPSPSPGAPAPPKRNWVACPPDCLGEFPSVSIPPPGPVFNPLKVRPPPGLRGTVSLLLLLFLGVILVKPVSGDKWAPLYQFCCRPPWDGLTWVAFAP

SEQ ID NO: 263025 - protein, 134 aa, Zea mays
  Clone ID: MRT4577_171490C.1.pep
EGYCRGVSAILYVVDAADQKSVPIAKSELHDLLTKQFLGGIPLLVLGNKIDKSEGLLKQALVDQLGLELIKDREVCCYMIWGKDFVKIKVVMDWLIKHFRTGKKAFWGFVSLKARCFIFCELGLPKSLVPWSPC

SEQ ID NO: 263026 - protein, 164 aa, Zea mays
  unsure (1)..(164): unsure at all Xaa locations
  Clone ID: MRT4577_171491C.1.pep
MSEPLPQNSYMDVEIDKPHVLILGVVKNEQDNVXAHXEHEHNCTXTQKIDSENLLHIEFSELHCDSEYELLLQQSASTKVTFPLLSTNTFCSHPLYREYELIHKNYLGEINAXQRKLLDELFLPAEDAACDQFTPLEKMLYKEPSDAKXGDYDIDYLLIIVRDA

SEQ ID NO: 263027 - protein, 90 aa, Zea mays
  Clone ID: MRT4577_171492C.1.pep
EIWRESPARDCTGRTNHLPRLTVHSARGVRWFVHTGSALGGGRVIANTCDLVDGFRVAPKRIITRVPYVQVEIHCSISKSISFVFGSCSM

SEQ ID NO: 263028 - protein, 250 aa, Zea mays
  unsure (1)..(250): unsure at all Xaa locations
  Clone ID: MRT4577_171493C.1.pep
MSSDTAAPNLPRVAALENDDSMLTRRFGKEVVNYYAGSRINRFSFLRADTGFLRKAAASPTARYLALSELNPLVVDKRTPAYLTFNDVEPLIGSDPFAQTEDEAIQNFDSTKTTPLIVFLGMLEEGNENDHISSTDHGDILGHPYFAIDITPKGNHAEKXRELLGRVGERGNVSRQEPSCXGHSPEAAALYAQARSMMDWNSRSPFCAGCGQPNLSVHAGYXRVCPPPTKRWRDSEARGDCALAMASLHL

SEQ ID NO: 263029 - protein, 73 aa, Zea mays
  Clone ID: MRT4577_171494C.1.pep
PFKGAAFFSVAKGMAFFDPSRSQDFLFIFGTKMGPYAKTGENPPPGFMCPGGGKVFVGYYPSLQAEKTTPVPV

SEQ ID NO: 263030 - protein, 156 aa, Zea mays
  unsure (1)..(156): unsure at all Xaa locations
  Clone ID: MRT4577_171495C.1.pep
DAQVGTXLNYMSPEAFMCNDTDSDGNIIKCGLPSDIWSLGCILYQMVYGKTPFADYKTFWDKYKGVTDRNHKIMYEPVDNPWLIDLMQRCLAWDRNERWRTPQLLKHPFLNPPVPRDLPPSDDDPYRLLIERIRVHWDNPMVQKLRSLIEELDGDQ

SEQ ID NO: 263031 - protein, 454 aa, Zea mays
  unsure (1)..(454): unsure at all Xaa locations
  Clone ID: MRT4577_171496C.1.pep
MALQNIGASNRDDAFYRYKMPRMITKIEGRGNGIKTNIVNMVDIAKALARPASYTTKYFGCELGAQSKFDEKTGISLVNGAHDTAKLAGLLEVFIKKYVQXMGCGNPETEILISKTQMLSLKCAACGFVSDVDMRDKLTTFILKNPPEQKKGGKDKKKAMRRAEKERLKEGEAADEEQKKLKKDAKKKGASSKESTAKGSKKKATAGGSDEDHSTSPTRSRDGDHAAADEEEDDDDVQWQTDTSIEAAKQRMQEQLSAATAEMVMLSTEETEKKKHATHKDGTANGSAKEIPDEKPAVTKPSPYKELIGDIKASLGSAPTPTQLKAMLASSTLPSQDVMNALLEALFDGVGKGFAKEVVKNKKYLAVAVPDEGAQTLLVQAIEAFGSKCNPEALKEVPVVLKALYDGDILEEETVVDWYNAAVAAGKDSQVVKNAKPFVEWLQSAESDDEDGDE

SEQ ID NO: 263032 - protein, 90 aa, Zea mays
  Clone ID: MRT4577_171497C.1.pep
LGVSVALAVGRDLALAGAGPSACGCSTWVLLGFLWLFWRVSVCGAGALGLLGCRGGGGCLPGRVRRPLVPGRLWRRSASSAVCCVAGPRA

SEQ ID NO: 263033 - protein, 133 aa, Zea mays
  Clone ID: MRT4577_171498C.1.pep
ANILRLDINHPPNIHLHTGIFVRATKRQHPLHNHTTRGGLPNHFKVTGGETYPNIRHEPNLQGPVITVISDQNTVDSISHSQNPTSTNLLPDVLDKATIHEFVFFQHITDRKHYAIHALNDPLLSLHDHYLIP

SEQ ID NO: 263034 - protein, 187 aa, Zea mays
  Clone ID: MRT4577_171499C.1.pep
MATTRLLPLLRRRLAAAIAGSPAPYSLRGPSFPAPAAAGLRSLLTAAGASDTATEPQDQQHSETTPPPASVPTPESGLKVRDTSNLKISPRHDLAMIFTCKVCETRSMKMASRDSYENGVVVVRCGGCNNLHLMADRLGWFGEPGSIEDFLATQGEEVKKGSTDTISFTLDDLAGSQVSSKGPSEQN

SEQ ID NO: 263035 - protein, 157 aa, Zea mays
  Clone ID: MRT4577_17149C.1.pep
GSNYLSLSIVKRNCEHNRRSVAASLVQAVYVLERDRQLNHQSFEALAPAWWEFLHFELIRKLIDDADMSIFGAIFEFNPPKEEASGANAPRFVIAFRGTITEKDTISRDLSLDLHLVQNGLHRTSRFNIAMQAVHNVASVFPGSTIWLAGHSLGAGL

SEQ ID NO: 263036 - protein, 120 aa, Zea mays
  Clone ID: MRT4577_1714C.1.pep
AGRVGSPRDMPLISSPGARCARGPRASHITRPISPHSELLSIRLYHVLLSTTRLHPSRICLDRKPVQLHHLETPDTVCYLLSESEYVTILDPPYPCLGHIAQPMSGRSLDAWNGFLTDYR

SEQ ID NO: 263037 - protein, 80 aa, Zea mays
  unsure (1)..(80): unsure at all Xaa locations
  Clone ID: MRT4577_171500C.1.pep
TYARLVVLAEVSLTVTAXSVQLXLTDSNPIRPVTDRAASELEYTVFAALGRTRDALRYARLGLRYGKSYNSPEKVHTLLR

SEQ ID NO: 263038 - protein, 140 aa, Zea mays
  Clone ID: MRT4577_171501C.1.pep
MTDFKGSCHCKQTEWTATLQPDQQAHILCHCNTCKELSGATYTLNQIIPAKALKITKGDDLGKYTYKGDSGKSVHCFYCKNCTAHVYHQQEVLGPDNIVLRTGLLEQGLKDFKPGAEIFGKDRLPWEKEVATTFDVLPPS

SEQ ID NO: 263039 - protein, 100 aa, Zea mays
  Clone ID: MRT4577_171502C.1.pep
ALLALLALFVCATYAFIIPQCSLAPSAIIPQFLPPVSSMGFVHPSVHAFMLQLALAGSVFHQPIAQLLLQSLAHLNLHTIASQQLQQFLASLIHLAVVNP

SEQ ID NO: 263040 - protein, 73 aa, Zea mays
  Clone ID: MRT4577_171503C.1.pep
TLSFSLLILLALICFQASFLFHFYFFFLCISLFFLTVKPAHKRLKAITSQRAPRKKGLNSIRTKTNSFPFCRE

SEQ ID NO: 263041 - protein, 230 aa, Zea mays
  unsure (1)..(230): unsure at all Xaa locations
  Clone ID: MRT4577_171504C.1.pep
KIPANTRIRIGSXSTPFGAKNTFVYPHETGNTMLFPLLILLLFTLFIGSIGIHFDNGVKDNRILELTILSKWLTPSINLFQENSNSSINSYEFLTNAISSVSLAIFGLFIAYIFYGSAYSFFQNLNFQNSLVKKNPKKSFLDEVKKKIYSWSYNRGYIDFFYTRVFILGIRRLAELTHFFDKGVIDGITNGVGLAGFCIGEEIKYVGGGRISSYLFFFLCYVSLFLFFIP

SEQ ID NO: 263042 - protein, 70 aa, Zea mays
  unsure (1)..(70): unsure at all Xaa locations
  Clone ID: MRT4577_171505C.1.pep
LENCRGSTRNKVSAPSTSXGSSFFVLQMKLDADLAGMRRKAGTFTITNNWGFTVWPPATPVGGGTQMNPG

SEQ ID NO: 263043 - protein, 334 aa, Zea mays
  unsure (1)..(334): unsure at all Xaa locations
  Clone ID: MRT4577_171506C.1.pep
MASSNSNSSSNPLEAMGAFFSKQVDRRKLVTTEKRALATRLSSSGDTFPGSEHRPADRKRWMAELGADKLRVHQVVWPGTHDSATNKIGVPLVTRPFAQCQSMSVYEQLAMGTRVVDVRVQEERRVCHGILATYPVDVVLDDVSRFLSETESELVVLEVRTEFGHEDPPEXGRXLVERLGEHLLIPQDEAVFHKTVAELLPRRVICVWKPRRSPAPGPGEPLWSAGYLRDNWIDTDLPETKFESNLKFLGQQPPVAGRGFLYRVENTVTPRPDNPVVCVWPVTRRIHGYARMFIAEVFAKGLGDKLQVFSTDFIDGDFVDACAGVTKARVDGTA

SEQ ID NO: 263044 - protein, 333 aa, Zea mays
  Clone ID: MRT4577_171507C.1.pep
MASSNSNSSSNPLEAMGAFFSKQVDRRKLVTTEKRALATRLSSSGDTFPGSEHRPADRKRWMAELGADKLRVHQVVWPGTHDSATNKIGVPLVTRPFAQCQSMSVYEQLAMGTRVIDVRVQEERRVCHGILATYPVDVVLDDVSRFLGETESELLILEIRTEFGHEDPPGFDRFLADKLGEHLIPQDEAVFHRTVAELLPRRVICVWKPRKSPPPRPGDPLWSAGYLKDNWIDTDLPETKFESNLKFLGQQPPVADRRFFYRVENTVTPKADNPVLCVWPVTKRIHGYARLFIAEAFAKGLGDKLQVFSTDFIDGDFVDACAGVTKARVDGTA

SEQ ID NO: 263045 - protein, 127 aa, Zea mays
  Clone ID: MRT4577_171508C.1.pep
PAGPSGVASITPIPPTRHMWTCQHICPTLSPFCASRTAIWLNPPQCRGLDASHTGHRPITNPRIWHVTIGQRTHTFPRLSSTSCIFRFNTTTTSTHTYRRRRRNSFILFLVDSLSLPLVSRWVRRFF

SEQ ID NO: 263046 - protein, 295 aa, Zea mays
  unsure (1)..(295): unsure at all Xaa locations
  Clone ID: MRT4577_171509C.1.pep
MGAFFSKQVDRRKLVAAEKRALATRLSSSGDTFPGSEHRPADRKRWMAELGAGRLRVHQVVWPGTHDSATDRIGVPFVTRPFAQCQSLSVYEQLALGARVLDVRVQKGRRVCHGVLATYPVDVVLDDVARFLGETESEVVVLEVRTEFGHEDPPEFGRFLVERLGEHLLIPQDEAVFHKTVAELLPRRVICVWKPRXXXXXXXXXXXKFLGQQPPVAGRGFLYRVENTVTPRPDNPVVCVWPVTRRIHGYARMFIAEVFAKGLGDKLQVFSTDFIDGDFVDACAGVTKARVDGTA

SEQ ID NO: 263047 - protein, 85 aa, Zea mays
  Clone ID: MRT4577_17150C.1.pep
NEPVRVAQGEIFHQAHKEGVQCYYLVPGAFEGEAMLTRNDSNELSCCRQTCLAHELAYVRVCPFASANVGVENRSMGWLKFAMVG

SEQ ID NO: 263048 - protein, 61 aa, Zea mays
  unsure (1)..(61): unsure at all Xaa locations
  Clone ID: MRT4577_171510C.1.pep
MMSTRSLNPIRHVAYGGLPTVXVLFHPKSRSPPVLTIALLLLGVILLVDYFISGSCVTGTR

SEQ ID NO: 263049 - protein, 94 aa, Zea mays
  unsure (1)..(94): unsure at all Xaa locations
  Clone ID: MRT4577_171511C.1.pep
FVFTDTKPASTXFLCRSGRDYNNRYEDDITDLSCAPYPPVTHXPIEHSWTFCFYNLYSKFKQAVFGSSIPPIHTYITVXEFLGLYNNINHPYQI

SEQ ID NO: 263050 - protein, 68 aa, Zea mays
  Clone ID: MRT4577_171512C.1.pep
DRANSTSFWYRRRSRRGGLSTTAGGLRCRIGGPACDGCGSYRAGLRASDAVVVVGGAASVAIVGARPF

SEQ ID NO: 263051 - protein, 345 aa, Zea mays
  Clone ID: MRT4577_171513C.1.pep
CTKAGKISSQRPRSSPPPMADSSGRSGGRPTSASPSTATHTSPASFDGGLLLRLLQNPPSAHPREEILAPSPVAPGAHHFFSDPAVAAVGPLFAASAQTQGGDFGWSSTSTTHVQQQPRFSDPRFAPGDPFAALGGRGFGSGDAVRAERPRSGAPPPGFGKPSHPLPAARDARSASGVVLRKEQYNPRPVDFVPALADVRDPVGRMPHGHGEQFYREQQQDRFLSRTPPEINANGQFGRMPIGEQHTLPILGGRRLHVDQYMPPVQEGRAPHGGHGKHESRLTNPLQREQRWLGLREDKGYASRKVPNVNAHYTSGKALVKEVHHLTIPAGSSSPVEITENQASL

SEQ ID NO: 263052 - protein, 108 aa, Zea mays
  unsure (1)..(108): unsure at all Xaa locations
  Clone ID: MRT4577_171514C.1.pep
WDSAGEYIPSAXEDWATIWSFRGGHDGEFLHELDRSGYQFHSXVFXHPTYQSLLVSGCYESLELWDIWEKITMTLDSAHDGLVADLASCSATGKGAAVRHDITLELWK

SEQ ID NO: 263053 - protein, 226 aa, Zea mays
  Clone ID: MRT4577_171515C.1.pep
ATRLERYSDTETPLSVLAQPFILQSQLYSSVKDRTQVDRDLESFKKDKVLRIFKLSSGQDDHAIMFMDDYLKQVSFAIKRSGGKDQGGSEVFEWFERYVVPSKLDVSITQLELCSLLSQGGDVTDKHITLLMNAGLLTRQLIDPNIYWFSIPRIGPILKGLSQGRKEILSLLNRRKYKEMPLSSLENTKLRLSPLDTRFLLRDLIGSGHIKTVQTPTGLLARVSRD

SEQ ID NO: 263054 - protein, 168 aa, Zea mays
  Clone ID: MRT4577_171516C.1.pep
NRRSQQIKMTEPSSSYSLPSKKRQRSPDDNEHSLDRGRICLSLDDNLTFNDTMIALQLMRTQFPKLDKVLAQPFILQSQLYSSVKDRTQVDRDLESFKKDKVLRIFKLSSGQDDHARRRRRHLRPLQRQHRGRLRTAISSWSFDDISLKSTESTDQDDRTIIIIFIAL

SEQ ID NO: 263055 - protein, 134 aa, Zea mays
  Clone ID: MRT4577_171517C.1.pep
LPTTTTGIQGFAECCNLCRVPFVGHSTKKSLPSAALGKARLSATRLFTECWTLGTGRHSAKTSLPSVKHSAKGALGKGPSTAVPKLTAVSLCREPAAGTRQRGFFAECHTSSTRQRPLCRVSSLDTRQSIFLFF

SEQ ID NO: 263056 - protein, 65 aa, Zea mays
  Clone ID: MRT4577_171518C.1.pep
RQVGGAYEQPPFLPLIHGSALNSGFYVAPAISCRSARFCVPPSSRFLLSCYCQLRPIVLVPPASE

SEQ ID NO: 263057 - protein, 107 aa, Zea mays
  unsure (1)..(107): unsure at all Xaa locations
  Clone ID: MRT4577_171519C.1.pep
GTXPFSSFFFFFFFFFFFFFFFFFFFFSPNFINFKKQELCTLKVTGPINKWFRGYFKGGIKVGTKGFETGNPFFFSNSGWQKVCKSCIQLPACTFLILLRNNKVIPT

SEQ ID NO: 263058 - protein, 65 aa, Zea mays
  Clone ID: MRT4577_17151C.1.pep
PISDTRLAWKENRIPKMITQCVMKLKGMGPSGLQYALSNLHLVIGKYIPFILGNKYCSITKKKTS

SEQ ID NO: 263059 - protein, 73 aa, Zea mays
  Clone ID: MRT4577_171520C.1.pep
VGICSNGHPCADSYSSLNPSRWKGQRGSSISELKLRHAKLANLMASQALMLLRQEVILSSSGGEGAALLVWAL

SEQ ID NO: 263060 - protein, 141 aa, Zea mays
  Clone ID: MRT4577_171521C.1.pep
WPPLYPALKGIKPTRGVRPPSPKKLWQTVRAAETKQRKLNDPGQNITNFPRTESSIKNWPPPTKKNGPRPPKNPGKGPRGQSVQFIQSGPCQNMGTRANDQGFRGNHLCYSPGPRAWRESGGKVPGGKIRTIALPRSGAGK

SEQ ID NO: 263061 - protein, 38 aa, Zea mays
  Clone ID: MRT4577_171522C.1.pep
EKINVKGAPGRWIHAGFGKVAFLCLNYGLPSYEEFIKL

SEQ ID NO: 263062 - protein, 58 aa, Zea mays
  unsure (1)..(58): unsure at all Xaa locations
  Clone ID: MRT4577_171523C.1.pep
WRRPWRRRGGDRSGRRCLRPCRXSTRVILTYILDSSYVRSFSWYKLSNILGGDIINME

SEQ ID NO: 263063 - protein, 64 aa, Zea mays
  Clone ID: MRT4577_171524C.1.pep
LIHVCCVRCEGEIPGFGGEEAQFNLTPARCSTKCSNWVSSLILTPARCSSQTTITVENPRRRES

SEQ ID NO: 263064 - protein, 113 aa, Zea mays
  Clone ID: MRT4577_171525C.1.pep
RRKPRLWEWPLRAIFCQKWGGPPPQNGLGIRVFLPPQMGGAFLGRPLFFYFPQAQGNSVFFVVAPLFFHFPLWEGKNPPPFGHPGFFTRTLFVSWGETPKCNLKFPQKNIGLV

SEQ ID NO: 263065 - protein, 49 aa, Zea mays
  Clone ID: MRT4577_171526C.1.pep
MKYRMFMMCPSQCMLRQLFSMFERNGCRSSTRQMRRDRVRRASAGDGGS

SEQ ID NO: 263066 - protein, 90 aa, Zea mays
  Clone ID: MRT4577_171527C.1.pep
KRSEKSGKRYREFTEFYRPFTSLIVSLLFYLTNQKERNRQRSNPGCMMHAAAIRRRRTGGDLAGPLRRVHGGLRDLQDRVERAGVPGASP

SEQ ID NO: 263067 - protein, 102 aa, Zea mays
  unsure (1)..(102): unsure at all Xaa locations
  Clone ID: MRT4577_171528C.1.pep
PMVYHPTILHRDPRHVHSMVARQAARVLRPVDCVVLSVTSSPPXSPVSSSVHSALTDPHWRCAMEEEYPALLANHTXELVPRPPGNNVATGDTRVLCVVTTA

SEQ ID NO: 263068 - protein, 87 aa, Zea mays
  Clone ID: MRT4577_171529C.1.pep
GWGFFFFKTRTPKALLGSKGLDVLYVQGQHNFMGWLAHSLCYFTTTRASYVCIKFAYVGYSSAKCKIGGFFLTKTERGRNRNIPSFT

SEQ ID NO: 263069 - protein, 63 aa, Zea mays
  Clone ID: MRT4577_17152C.1.pep
VLHLHNCENPHVTHLNILPAHPPFCRWIYTKQVRPYHLVHHVLSHMDNFFATPLSAFISGGYC

SEQ ID NO: 263070 - protein, 143 aa, Zea mays
  unsure (1)..(143): unsure at all Xaa locations
  Clone ID: MRT4577_171530C.1.pep
CRGSSEEDEGSHDSYRGXVDLDVLLDMRTVDLVQVFPASARRMFQRMLNRKPMALIKKLREAKIHAPGDGKPXSLXTRLRNXIIVPEMMVSIVVDYSGQNLNEVEIKTEMIGHYLDEISVSYKPVKYGRTGICATHSSTVIHL

SEQ ID NO: 263071 - protein, 66 aa, Zea mays
  Clone ID: MRT4577_171531C.1.pep
PRGLGQKKETGDKAPKACDPFERLGVGFVKKPEEGKTKGLAFTKDPECSGAEKFAHPIGAGTFSAS

SEQ ID NO: 263072 - protein, 116 aa, Zea mays
  Clone ID: MRT4577_171532C.1.pep
MSDNSATIPQDPTQAQDQTMAENKGKGKALAEQVTEDTAMDEDEDDDESDEEEEVAEADEDGLEEIDLNNIVEGRRTRGAQIDFAKAAEQHPAEDEDEEDDEDFQPAEDRDTKMSD

SEQ ID NO: 263073 - protein, 49 aa, Zea mays
  Clone ID: MRT4577_171533C.1.pep
SLEGTHHKHSYRQGILHITTKISHEFVHCKYFLLLDLKFILKLLNLCRN

SEQ ID NO: 263074 - protein, 34 aa, Zea mays
  Clone ID: MRT4577_171534C.1.pep
ASPLYRHGHVPTYQRFRSQLPSNTPPQTAVRLLT

SEQ ID NO: 263075 - protein, 43 aa, Zea mays
  unsure (1)..(43): unsure at all Xaa locations
  Clone ID: MRT4577_171535C.1.pep
HNSSRSISSDLFRSGNGRRATSHALILASXRQQNRARRPHWYI

SEQ ID NO: 263076 - protein, 227 aa, Zea mays
  unsure (1)..(227): unsure at all Xaa locations
  Clone ID: MRT4577_171536C.1.pep
FLYRHLTYRDNLTVXARAXERGRVGNLVLGHVEHHRLAGVVLFAGLDDVLDLRLFDQIREISAFGAWPVATMWRDEREVVVRGPACSSSAVTGWFSQDLGDVTVAAASTTSPPXARPSGEVAGHGFAFNSFLLWDPERWGRYPTSEPDKSQDSTKFVQQVVLEDLSKVKGIPSDCSEVMVWHVDTAXGVVPRLRRTRGDRELNTIEENGRAWRTAGVVYTVHAWLHH

SEQ ID NO: 263077 - protein, 172 aa, Zea mays
  Clone ID: MRT4577_171537C.1.pep
PAGPRKKKKKKKKKKKIRAPGCGDTANHGTTCLCSAFGAWPVATMRRGERKVVVRGPACSSAAVTGWFSQDLGSSGTAAASASTARPGELDVHGFAFNSSVLWDPERWGRYPTSEPDKSQDSMKFVQQVVLEDFSKVKGIPSDCSEVMVWHVDTAAPSPSPSHPSLQNKKRR

SEQ ID NO: 263078 - protein, 60 aa, Zea mays
  Clone ID: MRT4577_171538C.1.pep
CDGNFKMYIPFQKRAQVGAKRCMFLSSVMCYGIFLVFCPFYRFVRVWYKFFFFFFFFFFF

SEQ ID NO: 263079 - protein, 44 aa, Zea mays
  Clone ID: MRT4577_171539C.1.pep
PRIPHSQSLESTSIKPTGLSGFKEGGTRFYCRSFQKKKQKKEES

SEQ ID NO: 263080 - protein, 104 aa, Zea mays
  unsure (1)..(104): unsure at all Xaa locations
  Clone ID: MRT4577_17153C.1.pep
HAIMDQYVDRFLFREKGCNQNXXGKKKREKKKKKKKKRXKKKKKKKKKKKKGGGPPRAAAQKGNFAKIHKTGGGSRMFLKGPICPIWRAIKNKRAGFYKTGAGK

SEQ ID NO: 263081 - protein, 91 aa, Zea mays
  Clone ID: MRT4577_171540C.1.pep
CNAILSDKAELYSDDIQEACKIDELLDSVEELNTLIFSATYETNDSEKKTKIAKLLKETLPTWLRYIEQRLEIFGDGTYSVGSQLTIADLK

SEQ ID NO: 263082 - protein, 42 aa, Zea mays
  unsure (1)..(42): unsure at all Xaa locations
  Clone ID: MRT4577_171542C.1.pep
ANAGASKTXPQQAGTVRKNXFMVFKKRPYKVVEVSSFKTGKH

SEQ ID NO: 263083 - protein, 34 aa, Zea mays
  Clone ID: MRT4577_171543C.1.pep
TSIRTRMIVKWTSPNITNLVLFMQTHCIYHLLVF

SEQ ID NO: 263084 - protein, 189 aa, Zea mays
  unsure (1)..(189): unsure at all Xaa locations
  Clone ID: MRT4577_171544C.1.pep
GTIAXTQTYKKQTIPVNKIIASACLTNNFITIEFXAEEKSNDISAEGLVDGSGNLQCDEQMKAKGDTCQKDCENFCVHSQHYSEASSFARYGEHSTIDENQFVEDISPSTTSTLHELETPSSRGDNLREEDNQSINGSWEERGLWISSLGWPAPIDTMSPDSWHQETMGDIENHNNPIQFNDRPWIESP

SEQ ID NO: 263085 - protein, 168 aa, Zea mays
  unsure (1)..(168): unsure at all Xaa locations
  Clone ID: MRT4577_171545C.1.pep
HVVAFISDRDVINASPSIXDEQVSIDMLQQPLELIMKHPVMTCHPLDFVEEIATLFFENKIGCLPVTKAGKLVGIISESTVLHTLVELTGAHQPSSQIEIQVKNEPGILGTVVAIFSDLQINIVSVLVYPAKDENDKVLVFRIQTMNPINHEFWIRYVTRLQHAWYRA

SEQ ID NO: 263086 - protein, 51 aa, Zea mays
  unsure (1)..(51): unsure at all Xaa locations
  Clone ID: MRT4577_171546C.1.pep
LFGFSLLWSCRVSACCCSCCDFAFGLPGLRWFCVLVSARAFEPCPAFXVFW

SEQ ID NO: 263087 - protein, 83 aa, Zea mays
  Clone ID: MRT4577_171548C.1.pep
PWETRTGTRRIPSFPYRGSHFTLGQEGPKLVPVKNWNPSTVQNNIRPKSKKHKARGAKGGSKGTLMGGGSQPICQAENLGFQV

SEQ ID NO: 263088 - protein, 154 aa, Zea mays
  unsure (1)..(154): unsure at all Xaa locations
  Clone ID: MRT4577_171549C.1.pep
MSGRGKVEKGLDKVGAKCHRKVLRDNIQGITKPAIHKLXRRGGVKRISGLXIYEETRGVLXKIFLXNVIRDSDTYTENARHKSVTAMDVCYSLKYQGHTLYGFRRVSRPHTLRGELSWLRSTMGYELCACSSMRCLYPRCFLWNMCCITPVSNT

SEQ ID NO: 263089 - protein, 47 aa, Zea mays
  Clone ID: MRT4577_17154C.1.pep
SMSISIIGTLPHGSALRREPRSARLLPIGVIWRLTAGRMRRPGNSSR

SEQ ID NO: 263090 - protein, 33 aa, Zea mays
  Clone ID: MRT4577_171550C.1.pep
SYTSVTKTMINSAIVDTHDIYTVPSFVLGLQPR

SEQ ID NO: 263091 - protein, 89 aa, Zea mays
  Clone ID: MRT4577_171551C.1.pep
FLGSTAWWPRNPTSPLLEAPANYKTPKVFPPSKHCILPTNTPQTGWKLYSSLTFPSNKPPPSPFYIAHSPFQFVPATVLSKGFAKNSGD

SEQ ID NO: 263092 - protein, 105 aa, Zea mays
  unsure (1)..(105): unsure at all Xaa locations
  Clone ID: MRT4577_171552C.1.pep
CPFCLSVAHHPSAATALFDNTHGGELQSRTPHSVQGRLSRGGNACWELRCLEPGGEADGXMPGGETIGGGDDAASTLLRGTGAGERGPRAGGEGLGGAVVGGGEG

SEQ ID NO: 263093 - protein, 85 aa, Zea mays
  unsure (1)..(85): unsure at all Xaa locations
  Clone ID: MRT4577_171553C.1.pep
FVGGLAWATNDHSVHNAFRTYGEVLESKIILDRETQKCREFGFITFSTXEAMRNAIDGMNGKELDGRNINLNEAQTNRGPASRGR

SEQ ID NO: 263094 - protein, 75 aa, Zea mays
  Clone ID: MRT4577_171554C.1.pep
SNSRLKKKKKKKKKKKKKKKKKKKKKKKKKKKKKKKKKKGEGGKKKKKKKKKKKKKKKKRGAPFKKSKFLPPPYP

SEQ ID NO: 263095 - protein, 128 aa, Zea mays
  Clone ID: MRT4577_171555C.1.pep
RMRRRQNKPPALVTNMQSGGNKYTPQCHQASATPSYRPDLLPPPVSSDYAGNNNIDNTSMPMADVSNYLPTPTTSNVDMRYPSTSSETEAFRYASPIEDLYGWDAELERREASPSRDSISSTEGLDAF

SEQ ID NO: 263096 - protein, 22 aa, Zea mays
  Clone ID: MRT4577_171556C.1.pep
LNPKFARKYKHLLKAITKKKKI

SEQ ID NO: 263097 - protein, 101 aa, Zea mays
  unsure (1)..(101): unsure at all Xaa locations
  Clone ID: MRT4577_171557C.1.pep
MGRPFKMMVEADLLALALDTSTVXARCINNTMTANNDHATVRSHTYRSLHRLVCRAYIDTSGLPSGWISGSXMPAQRCHGGGGDEPXIMLPCMGRMPIFWG

SEQ ID NO: 263098 - protein, 99 aa, Zea mays
  unsure (1)..(99): unsure at all Xaa locations
  Clone ID: MRT4577_171558C.1.pep
FRXSRGQXLEGKXMXRSGVPXTSDGHPXPPXXNKCRXLARGLEERGLNRVRVLFXDFXXKLDTTREQXXLITDWVSXWIXQHKNMGYTKGAEAPFXDGV

SEQ ID NO: 263099 - protein, 49 aa, Zea mays
  unsure (1)..(49): unsure at all Xaa locations
  Clone ID: MRT4577_171559C.1.pep
GRCLXXFXXXWXLGGPLPGFLAAGSGGCXXACGGSGRPXPXXRXSLFLV

SEQ ID NO: 263100 - protein, 78 aa, Zea mays
  Clone ID: MRT4577_17155C.1.pep
WGGFFWKVWGGTPLVGPFCGGRGSPDIVWEGGGGFFSLIVLNTPRFYLFVLTRYLSLYLLFSLPPFFFPVYSPIIIPF

SEQ ID NO: 263101 - protein, 112 aa, Zea mays
  Clone ID: MRT4577_171560C.1.pep
IAGPAHFRSMWPIERYLMRLKGSVHTKSHCEGSIMEWSMFTECLTFCARYLHGESQLNHLDANDEDCSTTPFFHIIGRGLSGKCIVTLDHKTWLQAHRYVLFNYYNIGPYLE

SEQ ID NO: 263102 - protein, 57 aa, Zea mays
  Clone ID: MRT4577_171561C.1.pep
AASFVPQWGLRPVIFISKKKKGLPKKKKKKKKKKKKKKKKKKKKKKKKKKKKKKKKK

SEQ ID NO: 263103 - protein, 84 aa, Zea mays
  Clone ID: MRT4577_171562C.1.pep
ATTHPFLLLFNKRKMSLIPLKTCAEKGELGRNHQGNKTGEKKRVSLAAVSSLFFLHLGCSWLAMKTGSSFFSRIPKENKAGLLP

SEQ ID NO: 263104 - protein, 48 aa, Zea mays
  Clone ID: MRT4577_171563C.1.pep
AWAPKAKERLNGAPKRQGELIRRMGYLKHILRSFTRTKALKGQKVTVH

SEQ ID NO: 263105 - protein, 62 aa, Zea mays
  Clone ID: MRT4577_171564C.1.pep
SEAISTIKHVIIETKYEIDQASTASLPATWSRSRHTWKVIPRPPLGSTSIMPISCSCSDAWA

SEQ ID NO: 263106 - protein, 91 aa, Zea mays
  Clone ID: MRT4577_171565C.1.pep
PANPQAGGARTDNQRPRRQTKKGTTKPATRKPHRNGRRDKGGAPHQQGHPQHAAKRPRRRPDTQPGTRDRPRQPHDPDDQEARRPAHPRRP

SEQ ID NO: 263107 - protein, 95 aa, Zea mays
  Clone ID: MRT4577_171566C.1.pep
PLLLITLLSMLHGMLWKPLRPSKLTAAGEARANIVSQIPAEHHKKNYTALTDAITRTAGDIQNLRAQEDSKVNQTILMTTADAAYMNHMRYKIIN

SEQ ID NO: 263108 - protein, 356 aa, Zea mays
  Clone ID: MRT4577_171567C.1.pep
MGSAGALLWHTPQQLHGRGVLFRQSRPLLRQRNLPLISLAAPALEPERRRRQCLRCAAVDGDGAPRESGPLPQKESPSSGIGAALEDPPPGPPVENGSFGGPSQEEQSALYTFLYPSKDLLPDDKEMSIFDHLEELRDRIFISVLAVGAAILGCFAFSKDLVIFLEAPVTAQGVRFLQLSPGEFFFTTLKVSGYCGLLLGSPIILYEIIAFVIPGLTRDERKFLGPIVLGSSVLFYLGIFFSYTVLSPAALNFFVNYADGAVESLWSIDQYFEFILVLMFSTGLSFQVPVIQLLLGQLGLVSSDQMLSIWRYVVVGAVVAAAVLTPSTDPLTQMLLAGPLLGLYLGGAWMVKITGR

SEQ ID NO: 263109 - protein, 109 aa, Zea mays
  Clone ID: MRT4577_171568C.1.pep
MLIHHVEPSLQDRAATERRAPAYAWLVFGLTVGLLLSDYMSRQVLNAVFPLLKHAWGLSDTQLGSLSGVVALLVGLLTFPLSVLADRFERVRSIVLMPALWSVATLGCA

SEQ ID NO: 263110 - protein, 244 aa, Zea mays
  unsure (1)..(244): unsure at all Xaa locations
  Clone ID: MRT4577_171569C.1.pep
MELLRPRGDGCCPRVLSVSLLLLAALLWKHVSAAAITRGDFPEGFVFGAGASAYQIEGAWAEDGKKPSIWDTYTHSGXSERVAPPISLAQLHMVWKSESCIVWFFVLALCRIFDXHDTGDVAADQYHHYKEDVKLMHDMGLDAYRFSIAWSRLIPDGRGAVNPXGLEYYNSLIDELLRYGIQPHVTIYHFDLPQALQDEYNGLLSPXIIDDFTXAYADVCFRSFGDRVKHWITVNEPTSSPSAA

SEQ ID NO: 263111 - protein, 81 aa, Zea mays
  Clone ID: MRT4577_17156C.1.pep
SIIIHILLHLFLLYCEPYSGGSFIKCSAPSTLSHSPSSRLFLPLLLLLLKRTTNSFFTTTTTHVTYVPSTKTTPTSSLFCS

SEQ ID NO: 263112 - protein, 77 aa, Zea mays
  Clone ID: MRT4577_171570C.1.pep
SALPWSFNCTTVGYNPNAPVTVAVGGTATDSRICRSDDEHRGTDAWAGDMWCSCASPVSQCLHRPVSCGCSEQKASV

SEQ ID NO: 263113 - protein, 82 aa, Zea mays
  Clone ID: MRT4577_171571C.1.pep
MEPLRPRGDGCCPRVLSVCLLLLAALLWKHVSTAAAITRGDFPEGFVFGAGASAYQIEGAWAEDGKKPSIWDTYTHSGQRAS

SEQ ID NO: 263114 - protein, 539 aa, Zea mays
  unsure (1)..(539): unsure at all Xaa locations
  Clone ID: MRT4577_171572C.1.pep
MELLRPRGDGCCPRVLSVSLLLLAALLWKHVSAAAITRGDFPEGFVFGAGASAYQIEGAWAEDGKKPSIWDTYTHSGYSIDRDTGDVAADQYHHYKEDVKLMHDMGLDAYRFSIAWSRLIPDGRGAVNPKGLEYYNSLIDELLRYGIQPHVTIYHFDLPQALQDEYNGLLSPRIIDDFTAYADVCFRSFGDRVKHWITVNEPNIEPIGGYDQGYLPPRRCSYPFGLGVTCTHGNSTTEPYAVAHHLLLAHASAVSLYRRKYQGEQGXGLLSPRIIVVLXPPTQKCASGASATGRSTGSRXEPNIEPIXYGDYPPVMKRNVGARLPSLTARDSAMVRGSLDFVGINQYGAILVEADLGQLDRDLRDYYGDMATNFVTVPFESTVTRNQQVPRLGLRNHEAPWALSKLLEHLQTHYGNPPVMIHENGAGHEPDPSGGFLYDDEFRAHFLRVYVEAALASVRNGSDLRGYFVWSFMDVFEFLFSYRFRFGLYGVDFAADNRTRYARRSARWYAGFLRGGEKKQKLKNKFFLFINIIFFFFNY

SEQ ID NO: 263115 - protein, 554 aa, Zea mays
  unsure (1)..(554): unsure at all Xaa locations
  Clone ID: MRT4577_171573C.1.pep
IVWFVQIEGAWAEDGKKPSIWDTYTHSGYSIDRDTGDVAADQYHHYKEDVKLMHDMGLDAYRFSIAWSRLIPXLASRVLDTEERIFFSLCLSVYLAILSYCFRMSNXCHVFVDGRGAVNPKGLEYYNSLIDELLRYXSFGTSLIATLINGAXPNGFVGARVINVXGIQPHVTIYHFDLPQALQDEYNGLLSPRIIDDFTAYADVCFRSFGDRVKHWITVNEPNIEPIGGYDQGYLPPRRCSYPFGLGVTCTHGNSTTEPYAVAHHLLLAHASAVSLYRRKYQGEQGGRIGLTLLAWWYEPATQKPEDVEAAARANDFSLGWFMHPLVYGDYPPVMKRNVGARLPSLTARDSAMVRGSLDFVGINQYGAILVEADLGQLDRDLRDYYGDMATNFVTVPFESTVTRNQQVPRLGLRNHEAPWALSKLLEHLQTHYGNPPVMIHENGAGHEPDPSSGFLYDDEFRAHFLRVYVEAALASVRNGSDLRGYFVWSFMDVFEFLFSYRFRLGLYGVDFAADNRTRYARRSARWYAAPPLFQRGHTAPPIRSENQPHVSVL

SEQ ID NO: 263116 - protein, 35 aa, Zea mays
  Clone ID: MRT4577_171574C.1.pep
YCCWCTVFLIPNNGLSSYMPITRPSTSKKRIARST

SEQ ID NO: 263117 - protein, 43 aa, Zea mays
  Clone ID: MRT4577_171575C.1.pep
QQPTTRVISVLVVARPNTRHGAACSQSQAPQHHRTRADSELLR

SEQ ID NO: 263118 - protein, 128 aa, Zea mays
  Clone ID: MRT4577_171576C.1.pep
IKNSRFKKMVAKILEKYPLVWGGNGGPPPGNSREEIPIGRPRGVTPEFPAGPLGGTHFSLRGGGLKWGEIRGMQFPGGKWFSLHNSHKLTAGRLKGQTWGGPKGELLQYNGGGSLARFQGGKPWGHLE

SEQ ID NO: 263119 - protein, 886 aa, Zea mays
  Clone ID: MRT4577_171577C.1.pep
METGAAAAPASRADGVRRCKILVPWRFQPGFVRQPLKQAANDAAVNGDGGNTAGAPDAKSCRADGAASDGGETNVFRDAKKFGSGRATRGKNGEVDGGEEHSERCTSSQSLKSPDVENGGRPGPGDACNLGESVRGGWVKSSPLEGTGNSRGANGGVEAGEDYNLGSSNCDASWKDARTQEFRGAGDGAACDPEVIESNVGAEKCFAKGLKKPFMDQTGSKSNGSSAPGLESEDPEGNVGLEDSSYQAAKGCSMGDGAAKENEATANGCSSATPGSIGNGTYVRKGRKAAVPWRFQARYKRSFSDAFGSNNESPDLPAYMFDSSSTQCTPATRSTVRCYASAHSGVRVSAMNNFSVKGDTECKKRKTNNDYQDESMLNNGGVVVRERIMRSLQDLRLIYRDLLDEEDNSREKVLNVRPDLKAYRIFRERFCTDFDDEKYIGSVPGIYPGDIFHLRVELCVVGLHRPHRVGIDCTKKDDGTTVAVSIVSCAQSHDIKYNLDAFVYTGLVAVAVNQRIEGTNLALKKSMDTNTPVRVIHGFTTFNGKKKFPAYIYGGLYLVEKYWREKEHGDRYVYMFRLRRMEGQKHIDIQEILQTGNSGSNDNVIIKDLSRGLERVPLPVVNKISDERPMPYCYISHLRYPRNYRPTPPAGCNCVGGCSDSNKCACAVKNGGEIPFNDKGRIVEAKPLVYECGPSCKCPPTCHNRVGQHGLKFRLQIFKTKSMGWGVRTLEFIPSGSFVCEYIGEVLEDEEAQKRTNDEYLFAIGHNYYDKSLWEGLSRSIPSLQKGPGKDDENETGFAVDASEMGNFAKFINHNCTPNIYAQNVLYDHEDISVPHIMFFACDDIRPNQELAYHYNYKIDQVHDANGNIKKKKCLCGSVECDGWLY

SEQ ID NO: 263120 - protein, 80 aa, Zea mays
  Clone ID: MRT4577_171578C.1.pep
TSGPIRQSAVMWSDVHWRFRWSCAEPPEILAPAKELARPIIGAARHEFGHLDISQLNLEPSEVPRAQRPLSLCSGPSGGY

SEQ ID NO: 263121 - protein, 80 aa, Zea mays
  unsure (1)..(80): unsure at all Xaa locations
  Clone ID: MRT4577_171579C.1.pep
RAGFFPGFFFTLGGKKGPLFRGRNMFICGFLKPMPTQFFSKKKSWPPDMSKCFFVFFKKKKKKKKKKKKKKKKKKKKKKX

SEQ ID NO: 263122 - protein, 732 aa, Zea mays
  unsure (1)..(732): unsure at all Xaa locations
  Clone ID: MRT4577_17157C.1.pep
PAGPGSCHFAFAPTVPAPTRSAPPPPTPPPRLPPASSSPEQGRPPLPTHHPQQALLPRGPDPRAPRRSRSMARPGALLLAVAVAALLAAAVPGARGFYLPGSYPHKYNVGDDLNVKVNSLTSIDTEMPFSYYSLPFCEPQDGVKDSAENLGELLMGDRIENSPYRFRMYTNESDVFLCRSPPLGADAFSLLKKRIDEMYQVNLILDNLPAIRYTRKDDYIMRWTGYPVGIRVGVDYYVFNHLQFTVLVHKYEDANVARVIGAADATDAIPSGAKDAASSSPGWMVVGFEVVPCSIKHNPEDVKSRKMYDSYPSKIKCDPTTVSMSIKENEPIVYTYEVNFVESDIKWPSRWDAYLKMEGAKVHWFSILNSLMVIAFLAGIVFVILLRTVRRDLTKYEELDSEAQAQMNEELSGWKLVVSDVFRAPSNPMLLCIMVGDGVQILGMAVVTILFAALGFMSPASRGTLITGMLFFYLVLGILAGYVGVRVWKTIKCGDHSGWVAVSWRVACFFPGIAFLILTTLNFLLWGSHSTGAIPFSLFVVLLLLWFCISVPLTLVGGFLGAKAPHIEYPVRTNQIPREIPPQKYPSWLLVLGAGTLPFGXTLFIELFFIMSSIWMGRVYYVFGFLFVVLLLLVIVCAEVSLVLTYMHLCVEDWKWWWKSFFSSGSVAIYIFLYSINYLIFDLKSLSGPVSATLYIGYSLFMVIAIMLATGTVGFISSFCFVHYLFSSVKAD

SEQ ID NO: 263123 - protein, 38 aa, Zea mays
  Clone ID: MRT4577_171580C.1.pep
NILIYSYIRHKRSGIKKPKLTLLAFHIHPPHWKNPVFT

SEQ ID NO: 263124 - protein, 36 aa, Zea mays
  Clone ID: MRT4577_171581C.1.pep
TDSKKQSHTYHILEDIPTKSDRHSLSLDLSANWLPK

SEQ ID NO: 263125 - protein, 26 aa, Zea mays
  Clone ID: MRT4577_171582C.1.pep
SGDGIREGRLVILILHKVEGLSLREK

SEQ ID NO: 263126 - protein, 48 aa, Zea mays
  Clone ID: MRT4577_171583C.1.pep
FPGCLHSVLVGFPKFFFTRIFCLLAWKLVYLIRWGTCGSFGCLQVFSF

SEQ ID NO: 263127 - protein, 55 aa, Zea mays
  Clone ID: MRT4577_171584C.1.pep
MGRRTGSAGHGREGRGATLSCYRTPRRRGERHGRLRARTREGPRHGWSRGQGRWP

SEQ ID NO: 263128 - protein, 52 aa, Zea mays
  Clone ID: MRT4577_171585C.1.pep
RDEQLFLPDTQHYGSRNLQACHHDMLIEHDEMGDAHIDLQPRTSAATVIGDL

SEQ ID NO: 263129 - protein, 150 aa, Zea mays
  unsure (1)..(150): unsure at all Xaa locations
  Clone ID: MRT4577_171586C.1.pep
RPPCAPRLQGFGMEDGVFCGVFDGHGRCGQFISKLVRDYLPFMILSHRNALLMGSDDDDDDPAQLLEEWREACANAFEAMDKELKLQANVDCNFSGTTAVCAIKQGKDLIVANLGDSRXVLATMSDTGYLKAVQLTTDXKPNVPPGAERI

SEQ ID NO: 263130 - protein, 329 aa, Zea mays
  unsure (1)..(329): unsure at all Xaa locations
  Clone ID: MRT4577_171587C.1.pep
MEDGVFCGVFDGHGRCGQFISKLVRDYLPFMILSHRNALLMGSDDDDDDPAFSDASASASSTDGSGQSSPAPAQLLEEWREACANAFEAMDKELKLQANVDCNFSGTTAVCAIKQGKDLIVANLGDSRAVLATMSDTGYLKAVQLTTDQKPNVPRECVRHSRSSDDWIVSLLPSGWITKPYHAXAEEAERIKRCNGRVFALKDEPSVLRVWLPDEDCPGLAMARSLGDYRLKRHGVVSEPEVTHRRVAPGDLFIILATDGVWDVLSNEEVVSIVCATPRKQHASKAVAEAAAQRWRTRYPTSRVDDCSAVCLFLRDQDWASSVAAARAK

SEQ ID NO: 263131 - protein, 317 aa, Zea mays
  Clone ID: MRT4577_171588C.1.pep
MAGSDLEPLRASAAALPSSSDPDSPAVTPRRSRVRDLLRNLDRRLSNRSRGGAAAGHGDGEAGASPRRPEEDSDELGDGAPPEWALLLVGCLLGLATGICVAVFNRGVHVIHEWAWAGTPTEGAAWLRLQRLADTWHRILLIPVTGGVVVGMMHGLLEIFEQIKQSLSSQREGIDFMAAIFPTIKAIQAAITLGTGCSLGPEGPSVDIGKSCANGCAEMMENNRERRIALVAAGSAAGIASGFNAAVAGCFFAIETVLRPLRAENSPSFTTAMIILASVISSTVSNVLLGEKAAFIVPTYELKSAAGILLYSDYFWC

SEQ ID NO: 263132 - protein, 148 aa, Zea mays
  Clone ID: MRT4577_171589C.1.pep
MGICASSKRVEQEEDENVVYVVVDGQGGGCGGGWGGDGRGAAWERTVAASLFSQKGKKGPNQDAVILCQGFGMEDGVFCGVFDGHGRCGQLVSKLARDHLPFMILSQRNALLLGSDDDGDGPAFSDASPAASSSTDGSRSERSSPAPA

SEQ ID NO: 263133 - protein, 23 aa, Zea mays
  Clone ID: MRT4577_17158C.1.pep
AVLERDVFMVISVSYEKFVICSQ

SEQ ID NO: 263134 - protein, 66 aa, Zea mays
  unsure (1)..(66): unsure at all Xaa locations
  Clone ID: MRT4577_171590C.1.pep
MRTLFCLVDGVAVAAILLTASCHKCGYSTYLHICVXYKHESCTLQAHXCDXIKVHYRGTLTDGSDL

SEQ ID NO: 263135 - protein, 72 aa, Zea mays
  Clone ID: MRT4577_171591C.1.pep
KGIQKRNNWYAYSGQSGYLVTGSSRWSAKGCLRCLFKIRKSTNKVTCDLSCIHTYSREVDAISGHVPWQVRS

SEQ ID NO: 263136 - protein, 59 aa, Zea mays
  Clone ID: MRT4577_171592C.1.pep
PSLSHRKTAQRTLTQAWKSCTKYNFNIINSTIGNHKGFGKFVTKTNAKQTLQGLNGSHY

SEQ ID NO: 263137 - protein, 53 aa, Zea mays
  Clone ID: MRT4577_171593C.1.pep
LAWVSLLDLPSISSSFMARPVPARNMLCHVLTFVFQFSAFLGLINLMYVECSS

SEQ ID NO: 263138 - protein, 42 aa, Zea mays
  Clone ID: MRT4577_171594C.1.pep
SEEAGLISMGEIYCGRRKLEPALVVPRIYCRNSNGSAMSPSR

SEQ ID NO: 263139 - protein, 56 aa, Zea mays
  Clone ID: MRT4577_171595C.1.pep
NEQQGERHPEVQPQQLHGNNFFHPLDAAGEPTLQIGYPSEALTSSCMTTFLPPWLP

SEQ ID NO: 263140 - protein, 122 aa, Zea mays
  unsure (1)..(122): unsure at all Xaa locations
  Clone ID: MRT4577_171596C.1.pep
FLFGGRVRQTXPFFLPFQATTAPLSLPWGGCLLEGGILPLHMPSPSYGARPRLHAHRPGELLLYTRLSTPTPRHRWRLMDGPTSIYYITRDGSARSLTLGVPRLRFMPQSGCIQQITIICFD

SEQ ID NO: 263141 - protein, 86 aa, Zea mays
  unsure (1)..(86): unsure at all Xaa locations
  Clone ID: MRT4577_171597C.1.pep
RPRVRPRTTVVESPGCPPLRALTTDILGLVKVVEAHARPAGAGKVVETWGAPDACRAIVAGXLADRAAEPGLAGARRNSVVELLKT

SEQ ID NO: 263142 - protein, 70 aa, Zea mays
  Clone ID: MRT4577_171598C.1.pep
ARIVNIFDRRDVRSGSLRTKPLVSGDQVKYVTRGALLVTGTDGCSKGAAACVTSGSVNPHVCMQQCISDI

SEQ ID NO: 263143 - protein, 64 aa, Zea mays
  Clone ID: MRT4577_171599C.1.pep
DRYQMISRGPTKSTGKLFPGNNFLYIQKKHHRLVNTPSLTKKIKDVVKTKSCTEDFPQEGPFST

SEQ ID NO: 263144 - protein, 124 aa, Zea mays
  Clone ID: MRT4577_17159C.1.pep
MAQEKAHVPTQCSALRKGGFVMLKEHPCKIVDMSTSKTGKHGGAKVHLVGVDIFTEKKVEDICVSTHNMDVPVVERKDYQLIDIDGDDVTYLDETGSSFTNLKMPSLCESDLTLATDLREKFEN

SEQ ID NO: 263145 - protein, 132 aa, Zea mays
  Clone ID: MRT4577_1715C.1.pep
DLSGIDGPQSVGVFKSSTLLAHRDCVTGLAVGGGFLFSSSYDKTINVWSLQDFSHVHCLKGHEHKITAIVVVDNDSHSLCISGDSGSGIFVWRVDSTLKEEPLNKWYEHNDWLYRGVNCLAVSGTGYLYTGS

SEQ ID NO: 263146 - protein, 81 aa, Zea mays
  Clone ID: MRT4577_171600C.1.pep
RPADAWVRVYVDRGLVDDGISLYETTCGSLKPDSFVLSAAFHLYERAGRECEAQGVLESISASGTSFLRNMKIGFGSSLRS

SEQ ID NO: 263147 - protein, 70 aa, Zea mays
  Clone ID: MRT4577_171601C.1.pep
PPGPGEPFAFSLIWGLIANQNKPGITPPSPKIKGGGRYPFKLLKTGFCFPNKQFLLGTPPPPKTRLGGDV

SEQ ID NO: 263148 - protein, 35 aa, Zea mays
  Clone ID: MRT4577_171602C.1.pep
LQTLGLESYVERALPYNALSSCRSLCVLIDHSCHQ

SEQ ID NO: 263149 - protein, 99 aa, Zea mays
  Clone ID: MRT4577_171603C.1.pep
ASLKLMRVSSPTSSASPPFFHPAMVCINTFHNCPIAIRAKINTRSKGFSSNVTKGLPTPSFHFLCRASTFAADTIPPLVLDENPKAIILGAWSWNFFLL

SEQ ID NO: 263150 - protein, 309 aa, Zea mays
  Clone ID: MRT4577_171604C.1.pep
MHKRSKSCEPYRKMEERVGCSNAATSFDDSATGRTAGAAAAQCSTVSVFLAKINGAARHVTAVWSKSLINQSFTVSIERPGDGDGPVTHRVELKPWPFWSKKGGKALDVGGGDRVDMFWDLRSAKFAAAGSSPEPAGGYYVALVSNDEVVLLLGDCKKDAYKRTKARPSLEDAVLVCRRESVFGRRSFAARARLDARRSKEHEIVIEYALAAAGSSRDPEMWITVDGSVLLHVKSLQWKFRGNETLLVDEEPVQVIWDVHDWLFAGPGTQAVFVFKPGAPPEIQEDSGGNAIQGDGTDFCFFLQAWRTE

SEQ ID NO: 263151 - protein, 146 aa, Zea mays
  Clone ID: MRT4577_171605C.1.pep
GRVSDQASAPDTHHLPPRSTTPAMDTVFDSATSYHGCANFDGRPFSSIDDGLRLPGAWRLASRGFPAPLPGLTLTDAPLEMMTSGTEHVLHLDECDGGANLLLLTDRRSQEERLLLHRHGPEGNCHDHQDNNETDLRTGAPRRLQE

SEQ ID NO: 263152 - protein, 79 aa, Zea mays
  Clone ID: MRT4577_171606C.1.pep
VVRGSRIRPKSTSYMPASTSVSMSDPILKPSGRRILTTYIPHTIFQIARTHLVNSASFTHSTITSLSLIHEELKTALPS

SEQ ID NO: 263153 - protein, 129 aa, Zea mays
  unsure (1)..(129): unsure at all Xaa locations
  Clone ID: MRT4577_171607C.1.pep
MATKIFSLLTLLALSACDANATILPQCSQAPIAYLLSAYLTSMLAPDCENPALQSYTLQQAIAVRYIPLSPLXFNTAAVLSVGQXLVRTITAHXLQRLVLPVINTSSLSNLSPYSQQQHYLPFNQLSTL

SEQ ID NO: 263154 - protein, 113 aa, Zea mays
  unsure (1)..(113): unsure at all Xaa locations
  Clone ID: MRT4577_171608C.1.pep
SYGSGSGSRGSTLLGVVGEPIQTATSNVEYRCFXSDLRWTTVEHSIHNTFSTYREALTWTIILDTYRRRQTRGFGXLTLSTQEGXQTASMSSTAMDQVRRSMTDNEAHSRRRP

SEQ ID NO: 263155 - protein, 628 aa, Zea mays
  Clone ID: MRT4577_171609C.1.pep
DSQYEDGELRESGDCYWVDDGYEDVKHANWHYQVSDYKNEEATPGLTSLHTDSVANNVVIPVANDNGPQSRKEDIAVSPVSSKCSWLTNCLDGGSIADGKSQSIHLRGDTNMYGSNPSRVAVRSATTVSQSERCNDALGDMLNIRMKNTGWDMMPEDQKHSQHDARDVTDSSNRCVLSSDAARDDDSLQKKGLLNRDLQGVERQKSFDRPQRNELSRSDDGYGSGSKSGRAMDSHGSHDMYGTSRHVQTSARVEWVESSKRPRSTRHKSPEYYNYGTSGPRNAAEAAVAKMQSSGFVVARDGTLVRAVDAANAGQMPRRMRNPLSSSCHLISGWGSPVDRDEACGMSRGPVHARKASPERHFGANSNRSSRYGSEMEKNHTTDANLSSVHCSLSSRQRGTPTSRASLNLSRAHSRSPSGSRSRSPHDWAPRNRGKIMANGGSTLWKHSRSPPNHMTKGEIGRMASPRRQPGYDDRAMCYSPLSRNNTYSKNASTWVDGRNGSAVDISDDHNKRYSRRSSPLRITSRNDRFDVMDSQGRPRSGEFYRPTQGRLLYGYNRENKHGRNGEDGRECTDRYANNSVKRYDRSGAVKQFRNDTGDKFRTRISAPRSPDLQRGVSPRRFDRSFER

SEQ ID NO: 263156 - protein, 157 aa, Zea mays
  unsure (1)..(157): unsure at all Xaa locations
  Clone ID: MRT4577_17160C.1.pep
HAASAEQPXRAPKLNERILSCLSTRTATARSWPELEISPDAPAAFKVVVEITKATKAXIILPXKTGVITVDRGTCSSVACPHNYGFAPRTLXCEDNDPMNGVALMQETGVPVSFLGAIAIGLIAMIQQGDXADKIIAVCADDPAYRLYNEISELSPH

SEQ ID NO: 263157 - protein, 62 aa, Zea mays
  Clone ID: MRT4577_171610C.1.pep
QHQHPRFYTPGVRTITVQCLQLKSDPPENQQCPGTNQQRVRAVVITMRTHRCCHNCNVTGNK

SEQ ID NO: 263158 - protein, 56 aa, Zea mays
  Clone ID: MRT4577_171611C.1.pep
RGLALPVPNNDQTGLFPTVKKIYVSPPVAPTTRGHTMGPLMGPRWARQPNFAKNKM

SEQ ID NO: 263159 - protein, 113 aa, Zea mays
  unsure (1)..(113): unsure at all Xaa locations
  Clone ID: MRT4577_171612C.1.pep
GPDTTTWIWIFHFYAHNXKWHQVMLGKLXNTKFMAHFGQLSIIFLWLSGMYFHGARFSNYEAWLSDPTHIGPSAHVVWPIVGQEILNGDVGPGLRKIQITSSFFKTCRAFNIT

SEQ ID NO: 263160 - protein, 85 aa, Zea mays
  unsure (1)..(85): unsure at all Xaa locations
  Clone ID: MRT4577_171613C.1.pep
SSIXAPPQRPPSALPGCSTLXPFPLTTCPTPSPPAAKTATSFPHNVQNKLASPAHHLTVLTLRTNPCNLRSLIYPHLPPHSPFFQ

SEQ ID NO: 263161 - protein, 73 aa, Zea mays
  unsure (1)..(73): unsure at all Xaa locations
  Clone ID: MRT4577_171614C.1.pep
CVVLPRVREKKNVNAQILRHFRRLXLVLGIFPSMYAMDLTNQWPKELANKPKCLKFPSIWLHQTKDSLTPHGL

SEQ ID NO: 263162 - protein, 62 aa, Zea mays
  Clone ID: MRT4577_171615C.1.pep
MGMKLDTPPLTAANALLNATAPSVIKHTTSKRNLNSPEYMLADCRLYLSSVSIQGHTHGAQA

SEQ ID NO: 263163 - protein, 134 aa, Zea mays
  unsure (1)..(134): unsure at all Xaa locations
  Clone ID: MRT4577_171616C.1.pep
MSRKTLKTTRRETATAAWSPFSNVLRLLLLKDQEISVLCVDDVWLIVFSSCTNLSQXSRSLTNDVIDEDHTHSRNLGKTQHXPLELHLEHSQYACVNVPVAEACLLLCXMTREXLEGLNVQELHRLETNLASGL

SEQ ID NO: 263164 - protein, 34 aa, Zea mays
  Clone ID: MRT4577_171617C.1.pep
RMPGLKRVTRSAGKRQDLTCLGDGPYLKVWVPDR

SEQ ID NO: 263165 - protein, 155 aa, Zea mays
  unsure (1)..(155): unsure at all Xaa locations
  Clone ID: MRT4577_171618C.1.pep
PLRFRSPLALVPGSINPGGVWVGGDPLPPITPELGQGGCPALKDGVVLARCLGKAFPLLGQERXGXRVVPAALEEYPAARGWGSIQFFPPPLVVGFIQQSNNPVVRFVRDRFLFWLLSKTLVPMAGYDFGGLLFAGSRPWAGLQAIPPPPSFLKN

SEQ ID NO: 263166 - protein, 146 aa, Zea mays
  unsure (1)..(146): unsure at all Xaa locations
  Clone ID: MRT4577_171619C.1.pep
ERFRARSLIVRTEDREAALNPVSCSHARIEAIVLLWGRALVAGHAQVTPLPLGAVLAADNGGILRHAFTGASVCDGAAGDSLERVLIISLXKLPLRSPPPDSGPASSALIMVMRRTLSALKKRGDSHLGVCQLLLGLLDDSQISDC

SEQ ID NO: 263167 - protein, 112 aa, Zea mays
  unsure (1)..(112): unsure at all Xaa locations
  Clone ID: MRT4577_17161C.1.pep
VGAEIVRKSLSYPLXLVAKNAGVYGRVVSEKVLAHENFRYGAHAAPGGYEALMAAGILGPPQVVGCCLGPAASGAKPFLPSDAVVVAPQVGEQAPSFPANPMAMGGGPGFGF

SEQ ID NO: 263168 - protein, 40 aa, Zea mays
  Clone ID: MRT4577_171620C.1.pep
TTSLESGIPLPLLFYDAKLDSLALGQAHPRLITHADGETR

SEQ ID NO: 263169 - protein, 63 aa, Zea mays
  Clone ID: MRT4577_171621C.1.pep
MFVGTVILFVWERVTPKKFYSFAGGVPSGFICGKGIWIVPFAKLSILRIAPPICMYFNPSLSR

SEQ ID NO: 263170 - protein, 402 aa, Zea mays
  unsure (1)..(402): unsure at all Xaa locations
  Clone ID: MRT4577_171622C.1.pep
PRVRSSLISEQAARTGGAPMSSRDLYFHDELASLFAQRPAPAGEAMMTHQHQQQQQAPASWFADYLHAGAPGMGMDYDLLCRALDLPLPGDDVVKREEELLLVDTGGDGGGFAAPTPTPSGGGTAPVTPNTTSSMSSSSSEAAGGAAGGGGGGGGGREEDSPQGRCKKEEGDGEESKALDKGEEDADKGKKGSAAAGKGKGKGEKRQRQPRFAFLTKSEVDHLEDGYRWRKYGQKAVKNSPYPRSYYRCTTQKCPVKKRVERSSQDPAVVITTYEGKHTHPIPVTLRGSTHILAAQLHHHHNHHLGAFPTPLPQTGAAPFGRAAGXRGVIDMLGLLPPRNHGMSGGPMSAVAGAATTTAATITTTSTTPSSPPSLQMQHFMAQDFGLLQDIMLPSFPRRRRR

SEQ ID NO: 263171 - protein, 56 aa, Zea mays
  Clone ID: MRT4577_171623C.1.pep
SARAHNTGPHFGMGGARRTRGASEAARGGLRLTQMLIRLLLHLYPGTRLKLKGIVN

SEQ ID NO: 263172 - protein, 126 aa, Zea mays
  Clone ID: MRT4577_171624C.1.pep
PGTHRVRLFYLGIKELVAIFLKKKKKKKKKKKKKKKKKKKKKKKKKNQKRGANSKGPHACGPHASLHWAGGYQIHRPGIPQASPPPKPLAGTPPESPGRKSPLSPPPVSPVGALPQAPFPTGPPPR

SEQ ID NO: 263173 - protein, 63 aa, Zea mays
  unsure (1)..(63): unsure at all Xaa locations
  Clone ID: MRT4577_171625C.1.pep
SPRPSPRGGVLGVSFGVSPWPSCPPPVGFGRPLRSSPRWFAGFCFSLRVSXLTSFFVGAXAXX

SEQ ID NO: 263174 - protein, 138 aa, Zea mays
  Clone ID: MRT4577_171626C.1.pep
RCRLFTRHALPSPSAPGIRWTSIVSPARPSLLGRLPSTIRQAMLSAHTAHPPRCPNTCMTAATLNLDDVVPPTLSPRDHYHSDIPLHPTTSYTPSIYPDVAPFRSTITATSIIKFLAAVWRLSYVLRQHRRRTTTLCR

SEQ ID NO: 263175 - protein, 68 aa, Zea mays
  unsure (1)..(68): unsure at all Xaa locations
  Clone ID: MRT4577_171627C.1.pep
TITSTILSSSSVADYSVRIGDGDKRVEEESGFXTWTXRMNNGSFSCIMQIQIQTAVKGIISLTKTLKG

SEQ ID NO: 263176 - protein, 220 aa, Zea mays
  Clone ID: MRT4577_171628C.1.pep
AGRFRNCFFFWERLQLFGSELLTSLLAVGLNYAATFILPSSSLLKDPITTLSTTVPILFVGHLLLVALSNVLRGTSYKLLKTLLYSAIASVLATSILYVLIVLFGAPLLDKIPNTFLFSAYLSILTIMPCFQSLENPVWIKVFIQHSPTTTSEIYAYAQVVCTLTGAWIGAIVLPLDWERDWQVWPISCIISTYVGHAVGVLAAFVWSSLKGIFSKKKSE

SEQ ID NO: 263177 - protein, 779 aa, Zea mays
  unsure (1)..(779): unsure at all Xaa locations
  Clone ID: MRT4577_171629C.1.pep
AYLFIAPEEEDAGETGSYVFAQECLDRLXIAVGGNTILSVAAELLPSFFSSEDWKRRHAALVTIAQIAEGSAKMMIKNLEQVVGMVLNSFQDPHPRVRWAAINAIGQLSTDLGPELQNQLHHVVLPSLASAMDDVQNPRVQAHAASAILNFSENCRPDILTPYLDVIVGKLLLLLQTGNQMVQEAALTALASAADSSQEHFQKYYDAVMPYLKAILMNATDKSNRMLRAKSMECISLVGMAVGKQKFKDDAKQVMEVLMTLQGSQMEADDPITSYMLQAWARLCKCLGQDFLPYMRGVMPPLLQSAQLKPDVSVTSAGPEDENGESDDEGVETITLGDKRIGIRTSLLEEKATACNMLCCYADELKEGFFPWIDQVTTTLVPLIKFYFHEEVRKAAISAMPELLRSAKLAIEKGQAQGRDKSYLKQLSDYIVPALVEAMHKEPEPQICASILESLNESIQLSGTLLDQNQVRSAVEGVKEVIVASTNRRIERTERARAEDFDSEEEELLREENEQEDEIFDQIGDCLGTLVKTFKTSFIPFFDELSMYLTPMLGKNKSPEERRIAICIFDDVAEHCREAAVRYYDTYLPSLLEACMSENPDVRQAAVYGIGICAECGGSAFRPHTGEALSRLYNVIKHPNALDLDNAMAYDNAVSALGKICRFHRDIIDVSQVIPAWLSCLPIKNDLIEAKLVHEQLCVMLEQSERELLGHNNQYLPKIVSVFAEILCAGKDLATEQTASRMVNLLRQLQATLPPSVLASTWSSLQPQQQLALQSVLSS

SEQ ID NO: 263178 - protein, 71 aa, Zea mays
  Clone ID: MRT4577_17162C.1.pep
TINSSPTPDKVNFNQQAYTLFDRANRTLYVHNRLVDTEAPRAQALALSINYQHNKTLHLMIYYRPRSGYFL

SEQ ID NO: 263179 - protein, 50 aa, Zea mays
  Clone ID: MRT4577_171630C.1.pep
EPARPALLAIISARGLSQSLHGIICSAVPLSFSLPVETHALSRESIGREG

SEQ ID NO: 263180 - protein, 46 aa, Zea mays
  Clone ID: MRT4577_171631C.1.pep
TRTSTPELSIFTQLSSEKLFITMNISTGMSHMWCCQCQHIHTYSSR

SEQ ID NO: 263181 - protein, 527 aa, Zea mays
  unsure (1)..(527): unsure at all Xaa locations
  Clone ID: MRT4577_171632C.1.pep
PAGAVPIRRFGPGVRPRVQSKGFESKQKIFSEEFELVTQALFTDPSDQSGWFYHLWLLAQTSSPDNPQLIASWPSNAAKLSFSFIKEKAEQHTLSSVWSRTVPIVLYFNEPVKGLNHSSVNLKSDLEFGKDIIWRPLTMADSGYSNCWATYLQIINECSSLQEYSVEVSIPCSNGIVSRSGSNYNCPVHFTFCIELISNDPVQGLDMFDKPVAWNCSESFQPHGNRDPIPFDLLKITSALVEHDSNWHFERLSEEIDLFRELADDNSKFGKLTLARLLLACAAIKSRGRSLIERKGYCEEALGLFTDLIHLDPSHKQYYEDERSLALMDKLTCDMETFTKHXLFRFNQIQLPCIXQFRRLSVTRIGFAEXLGFTALETPTKIISLKVLYLSFNKIGAHSIDTTRYICSSPFSHKMEASEACEAYQEVNINVEDLSFNEIGVRSLKLARYICPSPFSHKTEASEAFEEYQEVNNINVTEYWDAILFFRSLKLAQLDIRGNAVASKDGFRTLVVTLIPCLKWFDGEGVS

SEQ ID NO: 263182 - protein, 222 aa, Zea mays
  unsure (1)..(222): unsure at all Xaa locations
  Clone ID: MRT4577_171633C.1.pep
RLSSTHCHPSGXTVPIVLYFNEPVKGLNHSSVNLKSDLEFGKDIQWRPLTMADSGYSNCWATYLQITNECSSLQEYSVEVSIPCSNGIVSRSGSNYNCPVHFTFGIELISNNAAQGLDTFDKPVAWNCSESFQSHGNRDPIPFDLLNITSALVEHDSNWHFERLSEEIDLFRELPDDNRLCSKSILNLLFHNYNPISITYSLFQQVWEVDISPAIACLCCYK

SEQ ID NO: 263183 - protein, 237 aa, Zea mays
  unsure (1)..(237): unsure at all Xaa locations
  Clone ID: MRT4577_171634C.1.pep
MSAATSTAPSIGEYPSPVSPPYPATSKDLELRRAMTASARSAAFASADVVFEDEWLAVVDKPAGVYCDALLTSFPXCRLRLDRDTSGLMVITKCNKVAGKLVKAFTDHKVKKTYLALCIGFPPAWEKIKICSGHGRSKHGAWRVYAMSDVGRSLPGGSVVRDMSTRFEVLGVNXVKGSSXPYNLDTDDIEPITVQEKATDQTCGGDANSSVILVRAYPQSGRTHQIRLHCQYLGLPI

SEQ ID NO: 263184 - protein, 301 aa, Zea mays
  Clone ID: MRT4577_171635C.1.pep
SFQPHGNRDPIPFDLLKITSALIEHDSNWHFERLSEEIDLFRELPDDNSKFGKLTLARLLLACSAIKSRGRSLIERKGYCEEALGLFTDLIHLDPSHKQYYEDERSLVLMDKLTCDMETFMKHCSVQVQPNSAPLNHVQLCRLSLTCIGFAERLLWVQMLDLSHNSLRSVEGLEALQHLVFLNISNNQISGFTALESLTKIISLKVLDLSFNKIGAHSIDTTRYICSSPFSHKMEASEAFEAYQKVNINVEEYWDAILFFRSLKLAQLDIKGNAVASKENFRTIVMMLIPCLKWFDGEDVN

SEQ ID NO: 263185 - protein, 307 aa, Zea mays
  Clone ID: MRT4577_171636C.1.pep
MSAATSTAPSIGEYPSPVSPPYPATSKDLELRRAMTASARSAAFASADVVFEDEWLAVVDKPAGVYCDALLTSFPCSAVSENPATKPNLHLANRLDRDTSGLMVITKCNKVAGKLVKAFTDHKVKKTYLALCIGFPPAWEKIKICSGHGRSKHGAWRVYAMSDVGRSLPGGSVVRDMSTRFEVLGVNGKGQFREPYSLDTDDIEPITVQEKATDQTCGGDANSSVILVRAYPQSGRTHQIRLHCQYLGLPIRGDVKYGGVIEWDGVECEGHALHAESLSFVHPITGLPITLRSPLPPWAKDCISAME

SEQ ID NO: 263186 - protein, 67 aa, Zea mays
  Clone ID: MRT4577_171637C.1.pep
NPSLFFLGNPLLESQPGDKLSPPLDLVVKDWCHFGVSHLMKRGLFCLALLFAPFFLNVLLLLYHGPL

SEQ ID NO: 263187 - protein, 82 aa, Zea mays
  unsure (1)..(82): unsure at all Xaa locations
  Clone ID: MRT4577_171638C.1.pep
PTIFSGILTLTSVRMLGRAKSYIXPPRTTLIVYMRPXXXLFKAGKKNILSFSINHSYEEASVHLKNTFLQSTGLSHRALFTP

SEQ ID NO: 263188 - protein, 79 aa, Zea mays
  unsure (1)..(79): unsure at all Xaa locations
  Clone ID: MRT4577_171639C.1.pep
MRSLQCTAWVLRQGSRAERXERGXITIDIXALWKFXETTKYYCTVIDAPGHPDFIKNMITGTFQAGCAVLIIDSTTGGF

SEQ ID NO: 263189 - protein, 51 aa, Zea mays
  Clone ID: MRT4577_17163C.1.pep
LGVKRGFQPPGGVFKNPLVSQIPRRAPPLVGLPLGFFRKFWPVKNGPFFFP

SEQ ID NO: 263190 - protein, 146 aa, Zea mays
  Clone ID: MRT4577_171640C.1.pep
ERAAANQDVPHRFTGPADALAKRTGSGLGHTLEHTQDRTLLDSLMASNMGVDSDKRRHSSSRNGSTSRKALLSSNRGSGDPSEPNRSSHLVPTTTSSSRPSTNQRLHHSTGLEGRTPSFPKPGRIGYDDPTMRSFERLTISAERRK

SEQ ID NO: 263191 - protein, 144 aa, Zea mays
  unsure (1)..(144): unsure at all Xaa locations
  Clone ID: MRT4577_171641C.1.pep
LHGCTMHLALPDXVYLVDAIEGXGKGLTQARKPVLDFAHITKXIYDCKKHSEAWYHQLDLKLHTVXNTQIAHTLIXEPEQNRKNRRPLITTTYILAVLLADXRYCGILYSEKEXVHTLIRHDPNCRTIRSLNNIMGLAATNDRR

SEQ ID NO: 263192 - protein, 112 aa, Zea mays
  unsure (1)..(112): unsure at all Xaa locations
  Clone ID: MRT4577_171642C.1.pep
IKRKKKRKKPKGKEEGKKGGGGGKKRGRGEKKKKKKGKGKKKKKKEKKKGKKKKKEGGRKXRRKKPEKMLKQTEKEKGKGGGGRGGGSVERTTEEGEKSRKKKRGGKRGVRE

SEQ ID NO: 263193 - protein, 164 aa, Zea mays
  Clone ID: MRT4577_171643C.1.pep
FFRVQKTGMTAQPLNDQLALLRNTCGSDHGNRRISFTAVGTDKFISAVLDIVTQTDLIMGDMGVLVQPLRLQSNFLIHTLPTCRHRDHDNEEHYDRRTSGGMHDTDTSHLKLEDIGDYFPMLSQKDGESGSSTREERIYPLPPQYQYQYQGIGHTMRPSSHRDP

SEQ ID NO: 263194 - protein, 44 aa, Zea mays
  Clone ID: MRT4577_171644C.1.pep
GLRCGSHRIFYTVSEHIGLHARFSLLWQNTTGTLTRGGLGIEGE

SEQ ID NO: 263195 - protein, 46 aa, Zea mays
  unsure (1)..(46): unsure at all Xaa locations
  Clone ID: MRT4577_171645C.1.pep
CACSQAEEGHVELLGNLLYAAKVVAEQEGLADGFRIVMDDGPRXSQ

SEQ ID NO: 263196 - protein, 81 aa, Zea mays
  Clone ID: MRT4577_171646C.1.pep
LPTPSLISLIHITKDLKHRTTLINLIRLHTTPTRINNNNKEANYFTTQIIKNQLVRLRTSNNRWATQKALVYHSKHINQPK

SEQ ID NO: 263197 - protein, 62 aa, Zea mays
  Clone ID: MRT4577_171647C.1.pep
LDACVKTILSAVRFQPQAPFSNIVSCRGNISGSSSLSRWAIMSSSLTIRWAVSVRLNTELAN

SEQ ID NO: 263198 - protein, 84 aa, Zea mays
  Clone ID: MRT4577_171648C.1.pep
MFNGTETCIDIILYIILSPLGVVGGFVYSVEFWICLTLTLFGYLPVIIIRRSGPSPTSRPVRYHAMRAHGDLVSRDTLCSCLDM

SEQ ID NO: 263199 - protein, 73 aa, Zea mays
  Clone ID: MRT4577_171649C.1.pep
ETNAPKDTRKAYIFLSSVSKMADLSRPSDAIAIARLPARPLAHCASASPHPWAVAKGAGTRRHPRRTLTPLRV

SEQ ID NO: 263200 - protein, 95 aa, Zea mays
  Clone ID: MRT4577_17164C.1.pep
EFSSTKFKVTAAKLSAISGRGKGGKGLGKGGSKHHRKVLCDNIHGITKPDIHRLTRRRGLNRIYVLIYYKTRTCFKILFENIIPYFLYYNKHVRL

SEQ ID NO: 263201 - protein, 75 aa, Zea mays
  unsure (1)..(75): unsure at all Xaa locations
  Clone ID: MRT4577_171650C.1.pep
MAEDNHMLLHEPLQLAFELFPAKPKRFXSLTKIVGTLGPNSHSGEIIQESLTAGMSHAPFDFSWIDAAYHQKTLD

SEQ ID NO: 263202 - protein, 97 aa, Zea mays
  Clone ID: MRT4577_171651C.1.pep
IRVENNARSFLLMNALGAIQGHEVIHGADSPTILCWCHGATLSVGFDHIPQRSICFDERLRLPVQDERTPWWDSTSANWSPRLWLHQACTGTDLLAI

SEQ ID NO: 263203 - protein, 38 aa, Zea mays
  Clone ID: MRT4577_171652C.1.pep
GEEIGQERGTMKTKPHRRPPVEAPCARSKPLTMRASCL

SEQ ID NO: 263204 - protein, 58 aa, Zea mays
  Clone ID: MRT4577_171653C.1.pep
MWHCFGSPFFGRNETGPKTTQPVMWGIRLEQLPSSPLNKKHILGRRKTFNGLHTAFFC

SEQ ID NO: 263205 - protein, 201 aa, Zea mays
  unsure (1)..(201): unsure at all Xaa locations
  Clone ID: MRT4577_171654C.1.pep
EKERKEKKERKKEKEDKKRRKKEKEEKRKKKRRKRKKXEREKRKKRKKKRIEKKKKKEKKKKRRCRNKEERRKKKEKRKKNKERKKRKEKKKKKKEIREEKRRGKKENKGKKQEKKLKSKRRKKKGKEKKRKEKKKNTRKGDKDQQQRKKNRAKKNTKSKKEKXKQRKNKKTKQAKKKTSKKKVHIRPNDKQQKGQGIRRG

SEQ ID NO: 263206 - protein, 137 aa, Zea mays
  Clone ID: MRT4577_171655C.1.pep
MFESRHAADRYRLHLHRARSVVLTSDELVEIRAAQRTFEGAYMRTAIGQFSFALVVLKIFTAEFYSIGALFAVYGVGILFTSLFRRQQGNKQFFSEVGADGLCHKKFRTSGNVVVALTALSISAYICLLVLTLKLAK

SEQ ID NO: 263207 - protein, 112 aa, Zea mays
  Clone ID: MRT4577_171656C.1.pep
FGYTSSFPNADPTWAVQPAPSTLAPRLLLPWQKPRLHLYWIKRAFLLVPLNPMRPRPRPGRRSGSSRKRGFTPSNTTRSVPASPICVFGSSKFTKLLIFATPMLHLRILEGY

SEQ ID NO: 263208 - protein, 100 aa, Zea mays
  Clone ID: MRT4577_171657C.1.pep
ALKTVMSRPPPLLFCKNFFQAPVFFLPLRKPPMSICVFFSLLCTPLCYRLFLYINHSMIGIFPLHPIGEAHQVRGHFVNKKRVKFKKHFFSPYFENHGAS

SEQ ID NO: 263209 - protein, 76 aa, Zea mays
  Clone ID: MRT4577_171658C.1.pep
PLGLPTRCYHNPDNGGSLINRHAYRRWPTCSSRCRGTALLYISRRLPINDCKATSNMFEGEGAPRCLLIIGSTPIE

SEQ ID NO: 263210 - protein, 113 aa, Zea mays
  Clone ID: MRT4577_17165C.1.pep
GLEQRAPQISILKLPSECFRPPRSQPWPAPPRSRSPPSVAAAAAAVARAQAPRARASLTVNPPERAQHGMKQASETLTVDLGRTASALSGNPIKGHNLKAGVGSVLATEICGA

SEQ ID NO: 263211 - protein, 140 aa, Zea mays
  unsure (1)..(140): unsure at all Xaa locations
  Clone ID: MRT4577_171660C.1.pep
EKGGTQGEIPQNQGPWGGPPKTSPKKEFPNDFKKNFIQKRVXKKFTQGQLGQMKKKKPPGIPGDKKGKAIPPPQIFKKLQRALGTKLGGKKKLSPKFGARSLKKGGKKGKRAGYLSKVGNPNPPACFCWPKKEKKGSRPR

SEQ ID NO: 263212 - protein, 68 aa, Zea mays
  Clone ID: MRT4577_171661C.1.pep
RKRTVLQTCYLHNMGHWSFRALKAVDTTVMLMYHCLKCHRLLCSLFACFISSLAELSHLSLKNILVPF

SEQ ID NO: 263213 - protein, 86 aa, Zea mays
  unsure (1)..(86): unsure at all Xaa locations
  Clone ID: MRT4577_171662C.1.pep
XLWLFFWSFXXLRPKAMSMREREHYLQQGARAKHTARPGTRRRGAAVAVAGRDVPKNQGVVLSRGREPGQPTTAREDSQREAPSSI

SEQ ID NO: 263214 - protein, 592 aa, Zea mays
  Clone ID: MRT4577_171663C.1.pep
MVGEDRRWMYEGWRMNDPSAEWIRKTEAFIARAFTLSRTGTDVRCPCSMCRIYRCQDKRTLSGHLCKYGYMPDYEVWVYHGEEFPRENASEAHNNDDVEYDRMDEMLEDLRGDPDLVFPPNPEEVPPPEVKKFFDLLKVAEEPLHEHTTVSILAFVTRLMAIKSKFVFSNNCYNELLSLISEVFPPNHKMPKDVYQCRKLLSGLGMDYQKIDVCPDNCMLFWKDHENDSKCLKCDKSRYVEVKNDDGEMVTSTVAQKQLRYMPLAPRVKRLFLSRNTARHMRWHKEHERGDTHVMTHPSDSDAWKPLDDFDPEFASEARNIRIGLATDGFTPFNTNATSYSSRVRKPRKTSWVPPPKEPVNKVEIIPSGDGAWLDSSFTGKDRVRQVNKVLGNIYHMRWPGLVIEDGIEVPVTRWDQYGLAVNAQHGNAQGVVWHDFWKYYKLPDGDTHTEHAHSVFHRNAADVVADMIYYVRIQHSIPWIAANGAAWRALCRYWASDNFKAKSIRQSSNRGTESYHKYGGDDHFRLAKRMEASSGVVPSDVQIYLRGHRGPDPANPDVLCSQQATDRLMSVLKCLAAYAEAMSSQHGSDYD

SEQ ID NO: 263215 - protein, 1399 aa, Zea mays
  Clone ID: MRT4577_171664C.1.pep
MDPDGRITGERKNYDIITGEKNKIRKKKDYRRTWEALASRADQDRRWMYEGWRMNDPSADWIRKTEDFIDRAFAISRTGTDVRCPCSMCRICRCQDKRTLLGHLCKYGYMPNYEVWVYHGEDFPRENLPEANNTDDVEYDRMDEMLEDLREDPDLVFPPNHEEPPPPEVKKFFDLLKAAEEPLHEHTTVSVLAFVTRLMAIKSKFVFSNNCYNELLNLISEVFPPNHKMPKDVYQCRKLLSGLGMDYQKIDVCPDNCMLFWKDHENDSKCLKCGKSRYVEVKNDDGEMVISIVAQKQLRYMPLAPRVKRLFLSRNTARHMRWHKERERGDTHVMKHPCDSDAWKALDDFDPEFASEARNIRIGLATDGFTPFNTNAASYSCWPVFVIPYNLPPHLCMKYDYMFLSLIIPGPDHPGKGLNVMMQPLIDDLKKLWKGVEAYDCYKNEKFTLRVAYLWSIHDFMAYSLFAGWSCHGTLTCPICGKDTDCFRLEFGGKICYFDCHRCFLPQKHLYRFEVNTFKKGTIVTKGPPMRLSGIEIEAMLNNLKENESGNGYIGFGTEHNWTHKCGLWELPYVKALILMHNIDVMHQERNVGESILSTCMNLDGYAAGFRRAVNLKTNKITGLKSHDYHIMMERLLPVMFRGYLKVSIWQALAELSYFYRQLCAKEINKDVMEKLETEIPVLICKLEKIFPPGFFNPMQHLLVHLPYEAKVGGPVQYRWMYHIERALKKLSSMVGNKGRVEGCIAEEFKYKETKFECTRPFAATKNTGVVCRAVDDRGREMNYYGVINDILEYDFAGSKNLNVVFFKCDWFDPNQGTVKNQFGMVEVKHELKTSACSKFVLAHQVDQVYYIPYPSIKLEATWVVYKVNPREQLHTRGEWFEAEVEEIYQEDELPTNFNIDTEVLPESLVGDPEDVDEPEDEEETEEWRQVEDEEETGWGEWPNDGGSGVGGASGSREGEAGVSGGGSGSGGVGGSSRVRKPRKTSWVPPPKEPVNKVEIIPSGDGAWLDSSFTGKDRVRQVNKVLGNICRMRWPGLVIENGIEVPVTRWDQYGLAVNAQHGNAQGAVWHDFWKYYKLPDGDTHTEHAHSVFHKNAADVVVDMMYYVRIQVINQAMLSSEGRRATSKSEASQYGLSMTEQDFLQHSIPWIAANDAAWRALCRYWASDNFKAKSIRQSSNRGTESYHKYGGDDHFRLAKQMEASSGVVPSDVQIYLRGHRGPDPANPDVLCSQKATDRLAAYAEAMSSQHGSDYDWRTAPIDPQAVYASGGKPHGRYSIFDNVIDSSQVTVQRGGSSRSAARSSRRSTQDTAEVEQLREELRQHQERQRVQEEYLRQHAAQQEYYATQFQQHQALIQVYETPPATLPAQQQDDGLDFVNTLFASGGSKHHSLIFPDVDRQ

SEQ ID NO: 263216 - protein, 35 aa, Zea mays
  Clone ID: MRT4577_171665C.1.pep
GFITCIIACKLRPYQAVALERSEWFPYEGFTASGD

SEQ ID NO: 263217 - protein, 1527 aa, Zea mays
  unsure (1)..(1527): unsure at all Xaa locations
  Clone ID: MRT4577_171666C.1.pep
MVGEDRRWMYEGWRMNDPSVDWIRKTEDFIDRAFAISRTGTDVRCPCSMCRICRCQDKRTLSGHLCKYGYMPDYEVWVYHGEDFPRENSPEANNTDDVECDRMDEMLEDLREDPDFVFPPNHEEPPPPEVKXFFDLLKAAEEPLHEHTTVSVLAFVTRLMAIKSKFVFSNNCYNELLNLISEVFPPNHKMPKDVYQCRKLLSGLGMDYQKIDVCPDNCMLFWKDHENDSKCLKCGKSRYVEVKNDDGEMVTSTVAQKQLRYMPLAPRVKRLFLSRNTARHMRWHKEREREDTHVMTHPSDSDAWKALDDFDPEFASEARNIRIGLATDGFTPFNTNAASYSCWPVFVIPYNLPPHLCMKYDYMFLSLIIPGPDHPGKGLNVMMQPLIDDLKKLWKGVEAYDCYKNERFTLRVAYLWSIHDFMAYSLFAGWSCHGTLTCPICGKDTDCFRLEFGGKICYFDCHRCFLPQKHPYRFEVNTFKKGTIVTKGPPRRLSGIEIEAMLNNLKENESGDGYIGFGTEHNWTHKCGLWELPYVKALILMHNIDVMHQERNVGESILSTCMNLGDKTKDNIKARKDLAKLCNRPTQELDENGKKPRAQFCLKPKQKNEVMEWLKKLKFPDGYAAGFRRAVNLKTKKITGLKSHDYHIMMERLLPIMFRGYLKVSIWKALAELSYFYRQLCAKEIKKEVMEKLETEIPVLICKLEKIFPPGFFNPMQHLLVHLPYEAKVAAFTSVYFADEHNINAPTLRYHDAKVRTRSNLQIFEIEGKTVGASTEYHPECEEKLDALLYMYENMDEMTPYFKNLISPSDWQCDKIPNLDEDLLQMSYAIVKVRSYGRYDIKGFRFRSTKFECTHPFAATKNTGVVCRAVDDRGREMNYYGVINDILEYDFAGSKNLKVVFFKCDWFDPNQGTVENQFGMVEVKHELKTSACSKFVLAHQVDQVYYIPYPSIKLEATWVVYKVNPREQLHNKGEWFEAEVEEIYQEDELPANFNIDTEVLPESLVGDPEDVVKQLAKGLARRASIFGRKEDLVFQGTSSSSSRRRALLEHVPELQGQPVGVLRDENESEDEVETEEGIQVEDVEDVQGREAERGWDEWPKDASGWAGDGGSGVGGASGGGSGSGGVVGSSRVRKPRKTSWVPPPKEPVNKVEIIPYGDGGWVDSSFTGKDRVRQVNKVLGNICRMRWPGLVIENGNEVPVTRWDQYGLAVNAQHGNAQGAVWHDFWKHYKLPDGDTHTEHAHSVFHRNAADVVADMMYYVRIQVINQAMLSSEGRRAATKSEATQYGLSMTEQDFLQHSIPWIAANDAAWRALCRYWASDDFKAKSMRQSSNRGTESYHKYGGDDHFRLAKRMEASSGVVPSDIQVYLRGHRGPDPANPDVLCSQKATDCLVVYASGGKPHGRYSMFDNVIDSSQVTVQRGGSSRSAARSSRRSTQDTTEVERLREELRQHQERQRVQEEYLRQHAAQQEYYATQFQQQQTLIQVYETPPATLSVQQQHDGLDFVDALFASGGSEHHFSLIPDADRQ

SEQ ID NO: 263218 - protein, 424 aa, Zea mays
  unsure (1)..(424): unsure at all Xaa locations
  Clone ID: MRT4577_171667C.1.pep
IGYLEAGRDVPELQGQAVGVQRNEDEPEDEEETEEWRQVEDEEETGWGEWPNDGGSGVGGASGSREGEAGVSGAGSGSGGVGGSSRVRKPRKTSWVPPPKEPVNKVEIIPSGDGAWLDSSFTGKDRVRQVNKVLGNICRMRWPGLVIENGIEVPVTRWDQYGLAVNAQHGNAQGAVWHDFWKYYKLPDGDTHTEHAHSVFHKNAADVVADMMYYVRIQVINQAMLSSEGRRVTSKSEASQYGLSMTEQDFLXSIXIPWIAANDAAWRALCRFWASDNFKAKSIRQSSNRGTESYHKYGGDDHFRLAKRMEASSGVVPSDVQIYLRGHRGPDPANPDVLCSQKATDRLXAYAEAMSSQHGSNYDWRTAPIDPQAVYATSGXKPHGRYSIFDNVIDSSQVTVQRGGLSRSAARSSRHSTQDTAEVE

SEQ ID NO: 263219 - protein, 60 aa, Zea mays
  Clone ID: MRT4577_171668C.1.pep
RVRSGIKEAPFEYKLDANGVDNRVSLVRVPVAYSGSAIFYHNCMDSSSFCPLTITHVVSS

SEQ ID NO: 263220 - protein, 97 aa, Zea mays
  unsure (1)..(97): unsure at all Xaa locations
  Clone ID: MRT4577_171669C.1.pep
PERGHLRTILYLRPDREAYKILVLHKLCHVINYRRGRVRLHHQRGKRRQHGSMLEGSHNARGALCCNGRRKHKMDYGTIWRDEITRPSXPEIRQRTA

SEQ ID NO: 263221 - protein, 95 aa, Zea mays
  Clone ID: MRT4577_17166C.1.pep
PPFGGGPPRFFRPAPIFGKGPAFVPQRPTKVGGVPVFFGLGPEFFQCFERVFFGKGVVKFLVSPPFFCEPPVPFLWLGPLSCGCGLFKFPRFLCF

SEQ ID NO: 263222 - protein, 87 aa, Zea mays
  Clone ID: MRT4577_171670C.1.pep
MYHTLRHECLTRIPGLSGSELIGLNVVAQSLLYSTCKGKVAPMYLFHGPRGTGKTSTARIFAAALNCVSLEEQRPCGFCKECVILFS

SEQ ID NO: 263223 - protein, 413 aa, Zea mays
  Clone ID: MRT4577_171671C.1.pep
MEAAAAVVGFGLTRWQAAALSAVAGWVWAASFYDLTRRARALVQPWVTRRVHAETAAILRFQRLEHKLLDNIFSVLSCVVSVPFYTGFLPLLFWSGHGRLARQMTLLMAFCDYLGNSVKDIVSAPRPCSPPVRRVTATEDEKENAMEYGLPSSHALNTVCLTGYLLHYVLTFGEHGSVTVAAGLSLAFLLVMLVGIARIYLGMHSLTDVVAGIGFGIVILAFWLSVHDRVDAFVVSGENVATFWAGLSLLLCFAYPKPEFPTPSFEYHTAFNGVAFGIVYGIQQTYFHFHTPDAPVVFSAELPLLTFAGRVLVGIPTILAVKFCSKALSKWLLPVVCSTLGIPTVSSCYVPALRADSGSGKNRQGAGHLQRLLFSHFPRKAYDVDTGIRFVQYASLAWSVVDLVPAMFAHLNL

SEQ ID NO: 263224 - protein, 59 aa, Zea mays
  Clone ID: MRT4577_171672C.1.pep
RLEFPPFFYPPTPSTHRGGSTKGVPAQTASKIGQIPQIVSILFHNYIVYSFKENTTLLQ

SEQ ID NO: 263225 - protein, 126 aa, Zea mays
  unsure (1)..(126): unsure at all Xaa locations
  Clone ID: MRT4577_171673C.1.pep
PLRNRLAGARKRDRPPCFSKANPKGGGGRPKAALGLILALGENLFLRLLEDPAMPDQFRRKLFSKLKERSKPPKAGWSLLLGPYGFXDLNRLNWKFSWVPKIIQAAGRWYPYNNLMERHFGWPPFS

SEQ ID NO: 263226 - protein, 132 aa, Zea mays
  Clone ID: MRT4577_171674C.1.pep
QLSPPPLRFHVGVGVGKAKEVTEAITKAAMNGRRNLVTVPLTKYSTFPHRADADYGAAKVMLRPACPGSGVIAGGAVRVVLEMAGVENALGKQLRSKNPLNNARATIKATQMMKQFKDVAEERGIPMEELWK

SEQ ID NO: 263227 - protein, 96 aa, Zea mays
  Clone ID: MRT4577_171675C.1.pep
MPPRAAPSSSPLPLALAAVAIVVVALAVSSCSATTDAPGLGVGAREMVARDDPKCEEMVPCTFRRCIQYCVSIGLQPKGFCNSKPNMQVYCCCVIP

SEQ ID NO: 263228 - protein, 121 aa, Zea mays
  Clone ID: MRT4577_171676C.1.pep
GVGVGKAKEVTKAITKAAMNGRRNLVTVPLTKYSTFPHRADADYGAAKVMLRPACPGSGVIAGEPVRVVLKMAGVENALGKQLRSKNPLNNARATIKATQMMKQFKDVAEERGIPMEELWK

SEQ ID NO: 263229 - protein, 61 aa, Zea mays
  Clone ID: MRT4577_171677C.1.pep
MALPASSSGLFRFVSPRSRPQSTDIVAAASWGVFAGTAGLYLVQPFDWIKKTFFEKPEPEA

SEQ ID NO: 263230 - protein, 375 aa, Zea mays
  Clone ID: MRT4577_171678C.1.pep
MTSVSEDQGFCLCLHDIFDYDGRPARGRPGRDPRTSPASSSFPSIAVAGASYNFKMAATATAMAIATISPAAPIPSAPFPSLPLPLGLRLRSQPLLFAASRRRFLHVPKAASWDESVPEDGGDAEESVAAGDDEDEDEKPRPEPVSSSEFQFAAPPEGYVEPAAFDELPPESPEDVAAAYESLYGPAFSGETLLGNNVFEVKVVDPIDMDREQRPNDDFTERVVQVNRVTKVVKGGRQLSYRAIVVVGDMKGHVGVGVGKAKEVTEAITKAAMNGRRNLVTVPLTKYSTFPHRADADYGAAKVMLRPACPGSGVIAGGAVRVVLEMAGVENALGKQLRSKNPLNNARATIKATQMMKQFKDVAEERGIPMEELWK

SEQ ID NO: 263231 - protein, 73 aa, Zea mays
  Clone ID: MRT4577_171679C.1.pep
SLTQEERRILKDRARRTCTESSHADEAAPEQLRDHRDLLVHVEGRRLRARRDLRGAHGQLQRAVRGDEHQRVG

SEQ ID NO: 263232 - protein, 97 aa, Zea mays
  Clone ID: MRT4577_17167C.1.pep
HNNRLLAMSEDDLPYHVRVTADGDLETAGRYDFGGQLDTAMIAHPKLDPATGELFALSYNVVSKPFLKYFYFTADGRKSPDVEIPVDAPTMMHDFAV

SEQ ID NO: 263233 - protein, 75 aa, Zea mays
  Clone ID: MRT4577_171680C.1.pep
PGTPNPATSTSRVHPWGWGAPIQKMAVPLLTKNIVNKRVKHFKRPHLDRYKCLKPSCLMPNGIDFLVRTNFKGCT

SEQ ID NO: 263234 - protein, 125 aa, Zea mays
  unsure (1)..(125): unsure at all Xaa locations
  Clone ID: MRT4577_171681C.1.pep
KDHGAPKVETRRGGDLENVTAEANGVSTIFVTGGQIPMSGPNSXIIEITLVVHPAPNAFPKGGPDCRRSTEIAAGRVSWGSLGLQGLPVTNGRWLCGGARKSRLQRARIPPLSLRDILIIGALYL

SEQ ID NO: 263235 - protein, 61 aa, Zea mays
  Clone ID: MRT4577_171682C.1.pep
MALPASSSGLFRFVSPRSRPQSTDIVAAASWGVFAGTAGLYLVQPFDWIKKTFFDKPEPEA

SEQ ID NO: 263236 - protein, 61 aa, Zea mays
  Clone ID: MRT4577_171683C.1.pep
MALPASSSGLFRFVSPRSRPQSTDIVAAASWGVFAGTAGLYLVQPFDWIKKTFFQKPEPEA

SEQ ID NO: 263237 - protein, 54 aa, Zea mays
  Clone ID: MRT4577_171684C.1.pep
FRRGLSNFGWQYFLGFSFGCYEASKSFWEALSTSKTNFSILCIETKRFLLWYSK

SEQ ID NO: 263238 - protein, 78 aa, Zea mays
  Clone ID: MRT4577_171685C.1.pep
QLCSRWGDGSGKVEQSDAKLNRNKEAMASGTEGGTEPNKSAWDREQSNEALDGFGAMLPKYQLARRRQVTSLALRTYG

SEQ ID NO: 263239 - protein, 89 aa, Zea mays
  Clone ID: MRT4577_171686C.1.pep
HDRRRSIIGWYQSSREHVRTSCSGFLGWVVAVVGAGRLVVVPVRGLAQSRSAHVDGQCDLCLMRRSELKTRWVMLLGWQFSEFLQWGVQ

SEQ ID NO: 263240 - protein, 81 aa, Zea mays
  Clone ID: MRT4577_171687C.1.pep
SSPRRSPTATAPSPPAPATQPPRLPSSIDRSITAAFDISSLLGCSWTLRVALANSAEHSLKLQFADICQRRRTKREQRTLA

SEQ ID NO: 263241 - protein, 67 aa, Zea mays
  Clone ID: MRT4577_171688C.1.pep
PWCVPSARPRSLPPTASSSAGLTGLLKGPCSVLTTLRSMESISTSTTRETSGSSCGFLKGCLAAVWF

SEQ ID NO: 263242 - protein, 78 aa, Zea mays
  unsure (1)..(78): unsure at all Xaa locations
  Clone ID: MRT4577_171689C.1.pep
TSCCKREEARTNRPSKELPNMNGECYLPSSXSLRAINVDATRSLITTIATALPAAYLAFFPFFFVTFLCFPRDVLKGG

SEQ ID NO: 263243 - protein, 84 aa, Zea mays
  unsure (1)..(84): unsure at all Xaa locations
  Clone ID: MRT4577_17168C.1.pep
MSEEDKTAASAXQPKGPFVLXKVVSSLSRRSVXVFPRHDLEIXPDATAXYLXAPPITKGNKXKYELDKKTGLIKADRVLYSSVV

SEQ ID NO: 263244 - protein, 59 aa, Zea mays
  unsure (1)..(59): unsure at all Xaa locations
  Clone ID: MRT4577_171690C.1.pep
RYNSVPSTXHWLLYHSVLAILMDNQAIYDICRRSLDIVRPTYTNLNWLASHVILSLTAY

SEQ ID NO: 263245 - protein, 70 aa, Zea mays
  Clone ID: MRT4577_171691C.1.pep
SVHSHTQHLNLYMARWLLTAHRLCSVFNKSLSAWNALPSDDRHPIVTSIHSISLMKVQRRLLEISAPCSS

SEQ ID NO: 263246 - protein, 112 aa, Zea mays
  Clone ID: MRT4577_171692C.1.pep
HGLSIPSAKYTQQKKPLFLLELFIERISFISFFSYRSRSRKSHRGFESSCRPGRTHVWPVPTNRAPNPPKPLISTQRSKLSRFPVYLATAEKCFDSSKSASVLVLDHKSAGN

SEQ ID NO: 263247 - protein, 62 aa, Zea mays
  Clone ID: MRT4577_171693C.1.pep
ITARSPRVATCMVTISRSLVLTCAVYYVWQSLVYRLCMNLPVVRACEVQPWRSDLYFQTLIC

SEQ ID NO: 263248 - protein, 43 aa, Zea mays
  Clone ID: MRT4577_171694C.1.pep
ITQIHALCHDCFVVVIHELHQIVHQFNQVKHMPVLSKFIRTAS

SEQ ID NO: 263249 - protein, 69 aa, Zea mays
  Clone ID: MRT4577_171695C.1.pep
EGRAQREGELAIGAAGGGHGKHQEGGALASGVGADAQEPSVANRGGSLVLQHLRGEGARKGAGVFSSSR

SEQ ID NO: 263250 - protein, 257 aa, Zea mays
  Clone ID: MRT4577_171696C.1.pep
MDGVTQAVENLKKEWGQAVSQLDENITAIESCGKTGKGTEEANYLPRLNGSAQDALQLLKSLQFQLDLLAQQLPTFDEVQSGQATLKSWDEQYKKTLLLGNGEESTIRRRNLQTSALAQPNKRLCSLSEHVPHGYRRKSLFEGLIRYNVLLLRATWFIKVTYLNQLQTRQTPNSISVAGSDNQRSQWTKDVVEYLQHMLDEFCSKEGAFVHPSFREQSSPGPTAGTNQIKMKTKASPAAGDIEEHLVHFKWWYMVAK

SEQ ID NO: 263251 - protein, 70 aa, Zea mays
  Clone ID: MRT4577_171697C.1.pep
NLLADVCAHLERHRAAGARRRALLRLVSSSLRSGGHDASVWVSRWEKSPSHPVGDDAYIDVLLPAASDRG

SEQ ID NO: 263252 - protein, 261 aa, Zea mays
  Clone ID: MRT4577_171698C.1.pep
MTRRCSHCSNNGHNSRTCPVRSAGGGSGGGGVRLFGVRLTTAPAPAVMKKSASMSCIVSSLGGGFGGSSPPVEGVGAGRGGEDSGTGYVSDDPAHASCSTNGRAERKKGTPWTEEEHRMFLMGLQKLGKGDWRGISRNFVVSRTPTQVASHAQKYFVRQTNSSRRKRRSSLFDMVPEMPMDESPAAVEQFTLQNTQDEDTSSNHVPTLHLGQRKETEFAKQLQTFQPGHHEKSEYAEPSLLLPNLEMNPNVPFKTITDPTR

SEQ ID NO: 263253 - protein, 232 aa, Zea mays
  unsure (1)..(232): unsure at all Xaa locations
  Clone ID: MRT4577_171699C.1.pep
MDRCKENCVSRPVKTTVPFGPKRVLVTEQIPSQNLGSASSGQAQRVLCPSNSQRVPSQAQKLGAGQKPAPKQLPAASVPRPVSRLNNPQKNEQPAASGNDSEKEQASLQKTEDTKKXRQWTLEDFDIGRPLGKGKFGNVYLARERQSKFILALKVLFKTQLEKANVEHQLRREVEIQSHLRHPNILRLYGYFHDATRVYLILEYAPLGTVYRELQKLSKFDEQRTATYITEL

SEQ ID NO: 263254 - protein, 139 aa, Zea mays
  unsure (1)..(139): unsure at all Xaa locations
  Clone ID: MRT4577_17169C.1.pep
FAPSRGGEAPGGGAFSGKDPTXKVGPPGAFFPRQASKSIFAKGLVFRAIFQVFFPLGVAQPLSVFVDTYGPGAIPPKEILKICKENFYFRPGMIFLTLGLKKGGNGGFLKTGAFGPFGRGDPSFPWGGGKPPQSEKPFA

SEQ ID NO: 263255 - protein, 131 aa, Zea mays
  Clone ID: MRT4577_1716C.1.pep
SPRPRPTPTVGTAAAAEFPGNFWGSFFFGFFRGQKQGGGGGGAKWVWGAPTHAGLFKWGVPRTKFQGPGQGQPHPFPPAFPPGPGQGVFFFVFFRPVEALLVFQAKNGGGVGKIKKLLDKLVVSVCQKERS

SEQ ID NO: 263256 - protein, 133 aa, Zea mays
  unsure (1)..(133): unsure at all Xaa locations
  Clone ID: MRT4577_171700C.1.pep
XXRVRTKDVGSLDMSTEPLRHRHHVLSETRLATLGHRNQQFEAGIARNVATVTEDICDAMEEDDWTHPHPNAELHNNGMVEQGVDHTHTKPKVISKGDDDEGVIFEEDEDDDENHGYLFAGQYDEIDEDIEID

SEQ ID NO: 263257 - protein, 87 aa, Zea mays
  unsure (1)..(87): unsure at all Xaa locations
  Clone ID: MRT4577_171701C.1.pep
MPAGHGLRSRTRDLFARPFRKKGYIPLTTYLRTYKIGDYXDVKVSGAVHKGMPYKFYHXGRTARVWNVTILSIGADDKFGVYGTHHC

SEQ ID NO: 263258 - protein, 71 aa, Zea mays
  Clone ID: MRT4577_171702C.1.pep
LNVARTSFRLPRTVVTIFYSACHLLDERIICLRTWATQPLDASNDLNVQIFHNDVNSVAQCQQRLLSPTSL

SEQ ID NO: 263259 - protein, 146 aa, Zea mays
  unsure (1)..(146): unsure at all Xaa locations
  Clone ID: MRT4577_171703C.1.pep
EKTKEKDKKTKGVRLHGLRQLATFFEKQIPKCXPFLCQQFEKNFTDGLFPADDMQDIEVIFPPPYFQWVQKKKEFTEYTNRNECITYRGDYMXKNGHFCXCLECSHRVTLXDLLIGYQAQXKKLSDHPPTKVXMAAICGSQAQRPN

SEQ ID NO: 263260 - protein, 663 aa, Zea mays
  Clone ID: MRT4577_171704C.1.pep
MLTNWTGNQKLVFPHECDAQIAPCSTDEDIHELDHPPLSSPALVDLESEDHVSDDRDSEVTPCLVKDKIDESVDAQPNLLPGELEQETHAPPELDFRVAPQSAKESDCSTEFDSQAAPCSSNIPVLANTTVSTCISAMPSSEETYQLSPVPPPTVQFQNDSYKDPQALLADSYKDPQAPPPLPPLQWRLGKPRLGLLSRKGCMTEPARVIDPVLQISSQEMDIRPGLLDPTDRSIEPVSCQEIKEDRCESSLIDHNDQNVDFDRLSTRVAVTDVARTEHRLSLETSEDIKQQGHISSSATGVGEHLDAGFTSTMADEEHLDDSGMTHGTALYLSDPLFPLPTYELQDPQPDTRENSEHPSQTHGAASGDDKSMDAVGSMESTLTKGHVSGNRCYQQPQHGESSSETSDHKEHITNASEDGVKHQSGTSEAPSDTAKHSAPGTLLKGNVQESQILQEHNVGSSEDDQPGGLLYSLEPVAPQGENKNQVNNPGLLLEWPGDTSELVTGLEKSCYAHAEQPPVMGWTVGPQMLHPKYGILEEESQFEPNIADNHLIRKPISIKNIPRNPLVDAVAAHDRSSMRKVSELAPPTDKPKPNERNMLLEQIRNKTFSLKPVAPAQQTAMRSPARTSTRNLKVAAIIEKANAIRQAVGSDDEDDADSWSDT

SEQ ID NO: 263261 - protein, 108 aa, Zea mays
  unsure (1)..(108): unsure at all Xaa locations
  Clone ID: MRT4577_171705C.1.pep
IVPDRYHYHFPYLDLDGLTADHNRVRPLXQHMFPTMYLSRLPSPVLPDNTSRATSRSPSCCESKALCGPVHTIVFQELEQEAHCVSGVLLGPPTLTSEEDMMASVRSH

SEQ ID NO: 263262 - protein, 109 aa, Zea mays
  Clone ID: MRT4577_171706C.1.pep
CCEPATVRGAQRLRRASGTRTAGTKPRVVVPWPSHMPAHDAPPHRRELAREEPRRWLLCLQMNCHPALLELITSCRTMTVACGAMLLLWANLTPLLVRACSSVSLDSLN

SEQ ID NO: 263263 - protein, 68 aa, Zea mays
  Clone ID: MRT4577_171707C.1.pep
NAHCLLVDHVSIDSEIWWVVISKKNQIQIGGNGGCVANLHVFRFRCVEWVWEAHHEFHVVLVYQEKIY

SEQ ID NO: 263264 - protein, 86 aa, Zea mays
  unsure (1)..(86): unsure at all Xaa locations
  Clone ID: MRT4577_171708C.1.pep
MASKTDKFRLQAEINKLLSRIINSFYXNNEIFLKELISHSSDGMDNIRFDSLTDMSKLDADPELFIYIVSDKSNNILTIIDIGIGM

SEQ ID NO: 263265 - protein, 107 aa, Zea mays
  Clone ID: MRT4577_171709C.1.pep
RRELFPSAASVRGAQRLRRASGTGTAGTKPRVVVPWPSHTPAHDTPPHWRELARQEPRRWLLCLRSVTNFYILCPCTFYVLKLLDGMPKQVCPLLFINKLPSSVVRT

SEQ ID NO: 263266 - protein, 69 aa, Zea mays
  unsure (1)..(69): unsure at all Xaa locations
  Clone ID: MRT4577_17170C.1.pep
SGLWRWPDSGLKISCLLRVASASPGECYAKLSCMCWVSLWSXCVLRPGSRVVDLREFSDPVSFMAFLAF

SEQ ID NO: 263267 - protein, 53 aa, Zea mays
  Clone ID: MRT4577_171710C.1.pep
DLPPCYLFIRSVWWTFQYFMTYYLLYMLWSISLSIKFTCYLKKKNSGGGGEKI

SEQ ID NO: 263268 - protein, 110 aa, Zea mays
  unsure (1)..(110): unsure at all Xaa locations
  Clone ID: MRT4577_171711C.1.pep
DDLPLVILGDCXKGSYGQWALGGRYWVITGVSAPRRGQPYSVLMLKLCSDVTAQXLASLWVKPPLAGDKXLAFYSGEREVLLQTLTRRAKALGYACXTLEGLSCSRLHER

SEQ ID NO: 263269 - protein, 101 aa, Zea mays
  unsure (1)..(101): unsure at all Xaa locations
  Clone ID: MRT4577_171712C.1.pep
SVRIHGLIWLPRAKATNTKQDDWVLKGGPNSHFVGPTCGTTACXTLIRNTQLCDKAGIPDGHIRGGKAYYLWRDHKPQLAPERERLMKAGGFFHMGRVNGS

SEQ ID NO: 263270 - protein, 318 aa, Zea mays
  Clone ID: MRT4577_171713C.1.pep
GRKKLQKKKKKKKKKKKKKKKKKKKHWVPRGRPVSFPPSTPRELSTPPPPMVAAPPPPPQFAKHFAAGPPPPPQAGAGRRTPTPPSSGSGGNGCEENKTIWVGDLQYWMDENYLHNCFGPSGEVVTIKVIRNRQTGQSEGYGFVEFFSHASAEKALQNFTGHVMPNTDRPFKLNWASYSMGEKRSEVASDHSIFVGDLAADVTDEMLLELFSSKYRSVKGAKVIIDANTGRSRGYGFVRFGDDNDKSHAMSEMNGVYCSTRPIRIGPATPRRSSGDSGSSTPGHSDGDSSNRNVYGGGLDPNVSEDELRKAFANMILP

SEQ ID NO: 263271 - protein, 118 aa, Zea mays
  Clone ID: MRT4577_171714C.1.pep
LSTPPHDPPRRRRRRCRLHNCFGPSGEVVTIKVIRNRQTGQSEGYGFVEFFSHASAEKALQNFTGHVMPNTDRPFKLNWASYSMGEKRSEVASDHSIFVGDLAADVTDEMLGASPSKG

SEQ ID NO: 263272 - protein, 420 aa, Zea mays
  Clone ID: MRT4577_171715C.1.pep
MQMAATTTESQAAVPPQHPHAHPHAPPQHAHPHHHMPQPRWVVIPYPPPPPMVAAPPPPPQFAKHFAAGPPPPPQAGAGRRTPTPPSSGSGGNGCEENKTIWVGDLQYWMDENYLHNCFGPSGEVVTIKVIRNRQTGQSEGYGFVEFFSHASAEKALQNFTGHVMPNTDRPFKLNWASYSMGEKRSEVASDHSIFVGDLAADVTDEMLLELFSSKYRSVKGAKVIIDANTGRSRGYGFVRFGDDNDKSHAMSEMNGVYCSTRPIRIGPATPRRSSGDSGSSTPGHSDGDSSNRTVYVGGLDPNVSEDELRKAFAKYDLASVKIPLGKQCGFVQFVSRTDAEEALQGLNGSLIGKQAVRLSWVRSPSHKQSRGDSVNRRNNMYYGTPFYGGYGYASPVPHPNMYAAAYGTYPLYGNQQLVS

SEQ ID NO: 263273 - protein, 133 aa, Zea mays
  unsure (1)..(133): unsure at all Xaa locations
  Clone ID: MRT4577_171716C.1.pep
MATALSFTALALAALXLSXAVTSGAGAEQEITCKAPTASQERSLLSYSTGWLPSEATWYGTPTGVGPVDQGGAXAIQGTDQYPFSXMTSCGNXPIFEDCKGCVSSYLILRLKSNHPVCSXXVAXTVIITDVNY

SEQ ID NO: 263274 - protein, 132 aa, Zea mays
  unsure (1)..(132): unsure at all Xaa locations
  Clone ID: MRT4577_171717C.1.pep
RGSVVNKFRMTMSLPAGATMNXSYNTAAKNLYIISVKGIXKGRLNRLTTACVEDMGMITIKGXKPDLKNKXMXPAVIVRQRKSCCRKDGVYMXFEYNXAAATVNPKGEMKGSAINGPIGKECDDLWSRIGSE

SEQ ID NO: 263275 - protein, 93 aa, Zea mays
  Clone ID: MRT4577_171719C.1.pep
GSMCIRWSCRRLSPRCLCYHISLVASLSHNSVFVPDGHPTVPSSVVCMRNSVHLALQASSSPHLVPDLALLFFLLFFLPLCLSLRAVLVAVSF

SEQ ID NO: 263276 - protein, 34 aa, Zea mays
  Clone ID: MRT4577_17171C.1.pep
CRCGIHYYFRSILPQPLMKKYRTLLQNMLFTHCQ

SEQ ID NO: 263277 - protein, 94 aa, Zea mays
  Clone ID: MRT4577_171720C.1.pep
MDKRFFLKIMSPGASKREMGWGFFFFWATSNYPFFFLQALYFQTFFWFYKKKKHKYKTKTIKIKKKKKKKKNEKKKKNKKKKKKKKKKKKKKKK

SEQ ID NO: 263278 - protein, 45 aa, Zea mays
  Clone ID: MRT4577_171721C.1.pep
DVLPLTRVDILVLILLWFVCFNGSRFASDVFERYANRVVYICANL

SEQ ID NO: 263279 - protein, 61 aa, Zea mays
  Clone ID: MRT4577_171722C.1.pep
IKGKQGHDFNICDTIFRTSYAKPYNHLIIFYEIGPLLERVLWSQALNFNIQPCLGPPLEML

SEQ ID NO: 263280 - protein, 128 aa, Zea mays
  Clone ID: MRT4577_171723C.1.pep
MFFSTVVTDQPWSTGRSREFGKFRLELEPEEHQTRTRPPPETERTDPAEKMAGEMSWVGKKIHLYNVTMGLYMLDWWERCLFNILVLILLWFVCFNGSRFASDVFESHLKARIFQGSNYGLAIGTPSS

SEQ ID NO: 263281 - protein, 92 aa, Zea mays
  Clone ID: MRT4577_171724C.1.pep
TVTSQFSFWFGGSRQLSLLFVQKACMMPRMWTRNFFFFWGHTLSVFNKTVPASLIIVNRGLLYHDNSPAPPHPGDPVWIPWHDPVPCLGVEA

SEQ ID NO: 263282 - protein, 83 aa, Zea mays
  Clone ID: MRT4577_171725C.1.pep
GGMSRVLFDRFPKTRFSAASTCDQEIDSSCCPVCLQDFGARQFVRALPQCQPIFPVRGIASWLLRHGSCPLCRAGVPIAHIHL

SEQ ID NO: 263283 - protein, 88 aa, Zea mays
  Clone ID: MRT4577_171726C.1.pep
FGSREPPAPNYDYPRARLAPRDNCSGGRRHLTGRRPAVSIRMLWRARLDGADIELDRPYLEDYMPSDLFMQDAPRNLHLRKLHGISSQ

SEQ ID NO: 263284 - protein, 101 aa, Zea mays
  Clone ID: MRT4577_171727C.1.pep
NRQERIDCLYYISTRILVYLYILLLQLLLAFSWIVIAWLIALSFIISVFQIQSVPFPVKSTRPVRSSLHSSDARAGYVSLCHERGELLQVEGAAGSGVDLS

SEQ ID NO: 263285 - protein, 166 aa, Zea mays
  Clone ID: MRT4577_171728C.1.pep
PTVILFGPSQAPAGLTTEAYTLLPQSPTQDTGPGPWRLGSTASATPTRRRRHPNTACKTALWLYRNNGHAEKKNGLGYLCPGINGPLRIGLERAPTKTASPYATYKQETASIFRADPRPITFHARRMRPTLTQRPPANLATNKISPRGPTLPKRKPRSPLPRTKLS

SEQ ID NO: 263286 - protein, 58 aa, Zea mays
  Clone ID: MRT4577_171729C.1.pep
PPVLFFIYSFFFFSPSARLSNTGDGAHACPWPLAQQNLQAEAAAATYNLIVCHFPPLS

SEQ ID NO: 263287 - protein, 128 aa, Zea mays
  Clone ID: MRT4577_17172C.1.pep
ESMILSKLAINFFIDRLFPLLANFIQLTYTVTVALASSKSVLMHRTRVHARRAKQRAFGALGSYSPCSRSTVEVQKAIWLDLRVIGLRSALPSPPPWKPKPRDGEEDTGADTTTRLAQGRSGRHRPHA

SEQ ID NO: 263288 - protein, 90 aa, Zea mays
  Clone ID: MRT4577_171730C.1.pep
HLRQDSEEGSHLAILIQIQAMRIVFRVYRGEKCLLSPERLSILFDAPVVWLYNTCKTRYPFGYVLDCEQGSVSAKTNIRREYLGVPYVGL

SEQ ID NO: 263289 - protein, 232 aa, Zea mays
  Clone ID: MRT4577_171731C.1.pep
MVRKSAEKSYGRMAACTSSPEPSENNPRQNFCLGDITWVKHDGSSWWPAQVIDEACASSKAKKKTSHDALVRLYGTCLDLYVDPWKSNMEFEMFLKKENKTAMEAFHEVLQKELSHFKSASDDEEEAVNTKAKTSTKKVRKQEALEQDQEVRSNAEGGGAAQKGKKQKGVRQASALDKALSIDSAEGLRDKTPKQASAVRDKKSGKKASSGTSVAKKEGSLKRSGRTNLKGH

SEQ ID NO: 263290 - protein, 93 aa, Zea mays
  Clone ID: MRT4577_171732C.1.pep
YPPFLARLRLRRHSSPARDSGDKAPDPAASAPIVPVSAAALPLLPHSFSLLGFVVPSTFPFPKSSLPFPSSILLAGIGPEASRSLSQSPSHNP

SEQ ID NO: 263291 - protein, 71 aa, Zea mays
  Clone ID: MRT4577_171733C.1.pep
VLGSATLTPPINQLGLSVSPAEHYCTANRKHMLSPMPDTNHTYTSARQDQTDNVSSRTATHHMRDQQTSAS

SEQ ID NO: 263292 - protein, 77 aa, Zea mays
  Clone ID: MRT4577_171734C.1.pep
HGAASGAPSSFALTEQSRPGQGAVFSLMTQTINHPDTRMDLNSDNSITHLGMLNIYQLHSRPTQDTARQKAPHVWPV

SEQ ID NO: 263293 - protein, 42 aa, Zea mays
  Clone ID: MRT4577_171735C.1.pep
HAADQPRQGHGRTNKRQTGEGNTQEPQPWHCLQHPPPLLCSP

SEQ ID NO: 263294 - protein, 56 aa, Zea mays; identical to SEQ ID NO: 236257
  Clone ID: MRT4577_171736C.1.pep

SEQ ID NO: 263295 - protein, 108 aa, Zea mays
  unsure (1)..(108): unsure at all Xaa locations
  Clone ID: MRT4577_171737C.1.pep
VSRIKCQVAERALFLWNNDHTVSLIAQSRVVRGRMIWEALDRNRQXHWNPAVHGRTANVRTMFLDMDSEVVEQCDQQYMEKQATAKEIQEXDKQHGDTWKQLLLPQVA

SEQ ID NO: 263296 - protein, 218 aa, Zea mays
  unsure (1)..(218): unsure at all Xaa locations
  Clone ID: MRT4577_171738C.1.pep
GNSRLLIYSFMXENGSLDDWLHNKGQXDSFLDWPTRLKIAKGAGRGLSYIHNTCNPNIVHRDVKSSNILLDREFNAYVADFGLARLILPYNTHVTTELVGTLGYIPPEYGQAWVATLRGDIYSFGVVLLELLTGKRPVQVLTKSKELVQWVREMRSQGKDIEVLDPALRGRGHDEQMLNVLEVAYKCINHNPGLRPTIQEVVYCLETIVEPQQVQVQL

SEQ ID NO: 263297 - protein, 81 aa, Zea mays
  unsure (1)..(81): unsure at all Xaa locations
  Clone ID: MRT4577_171739C.1.pep
NSGRPDGRYFLLRPRAPSKQHSEAPQTLXSPVELRTLAEAEGGVGGTLSCRSPLGLVLALGSSSDVTERGGRRIMAGGFVL

SEQ ID NO: 263298 - protein, 60 aa, Zea mays
  Clone ID: MRT4577_17173C.1.pep
GLIRPPMREAHVGFTPRGCMNLSSNFQLARVSEDYFPLPCYCLLWAFDPGLRGSWEEEVW

SEQ ID NO: 263299 - protein, 137 aa, Zea mays
  Clone ID: MRT4577_171740C.1.pep
ARLILPYNTHVPTELVGPLGSIPPEYGQAWVPPLKGDIYSFGVVLLELLTGKRPVQVLTKFKELVQWVREMRSQGKDIEVLDPALRGRGHDEQMLNVLEVACKCINHNPGLRPTIQEVVYCLETIVEPLQVREQVHV

SEQ ID NO: 263300 - protein, 93 aa, Zea mays
  unsure (1)..(93): unsure at all Xaa locations
  Clone ID: MRT4577_171741C.1.pep
PGVSATTVLPFHTSTEMFQGMRVRFPNLFPPLKPETVARRTVEAVQLNQXLLLLPWTMHVLVILKSILPQAALEEIHKFSGTYTCMNTFKGRT

SEQ ID NO: 263301 - protein, 94 aa, Zea mays
  Clone ID: MRT4577_171742C.1.pep
GAQWFPRRSRGVGGFPITVGPPGFLAPQGSVCVLPFMWVCALVRDPGFSPVCLRAGCCAGLGPEAGFPREAALAPGTPRLGRRPGPLEKDASEK

SEQ ID NO: 263302 - protein, 61 aa, Zea mays
  Clone ID: MRT4577_171743C.1.pep
EIVWINILKRLMVIKLIKKSYKRINYKGKVVGLQGRVKNSGVNPRVRKKVRQKRLVCLILV

SEQ ID NO: 263303 - protein, 291 aa, Zea mays
  Clone ID: MRT4577_171744C.1.pep
MNGGLPGFHNAPASKAVVVAAGLFSVAFGFRGHSLNLGLAYQSVYEKLSVWRLITSFFAFSSTPELIFGAVLLYYFRVFERQIGSNKYAVFIIFSTMVSVLLQILALGYMKDPSLNPLTSGPYGLIFASYVPFFFDIPISMKFRIFGLSFSDKSFVYLAGLQLLFSSGRRSIVPGLSGILAGLLYRLNTFGVRRLKFPEFATSLFSQLSLPFSSNPYQGLPITENDGSIPSHQARQIEDARTATQDPTESSIAALVTMGFDRSAAIQALALTNYDVNLASNILLEAQALQQ

SEQ ID NO: 263304 - protein, 166 aa, Zea mays
  unsure (1)..(166): unsure at all Xaa locations
  Clone ID: MRT4577_171745C.1.pep
YPSIQLASVPTNLSFSPQYVTPASPPLGLPCIKASCSSSQQLNDALKPVNNADTRCKRQAIIRPPPKAIIKCLTLMHRHRHTLXFEHVHXHRAAKIVGELTATLNKCGVISPPPDAASKEXIEGWTARLLPSXQSAYILLTTSAXIMDHXDARRKNLERKIHGIFY

SEQ ID NO: 263305 - protein, 319 aa, Zea mays
  unsure (1)..(319): unsure at all Xaa locations
  Clone ID: MRT4577_171746C.1.pep
RETSRLPLTLFLCCRHRSWRDSIWFCADNAPASKAVVVAAGLFSVAFGFRGHSLNLGLAYQDXSLELHGNXVYEKLSVWRLITSLFAFSSTPELIFGAALLYYFRVFERQIGSNKYAVFIIFSTMVSVLLQILSLGYMKDPSLNPLTSGPYGLIFASYVPFFFDIPISMKFRIFGLSFSDKSFVYLAGLQLLFSSGRRSIVPGLSGILAGLLYRLNTFGVRRLKFPELATSLFSQLSLPFSSNPYQGLPITENDGSIPSHQAHQIEDARAATQDPTESSIAALVTMGFDRSAAIQALALTNYDVNLASNILLEAQALQQ

SEQ ID NO: 263306 - protein, 127 aa, Zea mays
  unsure (1)..(127): unsure at all Xaa locations
  Clone ID: MRT4577_171747C.1.pep
ERGQQHQKSNNGDQERGPSGRQAAAAGEANATETXQGPQAAXAGXRPPDRPARTXTXGENPAQQPKRXQQASAASNKXXAPXXQQXPAPXGGQXXGQTNRAQQXQQXARPGNNQXAPANXAPNXQQQ

SEQ ID NO: 263307 - protein, 107 aa, Zea mays
  unsure (1)..(107): unsure at all Xaa locations
  Clone ID: MRT4577_171749C.1.pep
LCFPLLPRSLXARXXXGXXRLAXAGAGXPXXRLPVVRAGAXXRPALARGFFVCVLXLXXXXXALPRPPXGSVRXVCRLSWWSCPCPCPWAAPAPXPVGXAXVXVVPV

SEQ ID NO: 263308 - protein, 115 aa, Zea mays
  Clone ID: MRT4577_17174C.1.pep
IRLEVSRLFFFVVRLRGDLSGTFRTQYACRWVLGLTKDRLHGGALEEAWAHGQSFFCGGVNMIIDRRCCRWGRKDNIFMSTHEREQIMEVESLISIMTLQRDSDWCGLLLRLLRL

SEQ ID NO: 263309 - protein, 111 aa, Zea mays
  Clone ID: MRT4577_171750C.1.pep
AGRAAQILRCAMRSTWWIVIEWPSAEASSSSGGWSLHKHGQWRDTTSEMTIIARSYTSRVRGTHEGRHVHPAYYERGRYFFQEQTTPARSNCSLQKKAQWLFQSCQTEVVS

SEQ ID NO: 263310 - protein, 90 aa, Zea mays
  unsure (1)..(90): unsure at all Xaa locations
  Clone ID: MRT4577_171751C.1.pep
LGDDLVGCYLHPMPVLSVLXNTRNHNSLYIYVLCGLLESCQRFLYVYSITPKDQKNVSPCIVGYTPLVLPTLDHSSTGDFLYGRYGCILH

SEQ ID NO: 263311 - protein, 100 aa, Zea mays
  Clone ID: MRT4577_171752C.1.pep
MTMTRTMCLGLLLLLLAAASTATAHFTVGDVDEYVSKRTQESRHRNNGGAGIDDLISSAARFHANVDARAYGRRSDLQEEATATVITKAEAQEASAEGGD

SEQ ID NO: 263312 - protein, 52 aa, Zea mays
  Clone ID: MRT4577_171753C.1.pep
VKGCHFKTLLSGIKKPCSPSALDSQPTRTAPPPIHPSLRISYTRRRRAPANP

SEQ ID NO: 263313 - protein, 167 aa, Zea mays
  unsure (1)..(167): unsure at all Xaa locations
  Clone ID: MRT4577_171754C.1.pep
PVQHKEASNSASILFGKVLYLLEVVETFPDCEVIMGPGVHRTSSRLEEXDYIMHXLSKCGXGICGDDNEKKNPETAFSNKKTALLKIIEESPVRKTIVFCNKIETCRKVENALRRVDRKASQIKVLPFHAALDQAQRIANIKEFLNKQTADSMFLVCTDSLLQRYVS

SEQ ID NO: 263314 - protein, 693 aa, Zea mays
  unsure (1)..(693): unsure at all Xaa locations
  Clone ID: MRT4577_171755C.1.pep
MMEVAGAQARAVPLLLRNTASLRTSVSVSCTGSRRSWVAAATAEGDETRGFDKVPMDTPGAYRLVDRDTGRSVIVWGGTDDSDEASMPSPAVLSRTTDRRHSQGVGGGTGIGNFGRFKAQKIKSLVTRSAHRKRESSNRSSTAWSDESSFNGSDDEEESYFERRKHVSDSERHPKMSSGSRDGRTRSAHSLSSVLSQYRGDDDTDFPGSEATSGSKRWGNVADVTYGRQKSEAKGASXSLKEKGLLYGGFFSRRSFTEIGCNDEMLGALRNFDFPRPSHIQAMAYGPILEVRSCVVADQSGSGKTLAYLCPIIQNLRNEEVQGLHKSSPRNPRVIVLTPTAELASQVLNNCRLISKSGVPFRSMVATGGFRQKTQLESLDQELDVIIATPGRFLYLLQEGFVQLANLRCVVLDEVDILFGEEGFEQVLHQLITEAPVTTQYLFVTATLPLDIYNKVVETFPDCEVIMGPGVHRTSSRLEEILVDCSGDDNEEKNPETAFSNKKTALLKIIEESPVRKTIVFCNKIETCRKVENALRRVDRKASQIKVLPFHAALDQAQRIANIKEFLNKQTADSMFLVCTDRHPHPFYFVFFLAVLVGRCRASRGIDFANVNHVVLFDYPRDPSDTEEGDGEEHEGAPAARRAVRLETLEGEVSDACNCCLNSKHVFCFGTLWVIYPIPRLTLLGKGSRSHES

SEQ ID NO: 263315 - protein, 109 aa, Zea mays
  Clone ID: MRT4577_171756C.1.pep
KWSTTKKNEMLVTVQQQAEGVLRLHQSYMENTRSASQFYNPTPEGQNPDNSCVRIRWPPRHLWQSPSTRSFCQSTPEETFSRHPGRNSHSSTALSLQRQGSDLHSTPSV

SEQ ID NO: 263316 - protein, 85 aa, Zea mays
  unsure (1)..(85): unsure at all Xaa locations
  Clone ID: MRT4577_171757C.1.pep
KRISLPPQCYAEKQLLGKASQEFLDMRINPAIWELSGHLVLKRRKDYEEASEAXICRFLVEAALSETEFQELNLCVLDFLNSSLG

SEQ ID NO: 263317 - protein, 43 aa, Zea mays
  Clone ID: MRT4577_171758C.1.pep
TIKKKKKKKKKKKKKKKKKKKKKKKKKKKKKKKKKKKKKIKKK

SEQ ID NO: 263318 - protein, 480 aa, Zea mays
  Clone ID: MRT4577_171759C.1.pep
MSSGSRDGRTRSAHSLSSVLSQYRGDDDTDFPGSEATSGSKRWGNVADVTYGRQNQKQREPLNFPQRKGPLDGGFFSRRSFKEIGCSDEMLGALRNFDFPRPSHIQAMAYGPILEGRSCVVADQSGSGKTLAYLCPIIQNLRNEEVQGLHKSSPRNPRVIVLTPTAELASQVLNNCRLISKSGVPFRSMVATGGFRQKTQLESLDQELDVIIATPGRFLYLLQEGFVQLANLRCVVLDEVDILFGEEGFEQVLHQLIAVAPVTTQYLFVTATLPLDIYNKVVETFPDCEVIMGPGVHRTSSRLEEILVDCSGDDNEEKNPETAFSNKKTALLKIIEESPVRKTIVFCNKIETCRKVENALRRVDRKASQIKVLPFHAALDQAQRIANIKEFLNKQTADSMFLVCTDRASRGIDFANVNHVVLFDYPRDPSEYVRRVGRTARGASGNGKAFVFAVGKQVSLARRVMERNMKGHPLHDVPCV

SEQ ID NO: 263319 - protein, 50 aa, Zea mays
  Clone ID: MRT4577_17175C.1.pep
RHHVMMSMMDQYSHSEGADALRVCNVHEDANLTGYHSDVETYGHDILGVY

SEQ ID NO: 263320 - protein, 96 aa, Zea mays
  Clone ID: MRT4577_171762C.1.pep
KRKKNQNGEERGKGGAQGGPDRRDPLVSQRGPRGPGRARTGLSGLPWPEFGFPFSREFLIAFLFIFSRVFNSNSNQVSNSNQIKYEQQFKEYLGSI

SEQ ID NO: 263321 - protein, 54 aa, Zea mays
  Clone ID: MRT4577_171763C.1.pep
SFHSSSSLCSSIYQFNPIEPSISIPCMPNYNLVTPSAYHNPTISPLICPHNPNT

SEQ ID NO: 263322 - protein, 74 aa, Zea mays
  Clone ID: MRT4577_171764C.1.pep
DIESDGLSDHLSVLADSLNKARIHICPPVKKPSKLGESLISLAAIVENEHKRLLARKSIIEKRKEELERQILEK

SEQ ID NO: 263323 - protein, 111 aa, Zea mays
  Clone ID: MRT4577_171765C.1.pep
FSGSRPFLFLLRPRSTTSSSRLCLLPLCSPHAAQPPTHPARRRRSPSPALRFASNRSRFCLFVICGCAAIPTFFQIFDNNINNRPGRQIRVFFCAIARQAGQIGLRLCARA

SEQ ID NO: 263324 - protein, 563 aa, Zea mays
  Clone ID: MRT4577_171766C.1.pep
MDILTLLANERQRPHVPMSHEIMITPNKRAIEKDSRVGQASKTISKTVKVTSSNVSDHTYVSKGPCSGEPSVINQMAKPENILSLRRPREATSDLVGTTARSGITGVRRPSAALQRPSTKERRPVTKDASRKHAEVTTPCRPSTSERRTVTGESALKPENNAIPCRPVTAHRRPITKESATRQCSIATPRRPSTADRRPATKDLTPKLSNIAAPHRPSTAHRRPISKESAPKHFNVASPHRPSTVERHTSGRDMTSKYVGIATSYLPSAVKQRPITGEGAHKHADVVTLSCSTADRRPIRDVAPKYATLALPRRPSTAERHPIARDIAPKNGLSLRPSTAERRTIARNVEPKHAPAQRPSTAERRPVTRETVLKQANVANSCLPLTPDRRLTKKGDISTLECPSTGGRCPITSGTALWSRTMPYYSKGALVTEVTPQKTITPRVVRNSKLENLSYAKERVELQVDRKQKSSPFNLSSKKTLTSNVRDDQGLEMFKKPNKEGGVRAHAYKSNNATPSRTGNVKIKAPVPPPLPPHRPYCTEKKPNVNSSPVGGRKTKASAPHWH

SEQ ID NO: 263325 - protein, 80 aa, Zea mays
  unsure (1)..(80): unsure at all Xaa locations
  Clone ID: MRT4577_171767C.1.pep
IVPILPGRFLGSAQYNXHKTISSTLWHKSPTQDKATITPXAVLATSPTSSQEXLVTTLVLTMVSTWGANLVAYIRERSNL

SEQ ID NO: 263326 - protein, 58 aa, Zea mays
  Clone ID: MRT4577_171768C.1.pep
FSAPGLFGPEKTHLGRGEDDPPPQKKKKKKKKKKKKKKKKKKKKKKKKKKKNLKRGRY

SEQ ID NO: 263327 - protein, 194 aa, Zea mays
  Clone ID: MRT4577_171769C.1.pep
MAAELHFVLVPVMAQGHLLPMLDLARLIAGHGARVTVVLTPVNAARSRPFLEHAARAGLAVEFVEFAFPGPALGLPQGCESIDMVTDLSLFVPFYEATWLLAAPLEAYLRSLPRRPDCLVADTLGPWTAGVARRLGVPRLVLHGPSAFFLLAVHNLARHGTYDRAAGDMEPFEVPDFPVRVVVNRATSLGFFQW

SEQ ID NO: 263328 - protein, 492 aa, Zea mays
  unsure (1)..(492): unsure at all Xaa locations
  Clone ID: MRT4577_17176C.1.pep
PTAKPGGTLESHTLRPHARMAAAAGGTGGCGCHIVAVPFPGRGHVNAMMNLSRLLAARGAAVTFVVTEEWLGLIRSSSAAAAAEPAGIRIRTIPNVIPSEHGRAANHSGFLDAVATEMEAPFDRLLDGLEGPPPAALVADAYVPWVVGVGNRRGVPVWSLFPMSAAFFFAYYHFDRLPAWLTNSEHAPESGETIGNSDQRLXTISLGRLQVQXLSDLEPLIHNKRTVKHILTTISSIRNAQSLLFTTMYELDPNXLSLASEMLSLSFSPPCMSLRPVSXDSLRSVLSCPXPQGDYFTWLDSQPVNSVLYVSLGSFVSVSASQLEEIALGLIASEVRFLWILREQSPRVQELFSGINNGMILPWCEQLEVLCHHSVGGFMTHCGMNSTLEGVFAGVPMLALPLFFDQPIDGRLIVEEWKIGLAVRDWASKGGLIGREDIARAVKKLMSSDETGTKALRERALELKEASRRAVNEGGSSYCNLSSLMETVCTPK

SEQ ID NO: 263329 - protein, 41 aa, Zea mays
  Clone ID: MRT4577_171770C.1.pep
CLAAVYFSLTITVEDLDNKKRRRRKKIKQCIAYSTNCTFTL

SEQ ID NO: 263330 - protein, 69 aa, Zea mays
  Clone ID: MRT4577_171771C.1.pep
RLCQLSPPISPPSTAVPLNSPPDPTTTIKYHFPYLFIIYYQFFPTNKHCCTRKLRQGAYCRTPTSVGFL

SEQ ID NO: 263331 - protein, 53 aa, Zea mays
  Clone ID: MRT4577_171772C.1.pep
RKALSKSPLCIRIFHTTCLPLCVHQLTNDEATSDRPELEKPYCHRTDIHGLQF

SEQ ID NO: 263332 - protein, 65 aa, Zea mays
  Clone ID: MRT4577_171773C.1.pep
KKKTLFFFFLKSFPFFFSPSFFLSFCWFKKKKKKKKKKKKKKKKKKKKKKKKKKKKKKKKKKKKK

SEQ ID NO: 263333 - protein, 112 aa, Zea mays
  Clone ID: MRT4577_171774C.1.pep
NRFGPKKTPFFGPLIHFGAKNWRVLLGLTGKNLFLGPNPGIKTKNKWGPKGGGLYVREPGKRAVKKNTLLKGLKRSFFYGKKWELLLHGGRGNNFLHKIKAKAREGLLKISG

SEQ ID NO: 263334 - protein, 77 aa, Zea mays
  Clone ID: MRT4577_171775C.1.pep
NFQTIGARKPWWGICREGGLSNMEYIYDEACVKCGDVGSLETVSCSVGPSLQSGDATRNQSWRVPSVGQESLSNIIN

SEQ ID NO: 263335 - protein, 437 aa, Zea mays
  Clone ID: MRT4577_171776C.1.pep
MSSSRFSPVLQASDLNDFIAPSQDCIISLNKNTSSSRRLQVTQLSASGCITSAETVMLEKQSLSDFIDHINSDKAVIVSVSPQSRASLAAFFGLSQSQVLRKLTALFKSIGVKAVFDTSSSRDLSLIEACNEFVSRYQKNHSCSGQEAGANLPMISSACPGWICYAEKTLGSYILPYISSVKSPQQAIGAAIKHHVVDKLGLKPYDVYHVTVMPCYDKKLEAVRDDFTFSVDGKEVKEVDSVLTTGEVLDLIQVATWLTNVDEEGHLYGVSGGSGGYAETVFRYGAKVIYKREIQGPLDFRILRNSDFREITLEVEGKPVLKFALCYGFRNLQNIVRKIKMGKCEYHFIEVMACPSGCLNGGGQLKPVQGQSAKELIQQLESVYTQDILISDPFRNPIAKKLYDEWLGQPGSENAKKYLHTEYHPVVKSVASQLQNW

SEQ ID NO: 263336 - protein, 230 aa, Zea mays
  Clone ID: MRT4577_171777C.1.pep
PAGIRLSEGHFVRSSPYRRARRSGPALVTAAAIEDAVDCGSSSVSGTGVWKRAPAGEKVPSLLNLAPLRGQVLGCGDEAVAATRQQTWWFRPSIRLDGACSGASEGPVKLGLSDLGATILNLDDDASDLGGSDVYWYSLFPFSGACWFVEETRPRWRQLTATTEVAAVVEDWRFILKGLVVLSLSRVGRFRPSGSRVRFLAGLVLVRPDLGFAGGCQSSAACFSWRHRRG

SEQ ID NO: 263337 - protein, 268 aa, Zea mays
  Clone ID: MRT4577_171778C.1.pep
SPQQAIGAAIKHHVAERLGLKPYHVYHVTVMPCYDKKLEAVRDDFTFSVDGKEVTEVDSVLTTGEVLDLIQSKSIDFKTVEESSLDRLLTNVDEEGHLYGVSGGSGGYAETIFRYVAHVIYKREIEGPLDFRILRNSDFREITLEVEGKPVLKFALCYGFRNLQNVVRKIKMGKCEYHFIEVMACPSGCLNGGGQLKPVEGQSAKELIQQLESVYTQDILISDPFRNPIAKKLYDEWLGQPGSENAKKYLHTEYHPVVKSVASQLQNW

SEQ ID NO: 263338 - protein, 78 aa, Zea mays
  Clone ID: MRT4577_171779C.1.pep
CHLFSLKFRPSWRAVSFPSLIRTFSPVPENTQLIIVSVVFLVSWLSFGGPVVSVRLFLSRGHYSSKNPSTRNNKCVEG

SEQ ID NO: 263339 - protein, 91 aa, Zea mays
  unsure (1)..(91): unsure at all Xaa locations
  Clone ID: MRT4577_17177C.1.pep
FYTNGPDPCLGPISTRASPLQXFPTGGGSKAWRGVFPPNKAKLRFFFAGQGFLSLQLNQAQAPFFFFDVFGTILSRWSSRHPQPPPYFDEE

SEQ ID NO: 263340 - protein, 148 aa, Zea mays
  unsure (1)..(148): unsure at all Xaa locations
  Clone ID: MRT4577_171780C.1.pep
PEHSPYNVKKTSGGGGEKHEKTGESQKKKKEAPGHGXKKKKNQKPREKKKKKPGTGRENKRRRLQPTKKTPRQKNPGPQEDNPPPPKGGGGPAANKGREKLPQGGHRXKKKKKKGGGGGKKEKKNXGETSGPHREKSSQGGAPPRRGG

SEQ ID NO: 263341 - protein, 154 aa, Zea mays
  unsure (1)..(154): unsure at all Xaa locations
  Clone ID: MRT4577_171781C.1.pep
APCRHGRGICIGPPVRHITCMKGGVPAPLHVTGTAYRRALQSLSTFLNFIEGKLXHCDLNKLXDECDLLDWVLKNTNLSKEQILDLLLSLVFACHETSSCSIXLACYFLKSCPAAVQQLTVXTLYRFHSQKGVYESXMAWDXDFNKMVFTQCCL

SEQ ID NO: 263342 - protein, 45 aa, Zea mays
  Clone ID: MRT4577_171782C.1.pep
MIVCVAVVGHQNNPLYLQSFTEADDALKLHHIVHCSLDVIDERGS

SEQ ID NO: 263343 - protein, 308 aa, Zea mays
  unsure (1)..(308): unsure at all Xaa locations
  Clone ID: MRT4577_171783C.1.pep
KLYSPCASTIPSGHPSFPVHSPSPSPASSRGPANAKKRNHISPTLPSIPPLPEPKAPSAHPIWTLPPPPPNSDCNSLSCPEPLTDPPAGAPCACVLSARGGIRLSVDLYSFFPLVSDFAEEVASGVNMAQRQVRVMGANVAGDQPDKTMVLVDLVPVQVKFDNATAFSAFESLWSKKVSLKPSVFGNYEILYVVYPGLPPSPPSGQEGVGDGAFGNNRNARAVKPLGVDVRSPKRKVNGSLIAIVVLSTVIALIICCLAAWSLILRFRGPSHTARXFPHTVLPKFSRSSGTGHTLSAGAGRYSSPSGP

SEQ ID NO: 263344 - protein, 201 aa, Zea mays
  Clone ID: MRT4577_171784C.1.pep
MMACLLAGPAFARPGTSLPKEPRAREVTSLPEESPAPEVLLPAGGFFFRSSPSPLPGGIMIVCVAVVGHQNNPLYLQSFTEADDALKLHHIVHCSLDVIDERVSNPKRSAPTLNETFLGLLYPTENYKVYGYLTNTKVKFIMVTTDLDVKDADARNFFRKFHAAYVDAVSNPFHVPGKKIASRSFGARVSTIVKSFGSGTS

SEQ ID NO: 263345 - protein, 56 aa, Zea mays
  Clone ID: MRT4577_171785C.1.pep
PDLGLICMLVLRISHTHLTPLLHWCNYITRKACCVFLEQAHDSTRSRTTWVAWLRS

SEQ ID NO: 263346 - protein, 33 aa, Zea mays
  Clone ID: MRT4577_171786C.1.pep
STRCRSVGWRRAGARRRHGLAARSSMVACPAAR

SEQ ID NO: 263347 - protein, 75 aa, Zea mays
  unsure (1)..(75): unsure at all Xaa locations
  Clone ID: MRT4577_171787C.1.pep
RTMTVRYTVAAEERDQRVDYFRQAIKLAYICDAMNKANQERXRARPISCDQLDGAVLPNFNHCKRRRKRRRTQLL

SEQ ID NO: 263348 - protein, 33 aa, Zea mays
  Clone ID: MRT4577_171788C.1.pep
TEADIISCYTVEHRSMSDKACVQLSLILFPHHY

SEQ ID NO: 263349 - protein, 111 aa, Zea mays
  unsure (1)..(111): unsure at all Xaa locations
  Clone ID: MRT4577_171789C.1.pep
MLHLEEIHPYSPFNELSKYKKGYYISSIIEFRIERFKINKFYMIQIIKYTKGRQTITLFMTSYKLLKYTPKIKKNKGLSKLSXNISTDRLLKFXQVFKAQKHIHMSVFKAQ

SEQ ID NO: 263350 - protein, 484 aa, Zea mays
  Clone ID: MRT4577_17178C.1.pep
EPHTETSPHARMAAAAGGTGGCGCHIVAVPFPGRGHVNAMMNLSRLLAARGAAVTFVVTEEWLGLIRSSSSAAAAAAAEPAGIRIRTIPNVIPSEHGRAANHSGFLDAVATEMEAPFDRLLDGLEGPPPAALVADAYVPWVVGVGNRRGVPVWSLFPMSAAFFFAYYHFDRLPAWLTNSEHAPESGNSDQRLGHYIAGQASSSIRLSDLEPLIHNKRTVKHILTTISSIRNAQSLLFTTMYELEASVIDSLRSVLSCPVYPIGPCVPYMMLEDHTVSSGKVARQGDYFTWLDSQPVNSVLYVSLGSFVSVSASQLEEIALGLIASEVRFLWILREQSPRVQELFSGINNGMILPWCEQLEVLCHHSVGGFMTHCGMNSTLEGVFAGVPMLALPLFFDQPIDGRLIVEEWKIGLAVRDWSSKGGLIWREDIARAVKKLMSSDETGTKALRERALELKEASRRAVNEGGSSYCNLSSLMETVCTPK

SEQ ID NO: 263351 - protein, 141 aa, Zea mays
  Clone ID: MRT4577_171790C.1.pep
LCGARGGRVALFPLGRRPLPISSSLNSCSHQTLAAPPLNPLLPRCQSLPVGSSSSWCESSIVLVEGRREEGKGENPRYLIHVGNEGSSSTSTFTLTITLPRRSHDLIRNLLSKEVCLFFLYGRAHWLIQFRSYVYLSLLAE

SEQ ID NO: 263352 - protein, 120 aa, Zea mays
  Clone ID: MRT4577_171791C.1.pep
IMAAPGQRYCESESGRAATPLIPNMYQVPLPEVRANPKYDPEAHHLGFSPFPSSLLPSTKTIEDSHHDDDDPSGKDWHLGRRGLRGGAARVWWLQELREEEMGRGGGGQGQPGRLERRTG

SEQ ID NO: 263353 - protein, 112 aa, Zea mays
  Clone ID: MRT4577_171792C.1.pep
KIQGAYAVLSDPNKRILYDVGAYDGESDDDGAGEILGDILEAMSQAGPAADNGKGESLEDLQRQFEELFLRPSPSSFSPNRCWVLSTVRVSWSQQNDAAGKSASKSRPAGRK

SEQ ID NO: 263354 - protein, 92 aa, Zea mays
  Clone ID: MRT4577_171793C.1.pep
VSFFFRPPRLSFLGFGLVSFAKLKENKNETQKTDKPKKKKKKKEKKKKKKKKKKKKKKKKKKKKKKKKKKKNKKKKKKKKKKKKLVPARAAA

SEQ ID NO: 263355 - protein, 94 aa, Zea mays
  Clone ID: MRT4577_171794C.1.pep
LTWPVLSDPNKRILYDVRAYDGEGDDDGAGEILGDILEAMSQAGPAADNGKGESLEDLQRQFEELFLRPSPSSFSPQNDAAGKSASKSRPAGRK

SEQ ID NO: 263356 - protein, 132 aa, Zea mays
  Clone ID: MRT4577_171795C.1.pep
LVLLPPRAGGQKWHPDKCAGAGSSGGGADAAKARFQKIQGAYAVLSDPNKRILYDVGAYDGEGDDDGAGEILGDILEAMSQAGPAADNGKGESLEDLQRQFEELFLRPSPSSFSPNDAAGKSASKSRPAGRK

SEQ ID NO: 263357 - protein, 75 aa, Zea mays
  unsure (1)..(75): unsure at all Xaa locations
  Clone ID: MRT4577_171796C.1.pep
FASQIFPCLFPFFMQYCSFYSHFSFIIFFFLSIFLXYLFLFFFIFFNYFFYFIIFFFYYISFFFFLFFFFYFILF

SEQ ID NO: 263358 - protein, 75 aa, Zea mays
  Clone ID: MRT4577_171797C.1.pep
MSTQDLRVNPNPTSELCCPFNFDHAEETRYLHQTVHQSLLKRALFLFILIQVFYIEASSPSGSLVTSIYTTPLPA

SEQ ID NO: 263359 - protein, 52 aa, Zea mays
  Clone ID: MRT4577_171798C.1.pep
YGGYVMKRCVILKLFIMVGARVDNRAYLWGCVSFYLCHMRYIWRDRSKKSMV

SEQ ID NO: 263360 - protein, 63 aa, Zea mays
  Clone ID: MRT4577_171799C.1.pep
GFCLGLELNPLKPPQTILNGGEPNMPFYGGGKPPLIKNLSPNPTDTALYLKNTLPAGRTPNET

SEQ ID NO: 263361 - protein, 221 aa, Zea mays
  unsure (1)..(221): unsure at all Xaa locations
  Clone ID: MRT4577_17179C.1.pep
MSRSCTTIGTNTRPPAGCSMQRSVNPPEHGSGLLSRLFSSHYHGIVHDEKSVARHTVNLLTSTIKVDADQSDLRFCFRIISPTKIYTLQAESAVDQMDWIEKITGVIASLLNSQSPEQCFLSSPKGSGHDRSTSDGSSFTSSVEFEPSVSDDLVLEKKSGNGQHDVRGTHHHRTSTKPEKPIDLLRKVDGNNMCADCGASEPDWASLNLGALLCIXCSGVH

SEQ ID NO: 263362 - protein, 76 aa, Zea mays
  Clone ID: MRT4577_1717C.1.pep
NYHQKGPKTPPFRKKKPAHTALPPNQAKNTPPLTCLLKRTPPLNKKKNPTQRGESEGQNPPPRRRRSFPSRLVNHP

SEQ ID NO: 263363 - protein, 64 aa, Zea mays
  Clone ID: MRT4577_171800C.1.pep
RSSYFTPKKMVRLRLAMVSFGRAYIFLEGYFCSLRVAMRPHNWMVAGVLQLRLWQSPLGRSQGE

SEQ ID NO: 263364 - protein, 58 aa, Zea mays
  Clone ID: MRT4577_171801C.1.pep
ELLELSLQFAVQGRTRLAQLGQARCDEHPHRQNARRLGDHPYRLPFLFCLPELRLQQP

SEQ ID NO: 263365 - protein, 113 aa, Zea mays
  Clone ID: MRT4577_171802C.1.pep
MARGETQQTKVHYKGSDDFIIFIDDVETYQKWKSDKSIPLAHFISSFKIFLTHNQGAQGSLDAASKAALENEFGTSVDDDVIKQILEKGDTQTVEFPERQGPKNDSKGPMISH

SEQ ID NO: 263366 - protein, 47 aa, Zea mays
  Clone ID: MRT4577_171803C.1.pep
HACVEEDHTCKLNHRYSLHIIKNKSTRRWSWQLSHANLQCSCCSSVL

SEQ ID NO: 263367 - protein, 95 aa, Zea mays
  unsure (1)..(95): unsure at all Xaa locations
  Clone ID: MRT4577_171804C.1.pep
MARTMNDRALCLAVATVXCVLLRQSLDDGEGFKEADRIDTLPGGGANAAVQQNSGYVSLDDKVGKSLFYYFMEATVDPXIQKPIIVWINGGPGCY

SEQ ID NO: 263368 - protein, 92 aa, Zea mays
  Clone ID: MRT4577_171805C.1.pep
LLSAIADVAGGFAGRSSADGKTFSPPARSFPLCRKLLGAKNRQLGCLRSPFGPVPDDQIPRFDGGLAVFFLNPLLLDFNQIRSSRPLDVLFA

SEQ ID NO: 263369 - protein, 106 aa, Zea mays
  unsure (1)..(106): unsure at all Xaa locations
  Clone ID: MRT4577_171807C.1.pep
ETAPTMRGCRQXXXRFVKSTWLNGSKWCLLLQGAGVRRRVLVERATTCGWFMKVAGVLSSEQVCVLAVLFEAKGPDSSLHTSGQIRAAHKRIQQEKGSRRNESSWK

SEQ ID NO: 263370 - protein, 117 aa, Zea mays
  unsure (1)..(117): unsure at all Xaa locations
  Clone ID: MRT4577_171808C.1.pep
MEAYVLFARAKEQEEDIGCPSESSAARSTSSSSDGVDLADDASSSGSTXPLRDXASLMTHLPIKRGLSKFFAGKSQSFASLAAVGGIDDLPKXRRSGSRRRGAAASASRTRAAALPP

SEQ ID NO: 263371 - protein, 182 aa, Zea mays
  unsure (1)..(182): unsure at all Xaa locations
  Clone ID: MRT4577_171809C.1.pep
GYPEAGRGTRLASRRERKAKTLSSFPSRRRPKHPAAARRQPPSPGERPSRTAANRAPSPPQXARRRLLRSANRARSPPCPVPSRARSPPCHVPSRARSPPSPPQPRAQSAANRAQSAVPSPAQPRAXRRLLPSRARSPPYCTSQPTGLQQPAAPPRRVLRRSEPLQGRLYALDGRPAGQGSR

SEQ ID NO: 263372 - protein, 116 aa, Zea mays
  Clone ID: MRT4577_17180C.1.pep
TPGKTQIFIRPAQKKGKNFPPSPVPGKPKILKKQKTFQKNQKRGKGLWPVKGKRGPRGPNGKTKNIFLEKTRGGKKKLGNLGRGPWGGKKKTRGSQQPRKKSRPLQNLGPQPKQGG

SEQ ID NO: 263373 - protein, 69 aa, Zea mays
  Clone ID: MRT4577_171810C.1.pep
TGYDKKGGPTPYRLSLGGPLVPLIPPCKVEISYPKYVVRFQGSCYPGASSCVIDDPLQLEWATMFLDQG

SEQ ID NO: 263374 - protein, 72 aa, Zea mays
  Clone ID: MRT4577_171811C.1.pep
SAAGSNVCMASARGQPPMVVGGSGGRRRQGYRQEDGTEERQRSNQREDYTRWFIERALCVSDRSANAIRPAS

SEQ ID NO: 263375 - protein, 55 aa, Zea mays
  Clone ID: MRT4577_171812C.1.pep
KRFWLPVSGEVTQSCKLLETKKEFCFCQTSVIKNLVNFYKWPLSKTSPFLKNYSF

SEQ ID NO: 263376 - protein, 104 aa, Zea mays
  unsure (1)..(104): unsure at all Xaa locations
  Clone ID: MRT4577_171813C.1.pep
VHVIYKWTWAGTPAEGASWLRLXRLADIWHRILLIXVGMMHGLFEIFEQIKQSLSSQREGIDFMAVIPPLPVKAIQAAITSGTGCSLGLEGLCFYCTTHDNISK

SEQ ID NO: 263377 - protein, 126 aa, Zea mays
  unsure (1)..(126): unsure at all Xaa locations
  Clone ID: MRT4577_171814C.1.pep
RGAGESLTATQLLKSYYPAGRGERTHCENDHGRRRGGSCCSCSSPWPSFLQTFLSQRLPPPQVLDVDSSFXRLSLCASPHRITHIIXRADXSXEAGEPXXATASAESEEEVXEGSVAVAEAEEPTP

SEQ ID NO: 263378 - protein, 90 aa, Zea mays
  Clone ID: MRT4577_171815C.1.pep
RTYKNKHPKTSKIVDGRRQHSVLGRFLGSFFSDTHVSFLNLSFLQAITRTTTFSKTLAAAKSIKLMTLWIGWSVFFNQKNGSYTFSGLVI

SEQ ID NO: 263379 - protein, 104 aa, Zea mays; identical to SEQ ID NO: 263376
  unsure (1)..(104): unsure at all Xaa locations
  Clone ID: MRT4577_171816C.1.pep

SEQ ID NO: 263380 - protein, 236 aa, Zea mays
  Clone ID: MRT4577_171817C.1.pep
VGSKMKSSSDLLIIVGSMYFAVAFVGFENCITAQPVIAVERTVFYRERAAGMYSAIPYAFSQVVAEIPYVFVESVIYTVIVYPMMSFQWTLAKFFWFFYISFLSFLYFTYYGMMGVAITPNPQVASIFAASFYTLFNLFSGFIVPRSRIPVWWIWYYWICPVAWTVYGLIVSQYGDVEDLIKVPGKPDQQVKAFIKDYFGYDPDFMGVVAAVLAGFTALFAFIYVYCIKRFNFQQR

SEQ ID NO: 263381 - protein, 35 aa, Zea mays
  Clone ID: MRT4577_171818C.1.pep
PCYIQIAGFMPSMPNILPFREVSISVSNIFAAFDT

SEQ ID NO: 263382 - protein, 149 aa, Zea mays
  unsure (1)..(149): unsure at all Xaa locations
  Clone ID: MRT4577_171819C.1.pep
MGGTGGVSVSASGIASRGCAXSEAARGAWGIRGCGLRSEGLTCHSLRISXAPARVTGARPPPPAGXTNGAGAGTCGFXYDLXIIGAGVXGHGASLHAGXKGLKTAIIEGDVXVGGTXVNRGCVPSKARLAGXGPMRELHDEHHMKALGL

SEQ ID NO: 263383 - protein, 63 aa, Zea mays
  Clone ID: MRT4577_17181C.1.pep
HTGVGEPDGLEQRRLSQVSAGSSLGTWSTAWATRRTPRQPYSYVLSPTSAAAAWVNASCAPRP

SEQ ID NO: 263384 - protein, 134 aa, Zea mays
  unsure (1)..(134): unsure at all Xaa locations
  Clone ID: MRT4577_171820C.1.pep
PWPLTGTAIGSCSSKKATNRSSKAGLQIPVGRITRIRMADENAQRDNAVATAYLAAVLQYIAAEALXIARNAXVTTQKTRIXVPHSARRQQKLXVSRLMGTGTIAMDAVMXPXMHKLLIPINVDHISAKAAPGD

SEQ ID NO: 263385 - protein, 61 aa, Zea mays
  Clone ID: MRT4577_171821C.1.pep
YGGTILRSAVFRSPAGTSCVTGARSYRDPGSGRSRRRAGRADSAPAAAPLPGKGSCRRRVA

SEQ ID NO: 263386 - protein, 71 aa, Zea mays
  Clone ID: MRT4577_171822C.1.pep
KNGCAKKENPRMEGKNKSRHGDPSVAPSEQHDDAAAEDVEPSPLLSESPVELPLASNLHGMLRKLGARQRE

SEQ ID NO: 263387 - protein, 59 aa, Zea mays
  Clone ID: MRT4577_171823C.1.pep
TLKVPEFEPGLVLLRKFGSNPKKKKKKGGPIVNCEISNPWTRFCLMKAPPLNNVCPNNV

SEQ ID NO: 263388 - protein, 100 aa, Zea mays
  unsure (1)..(100): unsure at all Xaa locations
  Clone ID: MRT4577_171824C.1.pep
MHAYVSSEFGSRLGVPVLEWPSRVKIAAGSARGIAYLHEDCNDIFHSFTCFCDDFHYSQSHAFLFNSFPWXHPRIIHRDIKSSNILLDNNFEALVRMLST

SEQ ID NO: 263389 - protein, 49 aa, Zea mays
  Clone ID: MRT4577_171825C.1.pep
ISSQLPCIYSACRTTRANLCRAIACILLHSQNCHYFNLSTTVMSTIWNQ

SEQ ID NO: 263390 - protein, 448 aa, Zea mays
  Clone ID: MRT4577_171826C.1.pep
MPPRAAPALRVLPLALAAAIFSGLTAILFYLSGVSSSHSGSRLSEADLAALAALRGGFSKCVDANGLGLKAVTGEDYCRVVIQYPSDTVSKWRDPITHKAESLSFEFNLCEAVASWEHVRNSTTVLTKEYIDALPNGWEEYAWRRINKGILLNKCQNRSLCMEKLSLVLPETSPYVPRHFGRCAVVGNSGDLLKTKFGDEIDSYDAVFRENGAPTQNYTEYVGRKSTFRLLNRGSAKALDKVVELDETKKEALIVKTTIHDIMNQMIRELPITNPVYLMLGTSFGSSAKGTGLKALEFALSICDSVDMYGFTVDPGYKEWTRYFSEVRKGHTPLHGRAYYQMMECLGLVKIHSPMRGDPGRTVRWLPTKATIEAARVASEKLLKRPGAGSDDPLGTCTMIKKRRKGKAPNRSGLRDAAMKHLEDMKGAARYPLERNAGGGYLCMINDR

SEQ ID NO: 263391 - protein, 153 aa, Zea mays
  Clone ID: MRT4577_171827C.1.pep
SRSRTSALRVLPLALAAAIFSGLTAILFYLSGVSSSPALGSRRRTWRRSPRCGVASASAWYGLARMPPSGLITVRFALLVFLLISCRIVVFASGYGGTTSSQPRAVADWERGCLEILGSVRQLFRVRGSLFSVGGSTVTVRSLFWREIRFHGL

SEQ ID NO: 263392 - protein, 156 aa, Zea mays
  unsure (1)..(156): unsure at all Xaa locations
  Clone ID: MRT4577_171828C.1.pep
PTQNYTEYVGRKSTFRLLNRGSAKALDKVVELDXSLPSIFCPLSVRYKYEKXADFMVAETKKEALIVKTTIHDIMNQMIRELPITNPVYLMLGTSFGSSAKGTGLKALEFALSICDSVDMYGFTVDPGYKEWTRYFSEVRKGHTPLHGRAYYQMME

SEQ ID NO: 263393 - protein, 89 aa, Zea mays
  Clone ID: MRT4577_171829C.1.pep
HMLSYNLRYASTIYQVSKFDSDVRFHHERVSNIVGIILNRMTTSERGMHSMIIQNGVHSALDIPSVVMVRPGSKSSLHIDWWNCRTQNA

SEQ ID NO: 263394 - protein, 236 aa, Zea mays
  Clone ID: MRT4577_17182C.1.pep
TIKVDAEQSDLRFCFRIISPTKIYTLQAESAVDQMDWIEKITGVIASLLSSQSPEQCFMSSPKGSGHDRSTSDGSSFTSSVEFEPSVIDDLVLEKYSGNGQHDVTRGTHHHRTSMKPEKPIDLLRKVDGNNMCADCGALEPDWASLNLGALLCIECSGVHRNLGVHISKVRSLTLDVRVWEPSVINLFQSLGNMFVNNIWEDMLPDDNSSADGSDTSQYLSVSKPNLFMRILVYFV

SEQ ID NO: 263395 - protein, 64 aa, Zea mays
  Clone ID: MRT4577_171830C.1.pep
LEWDPSFRGTAKVGVVEFLNGVGKGVEAHAAKLEEAVGGDMQRLLEARTLRGRKLGIPCKHVMP

SEQ ID NO: 263396 - protein, 71 aa, Zea mays
  Clone ID: MRT4577_171831C.1.pep
MKTLHAVVLETLRLFPPLSFVVRKVFRDMQLGRLRAPKGTYLFVPVSTMHHDAAVWGPTARRFDPGRFQNG

SEQ ID NO: 263397 - protein, 106 aa, Zea mays
  Clone ID: MRT4577_171832C.1.pep
KGRGLKIKGGPSPGRGALKLGGPPPGIFFPDPKGSPPGGGSKIWRFSPLFYFRGPKGGGLKKSQKKFFPPPFWGWGAAPKKFPFFLEKKFPPWPPNSPFRPRRVSL

SEQ ID NO: 263398 - protein, 115 aa, Zea mays
  unsure (1)..(115): unsure at all Xaa locations
  Clone ID: MRT4577_171833C.1.pep
GLDVEEGALKETTPDGEGDHEKGVPAFWLTAMKNIEVLAEEISERDEGALKYLKDIKWSRIENPKGFKLELFFDTNPYFINSDLTXTYHMIDEDEPILEKAIGTEIQWAPGKCLT

SEQ ID NO: 263399 - protein, 58 aa, Zea mays
  Clone ID: MRT4577_171834C.1.pep
GGQNPNLGSLFYHKVSLLDRSQPPVYFPPPPIYKSQAGANIHFDPGRQKFKQPQGFLN

SEQ ID NO: 263400 - protein, 48 aa, Zea mays
  Clone ID: MRT4577_171835C.1.pep
LKRKLNVVICHCGPWIYIHKPGLALSKKKYNYKYNQNIKKKKTPPSFF

SEQ ID NO: 263401 - protein, 81 aa, Zea mays
  Clone ID: MRT4577_171836C.1.pep
GSSSSRATAASAFRTDKPDSHNSSDNHIWLDPRGSGSAHNLHADDLITCTRYPLVLVIDSENTHAFNVIHTVQKGEPPAVL

SEQ ID NO: 263402 - protein, 75 aa, Zea mays
  Clone ID: MRT4577_171837C.1.pep
KFLYILLVSQWVLVEIPVPTPIFLGSLSNEEPIFRFETHHRLFNPFWIHAWLVRNHPLKKDHVRNIKTSFWLEPN

SEQ ID NO: 263403 - protein, 102 aa, Zea mays
  unsure (1)..(102): unsure at all Xaa locations
  Clone ID: MRT4577_171838C.1.pep
SSPFLLSXLRLXVTLLRVLGLXSLPPSPSAGSSSSSLLTPSFKLVLPAYLSLWRERERGERSLGRSEALISQRFLPLYSLGSRSLQAMAGVATPPTPSPSSP

SEQ ID NO: 263404 - protein, 144 aa, Zea mays
  unsure (1)..(144): unsure at all Xaa locations
  Clone ID: MRT4577_171839C.1.pep
ILDGRRKKKIKIPNPSAHPPTTAPPXPRPPIPDLPGXPSPAALGPRCLGRRGGPRPCSATTATTASPPPSAAPTASSPGLGTPISTPPSAPSSCKPPSSSPLSPSPSLPLSWLYFSLFLSLPCLCLWDWIAAARAGVFSLLLLL

SEQ ID NO: 263405 - protein, 87 aa, Zea mays
  Clone ID: MRT4577_17183C.1.pep
MYKCMFGGGVTTIPTIVFNGETVEYKNISFTVCDVEGQDKIIPVWRHYLQNTQGVIFGVGGNDRDRVVLDRDELYRMLYEDELCDAV

SEQ ID NO: 263406 - protein, 166 aa, Zea mays
  Clone ID: MRT4577_171840C.1.pep
MAVLERRSRLPAVAQLAVAFWLAATSACLCRSVIPDPDLEPGRPCVGRLFCRWPPLPLPSPPPPPVVTPPPAPETTTPPPRHHHTPPFCPSPLCRHRLPPHLPRPIYPPPTPLSPESPPLPPSPPVITPPPPTPRHPYPTPRPCIYPFCPPRPPVCLGCGSHGGPP

SEQ ID NO: 263407 - protein, 86 aa, Zea mays
  Clone ID: MRT4577_171841C.1.pep
SGIGICQCTKLKRLPGTRFPALHLIKTKNNIELIKVNDISNSHWEWLDLLQRISAVITFFISHVVTKRSRFIFKTSGVASFNRMQL

SEQ ID NO: 263408 - protein, 54 aa, Zea mays
  Clone ID: MRT4577_171842C.1.pep
HGSRKRVQVSLHESKPSVGLLCSHAVNTICCNLLFLGRACTSLLYKSVECNSGA

SEQ ID NO: 263409 - protein, 134 aa, Zea mays
  Clone ID: MRT4577_171843C.1.pep
MAVLERRSRLPAVAQLAVAFWLAATSACLCRSVIPDPDLEPGRPCVGRLFCRWPPLPLPSPPPPSVVTPPPPETTTPPPRHHHTPPFCPSPLCRHRLPPHLPRPIYPPPTPLPPESPPLPPPPPVITLPRESRS

SEQ ID NO: 263410 - protein, 59 aa, Zea mays
  Clone ID: MRT4577_171844C.1.pep
LTLLPLPNMSSTEFGSTHEPPRCVKAYWIRATQNGRKLSGLLVLEGPISSWRLPLLTLV

SEQ ID NO: 263411 - protein, 249 aa, Zea mays
  Clone ID: MRT4577_171845C.1.pep
MPPNRKRRAAAMDPAAGGAGQQRQNKASAGKKVKKGGGSGGRWPAVKPKKDLQINRLKGTHLLTIPDFFTSAEAKAFIDIAESMGFTHQGSLGPLKGEAYRDNDRISVTDPLLAQAIWESGINRIFTDISVSGKVATGLNPNIRFYRYTEGQRFGRHIDESVSLADGSKTYYTLLIYLSGKGSAKDSSGQALVGGETVFYDQRGGVVAEVAPVQGMALLHLHGAKCMLHEARAVKKNAKYVLRSDVVFS

SEQ ID NO: 263412 - protein, 51 aa, Zea mays
  Clone ID: MRT4577_171846C.1.pep
KNKRPPFRMGIRACFSHQKSFVVLWFFKNLLRFCQSFLPFSNKGWFNNPTF

SEQ ID NO: 263413 - protein, 84 aa, Zea mays
  Clone ID: MRT4577_171847C.1.pep
PPGFLRGEFFSKQNIPPLFFQEKIGPDFNWGRVFPPPFLKRGFLCPPPFYLKKRISPTPPPFFFFKKKRGKPFFFRSGFCTSFL

SEQ ID NO: 263414 - protein, 202 aa, Zea mays
  unsure (1)..(202): unsure at all Xaa locations
  Clone ID: MRT4577_171848C.1.pep
FFPSSSLFLRWLSAVFLLCPLVHLLALFFKAPRLWQLVLDYPCAFFQXHXFLPFSLLVACPFWAFLQHLFPFSQLVGAYPRGFLPLRQLLSFTGGGXLPWGRLPPLSPALFVSPVAFFIHPLLLAFPLLAAGTAFFLFLLFHLLPFPPPALGCPPNVRPIVAIHCPVPSKRNACKKNTKKKYLEKKKKKKKKKKKKKKKKKK

SEQ ID NO: 263415 - protein, 121 aa, Zea mays
  Clone ID: MRT4577_171849C.1.pep
ARSESRRRCWEESQASGAATLAPAVKVATASREPRAIHDAPPCADECSMDEDRRVSRWGAQHDLLHELLSQRARRRRRRISFHGVDGRRCAWRSSLIAREHEAARGPATTGAAEWEQRAPG

SEQ ID NO: 263416 - protein, 44 aa, Zea mays
  Clone ID: MRT4577_17184C.1.pep
MGRDFFLKKKKKKKKKKKKKKKKKKKKKKKKNKKKKKKKKKLVL

SEQ ID NO: 263417 - protein, 103 aa, Zea mays
  unsure (1)..(103): unsure at all Xaa locations
  Clone ID: MRT4577_171850C.1.pep
RTYVLCLLPDLAVTSVLNPLKAYLSAQEATLPTLXFAAALALALHILLTVSLSARMGVRGVAAAVWLSDLALALMLAAYALAHDLRRQRGTTSKPIAAAAAAE

SEQ ID NO: 263418 - protein, 70 aa, Zea mays
  Clone ID: MRT4577_171851C.1.pep
MGSGSNSKEGEERVLSHGDVVLIRSDLAILRGPCFINDRIIAFYFAHLSASLQDDDLHRRGRFPLDPPHP

SEQ ID NO: 263419 - protein, 253 aa, Zea mays
  Clone ID: MRT4577_171852C.1.pep
MGSGSNSKEGEERVLSHGDVVLIRSDLAILRGPCFINDRIIAFYFAHLSASLQDDDLLLLPPSIPYLLSNLPDSAAVAAVAEPLRLASRRLVLLPVNDNPDASIAEGGSHWTLLILDNITSPSVPRFVHHDSIAGAPNLPIAARLADALRPLLSGSNSKRDTVPLIEGPTPRQTNGYDCGVYVMAIARALCAWWKSGQDQRGGDWFQAVRSGVDAHSVEAMRTDLLQLISTLIQEKANANSTPMGDTDPGSLE

SEQ ID NO: 263420 - protein, 64 aa, Zea mays
  unsure (1)..(64): unsure at all Xaa locations
  Clone ID: MRT4577_171853C.1.pep
KKARNAKRHRPPPTRTRAKAKNHEGGHRQQDQSPATKSDPEPSNQXGXTIXASLLMAGIHDILA

SEQ ID NO: 263421 - protein, 40 aa, Zea mays
  Clone ID: MRT4577_171854C.1.pep
YSMVPLSPTSLSPSSCSSHYTYYLFCIFLMTNLLCHIYYT

SEQ ID NO: 263422 - protein, 88 aa, Zea mays
  Clone ID: MRT4577_171855C.1.pep
ATIIAHPYPDSEHNRKHEIEVCRPKAQNRTITHHSATFGQPGGELLDDLVATAAQAYRRLDGERHLYMVRLHALSISNVRDCLMAGRR

SEQ ID NO: 263423 - protein, 371 aa, Zea mays
  Clone ID: MRT4577_171856C.1.pep
MEVRLPLPDQHCFGRINTESGSVRHESKNIEVRQGSGTAQRLGMLFKKEKSHLRILNRDIQNHVNQVVNFPLKGGKQKVCPTSVKSESLKMKAKLVRFNVETGVQHGSVKQVTSSTLDTSPMRKDGSMITFALKEARDLKHKANDLKNKGQELESTGLYFEAALKFLHVAFLLETPSFDISRQGGGGRSMKMYSETAKLCNFCAYEYERCKKMASAALAYKCVEVAYLKAAYYKHRTATKDQQELQAAVQITRGEPPSPSALDIDNLNSHGSSNASSLKGDNSPHVPGNHLPLAIHNQAQLLRLLAYTNDMNLAFDATRKAESVIASATGCPERGVVGDGLASVKAVLDLNFNNVNELLRLVRVSMESISS

SEQ ID NO: 263424 - protein, 54 aa, Zea mays
  unsure (1)..(54): unsure at all Xaa locations
  Clone ID: MRT4577_171857C.1.pep
ASPPPGVFFQVRWGSPGFGFVGEQIEMAAXDVEYRCFFGGLAWATDDHFLHNAL

SEQ ID NO: 263425 - protein, 63 aa, Zea mays
  Clone ID: MRT4577_171858C.1.pep
LFTFRFLKELDLQKSCVKHQDHQWINCFPKSSTSLECLNFSCLTGEVNACALEELVARSPNLK

SEQ ID NO: 263426 - protein, 125 aa, Zea mays
  Clone ID: MRT4577_171859C.1.pep
QNCWYGPPSIRRKWCSASSPTIAAKGSPPWASPSAVKFTGPVMMPRLSRLAAPLGGASTGHGGGRVGGRTVRVQPESGSGFPAPSPSRLAAPVDDGARRRRRRWIPLFARLRMGWSDSDRGRSDG

SEQ ID NO: 263427 - protein, 231 aa, Zea mays
  unsure (1)..(231): unsure at all Xaa locations
  Clone ID: MRT4577_17185C.1.pep
TLAXLPGYPCAVLEIFLRSLSHSCSARCPAVGLPHRRPAPSRLLPGSPLAHGSHVPAKPPAWIPYFSPCARVSSCMAAPGSLLHPWPKLLPARQPAARPSPWSLLRPSSLFFLLPVFCARRATSMAGSPCSLLLAPSSQPWPSSPPVPMADLGSICRGSRLCCLLPCAPCSSALYLRACCARRLPMALDALLLSAPXSLRARSCLSRSVWIQRSSCPIFCSPACPLGSLGP

SEQ ID NO: 263428 - protein, 32 aa, Zea mays
  Clone ID: MRT4577_171860C.1.pep
ESEGIYHMLEDLKHNFTSAAYEPEPFALSEQL

SEQ ID NO: 263429 - protein, 331 aa, Zea mays
  Clone ID: MRT4577_171861C.1.pep
MEGSAAAPLRTRICIIGSGPAAHTAAIYAARAELKPVLFEGWMANDIAAGGQLTTTTDVENFPGFPNGIMGADLMDNCRAQSLRFGTNILSETVTAVDFSACPFRVSADSTTVLADAVIVATGAVARRLHFPGSDAYWNRGISACAVCDGAAPIFRNKPIAVIGGGDSAMEESNFLTKYGSHVYIIHRRNTFRASKIMQARALENPKIKVLWDSEVVEAYGGANGGPLAGVKVKNLLNGEVSDLQVSGLFFAIGHEPATKFLGGQLELDSDGYVETKPGSTHTSVKGVFAAGDVQDKKYRQAITAAGSGCMAALDAEHYLQEIGAQEGKSD

SEQ ID NO: 263430 - protein, 44 aa, Zea mays
  Clone ID: MRT4577_171862C.1.pep
TYSPAVTEQFFNTQSSSKYFLTVHNILRINQHITITIYGQLHSL

SEQ ID NO: 263431 - protein, 76 aa, Zea mays
  unsure (1)..(76): unsure at all Xaa locations
  Clone ID: MRT4577_171863C.1.pep
DRGRNRRAXTSQARERKLGSSRAAAXFFFFHITHFITDLMRKGLLQFNYQKTDIEMYGTDSTRTSSAYTEWVVLGA

SEQ ID NO: 263432 - protein, 50 aa, Zea mays
  Clone ID: MRT4577_171864C.1.pep
VFGRVLPGCCKFLLLTHWASAAGWNGSLSPIFESVHLNFRNRFQWRGSPG

SEQ ID NO: 263433 - protein, 112 aa, Zea mays
  Clone ID: MRT4577_171865C.1.pep
ARARILLVLAAGGVQPGGKHVVWVVLPVLCPVRRGPAPRSGLEVLSQLPFRGADNRGPWIGFLLAPPPKKKPGGCCVPLLVGEGKGLPSLFFFHFQSERRAARPFFLHPIHF

SEQ ID NO: 263434 - protein, 58 aa, Zea mays
  Clone ID: MRT4577_171866C.1.pep
IIHPVWPMANIKKASTHGCYCEWTDRSNEGVLKPVNEAFVPGQDTDLFFLKICLLFGL

SEQ ID NO: 263435 - protein, 130 aa, Zea mays
  Clone ID: MRT4577_171867C.1.pep
VPLNATLLAIDRKGVGGTKLSTGAPYTVLQSSIYKAVTDAFAAETAMIPRAPPLAPFKLCYDRSKVGSTRVGPAVPTIELVLGNEATSWVVFGANSMVATYGGALCLGVVARGKAPRTSVVIGGHMMDDN

SEQ ID NO: 263436 - protein, 55 aa, Zea mays
  unsure (1)..(55): unsure at all Xaa locations
  Clone ID: MRT4577_171868C.1.pep
EPAETAAGPARGMLLSEVTAGNPASGIWEHASRPRIWRQWPPPELGDALDFRDXR

SEQ ID NO: 263437 - protein, 35 aa, Zea mays
  Clone ID: MRT4577_171869C.1.pep
PPLPTMYSGAFMGLVKSMLRKSPDHRPRAAELLKH

SEQ ID NO: 263438 - protein, 496 aa, Zea mays
  Clone ID: MRT4577_17186C.1.pep
MATMAGRLVARTSSSSAKRQRFSSAVLLLALFQSSWCYDDAAATTTVDYGYNNEHEADRVAFLPGQPRSPPVSQFAGYVTVNERNGRALFYWFFEAQTSPAHKPLLLWLNGGPGCSSVGYGAASELGPLRVNRHGAGLEFNNFAWNKEANLLFLESPAGVGFSYTNTSSDLTKLDDAFVAEDAYSFLVNWLKRFPQYRSHEFYISGESYAGHYVPQLAELVYDRNKGNTNTHINLKGFMVGNPLTDDYYDSKGLAEYAWSHSVVSDEVYERIKKVCDFRVSNWTDGCDTAMSAVFSQYQEIDIYNIYAPRCNLPPSSAALALAVDKAVVANRQEHFRRRIRMFSGYDPCYSSNAEKYFNDAGVQTAFHANASGARKWEVCSDSILRSYNFSVLSVLPIYSKLIKAGLRVWLYSGDADGRVPVIGSRYCVEALGLPVKTQWQPWYLNKQVAGRFVEYHGMTMVTIRGAGHLVPLNKPAEGLALIDTFLQGKQLPTHR

SEQ ID NO: 263439 - protein, 88 aa, Zea mays
  unsure (1)..(88): unsure at all Xaa locations
  Clone ID: MRT4577_171870C.1.pep
ITSNXPXLXXXXXKXFFXXITXLMPTQXSXXXXXXLFFIYSNFLIGGILFFFFXXYYIKXKKXXXNKXFSPFLQXQKIXYLPXXXLXX

SEQ ID NO: 263440 - protein, 460 aa, Zea mays
  Clone ID: MRT4577_171871C.1.pep
MCLLFQITKDSLPSIMKLPNLQELTLVGCIGIDDGALVSLERECSKSLQVLDMSQCQNITDVGVSSILKSVPNLLELDLSYCCPVTPSMVRNFQKLPKLQALKLEGCKFMANGPKAIGTSCVSLRELSLSKSSGVTDTELSFVVSRLKNLLKLDITCCRSITDVSLAAITSSCTSLISLRMESCSHVSSGALQLIGKHCSHLEELDLTDSDLDDEGLKALARCSELSSLKIGICLKISDEGLSHIGRSCPKLREIDLYRCGVLSDDGIIQIAQSCPMLESINLSYCTEITDRSLISLSKCAKLNTLEIRGCPSVSSIGLSGLAMGCRLLSKLDIKKCFGINDAGMLYLSQFAHSLRQINLSYCSVTDVGLLSLSSISGLQNMTIVHLAGITPNGLTATLMVCGGLTKVKLHEAFRSMMPPHTIKNVEARGCVFQWIDKPFKVEVEPCDVWKQQSQDVLVR

SEQ ID NO: 263441 - protein, 89 aa, Zea mays
  Clone ID: MRT4577_171872C.1.pep
YNNIIIIINCKKLWCLPRLFVCNKFIIVGCSRSIFNSHSRFHSLDCLHSLHYHLESHCITTIFYIFSISNIVSTFCSYSRELFIFSIFS

SEQ ID NO: 263442 - protein, 43 aa, Zea mays
  Clone ID: MRT4577_171873C.1.pep
STDGAKGAKYRCDVNIVDMARAHILCLEHFAMGTHKIYANIVV

SEQ ID NO: 263443 - protein, 95 aa, Zea mays
  unsure (1)..(95): unsure at all Xaa locations
  Clone ID: MRT4577_171874C.1.pep
PTRLEIIRRFHYKFLLFNPGSWXSRNKKLVVYXYLPNNTLQIHLHAKDLPSNNLTNRLXINLGTTNDLDYLHQNNHPKNIHCHINSSNLSSLLTK

SEQ ID NO: 263444 - protein, 78 aa, Zea mays
  Clone ID: MRT4577_171875C.1.pep
GSSFLVRVKKHFAALSFSPLVSTCFRSDSLHEIPSLVTSGSQLANHAPSIAALRCVVAARPATPVGQSYLHWQWATRS

SEQ ID NO: 263445 - protein, 99 aa, Zea mays
  Clone ID: MRT4577_171876C.1.pep
NHSSLATGGIIDRRDDNIYQSTRSDRGLLVYGYVQLNQIFLCLNVRLHGHGSLYFRLPQGMCLPRGTRGKIHPKKWPALVGLPVPALLVGWFQYGAAFE

SEQ ID NO: 263446 - protein, 35 aa, Zea mays
  Clone ID: MRT4577_171877C.1.pep
NLSQQHKLFNGIHYFCEKANKTSPLGCLPKIKIPL

SEQ ID NO: 263447 - protein, 93 aa, Zea mays
  unsure (1)..(93): unsure at all Xaa locations
  Clone ID: MRT4577_171878C.1.pep
MSGRVKVGMGLIQGGAKRQLKVLRDNIHSITKPMIRRLVRMGGVKLIXRSLYXETRSVLKIFLENVIRDTVTYTEHARRMTDTVMYVVYALKR

SEQ ID NO: 263448 - protein, 130 aa, Zea mays
  Clone ID: MRT4577_171879C.1.pep
EQKSDFPSWMSAEVPVSVQVVTPIVRGTLGISTFNYNYDHVQMQRFPRSGYSEQTYCLRGAVKAVGLVGAVMQRAVIFGERGEGAAVRGSPCRVGEGEAMHQREDMKGNDGGGGRHRPGGPARGTGRRRP

SEQ ID NO: 263449 - protein, 68 aa, Zea mays
  Clone ID: MRT4577_17187C.1.pep
HLWPRSQYPEPTQCFYQYFIEHFSGNLLCDLTKFLSHGLHQASPYNFWRHDFVQHGSGVVVLVSANLS

SEQ ID NO: 263450 - protein, 64 aa, Zea mays
  Clone ID: MRT4577_171880C.1.pep
ASVTSPFMGPPACSSSGIYCLATTARLRRTSWEGSAPPLRWPILIRSALRLVGQTSWRGGNTCE

SEQ ID NO: 263451 - protein, 677 aa, Zea mays
  Clone ID: MRT4577_171881C.1.pep
MAPHTTADDDGEGNALSVERAFADQAVPSWREQLTVRAFVVSFFLAIMFSVIVMKLNLTTGIIPSLNVSAGLLGFFFVRLWTAAIERVGLLRQPFTRQENTVIQTCVVAAYDIAFSGGFGTYLFGMSETIAKQATEADNPQNVKNPHIGWMIGFLFLVSFIGLFALVPLRKVMIVDYKLTYPSGTATAYLINGFHTPEGAKLAKKQVKTLGKFFLMSFLWGFFQWFYTGGDNCGFQNFPTLGLQAYKNKFYFDFSPTYVGVGMICPHIVNVSVLLGGILSWGIMWPLIGNQKGNWYDASLPESSLHGLQGYRVFISIAIILGDGLYNFVKVLIRTTAGFISMMKKNSTLPVSNNGSPITEGVSFDDERRRDLFLKDQIPRSVAYGGYVAVAAISIGTLPQVFPQLKWYYILVAYIFAPVLAFCNAYGTGLTDWSLASTYGKLAIFIFGAWAGASNGGVLVGLAACGVMMSIVSTAADLMQDLKTGYLTLASPRSMFISQVIGTAMGCVIAPCVFWLFYKAFADIGLSGSEYPAPYAIVYRNMAILGVDGFSSLPKNCLTLCYIFFAAAIVVNLVRDLVPKKVARFIPLPMAMAIPFYLGSFFAIDMFIGTVILFAWETINKAKANAFAPAVASGLICGDGIWTLPQSILALAKVKPPICMKFLSRSVNAQVDGFLGS

SEQ ID NO: 263452 - protein, 95 aa, Zea mays
  Clone ID: MRT4577_171882C.1.pep
KKLFGWATKPRFFLQTQRFQQKNPSWVSGFPRVLGNFPRPQKFFVLSPPKKKNGVFLYLGGEHGKNFFSPLKLAFCPTGGVYPPPFVNPLWQGHF

SEQ ID NO: 263453 - protein, 427 aa, Zea mays
  unsure (1)..(427): unsure at all Xaa locations
  Clone ID: MRT4577_171883C.1.pep
MAPHTTAAGGGGGEEEAVEEASTLRHRHSAAKDGGEEGQANNGVAASHLVAADDDDGEGNALSVERAFADQAVPSWREQLTVRAFVVSFFLAIMFSVIVMKLNLTTGIIPSLNVSAGLLGFFFVRLWTAAIERVGLLRQPFTRQENTVIQTCVVAAYDIAFSGGFGTYLFGMSETIAKQATEADNPQNVKNPHIGWXMIGFLFLVSFIGLFALVPLKVMIVDYKLTYQDGDCLSHLGHRXFISMMKKNSTLPVSNNGSPITEGVSFDDERRRDLFLKDQIPRSVAYGGYVAVAAISIGTLPQVFPQLKWYYILVAYIFAPVLAFCNAYGTGLTDWSLASTYAIVYRNMAILGVDGFSSLPKNCLTLCYIFFAAAIVVNLVRDLVPKKVARFIPLPMAMAIPFYLGSFFAIDMFIGTAILFAWETINK

SEQ ID NO: 263454 - protein, 39 aa, Zea mays
  Clone ID: MRT4577_171884C.1.pep
RFKNNPSLAAPSFRVLTSYSSIRESFGLCLRIPRNKKEH

SEQ ID NO: 263455 - protein, 255 aa, Zea mays
  unsure (1)..(255): unsure at all Xaa locations
  Clone ID: MRT4577_171885C.1.pep
MAGARSQVNKPHKTRFASKASRHSHKIDKVRSGKPAGSHRAAVKGARAARLQHSKAIRDQKRAALLKEKRSSNGSSSAPRVIVLCGLSSSANVGPLAEDLLTFAAGGDEKLTSNTVASPAYKLRTTVLQAPYGDLTSCMELAKVADLLAFVVSANSLYNSDSGNPIDEFGSQCLSVLRAVGLPSTAVFIRDLPSDTKSKQELKKAAVSFLSPEXPEDCRFYAAETKDDLHMFMRLFRSNIFXITHWRXQRPYVMS

SEQ ID NO: 263456 - protein, 65 aa, Zea mays
  Clone ID: MRT4577_171886C.1.pep
GRDQSHNSPSAFCVLHFSLCPLQVQSHLQPWVNRTPTSTFSLIAYVSSPHGATTLHILYTLLNKQ

SEQ ID NO: 263457 - protein, 72 aa, Zea mays
  Clone ID: MRT4577_171887C.1.pep
NVMMLQMQEQQLDEIRARSWLLTSVSSFITGWMGCCNPSSEVPTPYICAVIHCFEHNWAFSLRWALSLPIEL

SEQ ID NO: 263458 - protein, 72 aa, Zea mays
  Clone ID: MRT4577_171888C.1.pep
AHHIHPPSTSPPGWYKHAFFCELIYDRASGALKQLPPNVRFMSMVQRKIHASDIREVYYSEDVIDVPVARSY

SEQ ID NO: 263459 - protein, 74 aa, Zea mays
  Clone ID: MRT4577_171889C.1.pep
TPGSGPVPFGLSRSEHVAQQYRASLHHQIVLPLSSEQLVVGVSCGPLGQACAPSFYGYLLARQFNPSLCKGVCS

SEQ ID NO: 263460 - protein, 86 aa, Zea mays
  Clone ID: MRT4577_17188C.1.pep
VPGLCGLCQCCEALPGGTPAGPYFGSLVVASGLAKQPVVGSFVGRRTGSCPCVASLVLSFVAIRVPFIWSSFCGPISIQSFFPKCF

SEQ ID NO: 263461 - protein, 46 aa, Zea mays
  unsure (1)..(46): unsure at all Xaa locations
  Clone ID: MRT4577_171890C.1.pep
RHNLFERNYLNIKLPSIIYSTRYITPQKGQYXFXKAQGSMHAKPGA

SEQ ID NO: 263462 - protein, 51 aa, Zea mays
  Clone ID: MRT4577_171891C.1.pep
KDHQDLTSKPQNRWWAERGHTQSMVSRSKYQGRSTDAKTHHTRGGEFNSKD

SEQ ID NO: 263463 - protein, 461 aa, Zea mays
  Clone ID: MRT4577_171892C.1.pep
MVDQSVVDLDIAFRLGGFASTTIQHLGIVAVMSKVTWQVLILIVPMAVACMWMQRYYIASSRELTRILSVQKSPVIHLFSESIAGAATIRGFGQEKRFMKRNLYLLDCFARPLFSSLAAIEWLCLRMELLSTFVFAFCMAILVSFPPGTIEPSMAGLAVTYGLNLNARMSRWILSFCKLENRIISVERIYQYCRLPSEAPLIIENCRPPSSWPQNGNIELIDLKVRYKDDLPLVLHGVSCMFPGGKKIGIVGRTGSGKSTLIQALFRLIEPTGGKIIIDNIDISAIGLHDLRSRLSIIPQDPTLFEGTIRMNLDPLEECTDQEIWEALEKCQLGEVIRSKEEKLDSPVLENGDNWSVGQRQLIALGRALLKQAKILVLDEATASVDTATDNLIQKIIRSEFKDCTVCTIAHRIPTVIDSDLVLVLSDGKIAEFDTPQRLLEDKSSMFIQLVSEYSTRSSCI

SEQ ID NO: 263464 - protein, 56 aa, Zea mays
  Clone ID: MRT4577_171893C.1.pep
FSIWSWFLITIRCRVVFESCWAGRVCSKNQLMADWPQNNKNHRSMGFVSKRKEKKE

SEQ ID NO: 263465 - protein, 74 aa, Zea mays
  Clone ID: MRT4577_171894C.1.pep
FPSVPPDTLIQPPLSCAWGGVGGISMEWMGARATNTFLAPIQGLPGFLPCLVFISTQGAITVQGPHPKDGMRKE

SEQ ID NO: 263466 - protein, 93 aa, Zea mays
  Clone ID: MRT4577_171895C.1.pep
KRQVSTPSPGAKNDERCHPPPSFCPPFFYSLQQRRYPHLFLDDEAAAAIIPPATRPTTPKAPVMIAMPIIPSAFSHQVSNVTQVRQSRNSALE

SEQ ID NO: 263467 - protein, 70 aa, Zea mays
  Clone ID: MRT4577_171896C.1.pep
KTAYREATNDALAVLDKVINQCMCFIEQATCGCYGDRTNNYFRHAADMRLPSCIARSTRICERPRSNTSW

SEQ ID NO: 263468 - protein, 76 aa, Zea mays
  unsure (1)..(76): unsure at all Xaa locations
  Clone ID: MRT4577_171897C.1.pep
GAGXIPXXSLYFXSLXKXRWXXLXKXXLXXXRQXRXQXTFQITXXTFXXIFFXXXPFFXFFWGGXCFFFFFFWGGG

SEQ ID NO: 263469 - protein, 81 aa, Zea mays
  Clone ID: MRT4577_171898C.1.pep
LGFHTPPVGLTIIPLFFSPRFFFFALFGGWAYKQPQSVIPKKIYWVARTRIGGRPFFSPPLPQPWSKVWINNGFPPPEEKK

SEQ ID NO: 263470 - protein, 63 aa, Zea mays
  Clone ID: MRT4577_171899C.1.pep
KKKTNLLHYNSKKISNFTTLFTTQTFISHPLLRLPNPNIYSFQLTFPIFHTFSPNHNQLLISK

SEQ ID NO: 263471 - protein, 58 aa, Zea mays
  Clone ID: MRT4577_17189C.1.pep
FSTKRCALMLFASIKPSLRICHWLLHIILSCNLFELVMPGEVCSKKLLGCSRTARFIN

SEQ ID NO: 263472 - protein, 60 aa, Zea mays
  Clone ID: MRT4577_1718C.1.pep
CIKTEFVLRSSIGRMRREESFLVVYDPRCRQGASRVSSRSQLGSRLEVCRSPAHHQRFTG

SEQ ID NO: 263473 - protein, 261 aa, Zea mays
  unsure (1)..(261): unsure at all Xaa locations
  Clone ID: MRT4577_171900C.1.pep
MVLVIRSVNKLNLDVTHFGPTHLTCDTCEDRRWMYEGWKKRGALSSEWVAKTNMFLDHAFARSETGTDVSCPCSKCQNIYFLDRRTMSIDLCKNGYMPGYEVWVHHGEDPPPRVVSEVQSHEEGDYDRMEEMLDDSKFAFSNNCYKELLNMINDVLPENHKIPKDMYQSKKLLLGLGMDYEKIDVCDNNSMLFWKETASEKKCIVCGERRFVEVENDDCLTMTIEVACKQLRYMPLIPRFEXLFISKNIARHMRWHKEGVC

SEQ ID NO: 263474 - protein, 215 aa, Zea mays
  unsure (1)..(215): unsure at all Xaa locations
  Clone ID: MRT4577_171901C.1.pep
MAGVQAMPAAVGVAGLRGSGLVSSSSTSLFTGDCKRKARRPACSAWALRQSRIGSRSRSKRGLGIVCNLAGQYEDSFDDVQRQLMNYFPYKAVRTLLTQLYELNPPSYRWFYNFVAVNKPTDGKHFLRALGKERQELAERVMVTRLHLYGKWIKKCDHAKTYEKISDENLALMRERLXMETVIWPTDDSSTEKDRLMPDACAPEFSGLLIKLSSF

SEQ ID NO: 263475 - protein, 194 aa, Zea mays
  Clone ID: MRT4577_171902C.1.pep
MSGVQAMPAAVGVAGLRGSGLVSSSSTSLFAGDCKRKARRPACSAWALRQSRIGSRSRSKRGLGIVCNLAGQYEDSFDDVQRQLMNYFTYKAVRTVLTQLYELNPPSYRWFYNFVAVNKPTDGKHFLRALGKERQELAERVMVTRLHLYGKWIKKCDHAKTYEKISDENLALMRERLMETVIWPTDDSSTEKIG

SEQ ID NO: 263476 - protein, 42 aa, Zea mays
  Clone ID: MRT4577_171903C.1.pep
VQFLSTVLVAFSCETGTTGPHHNHELPLVPITKTLLPILPVP

SEQ ID NO: 263477 - protein, 85 aa, Zea mays
  Clone ID: MRT4577_171904C.1.pep
PLSFLSTVFQTRAPHRDVLCHGCQSLQCDLIILLSIQIYQIRLVVGSPVVHGRHSGISQTSVPQHVRSMSIGTNGRLSYRDRLKP

SEQ ID NO: 263478 - protein, 90 aa, Zea mays
  Clone ID: MRT4577_171905C.1.pep
RTQRLSTGKRSRSMYPLSRLGVPSTKPSLGTWRKIRGARLRGGPLRPEKASSPLGRILRRLKGTVRKGMCVWVHTQSGFHQFMSAGMCRE

SEQ ID NO: 263479 - protein, 87 aa, Zea mays
  unsure (1)..(87): unsure at all Xaa locations
  Clone ID: MRT4577_171906C.1.pep
FKAGDGATLLCVAGDNLGLGVLTHVDYLAHLEELLAGFLLGLGSLMRPKXVWMERYGLSGGAPCTGRKYLAYQWSLLGVVIIILLVG

SEQ ID NO: 263480 - protein, 40 aa, Zea mays
  Clone ID: MRT4577_171907C.1.pep
ATVNASVLNHRILHLRSDIHEYVRMHTLYSLAISVILRAS

SEQ ID NO: 263481 - protein, 89 aa, Zea mays
  unsure (1)..(89): unsure at all Xaa locations
  Clone ID: MRT4577_171908C.1.pep
STYAYALILSIYNPITLNSYQHMLPSPMCHLXSRERNIIYFLQHPSVNIPSNQGYPPKDSYPTTFYHSSIYPSSTHFYPHHFYPQQVFP

SEQ ID NO: 263482 - protein, 46 aa, Zea mays
  Clone ID: MRT4577_171909C.1.pep
GGGVPGLVVPVILGNGNGCPPAKRNWRTTRGGGVGNGRDPRRWERI

SEQ ID NO: 263483 - protein, 56 aa, Zea mays
  Clone ID: MRT4577_17190C.1.pep
MWQDGRLNLCLSGTCVSVRPKLVQWAIIRHGGHIESFFPAALSSSKNLFVWKAHQV

SEQ ID NO: 263484 - protein, 88 aa, Zea mays
  Clone ID: MRT4577_171910C.1.pep
RFGIKGKLAPRYIGPYEIKEACGPVAYQLKLPPHMSAIHDVFHVSQLRKCVCLPTRAPRQGIGPKRKINSREEHPVKVLDQKERSTRG

SEQ ID NO: 263485 - protein, 125 aa, Zea mays
  unsure (1)..(125): unsure at all Xaa locations
  Clone ID: MRT4577_171911C.1.pep
MQDIRRIGLGTNIRDNSLIIVAKSKTRGMAFPTIIANNATVGHSATLQGCTTEDDAFVVIAATLLDAVAVEKTEMXAAAALVRQNTTIPXAEVWSGNPARFRTKLXDDEITFIAESVAKYSNLSK

SEQ ID NO: 263486 - protein, 56 aa, Zea mays
  Clone ID: MRT4577_171912C.1.pep
MESCFSDSQIRISLTLPALWKNEASQGTFLGMYGQTALALKIQCFNWPRRAGCHSV

SEQ ID NO: 263487 - protein, 59 aa, Zea mays
  Clone ID: MRT4577_171913C.1.pep
KYTRPTNYKTLVSFENRSFVLLQRNQSTEFQMPLMQHVEVPVPFAKKNELLLKLEAASI

SEQ ID NO: 263488 - protein, 116 aa, Zea mays
  unsure (1)..(116): unsure at all Xaa locations
  Clone ID: MRT4577_171914C.1.pep
SHRARALCYARPGVFFENGRCSVTLVGPCPIRPYDPREKLLLQTKKTVCGPPPLVNWVGWKPCPALNSSAPPAPSKXSYSKQNKAGFCPPLLRLGPPPAKVFRIYLRKIKLHLFSP

SEQ ID NO: 263489 - protein, 161 aa, Zea mays
  unsure (1)..(161): unsure at all Xaa locations
  Clone ID: MRT4577_171915C.1.pep
QAGPVRVLSSSSEDEDVFVPLAERITCKLLTSKQLCPELSSSSLKTGLDGQNNASAPCDWKRQPWPKIPDVPLHGALEKSAANDEDSLLDDQCRQLPTYQATCRELAVSKTNSDRPLPKKRTKHIQTVQSGGSQGCWRXRDSKQKGNTPSSMKEKEXEMIR

SEQ ID NO: 263490 - protein, 97 aa, Zea mays
  unsure (1)..(97): unsure at all Xaa locations
  Clone ID: MRT4577_171916C.1.pep
KTAGKPKPAAXGSPWYRAHRGLDLGPLCGQPPSYLTGELPCYYSWDTGGLSADPETFGKNRXLEVIHCRWAMLGALGCVFPELVARNGGQFREAVWF

SEQ ID NO: 263491 - protein, 38 aa, Zea mays
  Clone ID: MRT4577_171917C.1.pep
ACDDTLALACGPPPMIQFAVSPNLEKMKYDMANSFFLF

SEQ ID NO: 263492 - protein, 67 aa, Zea mays
  Clone ID: MRT4577_171918C.1.pep
LDCRMCSNNGNKLLKNKLLISYGPYFPGTSAFSISSKALHKLQELLSEDLRNGVSATSVSPSPRAIW

SEQ ID NO: 263493 - protein, 62 aa, Zea mays
  Clone ID: MRT4577_171919C.1.pep
KTHVRLVHIKTPIMRRKVYIFFGRGWYFPLVSLYSPLFHFQIWFTNLGAIIQEWDEFFRTRG

SEQ ID NO: 263494 - protein, 95 aa, Zea mays
  Clone ID: MRT4577_17191C.1.pep
GEIVAEGSPSKDQTDDFGLKLKEEAMLNRVLKEAVLSKEVAIEQLQSDLASSLRIQDVMRNEIQRVQDELSCITHKAKQLEHQVSKKDESIDEIQ

SEQ ID NO: 263495 - protein, 45 aa, Zea mays
  Clone ID: MRT4577_171920C.1.pep
YSPELIFTTKKNNNTSCIFITELCSTHIQHNHISLNYFYPYLKIN

SEQ ID NO: 263496 - protein, 316 aa, Zea mays
  unsure (1)..(316): unsure at all Xaa locations
  Clone ID: MRT4577_171921C.1.pep
IRLETGLAIADLGCSSGPNTLVLVSTAVAAVRRRCSELRRQPPELCVHLNDLPNNDFNLVTKSLATYAKAQESLGPPVLTSIVPGSFHARLFSKRSLHLVCSNASLQWLSKAPXRAGAERDPVLRQGRVXARRARRPAVIQAYARQFRSDFTQILRLRAQEMVPGGKMVFSLLGQRPDDKPENALQLFEFINAVLHEMASKGLIDEERLHSFYIPVYGPSEKELREIVEAEGSFSIDKMAIHEPPPPRNANLTPKARAGGLRAAMEPIIVRHFEASPPAMDEFLRIAEKLIKMSHVEDEYPNKPRAFVAASLTRRA

SEQ ID NO: 263497 - protein, 231 aa, Zea mays
  Clone ID: MRT4577_171922C.1.pep
MKSRRQSSGGSSGACAAGERNAHSSGGGCKLERKDVEKNRRLHMKGLCLKLSSLIPPAAAAAATHASLLSDAASAAVSSNPGNKQDAVTQLDQLDSAAAYIKQLKERIEALKQRKAGCCNGGGAATEAATAAAGSTGGGGGVRMPVIEVRCQDGTLDVVLISEAARPFKLHEVITVLEQEGAEVVSASFSVIGDKIFYTVHSQALSPRIGVDAARVSQRLHALLLAPTILV

SEQ ID NO: 263498 - protein, 56 aa, Zea mays
  Clone ID: MRT4577_171923C.1.pep
GDTNLILREFGKGGVILRHHSGPRDGNWIHILYQVIIHLSTVVLPYFCCTIYFNFL

SEQ ID NO: 263499 - protein, 179 aa, Zea mays
  Clone ID: MRT4577_171924C.1.pep
MEETPLPQPLVPRVRLGAQGLEVSKLGFGCMGLTGSYSAPLSDDAGASVVAHAFRRGVTFFDTSDFYGPHTNETLLGKALKQLPREQVQVATKFGIQQYAYDEGRGAVCGRPEYVRACCEASLRRLGVDYIDLYYQHRVDTTTPIEDTIGELKKLVEGRSGTLGSRRRAPTPSGVLTPC

SEQ ID NO: 263500 - protein, 59 aa, Zea mays
  Clone ID: MRT4577_171925C.1.pep
PTRAQGSSSSPSSTTVLCTKRRGEDADLREDPHGEDHHPRCGQQRHRPQRQRQNPGQGR

SEQ ID NO: 263501 - protein, 63 aa, Zea mays
  unsure (1)..(63): unsure at all Xaa locations
  Clone ID: MRT4577_171926C.1.pep
LSEKMSFQTSFXPTPPPPPXQWFXQGKAHTATQGEGRHTETQRRKTSKQEKGKKKKKKKKKKA

SEQ ID NO: 263502 - protein, 101 aa, Zea mays
  Clone ID: MRT4577_171927C.1.pep
AYNDAVRTRADENALTGCLGAFILGTKPQWPRGRGQHGCPRGGRTSYGQQAEAPHGPRPMEVGGSEPEGRWAEIINLGWDEREVWERVPFCMGAAPPKMKI

SEQ ID NO: 263503 - protein, 79 aa, Zea mays
  Clone ID: MRT4577_171928C.1.pep
GNNRAEHGETVVEAFRRRLSAMRFLDGAPPPWTLLLWWGPPAAPLTTTGVCSELSPAAPPNTNVGDRRLHIAAPAGDRS

SEQ ID NO: 263504 - protein, 66 aa, Zea mays
  unsure (1)..(66): unsure at all Xaa locations
  Clone ID: MRT4577_171929C.1.pep
RKSGRHPRDRPHECLVIGQREQXGTTRNPRGHREADGDTPAARTAHEMTNAGASYRRREGQHRGPD

SEQ ID NO: 263505 - protein, 122 aa, Zea mays
  Clone ID: MRT4577_17192C.1.pep
TIACSSSNGKSSYHGHSLERLAVGGPVVPVPFHHQVRVGVPVGQPRDGVHEREGAVHGSCAATVVPVGPAVSHHLLRHHREPPRPEALLPPVHECGHLVAAVWPRAPSLNRPPMVISGSSSR

SEQ ID NO: 263506 - protein, 78 aa, Zea mays
  Clone ID: MRT4577_171930C.1.pep
DEEGHTRVPVLEPQVLLQAQLELHLEEHTLRPCQEQLLGQRHTLQLGQTEAAEGNALDHNIRVPDQVHMHLPVTLQRH

SEQ ID NO: 263507 - protein, 67 aa, Zea mays
  Clone ID: MRT4577_171931C.1.pep
KQKHFSFFGAPPNGLKYLAQTLNRGADKTRPLIPQFHLTHPPQTAIPLLGALHRGPGGVKKKSLHQA

SEQ ID NO: 263508 - protein, 358 aa, Zea mays
  Clone ID: MRT4577_171932C.1.pep
GRVPRVRANTESNPELLPDAVTYTTLLKGLGNSRDLYSVVKIVVEMKSSLISIDRTAYTAMVDALLACGSIDGALCIFGDIIKHAGKNNDLRPKPHLYLSIMRAFATRGDVDMVMRFNKRMWLDSVGSISRAAKEETHELLMEAAINNNQIDLARGLLRRIVNEKECFSWTSRVGLVAVKVESLSGFTNSLLRPHVFPQIILNDPVEKYMVPFQESRPLPADLILRKVVMRLLKERAVPLVDDWGGCIGIVHRDDCTKLDAPLISMSRGPPLCVPTSTTVEHVIDLLLRNKSEMVIVVKSGNMYEGSYTSSSRPLGVFSLAILWSFTGDYSSGSDDVPDAGISRAAKPKPDAEACNHS

SEQ ID NO: 263509 - protein, 334 aa, Zea mays
  unsure (1)..(334): unsure at all Xaa locations
  Clone ID: MRT4577_171933C.1.pep
SGLLFLFQLSLFAEPFSEIXRPLQHRMGCVILSFLEKLYRRYVVKRNQRKRQREEDLKKEEKKSSEKRSKTMHETIIESVDNLGGSVEVTKEDEEKMSKDQSANVHAELPKEGQIKLGTDHPIVNHGEPAKEGDENMNTDHSEAVLDKPAADANMAEEDPEYEEDPEEIEIYEDDEDMDDAHAGAQNGEQNENTNDRDVKPEVATADGGNNRSSTQPEVGNITNIHERAASMEDKLSVAEKGDSVEGGEKVVSKEVKPAKDEVVDKDLLQAFRYFDINRAGYLKMDDLKCILHNLGKFLSSRDVKDLVQVALVESNSARDTRIIYPKLVKIVDL

SEQ ID NO: 263510 - protein, 202 aa, Zea mays
  unsure (1)..(202): unsure at all Xaa locations
  Clone ID: MRT4577_171934C.1.pep
MGGKPKGPFFEKKSPGGCRAPSPKKKPNPPGGGYPSPGKREGPPKKMGGFSQGEGLPFKGKXKPQTKPPPFPPPLTPNLKGXPKAPNPPGGKTXPLIPTPVGPXFLPEPGGKISNRGKKNPRGGGKKKRGFLGPPPPXLGGPPPPGPXGPPGFPKFGPPPSPKXGGLGPXQSPWENPPPNGGKGGFPWARAGGFLSPKNKRF

SEQ ID NO: 263511 - protein, 122 aa, Zea mays
  unsure (1)..(122): unsure at all Xaa locations
  Clone ID: MRT4577_171935C.1.pep
MVQHVRFFNYIYIDEKWFNITKKTLRYYTAPDEQQPIRTCKNKNYIPRIMFLTALARPRFDSSGNCTFDGRIGCFPYVTYVAAKRSSRNRLAGTIEMXPILSIDKSVMRDFMIGKXLPAIHA

SEQ ID NO: 263512 - protein, 320 aa, Zea mays
  Clone ID: MRT4577_171936C.1.pep
MACSLPLHAPFSSSPRILSYRPAPRTLPLFRRGLRVPYHRSPSPPRALPDVAAGAVAGIRDALADAFLTSPPTWRSAAASNLAVFVSGSPLLLSGLSASGFAAAYLLGTLTWRAFGAQGFLLVVAYFVVGTAVTKLRIRQKEALGVAEKRGGRRGPGSVIGSSAAGCVCALLSIYHAGGTASSELWRLGFVASFCTKLSDTVSSEIGKAFGRTTYLVTTLKVVPRGTEGAISIEGTIAGILASVFLAGAGYLLGQVDVSQVVLCVLASQIANYVESYIGATLQDKEGFEWLNNDIVNVLNISIGAILAVLTQQLLVSWRS

SEQ ID NO: 263513 - protein, 117 aa, Zea mays
  Clone ID: MRT4577_171937C.1.pep
AYKHSFPKYFHEEGKKNFLYPNQHTVKKKKNHVSLKKCAPREPTCSIASKRRGGSLAVILGGTTLGGAQYNRLKTRRGPENRLEPVVHLVLVNEGLWTFPQLGSCSPAQLPLSRRRR

SEQ ID NO: 263514 - protein, 147 aa, Zea mays
  unsure (1)..(147): unsure at all Xaa locations
  Clone ID: MRT4577_171938C.1.pep
GYYLPQNGSIKLYKEIVCPLDGFELLLFSMVGPDAKSFPLCPFCYNCPPFEGIDKLFGALKLDDTGKVGKGAGMPCFLCPHPTCKQSMITQGVCACPECSGTLILDPVSAPKWRLYCNMCNCIVLLPHAGHRITTIDNXKCPNEATL

SEQ ID NO: 263515 - protein, 158 aa, Zea mays
  unsure (1)..(158): unsure at all Xaa locations
  Clone ID: MRT4577_171939C.1.pep
MNSSRQMELHYINTGFPYTITESFMDFFEGLTYAHADFALTDGFQDQGNPYWAMMHTNSYKYGYSGPGNYYSYAHVYDIDDYMRRADGGRRIWDNTTPVNNVDSANVVLRVVKLXHTTTNTIXQECIHQVHQSPGSPQVVWXDNIEPDNMTMRTVGLG

SEQ ID NO: 263516 - protein, 131 aa, Zea mays
  Clone ID: MRT4577_17193C.1.pep
MSVNSEKSSSSERPEPQQKAPLVPPPPPPPPPPPPPLPDPTPPEPEEEILGSDDEEQEDPADYCKGGYHPVKIGDLFNGRYHVIRKLGWGHFSTVWLCWDMQGKRFVAMKVVKSAQHYTETALDEIKLLKC

SEQ ID NO: 263517 - protein, 76 aa, Zea mays
  Clone ID: MRT4577_171940C.1.pep
PVTTCKKSARPRSGLPPTYQKYIYTSSSDPLYTLCMGRMIFYYINESVLEARPPKPPNGRCDMYAPGNHYYPMPRT

SEQ ID NO: 263518 - protein, 180 aa, Zea mays
  unsure (1)..(180): unsure at all Xaa locations
  Clone ID: MRT4577_171941C.1.pep
MTSSRQMELHYINTGFPYTITESFMDFFEGLTYAHADFALMDGFQDQGNPYWTMMHTNSYKYGYSGSGNYYSYAHAYDIDDYMHRTDGGRRTWDNTTPVNNVDSANVVLQGGEAPRTTANTTSEDCIQQVHQSPGSPQVVWQDNIDPDNMTYEELLXLGEAVGTQXXRGLSQDAISLLPI

SEQ ID NO: 263519 - protein, 117 aa, Zea mays
  Clone ID: MRT4577_171942C.1.pep
RFILPRTLKLNLATKMAETQALLRADKAKDKAFDRTLTQNLSNSQVALRTTTNRDSESQALLPADQVKNMAFDKILHKSSSTSQGGLRAMINKDNEAHKAAVAEYFQHWDDKKAEDE

SEQ ID NO: 263520 - protein, 104 aa, Zea mays
  Clone ID: MRT4577_171943C.1.pep
SLHTSRQHQLACRNGRSVILLPGAAVPRAGRSWQPGSCSCGGGPGRRHGRRAAERRRGDLLRASGTRGPERQRPPRLPGALHARATAQQPRRGTGRTTWNSPTS

SEQ ID NO: 263521 - protein, 53 aa, Zea mays
  Clone ID: MRT4577_171944C.1.pep
QPSCRRRVTMQGQELLDEHIGLLHLLVVLVCYLLVLLQLPLCHRLLLCLCKLN

SEQ ID NO: 263522 - protein, 111 aa, Zea mays
  Clone ID: MRT4577_171945C.1.pep
NPPGGPVFFYVFLAGNKNWGGALNIRGTLPKKKDPKSAAGGLNLGDPPPGGGFPGGALGPKFWEPGLLKMSGTPKPFLGFSGGQGKTLGPKRGACLREHPLFPKFQMEMDP

SEQ ID NO: 263523 - protein, 74 aa, Zea mays
  Clone ID: MRT4577_171946C.1.pep
LTKFCKYKLLEKIITFHRTFIIMSVSELVSKPIKQCNSFVSKQIRLKQWTTKIQKPITLAILNLNYNEHALEKF

SEQ ID NO: 263524 - protein, 43 aa, Zea mays
  Clone ID: MRT4577_171947C.1.pep
VHTSAHTSPPVKVYPLLLLLKTMMHSIPITIHSTILITYDHQN

SEQ ID NO: 263525 - protein, 105 aa, Zea mays
  unsure (1)..(105): unsure at all Xaa locations
  Clone ID: MRT4577_171948C.1.pep
MALWKEEPSGRCFLEEREEEAESQQMTHIAVDRNRRKHINEHLSALRSLMPSDHTHRGDQAFIEXGSINCGKELDQLLQTLEARRPHPQGSAYARNPDDTAAEAD

SEQ ID NO: 263526 - protein, 108 aa, Zea mays
  Clone ID: MRT4577_171949C.1.pep
RGPPKHNFRLCPYTKFFLGFFARPLQGMIFNHFLEKKPPKLQIWAQKETWGWGYLPFPPEGGKTCLFPQFFLKFWGGDPTDPQKGFPRGILVHTGISLKNHFNPRVGL

SEQ ID NO: 263527 - protein, 261 aa, Zea mays
  unsure (1)..(261): unsure at all Xaa locations
  Clone ID: MRT4577_17194C.1.pep
MAAGTLYTYPENWRAFKALIAAQYSGAQVRVLSAPPHFHFGQTNRTPEFLRKFPAGKVPAFEGDDGFCVFESNAIAYYVSNEELRGSTPEAAAQVVQWVSFADSDIVPPASTWVFPTLGIMHHNKQATENAKEEVKRILGLLDTHLKTRTFLVGERVTLADITVVCTLLWLYKQVLEPSFRQAFPNTXXRWFLTCINQPQFRAILGGXVKLCEKMXAQFDAKKFAESQPKKEPQERKGSREENRNPXAEREEXKKAAAPAL

SEQ ID NO: 263528 - protein, 727 aa, Zea mays
  unsure (1)..(727): unsure at all Xaa locations
  Clone ID: MRT4577_171950C.1.pep
MSIAAVSADGLLALADEAERRYDFSAAAACLESALRPPYAAALLPLTEARARLRLASLLLAPRGSSRVPRAGAPAAAKTHLERALLILSPLPSAPPRLKLLAHSHLAGAYAVLXAIASRKNVLHRGLGLLDSASASGLLQREPALLWTCNFQAQLGSVFTNDGDAASALSALSVGASAAAELGSPQLELFFAASELHVHLLCWEDSAAVENAVTRASLLWDALTAEQMEHWVGLFFYTQLLQTFYLLRICDYKAASQHVERLDTAVKSEMQRGRQITALANDLSTLERTLGQSGLKEREMLALSHKQRQLKGQLRALCGYDSLNDVLDYGDKLLLAPPLMHGEWLPRTAVFVLVDLMVVMVGRPKGIFKECGKRINSGLRLIHDELVKLGIVDGVMEADLEHSTIWTAGLYLILLLQFLENKVAVELTRSEFVEAQEALAQMKNWFTRFPTILQGCESIIENLRGQYAHSVGCFDEAAFHFLEAKKLTESKSMQSMCETYAAVSYICKGDAESSSQALELVGPAYRTMDSFVGVREKTCIIFVYGLLLMRQHNPQEARNRLASGLKIAHQQLGNIQLVSQYLTILGTLALQLHDAAQAKEILKSSLTLAKTLFDIPTQIWILSVFTELYRELEEKENEMENSEYEGKKEDDLQRRLSEAYSHSFHHELVEKSRIQPLHMSSKQPEMAVPSANGDLDIPESVGLSAPQPFLKRLVEAEPMRRSTRRRR

SEQ ID NO: 263529 - protein, 43 aa, Zea mays
  Clone ID: MRT4577_171951C.1.pep
ILYTYFYFSIFVFFFKNTRLAALLCIKERKYPHTLHISYRDQI

SEQ ID NO: 263530 - protein, 100 aa, Zea mays
  Clone ID: MRT4577_171952C.1.pep
LCDDVIQQEVKEVIISYYILMEQGKATVQDLDSRCEQLIKEEFGMECNFDVVDAVKKLEKLGIVSRDSIGRILCVPLKRANEIIGTTTEEMVMRAQQASG

SEQ ID NO: 263531 - protein, 147 aa, Zea mays
  unsure (1)..(147): unsure at all Xaa locations
  Clone ID: MRT4577_171953C.1.pep
XPRLPEPDRAQGNRVMGCVARVWLVARCNASTGWRMWFSADSDSDISRGYCACLVAALDGAKPEDVSRRRPRRSRPAPLGAGTTAAWSRASTWHNVLVGMQKRARXRPXAAREGRHPGKPFPSLVIAXXGAVSAQGSYAEAQVSSFS

SEQ ID NO: 263532 - protein, 74 aa, Zea mays
  Clone ID: MRT4577_171954C.1.pep
DPLVRRPIVATSHEFTSFPHWHTARAFVTFSSRCDLLDQLIIRHMYTYLTHTHRLKCLDTSHDYYSHLYNTTGS

SEQ ID NO: 263533 - protein, 48 aa, Zea mays
  Clone ID: MRT4577_171955C.1.pep
NTISFKLKLLFSIYIQHRHLNRSTSSILTHALPCLRFYKFTKTLMTDF

SEQ ID NO: 263534 - protein, 111 aa, Zea mays
  Clone ID: MRT4577_171956C.1.pep
LIIASITNFLNVSTDPATFVQGALPHILENTKEDFFRRIIGLLAETSEICYREIKDIKCITCPHKPEGSMFVMVKLNLYLLEGIHDDIDFCCKLAKEESVILCPGYSRQES

SEQ ID NO: 263535 - protein, 78 aa, Zea mays
  Clone ID: MRT4577_171957C.1.pep
PGSAGADGAPGIDGPRGPTGPIGPPGPAGQPGDKGEGGAPGLPGIAGPRGGPVSENEALGYSCAHQARALPQQSRPRT

SEQ ID NO: 263536 - protein, 34 aa, Zea mays
  Clone ID: MRT4577_171958C.1.pep
MVVAACARCGCGSGWSAWALVVAKVTVRASVGRT

SEQ ID NO: 263537 - protein, 138 aa, Zea mays
  unsure (1)..(138): unsure at all Xaa locations
  Clone ID: MRT4577_171959C.1.pep
HASGTRVVGWPPVRXYRKNALSDSGEGNRSSSFVKVAVDGAAYLRKVDLQAYGGYDQLLRALQDKFFSHFTISQCFVHRPALGLVFRSALLCLIERRLRLMKGSEAVNLGTYVFSSKALPSFMCYKIRSDCKPSGSFF

SEQ ID NO: 263538 - protein, 80 aa, Zea mays
  unsure (1)..(80): unsure at all Xaa locations
  Clone ID: MRT4577_17195C.1.pep
ITDHYDPNSATHDRSKDGLELGNVLPDIRSTRQCLQAVXDAGYEVVWDQDLAVESPLPWYLPMDPSRFSLSSFRLTSVGR

SEQ ID NO: 263539 - protein, 80 aa, Zea mays
  Clone ID: MRT4577_171960C.1.pep
KTRVEQRKHLDPPKAETQLFFSFLFFSDSMLSAVSCPLLNRERKRGRRFFSVYTKSCSSIVACMFLVFWMITHCFGHHFI

SEQ ID NO: 263540 - protein, 240 aa, Zea mays
  unsure (1)..(240): unsure at all Xaa locations
  Clone ID: MRT4577_171961C.1.pep
SRGLQYKIVYKKRCDNAAADALSRYSHQPDQLLHISHCTPTWVQEIVEGYQHDQQAQSLLSQLALDPSALAATYTLKDGLIRHKGRLWLGKNEVLQQKVIAAFHDSALGGHSGVPVTYRRVKQLFSWKGMKKTVHQFVQSCPICQQAKPDRAKYPGLLAPLPIPPHAWHSISMDFIEGLPKSGSWNCILVVVDRFSKYSHFLALAHPFTATXVAKVFLDNIYKLHGMPASIVSXDRDPIF

SEQ ID NO: 263541 - protein, 73 aa, Zea mays
  unsure (1)..(73): unsure at all Xaa locations
  Clone ID: MRT4577_171962C.1.pep
ICYLDIRFSIIKVVIITYYKKILWGGGVGXXYLXYYNSVCLVLNVNCRAILMFKFGKYGTVIILIGVFVVIWS

SEQ ID NO: 263542 - protein, 66 aa, Zea mays
  Clone ID: MRT4577_171963C.1.pep
HGCYKLQRSLRKGYKNKSHAGRAPGNTCTRNFTPTNVTLQNEASTLTQKNCLYCTDCPDMERGSAT

SEQ ID NO: 263543 - protein, 113 aa, Zea mays
  unsure (1)..(113): unsure at all Xaa locations
  Clone ID: MRT4577_171964C.1.pep
PPQPGEFRVFNQFPEQFFVNXLAKLVTPAETKLGLKMETKSIPPPRVEVXEPFFNPKPPKLFXPGLVPPLLWDSLLDPLFNFAPQNKDRVDPAQIMPNFSWKKMGAKPRTVFF

SEQ ID NO: 263544 - protein, 73 aa, Zea mays
  Clone ID: MRT4577_171965C.1.pep
CVLIPSWREPCFVQFVHGPKPIIYLCVAGLVLFNVPSRVSQNLLGVFFPVFLIKLVCFLSKGPPLAFFFFGPL

SEQ ID NO: 263545 - protein, 118 aa, Zea mays
  Clone ID: MRT4577_171966C.1.pep
RRRPTVGSPACGFPRARHQSVRNHTARNEGWTFASAFEAGGIHDACDDACRICLEAFCESDLTLASAGARSRALRAGHTDDMLNSKELVQWENGLSFNDIAARQGIRIRRHCPPTGYL

SEQ ID NO: 263546 - protein, 156 aa, Zea mays
  unsure (1)..(156): unsure at all Xaa locations
  Clone ID: MRT4577_171967C.1.pep
MYPASAQATIGIPCSNGTSNEQGLQHAENPTLPPYRIQQESTGGFLPLSPLCLQHXRPMXHQLHLVHVLAQNIKAQQLQQLVLPNLAAYSQQQQFLPFNQLTALNSAAYLQQQQLPFNQLPAAYPQQSLTFDQLAELNSAAYVQQQQLLPFSQLAG

SEQ ID NO: 263547 - protein, 148 aa, Zea mays
  unsure (1)..(148): unsure at all Xaa locations
  Clone ID: MRT4577_171968C.1.pep
MAAATALVSSSSLRAPAAFSVVVRAASRPAPVGAVVTPLPAAKAAAARGAWLRAXATXIVLLISPAGEVRVMMPGDVYILDFAVVQGLDLPYSCRAGACSSCVGXVGSGSVFLFVQSFLVVDPVVVGFELPCVGCPTWGLGVPSRKVD

SEQ ID NO: 263548 - protein, 159 aa, Zea mays
  Clone ID: MRT4577_171969C.1.pep
CVQLLIRTRYSDHRDSVFEVSSGSSPSCKRITHASNIDDGSEMVVFRRSPTISVQSDMCATDDSLIDSPRTCPMNTSSSRPVVTKQGGGVGDVGAQPPPCGNSDLVFRHGCLPPYASPLSAFGACFPILSGRTRQLSARATAIRSLVREPPRRYVSEDV

SEQ ID NO: 263549 - protein, 54 aa, Zea mays
  Clone ID: MRT4577_17196C.1.pep
LIKNQPGNPEGVSYNWLSYPSSFKSGTIPVKSEVPKLQTCNPLMPLVGVFQKKF

SEQ ID NO: 263550 - protein, 84 aa, Zea mays
  Clone ID: MRT4577_171970C.1.pep
LSLKGGGGARGQAKIQPPDARWGGGTSTTPLRTKVNADRRGNAPALLRPIYGDKVSLLNIMKYRGYIKNLEAIDENRGGKTRAE

SEQ ID NO: 263551 - protein, 162 aa, Zea mays
  Clone ID: MRT4577_171971C.1.pep
SSERPKSGQVRRRQQPDSRDTENRIYSASQGQSSRCSHRAQPARRPGDAGGYLLTRGETTRPNRAFNATRWTTYRAAGPPSRNGPPARARHELLGVRRKCGDDDGRLLQAAATSSPASRQSIFWFPLKIFFFFFFFFFFCGDNEKSPRLRRCQSSCRVSKGL

SEQ ID NO: 263552 - protein, 198 aa, Zea mays
  unsure (1)..(198): unsure at all Xaa locations
  Clone ID: MRT4577_171972C.1.pep
RDPHSIHPRRSSLHLPAVPPLKNPTTFLALQASTHSCPRHSHCHQSSHRQARHNAAAYPSPAGLLALGGGPLSFPSQISASTFSYCLVDRDSPAASTLQFGDGAAEAGTVTAPLVRSPRTSTFYYVALSGISVGGQPLSIPASAFAMDATSGSGGVIVDSGTAVTRLQSAAYAALRDAFVQGAPSLPRTSGVSXVETC

SEQ ID NO: 263553 - protein, 69 aa, Zea mays
  Clone ID: MRT4577_171973C.1.pep
SHQLTNELLLDHELAEVAMRWLNSRRRRAGWRLVAGRCWLAVRRITCAGGVALAPAPDATEGRALPVEL

SEQ ID NO: 263554 - protein, 105 aa, Zea mays
  unsure (1)..(105): unsure at all Xaa locations
  Clone ID: MRT4577_171974C.1.pep
PPRSPAPAPRSPPTPSRCACLYEVAYGDGSYTVGDFATETLTLGDSTPVGNVAIGCGHDNEGLFVGAAGLLALGGGPLSFPSQISAXTFSYCLVDXDSPXXXTLQ

SEQ ID NO: 263555 - protein, 237 aa, Zea mays
  unsure (1)..(237): unsure at all Xaa locations
  Clone ID: MRT4577_171975C.1.pep
MQPPTLLPLGAVVVAILLLATAPSPAVSRHRHSSAADTETLDVAASLSRARAALSTDAVSLHQSAAAIQGPVVSGVGQGSGEYFSRVGIGSPARQLYMVLDTGSDVTWVQCQPCADCYQQSDPMFDPSLSASYAAVSCDSQRCRDLDTAACRNATGACLYEVAYGDGSYTVGDFATETLTLGDSTPVGNVAIGCGHDNEGLFVGAAXLLALGGGPLSFPXQISASTFSYCLVDRDSP

SEQ ID NO: 263556 - protein, 507 aa, Zea mays
  Clone ID: MRT4577_171976C.1.pep
MQPPTTLLPLGAVVVAILLLATAPSPAVSRHRHSSAADTETLDVAASLSRARAALSTDAVSLHQSAAAAAGAKRSPRAREGGLTLRLHSRDFLPEEQGRHETYRSLVLSRLRRDSARAAAVSARATLAADGVTRLDLRPANGSAVFAASAAIQGPVVSGVGQGSGEYFSRVGIGSPARQLYMVLDTGSDVTWVQCQPCADCYQQSDPVFDPSLSASYAAVSCDSQRCRDLDTAACRNATGACLYEVAYGDGSYTVGDFATETLTLGDSTPVGNVAIGCGHDNEGLFVGAAGLLALGGGPLSFPSQISASTFSYCLVDRDSPAASTLQFGDGAAEAGTVTAPLVRSPRTSTFYYVALSGISVGGQPLSIPASAFAMDATSGSGGVIVDSGTAVTRLQSAAYAALRDAFVQGAPSLPRTSGVSLFDTCYDLSDRTSVEVPAVSLRFEGGGALRLPAKNYLIPVDGAGTYCLAFAPTNAAVSIIGNVQQQGTRVSFDTARGAVGFTPNKC

SEQ ID NO: 263557 - protein, 105 aa, Zea mays
  Clone ID: MRT4577_171977C.1.pep
LLLPKQVNESSQPSRVLDPDPLASLAGGEFLSLIHLPFRHLQPIDCSCIEVLFEADPLGLPNLQSDRCSHCCYLHAVGQVDDGAHRLAQLTFARSFLCLAAFLKG

SEQ ID NO: 263558 - protein, 65 aa, Zea mays
  Clone ID: MRT4577_171978C.1.pep
ASPPPPVRVRVREVLRGSGSWVSGSRWRRRMLTTAGSTWEATEYHDKTLYTRCIRSYPCRVHHPW

SEQ ID NO: 263559 - protein, 78 aa, Zea mays
  Clone ID: MRT4577_171979C.1.pep
PPPGEEKPWSSGKPPAFFFPPKKPKKAQSHPNKKHFGTHDFSLPKKNFWSPKKKKRAPKSFWGLKTPFMGPIRPVLFS

SEQ ID NO: 263560 - protein, 82 aa, Zea mays
  Clone ID: MRT4577_171980C.1.pep
SFAPKPKSVKQFASKYRLKPPPQFNLISTRSGKVFHLSGSQRGSQTRTRYRRSGSDTALACEAFQLPSFHEDSSFIKHSTSE

SEQ ID NO: 263561 - protein, 62 aa, Zea mays
  Clone ID: MRT4577_171981C.1.pep
VGSTHASHTRPVLEGDFESGEYDDRTIQEFNNNIVKEREGKRPLISGDAFIALVDGIGTVGE

SEQ ID NO: 263562 - protein, 403 aa, Zea mays
  unsure (1)..(403): unsure at all Xaa locations
  Clone ID: MRT4577_171982C.1.pep
MAQEIEHTHLPIRGLNLHVAQVGTGEXHRCFEPMDPSGAGRVSIIXATACGPHGWPAGAVGSCAAGELGTVVFLHGFPEIWYSWRHQMRAVAAAGYRAIAPDCRGYGLSEQPPEHEEVSPDDLIADVLGILDALSVPKVKQRLRRQPTERTKRRSVQSMSPRSELLLPRAXAFLVGKDFGAMPAYEFALQHPGRPVGVVCLGIPFNPAPMSFDAIMPEGFYILRWRXFFFWCSPFASLVQEPGRAEADFGRFDVRRVVRTIYVLFAGAEIPIAKEGQEIMDLADLSTPLPEWFTEEDLDAYAKLYEKSGFGYPLKMPYRSMHKLPNRLDAKFQVPVFMVMGEKDYAFKFPGFETAMRGGVMDNFMPDLKITYIPEGSHFVQEQLPEQVNDLLLGFLRDHPSAA

SEQ ID NO: 263563 - protein, 134 aa, Zea mays
  unsure (1)..(134): unsure at all Xaa locations
  Clone ID: MRT4577_171983C.1.pep
VDAGSQEPMKGRGSGILRRAEPDWTTGAVAXFAHPDAAXRWRRAPAPWDAGRTTRARTRAKVRAKILVGAEAWEPWPAFLGLLPTDDITRADATTNEGLNGVDPDIXGATSVLSPRGSYKVADTPVLHMEGGEN

SEQ ID NO: 263564 - protein, 204 aa, Zea mays
  unsure (1)..(204): unsure at all Xaa locations
  Clone ID: MRT4577_171984C.1.pep
MSEPRLRTITTPGAAMASSDLLFRQRKLLXVFLLKEALPTETARELQLEPAAEGDDCDCLSDICLDSYQLVXPEXDSYGGTSLDGVNVFSEHMTGDXERVISRLXECLSDLRPANNYALGXSAVIVFSDDXDLTVTLLREITMXSMDMDGLYVQIFIKMHRSQYAEKXLNMMHIIDEDRTLALIVDVCVGSADGDSKIRADYLI

SEQ ID NO: 263565 - protein, 203 aa, Zea mays
  Clone ID: MRT4577_171985C.1.pep
MAQEIEHTHLPIRGLNLHVAQVGTGELGTVVFLHGFPEIWYSWRHQMRAVAAAGYRAIAPDCRGYGLSEQPPEHEEVSLDDLIADVLGILDALSVPKAFLVGKDFGAMPAYEFALQHPMSFDAIMPEGFYILRWREPGRAEADFGRFDVRRVVRTIYVLFAGAEIPIAKEGQEIMDLADLSTPLPEWFTEEELDAYAKLYEKS

SEQ ID NO: 263566 - protein, 189 aa, Zea mays
  Clone ID: MRT4577_171986C.1.pep
AAVAARVQAFLVGKDFGAMPAYEFALQHPGRTLGVVCLGIPFNPAPMSFDAIMPEGFYILRWREPGRAEADFGRFDVRRVVRTIYVLFAGAEIPIAKEGQEIMDLVDLSTPLPEWFTEEDLDAYAKLYEKAGFGYPLKMPYRSMHKLPNRLDAKFQVPVFMVMWEKDYTFKFPGFETRMRGGVMDNFMP

SEQ ID NO: 263567 - protein, 86 aa, Zea mays
  Clone ID: MRT4577_171987C.1.pep
SSFFFFFETKMVATFGTGHISSVCRGAQTKNGVGLEKNKANFKGLSAAGPQLQCITYSRLPWERPYTSQPADIVQHKNTGRKIGNT

SEQ ID NO: 263568 - protein, 168 aa, Zea mays
  Clone ID: MRT4577_171988C.1.pep
MAQEIEHTHLPIRGLNLHVAQVGTGELGTVVFLHGFPEIWYSWRHQMRAVAAAGYRAIAPDCRGYGLSEQPPEHEEVSPDDLIADVLGILDALSVPKAFLVGKDFGAMPAYEFALQHPGRTLGVVCLGIPFNPAPMSFDAIMPEGFYILRWRVRSRPPLTAYIQLLLF

SEQ ID NO: 263569 - protein, 105 aa, Zea mays
  unsure (1)..(105): unsure at all Xaa locations
  Clone ID: MRT4577_171989C.1.pep
MTSPYASPFLLSLLLLISIPVVFLLAPRLLPPKTLPAIPDADESDDLALFRRAILSSSSATXAHLRGLLLFLAPXPAPKIAFLFLTNSXLVFSPLWEKFFRGHTH

SEQ ID NO: 263570 - protein, 90 aa, Zea mays
  Clone ID: MRT4577_17198C.1.pep
PAGLPTQARPSAALVEPPRPAVIPPWPCAGSGEQQPCRAASSALSLCSEPACCFQDEEVVRGPPACCMLHADSYTMRLTKTTRAHLACKC

SEQ ID NO: 263571 - protein, 109 aa, Zea mays
  Clone ID: MRT4577_171990C.1.pep
MTSFFSLSTSEASIATGVMFDNDREHAQIMARLVELEREEKEAGNTCEDDDDDGDDDGDAGTSEDGEENKEPGNALSDGNEDHSSGSGALFFGNGGNDRSNGNIKLKSA

SEQ ID NO: 263572 - protein, 340 aa, Zea mays
  Clone ID: MRT4577_171991C.1.pep
MVRLENGYPLEAGRDSPAVLEERAAMAQEIEHTHLPIRGLNLHVAQVGTGELGTVVFLHGFPEIWYSWRHQMRAVAAAGYRAIAPDCRGYGLSEQPPEHEEVSPDDLIADVLGILDALSVPKAFLVGKDFGAMPAYEFALQHPGRTLGVVCLGIPFNPAPMSFDAIMPEGFYILRWREPGRAEADFGRFDVRRVVRTIYVLFAGAEIPIAKEGQEIMDLADLSTPLPEWFTEEDLDAYAKLYEKSGFGYPLKMPYRSMHKLPNRLDAKFQVPVFMVMGEKDYAFKFPGFETAMRGGVMDNFMPDLKITYIPEGSHFVQEQLPEQVNDLLLGFLRDHPSAA

SEQ ID NO: 263573 - protein, 436 aa, Zea mays
  unsure (1)..(436): unsure at all Xaa locations
  Clone ID: MRT4577_171992C.1.pep
GCWICLVLSHGWVAASIVRKRVIKNMRRSIADGNSFAFLCDNIDELEHSVQXRIYLESVIMPLKGFGEHNLQNWRTQITSPYGGPLEFLFVVESEDDPAYHAVSRLIAEYKDNLEAKVVVAGLSTTCSXEIHNQLIGVEKTHRDTKYVLFLDDDVRLHPGTIGAVTKEMEKNPEIFIQTGYPLDLPSGSLGSYCIYEYHMPCSMGFATGGKTFFLWGXCMMXQDRYGVVSGLRDGCYSDDMTLAAIAXVVARTVSLESPSHGFQAASPYLRWEDLPQFIPSPNPTHRGLRHWDSTRCSYLHLLSLCFHTLLPVIXLLEVQRICIGKLRSLFAGSKRKSKSHKSNSLCHNDKVSVCEAFRSHFSQSINWSGIXYYLRDGKICKIERENXQSTENSSKYTDLGGKRLYGKRTYPSNKSLLGYLSRTLVQWHQPKKYDV

SEQ ID NO: 263574 - protein, 517 aa, Zea mays
  Clone ID: MRT4577_171993C.1.pep
MTAMEAAVDAMLAAASRAFTSTFAIAIQIQGCMICLVLALGWAAASIVRKGVIKNMRRNIVDGNSFAFLCDNIDELEHSVQENLPRVSVVMPLKGFGEHNLQNWRTQITSLYGGPLEFLFIVESKDDPAYHAVSRLITEYKDNLEAKVVVAGLSTTCSQKIHNQLIGVEKMHKDTKYVLFLDDDVRLHPGTIGALTKEMEKNPEIFIQTGYPLDLPSGSLGSYCIYEYHMPCSMGFATGGKTFFLWGGCMMMHADDFRQDRYGIVSGLRDGGYSDDMTLAAIAGQHKRLIFSPPVAVFPHPLASDLSFSRYWNYLRKQTFVLESYVSNVNWMMNRALFTSHCYLSWGFVWPYIMALVHVLAALRAPYSKVVKEASDSSWGLFLVGLLFTCTLIELVSMWNLTKVEIQLCNMLSPEGPKVSLDSYNWGLVFIAVLVDNFLYPVSAIRSHFSQSINWSGIRYYLRDGKISKIERENSSKYTDLGGKHLYGKRTYPPNKSLLGYLSRTLVQWHQPKKYDV

SEQ ID NO: 263575 - protein, 343 aa, Zea mays
  unsure (1)..(343): unsure at all Xaa locations
  Clone ID: MRT4577_171994C.1.pep
DNLEAKVVVAGLSTTCSXEIHNQLXTSGIVLILIVSFMIGVEKTHRDTKYVLFLDDDVRLHPGTIGAVTKEMEKNPEIFIQTGYPLDLPSGSLGSYCIYEYHMPCSMGFATGGKTFFLWGXCMMMHADDFRQDRYGVVSGLRDGCYSDDMTLAAIAVARTVSLESPSHGFQAASPYLRWEDLPQFIPSPNPTHRGLRHWDSTRCSYLHLLSLCFHTLLPVIXLLEVQRICIGKLRSLFAGSKRKSKSHKSNSLCHNDKVSVCEAFRSHFSQSINWSGIXYYLRDGKICKIERENXQSTENSSKYTDLGGKRLYGKRTYPSNKSLLGYLSRTLVQWHQPKKYDV

SEQ ID NO: 263576 - protein, 225 aa, Zea mays
  Clone ID: MRT4577_171995C.1.pep
MAPKVLVVLTSQSKMNNGNPTGWYLPELAHPYYDLVNAGVEITVASPAGGEAPLDQGSVQMFKEDEESVKFLNEKKQVWEQTTPLKEFLGKSSEFDAIFYPGGHGPMFDLVNDETSIKLIEEFYKAGKPVASVCHGPIVFTQVKIDGKPLLEGREATGFSSSEEDAVGLTSAMPVLLEDEIKRVGGKYVKADDWAEKVAVDGQIITGQNPASAHAVGKGILKIGA

SEQ ID NO: 263577 - protein, 92 aa, Zea mays
  Clone ID: MRT4577_171996C.1.pep
HMTHQAVPTDNMGQRATDTWPDQHYNPTHTLFSPRHSQPKPDTSTRQSLLATYRATYETHTHTERDSSNNRRVLEQQNPVLYCHVRAQANTP

SEQ ID NO: 263578 - protein, 97 aa, Zea mays
  unsure (1)..(97): unsure at all Xaa locations
  Clone ID: MRT4577_171997C.1.pep
LKHTRLKLFKDFFLQERKELGSTXPHTASGSSAXIDHILEGLQSGEINXDNLLFIVENINVAAFETTLXVIERAVDDLLNLTEIQXYLSLDLDTVLG

SEQ ID NO: 263579 - protein, 75 aa, Zea mays
  Clone ID: MRT4577_171998C.1.pep
NNTRLVLLDVIHLAIIFCSELVPIIHLQFRSSAPSCGRLSSGFPHHVVNSRTSIKRDSLLVRMLIHPGSSLSLNT

SEQ ID NO: 263580 - protein, 60 aa, Zea mays
  Clone ID: MRT4577_171999C.1.pep
LTCNHFKPHLGFVATKTHDRRETYKSFWLCKDFPQNPYKSTNIHFFHNWFLDINNHSFQR

SEQ ID NO: 263581 - protein, 76 aa, Zea mays
  Clone ID: MRT4577_17199C.1.pep
TISYTIAQKPSTWGLSCCFACERHSHHGVGAHALITARHCTSVPALGIPRVTPRGHCTRPGPRYCAHSDQPATAEP

SEQ ID NO: 263582 - protein, 83 aa, Zea mays
  Clone ID: MRT4577_1719C.1.pep
SLQRTSEAFRSQGLDKRDENLVTAEDASAPHFEEKTDVDVDVEVAKGESSSDTVPGGSENPPLPDEYVDHKIEEDTCTAPSPS

SEQ ID NO: 263583 - protein, 161 aa, Zea mays
  Clone ID: MRT4577_171C.1.pep
FIRVEDIEETIRLIPNKVDDLNLKPPHLSIQPYTCSKSSSSNWEQTSPSALHSTSLGGTSAFGQWQRPSPLATQSFDLSNYKLLMEHLFKVVGRQEEALSAICASIVRCRSMERRLGANKKNDIWFSFYGPDSIAKRRVGVALAELMHGSFKELDISGLKP

SEQ ID NO: 263584 - protein, 185 aa, Zea mays
  unsure (1)..(185): unsure at all Xaa locations
  Clone ID: MRT4577_172000C.1.pep
LEAWPVTQLQTIHLSDCTNCSVLPALGVLPLLKFLDFGGFHAIVHINQEFSGTSEVKRFPSLKELVFEDMSNLKGWTSVQDGQLLPLLTELAVIDCPLLEEFPSFPSSVVKLKISETGFAILPEIYTPSSQVSSSLVCLEIHQCPNLTSLERGLLCQKLSMLQQLTITGCPELXLHLPAERSEAL

SEQ ID NO: 263585 - protein, 124 aa, Zea mays
  Clone ID: MRT4577_172001C.1.pep
PSLRFAAPPRPRRPQPLFYYKPPALRPLLACSIFPPCAAHTTTRRPAAAAPRRPGSRAHQSGPPRLVSPAPLPQVYCPFRKLKLSPPKPHRPPVVLESGERWIVTMWLALSAEVANISCGRLLI

SEQ ID NO: 263586 - protein, 145 aa, Zea mays
  unsure (1)..(145): unsure at all Xaa locations
  Clone ID: MRT4577_172002C.1.pep
NPHVLDQAFKSGIHQCGVDEAFAANGSAEGDDEYRGEVPGVNAGDIXVHLFTVQKPPPLHKRSLMSYIXKYVNNLIDAMNXQKADELLKHVLGVTNYLLNTVKDNQNYNEKNMQDEAAVVFTYYRDGATNATYLYFSHGLKEIKC

SEQ ID NO: 263587 - protein, 37 aa, Zea mays
  unsure (1)..(37): unsure at all Xaa locations
  Clone ID: MRT4577_172003C.1.pep
GINQXVYIYIYHQEYSAKRTLSYANLTSTRSKILYEQ

SEQ ID NO: 263588 - protein, 71 aa, Zea mays
  Clone ID: MRT4577_172004C.1.pep
CGAWINLHITNDQVYCETEKVKEGGGNTLNDLARRTTDLDPLDKKEASSSKGHLAMPLNPSELQGVIWPPH

SEQ ID NO: 263589 - protein, 227 aa, Zea mays
  Clone ID: MRT4577_172005C.1.pep
SPALPTHHTIGHVAATVSMSKVAVSFTHIIKSAEPAFSVLVSRFFLGETFPIPVYLSLLPIIGGCALAAVTELNFNMVGFMGAMISNLAFVFRNIFSKRGMKGKSVSGMNYYACLSIMSLVILTPFAIAMEGPQMWAAGWQKALAEVGPNVVWWIAAQSVFYHLYNQVSYMSLDQISPLTFSIGNTMKRISVIVSSIIIFHTPVRAVNALGAAIAILGTFLYSQAKA

SEQ ID NO: 263590 - protein, 100 aa, Zea mays
  Clone ID: MRT4577_172006C.1.pep
ISLRCYSGTLDDGSCHGLCISIWSTNKNGTAEPLIHYYPLSHENRTLYLHATPTSKTGSSACYWLRSFGQSFSLTPLPERQECAKDGNGSSQCIDRADRR

SEQ ID NO: 263591 - protein, 140 aa, Zea mays
  unsure (1)..(140): unsure at all Xaa locations
  Clone ID: MRT4577_172007C.1.pep
SIXTRTFLYPNLFTAPAKAHTRRRFFISHLHLPRSAGAAALHLPLPPLLALGTQATAAAPSLVLSAASPPASRQSPRALASGPAHAGLLPCVRASLSPPASGGSSTAPGLRAGTSSRCPTKAVAPIWERLCPKAKRYPYS

SEQ ID NO: 263592 - protein, 387 aa, Zea mays
  Clone ID: MRT4577_172008C.1.pep
MIPSVRISPGYAAFSGSSLRLKLHSIPSISSLKPSKYVVSSLKPLYLAPPDGPHTSELKSWRQPLEFRCAASAADDKESKTQVVPVQLEGAQRLKISIYFATWWALNVIFNIYNKKVLNAFPYPWLTSTLSLACGSAMMLFSWATRLVEAPKTDLDFWKVLFPVAVAHTIGHVAATVSMSKVAVSFTHIIKSAEPAFTVLVSRFFLGETFPIPVYLSLLPIIGGCALAAVTELNFNMVGFMGAMISNLAFVFRNIFSKRGMKGKSVSGMNYYACLSIMSLVILTPFAIAMEGPQMWAAGWQKAVAEVGPNVVWWIAAQSVFYHLYNQVSYMSLDQISPLTFSIGNTMKRISVIVSSIIIFHTPVRPVNALGAAIAILGTFLYSQAKA

SEQ ID NO: 263593 - protein, 388 aa, Zea mays
  unsure (1)..(388): unsure at all Xaa locations
  Clone ID: MRT4577_172009C.1.pep
MIPSVRLSPGPAAFSGSSLRSKLPSIPSISSLKPSKYVVSSLKPLYLAPLDGPRTAELKSRRQPLEFRCSASAADDKESKTQVVPVQSEGAQRLKISIYFATWWALNVIFNIYNKKVLNAFPYPWLTSTLSLACGSAMMLFSWATRLVEAPKTDLDFWKVLFPVAVAHTIGHVAATVSMSKVAVSFTHIIKSAEPAFSVLVSRFFLGXETFPIPVYLSLLPIIGGCALAAVTELNFNMVGFMGAMISNLAFVFRNIFSKRGMKGKSVSGMNYYACLSIMSLVILTPFAIAMEGPQMWAAGWQKALAEVGPNVVWWIAAQSVFYHLYNQVSYMSLDQISPLTFSIGNTMKRISVIVSSIIIFHTPVRAVNALGAAIAILGTFLYSQAKA

SEQ ID NO: 263594 - protein, 45 aa, Zea mays
  Clone ID: MRT4577_17200C.1.pep
WRGHSRSRLSIMGQFEAEDNAQREWEREFRLSRYSHMVHTFLLHM

SEQ ID NO: 263595 - protein, 172 aa, Zea mays
  Clone ID: MRT4577_172010C.1.pep
MEATATVQRLADLEVQRRRIAEVRATDLHESNLVCSEQLVVDTAAFACTTNDAVQITDISLELAVPLHLTKELVQRGPASVTAAPTSSSVSVCEMDRFRLDTNGTKLLQRAILCGAHLLQDRLGWRGARTGPSHARHQGQPMGVLPHLPRPARPTQTPPHRVEQELHGRSSG

SEQ ID NO: 263596 - protein, 57 aa, Zea mays
  Clone ID: MRT4577_172011C.1.pep
PYWRQLGSSTARLSFLRSETLPTVTAMQVGVLTAVFCPLGRPLRRRRLEIIKLNERV

SEQ ID NO: 263597 - protein, 48 aa, Zea mays
  Clone ID: MRT4577_172012C.1.pep
IFRVISPNPFSRGFRFPTLTRAPPFSLFIYVVPPWNGFECQIVPVVAA

SEQ ID NO: 263598 - protein, 123 aa, Zea mays
  Clone ID: MRT4577_172013C.1.pep
GDCISRGRPGITDVMARPSLQITAMAPKILYILVILGRGLTGGSGRLPCDRDGMRQAHVLHLPEDPAGHQGRGRGESAPVGDAYWSAPTNLPSLWSLCPPIRCSRRRRTTSFSVTSTPSCWTR

SEQ ID NO: 263599 - protein, 384 aa, Zea mays
  Clone ID: MRT4577_172014C.1.pep
MFASICRRRLLRLCQIPFGTGAIPSDALPHCHSLATIADAPVSEPCAALVSCGLSPAAAVAHRLPIRSTAKADAVRALLRSYGFTDAEVADLVRRLSQILSVDPDRIRPKLDLFASLGVKPRRLARYPALLTRSLDKHLVPCIQFLRNILSTDEDVCLAISRTPRALSAGLEKIMRPALDTLRRLGLPDESISKLVVIEMGVLMMSPDRICQIFEALKELGLGVTEKRFPYGIRALCCISREKWLHRVALYRSFGVSEGELQRAFKKQPNIVNFSDEIIKKKIRFFLDVLKVELSEVMEQPAIIGYSLERNIIPRCAVLSLLMREGKIGPNVKLISALLGSANMFSTRYVLRYANELPDVVKAYEGKITFDGFREQDLLVPLKL

SEQ ID NO: 263600 - protein, 183 aa, Zea mays
  unsure (1)..(183): unsure at all Xaa locations
  Clone ID: MRT4577_172015C.1.pep
MDEGGGAGAAAAAAGNXGGGGGAPQXARSAEDVFRDFRARRAGIVKALTTDVEKFYRQCDPEKENLCLYGLPNETWDVTLPAEEVPPELPEPALGINFARDGMIEKDWLSLVAVHSDAWLLSVAFYFGARFGFDKEARRRLFTMINGLPTVYESGTGIAKRQKKVSNGSSKSNKSHPKPSKQS

SEQ ID NO: 263601 - protein, 89 aa, Zea mays
  Clone ID: MRT4577_172016C.1.pep
FGSRVALLERVYALAFHTGTGQLYTIVHEQREDAVNQAIRDQTSVGQLSLGWDHVGDQWDNGWRHRVDQVHHQIGQQAHQPRGLVGLSG

SEQ ID NO: 263602 - protein, 72 aa, Zea mays
  Clone ID: MRT4577_172017C.1.pep
KPSPLVPPKKEPALKKWGGPHNPQFFNLKGKIYPGGDPPPFSKYTFGGGGLLPIKNFFLPEINWAPLPTGAK

SEQ ID NO: 263603 - protein, 109 aa, Zea mays
  Clone ID: MRT4577_172018C.1.pep
FMEQHGKGNHLQNSGGGSDKGTAKKEKSRDFFFWSQGFRNRNEKYLQGHSGMEIFFFFPEFSNRARSHDSPNKGGASHQFVLKNPGWLNKKGGGVIKPTTHGPRVFPKI

SEQ ID NO: 263604 - protein, 112 aa, Zea mays
  Clone ID: MRT4577_172019C.1.pep
LGSLRRIVRFRELLLRVFRYRSILSKGTMGELIPFTFIMNGFVINRTGPSLLGVLRPGTLPSLNPLSRRPFFGRSKLLGALKISSPQKQGRVRTQPTQTRIEQQRAEPSPTS

SEQ ID NO: 263605 - protein, 86 aa, Zea mays
  Clone ID: MRT4577_17201C.1.pep
LGGPPFFFFFGFWDTLPKAQRPKNFFFLGHLQNFCLLGPPLIKWKKKVPPFRGKKKKKKKKKKKKKKKKKKKKKKKKKKKKKKKKK

SEQ ID NO: 263606 - protein, 98 aa, Zea mays
  unsure (1)..(98): unsure at all Xaa locations
  Clone ID: MRT4577_172020C.1.pep
VHALQVCPWARSLLLCLARRLRRLRQRRRRGLCPLALEAWCLPSRWSVAWRPRRPSGCWVCWRRWVRSAXPLLWGFFPFAXVIMPVLXVAAFGCHSRV

SEQ ID NO: 263607 - protein, 76 aa, Zea mays
  Clone ID: MRT4577_172021C.1.pep
EKRVRSRFSHRKLLFISPSLDDIQRLVEHLLILAKDSGLPSKYIADYNSRLTVSFLRPDCYGAYLILFEYLAINGI

SEQ ID NO: 263608 - protein, 368 aa, Zea mays
  Clone ID: MRT4577_172022C.1.pep
MSAAGVISGALLYIRDDFVSVDRNTWLQEMIVSMAVAGAIIGAAIGGWTTDRFGRRASILVADSLFFAGAAVMASATRPAQLVVGRVFVGLGVGMASMTSPLYISEASPARIRGALVSTNGFLITGGQFLAYLINLAFTKAPGTWRWMLGVAALPAVVQFGLMLALPESPRWLYRQGRAEEAEAILRRIYSAEEVEREIEELKESVAAERGSSEKLSLVALVRTATVRRGLVAGVGLQVFQQLVGINTVMYYSPTIVQLAGFASNQTALALSLVTSGLNALGSVVSIYFIDRTGRRKLLVISLVGVILSLGVLTAVFHETASHSPAVSATETARFDASLTCPSYRPSSPASGGASWDCTRCLKAAADK

SEQ ID NO: 263609 - protein, 243 aa, Zea mays
  Clone ID: MRT4577_172023C.1.pep
MEGGAHEFDGSTFKECFSLSWRNPYVLRLAFSAGIGGLLFGYDTGVISGALLYIRDDFVSVDRNTWLQEMIVSMAVAGAIIGAAIGGWTTDRFGRRASILVADSLFFAGAAVMASATRPAQLVVGRVFVGLGVGMASMTSPLYISEASPARIRGALVSTNGFLITGGQFLAYLINLAFTKAPGTWRWMLGVAALPAVVQFGLMLALPESPRWLYRQVSIHPIRLLFFSSGHFFGWLRAYDELE

SEQ ID NO: 263610 - protein, 81 aa, Zea mays
  Clone ID: MRT4577_172024C.1.pep
CQGPIWGFRKIESLVVVPANNRSCLRLGRRNLYLDGHVPLFVSVHAVISGLSPNAYKFLVAACQYDGHSVQLNSVTCSYHA

SEQ ID NO: 263611 - protein, 826 aa, Zea mays
  Clone ID: MRT4577_172025C.1.pep
MAPVFFLLPLLLGQILLCAAGDTINSSTPLSGAQKIVSKGNKFTLGFYTPPQGTNTSSNQGNYYIAIWYSNIPLQTTVWMANPDLPVADPTTAALTIGSDGNLVLLDQSKNRQVLWSTNISTSSNSTIAVLQDGGSLDLRDATNSSMVYWRSIDHPTNTWLPGGKLGLNKTTGVSQRLVPWTNTANPSPGLFSLELDPRGTTQYLIQWNDSITYWSSGPWNNNIFSLVPEMTSGYNYDFQFINNATESYFIYSMKDNSIISRFIIDVDGQIKQLTWVPASQSWILFWSQPRTQCEVYALCGAYGSCNLNALPFCNCIRGFSQKVQSDWDLQDYSSGCKRRVPLQCQTNSSSSQAQPDKFYTMANVRLPDNAQTAVAASSQDCQVACLNNCSCNAYTYNSSGCFAWHGDLINLQDQYSGNGGGTLFLRLAASELPGSKRSKAVIIGAVVGGVAAVLIVLSIVAYFLFQKYRRERTLRIPKTAGGTLIAFRYSDLQHVTNNFSERLGGGAFGSVFKGKLPDSTAIAVKRLDGVHQGEKQFRAEVSTIGTVQHVNLVRLLGFCSEGSRRLLVYEFMPKGSLDLQLFLGETTALSWATRYQIALGTARGLNYLHEKCRDCIIHCDVKPENILLDESFVPKVADFGLAKLLGRDFSRVLTTMRGTRGYLAPEWISGVAITAKADVFSYGMMLFELISGRRNSDHGEQHGSTFFPTFAASKLHEGDVRTLLDPKLNGDANADELTRACKVACWCIQDDESARPTTGQIVQILEGFLDVNMPPVPRSLRVLGESPDVINFFSDISSNQTSQTQNSTTSQTRSTTSGSSHLQSP

SEQ ID NO: 263612 - protein, 121 aa, Zea mays
  Clone ID: MRT4577_172026C.1.pep
RLERLEHTLLLPVHPSNNCQSFCIYIHTSIYLSFKDTMFENGFFGLFRSSQQEEEPRTQQPTWNATTMAMEQPANYAGNQQAAAPSQEEQQVKLRGGAGCCDVCCGCFAGLCAFECLEDCC

SEQ ID NO: 263613 - protein, 252 aa, Zea mays
  Clone ID: MRT4577_172027C.1.pep
MSPSDDGEETLAALIELSRTPEGRKGLTDVLIDTLFLLPASPPRLLLLRLRLLRNLLAGDELNHYAFIEHSGPAAVAASVLSFPSLAPDVARAALQALGNAALAGELHRDAVWQALFPEALRVFAGLRDQGVLDPLCMVLDTCCGGEGGRGRLQELCHEELGLPILVQAVTTASQVEHKEEWLEWLLFKVCAEEQKFESLFYALCSANDVGEYNAKHIFLLDTLSRCFDSHPEESTVSDKFAHDVFNLHKHA

SEQ ID NO: 263614 - protein, 136 aa, Zea mays
  Clone ID: MRT4577_172028C.1.pep
GGDGLLHAERAFRIAQLELAFLNDYFYTRYPILFWRGFPLLCAWHPLLTIALIAWLARDIHKLYEPREGETAHVIKGVNVDITITWIFMGIIVLKELWKMVTYILSDWTKVMLLCEYTSRRSIGPWCMWIPFHNVC

SEQ ID NO: 263615 - protein, 72 aa, Zea mays
  Clone ID: MRT4577_172029C.1.pep
HRLLLDRITLPCSLMRPLRVHGHLAARDGEAHAVTLVSFSPWITTGAAVVVECTYHAHFALGIGGLTTGPGV

SEQ ID NO: 263616 - protein, 91 aa, Zea mays
  Clone ID: MRT4577_17202C.1.pep
RGPPHGHPMALACVPPQALWVPKSHNVSRAPPDPATMGPPGGPPVFGRNRSRPKGHPFKTGEIPPGGPGLWGKLGPFAFAPGEANNPPVYL

SEQ ID NO: 263617 - protein, 287 aa, Zea mays
  unsure (1)..(287): unsure at all Xaa locations
  Clone ID: MRT4577_172030C.1.pep
MDQLPRPVIFHDGRLVRRPTPLAALLVVLWFPVGFALACLRIAAGALLPMPLVYYAFWALGVRVHVRGAPPPPRAERATGRRGVLFACSHRTLLDPIFLSTALGRPVAAVTYSLSRLSEFLSPIRTVRLTRDRASDAAMIRDLLAEGDLVICPEGTTXREPFLLRFSALFAELTHEVVPVAMENRMSMFHGTTARGXWKGMDPFYFFMNPSPAYVVTFLNKLPPELTCAGGRTSHEVANYIQRLIAATLSYECTSLTRKDKYLSLAGNDGVVATPKPPAPAKKPNGC

SEQ ID NO: 263618 - protein, 84 aa, Zea mays
  Clone ID: MRT4577_172031C.1.pep
NFHPPTKKGQKNAPGTKQTAPPGATHPFWLLGPKIYHPIDKTYQAESIPQVGGSPKKTTMALNSRKAFFSPPGLLNRGKKNPKG

SEQ ID NO: 263619 - protein, 82 aa, Zea mays
  Clone ID: MRT4577_172032C.1.pep
QQNLPSFNMNLQVQICCSQDNHSNALWGILSMNQMSAVCLPYQCAATGMRQAFTMYGERIDRALGRLAYHVIRGCTRCHSGE

SEQ ID NO: 263620 - protein, 64 aa, Zea mays
  Clone ID: MRT4577_172033C.1.pep
QDTHMNFHFGVETPLEISVSGFYSVEREKTHMLLFRKGGNLYMIIGRLLTLPKTFVIREKITGD

SEQ ID NO: 263621 - protein, 84 aa, Zea mays
  Clone ID: MRT4577_172034C.1.pep
GFEEDDVADCYLKTMWPCRHHRQRSPHPFCTSLISIGKANPPTSASGRALGIRPRELMEGRRHSRGFKAEHDRASPAGLEEPNR

SEQ ID NO: 263622 - protein, 133 aa, Zea mays
  unsure (1)..(133): unsure at all Xaa locations
  Clone ID: MRT4577_172035C.1.pep
RGLFFFFFYGRARTQFLFPKQICKVKSGTENLLHIHXKNLIKFSHRIPSFIFNHEARIMFEPDHYAVPENMNQENITACISHLSELSCLHDDTNGFPETVVAQFSNPSXXSKMEAGSPMQAMMSYFFDGTKNS

SEQ ID NO: 263623 - protein, 87 aa, Zea mays
  Clone ID: MRT4577_172036C.1.pep
MSSAFHQFSRTDSQGAAGGRRRRVGLSRLDRIRSNSFFPPGARLVRYKMDEDRADDDDDMATIAALRLKDLPEGSYGSDGTGGCGIS

SEQ ID NO: 263624 - protein, 74 aa, Zea mays
  unsure (1)..(74): unsure at all Xaa locations
  Clone ID: MRT4577_172037C.1.pep
FYFYFHLVLFFFISYXDFFMFFDRFLFYYRYFILYFFFYIVYYLYLFYINLVYIIFILYFFLYLFNYFLFFFIY

SEQ ID NO: 263625 - protein, 116 aa, Zea mays
  unsure (1)..(116): unsure at all Xaa locations
  Clone ID: MRT4577_172038C.1.pep
PHCLVGGFGGHRSLEQKNKSFNIRGSIYRSWTTNYETPVWNNNGVLTEGQQGPILLEDYHLTEKLAQLDRXRIPERVVHARGAXRADSFEVTHDDNHPTCADYLRAPGVHTPVIVR

SEQ ID NO: 263626 - protein, 76 aa, Zea mays
  Clone ID: MRT4577_172039C.1.pep
KTRLRMIKVRLLYCAGLRGPGFRGSNSYRLRSIPVTLFYGYLISLTCALFTLTGLKKSIISRLYLSREISLFIRLF

SEQ ID NO: 263627 - protein, 38 aa, Zea mays
  Clone ID: MRT4577_17203C.1.pep
ALEEPLKLLPSAMIAQTYADHVTHTISAHTIATEFTSS

SEQ ID NO: 263628 - protein, 104 aa, Zea mays
  Clone ID: MRT4577_172040C.1.pep
MLENPAASQGPLMGWTLTARSLVNGGYVDRPEQITEFDDWKIEYHVKEIPEEKRWKLYKSLQARRHSLIGQDEEAVDRGLKHLPRLIQRYSKPRRPWREEDRIN

SEQ ID NO: 263629 - protein, 123 aa, Zea mays
  Clone ID: MRT4577_172041C.1.pep
SVKVKCSELRAEDKKELTKQLDELKTELLGLRVAKVTGGAASKLSKIRVVRKAIARVNIVVRAETKENLRKFYRNKKFKPLDLRPKKTRAIRKALSPRDANRKTAKELRKRSVYPQRKYALKA

SEQ ID NO: 263630 - protein, 85 aa, Zea mays
  Clone ID: MRT4577_172042C.1.pep
GDLGQKETHRQDLLKDGNTQSGFLRISILRKLQIRIIYKASPQSGSYTKQALNQDLTNHNTLHCLLGRLAIEPRAGPVYGRESAV

SEQ ID NO: 263631 - protein, 229 aa, Zea mays
  Clone ID: MRT4577_172043C.1.pep
MAAVRVILPHPHLPIPSWRPQLKPSSSYPRRAVAAPASLSPSPLTASLQLGDVIEAQQFDRQILNEIFEVAREMEAVECGSHGFRSRVLEGYLMATLFYEPSTRTRLSFEAAMRRLGGEVLTTENAREFSSAAKGETLEDTIRTVEGYSDIIVLRHFESGAARRAAATAEIPVINAGDGPGQHPTQALLDVYTIKREIGRLDGIKLGLVGDLANGRTVRSLAYLIAKYQ

SEQ ID NO: 263632 - protein, 165 aa, Zea mays
  Clone ID: MRT4577_172044C.1.pep
PGFLLPLLTKPSLTITSRRVVVVVISLASASTARSPIACWPALLAMDRSKSYAGGRMQIEPYYGGGGGGGGGARADFRSYSYSAGGTGPSSYSYNQYEYGGPGAGEEEVKRSKSKRRWLADPDMDRKRRVAAYKAYGVEGRVKGSLRKSFRWVKDRYLDLVYGWS

SEQ ID NO: 263633 - protein, 112 aa, Zea mays
  Clone ID: MRT4577_172045C.1.pep
RFDITFSNRRLWMCSSYRAPVSFLLHTSPSCKLISPNMAIIVGVIAYGCQQLGRICRRLLAVHAHQLPGGRCAHGYDEWAQQLSIFQAIVLLVDGFPSHSTMGSTGRSFILV

SEQ ID NO: 263634 - protein, 72 aa, Zea mays
  unsure (1)..(72): unsure at all Xaa locations
  Clone ID: MRT4577_172046C.1.pep
SCVVTGPPLAQGRAKPCSCVLKIVLEARRGLVCVPSHHLILVYQLVGAGAVYEGNIFEKKTLAYXAELGLGG

SEQ ID NO: 263635 - protein, 47 aa, Zea mays
  Clone ID: MRT4577_172047C.1.pep
HCSYLKLILNCFFEILLVPYFKTSILTGLILYHFRRKKNIRMLNLVQ

SEQ ID NO: 263636 - protein, 204 aa, Zea mays
  unsure (1)..(204): unsure at all Xaa locations
  Clone ID: MRT4577_172048C.1.pep
MAPSYDKTIATAASLAASLMLVRSLANELLPSEVRDALSSALASLRSRMTWRHTIVIKEIEGWCRNCVYDAVEAYLATRINANLNMERLRVSSAGASEKMVVGMEAGEEMPDVYQGAEFKWCLVTREVRADTDSVGDGAHEVRSYEVSFHKRHKEKALKEYLPFIVAAXKAINDQERSLDIYMNEHGNEWPSIVPQPPLTFETL

SEQ ID NO: 263637 - protein, 61 aa, Zea mays
  Clone ID: MRT4577_172049C.1.pep
GTPAGAGPELIAGSSSSFFGGRPQLFFLWVTLWNTYRFNNQRTDHRKSHSNHHLRYYIKVF

SEQ ID NO: 263638 - protein, 115 aa, Zea mays
  unsure (1)..(115): unsure at all Xaa locations
  Clone ID: MRT4577_17204C.1.pep
HNTTEYNTRHVCTAPCRSTYPPKPQGCNAATLIACKNNDAKKDAPDSXSLSSDGFHTINRFTCAAQNSCPAVVSCADIMALAARDVIYLVTAVTTPLMSRARQTVPASSLYQLVT

SEQ ID NO: 263639 - protein, 66 aa, Zea mays
  Clone ID: MRT4577_172050C.1.pep
PRVRPRVRTRFRDYGYPTRVRLYLWKSSFPVSWTSNSCHGDRYKFLFIHISNLGCHDTLLPTIQLD

SEQ ID NO: 263640 - protein, 113 aa, Zea mays
  Clone ID: MRT4577_172051C.1.pep
YQNISLRTNEYMETGDAVGSHQHACIHTFMNTKTDAKHATRDSKPKNSGCICLTHTPHNTYVWRSVGPMLIIVKPPPQARSIIIISMDVDRRDQQLQGLHLQSLPKMQSWTDF

SEQ ID NO: 263641 - protein, 114 aa, Zea mays
  unsure (1)..(114): unsure at all Xaa locations
  Clone ID: MRT4577_172052C.1.pep
NNKGEQAVLLLFSFCENPVLKPHMIQQXATAAGILPLPPLFLQHSSAGGGGGPXVHSLPPHIXPQLLAQLVLAHLPAYSRRPPFLPFNHQAAWHSAPYXAHQQLPLNQVAALYP

SEQ ID NO: 263642 - protein, 62 aa, Zea mays
  Clone ID: MRT4577_172053C.1.pep
YHDSCRRFQAPAPWPLRSNNQAVCVWHNPHLPWSVPLMQTPLLCIQRPSVQLLFEGPSLERP

SEQ ID NO: 263643 - protein, 173 aa, Zea mays
  unsure (1)..(173): unsure at all Xaa locations
  Clone ID: MRT4577_172054C.1.pep
SCSSSRRRGPERAGSAPLAKLPDSPPAPELANPPLPHHRPSKSYXRHRHRPRWSPRRRGARLSKLESSDSFSAPLHKVEGRAIHYHIADDLGNVQDGTVGHSFTFNGSNLEELAHKLQEETGLDNIIICTRSPINGKLTPLRLQLPPNNAAMHIVLVQESSKVARSFARPYGS

SEQ ID NO: 263644 - protein, 130 aa, Zea mays
  unsure (1)..(130): unsure at all Xaa locations
  Clone ID: MRT4577_172055C.1.pep
ARRASKRGGSEKHKYLPAALLPPRTYPWLGMSRCTPSPPCGPLLCQVALRHPRRHGHPSAAARADPQPSRTRVVSEGRGGGGGGRGVKAGGHGWGSGSGREVVGVRCASLSERTEANERVVGXAPGRPRG

SEQ ID NO: 263645 - protein, 83 aa, Zea mays
  Clone ID: MRT4577_172056C.1.pep
LLSCLYGSVSTSWSKADVIRASRVVQLCEMDVAILYQSSRVTSLECGHRGALRPLYGTGNAPPAGDDGQCRPFQEHARPLLRV

SEQ ID NO: 263646 - protein, 47 aa, Zea mays
  Clone ID: MRT4577_172057C.1.pep
PKQKPQRGCKHCKYRLVPKNPVNSFPGHIPDQCKGVNHINCNKKEPL

SEQ ID NO: 263647 - protein, 96 aa, Zea mays
  Clone ID: MRT4577_172058C.1.pep
ISESWSCVITRFCSFLLFWREWCYQHYYTRLLCVNGILLYFVSKKKKKKKKKKKKKKKKKKKKKKKKKKKKKKGRGGGVQDDPRLRAPACNLISVT

SEQ ID NO: 263648 - protein, 56 aa, Zea mays
  Clone ID: MRT4577_172059C.1.pep
LEAGRAPSFPRWDKHHDFQLYLSNPSGNYGGGKVVVVGANSQCAQGVTKSCSFWCP

SEQ ID NO: 263649 - protein, 142 aa, Zea mays
  unsure (1)..(142): unsure at all Xaa locations
  Clone ID: MRT4577_17205C.1.pep
MPISTMGVSLLVTNEKMHVTRERVFWDDHVVQGDKYYDPDIQIICDDCNIFMRNAPIDGDXDAPYDGGAHQLDCNIPEHDALLPHHVLFVTHILHPTVHLQTRELCLDILKNAXSPAWTLQSDCIARTAMMGHPEAHTPLNW

SEQ ID NO: 263650 - protein, 94 aa, Zea mays
  Clone ID: MRT4577_172060C.1.pep
QNPEGWVSYDYDGQLSWFNPGVKVGVGIGLGVFVGVGKGVGVLLGSFPATTKSFKRRFFFPLPLGWPPIMPQAEFCPPTLESSWVCWAGVFFFF

SEQ ID NO: 263651 - protein, 46 aa, Zea mays
  Clone ID: MRT4577_172061C.1.pep
LFPQGLSLPWFRLAVSVLPLWQRGSPSGRGPVFFCGAPCLIVARRP

SEQ ID NO: 263652 - protein, 144 aa, Zea mays
  Clone ID: MRT4577_172062C.1.pep
DPRGRPGNRRYPSSPDIFLRRRPWALQKCSRRSSSGRVPISLRRALGSVLHRTGRCFPQPPRRSLPASARTAPSRAAPPTCAPLSPMAHACPLVGCCSLRSPWLPAVARPQLAARLPWRAPLCQAVESRLPLLARAAPLLPLPS

SEQ ID NO: 263653 - protein, 120 aa, Zea mays
  unsure (1)..(120): unsure at all Xaa locations
  Clone ID: MRT4577_172063C.1.pep
ILLVMVDSLAKLSMDVGDKDLVYSLLLVFSGMLMDXKAKSAFWTTSKSQSAXTELVSYPHMMVVRETALQCLVAFSTFPHSKIYPVRRKVVQAAVRALDDKKRAVRRVAVRCRHTWQSFA

SEQ ID NO: 263654 - protein, 170 aa, Zea mays
  unsure (1)..(170): unsure at all Xaa locations
  Clone ID: MRT4577_172064C.1.pep
VHTDVDWARRPDTRSPTPXHXVFXGENLVSQSSKRQXTVPRSRAETEYRPVANGVVEASXLRQXPQELHSPLTKSSLVYCDNVSGVHLSXNPIXHQRXTTHIEIDSPPLVRERRCSLVDVRCSLMSQTMVSSLRQHLSPAATSGLPRKISLPVLHICRPSHVSTAGRVLE

SEQ ID NO: 263655 - protein, 67 aa, Zea mays
  Clone ID: MRT4577_172065C.1.pep
GLYREHSQISVPSMATVLRLACLDALGCTAGVLRLISTGGEHYDPGMIIVFAPRAPVPSRVIVGIRL

SEQ ID NO: 263656 - protein, 84 aa, Zea mays
  Clone ID: MRT4577_172066C.1.pep
QKRKSTAPTSNANVRGIKRQSRVSNDSRGCRLLPSGGRPRPARNARESMRNWRGRSVTASGCAGGEAAAPGKASLAFTAIHVYR

SEQ ID NO: 263657 - protein, 27 aa, Zea mays
  Clone ID: MRT4577_172067C.1.pep
ILDQWARKGSPRPHGLRAGDARRRITC

SEQ ID NO: 263658 - protein, 161 aa, Zea mays
  unsure (1)..(161): unsure at all Xaa locations
  Clone ID: MRT4577_172068C.1.pep
LSGPVGEDMFHWRATIMGPSDSPFAGGVFLVNIHFPPDYPFKPPKVFSLIFDFXSARGAGGVFLVNIHFPPDYPFKPPKVSFRTKVFHPNINSNGSICLDILKEQWSPALTISKVLLSICSLLTDPNPDDPLVPEIAHMYKTDRAKYESTARSWTQKYAMG

SEQ ID NO: 263659 - protein, 63 aa, Zea mays
  Clone ID: MRT4577_172069C.1.pep
RGGFKPISGVIFEETPGVLKIFFENVIPDVFTYPEHALCKTVPPMDVVYALKPQGRPFYGFGG

SEQ ID NO: 263660 - protein, 64 aa, Zea mays
  unsure (1)..(64): unsure at all Xaa locations
  Clone ID: MRT4577_17206C.1.pep
FSQLVAVSPHPFLPKQQWLSFYRHVRPNVATLKKKQRLLPFNHLALRNPAXAFYQQPIIGGALF

SEQ ID NO: 263661 - protein, 72 aa, Zea mays
  Clone ID: MRT4577_172070C.1.pep
FTCGGLYGAETRELTTHLFMSLDCTAPIRCFPTDASTLGTKKRGWCHYIAAHHPLNSVKLSTRPHLFFFASN

SEQ ID NO: 263662 - protein, 305 aa, Zea mays
  Clone ID: MRT4577_172071C.1.pep
KKSARNGAPRGGKRRKQQALADAATPSKKRKKGGEGPEPKEATPAKKHKPAGTPPKKQKASSKPATPAKKQQSPGKAEKLTPKKKQQSPGKAEKPTPKKKQQSPGKAEKPTPKKKQQSPGKAEKAAPKKQQQQPAGKARKPAVAATSPTKKKQAKREKPTPTKRKRGDDEQAKEAKSPKRAPADGAARASTPVKKKLKDQKAAAANMGVCSFSMARVRQLMRAEDPTIRPSSEAVFLINKASEFFLGKFAEDAYHNAAKDRKKSIIYDNLSTAVSSQKTLKFLSDFVPQRVAAEDALKTMTSNNS

SEQ ID NO: 263663 - protein, 69 aa, Zea mays
  Clone ID: MRT4577_172072C.1.pep
MRMLLKHSAFGKLANSRHDRLTLKWASHVYPEDVTHVYPYPAGEDPNGYELASERWTPLHTSESIALSI

SEQ ID NO: 263664 - protein, 166 aa, Zea mays
  Clone ID: MRT4577_172073C.1.pep
PPGQVPSLFFFLFFFIFFFLFFFFFFFFLNSKILKRAPQTRGTHKPLFTKKDYKTKTKGQPPKGAPPKNGGGENTARGEKGRGRKGGKGAPGKSAPGGGPGNQWNGNNRGGGHTPTRATPENRGKGCKSPGEKKATKGKTDKKSKGKKPGGGQKGTGCMANNEQTK

SEQ ID NO: 263665 - protein, 97 aa, Zea mays
  Clone ID: MRT4577_172074C.1.pep
CMKLYICIYLRHACMNNACDLWVDRRRSGRLYRQMMPANGGGGGGGDGAADTAQKSEGPLSSARCDVHDTGTRHSPLLLKSFLLPSSMPLPWTGRVG

SEQ ID NO: 263666 - protein, 92 aa, Zea mays
  Clone ID: MRT4577_172075C.1.pep
GNQCVSSFSLDTVASTWYNPGHLPSGFPGTAPLSDTTAGGSLTSAPAPYTYSVFPSYISVITPAPYNARNAAGTGTAVETSSPTGASATGSL

SEQ ID NO: 263667 - protein, 122 aa, Zea mays
  Clone ID: MRT4577_172076C.1.pep
STSNIGLLRYVNPTHELYISGLDNTISAEEVDSINLSQKQGIQSLSLSWTRDAQRSVEDMEVLGKLVPPDTLKCFELRGYDSMSFPTWVMGITLYLPRLTKVVLWELRKCNSLPPLGQLPTL

SEQ ID NO: 263668 - protein, 250 aa, Zea mays
  unsure (1)..(250): unsure at all Xaa locations
  Clone ID: MRT4577_172077C.1.pep
MAVAISTKLAALAALVVSVFATHGARAQPSYNASAARRELYYSSTTGGSWLPARATWYGRPNGAGPDNNGGGCGYSGTNTYPFNSMTSCGNQPLFRDGKGCGACYQIKCVSKNNPTCSGEPKTVIITDVNYDTKVAPYHFDLSGTAFGAMAKPGLNGKLRDAGILDIQFRRVPCDYKGLNVKFHVMGGCNPFYFAVIVYYAGSDGXVVQVDLKEANSPAWMPLYESWGXVWKIDPGHPLKGPLSLRVRSD

SEQ ID NO: 263669 - protein, 122 aa, Zea mays
  unsure (1)..(122): unsure at all Xaa locations
  Clone ID: MRT4577_172078C.1.pep
RAHDLEEDFEYYQNNXTWEXLINVMESVIEIELAHIRIHTDMGTQYARFYSKNLIEHIKLHITRFNIPKIIPTLNQPHHXRTLLXLLIHLDIHDNASDNIINHIINASEHTQDHDQCNEVSN

SEQ ID NO: 263670 - protein, 52 aa, Zea mays
  Clone ID: MRT4577_172079C.1.pep
KLTPLLSSSKNIKRAYMPKSYRFDGLEIPFFLTRERRTGTRGPILLLASVRG

SEQ ID NO: 263671 - protein, 110 aa, Zea mays
  unsure (1)..(110): unsure at all Xaa locations
  Clone ID: MRT4577_17207C.1.pep
MASGELACTYAALILIDDGIDIAADKIATIGKACNIKVESYWSAIFGKLLEKLNLEDLILSAGSVGGPAPAAAAAPAGGAXAARTAPAVHENKEQAKDETDDDMRFTLFD

SEQ ID NO: 263672 - protein, 124 aa, Zea mays
  Clone ID: MRT4577_172080C.1.pep
KKKQFWAPIPGIKNFYFRGSCRVSPKPWKELGLQGPPSNPNFFKKKKLSIKRGFICPLGRTWPLFEKPQGLRGAPKKKGEPPQRKKPPFFLFQKKGDSPPKNPLRVSQKKQWGGQGGHFSKNQG

SEQ ID NO: 263673 - protein, 224 aa, Zea mays
  unsure (1)..(224): unsure at all Xaa locations
  Clone ID: MRT4577_172081C.1.pep
MAVAATTVLDIAELSFSDLVALLSPETLADDGRCRRVVDTVATELGRGGSGLLAIDGVPRVGALRRRLLPLARRVALMDHLTRSQLLKKHLLGSDVPLKKLDRSVSSFAQLHKHRARLVLLESVKNNGFNSSDRVQDCNQSEDVNDDDDADDMDNLGDLIKELGLXMMELGILIARACDIXIGRGQLEQSITDFGTAKARLIHYHSELXNIVIRDNNAKRKGSA

SEQ ID NO: 263674 - protein, 89 aa, Zea mays
  unsure (1)..(89): unsure at all Xaa locations
  Clone ID: MRT4577_172082C.1.pep
ELYCLXHGIQADGHIPGHNTIGGGDDAFNTFFXETGAGKHVPHAVFVDLEPTVIHDVRTGTXRHLFHPVHLINGKDDAANNLSRWHYTI

SEQ ID NO: 263675 - protein, 158 aa, Zea mays
  unsure (1)..(158): unsure at all Xaa locations
  Clone ID: MRT4577_172083C.1.pep
FLFFFFFFFYFFFFLFFFFYFFLLFFFFLFFFWGAKGPQLILPREKSRAQKPFAEKTPTRSQTNGRGFLPPPPPALKFDPPPPPQAGGPLPKNPIKPGPPXKTPPXGATPPFLKPGGPPPAGPPLGQGGSPQNRLRHKHKSFLLLGAPASFSPYPHPG

SEQ ID NO: 263676 - protein, 76 aa, Zea mays
  Clone ID: MRT4577_172084C.1.pep
QPFLERPPGWLFFFTAPAGFFYAPPVGLKGALSNFITVCFFGIIQGRWRLKYFPPPLAVYWAFNYSVFFCKTRQKK

SEQ ID NO: 263677 - protein, 55 aa, Zea mays
  Clone ID: MRT4577_172085C.1.pep
IPLINDIFSMIKPNSPTRWAATFFFFTQHTNITLATSTISIPISVTHIVTNHLFT

SEQ ID NO: 263678 - protein, 71 aa, Zea mays
  Clone ID: MRT4577_172086C.1.pep
WMAPWRWVRSTAREGVILIYNAPISLVAQWMTINAQILSERRGDLQARCDYSTLLSDMIHCGLLEGIFNRH

SEQ ID NO: 263679 - protein, 71 aa, Zea mays
  Clone ID: MRT4577_172087C.1.pep
SFSELNLFGFFAELEKHLIDKKHGRVVVWGAFSPQDVAIKIRKRTNRRVEILDLSEASPAAPEGGPDGHMS

SEQ ID NO: 263680 - protein, 456 aa, Zea mays
  Clone ID: MRT4577_172088C.1.pep
MASLISPCLSVPTAPGPARLAAPGTPRRRRMAVVRAKIREIFMPALSSTMMEGKIVSWTAAEGDRVAKGDPVVVVESDKADMDVETFQDGIVAVVLVPAGGTAPVGAPIALLAESEEEVALARARAQALSQGQSQAPSPPPPHAAAALGPPPPAPVAPPATKGIATPYAKKLAKQHRVDIAGVVGTGPHGRVTAADVEAAAGIKHKRPPPPPPPASVDAAPLVPASAVLPPVPGGTVVPFTTMQAAVSKNMVESLRVPTFRVSYSMITDKLDALYEKVKSKGVTKTVLLVKAAAVALTQHPVVNASCRDGKSFSYNNDVNIGVAVALEGGLLTPVLEDADKMDIYLLARKWRVLLKKARMKQLQPNEYNSGTFTLSNLGMFGVDKFDAILPAGQGAIMAVGASRPTVVADKDGFFSIKSEMLVNVTADHRIIYGADLAAFLQTFAKIVEDPECLTL

SEQ ID NO: 263681 - protein, 104 aa, Zea mays
  unsure (1)..(104): unsure at all Xaa locations
  Clone ID: MRT4577_172089C.1.pep
LVVQVSRKTLSXEVIQAFRDSAANELQGILEVFDVRLVSMDLRCXHVSFTIYACLPIVMVAAMVKVISWXSSSEGXEVSHRVIYLGDICASECKCSIALRCYIL

SEQ ID NO: 263682 - protein, 82 aa, Zea mays
  Clone ID: MRT4577_17208C.1.pep
MEKFLYKSRSYTNREVLSRKHSSTVRTEQNPVLHENTRAGPFFTLYVKLLKLGPQAQTKFLPSKLLDNSKKQYNTCTCTNRK

SEQ ID NO: 263683 - protein, 124 aa, Zea mays
  Clone ID: MRT4577_172090C.1.pep
TDDKSKAVIIANPRTSEFEIFEVGDVVMLDSSRDVGASNNRRLAALYCNRVSGFEEIMGLVDSIVKVVRAPHVNFGENYYVPTDEPEFFPKRQCKIVTSDGKQVGYLGIVHAEVLRKFGIPDPC

SEQ ID NO: 263684 - protein, 100 aa, Zea mays
  Clone ID: MRT4577_172091C.1.pep
KKKKRGGGIFWGQKFFPHHKVFFFCAPKKRGERVQKKPPFPFIEQKFGGFLNPPQKKKSTPFKKRPLFIPSMALKTSPKKLYSTIIWGKKKCCCHSQKFK

SEQ ID NO: 263685 - protein, 594 aa, Zea mays
  Clone ID: MRT4577_172092C.1.pep
MPTVSVGRDRLLAAIGRTYTQEEFEALCFEFGIELDDVTTEKAIIRKEKHLEDDSEVDEDDEVIYKIEVAANRYDLLCFEGLARALRVFTGTEASPVFQVSSIPRGSMLQMHVKPETSKIRPYIVCAVLRGVTFDEARYNSFIDLQDKLHQNICRKRTLVAIGTHDLDTLQGPFSYEALPPNEINFVPLKQEKSFRADKLMEFYKSDMKLKKFLHIIENSPVYPVIYDSNRTVLSLPPIINGAHSAITLATRNVFIECTATDLTKANIVLNTMVTMFSEYCETKFEVEPVEVIHHDGRKTVYPDLSCYKMDVLLSDILGPIGISQDEKQVVCLLNKMQLQAESHSLKGEARISVSVPPTRSDILHARDLSEDVAIAYGFNNVPKSKPKCMTIGGRQPLNRFSDKIRAEVARAGYMEVLTFILSSHEENFDMLNRTDDKSKAVIIANPRTSEFEVVRTSLMSCLLKTLKHNIDHPRPIKIFEVGDVVMLDSSRDVGASNNRRLAALYCNRVSGFEEIMGLVDSIVKVVRAPHVNFGENYYVPTDEPEFFPKRQCKIVTSDGKQVGYLGIVHAEVLRKFGIPDPCTFVEMDLEALL

SEQ ID NO: 263686 - protein, 107 aa, Zea mays
  Clone ID: MRT4577_172093C.1.pep
MRVMIMRYVSRDDDDMTLDQELSEILFYVSSTPQRRNTSCPGRTHQTRDSITQTNGAVSSWLSCFLGGGALYRCEYAVSPALFLFKARRGTCTFAPSDSDHTEVRHC

SEQ ID NO: 263687 - protein, 299 aa, Zea mays
  Clone ID: MRT4577_172094C.1.pep
YNESSEPISDHDSRQHCDVEAIQQPRPETEALSILEQDEALQKIDSDQKQKEVEEIESQNDELQVDEQKHEDKRDDLAKEPLVEYQNFENRASNNTKDNDAFKVEQTEAANSEILKNKALHISKESTPSIMAMKVENIKETSEGTEEDDAAKNDNKDEQENAENVDIVSKTSTNEQGQTTDEIRKEEDPVHIIQASEKEIADEIEESKEIHEDNAICHDKLQTNSEKEESPQPHSNEPYNVDAKIDDTTSLCEEIIHDNTSINPREIEEIGENKGPDFTSEPSVESSIQNNVEDSSSHH

SEQ ID NO: 263688 - protein, 132 aa, Zea mays
  unsure (1)..(132): unsure at all Xaa locations
  Clone ID: MRT4577_172095C.1.pep
PLSCSALARFPGYSVTALPAGLPAPSPSTPALCSPRRRAVYLVPDCVDAQQRLLSSSFSRCRRQTPLPGPPQAPVRLALPCRAPPSSSVPSLPRPSPPDPRXCXLLGSIPSSFDLIASSRPDSSLALPFRPD

SEQ ID NO: 263689 - protein, 93 aa, Zea mays
  unsure (1)..(93): unsure at all Xaa locations
  Clone ID: MRT4577_172096C.1.pep
APAHMITITSINRTQTQNHQLYTNTRGRGGIFFFXTSLKSRPPNTRIPTQATIHKRLIRVTLVTETLPEGTKKKPPLYKNICHLPQRGQRKNH

SEQ ID NO: 263690 - protein, 69 aa, Zea mays
  Clone ID: MRT4577_172097C.1.pep
VKHDHKQILMNKTNFLHMDKILHISIPETTLFCMTFKDLCQYCITLNINFIIINPYYYLLFIFDATYTL

SEQ ID NO: 263691 - protein, 56 aa, Zea mays
  unsure (1)..(56): unsure at all Xaa locations
  Clone ID: MRT4577_172098C.1.pep
SDQWTPPSAASRLVLVYTNGSGATRXRPLLLLAIVVGARGWKFPSSSGGDVYKGFG

SEQ ID NO: 263692 - protein, 92 aa, Zea mays
  unsure (1)..(92): unsure at all Xaa locations
  Clone ID: MRT4577_172099C.1.pep
SGLAALHGALFLPLTPRRSPATPPSPXPSPAISRPPPPXSPPPATPSPPPLTPPXPPPPPAAPPPRPPPPPRPPPPPPPXPPPPPPPCRPPP

SEQ ID NO: 263693 - protein, 158 aa, Zea mays
  unsure (1)..(158): unsure at all Xaa locations
  Clone ID: MRT4577_17209C.1.pep
KNRXKKKXSKHDNNEKTXKQKNTXQQQPKDPMHNPPQPXXQHQTKKKKKKKXNKINNKKKKKKKNNKKKKLKQKKKKKKNKKNIKKKKKKKKKKKKTTKKKKXQKKKKKKKKKKKQKKQXXKQKKKKKTKKNKKKNKKKIXKKKKKQKKKXIHKQTTH

SEQ ID NO: 263694 - protein, 124 aa, Zea mays
  Clone ID: MRT4577_1720C.1.pep
APLTALPASVRESGCRVVYLCRDPKDAFVSLRHYLDEIKPKGAAMTPFAEAFDLFCDGVSPFGPVWDNMAEYWNESVARPEEVMFLRYEDLKEDTVGSVRRLAAFLGCPFTDEEAERGVPVAIV

SEQ ID NO: 263695 - protein, 73 aa, Zea mays
  Clone ID: MRT4577_172101C.1.pep
YSMSTNSIFLYIKCYSIISNHKHLSIILVNLAQYISCAKLLEYKCTRQIWILHLWSKTRTVPWGILYGVAACP

SEQ ID NO: 263696 - protein, 224 aa, Zea mays
  Clone ID: MRT4577_172102C.1.pep
RQRRRGGCGRSSTPSGGPRRRQPDPARPSSPYSSSWGSQIKGPTRSLEPSYDEALQPDEEAGVGATEAAPAEADDGIEVCCFDNRGVGHSSVLPNKSYYSTTIMATDALALMDHLGWKKAHVFGHSMGAMIACKLDVMAPHRLCSLALLNVTRGGFQCFPKVDAQMLSLAFRFLRAKTPEERALVDLETHYTKVVHTVLSAQEEMLATWRTSRSFRTTMSSSLS

SEQ ID NO: 263697 - protein, 80 aa, Zea mays
  Clone ID: MRT4577_172103C.1.pep
VEDRVLPHFSLVFPRLVPPWSKSNKSLSLPHLGNTRLVLLGDVHLTIILVLALDQAGSFISISMRSSPRLGSTWFVFRIT

SEQ ID NO: 263698 - protein, 109 aa, Zea mays
  Clone ID: MRT4577_172104C.1.pep
LRLQVSDQVSTLRGYNGDPNRFTQLRISNHTTYVALNPCICQPFPQILHNVNRSALPGSTVLLHPASSQEGTRYSHHLPRPVRGLSFHVWNSPGSSLPCPISRACGQLR

SEQ ID NO: 263699 - protein, 54 aa, Zea mays
  Clone ID: MRT4577_172105C.1.pep
RGPVHVMEDLWERLTYARVKCYICRVVRDPQLGIIGSNRRCSSVMETRLTDHSS

SEQ ID NO: 263700 - protein, 54 aa, Zea mays
  Clone ID: MRT4577_172106C.1.pep
VWNYSTRLTRLKKRLSRVCWLEGFKVWLINNQRLGFAEMLTKSGSLKIHFYLSG

SEQ ID NO: 263701 - protein, 100 aa, Zea mays
  unsure (1)..(100): unsure at all Xaa locations
  Clone ID: MRT4577_172107C.1.pep
RRRRMIKNRESAARSRARKQAYSMEFEAQVQKLKKANXNLRRNQPKLLELQTTKXKIVEGSIRPKKPVCSRRTFTGPCGQMPITQHKFHFLHTCRGAWDL

SEQ ID NO: 263702 - protein, 150 aa, Zea mays
  unsure (1)..(150): unsure at all Xaa locations
  Clone ID: MRT4577_172108C.1.pep
LRLQVSDQVSTLRGYNGDPNRFTQLRISNHTTYVALNPCICQPFPQILHNVNWSALPGSTVVLHPASSQEGTRYSHHLPRPVRGCPFTYGIAGFRLTHDEVCGQLXSPRSTCLQSVQSLIDTDGDTTTRLRSGASQPPSLKFTSAISQNI

SEQ ID NO: 263703 - protein, 49 aa, Zea mays
  Clone ID: MRT4577_172109C.1.pep
VPLHSLEDPGGGHNFLLLRESRQDLHCQPSRPCPCLDKLKTETVLRIST

SEQ ID NO: 263704 - protein, 39 aa, Zea mays
  Clone ID: MRT4577_17210C.1.pep
GACLMQVDTFWSREWRRYNSVFSVVNVLVCRNFQVSFCC

SEQ ID NO: 263705 - protein, 81 aa, Zea mays
  Clone ID: MRT4577_172110C.1.pep
KWGKKNPSLKKKSPPAKAPLFLGVAPKKKPAPNFFKPPGNSGKPPHPWGLGKNSKCNPSNFCSHRSAPMEIIIIYQAWGGG

SEQ ID NO: 263706 - protein, 14 aa, Zea mays
  Clone ID: MRT4577_172111C.1.pep
MGKPCLGQTKARIR

SEQ ID NO: 263707 - protein, 107 aa, Zea mays
  unsure (1)..(107): unsure at all Xaa locations
  Clone ID: MRT4577_172112C.1.pep
VNYKTGGSHWVIDSGCTQHMTGNPQMFTSLDENVDGQDKITFGDNSKGKCXGLGKVAISNDLSISNVLLVAPLSFNLLSVGQLCDLGLQCLKKKKKKKKRKKKKKKR

SEQ ID NO: 263708 - protein, 119 aa, Zea mays
  Clone ID: MRT4577_172113C.1.pep
MPIITPHIMMTHNRLKNIKPTTMIPISTNRLRKSLRKHHTRRKHNTQRSTITILRRRLQMPQRRRITMLNTPPAIITTGRSNILEPIIMTTDINQPAITPLELTNHLHYQAHKQAHKSA

SEQ ID NO: 263709 - protein, 36 aa, Zea mays
  Clone ID: MRT4577_172114C.1.pep
KKKKKKKKKKKKKKKKKKKKKKKKKKKKKKIIKFKK

SEQ ID NO: 263710 - protein, 155 aa, Zea mays
  Clone ID: MRT4577_172116C.1.pep
KKKKKKKKKKKKKKKKKKKKKKKKKKKKKKKKKKKKKKKKKLPSRGGPFKRGEIPAPGRAVIRGPDLGPKLGEIRAKVVPWGKLFPVQISPKNTTGNHKGKTRGGLRGGLPQFNGVGLTALFQGGKPVGPVVLINGPTPGKGGLGFGALFRFLVN

SEQ ID NO: 263711 - protein, 77 aa, Zea mays
  Clone ID: MRT4577_172117C.1.pep
ELIVTIQVFNLKNAYRKLTLPTKELLEYLVTTRSLKSCYLYKHNNLDVPREFREHITFLFIFQYLSRIFVNPSSIDT

SEQ ID NO: 263712 - protein, 175 aa, Zea mays
  Clone ID: MRT4577_172118C.1.pep
VPTLLSSQYAPAPSLEVNGRSVPSPLRPSACFYSAPRRPSTQPLAAVYRRSGNGPPPCPPYSLQPPQGYAHPTAPRLPPPSARHPAPRHFVEDRVPRGRCRCRCRCSALPSSWRRWWRAWRNGAHWGGSIAWVPGVGGVSLRPRAVAAAGLPLGRAHRADAWPLLHNAWSGPSFP

SEQ ID NO: 263713 - protein, 106 aa, Zea mays
  unsure (1)..(106): unsure at all Xaa locations
  Clone ID: MRT4577_172119C.1.pep
SGSLQGFQRIAHQCTPQCRQAFQFFISCRSRSFTLLEILRTSSFFSSKIISSCTENLSMCPKSIILQCFVVATFSVTTFLKTQNKTYTTGKGINTKNXYLGISNCC

SEQ ID NO: 263714 - protein, 74 aa, Zea mays
  Clone ID: MRT4577_17211C.1.pep
GKETNQSMWAIKCFIFPKNIHLSLQQILTLPAGAPGPMVLKQKMGFLEQPWGAEVSKFPTFFRGGGWFYFFNIN

SEQ ID NO: 263715 - protein, 129 aa, Zea mays
  Clone ID: MRT4577_172120C.1.pep
SRRATARVADGTVDVSTRHPHYSMHTHTAAVARALFTSKSNQSQTNVDLEVLISRARMMKGHGRHNLEGDPSWWHIFRLWLHVRARYRSAYGVRDAARPSFQAVSYCYSATIRGLRTTVYSLRVLLFVI

SEQ ID NO: 263716 - protein, 126 aa, Zea mays
  unsure (1)..(126): unsure at all Xaa locations
  Clone ID: MRT4577_172121C.1.pep
NSWTRSGGPLMRTSXADKFISFIHNLEIDTELTRACTVEGNAAGIWSEPTFPSDPPPNNSSSVTMPGRCTENSETEACNTANTRASQASTPTSMAVCEGDLLQPESTSNGILLNIVKRKGMPYGLV

SEQ ID NO: 263717 - protein, 51 aa, Zea mays
  Clone ID: MRT4577_172122C.1.pep
DICEFLNHVEDGLKDHYDIRMLTFIMVARLATLCPAPVLQRVDRLIEPLRA

SEQ ID NO: 263718 - protein, 133 aa, Zea mays
  Clone ID: MRT4577_172123C.1.pep
MPFASAVSTADWILPSRASLARLATQITTSFSASPQSPRKDGGFLTQDQPSARPRRPVTPPPSLPGRRTPRPSSTTSTVAGKENTASKPTSAVRWSTSSLPQASKIQSSVDSSKVVSTFRAPVLLGSAAPRPR

SEQ ID NO: 263719 - protein, 91 aa, Zea mays
  Clone ID: MRT4577_172124C.1.pep
KCKWTCCYSPHSQHVSSTFTGSSGKSLSTIRKSTTLGSSFPPSILPSSSLQTPMEDSHPHDGVPSGEDAPWRAGGAARVGGGVLQSLGGRR

SEQ ID NO: 263720 - protein, 64 aa, Zea mays
  Clone ID: MRT4577_172125C.1.pep
IQGVFIQFNSNRFFLKQLINKLVDGIIPTFLLKYFMETPPVENNKTARSFKTTCFCKKKLILLG

SEQ ID NO: 263721 - protein, 488 aa, Zea mays
  Clone ID: MRT4577_172126C.1.pep
YLQMGQEEISASGTSYLNRTEAANVEKIVTTFLRSGVVPSQIGVITPYEGQRAYIVNYMARNGSLRQQLYKEIEVASVDSFQGREKDYIILSCVRSNEHQGIGFLNDPRRLNVALTRARYGIVILGNPKVLSKQPLWNSLLTHYKEHECLVEGPLNNLKQSMVQFQKPKKIYNDRRLFLGGGQGVMHGTNFGAGASSQAADKRSGRGKEGQSFAPYGPPNGVHKPGVHPVGYAVPRMPFPPFPGAPHSQPYAIPTRGLHGPLGAVPPVHQPGSRNFGAARSNTGGPIGGHLAHQQNSQQAMGSIGSNFNYTGMENPSSQPSGGAQMSQTGLMTQVPVQGLSQTFRDGFSIGGMSQDFFVDDFKSQGSHVPYNIAEFSTQASQGGYGVEFTQAPQSGYSGNYMNQNSHPGYSHIGTTNDIVSQDHMAHGSHGMFTQAGYNDPSQDESSQIHYGMAAAGPLQSQGMMNPLYSQSYAHYNTQPQSLQPPPQ

SEQ ID NO: 263722 - protein, 77 aa, Zea mays
  Clone ID: MRT4577_172127C.1.pep
GDASSFPVTALRKCRQENANWAYYRLDKGRMDGSAVVDDHRTEPPYFDGCGLPDQSCRVVTGPGPVDTNKYKRAFIY

SEQ ID NO: 263723 - protein, 88 aa, Zea mays
  unsure (1)..(88): unsure at all Xaa locations
  Clone ID: MRT4577_172128C.1.pep
YHPFYQYHYSYTYFLTYTFNYYYHKYNNHHNDHNHKQHLFQAITISSSSFSLYXKHXANKDPXHTHKHKITEDVSATAAVDSYCYVFH

SEQ ID NO: 263724 - protein, 55 aa, Zea mays
  Clone ID: MRT4577_172129C.1.pep
LLYTLQVPPIGLPIAIASSSVKRHHNYLSKHRSSAPLPDLGDDILTNTWKLLLPS

SEQ ID NO: 263725 - protein, 147 aa, Zea mays
  Clone ID: MRT4577_17212C.1.pep
LEHYALTGGVDDIPPLGEARRACFSGVLASTVRPHRAQRHRLLSCGIGCVFVLFSARLVELFSTARFASSPVLKRVRRRASLRLWLISWPSPQSTCSPVTDLNTGVLQHWVDDPSDRRQRRQLPHRGLHCPAARSENTWRMSLFSNH

SEQ ID NO: 263726 - protein, 59 aa, Zea mays
  Clone ID: MRT4577_172130C.1.pep
ADEGYPAFVLVNRVSGDAIKHSQGEGHPVKLVPYYPGYHDESVLWTERRDVGHGFRSGR

SEQ ID NO: 263727 - protein, 176 aa, Zea mays
  Clone ID: MRT4577_172131C.1.pep
PPPARPAPKQAQAQSFPCPGAERPGCWRLGRRRHRWSRPIRGGPASDPEVRRTRLAPRSKRPGRRPPADPPGAGEGCQEHARRRFCCCGCYYYVYDPEAGRGASWNSCSRLAGQGGRTGEARASLCLVLWYAFACSLRLVASSPPPLGLRSLPAGRCYSQVCLVPNYHPTSGAPLF

SEQ ID NO: 263728 - protein, 139 aa, Zea mays
  unsure (1)..(139): unsure at all Xaa locations
  Clone ID: MRT4577_172132C.1.pep
PCRPLSWXIRSETFPVETSTLVQSETDCVNLLFIFEIMQAXFCTCVCXLKDPISCDLVQRGSVEIVXFFDLFFLPXTKSLPIYEMTDSVGNQHWVCKSYMADDHHHIGDGKLTGCLRRTTSVCYCSCIRRHLMRLQDYY

SEQ ID NO: 263729 - protein, 139 aa, Zea mays
  Clone ID: MRT4577_172133C.1.pep
TIFSSQKEFRKALGGSGPKKRGNGTLFLSRTITPIWGVFLNWPGLKIKFAAFFKNCFWAPPFVVQSFLFTPFGGGMKAPLFSFFAPPGLVHFLYNCFIFLAGPFFFFSKKKKKKIKEGRQKKKKKPKKKKKKKKKKKKG

SEQ ID NO: 263730 - protein, 77 aa, Zea mays
  Clone ID: MRT4577_172134C.1.pep
KMGPAPPQNGKLGPPKAGGPKSSPGKVTARKKARVLNQPPFTPRGGFAKKKRVLGGPGWPLRGGPPNWFLKAPKGGE

SEQ ID NO: 263731 - protein, 119 aa, Zea mays
  unsure (1)..(119): unsure at all Xaa locations
  Clone ID: MRT4577_172135C.1.pep
RRNHIWEQKAYARRIESVGNKSFWPKVSIAEEVNAPIGKRSVGRQRKNRVKSSLEGGAAKKKKSVPEEEKEKKLLRGKIKCPNCGQLGHRKASPKCPLNGSKKRKRKSRXNCTKQWFSK

SEQ ID NO: 263732 - protein, 38 aa, Zea mays
  Clone ID: MRT4577_172136C.1.pep
KKKKKKKKKKKKKKKKKKKKKKKKKKKKRKKKNKKKKN

SEQ ID NO: 263733 - protein, 152 aa, Zea mays
  Clone ID: MRT4577_172137C.1.pep
AWILLVGSFRLSLLRASPSLTLSSLWSLVEWASSWSFLHRRAAKLGLSLSWGFVFLSCGGPSFGAFFLLPWVGFVSCSPFGVGVAGVCLGLVLVFGCVCLVLGVAVFCWFFFSSSFFLFPGLWAFPAPVPLPPLSPLPFFPPPGSCSTSLLG

SEQ ID NO: 263734 - protein, 58 aa, Zea mays
  Clone ID: MRT4577_172138C.1.pep
PLDFKRLRFFSFFVLTRLPLGLVLFFNGWKGGFFISRVVPLKGKAASPPVYNSPCLSC

SEQ ID NO: 263735 - protein, 103 aa, Zea mays
  Clone ID: MRT4577_172139C.1.pep
LGRGVPFPLRFSPPFPLFSFVFPCVLWVALVLVGFLGAGCVPPRFFFALLRFFPGGPFFLGAPGGGSFFFSFFCFLFFFFFVLCSPCFWGFGLFLFQQLPNLP

SEQ ID NO: 263736 - protein, 119 aa, Zea mays
  Clone ID: MRT4577_17213C.1.pep
YYLHGSACMQTANVALAGYACISKPLSGIEAKQKQVVIAGVSKRRAGHESEAARRRREAGRASRATSHVAGRPSRPVLRRRGPHRSPRGSHRRPRRSHHGCGELRLRLSLRPRPASRYP

SEQ ID NO: 263737 - protein, 103 aa, Zea mays
  Clone ID: MRT4577_172140C.1.pep
CFWPQISPCPRQPLVCAGVPPECVSHKGCAPGQGPPKTCARVQVPVKTFLFVGPPPGRMYSNFAVLVLFTLAKIVVGSPHPLTKKIQKSIKKKKKKKKKKKKK

SEQ ID NO: 263738 - protein, 89 aa, Zea mays
  Clone ID: MRT4577_172141C.1.pep
MITRSKLVEQLRDYQIRSQHKRDVIGAISWGLLCCFLIISSYMTLYFRHFWLSAIIISLGILLPAGLYILRQRKLAKKRERRLLLPLSV

SEQ ID NO: 263739 - protein, 89 aa, Zea mays; identical to SEQ ID NO: 263738
  Clone ID: MRT4577_172142C.1.pep

SEQ ID NO: 263740 - protein, 29 aa, Zea mays
  Clone ID: MRT4577_172143C.1.pep
KEKAAQVLRLLLPPKLSKQQVCHFLLHDD

SEQ ID NO: 263741 - protein, 124 aa, Zea mays
  unsure (1)..(124): unsure at all Xaa locations
  Clone ID: MRT4577_172144C.1.pep
GWXAGGRRXGXTPXGRRXFLFSXKGVSDSXSSXXWLDPDAXTSVLGIFLGGGAGXWLFFLTXKRXKXXXALXXXXRFIYIPVTNWFNCKRLLRIYVLNHXSNSASLNXRHLSEALWNKTLPGNK

SEQ ID NO: 263742 - protein, 39 aa, Zea mays
  unsure (1)..(39): unsure at all Xaa locations
  Clone ID: MRT4577_172145C.1.pep
TSHSXXLRESXHSSRSXPXXXHXXXACVFXRXIANMLXD

SEQ ID NO: 263743 - protein, 50 aa, Zea mays
  unsure (1)..(50): unsure at all Xaa locations
  Clone ID: MRT4577_172146C.1.pep
IXFFFFFFFFFFFFFFFFFFFFFFFFFFWGGDGEFYPGRNNVWTTRFGRS

SEQ ID NO: 263744 - protein, 89 aa, Zea mays
  unsure (1)..(89): unsure at all Xaa locations
  Clone ID: MRT4577_172147C.1.pep
ATPSRSAPRTSPRPAPRGKRPPPRPPLGAPTRRRHQGGPCRQRGGLAAAVVGKLEIFLTXRLKRGLFALPLLWGFTGCSSKAKRYRGKT

SEQ ID NO: 263745 - protein, 200 aa, Zea mays
  unsure (1)..(200): unsure at all Xaa locations
  Clone ID: MRT4577_172148C.1.pep
APXXRKSHKSLAETMARXXRKARLEGLQTFXXCTTXXASQTGRAKVLXRRPRXTCKAPXRTPAGRPRQIDARKPLPPXRGSRSCRGSRFAAXXPSTKHAFLSCWSQXRQRKADDCAGGXXASESASKASWRNXXGGKAARCXAVGPLTXXPKRAAGKRRAKGTRCXXPAPSPTXRPXXEPAXVIAXXTWAPTTXAPXXAR

SEQ ID NO: 263746 - protein, 86 aa, Zea mays
  Clone ID: MRT4577_172149C.1.pep
LIFSMLSSFLNMRSVEITKYDFGKPKGCPFFPSAILFPVVVGAWPVLMLLSEHFFMLGLGALVSFGEYASVPCPMGARDSSVQNPA

SEQ ID NO: 263747 - protein, 39 aa, Zea mays
  Clone ID: MRT4577_17214C.1.pep
RDLTLVKPTHHDGNNAGSTKSFMHDLSMSPKKHTHLITH

SEQ ID NO: 263748 - protein, 49 aa, Zea mays
  unsure (1)..(49): unsure at all Xaa locations
  Clone ID: MRT4577_172150C.1.pep
QPFRYTIQANPTTNFSSKDTIPYQEAFSNILQKPLTSXPFISPPFFFTL

SEQ ID NO: 263749 - protein, 68 aa, Zea mays
  unsure (1)..(68): unsure at all Xaa locations
  Clone ID: MRT4577_172151C.1.pep
SLRTLYVDGRSQKVSSACERLCFICPSLRTRSRHPVKRYKKLLAEIFPRTQDEGPNDRKXGKLCEYIS

SEQ ID NO: 263750 - protein, 65 aa, Zea mays
  Clone ID: MRT4577_172152C.1.pep
RGADSHDVARVSCTLHSAWPRAYPTASSPSPTGRCALNVTQTSAPPQCAPAVALMSATPDGIPSN

SEQ ID NO: 263751 - protein, 259 aa, Zea mays
  unsure (1)..(259): unsure at all Xaa locations
  Clone ID: MRT4577_172153C.1.pep
NYGRVGGRVGGRVGGIISKTISKXGMLEVYNSLSEEGKKEFNKAYSASFYPCMDILYECYEDVASGSEIRSVVLAGRRFYEKEGLPAFPMGNIDQTRMWKVGEKVRSTRPEGDLGPLHAFTAGVYIALMMAQIEXIKRKXHSYSEIINERWSRYSLVIESPVGXNPFMRAXGVAFMVDNCSTTAPLGSRKWAPRFDYILTQQAFVAVDKDAPINLDLISNFLSDPVPGAIEVCAELRPPVDIFVPANPDFVRPKKKQFS

SEQ ID NO: 263752 - protein, 108 aa, Zea mays
  Clone ID: MRT4577_172154C.1.pep
FKFVDPFLSSSCNSRSYMHGDSSDPDKRSRGWGSMVKNMNGEVLVAGAGDTTRHASSALHAWRCAIVAYKSIHSSCNSVRFIANHIRKKNGCHGVSYSRHDAIRVFFF

SEQ ID NO: 263753 - protein, 583 aa, Zea mays
  Clone ID: MRT4577_172155C.1.pep
MAAASTLAFGHPKTLAAAGAKPLPAATSTSVSFPATHQPACLLSSPAPGSLRRRDVAAMVSAPPAVGTAMPSLDFDTSVFNKEKVSLAGHDEYIVRGGRNLFPLLPEAFKGVKQIGVIGWGSQGPAQAQNLRDSLAEAKSDIVVKIGLRKGSKSFEEARAAGFTEESGTLGDIWETVSGSDLVLLLISDAAQADNYEKIFSHMKPNSILGLSHGFLLGHLQSLGLDFPKNISVIAVCPKGMGPSVRRLYVQGKEVNGAGINSSFAVHQDVDGRATDVALAWSVALGSPFTFATTLEQEYKSDIFGERGILLGAVHGIVEALFRRYTEQGMDEESAYKNTVEGITGIISKTISKKGMLEVYNSLSEEGKKEFNKAYSASFYPCMDILYECYEDVASGSEIRSVVLAGRRFYEKEGLPAFPMGNIDQTRMWKVGEKVRSTRPEGDLGPLHAFTAGVYIALMMAQIEILRKKGHSYSEIINESVIESVDSLNPFMHARGVAFMVDNCSTTARLGSRKWAPRFDYILTQQAFVAVDKDAPINQDLISNFLSDPVHGAIEVCAELRPTVDISVPANADFVRPELRQSS

SEQ ID NO: 263754 - protein, 203 aa, Zea mays
  unsure (1)..(203): unsure at all Xaa locations
  Clone ID: MRT4577_172156C.1.pep
VVKFQGHTAIDMAPTQVVAMVLLAVGSALLSAAADTAAAPSPQPFVWQKAHATFYGGADASDTMGGACGYGNLFSEGYGTRTAALSAVLFNDGAACGQCYKIACDRKRADPLFCKPGVTVTVTATNFCPPNDALPNDNGGWCNTPRPHFDMAQPAWEKXIGVYKGGIIPVMYQRVPCVKXXGVRXKINGHDYFNLVLVSNVAA

SEQ ID NO: 263755 - protein, 137 aa, Zea mays
  unsure (1)..(137): unsure at all Xaa locations
  Clone ID: MRT4577_172157C.1.pep
CYFRCTYCYIXFAAAGLDLYCNNVMDTMTDECGQCYNLSYLTXTIPXAQTLISTDHPLLPYQRLGPCNDCRRNQPLPLCSHMSSDLTRRMAFRCHPQHKRHRLPSGHNLCMTDYIQRISADWPHIPHWEAFTMDVHN

SEQ ID NO: 263756 - protein, 45 aa, Zea mays
  unsure (1)..(45): unsure at all Xaa locations
  Clone ID: MRT4577_172158C.1.pep
VQAPHPPRGSDNILNIRNXQHEPSNTSTTIINHQDHQDHHYSHYN

SEQ ID NO: 263757 - protein, 51 aa, Zea mays
  Clone ID: MRT4577_172159C.1.pep
MGSNMSYVTESWAFIDVKRPFNGTVSIRGRIIAGTCHNAKMNRTIIRRRSY

SEQ ID NO: 263758 - protein, 129 aa, Zea mays
  Clone ID: MRT4577_17215C.1.pep
MAPTTKSAGKKSAGKTGRSAIADVVAREYTIHLHKRVHGVSFKKRAPRAVKEIRAFAKQAMGTNDVRLDPQLNKKVWESGIKGVPFRLRVRISRKRNDEEGAKEKLYSYVQAVNVKDPKGLHTQIVEDA

SEQ ID NO: 263759 - protein, 95 aa, Zea mays
  Clone ID: MRT4577_172160C.1.pep
GSAGPGPKGLGCVYVGVQRLKVFLLLLVRVKGQDGRIRGAVLWALRRPSAYVCMTFGRPCYSARSARRCAWLVGVRYCPRVPWQGSKGERACLLE

SEQ ID NO: 263760 - protein, 131 aa, Zea mays
  Clone ID: MRT4577_172161C.1.pep
RFNQLFVTTNLDEHTHAPRLSRFFLPRPGRGLARLIAASKGQGGRSSSRLSRSGGAGARGAGSGSRAAERSPAASPDRRRQFAGLHIVGDFSESEAGFRDGGAAGHGDREARLRLASYSPGNTPCSCTGGC

SEQ ID NO: 263761 - protein, 77 aa, Zea mays
  Clone ID: MRT4577_172162C.1.pep
SPGKKGGAHFKKIPKGLPLYPPNPVFFRQTPGDFPPPRGFKNFYPPFLSNRGKEVWGKPVGHFPPLFNHPKTPFIKN

SEQ ID NO: 263762 - protein, 106 aa, Zea mays
  Clone ID: MRT4577_172163C.1.pep
KAPTHVQTLGHPPETKNTHTGSSCPSNKVFAPSPNQHSEVSPMDHGPQFCYPSTPKVTCPVSLEEYYYDQSDRFPSNANIIPPLLHLRVHVKHPPLPFLISCPPHN

SEQ ID NO: 263763 - protein, 49 aa, Zea mays
  Clone ID: MRT4577_172164C.1.pep
VQNVISCHFMWSRKNVYIFVFLQKAENFIFLLDTSLPVYAFARTNWVVH

SEQ ID NO: 263764 - protein, 76 aa, Zea mays
  Clone ID: MRT4577_172165C.1.pep
VGLSVMGKYMVAPRLGLLGRWLLSVVAGVCIPRVVVTCRDRPCASSAPLGIELGFRRKLARMRDRMRERMRGRTRG

SEQ ID NO: 263765 - protein, 291 aa, Zea mays
  unsure (1)..(291): unsure at all Xaa locations
  Clone ID: MRT4577_172166C.1.pep
MEIEARQLLLAVFGIVIAIGFANAVQGETAPPVVVGLAKCSDCARRNMDAEAAFKGLQVAVKCKNSKGEYESTAVGQVDRSGAFRVPLAAADVVGEDGELKSECFAQLHSASSAPCPGQEPSKIVAAPPGHDANGEKTYVALGGKVYRSSPECASAFLCHPFFHSIMHHHHVGTHKHVVIPHLPVPDHGHGHSGVPVPVPPVTKPPVDVPEHKPAPVPVPEHKPPSSTPVDTPPSTPVGTPPSTPVDPAPSTPXFAAEANPQLLPPVXFKKLLPCFKKLPFFPPAAMETRH

SEQ ID NO: 263766 - protein, 173 aa, Zea mays
  unsure (1)..(173): unsure at all Xaa locations
  Clone ID: MRT4577_172167C.1.pep
KNFSPPPPPFCLPPLPQAGQGHPPIRAGPGLPNVPPVATGPGPFFSKPRGPGGPNRVPPGGDQGGGFNPNRGGQGGGFGRGPFPPQGGGPPFPGTGGPRGNGGRGYGGGGPNFPQGGPNGGAGPGRGPNSFQXGWVPPPPPVWGLAIMWPGFAPDMVGAPEGLWRPFALLACF

SEQ ID NO: 263767 - protein, 138 aa, Zea mays
  unsure (1)..(138): unsure at all Xaa locations
  Clone ID: MRT4577_172168C.1.pep
AKPAPVPVPEHKPPSSTPVDTPPSTPVGTPPSTPVDPAPSTPVYSPPKPTPSYYHPPAQRDATTGPXLFKKLLPCFKKSPFFPPAAMETRQSALECLVSVFFGGLLQVMPFPQNKAVTLISTHEGWISFKSVRSIYWR

SEQ ID NO: 263768 - protein, 87 aa, Zea mays
  unsure (1)..(87): unsure at all Xaa locations
  Clone ID: MRT4577_172169C.1.pep
RQRIGLVSTMFTSGLVGDQFQLLYMQHEHGGRPGILGDVLMFVGVHLEMIITVLVTMLVQPIVVYDVVDAXLHQIKWSSSIMWAQIV

SEQ ID NO: 263769 - protein, 49 aa, Zea mays
  Clone ID: MRT4577_17216C.1.pep
LTILIFALRLRQSSTQVRKNLTVRLLNNNPTTILTAIKTLSHPYQIHTG

SEQ ID NO: 263770 - protein, 96 aa, Zea mays
  unsure (1)..(96): unsure at all Xaa locations
  Clone ID: MRT4577_172170C.1.pep
CFVQAYHKRYPIDGEDXVQLEPCATEYQXWVSAIXEGGFAPCTRSVINTCIRACKEYGLNKMGSISTEMEGKTEDGVIHDPLVCLKKTKHMSDYDK

SEQ ID NO: 263771 - protein, 199 aa, Zea mays
  Clone ID: MRT4577_172171C.1.pep
MRSNPATPANPSGSRKRGHYNSANKSRRKGDTAYRCSPHLIPPMMKLLSDEQRGFVRKIGFGSLLSMADFEMDRALTLWLIDRFSCDTEALEFEGDVSVPVRPLVASVLGIPSGPIGRGGPPRRRRSPHSAPLSREERRETGRRNARHDPRGTLLYGLHDGDTCDLSRAEHDQACQPVLVWSRSTGRQPQADGLVRLRC

SEQ ID NO: 263772 - protein, 73 aa, Zea mays
  Clone ID: MRT4577_172172C.1.pep
TQARDFFLTGHKLLTDHIGLGFYRRTLSHFFGPPPRLKKEPTHCTGTFRLTAPRAKKERQKQWTPGKNYKGRP

SEQ ID NO: 263773 - protein, 89 aa, Zea mays
  Clone ID: MRT4577_172173C.1.pep
PPTKKVLEGVFFFPSKPLPNKVVGFSTPLMPRIQGGPVPGILLKFQKEEPEPPLDFFPEKSPLEVKKIPVPKEPLEMLLALGMAPLPGF

SEQ ID NO: 263774 - protein, 73 aa, Zea mays
  Clone ID: MRT4577_172174C.1.pep
ESATAVLSSAISYSSAGAGHLIGCSDRSLSTDRRRMSDLPQDAGYTGPLCGFMLPALATRQISLPSGPAHTVR

SEQ ID NO: 263775 - protein, 86 aa, Zea mays
  Clone ID: MRT4577_172175C.1.pep
ADPNALSPYRQYAVSVVIGVYTASSLPRSAFLGCGITCVLLSTRDTPGRQSHAVKPERRYGGADLGCGHEARVEGISRQYESRGCP

SEQ ID NO: 263776 - protein, 72 aa, Zea mays
  Clone ID: MRT4577_172176C.1.pep
PRTMTLSSQLTSDIRNALRQPRTGVGARRRDGSNSPGEESCYAIADLPRASVDVSIRPWFRAPPTPGRRCRP

SEQ ID NO: 263777 - protein, 44 aa, Zea mays
  Clone ID: MRT4577_172177C.1.pep
SSTYTLATTSSILATSPTTCRDDTLIYFYLYTLHLTIIYYANKS

SEQ ID NO: 263778 - protein, 80 aa, Zea mays
  Clone ID: MRT4577_172178C.1.pep
EDGEHIFPLCVERKMVVWVACSVARPPGVLGEFRRFFWFPNPVKWLPFVVLVSCTLHGLWVSVCPVIVQAYFFKPTRQVF

SEQ ID NO: 263779 - protein, 448 aa, Zea mays
  Clone ID: MRT4577_17217C.1.pep
MATAAAAAAPLDDAKAKNVIRQVEFYFSDSNLPRDGFLRRTVEESEDGLVSLALICSFSRMRSHLGLEGDAKPETVPEETVLAVADILRRSTALRVSEDGKKVGRSKELSKPDEVIEQVDSRTVAASPLPYNVKLEEVESFFAQCGKVNSVRLPRHVSDKRHFCGTALVEFSEEDEAKGVFEKNLIFAGADLEIRPKKEFDTEREAKKEAYEKSHPNKSSHGEGYPKGLILAFKLKKTADDGETGKSGGGKVDDTDLTKNNGASDATEKSSVENDEKITENKGNVSEEQADAVEELKGLSAGETLQSVPKVDKSPSNKDQDIISREDLKEEFTKFGTVRYVDFSIGEDSGFIRFEDPAAADKARAFAAIADEGGLTMKGHIVILEPVSGQAEKDYWSAIRGVQEKYKDSRNNRGRDWKNNRGGKQFGGGKRGRHFDSRDRASNKAQKV

SEQ ID NO: 263780 - protein, 149 aa, Zea mays
  Clone ID: MRT4577_172180C.1.pep
MVDDVRDMPRRSSRTQTPLQILRDATTRNPLQTKQHAPPPTYDRDDAMSMIARIAATIAQGMASTTPSAMAHRCGNAVLPPRNMHNETVASKLVDGAPAPSAINDDCCYIHYNAIQHRHINYGRIDQRVATLLPRTCWNYLTTQAWCYD

SEQ ID NO: 263781 - protein, 51 aa, Zea mays
  Clone ID: MRT4577_172181C.1.pep
MPSLTACAGRVHIYAQNASWLEAWTTRVASPSAWHLAAEGASSNSANCDVG

SEQ ID NO: 263782 - protein, 63 aa, Zea mays
  unsure (1)..(63): unsure at all Xaa locations
  Clone ID: MRT4577_172182C.1.pep
MAEVMPMESYYADGPGGRMSDGFLYXYRKGVDVRFVSVCHGSFLTPAEFEELAGGSVVPNPLR

SEQ ID NO: 263783 - protein, 102 aa, Zea mays
  unsure (1)..(102): unsure at all Xaa locations
  Clone ID: MRT4577_172183C.1.pep
MAAKIXPSLMLLALSACVANATIFSHYSQATIAAILSSSLPSMTAXVCENPALKPYRLQQAIATSNXPLSPVCFQQLPALSLVQALVQTIKAQQLQLLVLPV

SEQ ID NO: 263784 - protein, 153 aa, Zea mays
  unsure (1)..(153): unsure at all Xaa locations
  Clone ID: MRT4577_172184C.1.pep
EHALYGKNKRISEGKEGXKKNTARPFXEKDCHDIKAPAVCTVRYIRKTLASRTQGTKIASEALKYRAFEACLLDLQGDEDQDYKKIRLRAXEHVQVRNVLTNLXCMNCTTGILRSLAKKRQTSVXAHVDDKTADKYMLSXFCISMPRRRPYQV

SEQ ID NO: 263785 - protein, 222 aa, Zea mays
  Clone ID: MRT4577_172185C.1.pep
RVAVDHPSTGRRPPASAAPSPGGSSITPGGSPHPTRHQPSPSPSLVQQVQRIPPHRPLHHQQQGVPAPLSSRSGLSWCLPPPARAPHRDAWSPATMDAPSLNSDSPCFLKSELPLATAPFPQAVAPTTSGGVALLPFADVAVSLPSGQTAPPPPGRASCCWRPDPRCQCRLTSDLRRRTAPRPHRPTPASSGPCQRAPWPASAHNGRVAGVLSHITSLLTYD

SEQ ID NO: 263786 - protein, 143 aa, Zea mays
  Clone ID: MRT4577_172186C.1.pep
SGRLTSKSDVYSFGVVLLELITRRKAVDGGQISLTENFTQALAKRNKIREFYDVKVADENSLRILDGIGKLAAKCLAMEIEKRPEMKDVAEQLRMFRKTQYQSQEKIFFFGWVRRSKQPPQNMVQIHKNRGNQVLVHMTHIVY

SEQ ID NO: 263787 - protein, 646 aa, Zea mays
  unsure (1)..(646): unsure at all Xaa locations
  Clone ID: MRT4577_172187C.1.pep
MDLPENELQRYIKDNGKPMWTAHNNHNIRYFKEEDIRIITNNYNTFLGKGAFGEVYKGVLDDNSLVAVKKYIHNVKEDFAKEVIVHCQINHRNVVRLIGYCIGENALMMVTEYISRGNLSDILHSSEISISLETRLSIAIGCAEALSYMHSQMYGKVIHGDIKPANILLDDNLTAKISDFGISKLLSTDNTLYTTHVLGSIGYMDPLFARSGRLTSKSDVYSFGVVLLELITRRKAVXVVKLALXNFTQALAKRNKIREFYDVKVADENSLRILDGIGKLAAKCLAMEIEKRPEMKDVAEQLRMFRKTQYQSQEKIFFFGWVRRSKQPPQNMVQIHKNRGNQVLKAEVQTQEVSKVDKDVHNVTVVRDRSSKLYSFGSSQGIELEKLLEASAEVLGKGKYGTTYKTTLHDGSTLIIKRLKTLDVPEAVFKKRIVAIGTIEHELVVPLRQYYYSKDEKLLVYDYFPNGSLASNLHGKDVKPVGWETRSAIALSVARAVAFIHSTNAAASHGNISSSNVLLTSNYEGLVSEHGLKTLVSIPTLLADNNIAQKDDVYSFGVILLEMLTSKSPIVTDEPDLVDWVLSIPHEHWATQAFDKKLLTNKTVVEELVQFLKLAIHCCDKNPTMRPAMAEVVQRIEGIRRFYSWE

SEQ ID NO: 263788 - protein, 31 aa, Zea mays
  Clone ID: MRT4577_172188C.1.pep
MASLRGLPSLLSPSKPLLRRRFPDPRFAFYF

SEQ ID NO: 263789 - protein, 99 aa, Zea mays
  Clone ID: MRT4577_172189C.1.pep
RPRSLSPRKFPLPRAAELANLDNPSVSGIGMMTTTTSAPPPGFISRWCWCVRARAGKAEGGRRIGTDPHGTAPRGPRHTCRDQSSPAAAHSSDAERIKT

SEQ ID NO: 263790 - protein, 103 aa, Zea mays
  Clone ID: MRT4577_17218C.1.pep
MTEPTTEMWTGAACAVSRRRVDARARNEERVWSRRLAGGHALPALDDAPDLPSNGSSLRDLDCTHSNYQTLTRPVLLFIVTTSPCQDWVICAPAAFLGCGSRF

SEQ ID NO: 263791 - protein, 83 aa, Zea mays
  Clone ID: MRT4577_172190C.1.pep
NYCAIEKDLWGSGTVNDEYLEALNSVFTNFPRLRATEPATLSISHLVTALKTGSEACQEAALDALFLLRQAWSACPAEVSRAQ

SEQ ID NO: 263792 - protein, 73 aa, Zea mays
  Clone ID: MRT4577_172191C.1.pep
MSPDAPEAEIFKEYAKKHEGQNGTTIPAAATGAAATGKSTSAAPTADGAGRQPCAVFFYLVSALFASVAVLLG

SEQ ID NO: 263793 - protein, 41 aa, Zea mays
  Clone ID: MRT4577_172192C.1.pep
SLAAKKKKKKKKPKKKKKKKKKKKKKKKKNKKKKKKKKKPP

SEQ ID NO: 263794 - protein, 174 aa, Zea mays
  Clone ID: MRT4577_172193C.1.pep
GRFFFFFFQIHFQFQHRFNSSKTASLLAILAAYAPEHRFSFSSESNSKTVSRTASLHRHTFNRFNLSFSRHNRKFQQHVFNSPNDGGWSGPSCARLPDGRCSRAGVIAARGIRPTDVSARQLQAVAWWGWRRPFTCLNAGDLPIRASVGDSPSRAPRDDSASRAPFGGAFGRRC

SEQ ID NO: 263795 - protein, 117 aa, Zea mays
  Clone ID: MRT4577_172194C.1.pep
LGTMVRHRLSSLAISSWVAELEEYQQTASVIQWCRSGVRKPSSPARVLPSIEPQPRLSPVRAVQWSATPPVALREPHSAAEGVTRVMLIKPSVWSTWRPSPLGSILARVSNKKNGNE

SEQ ID NO: 263796 - protein, 140 aa, Zea mays
  Clone ID: MRT4577_172195C.1.pep
PRSHPWSAWGAPSIVEKVLAGPVVNEKLAKMGPRSLQGELNMPPGRTVFRQLSRIASRSCKCPTPGCYLLLADADLFCAAAPLFHAPKMLLRFSLDSPASRAGAKNAPACALPAPRRPAHAEGYKKLIGIRWMRVFPFFF

SEQ ID NO: 263797 - protein, 111 aa, Zea mays
  unsure (1)..(111): unsure at all Xaa locations
  Clone ID: MRT4577_172196C.1.pep
KKKKKKIRRDKINLXAVPFKXSNLTSPSIQHHIFFLVPPKLNSLPFILQLPTWKNPDFPQLNSLSKHPPFSNCHNTKKPLTNLPFPTISHPKFLIEPPLYFPIKPPRCFCF

SEQ ID NO: 263798 - protein, 88 aa, Zea mays
  Clone ID: MRT4577_172197C.1.pep
QELMIWDTRSKFISKPSHLVDAHTAEVNCLSFNPYSEFILATGSVDKTVALSICGNLKLILHTFESHKDEIFQVHWSPHNVTILASVV

SEQ ID NO: 263799 - protein, 69 aa, Zea mays
  unsure (1)..(69): unsure at all Xaa locations
  Clone ID: MRT4577_172198C.1.pep
ELLQRSGGGGGGFHHKVSGIYTSDSALPAGTYCTFHERQFTVYDRRPGETVAQRXVGNLTIIFGVGLWA

SEQ ID NO: 263800 - protein, 58 aa, Zea mays
  Clone ID: MRT4577_172199C.1.pep
LARSRVHLFCRRGNPSLWRELALRNGHLSLRFKYAKDTPGRTGRHQQRRCHALGVAVH

SEQ ID NO: 263801 - protein, 62 aa, Zea mays
  unsure (1)..(62): unsure at all Xaa locations
  Clone ID: MRT4577_17219C.1.pep
SQQAGGSPATIATQPQLXPFDQHVAPNAGTLXQLPPPPPVNQHALTNPAVFXQQPSIGGALP

SEQ ID NO: 263802 - protein, 120 aa, Zea mays
  Clone ID: MRT4577_1721C.1.pep
FHYASQRVFLHLCHFSTSRVPPSNLWSPNLSFIYSTSGGSSFSLLCGRSTIVPRAPPVLLSPPCGSTIAVEIIAQAPARPHHASLWPLPLRWASRRRTLYISRSACIPQCRMRSPAGAHE

SEQ ID NO: 263803 - protein, 117 aa, Zea mays
  Clone ID: MRT4577_172200C.1.pep
GPVKVKKTRLFQGFVSLSPKGGEAPRQAPVKIIKPGPVEGDRYNFKSIVQRPPGKNPGGGGGGDSPEGGPPRRSNKKGGAQRAFGFSSKQTSRPFPVPPGGKNKTCLCPPGICFLFF

SEQ ID NO: 263804 - protein, 135 aa, Zea mays
  unsure (1)..(135): unsure at all Xaa locations
  Clone ID: MRT4577_172201C.1.pep
RPGRQPRPKQQQGGHGHKEQQDEHEEHAEKANTXPATTTNESKQERNGRDKQATARDGRTRATGQEGGQKERAKRDARKAAEGKGKDKAKADNTTKXKHKQEADAAATAKATQGKTKTRSHRRTQRKQGAKRNGR

SEQ ID NO: 263805 - protein, 55 aa, Zea mays
  Clone ID: MRT4577_172202C.1.pep
QNDYALLSFLSKSQPKPKIMTVPRFAFKTEILPDFCGQEAANMAKLEGCFVDRYF

SEQ ID NO: 263806 - protein, 180 aa, Zea mays
  Clone ID: MRT4577_172203C.1.pep
NDRAEPSRTRSATELHRAEPSLTRFVSSPTPTENGICSAVGHYTASARAAPCPAPAQGNNKPTENAVGNRPPPAPRRGEAGGQGQPPDTPRVGHGARSVTDVDARPNLALERGRGGRRGRTDGTGDCEPRLVSGRPRATVTARSLLRVRPGPGPVQWRGACRAAGSHGLSIVQTGQAVAE

SEQ ID NO: 263807 - protein, 147 aa, Zea mays
  Clone ID: MRT4577_172204C.1.pep
LGSSRPAVARARGPPPRPRQDGQGDAPAALGTQVKRREATVPPGSPAGVARFALPAIRPARTVLYLYIHLHTTTCTCTTTCCCTILNTSALLLPCLLACTSHSAFLLERSTARVASGHGRSSVWVCPLHCKAPFLGTPCMPKLADVY

SEQ ID NO: 263808 - protein, 39 aa, Zea mays
  Clone ID: MRT4577_172205C.1.pep
MSASRLGTARTESGKCKSKNRKSVTKQLYASSHHLLYTN

SEQ ID NO: 263809 - protein, 93 aa, Zea mays
  Clone ID: MRT4577_172206C.1.pep
SCVLLQLQRLVTGCSRLADMLVVRSCHEVRARVIVMPVDASSQPALRICRSADGRCCTSSPDCSEHPGAGTCTCHNGSATHGCLGWRRRIPAA

SEQ ID NO: 263810 - protein, 35 aa, Zea mays
  Clone ID: MRT4577_172207C.1.pep
MWRKGGGHEDKGDIRKVDGMRGYYIPPPNKELINP

SEQ ID NO: 263811 - protein, 65 aa, Zea mays
  Clone ID: MRT4577_172208C.1.pep
GLLMQFHQHKLCIAVVLRTVIFFHCLSCILYYPCLHIHLHTARSLLSAIATPADVSLVPLLRPDI

SEQ ID NO: 263812 - protein, 103 aa, Zea mays
  Clone ID: MRT4577_172209C.1.pep
ASDVRISKENTLNAVAIVGHDESAWANAERFNDLRSDDGAVTLREIREYDNIAELVIRKVTIQRLVSEIDHDFEIELRFQSSAVTMMKDAMDLNIGVFYEATT

SEQ ID NO: 263813 - protein, 59 aa, Zea mays
  unsure (1)..(59): unsure at all Xaa locations
  Clone ID: MRT4577_17220C.1.pep
LWHGHPPLLENDVDILYLYYHVDSRRIVAIXGCIAEIGAILEWIILDTRGAVEPHAAHY

SEQ ID NO: 263814 - protein, 75 aa, Zea mays
  Clone ID: MRT4577_172210C.1.pep
GCQHFQKQGACCPFPKSSWFPSAFSLLVWKKQWFAQLVLLLIHRYYLKKAPSPKIRRFRILLNSNQTPCMSFTNV

SEQ ID NO: 263815 - protein, 79 aa, Zea mays
  Clone ID: MRT4577_172211C.1.pep
VSRQLHFSSMRHMQCSWHCIPLCDHLNTLVVEQDLPQPWPFVEKAMTSSLLGRRQAFNKSWGTGRFAPQTLWVKIARAE

SEQ ID NO: 263816 - protein, 77 aa, Zea mays
  Clone ID: MRT4577_172212C.1.pep
SYSAIHSLAAAEQSSTILSDTIAPSPQLMLPPEHALQGNGTNNVARIDRHGFAGDIHGRNNVRASASPEESLSQKKA

SEQ ID NO: 263817 - protein, 90 aa, Zea mays
  Clone ID: MRT4577_172213C.1.pep
RRNYPGKSKHRSKTRSDHFFFFRKTLFFWGEGMHRLKDEKTDRSPPIWVMIVTSCKAPECNSYQARFGLYLYRIPPYCHIFFFFFFFFFF

SEQ ID NO: 263818 - protein, 129 aa, Zea mays
  Clone ID: MRT4577_172214C.1.pep
IGYLEAGRDLASPHAIDSLKCGTPAMECPPPYITPATKFQLAGSCRYGRGAPTATARKSCSLSTSKLSRSPSALRGLPLLRTSSTTSSRGTSLTRANRTRRTGVLHPSEESKVPHRRCPRILWIPTPLL

SEQ ID NO: 263819 - protein, 78 aa, Zea mays
  Clone ID: MRT4577_172215C.1.pep
LVKDNRSAHNDAGCAKPNYTQSTKRACAWDAVVTAIDKALNHPSFSSCSMNQQPVTDRTHTCSISNACTSQQSQRKPT

SEQ ID NO: 263820 - protein, 262 aa, Zea mays
  unsure (1)..(262): unsure at all Xaa locations
  Clone ID: MRT4577_172216C.1.pep
RNTPLLRWHDEERIKDGLLRHPADAPVWKRFDEKFPQFASDSRNIRFALATDGFNPFGKMSSMHSCWPVVLVVYNLPPWLCMKDHNIMLSLMIPGPKSPGYRIHVFFEPLLEDLKDLFQTGISTYDASRNESFTLQGAVLMTISDLPGLGMLASHMVHGKFACPPCGENVWTKQLKNGRKSCFLGHRKYIDLDHPYRFDASSFDGMIELGKEPSTYYGRPILHEITALGNFKDSXTYKSVSSLVSLPYWGXYILRYHLDVMH

SEQ ID NO: 263821 - protein, 237 aa, Zea mays
  Clone ID: MRT4577_172217C.1.pep
MPSNPSAENGASESPVDGMSIVPHDPEGINGQTTCRKGKKRGRHFDREVRAEILQGSYLTKADKWVQIKAKQDEDKFAARLHSFSGNSVKPKGSKSSCEKIEMARSLNLIGAPWKNKALRSDEHRPVVRPEVILCVEIYQKTYASVKSQELLLLGSQFLTDLRDNIYCLTDKVMKVAGQHDHSGYFLIEDTFYNDTRHFFVTDYSKSILGIVLRRLSFPLCHYFGSSFHFVCLFYSL

SEQ ID NO: 263822 - protein, 62 aa, Zea mays
  Clone ID: MRT4577_172218C.1.pep
HRGKAARDFIMKDWAISSKSDHNGSYLPMFPIHSSLSNDVRLGLISQVQNLLECSFQHPMHI

SEQ ID NO: 263823 - protein, 88 aa, Zea mays
  unsure (1)..(88): unsure at all Xaa locations
  Clone ID: MRT4577_172219C.1.pep
NFDGYHNPIAYLRKFLXPRIQGLSIYQKKFFALFVGLTKSSQYLHHTEFIIRTDHKALTFLDDQMLHSEWHKNAMTNLIGLHFPVDYI

SEQ ID NO: 263824 - protein, 48 aa, Zea mays
  Clone ID: MRT4577_17221C.1.pep
MFIFFLNKPLCKNQILILNGIISKNYEDDLKLLIYIVTYKMFFICVHK

SEQ ID NO: 263825 - protein, 165 aa, Zea mays
  Clone ID: MRT4577_172220C.1.pep
MASVKLGSKPDAFKRQGQAWFCTTGLPSDVTVEVGDMSFHLHKFPLLSKSAFLERSIEENSDQEECIIKLNDIPGGAKSFELVARFCYGVKIELSPANVVYLRCASEHLEMTEEVAEENLIAQSEMFLNQVVLRSWKDSWQIGNCDDLLPMLKPQIGTDARVLAS

SEQ ID NO: 263826 - protein, 59 aa, Zea mays
  Clone ID: MRT4577_172221C.1.pep
SLCCRRAQSWRGFFSVSWRLNTTMKFNIVNPVTGCQKKLEIDVVQKLLSFYDRRYFSVV

SEQ ID NO: 263827 - protein, 69 aa, Zea mays
  Clone ID: MRT4577_172222C.1.pep
MPGRVFIKKMVLILTYTFLVQKNFNFFFIWGTSHIMLQATKNFLVASPFQGKNGVRGHIPCPNFWHFCT

SEQ ID NO: 263828 - protein, 97 aa, Zea mays
  Clone ID: MRT4577_172223C.1.pep
MAKRLIPSLNRVLVEKLLKPSKSAGGILLPETTKQLNAAKVVAVGPGDRDRDGKLIPVSLSEGDTVLLPEYGGTEVKLAEKEYLLFREHDILGKLEE

SEQ ID NO: 263829 - protein, 60 aa, Zea mays
  unsure (1)..(60): unsure at all Xaa locations
  Clone ID: MRT4577_172224C.1.pep
SHKLQANEGKQKAWRRKRKYELASXQPTQSSQEIIXRRVTDCTGNVKTTALRVXTVNYSR

SEQ ID NO: 263830 - protein, 142 aa, Zea mays
  unsure (1)..(142): unsure at all Xaa locations
  Clone ID: MRT4577_172225C.1.pep
RNREQRGRGAARAGGRTSHHNXHGXRGAXHQRKAARPXDRPXXEPRRQERAQRAQGGGGTXXRXXTGDXREXRRTKEEARARPXPXRSHDNAGHDEPXNHGAXXEHGKTXQTRXGPDPRXTXXNPNXXRDXKANKXGHXEKP

SEQ ID NO: 263831 - protein, 69 aa, Zea mays
  Clone ID: MRT4577_172226C.1.pep
TSNQRRAAEKRKNWGLGEAKKTKLELLLMPKVKTRDKLVIDSIADDQSAVFLYIYRGGGLDPSQTNLVS

SEQ ID NO: 263832 - protein, 60 aa, Zea mays
  Clone ID: MRT4577_172227C.1.pep
GRGSVERVFSDPDCVKCMQFSSAQSASCMGLGSILWALCARHFAPSPPRCGGATCGSGPE

SEQ ID NO: 263833 - protein, 124 aa, Zea mays
  Clone ID: MRT4577_172228C.1.pep
SDRGAGCLSPAHLRSKSLSLSVADLSSAAMPTSLAECPASATTCIQWSHRRSSYRCSVTILKNQVNLPRSLSEYSILKNHKLNHEFHRRKIPATQSTKRLIVCNHLSKISCGLYPSSTANHLHS

SEQ ID NO: 263834 - protein, 419 aa, Zea mays
  Clone ID: MRT4577_172229C.1.pep
SVTITEFGAVGDGVTLNTVSFQNAVFYLRSFADKGGAQLYIPRGRWLTGSFNLTSHLTLFLESGAVIVGTQDVSQWPVVEPLPSYGRGMDLPGSRHRSLINGQNLVDVVITGNNGTIDGQGSTWWNWFRSNKLNYSRPHLVEFVDSEQIVISNITFLNSPAWSIHPVYCSNVVVHSVTIQTSLDAPLNHGIVPDSCSNMCIEDSSISVSHDAISLKSGWDKQGIAFGRPTSDIHISRLDLQSSLGAALTFGSEMSGGISDVHADRLLIHSSFRGVFFKTAPGRGGYIRDTVISDVQMEDVDVAIAFTGDWPSHPDDQFDPTALPVVSHITLKNMTGTRISVAGVLSGIAGDPFTDICLSNINFSLADSASPTSHWSCSNVSGYSELVFPEPCLDLQTQSSDASICSTLPSFHAAAIAAA

SEQ ID NO: 263835 - protein, 82 aa, Zea mays
  unsure (1)..(82): unsure at all Xaa locations
  Clone ID: MRT4577_17222C.1.pep
SFLFFFLRYPILHSPLHSDHSFPYFQYTFLKSXXLDTDYCYFLPITIQPRWIMCIPLLKPTISCTTFFISELNQKKPSWLLS

SEQ ID NO: 263836 - protein, 78 aa, Zea mays
  Clone ID: MRT4577_172230C.1.pep
RTRGGRVGSSGATRPHCHKPTTRRGESEKRGDRATSPSTSAPLPPPIPLPYPHYRGPWPRRGPPRCARSEPEASRRLA

SEQ ID NO: 263837 - protein, 85 aa, Zea mays
  Clone ID: MRT4577_172231C.1.pep
GLIYIGFCLFFFIFLWVFVGTPKQPLQMGFFQTLPRFFHSALLRPNLFFPKGLPQLNLRPVPSLFGLYKIQKGPPFQKFSGASFF

SEQ ID NO: 263838 - protein, 63 aa, Zea mays
  Clone ID: MRT4577_172232C.1.pep
VPFDGSWRVAIIQLDPFRWGYCFLCLSIRPLIFLYANHRLPLAEPVLWSIGNIFWLSGKQTLT

SEQ ID NO: 263839 - protein, 326 aa, Zea mays
  Clone ID: MRT4577_172233C.1.pep
LPKQLAGMVEKASIEDVMKVLMASRKQDLHQLWTTCSHLVAKSGLPPEVLAKHLPMDVVSKIDELRLKSSLSRRSPFLAHHHHPAPGGGMEASSAADIDDHHKIRRMRRALDSSDVELVKLMVMGEGLNLDEALALHYAVENCSREVVKALLELGAADVNHTAGPAGKTPLHVAAEMVCPDMVAVLLDHHADPNVRTVEGVTPLDILRTLTSDLLFKGAVPGLAHIEPNKLRLCLELVQSAAMVMSREDAHTAVNAAPMYGEPSGGGGCGVYSASGTSSTSLVNLNLDNRMVYLNLGMDAQFGKMGDGDDGGGRGPSSLFSPHGYH

SEQ ID NO: 263840 - protein, 128 aa, Zea mays
  Clone ID: MRT4577_172234C.1.pep
PTRPPTRPRTRGRTLTSDLLFKGAVPGLAHIEPNKLRLCLELVQSAAMVMSREDAHTAVNAAPMYGEPSGGGVYSASGTSSTSLVNLNLDNRMVYLNLGMDAQFGKMGDGDDGGGRGPSSLFSPHGYH

SEQ ID NO: 263841 - protein, 124 aa, Zea mays
  Clone ID: MRT4577_172235C.1.pep
RPKASCQKLSRGLEQVQIPVGCDLLPWVMDSWSWSWRWMESSKGLGVDCGQGPTQRLGPPNGHATGVGRRHGDTLRPLIPCLLPELLDKHGAKRRWAVTSGCCGLGRLGLKKGCQKNDLNPNLD

SEQ ID NO: 263842 - protein, 167 aa, Zea mays
  Clone ID: MRT4577_172236C.1.pep
PPGKTPLHVAAEMVCPDMVAVLLDHHADPNVRTVEGVTPLDILRTLTSDFLFKGAVPGLAHVEPNKLRLCLELVQSAAMVMSREDAHTAVNPAAAPMYGEPSGGGAVYSASGTSSSMVNLSLDNRMVYLNLGMDAQFGKMDDGGDGDDGGGRGQGGPPSLFSPHGYH

SEQ ID NO: 263843 - protein, 35 aa, Zea mays
  unsure (1)..(35): unsure at all Xaa locations
  Clone ID: MRT4577_172237C.1.pep
CRTHIPISYILFXKEXPTQLHEHIISCNLCIRTPG

SEQ ID NO: 263844 - protein, 80 aa, Zea mays
  Clone ID: MRT4577_172238C.1.pep
SVLAVIITQDNAEAVLVLDPLWGALSKGQAHVSPKVPVFFTLFTVVSEAAGFPPLVEHKLQGRVMSSLDHARARWLDSLD

SEQ ID NO: 263845 - protein, 86 aa, Zea mays
  Clone ID: MRT4577_172239C.1.pep
MHSALGPSTHIFVFCAQVVAAGDLCAICQEKMHVPILLRCKHIFCEDCVSEWFERERTCPLCRALVKPADLRSFSDGSTSLFFQLF

SEQ ID NO: 263846 - protein, 136 aa, Zea mays
  unsure (1)..(136): unsure at all Xaa locations
  Clone ID: MRT4577_17223C.1.pep
TSDRFSEKSLFGAGTETTXTTEEWVMSLMIGNAGTLETAREEIDAAVGHSRLLNAGDLTRIGYLRCIIAQTLNLYPAAPLLVPDESLSDCKVGGYDVPTGTALMVNVDAIHRDPTVCEEPGRFVPERFEGWKAQGL

SEQ ID NO: 263847 - protein, 135 aa, Zea mays
  Clone ID: MRT4577_172240C.1.pep
MAKDKLANNITTQQGKTLKDAWGDVFWSLEVEHACGMGTLQMGEYESNVSNGNDTFIIREPLGVCAGTCPFNFPAMIPLWRPRSSFEINTREPMLEFVIAMWIAVHGIAGAAHIFYYYRRIYIANLLSTDIIILV

SEQ ID NO: 263848 - protein, 600 aa, Zea mays
  Clone ID: MRT4577_172241C.1.pep
MGPRAGGTAPHLPPIPLQSTTAPIPQPPSAVAMATAAHSLLHTPEAHRAATRSPFSPPAPTPFLHLRPHRLPLRLRSTSPTASDLTAFPPNPNGIFASDRPIDVDAATEAELRENGFRSTRRTKLVCTVGPATSRPDQLEALAVGGMNVARLNMCHGDREWHRAAIRAVRSLNEEKGFAVAVMMDTEGSEIHMGDLGGASSVKAEDGEVWTFSVRSFELPLPERTINVNYDGFAEDVRVGDELLVDGGMARFEVIEKIGPDVKCRCTDPGLLLPRANLTFWRDGSIVRERNAMLPTISSKDWLDIDFGIAEGVDFIAVSFVKSAEVIRHLKSYIAARSRGSDMAVIAKIESIDSLKNLEEIIRASDGAMVARGDMGAQVPLEQVPSIQQKIVQLCRQLNKPVIVASQLLESMIEYPTPTRAEVADVSEAVRQRADALMLSGESAMGRYPDKALSVLRSVSLRIEKWWREEKRHEALELRSVSSSFSDKISEEICNSAAKMANGLGVDAVFVFTKTGHMASLLSRCRPDCPVFAFTTSTSVRRRLNLQWGLIPFRLAFSDDMESNLNRTFSLLKARGMIQSGDLVIALSDMLQSIQVMNVP

SEQ ID NO: 263849 - protein, 216 aa, Zea mays
  unsure (1)..(216): unsure at all Xaa locations
  Clone ID: MRT4577_172242C.1.pep
MVSRRTLLVMMATVVVLHRSRTLCAAASAAAAPPATTKQARTPALFVFGDSIVDPGNNNAITTTVRCNFPPYGQDFPGHNATGRFSNGRVPGDIVASRLGIKEHLPAYLGTELSDFDLLTGVSFASGGCGFDPLTXPXLVSVLTMDNQLDLFKEYKEKXAXXXGGAHQAARHRVQELFTWVVXGTDDLANTYFHHAVPPRLRPRALHSSFVVQCAS

SEQ ID NO: 263850 - protein, 59 aa, Zea mays
  Clone ID: MRT4577_172243C.1.pep
AASSEIMILPERSERCLSGRSFIVVRQAHDLLHRTARVRDRIKRLAVQIVELKGQVTYV

SEQ ID NO: 263851 - protein, 187 aa, Zea mays
  unsure (1)..(187): unsure at all Xaa locations
  Clone ID: MRT4577_172244C.1.pep
GVHERIILPXVPYLTDQNGDIYLEVDNEDALLESIMGEDKIAHVIIGLDNTQVFADLDLVSASGTEFAQEDDNGDEDDDGSDDDEESDFDEDFNDVEGVFSVDEDDEDDGEEEEDDDDEDLPSWSNLETVNSCHPLYFARMIVETATKSSIDWLDRPPASLVVEGQLRPAFAEESTMVAKHISSDAP

SEQ ID NO: 263852 - protein, 112 aa, Zea mays
  unsure (1)..(112): unsure at all Xaa locations
  Clone ID: MRT4577_172245C.1.pep
LIVXGSHDEQRIGVGILVNVAASPRLGDGALRRVGTSPAVVERLVDMLSWKGAAERGARASAALVVSKLASKKRNALRVAGVPGAIESVSSLLYAADEECNLLGLLIIKKLA

SEQ ID NO: 263853 - protein, 126 aa, Zea mays
  unsure (1)..(126): unsure at all Xaa locations
  Clone ID: MRT4577_172246C.1.pep
GVRCWEYRYQPYIVRLRGGTRTDKARPLCYKAKHGYXLTRLRLNFCGMNTPVLKGVVYVKPNLQGVTHLKFHRNNRSVSDYRAGRKLCRLSDLNSYXLNDDRTYNYLEIMLVDNTYXVIKADPRIN

SEQ ID NO: 263854 - protein, 211 aa, Zea mays
  Clone ID: MRT4577_172247C.1.pep
GCVVQPTLPTRSLVAPSIPNPRSPFSTAAAMASPPPPLVSIPIPDDLLEEIFLRLPTPDAVARASAACTSFRRVIKGRAFRRRFRALHRPPLLGFMDAAGFHPAQAPHPSAPLTGALAPCAADFSFVPAVVSSASYIPRGVQADGEGPRWRPRDVRDGRVLLDWVSLHPRAMRICCYMEDGYEVSILMDFGELAPRDRPTWTERERCNAAE

SEQ ID NO: 263855 - protein, 118 aa, Zea mays
  Clone ID: MRT4577_172248C.1.pep
FATKFCVVSPSVVGCCPWQRKIAQDTHDVDGFGCLGTANNLSRQLYPMIGSMLESLSQDELPGMKYSLGDAVAMAQWIFTHASTPPNNFTTPDRACCGSGDFGSGACNSSAPLCPNRS

SEQ ID NO: 263856 - protein, 47 aa, Zea mays
  Clone ID: MRT4577_172249C.1.pep
KNETNNDFNNPLIHGKQNERWGTFFSGERFSKYMELSRNTRHAFCFF

SEQ ID NO: 263857 - protein, 219 aa, Zea mays
  Clone ID: MRT4577_17224C.1.pep
LLPPAPPPPPGPPAAGGGLLSYRDAAPAGGQPAPDRPGHRLAPPLLLLAPRLLLASPTLLPAFLLRSPAGRRRSGRRGRAGLPPPPERVSASAPTIGPALPARIHATARNHRRRLPPRPCRGGPTDRSINQSFGRSTTAAGGPIPRRRRNHCWLRSTAPVVSAGIGGGGGDGGGGGCDGDKSNAPNSVALALLRLLLDETSSLQLLSPWHGGSSGFANE

SEQ ID NO: 263858 - protein, 79 aa, Zea mays
  Clone ID: MRT4577_172250C.1.pep
ANFKKNRCSAEGRDGSRRERQARRQLPSQPAGRHSGPGGHLPVAALRRQTFAERMYLDGLRELPLLWLTLDLLQLHAWP

SEQ ID NO: 263859 - protein, 78 aa, Zea mays
  unsure (1)..(78): unsure at all Xaa locations
  Clone ID: MRT4577_172251C.1.pep
ECFEKTVTRYVYKPKRTILKLYDFMCGSLPSVVALALGKEHVXAECHTRHSAXYLTWGPIWPILCRVLSGRHSAKETP

SEQ ID NO: 263860 - protein, 60 aa, Zea mays
  Clone ID: MRT4577_172252C.1.pep
YIHSLKGVRDRGYIRGRKQKVTVTTNLGGFGGTTRCPFYRGGGPRIGGPPPRGRRPGGPF

SEQ ID NO: 263861 - protein, 81 aa, Zea mays
  Clone ID: MRT4577_172253C.1.pep
AFNGLCSQKTGPAFPVFLARKSKWELLFRPKLNDKIVKTPHPFHKIQNPPKNDWPPLLSILAGGLKEPLNFGTSEPCNYDP

SEQ ID NO: 263862 - protein, 129 aa, Zea mays
  Clone ID: MRT4577_172254C.1.pep
GTSQAVGDPVHKGARLPLSSPPFLVTAAAGPSPPFPLLSPAPAPAPDQSGPRGRPHLPPRVHSLAVACPAGRPLGPRQLRTRMGISPAATGETMQLRVCDLPRRDHEGQELAKILYREFFFFPPPPPRG

SEQ ID NO: 263863 - protein, 94 aa, Zea mays
  unsure (1)..(94): unsure at all Xaa locations
  Clone ID: MRT4577_172256C.1.pep
AIFPTPFKFXGAFFIFMKKKGPVGEFFGSKGQIGKRWPRVTPSGFKRVKGGGAGVFPSCFFFFLQRRGLFFHPNRLGVGFAPGSPPFFKKPPPF

SEQ ID NO: 263864 - protein, 128 aa, Zea mays
  Clone ID: MRT4577_172257C.1.pep
LVLEGWWCFDRMVRFYNIEPKAEHFGCMMDLLGRAGLLRDSENLINNLQAKVSPALWGALISASRTQDSSKLGEFIGTKLIEMKPTEFSSYVLLSNIYATEGRWDDVEKVRKVMKEKVVEKDVGMSLV

SEQ ID NO: 263865 - protein, 447 aa, Zea mays
  Clone ID: MRT4577_172259C.1.pep
LASASSRPASGGATILPSPAGSPRTPPPLQIDHDDRENLSLLRFEALWEAEFAQDSLLVFSTGRTPVSYKGLRRDKPLVTPDVTIMSVGTVIAYGEEMVRDVGWEERLDSDWDRAVVVEETARLPQLTRMQPERNQGPHKVSFFVDKQGAQEVMDYLPKKLERRGVDVKIVYSSGNALDVLPRGAGKGQALVYLLKKLDSNGKPPKNTLVCGDSGNDAELFGVPSVHGVMVCNAQEELVQWYQENARDNPRIIQATERCAAGIMQAIGHLGLGPNVSARDLVGFPAYYPNNNKKGAAATAKPADVVVRFYVLYEKWRRGELPSSNYFSSSSAMRYLKSITHPNGTIIHPCGSERSLHASVDALLSSCYGDKKNFRVWVDRLVTSPIGTSSWLARFDSWEMEGGVRYCCRTTILLNIKPESPEGLELTHIHKTWVQGHSAGPGSALVF

SEQ ID NO: 263866 - protein, 104 aa, Zea mays
  Clone ID: MRT4577_17225C.1.pep
PIKPFKCISIFDLCAWRPSPRRAGQKGTTLAQPPSSSLTSRAGPPGSREVETAIGPNPIGVSRRSHSAATLCASSNKSRARGGWQIGLRSSVNRSGGGGARRVS

SEQ ID NO: 263867 - protein, 137 aa, Zea mays
  unsure (1)..(137): unsure at all Xaa locations
  Clone ID: MRT4577_172260C.1.pep
RLLGATGALHRKVXVAALXIQLGXXPQXLPXXKQIRXALMKXVDGXXTNDDXIKSIFXKYPACHNRQXAPXXXXVVRXXPIXXSXRGLWIPQEQGSPQSGSPHGPLHHLSTSVAAVSSAATASCEEEDGRSESYGWK

SEQ ID NO: 263868 - protein, 51 aa, Zea mays
  Clone ID: MRT4577_172261C.1.pep
LPRPWIWQLRVNLPPPGIFQRGGNWRRRGTWHRRGICPPPVICRRHHCTIL

SEQ ID NO: 263869 - protein, 65 aa, Zea mays
  Clone ID: MRT4577_172262C.1.pep
HSSAYVNGSRSGGTSQPPALSQGPLPLQSTRSGAGGMTSTESPHCQDAAFLSLSDVYSFDSSVAL

SEQ ID NO: 263870 - protein, 177 aa, Zea mays
  Clone ID: MRT4577_172263C.1.pep
MDSTPPTDPAASCLASASAAVASGDVAAMLPDSPPRRGAGHRRAQSEILLGGAALPDDLTFDADLGVVGEACVAGDEDEEDDDDDEEGVGGAGGSRMFEMFLENGGKLPGPPEPSAHPHSTPPRPRHHHSMSMDGSTSLFGSAAAGTPGRSGADAKKAISDAKLAELALVDPKRAKR

SEQ ID NO: 263871 - protein, 119 aa, Zea mays
  Clone ID: MRT4577_172264C.1.pep
MKEAALNSRKTPWEAAALRAEALLASSESAGITCGQVGSALAPCIPYATGRASGLPGSGCSGAKSLNRAVRTSADRQAASTWLKSLANSDKSVNRGTNSTIPGKSGGSVGDRNSTGTDC

SEQ ID NO: 263872 - protein, 112 aa, Zea mays
  Clone ID: MRT4577_172265C.1.pep
HVSSRRSFAPARMESICRRVHSRRQRVTEGKERRGSQGELHGRPRPRELRRAPPMEKAWRARPWSTRRCPALGLEGVHRGQRWEMASRSMLASHNHGLVLMALTVFLYSSMA

SEQ ID NO: 263873 - protein, 54 aa, Zea mays
  unsure (1)..(54): unsure at all Xaa locations
  Clone ID: MRT4577_172266C.1.pep
APTFPPXHPRGREGKRHGRSEMPIQDPDHRLPALFMNVYGFRRDPLDRLYGPIH

SEQ ID NO: 263874 - protein, 87 aa, Zea mays
  Clone ID: MRT4577_172267C.1.pep
GSISDSIAPEIPSHPTPSQRCSTFDTKLGALPPCPHPRPHTVAPVTHKDKNEVVFQQHNYTRNRTVSPTQPAHVWPMFPVCCDPAWL

SEQ ID NO: 263875 - protein, 40 aa, Zea mays
  unsure (1)..(40): unsure at all Xaa locations
  Clone ID: MRT4577_172268C.1.pep
DSLCVVGPAVPSVVCSDLLXSIPESKSDVQKQSLCVVPLL

SEQ ID NO: 263876 - protein, 106 aa, Zea mays
  unsure (1)..(106): unsure at all Xaa locations
  Clone ID: MRT4577_172269C.1.pep
DFYQDTEMTWGNGRGRVWAGGAGLNLPLNRTSGSGFXSKSQYLVGKIDMQIKLVPGNXRGTVTNFYLSFQGDTHDEIDFEVLGNVSGEPYTLYTNVFTRGQRQREQ

SEQ ID NO: 263877 - protein, 103 aa, Zea mays
  unsure (1)..(103): unsure at all Xaa locations
  Clone ID: MRT4577_17226C.1.pep
MLASPGGVFAQSFAAXTHGNILDASPPVXTPARCAALCVVXKVKVATPQNDRMGRQRRLRRKVRGTTERPRLSXVRSNKHMYAXLIDHTKQRTMXSAQTMHKS

SEQ ID NO: 263878 - protein, 121 aa, Zea mays
  Clone ID: MRT4577_172270C.1.pep
LKHKGFPHKRGELTPTPRGGPPLPKNGSIDPPQFFFNNPGTFVAPGGFSLKSSKSGGGPGPPQNSPFPGGRFSSGGGPPPPLSKTQCWAPPPPPRGPCPRGRAPNLRENVVSPCGPRESRG

SEQ ID NO: 263879 - protein, 30 aa, Zea mays
  Clone ID: MRT4577_172271C.1.pep
LEPTQTYPGSRSLCSGLLPILLPNPPQIKP

SEQ ID NO: 263880 - protein, 149 aa, Zea mays
  Clone ID: MRT4577_172272C.1.pep
LGTSSRRELFSILIPVRPYLASCPFEDVYLVRAPPNCDVEIRCFRCHLSVSRGSCRIRGDLRGRPIRTGVTLCIGLEMDSCADASDCVRGPLPLRALLPRSPGLPRSPPPDLIKLYLLSSRFLTDVLVARLALTFTATLSPSSSCTLRS

SEQ ID NO: 263881 - protein, 140 aa, Zea mays
  unsure (1)..(140): unsure at all Xaa locations
  Clone ID: MRT4577_172273C.1.pep
LARDRQDTSRGGAPGPGTIATPAARRGRKRNKPLGLQAHGRGTKPKKAGLATAKAERPDKGPPRARAAAKQKRSGGGSNKQGQRTRRLPLAPPRXKGARSRQEKKRQRKRSGNQFRGRKAWKKKKKPFRFAIHQAARPIF

SEQ ID NO: 263882 - protein, 177 aa, Zea mays
  unsure (1)..(177): unsure at all Xaa locations
  Clone ID: MRT4577_172274C.1.pep
GRGSPCKRLGPKVVVAVGPGFGRPELLFSPPLFQAFPSWVSLLDSLHPVGGPDPQAVGRIQPFMVQPHLERRVIFPPPPAXAVDQPPPLPWRAVLGLAGFVPVQASPFPQFQAQALLQRMALIGFPVQKAGGALFLFWQPGQLVSVLGWRFLPPGVPPPPPNQKPTVNFPPGRVKLG

SEQ ID NO: 263883 - protein, 108 aa, Zea mays
  Clone ID: MRT4577_172275C.1.pep
TQFAAFMATCPVPCLGDTSDMFSEYLAFKFHMQDFLMTCPMHTRHTGVISILNRAVPCPMSLQHRHLAYFNIFLEMGLFSNLSCSLSWDYLELVFTSVHHYSTLYLTR

SEQ ID NO: 263884 - protein, 294 aa, Zea mays
  unsure (1)..(294): unsure at all Xaa locations
  Clone ID: MRT4577_172276C.1.pep
IRGRPEVAATRHTKPLQWSPTPPLLLFSIRNRVRPNALEPSGPRXISMGPEQEEAVLETIWDLHDKVSDAIHALSRAHFLRAVRRRSSASAPGLVDVKGGGLGLGARGGDEVVALAALAEEARSLHAIRAALEDLEDQFECFLAVQTQQQAERDFAMARLEQSRIMLAIRLKEHHGRNHKVIDEASAFVRDVYQDVWPSLSATKAERRADSSGNPAKGPSFLARMVSSSLAVAGSGFSLKRLALALGLVAVLQSSGVGDRRYRRTTSERSSSWLGSSSPRGGRTGRLDVSLARG

SEQ ID NO: 263885 - protein, 38 aa, Zea mays
  Clone ID: MRT4577_172277C.1.pep
PGLHLQVLSSDINAYEVDLDTDEKHCFCRESDLLAVVE

SEQ ID NO: 263886 - protein, 301 aa, Zea mays
  unsure (1)..(301): unsure at all Xaa locations
  Clone ID: MRT4577_172278C.1.pep
RLNHPWSPTPAVLLFSIRNRVRPNALEPSGPRXISMGPEQEEAVLETIWDLHDKVSDAIHALSRAHFLRAVRRRSSASAPGLVDVKGGGLGLGARGGDEVVALAALAEEARSLHAIRAALEDLEDQFECFLVTGLKCLKPPVLCAVLKLRAVQTQQQTERDFAMARLEQSRIMLAIRLKEHHGRNHKVIDEASAFVRDVYQDVWPSLSATKAERRADSSGNPAKGPSFLARMVSSSLAVAGSGFSLKSLALALGLVAVLQSSGVGDRRYRRTTSERSSSWLGSSSPRGGRTGRLDVSLARG

SEQ ID NO: 263887 - protein, 66 aa, Zea mays
  Clone ID: MRT4577_172279C.1.pep
WLRTAELSVVCPCFLVCLNQEDTTGCTPQEIRDALYCWNHGFILRKNGVGCHTKMPLIWIHRLTTF

SEQ ID NO: 263888 - protein, 82 aa, Zea mays
  unsure (1)..(82): unsure at all Xaa locations
  Clone ID: MRT4577_17227C.1.pep
PKRHMPQRAITRAFQHLIAIVVPLIAGSCDIRPSAMRHDYAAAPAAARQSAHAIVCRYSSRSHXTTVQILLVRRDQQPWRTA

SEQ ID NO: 263889 - protein, 56 aa, Zea mays
  Clone ID: MRT4577_172280C.1.pep
VDLVEGALVECGQFILCVRLLVKGRGQRRVIVVRACLAGAAQDAQSAEDGPQELLP

SEQ ID NO: 263890 - protein, 61 aa, Zea mays
  Clone ID: MRT4577_172281C.1.pep
KTFDSKCMGKGNRVPYVTLVATHDPKKEPILVPTLIYTVVYIWGFVLGIHFHSTQTNHNNG

SEQ ID NO: 263891 - protein, 83 aa, Zea mays
  unsure (1)..(83): unsure at all Xaa locations
  Clone ID: MRT4577_172282C.1.pep
HSPHHPXQSANLIAYFFYPFKQDLNSLLKISGTRLHRIYNKYTCKTYTHRLMTXMAGFYHFXKYLSKLXRHNTRPYLYMYYIL

SEQ ID NO: 263892 - protein, 77 aa, Zea mays
  Clone ID: MRT4577_172283C.1.pep
CVPTCRRPCKICSRLVSCARGVRDPCPCCTVSSLPVFSSSDCGHRRDPRQQRPDWVVGDREGQRGALDRIPRWARAV

SEQ ID NO: 263893 - protein, 89 aa, Zea mays
  Clone ID: MRT4577_172284C.1.pep
SVSRSFRGTQLYLGLHLFVFPLFCADKPCLFLMVFCPPLYFSSGLPLLCLVTMCFSLNFGSFRAHVILSVLPLLHRGSLGCQLKKPPPK

SEQ ID NO: 263894 - protein, 145 aa, Zea mays
  unsure (1)..(145): unsure at all Xaa locations
  Clone ID: MRT4577_172285C.1.pep
CSPWGLSFARVFAKCLGCAPVMKESLVFPPPFGLPFXAPFWRGRVLPPFVPFGPFLSPVLNGLVPPVSCSWGLALLVPEEYGLLLVFRGLIPPVSMLVPFWEAFCAFVASPFLGPFALPPPSCPCFGELVGGCVQPPCFFAHLVR

SEQ ID NO: 263895 - protein, 222 aa, Zea mays
  unsure (1)..(222): unsure at all Xaa locations
  Clone ID: MRT4577_172286C.1.pep
PAGPVSLVSQLSVRRFMYCLPPPMSRTSGKLVLGAGAGADAVRNVSDRVTVTMSSSTRYPSYYYLNLDGLAVGDQTPGTTRNAXVGAGGANAYGMIVDVASTISFLETSLYDELADDLEEEIRLPRATPSLRLGLDLCFILPEGVGMDRVYVPTVSLSFDGRWLELDRDRLFVTDGRMMCLMISRTSGVSILGNFQLQNMRVLFNLRRGKITFAKASCDSLP

SEQ ID NO: 263896 - protein, 105 aa, Zea mays
  unsure (1)..(105): unsure at all Xaa locations
  Clone ID: MRT4577_172287C.1.pep
GIFLSYCFVIVMIARRKEEALLRKNVSLCRPPHCVFEPGGPFLFIGEGGPWQIPLCTPPLLCFVQTPENFVTLPGNKGGRANPISPRGRAPXLSPLRIWLLTLPT

SEQ ID NO: 263897 - protein, 67 aa, Zea mays
  Clone ID: MRT4577_172288C.1.pep
GLCGIGICQVMGMVPRLSHTSISVMVITSSRRRRTLVSHARVGYCLCIISKSKAVVVQFTLNSFVFV

SEQ ID NO: 263898 - protein, 169 aa, Zea mays
  Clone ID: MRT4577_172289C.1.pep
SKRKLRRIGGCHARSSLRASRAFRDAARSNIVPHASPSLLAHRRASLARRPWKCRLLRASETPSLARTRASPSLALWIGEPPPPTSEPPPLLRIEEPPPPRVKVMELRPPAGEPPPPHKGTAVARPLDREPPHIEVGEPRPLQPLAGVHRRARYQATVVANESRWGVKN

SEQ ID NO: 263899 - protein, 57 aa, Zea mays
  Clone ID: MRT4577_17228C.1.pep
LSSSSLFFFWRSLSGALAVFSFPRVFCCWVCAFCHQPGRVGRPGFSGSVPAGVPAFP

SEQ ID NO: 263900 - protein, 66 aa, Zea mays
  unsure (1)..(66): unsure at all Xaa locations
  Clone ID: MRT4577_172290C.1.pep
GAPKTSEDTNTRHDERDXSFQPVAGQQAESRRPGAVQTGTSATRDEERPWRRPPQQDDDPGGLLSR

SEQ ID NO: 263901 - protein, 52 aa, Zea mays
  Clone ID: MRT4577_172291C.1.pep
QQEQDLTVPAVDTAEVLSIIKGATALVIVLKRNRTPSPAREGTYSRSHIVML

SEQ ID NO: 263902 - protein, 109 aa, Zea mays
  Clone ID: MRT4577_172292C.1.pep
STCTSCRWQLDQAAVCLSEIYGLYMDHAVPLRLSVDAGESAVRAWLSRVRPLLGLPLDDLDFADRTEDDTVHDVDQHLPRALKAASAACLPVVRPVPECSASWRSRSFA

SEQ ID NO: 263903 - protein, 125 aa, Zea mays
  Clone ID: MRT4577_172293C.1.pep
AASVDTKNDYSMEAGLLSTDREERTMSSKEALLQDSESAQTIPRTKTRRISPAGKALIALAACCLLGAGVASIGGATRFCPGHLRHSDVGKYGMNAHRPNLSDSMAQMVRRQNTPPPTDTAHGTD

SEQ ID NO: 263904 - protein, 48 aa, Zea mays
  Clone ID: MRT4577_172294C.1.pep
KCLTKRPGNQSRCGKGMPCRLQKVTRASSLHPSAMRQAVLGVPWVFCS

SEQ ID NO: 263905 - protein, 93 aa, Zea mays
  Clone ID: MRT4577_172295C.1.pep
NCSDEIPNGVSLSYQDDECVASNIQHTEVDINNDIVGVQNVDIIDASVVEDLHRQMDEEDYFEDEEDETGWQYASDNDESNIPNVVDDNSDDD

SEQ ID NO: 263906 - protein, 42 aa, Zea mays
  Clone ID: MRT4577_172296C.1.pep
SGDMCVEGVVLTMEDAGRMVRSRLCYDSAMTHGYVSTAMDDI

SEQ ID NO: 263907 - protein, 281 aa, Zea mays
  unsure (1)..(281): unsure at all Xaa locations
  Clone ID: MRT4577_172297C.1.pep
SKKKEYSWSYNRGYIDFFYTRVFILGIRRLAELTHFFDKGVIDGITNGVGLAGFCIGEEIKYVGGGRIKNKNKDTSLSLKRKERTIVNMGPQHPSMHGVLRLIVTLDGEDVIDCEPILGYLHRGMEKIAENRSIIQYLPYVTRWDYLATMFTEAITVNAPEFLENIQIPKRASYIRVIMLELSRIASHLLWLGPFMADLGAQTPFFYIFRERELVYDLFEAATSMRKMHXNYFRIGXGVAAXDLPYGWMDXKCLDICDFFLQGXVVEYQELITQDPIFLER

SEQ ID NO: 263908 - protein, 78 aa, Zea mays
  Clone ID: MRT4577_172298C.1.pep
CWCNLTQVCLLEGWGVQFAVRDRSSLDAHAYLSSSTQKEQNSVTHELTQLAKWMFHTADCNNCPVCVEYLVAADCILS

SEQ ID NO: 263909 - protein, 138 aa, Zea mays
  Clone ID: MRT4577_172299C.1.pep
MERGRSSTSSSCRSLLLLLLLLVCFSHGAAVAAAAARLLTPLQAAAAVPPLALRQAESNGATAAAADDGLVMTEEGDADATSNGNDDDEIFFVLKTTGAEEEACGTEGDDDDEEECLQRRLLGDAHLDYIYTQHKGKP

SEQ ID NO: 263910 - protein, 54 aa, Zea mays
  Clone ID: MRT4577_17229C.1.pep
FLKSMVGPGFEKNWACPLKKPEACIMLCEKNPHPWFIFLELTRMLLINLKRFCS

SEQ ID NO: 263911 - protein, 363 aa, Zea mays
  unsure (1)..(363): unsure at all Xaa locations
  Clone ID: MRT4577_1722C.1.pep
MLALTGSGGSGGASTGTGSNPPWSAGGGAASTGLNGIKKDYDETNLYIGYLPPTMDDAGLVSLFSQFGEIVXAKVIKDRNTGQSKGYGFVKYSDVSEANAAIAAMNGHHLEGRVIAVRVAGKPPQPAPAVSAPPSYPPPDPTSGGYSSQSYMGAPPPPPPGSYAPVPWGHAPPYASYPPPPPGSXSTILHPLHLAMLPXPYGMQYPPPPPQQLQXPPPGTATSSDGAQNYPPGVTPPSSGSSTHPVATSVYASSGAPNAPSIYPPPPYSYSSYYPPHXQPPPPPPPASVDPSQSIATAPWLTHSVVVPPPPTSVDPSQSISTAPWLTHSAVPPPPPPLSSTTDQSTASYGADAEYDKFMSEMK

SEQ ID NO: 263912 - protein, 83 aa, Zea mays
  Clone ID: MRT4577_172300C.1.pep
TGRRGDCDDDGLRWMPRPRGGLAARRRERGNEEISSPCSATIEDFGLRVSMEMLVDFSNLTSAKWLAMNHGHLGQHPKLAVLT

SEQ ID NO: 263913 - protein, 37 aa, Zea mays
  Clone ID: MRT4577_172301C.1.pep
GLEFPVDAHVHSRSAPDRSLFQLDHPTHARTLASTAS

SEQ ID NO: 263914 - protein, 54 aa, Zea mays
  Clone ID: MRT4577_172302C.1.pep
FATSLRAGDSLLNRVGGVVFCIRGGGAGVEIMATTIFAGVGEAILVGQFSCHRG

SEQ ID NO: 263915 - protein, 118 aa, Zea mays
  Clone ID: MRT4577_172303C.1.pep
HASATRPVKPIAYARVDGCLKLLEHKLKTDFELYSGPENVPELLKDVQEVLFFQIYFCFLVSMSSVIVVKHMNCEILQIMAAFFINVIFRYQQPSNGLVYCSGQPVNWYLKRHVCFNE

SEQ ID NO: 263916 - protein, 239 aa, Zea mays
  unsure (1)..(239): unsure at all Xaa locations
  Clone ID: MRT4577_172304C.1.pep
RLQVLGPEFPGRPTRPEYFAFLYEFAKMGEEESQFLLSLQAISTMVHFYMGTKGPENPQVEVLSEEEGEEEEEEEDILSLAEEKYRPAALEKMIALVALLVEQSRSERHLTLSQTDMAALTGGKGFPFLFQHIRDGINIRQTCNLIFSLCRYNNRLAEHIVSMLFTSIAKLTPEAANPFFKLLTMLMEFAGGPPGMPPFASYILQRIWEVIEYNPSQCLDWLAVQTPRXKAGHSWVLQI

SEQ ID NO: 263917 - protein, 46 aa, Zea mays
  Clone ID: MRT4577_172305C.1.pep
QNRGLLLQTRRVVGQDIPGVKVTHLTLPGGGCMGGRLIRYGRHYWG

SEQ ID NO: 263918 - protein, 123 aa, Zea mays
  unsure (1)..(123): unsure at all Xaa locations
  Clone ID: MRT4577_172306C.1.pep
MPPAPSPGAHGASGAATPPSKPQSPLRITHEGEFYARLLTRESSLGNPSFRYYGAGTGAVPFVWESQPGTPKDAYSCRVLAAPPXRRVGPVITPPPSYYLHGGQLRILHCSLALFRFQRRRGP

SEQ ID NO: 263919 - protein, 431 aa, Zea mays
  Clone ID: MRT4577_172307C.1.pep
MPLLHLSLPSHRLLVGGRGRLFFPSSPRRICLSVRAAGDAAVSVAAGAYGLPFRPEGAAHHRELSAAVAVVERACCLCVDVKRSLFSGGSSILEKNDQSPVTVADFGVQALISLELQRLFPSIPLVAEEDSASLRSSKADDNSSDILVESIFSAVVDKVSNNGSHLTQDDVLRAIDRGGKDAVSFDSNPATYWVLDPIDGTKGFLRGNDALYVVGLALVVNGKVTVGVMGCPNWTNDDIVNKKDDSVAACNGRGILMVSHIGCGTWSRRLSADIGQLNTAQDIWKRCFVDTCSIAHMAHYCIPDSQTWDMIPLSATYDSTTDATDPRNENEILLLSVFCGSLCKYLTIASGRASVFVLQALPTTQIKSWDHAVGVICVQEAGGQTSDWSGEPLDLAADLTSRRIIYPRGGVLVTNGALHDKLVEMISASYK

SEQ ID NO: 263920 - protein, 80 aa, Zea mays
  Clone ID: MRT4577_172308C.1.pep
RVVTDNNGERVAPGSAGAVPRRGSLRSVLESGPRRPRTTMTAPPCPATGDGGGGEKGPHETGTKATNGIRRAAPVPSSRA

SEQ ID NO: 263921 - protein, 237 aa, Zea mays
  unsure (1)..(237): unsure at all Xaa locations
  Clone ID: MRT4577_172309C.1.pep
MPPLHLSLPSHRLLVGGRGRLFFPSSPRRICLSVRAAGDAAVSVAAGAYGLPFRPEGAAHHRELSAAVAVVERACCLCVDVKRSLFSGRSSILEKNDQSPVTVADFGVQALISLXIHSKISKFRFVTLSNAIFCHVAIXELQRLFPSIPLVAEEDSASLRSSKADDNSSDILVESIFSAVVDKVSNNGSHLTQDDVLRAIDRGGKDAVSFDSNPATYWVSDKLLCFWLSIEICEVDS

SEQ ID NO: 263922 - protein, 62 aa, Zea mays
  Clone ID: MRT4577_17230C.1.pep
EIRSPFSIFFSFLYLKAGVCLGRGVFSFSFLENKKFNIYLNILKMAINSKDFFYWGKIPGLK

SEQ ID NO: 263923 - protein, 188 aa, Zea mays
  Clone ID: MRT4577_172310C.1.pep
DDSAAACNGRGILMVSHIGCGTWSRRLSAEIGQFTTAQDIWKRCFVDTCSIAHMAHYCIPDSQTWDMIPLSATYDSTTDATDPRNENEILLLSVFCGSLCKYLTIASGRASVFVLQARPTTQIKSWDHAVGVICVQEAGGQTSDWSGEPLDLAADLTSRRIIYPRGGVLVTNGALHDKLVEMISASYK

SEQ ID NO: 263924 - protein, 70 aa, Zea mays
  Clone ID: MRT4577_172311C.1.pep
VESVLYFAAPDAFYGIAFVGAPMFFLSSSLSRVSLLQFVPSVLFFLCIFYSISILYVISEGSWICTVDEC

SEQ ID NO: 263925 - protein, 128 aa, Zea mays
  unsure (1)..(128): unsure at all Xaa locations
  Clone ID: MRT4577_172312C.1.pep
TKTRQIKKNGGSILQPLVITDWSSAHEFMMMCSCCYSXLCKYLTIASGRASVFVLQARPTTQIKSWDHAVGVICVQEAGGQTSDWSGEPLDLAADLTSRRIIYPRGGVLVTNGALHDKLVEMISASYK

SEQ ID NO: 263926 - protein, 372 aa, Zea mays
  unsure (1)..(372): unsure at all Xaa locations
  Clone ID: MRT4577_172313C.1.pep
VAASTEPTAVFTDVGRVNGTSAERFRSAVSGRRANVLGEITQIDTRSLLLEKAKATVRKKLQELNITSSSRFAERRGSEGKLNPCGNNXRSMVSSLTNLARESSYVAQEAXIQVPDTDDKNPEQRRVPVSIDVPDPDFHDFDKDRTEKAFDSDQVWATYDSEDGMPRLYVMVQKVLSMRPFRIRMSFLNSKSNIELAPISWVASGFQKTCGDFRVGRYQVSETVNIFSHRVSWTKGPRGVIRIVPQKGDTWALYRNWSPDWNELTPDDVIYKYEIVEVVDDFTEEQGLTVIPLLKVAGFKAVFHRHMDPKEVRRIPKEGLFQFSHRVPSRLLTGEEGNNAPKGCHELDPAATPVDLLKVITELKEDAVGADC

SEQ ID NO: 263927 - protein, 67 aa, Zea mays
  Clone ID: MRT4577_172314C.1.pep
TRAAWAVGTHRPGAPGWVVWRGAGTARTLWPPTRCCFPLWGSQGLFEDIFSLCDYFTLDADDLFVYF

SEQ ID NO: 263928 - protein, 72 aa, Zea mays
  Clone ID: MRT4577_172315C.1.pep
GCEARTEHVHRTVTILACLFMTSPLECCEWHVLCSKARMNTRTHWRATASPLHTDGPLFDRAYWTNKATGPP

SEQ ID NO: 263929 - protein, 54 aa, Zea mays
  Clone ID: MRT4577_172316C.1.pep
PNVSSCAPMIRCVPCMLHSVSYGTNYRLLFATISHCVAYRCIWAQVGRINKKIM

SEQ ID NO: 263930 - protein, 102 aa, Zea mays
  Clone ID: MRT4577_172317C.1.pep
YGHRHRALHNAMHSRLAGSQHEHRSKRLVCVHTISPSDHTRLGPPVLSHLHRMHTSYSPLSTLRMQRFCRERFYLYDVDLRLVETPTEICCRPVGFLRIPPP

SEQ ID NO: 263931 - protein, 85 aa, Zea mays
  unsure (1)..(85): unsure at all Xaa locations
  Clone ID: MRT4577_172318C.1.pep
XPNRGPXLSPPNDLRPXHGIXLPLXNXXHXRPTNXXTXHIPXMXXCNTRXXIPRPPHXTCPKRPSIRXNPIYYLRSFVLRRXFLS

SEQ ID NO: 263932 - protein, 62 aa, Zea mays
  Clone ID: MRT4577_172319C.1.pep
FSCRVLTLATLILIALTLINQVLGYLVLNFIGSPIYPPLGALNWYSEPYSSFKGLTALRDGS

SEQ ID NO: 263933 - protein, 231 aa, Zea mays
  unsure (1)..(231): unsure at all Xaa locations
  Clone ID: MRT4577_17231C.1.pep
YKGRVWLGANTELQQTVLLALHDSAEGGHSGFPATYRRLKATFAWPGMKKHTKEFVQSCTTCQQAKPDRGKYPGLLLPLPVPAHAWHTVTLDFITGLPRSKHYNCIIVVVDKFSKYAHFLPLGHPFTALSVAKLYLSEVYRLHGLPVAMVSDRDPVFTSKLWQELFRLAGTKLCLSSAYHPQSDGQTERVNQCLETYLRCFVHSCPXKWLSWLALAELWYNTNSHSTLGYF

SEQ ID NO: 263934 - protein, 52 aa, Zea mays
  unsure (1)..(52): unsure at all Xaa locations
  Clone ID: MRT4577_172320C.1.pep
PLQRSKSNFVSHKESEHALATLLNFGNYTNERSRNETKQPCXKFSSINITND

SEQ ID NO: 263935 - protein, 49 aa, Zea mays
  Clone ID: MRT4577_172321C.1.pep
VCERARRHQPCARRGGRARIAGRHLLESPWRLACSETAPCAWLHRSALS

SEQ ID NO: 263936 - protein, 309 aa, Zea mays
  unsure (1)..(309): unsure at all Xaa locations
  Clone ID: MRT4577_172322C.1.pep
MMIKEARYVDDALNDPIHEPQTVALKATRSKEALPSKVAQVEAAGLNEEEMALIIKRFKTTLKGRKEHPNKNKTKGKRSCFKCGKIGHFIANCPDNDSDQEQEKKREKKKSYKKAKGEAHLGKEWDSDCSSSDSDNEGLAASAFNKTSLFPNEHHTCLMAKEKKDRLLEKQEDLLYEEHDKFVEAQNSLALEVKRNEMLSCELSTCHESISSLKGVNDDLNAKLEIASKSTSREEHVMICNRCKDFNVDACSEHLVCISKLNDEVASLNAQLKTSKNDFDKLKFARDAYTVGXPSIKDGLGFKREAKNL

SEQ ID NO: 263937 - protein, 388 aa, Zea mays
  Clone ID: MRT4577_172323C.1.pep
MDPKGKGIVINDKEKESFINEPKDDKPTDSGSSHKKKEGKKKRRIKKIVYYDDSDESSSSQKDNDDNDYEKKKTVNSNFSFDYSRMPHSSNAHLLSIPLASLCRDEYHKVSGMDNAKQIWDTLKISHEGNDVTMLTKMELVEGKLGRFAMIRGEEPTQMYNRLKTLVNKIRSYGSTQWTDHDVVRLMLSSFTVLDPHLVNNIRENPRYTKMTPEEILGKFVSGRMMIKEARYVDDALNGPIHEPQTVALKATRSKEVLPSKVAQVKAAELNKEEMALIIKRFKTTLKGRKEHPNKNKTKGKRSCFKCGKIGHFIANCPNNDSDQEQENKREKKKAYKKAKGEAHLGKKWDSDCSSSDSDNEGLAVSAFNKLSLFPNEHHTCLMAKEKK

SEQ ID NO: 263938 - protein, 26 aa, Zea mays
  Clone ID: MRT4577_172324C.1.pep
LSQLNDDCDQTDYVKLLNVLGSGSQR

SEQ ID NO: 263939 - protein, 33 aa, Zea mays
  Clone ID: MRT4577_172325C.1.pep
APGLEQGQLAKLRSVAALPAGHRPHRMRVRTRG

SEQ ID NO: 263940 - protein, 130 aa, Zea mays
  Clone ID: MRT4577_172326C.1.pep
RRRTASSPLRSRLSCAPSPPPSSRATSSAPRHACVVLVGAAVVCRYRKEEAWNESTCPVCLADFDDGEVVRVLPECMHYFHADCIDTWLRGSTSCPMCRAETTPTPTPSPASVRHHLELSVSLEEILVAT

SEQ ID NO: 263941 - protein, 122 aa, Zea mays
  Clone ID: MRT4577_172327C.1.pep
ARMMCVMYVGDLQDPLGSSQSRHGSIPAATVSLPSLFPPLYSLLTTLLSTAPPCLSLLGGGDGDGDDEAEHVPRGRDCEEEGAQGDDATPRLERRRKMRDSGGGKSGGGGDGRETRPGRPRG

SEQ ID NO: 263942 - protein, 146 aa, Zea mays
  Clone ID: MRT4577_172328C.1.pep
LTMTPHGTIQQAREFEPLNLMPGIGRIQDRQQSEPTPKSDKRTSCKIAGITLNRGYSPSHRRETEKNKGASHARQHRSDARRPPTTQAMHSARRLARFMVKERREPEAYLAAEGSNAVAGGGAGGDLRDGEAADPTYGSEGIHPGR

SEQ ID NO: 263943 - protein, 89 aa, Zea mays
  unsure (1)..(89): unsure at all Xaa locations
  Clone ID: MRT4577_172329C.1.pep
FIYKFTTFAYYTQTXPTWGGPSFKSTGPTYLTELPTLKNDKSIISSQSPNNIQSISNEPSKDAIRSTSAFGGSNKTSLSSSPIHLMANN

SEQ ID NO: 263944 - protein, 46 aa, Zea mays
  Clone ID: MRT4577_17232C.1.pep
ERIIFISSHGTNLSGTCFTGFMQLLLALQCKSDQQSPTIPAGSSEC

SEQ ID NO: 263945 - protein, 147 aa, Zea mays
  unsure (1)..(147): unsure at all Xaa locations
  Clone ID: MRT4577_172330C.1.pep
RQDTSEGAAESTFLGTRLAXDSAPLQGRIEYRKGFGLGGXAKPATKKVAKTXTYYDGAVWIPCAVAHDYLDRSLIGDYGFNTFGVGKPAKYLTVGVVXLDQNLXKNEDGGIIVNRFECSEASATXLKPYSEEFGASARSRKLQADGT

SEQ ID NO: 263946 - protein, 358 aa, Zea mays
  unsure (1)..(358): unsure at all Xaa locations
  Clone ID: MRT4577_172331C.1.pep
TLEAGRERRRGAENPSRVGEKRKAPDDAAQGAGEDEEEAFDDESKLLRTVFVGNLPLRTKRKVLIKEFAAFGEIESVRIRSVPLVDTKLSRRGAVLQGKVNGLVDNVHAYIVFKDEQSARAALSHNMALFGGNHIRVDMACPPRKKLRGEGPLYDRKRTVFVGNLPFDVKDEEVYQAFCSSSGSEGDVEAIRVIRDPSSSLGKGIAYVLFKTREAANSVARKRDMKIRAXRVRLTHAKPVDAAPKKTEVKKRSRVPNHKEVSTPGSKSNEGSDKAKRKASVLSYQGLRSSKSGVVKKVKVTQQPSNQGKQRKTDETGATAGKAKRPAVAARKAKQLAKKRKVDASTPENTHRSKKPRK

SEQ ID NO: 263947 - protein, 77 aa, Zea mays
  Clone ID: MRT4577_172332C.1.pep
RIWCDNIGATYLTANPVFHGRVKHVEIDFHFVRERVARKLLDVRVISTNDQIADGFTKALTKKKMDLFRDNLNLCKL

SEQ ID NO: 263948 - protein, 42 aa, Zea mays
  Clone ID: MRT4577_172333C.1.pep
EPHLLNNKIRLFKTRLNVYGYTADKKSLIDFQYGHRITFQRE

SEQ ID NO: 263949 - protein, 104 aa, Zea mays
  Clone ID: MRT4577_172334C.1.pep
FGRRLSLPCTNMFTTFFMRLILWYLFLTTPCIFLLLISISVFMATSSSIIELARSRSCSHSVFPTTPSLAHALFYRLLWCDSCVSFHRDPYLLFNSPYAFDEGF

SEQ ID NO: 263950 - protein, 181 aa, Zea mays
  Clone ID: MRT4577_172335C.1.pep
PIQSFHPAASKRRTCFVSSSLRFHGFRSEGRRCRGWAAQNTKHPTTLIGLSMTRYFTWTFYQTPYGCGWCGTTGGCPAARGCCYWRPWKELGRPWEMAGTGKWRLGEHHRRGGAGKERLGGGTGWTQGNGGRAGSIISQRWRRGSKRHPRRASEGSEQGGCPWIERENVWGGGDVKKPGSW

SEQ ID NO: 263951 - protein, 134 aa, Zea mays
  Clone ID: MRT4577_172336C.1.pep
HDTSLGHFIKHHTGADGAGLPEDVRQRGAAAIGVHRRSWGGHGRWLEQGSGGWANTIEGEVQGRRGSAEVPAGRRGMVGGQGASSANVGVGAANGTHGEHRRDQSREGVHGLRGERENVWGEGDVKKPGCVVSP

SEQ ID NO: 263952 - protein, 58 aa, Zea mays
  Clone ID: MRT4577_172337C.1.pep
PVEKNIACLRVLLCLTAHVWTLLLLMRAFGWEAGLHLFLFQKRTHQALITLPAPAAVR

SEQ ID NO: 263953 - protein, 124 aa, Zea mays
  Clone ID: MRT4577_172338C.1.pep
TSDEAACELPGAGGPVLWLCGKRVVVSNLFDQQPSSNTGSLQRQRVADMELDASAPESPTSCGTGKKLSSHAAEEAKTWHPWLTGTRQFMHCLPQGEEVFSVHSACRPLSYGDGSMPCTTVWNA

SEQ ID NO: 263954 - protein, 83 aa, Zea mays
  Clone ID: MRT4577_172339C.1.pep
PVHAFVECRHLGGPYTNVHAGCVQPAKILCWKGHSGIISSYNIFETAPLVTPSWWSTPTPFLLATTTLVNREHCLLYVCTTVP

SEQ ID NO: 263955 - protein, 428 aa, Zea mays
  Clone ID: MRT4577_17233C.1.pep
SHGLKDGWYDGVSIFLAVFLVAAVSAVSNHGQARRFDRLATESDNIAVAVVRGGRRQELSIFEVVVGDVVVLNIGDAVPADGVFMQGHALQVDESSMTGEPHPVDIDAEKNPFLASGVKVIDGCGHMLVTAVGTDTAWGEMMGSITREKTEPTPLQERLEALTSSIGKVGIAVAVLVFAVLTARHFTGSTRDEQGNPTFDRHHVSFNTVFTALVGIFQQAITIIVVAIPEGLPLAVTLTLAFSMKRMVKEHALVRTLSACETMGSVTAICTDKTGTLTLNQMKVTEFWVGTDRPKAAATVAAAVVSFLRQGAGLNTTGSVYKPDNVSPPEISGSPTEKALLSWAVAELGMDADALKRSCKVLHVEAFNSDKKRSGVMIRDNATGALTAHWKGAAEMVLASCSAYVGSDGAARELDAGKRRKLQEIISG

SEQ ID NO: 263956 - protein, 644 aa, Zea mays
  Clone ID: MRT4577_172340C.1.pep
LHSWGLLVAKFCAVAETRPEDNIDISFFFPVKRAVLRGVIKRIGILCSCSSCKGRKVVSPYYFEVHAGSTKKHPSDYIFLENGNNLHDVLRACTNATLDMLEPAIRKAIGPAPQERISRCKSCKSSFSTLRSGKFALFCDSCLESKGAKNNISSSKVGRSQTSSAKVYKSASPGAKSSSVGRLTRKDKGMHKVVFMSGILPEGTDVGYYVGGKRLLDGYIKELGIYCHCCSTVVSPSQFEGHAGRAARRKPYHNIYMSNGVSLHELSISLLKGQKMSNRQSDDLCSICSDGGQLLLCDTCPRAFHRECVGLSSATKGTWCCRYCENRQQRESCLAYNNNAIAAGRVEGVDALEQIFTRSIRIATTLETGFGGCALCKLHDFSKKKFSTRTVLLCDQCGREYHVGCLKEHNMADLTALPEGAWYCSTDCVRINQTLQDLLNSGGEPVLAMDLDVIKKKREVKGFNDDDADLDVRWRVLKDKSSDDSKLVLSKAVAIFHETFDPIIQVSTGRDLIPAMVYGRSARDQDYTGMYCTVLTVNNIVVSAGLFRIMGSEIAELPLVATSRDRQGLGYFQALFSCIERLLSSLEVKHFVLPAAEEAESIWTERFGFAKISQDELREYLKGGRTTVFQGTSNLHKLVAKLEC

SEQ ID NO: 263957 - protein, 114 aa, Zea mays
  Clone ID: MRT4577_172341C.1.pep
AIFSSTSPEPTATLTHTPEANLSNTYDWQVLSATLECRTEVVEKKLLQGLVRKSRKANYIQPRSGMWRSTRLVEYKRGCRGAGVWGPSEPGSRTNCLPTTTACWSRSLSSPTRY

SEQ ID NO: 263958 - protein, 46 aa, Zea mays
  Clone ID: MRT4577_172342C.1.pep
FLDENANKTVIQYVHLGKITDFFYRIEGLNKYNNNDHHKANNPYHH

SEQ ID NO: 263959 - protein, 92 aa, Zea mays
  Clone ID: MRT4577_172343C.1.pep
TPWEPEAPAQREKSLFLCPWAYFLCAVGKVCPGGAFFFHPGVLPFFLNPGVKPPTLFPPLFLLCFLPGGPGPFWSRPFFTKWFFFKTGPPGF

SEQ ID NO: 263960 - protein, 93 aa, Zea mays
  Clone ID: MRT4577_172344C.1.pep
KKKKKKNKIKKKKNLKVKKKKIFFYLGRFPLWGKFSNGPLPGGPFKFSFLGGPHFSLVGEFAFKLPWLKILKGACFEKTFVLKNLKVLKKIPF

SEQ ID NO: 263961 - protein, 54 aa, Zea mays
  Clone ID: MRT4577_172345C.1.pep
KKKKKKKKKKGEGRKKKNKYKGSKNNGNAYQCKIYSYFNSDSLNQIHWNVVFEQ

SEQ ID NO: 263962 - protein, 184 aa, Zea mays
  unsure (1)..(184): unsure at all Xaa locations
  Clone ID: MRT4577_172346C.1.pep
DHAPVPHTPRTLRGQRKRRHENSSVAASPGLPGLQRGESGDWWRGLPPKFSAAPRRNAGFPPGRFGLSCITVLESASPSHGSGQSLHLAAQNARRESGRVSFWVSPKGLGPSLFLRQRFPFLHSFLSGPEKLVPRLGFQLGLAPLSIFGRKFSNGCMGYCRLLQCSLCVRSSCTKITXRNLIKR

SEQ ID NO: 263963 - protein, 568 aa, Zea mays
  Clone ID: MRT4577_172347C.1.pep
MNASQFMDKQILGLAASASPSGGGAGGGGGVDLSDLMIPIPQEDGEDRLRRRRSSSSVNGTSDDMLPSYDFQPIRTGGATAAAPVSQASWGSLDSKAPSASASASAAASYNLKSAGILEPHVLKKVSHEEDRSNFPTVTIADIDRTMKKYSDNLLHALEGVSSRLSQMEGRTHQLENSVDELKLTIGNYNGSTDGKLRHLENMLREVQAGVQILRDKQEIVEAQLHLAKLQTTKTDAHSSENSGSGHAGSQPVPPPQAAIQPQQVLTPSQPPALPALPAPNAPLPTLQSQPPSQFPSHLQHSQVPSVPSVAPVPSVPALPRDAYYAPSSQPTETMHQQYQAPPVPQPQAPPAPQQYQSPSQFPQYSQPSQPSNVNPPTPHVPPAPQQPEETMPYAPPQSYAPNARPPSPYMQPPSGPAPPYYGQQNPTMYEPPAGRANPGPPSSYGSGGYGPQGGSGFSDSYGYAGSPSHRGNAGMKPSTPFAQSSGGSGGYGSGRLPTAQILPQAVPVSSSSTSGASGNRVPLDDVVEKVATMGFSREQVRATVRRLTENGQNVDLNVVLDKLMNGR

SEQ ID NO: 263964 - protein, 172 aa, Zea mays
  Clone ID: MRT4577_172348C.1.pep
IGTLEAGRNDMRPPLREWMHLHDCVACARAYLLSRLLRRRVSALTLFSPLMTLASSACLRPVHYYLLSLRAPFQLCTPTYVAYKLYTTHHDILRMICPAIAEVHLQYLVLRALLPILRLPCARRCCHQRTSLVISPMMLEIPMKHLKIRLQERQLLLLYPPSYDTLESPNAL

SEQ ID NO: 263965 - protein, 71 aa, Zea mays
  Clone ID: MRT4577_172349C.1.pep
SRTQLAFYDLLLRFLHLLCFGFLSNLLVYSNYDCAIQCSNHGESWSVADSFAPVNDSLDSDDLCAQGNAHT

SEQ ID NO: 263966 - protein, 86 aa, Zea mays
  Clone ID: MRT4577_17234C.1.pep
PTRPLSPTTTHLNLFPTSPSTRTKSNFTPSMTLNNYYTSSIMTNYKKHPHYLNTYLNQHSTTITYSTNNNPSHPSSQFTHNHLLPI

SEQ ID NO: 263967 - protein, 45 aa, Zea mays
  unsure (1)..(45): unsure at all Xaa locations
  Clone ID: MRT4577_172350C.1.pep
QFFTTIKXNSPTNNTLTHKPMKPKYTRITLTISIKQLHNHHHPKA

SEQ ID NO: 263968 - protein, 40 aa, Zea mays
  Clone ID: MRT4577_172351C.1.pep
FNLLCPRSMTNQGFPAMDLNSIHYHVLCHTSDFDIIQETG

SEQ ID NO: 263969 - protein, 367 aa, Zea mays
  Clone ID: MRT4577_172352C.1.pep
MAGAKRGILLVLCLAVVLVALGSGGVEARKRGKQSLGFYELRRGEFSMVVTNWGATILSVRLPDKNGHIDDVVLGYKNIGSYVNDTTYFGALVGRVANRIAGGRFTIRDHAYHTYRNDGNNTLHGGHRGFNQVFWSVRERVTGEFPHITFAYRSYDGEQGFPGNLDVLVTYKIDGDCSYSVTMYARPLDKPTPVNLAQHTYWNLRGHGNGTVLRHAVQIFASAVTPVGRGLIPTGAVTPVAGTPFDFRAPAAPGAHIAEVEGGYDINYVLDGETDGQGVRKVAVVSEADSGRVMELWADQPGLQFYTGNMLKGDEGKGGAVYPKYAGMCLETQDYPDAVHEPAFPAEVYRPGQLYKHYMLYKFSISK

SEQ ID NO: 263970 - protein, 127 aa, Zea mays
  unsure (1)..(127): unsure at all Xaa locations
  Clone ID: MRT4577_172353C.1.pep
TASRATPSLYIPPFPVLAGIARHSVLNTGTNIPYVGLVTXQSDPGVLGNADYAVIKAAYLHIHXATFYMYEKKIALALKKLFQHGVMKLEDLFITYKLSNDHNAPEDMPXALNDSLNDMQLEYLHLY

SEQ ID NO: 263971 - protein, 94 aa, Zea mays
  unsure (1)..(94): unsure at all Xaa locations
  Clone ID: MRT4577_172354C.1.pep
MSNPETEEVAVQSNSVYTFGKKKKATAVAICKPGKGLIKVNGRPLESVQPELLRFKIFEPILTLGKDKFRCVDIKIRVKGXGGPVAQVYAIRQA

SEQ ID NO: 263972 - protein, 294 aa, Zea mays
  unsure (1)..(294): unsure at all Xaa locations
  Clone ID: MRT4577_172355C.1.pep
MKRPTSRGSSMVSGQATTDLQEDSCRSMEPHGVDGDATAAAERDDVDAGAYDXGGGRRRGXAGSRGGLGEKKRRLAADQVRALERSFEVDNKLDPERKARIARDLSLHPRQVAVWFQNRRARWKTKQIERDFAALRVRHDALRVECDALRRDKDALAAEIKELRGMVEKQMEVKLESAAEELLPVATRSAAAAAVYNKDGSTDSDSSAVFNEEASPYPYSGAALDHQQQQETSHPLGFTGFTSFLTSSFPSVYHGDSHLDQEADGFFSAAAAGDGFFAEEQSAGIGSWYGGEGW

SEQ ID NO: 263973 - protein, 106 aa, Zea mays
  Clone ID: MRT4577_172356C.1.pep
RSKSGDTVNGVTPSKHPMHKYTVRVVASGSAQSVSTSSSVSLLSVGGGDHQQSHAGLFLDDEEYGNNATGQRLKKARGGDEPVPKAGAFHFHHVQDMAALHEQTTT

SEQ ID NO: 263974 - protein, 95 aa, Zea mays
  Clone ID: MRT4577_172357C.1.pep
SIAGRRSPSRRLGGSTERWHRRTREARASVGAPEAWYVSHECGSRRLPMAPSAWLAPPMACQWPDPWPLSWVYSTETLCRLARTPQTVERSTASE

SEQ ID NO: 263975 - protein, 160 aa, Zea mays
  unsure (1)..(160): unsure at all Xaa locations
  Clone ID: MRT4577_172358C.1.pep
GKDEDGRLTANKFSXVRPSERDDKSRTTXDYKEPTTAPLCCPGSADMSLLAQPASPXIDDSFLFVYISILIVMRGSECTYECXATTISTASAXLFGGMIFFLVYCAAVISGXYIKPEMTYXGVYLAKNELLSNVWLYIMMQXLNAVCDMNVVMDGQNLLY

SEQ ID NO: 263976 - protein, 74 aa, Zea mays
  Clone ID: MRT4577_172359C.1.pep
RAGPRAPPGVPVRAGAGRRAGPRHGPREPHLHHRGHYLSHGGGRVRAREASPEVRWSMTWSRHLPLALSWTPTD

SEQ ID NO: 263977 - protein, 177 aa, Zea mays
  Clone ID: MRT4577_17235C.1.pep
IMSPLPYEGVSPLQAAVGFPQGLPPVLPNLPPPKVLAFLQNCWDSPPFFRPAFPFFLPVLGALLAPVQGPPGKSAPAPSPPCPPTDCPPCPPARRFFEFSALPCLGFASLFSGLVAFVFFSPPPPPLCPFLPSLGAFFYGPLLVPFLGDFGSSFWKNYILKKKKTKKKKKKKKNPPP

SEQ ID NO: 263978 - protein, 102 aa, Zea mays
  unsure (1)..(102): unsure at all Xaa locations
  Clone ID: MRT4577_172360C.1.pep
MAPPSCGCERFPRRLPPPPAFDYPPRPTPIECXPTDFVLRSRQIATLPCILHLRGTKPSYLGVHKRPRSVXLXPATINCVCTLQEISDSNHYAPPLYYNLKD

SEQ ID NO: 263979 - protein, 52 aa, Zea mays
  unsure (1)..(52): unsure at all Xaa locations
  Clone ID: MRT4577_172361C.1.pep
FLFTDAIXAVKFVHWSRGESFRPMIVYRVTHNNTMCWLMVPIQARAMLSTHL

SEQ ID NO: 263980 - protein, 82 aa, Zea mays
  Clone ID: MRT4577_172362C.1.pep
KKTSWRARNMRSYKVYSSRRLRSILLALVLPLVDWLYPGVPLLNRLSAHSPLVSCRPSDRALTSWPFSPLPPFYRPWDPLCS

SEQ ID NO: 263981 - protein, 101 aa, Zea mays
  Clone ID: MRT4577_172363C.1.pep
CVFLVLCVPCCGGSVPSPLAQAAWLGLFAGVSLELGFPGFPPSGGGRWLVIGCSCLVLRCVRVTIVALSGSLGGFVGPLWAVVCPPFSALRWGWSVVLHKS

SEQ ID NO: 263982 - protein, 101 aa, Zea mays
  Clone ID: MRT4577_172364C.1.pep
FFLLVVKPHKGRNGTTRWALIDWRMAAINGSAVTLGPRCGLLPSHLKIIPPYVSMYLSLHVIPCKQPDTGTQDPKGIHAVLILLKSQRLTKGGQSRQTRTL

SEQ ID NO: 263983 - protein, 88 aa, Zea mays
  Clone ID: MRT4577_172367C.1.pep
ITRSFSSSCGRTRRWRQRRRGRPRRRTTRTTARRVSRRRLRPRARARRRRRTPRPRGRISRGSAPTTLVAPRRRRPASLARFVRGTGA

SEQ ID NO: 263984 - protein, 231 aa, Zea mays
  Clone ID: MRT4577_172369C.1.pep
MASLLRPLVLVLLIASCAAQQSPPAQPPPTPNAPPANSPPQAPPAGNPPPAPQAPPAGNPPPAPTATPPPAPTTPPPAPTTPPPAPTTPPPAPTTPPPAPTTPPPSPPASPPPAPTTPPPSPPASPPPAPATPPPSPPMAPPPATPPPPATPPPPAAPTPAPSVAPTPPPVATPAASPKSPKTPSPAAATSPAPSLSPAGTPTNEDSGASARAVGFATVVALAGAGLAVLL

SEQ ID NO: 263985 - protein, 84 aa, Zea mays
  unsure (1)..(84): unsure at all Xaa locations
  Clone ID: MRT4577_17236C.1.pep
ITFTNPLPTGESLTFIMRPKSKXKHGKRGGKHKTPPTRSRQLRLPPQSLLQPQTTPRHHKKYAKTPSPGSAPTSSTFTTYPSTT

SEQ ID NO: 263986 - protein, 62 aa, Zea mays
  Clone ID: MRT4577_172370C.1.pep
KGALGGWCLFPCHFFLFFPSRRGKKKFAFFRRRAFVAALCFKSLIFLPCQGLVPSLIRGALF

SEQ ID NO: 263987 - protein, 32 aa, Zea mays
  Clone ID: MRT4577_172371C.1.pep
KVKILKNSRPLLKHTGLNMPKRFDSQLCSCPV

SEQ ID NO: 263988 - protein, 164 aa, Zea mays
  unsure (1)..(164): unsure at all Xaa locations
  Clone ID: MRT4577_172372C.1.pep
MAWVLRPLVLVLLIASCAAQQSPPAQAPPTPNAPAPPANSPPQAPPAGNPPPAPQAPPAGNPPPVPTDTPSPAPTTPPPAPTTPSPAPTTPPPAPTTPPPSPPASPPPAPATPPPSPPMAPPXATPPPPATPPPPAAPTPAPSVAPTPPAVATPAASPKSPKTP

SEQ ID NO: 263989 - protein, 239 aa, Zea mays
  unsure (1)..(239): unsure at all Xaa locations
  Clone ID: MRT4577_172373C.1.pep
GNSARGSAQVTTENGVTSPPSRPRAPXPPAQRSXSPPAQPPPTPNAPPANSPPQAPPAGNPPPAGNPPPAPTATPPPAPTTPPPAPTTPPPAPTTPPPAPTTPPPAPTTPPPSPPASPPPAPTTPPPSPPASPPPAPATPPPSPPMAPPPATPPPPATPPPPAAPTPAPSVAPTPPPVATPAASPKSPKTPXPPPRRPRRPRSRPRARRRTRTRVQARARSASPRWWRWRARASPFCFE

SEQ ID NO: 263990 - protein, 98 aa, Zea mays
  unsure (1)..(98): unsure at all Xaa locations
  Clone ID: MRT4577_172374C.1.pep
MGKEKSHINIEVIAHVHSGTSTTTGHLIYKLGGIDKRVIXRIETEAARMNKRPFTCALWXLDKLTADRERGITIDIALCKVETSKHYWAGIDAHGHRD

SEQ ID NO: 263991 - protein, 51 aa, Zea mays
  Clone ID: MRT4577_172375C.1.pep
NMIVKSPHLIRAEHRAARIGTWVTGPMPGNTMKAPGGLKTRAYDASPARLR

SEQ ID NO: 263992 - protein, 76 aa, Zea mays
  Clone ID: MRT4577_172376C.1.pep
VVQLAELLFRAVPLFVGHPDSPSVRLSLSVSLLSSSVLPRGFQESPVLHLVLLVLGLSPPWCCWVFLSSSMIGEKR

SEQ ID NO: 263993 - protein, 138 aa, Zea mays
  Clone ID: MRT4577_172377C.1.pep
YFRKLGWDPKDGESHLDVMLRSLLLTALVRLGHNETINEGVRRFHIFFEDGKTSLLPPDTRKAAYLAVMRTVSTSSRSGFDALLKIYREASEPQEKSRVLGSLSSSPDQDIVLEALNFMFTDEVRSHAVFYILDGISL

SEQ ID NO: 263994 - protein, 66 aa, Zea mays
  Clone ID: MRT4577_172378C.1.pep
SVERLGANVNEGGCHQIIGHCFNTHAEMEPVVITTNRPIRMTDPGPELLLTYYRDTMNSNFNARQM

SEQ ID NO: 263995 - protein, 70 aa, Zea mays
  unsure (1)..(70): unsure at all Xaa locations
  Clone ID: MRT4577_172379C.1.pep
PTYGFTFKCDERSEKRLENWAKLKEKMHXATQIEISYLQAKSKETEEAKLRMLVKEIDFXATSMPSLYKN

SEQ ID NO: 263996 - protein, 71 aa, Zea mays
  Clone ID: MRT4577_17237C.1.pep
PPPSLYSTYPSLVYILYCTEPPGVGSSGGPRHDRFLFTGGRIAAPSVALGGGSASSFGGSPGEQLPAIGLS

SEQ ID NO: 263997 - protein, 121 aa, Zea mays
  Clone ID: MRT4577_172380C.1.pep
GVIADEAHGEPGLGPNEPAAQEGEAPALARRAQGHRKAARGLPCGGSVHGTLLPEGEDPPHGPETDDRPCSQLPTGVGNADPLVRGLAYPHEAGFEEATGEKGPDIRPNYGHLSDAIEASC

SEQ ID NO: 263998 - protein, 60 aa, Zea mays
  Clone ID: MRT4577_172381C.1.pep
FHEKTEESTLIKARMKLHRKCFDQFHMLHYVLNITKRPWLSQQVWGVQALQSFYQIFLQP

SEQ ID NO: 263999 - protein, 77 aa, Zea mays
  Clone ID: MRT4577_172382C.1.pep
MGCAPKWGCPVPCPGGKNSRCPSGSGGQGEPTPWGWGEPCESSPCTCGRAPIPSARENRRVNCSWGGSCNWASCPWA

SEQ ID NO: 264000 - protein, 79 aa, Zea mays
  Clone ID: MRT4577_172383C.1.pep
LGYGEQRATSLFLTKPALSWAANTRPDHILTHTYALEEGRGANKHHHKKRALHAQHPSLFYTQKTYVQTIEQPRTNKTE

SEQ ID NO: 264001 - protein, 347 aa, Zea mays
  Clone ID: MRT4577_172384C.1.pep
CTRVAPVDPQTKARDLPFNRPAWLTTHNSFARLGQRSQTGVAIATPWNQQDTVTEQLNNGVRGLMLDMYDFRNDVWLCHSYGGICQNFTAFQPAVNVLREVERFLSRNPAEVVTIFVEDYVESPMGLTRVLNASGLARYVLPAWRMPKSGGDWPLLSDMVRDNHRLLVFTSKAAKEAAEGVAYEWRYVVENQYGTKGMVKGTCHNRAESAAMNDLSRSLVLVNYFRDLPNLPAACKDNSAQLLDMVTACHDKSGDRWPNFIAVDFYKRSDRGGAAEATDKANGGLVCGCGSISACNANGTCTPRHGRTPRGIFNASSDAAAWRPPPPVLQWQRLILLPSLLALLLGL

SEQ ID NO: 264002 - protein, 98 aa, Zea mays
  Clone ID: MRT4577_172385C.1.pep
NACVGKYCSAEAYDLTISRPRLNRFIGPNQYHCPDRTCVCRFVRPRPKFFGSLSQLAQTTFLDITNLRIWTVKNRLVSTSNLIRFVEKIINFCMCGRV

SEQ ID NO: 264003 - protein, 169 aa, Zea mays
  unsure (1)..(169): unsure at all Xaa locations
  Clone ID: MRT4577_172386C.1.pep
QKTRPPATEKAXPKQGTGDNPSXKRGNAGDGGTXTNTTAKRHXGGEXXYKYXPTIXVEVHALDFTTNCGKIRFYCWDTAGQEKFGGLRDGYYIHGQRAEIMSDVTSMLTYKKVPTRHRDLCRVCENIPIVLCGNKVDVNNRXAKAKQVTFHRXKKNLQSYXEISTKTNY

SEQ ID NO: 264004 - protein, 51 aa, Zea mays
  Clone ID: MRT4577_172387C.1.pep
PLCYSLFPYRAVHDATPDVPIFVYLTPFNTMLVYLIHLTTWPWTPAPKSPT

SEQ ID NO: 264005 - protein, 141 aa, Zea mays
  unsure (1)..(141): unsure at all Xaa locations
  Clone ID: MRT4577_172388C.1.pep
IPQCSLAPSSIITQFLPPVTSMGFEHPAVQAYRLQQAIAASVLQQPISQLQQQSLDIYNTTIERTAQQFYQTDHLAWXDPAAXLEQQCLINPLALATXVETSTQQLNSSAALATSLVTLPLPTQQQLLXISPLAXXNAPTY

SEQ ID NO: 264006 - protein, 55 aa, Zea mays
  Clone ID: MRT4577_172389C.1.pep
MDSSIALRFECSFERVCRVAFPGRADPIARPLRSTTAYRAAAWPATRTTTCYTTS

SEQ ID NO: 264007 - protein, 163 aa, Zea mays
  Clone ID: MRT4577_17238C.1.pep
MLPISILLMSSLSGAVSTTFTLANSCGYTVWPGLLSSAGSAPLPTTGFALAPGESRVVDAPAAWSGRIWGRTRCAADNQASGRFACATGECGSGAVECAGGGAAPPTTLAEFTLDGAGGNDFYDVSLVDGSNLPMAVVPQGGAGTSCGATGCLADLNGPCPAD

SEQ ID NO: 264008 - protein, 101 aa, Zea mays
  Clone ID: MRT4577_172390C.1.pep
MEAGGKDGNPLKNYRIGKTLGIGSFGKVKIAEHIKTGHKVAVKILNRRKIKNMEMEEKVKREIKILRLFMHPHIIRLYEVIEAPADIYVVMEYVKSGELFD

SEQ ID NO: 264009 - protein, 92 aa, Zea mays
  Clone ID: MRT4577_172391C.1.pep
LSQKEKLLDQLNEGITPCAILSHTQQISIFIHSQPNVFPSPFYPIHISKLLGRLSTDLIFLSLVNRYLLFVPLSLSGSPSLLNHECFPLNMN

SEQ ID NO: 264010 - protein, 90 aa, Zea mays
  Clone ID: MRT4577_172392C.1.pep
LGFGRRLPSIFAAPLFRGIRALCWRGRPFSPLAFYSGGDFAGGRGLLRKGSRPAVPDGVHSFKLSQRTSFMLAHPPCPRAAFYVASLAML

SEQ ID NO: 264011 - protein, 129 aa, Zea mays
  unsure (1)..(129): unsure at all Xaa locations
  Clone ID: MRT4577_172393C.1.pep
ERGVRYNYTQETVGSSSVQTHTDSCVLTVLEEGEFLFGLDVLDPGTGNVLPLDPTSGSFLNNMXDTHAHAXSTGMLHNGKHRIHVHXASHYISICIDLLQAKDDRVSSPEANVYPAHPFCDKPVNYYDY

SEQ ID NO: 264012 - protein, 105 aa, Zea mays
  Clone ID: MRT4577_172394C.1.pep
IVLFLFMDDPGQLVSFSLSIIAVFMVCLFLISCPLSFYMPWAAFSSCFSLAWVVVVCAVAFVRLMVCRCPPALLFATRVQPSGCRFNGASIERIPLWVLSATVPH

SEQ ID NO: 264013 - protein, 91 aa, Zea mays
  Clone ID: MRT4577_172395C.1.pep
IVSSSSLIRLPKILFYTVRRVKFNMGVSMGKSLSWQIVFWCKDLENTPVNTWENHLSEREGGATNQGAAQMPTSIHLCCGEEPHLVMSDFV

SEQ ID NO: 264014 - protein, 49 aa, Zea mays
  Clone ID: MRT4577_172396C.1.pep
AIQICCCASLRIIMQSPRINMQVRAGLSHVSLYFVCVLYDKYVPFLSHD

SEQ ID NO: 264015 - protein, 147 aa, Zea mays
  Clone ID: MRT4577_172397C.1.pep
APALARVSGSAAAACARSPRPACSRLRSRAPTAAATSRMPLILAHDALTPSPTQVPFGASAPHFPLPLSHTRPHLRYHRRSRRAACAAAPSPVTWCPAASGSHRRPPRSLRGAIVEITICFRDARNRRSIVADQVIWFLQFYDIEAP

SEQ ID NO: 264016 - protein, 83 aa, Zea mays
  Clone ID: MRT4577_172398C.1.pep
HRTQSRAKSIRATPFLCPCIYYWSYRTFPCAFSLYIYMYKDSKTCLIFISGISIIISRVKRQFGLHRGWCGSWTKGTKKEKLV

SEQ ID NO: 264017 - protein, 74 aa, Zea mays
  Clone ID: MRT4577_172399C.1.pep
SLQAVAVRYVLPSDCWPAPYHAHGLNISCPLATSYNLVLSEIGSAIMAYGASRLESALVLEHPLCRRWVAGDRG

SEQ ID NO: 264018 - protein, 93 aa, Zea mays
  Clone ID: MRT4577_17239C.1.pep
QINQQHTGNPAAYLQQQQKHTSRPLAVANEQKYKQQQQKQQNEPALTQQDGANPAAYRQQQLPINQQNKTNKTATNNNTTVLIHSRANPRTCL

SEQ ID NO: 264019 - protein, 60 aa, Zea mays
  Clone ID: MRT4577_1723C.1.pep
AKQVQGIKCCRAGAGEKFKKRAWWFPFGSCLPWFPHLIVNHMGLAPPVAFLNDHQGWGGP

SEQ ID NO: 264020 - protein, 119 aa, Zea mays
  Clone ID: MRT4577_172400C.1.pep
SRSMPDASVNNLCQPEKQRLLNYSSVPCRCMIPRCANLCLPFSLIQAATVLVLFSYARVQWPKHLLYSSVSCRRSGRSLRSRRLTCCLPRGALQYAPPATVLSVIRRLSLPKKASTDRG

SEQ ID NO: 264021 - protein, 228 aa, Zea mays
  Clone ID: MRT4577_172401C.1.pep
MAWEEEAVEEEDYGEEMSASESEEDVVVGQMPTVMVPKHINKRSLKNKALSVTLDKKALRDFVTGFHKRKKKRRKEAQKILQEKERKKKIQDRKRRKEEKEIALYGRVLTSDKNDGAGLENEDIGDDGEDMENDKPLSEIKTYEDDGTRTVVTTSEITPEEDDIVPKTVGPVATSLTSKNPSSFAKKNSSLGVKRKPPKRTFKSKARAKRGDKKRGAAKGKRKGKGMK

SEQ ID NO: 264022 - protein, 65 aa, Zea mays
  Clone ID: MRT4577_172402C.1.pep
MLALLTLRRDLSQEPFPMGTNIRPRSGRSRTSSGEENHHDIQTVLTNGDTSSNGADTSGPTKDTE

SEQ ID NO: 264023 - protein, 126 aa, Zea mays
  Clone ID: MRT4577_172403C.1.pep
HACATVRFVFIFVSFFMLYTYHNMVTICLLSKIMTKHGCLLTKSGYLHSNMCLRSLLHLATQMMDSILIRGTPLPRRDAMQIITICLVANNNSGLDTHLAIYLDHRWNISNGKYCSNIQLLEYAIG

SEQ ID NO: 264024 - protein, 107 aa, Zea mays
  unsure (1)..(107): unsure at all Xaa locations
  Clone ID: MRT4577_172404C.1.pep
GASPGSAVPPPXGXXVXXXLFLXVXPXXCSXPLXALXXVLLXGLSSXPLLXSXLPLXCXPRRFAFPPPSFALCXXXFXCXGXSRALSCVXLLSSCXPSLCLGVLSFV

SEQ ID NO: 264025 - protein, 60 aa, Zea mays
  Clone ID: MRT4577_172405C.1.pep
ICCVFWSLDLDQASTCLLARPKVNMLKRKKKKKKKENKKKKKLGRQYSRSKITNSNAMKS

SEQ ID NO: 264026 - protein, 45 aa, Zea mays
  Clone ID: MRT4577_172406C.1.pep
ANNALPVLYLHSLIAHTSTQITQCSYDTMSRKRLHTDKLEPTYDD

SEQ ID NO: 264027 - protein, 89 aa, Zea mays
  Clone ID: MRT4577_172407C.1.pep
GFGVLGLVVDVLCLGEWRFGYGVAGGVRGWVDSLVCCMQCIEGVLYWGFNMCNGVFGEFMGFLAVRVVFEVRLVLFDVKVAFLYLELCV

SEQ ID NO: 264028 - protein, 75 aa, Zea mays
  Clone ID: MRT4577_172408C.1.pep
FINAVNIAITKGNMQYSTLILNGHHGIYKTLRASLGVRKLKGIRGAKITFLFKLNKKVILAPSIPVFGLSNEPKG

SEQ ID NO: 264029 - protein, 74 aa, Zea mays
  Clone ID: MRT4577_172409C.1.pep
TVRACWTFLIFPLLKANIDSMFMDIYVHRWLTSSKHAYRSSRHQPRNLYPSYMMLYLGMKTDTYSDLSLLPTRQ

SEQ ID NO: 264030 - protein, 415 aa, Zea mays
  Clone ID: MRT4577_17240C.1.pep
RGGIRFRRRRHSPPSPPPPLDAHPLPYPWPLTVSSTFSERRQALRLPPTTRAAGWGRPRTQRVDVWQGAAGIRRASVSCSSTSSGGQGGLTYKDAGVDIDAGAELVRRIARMAPGIGGFGGLFPYNDDYLVASTDGVGTKLKLAFETGIHDTIGIDLVAMSVNDIVTLGAKPLFFLDYYATSKLDVDLAEKVIKGIRDGCEQSDCALLGGETAEMPGFYAEGEYDLSGFAVGVVKKNKVIDGKSIVKGDVLIGLPSSGVHSNGFSLVRRVLEKSGLSLDDQLPRNDGITTTVGEALMAPTFIYVKQVLEIISKGGVKGLAHITGGGFTDNIPRVFPSGCGAKIFTGSWEIPPIFSWLQQAGNIDDAEMRRTFNMGIGMVLVVSRESADRIIEDTHGSNPAYRIGEVIEGDGVQYV

SEQ ID NO: 264031 - protein, 71 aa, Zea mays
  Clone ID: MRT4577_172410C.1.pep
FILLWEYRVSKLALKECRTYICYAMNIHSMIRRPFMFELPDLESGYTLDASCLTYKVAPSSSLALLLNAGP

SEQ ID NO: 264032 - protein, 89 aa, Zea mays
  Clone ID: MRT4577_172411C.1.pep
AVIPFLVPGLADPVILRQGVCTGRLSKPLQRFRRGHSCPLGFSSLINTVPLPAGGRLKSKTKEPRQSKHCAWTPLTARRRSKYTSSSFN

SEQ ID NO: 264033 - protein, 41 aa, Zea mays
  Clone ID: MRT4577_172412C.1.pep
GAYGPVYIMAAFVGTPNVLSIVLVGLRTPRSRPKFRIRACG

SEQ ID NO: 264034 - protein, 74 aa, Zea mays
  Clone ID: MRT4577_172413C.1.pep
HTIAACNALSRLYTVPRMHDVPSLASLVTGSTALSSERRFPYAILRCLYTAMHSVLGGSIQVSMSSISRESSIR

SEQ ID NO: 264035 - protein, 44 aa, Zea mays
  Clone ID: MRT4577_172414C.1.pep
HLGVRFCVTRLCQFTLALTIVSLLKFIYILCQTIHFMLLSLRIY

SEQ ID NO: 264036 - protein, 127 aa, Zea mays
  Clone ID: MRT4577_172415C.1.pep
GQRTTLYPLGNRTSGLADKVPPNPYQQKAKAPANGTNNGDTWTKDAAETGNGKTRQIQPTNPEDPNPRMIKTELTIKLETTTGEGPWDGTNAWTIRPNRRKPTSSSSPPLPQPTEWGKGFLLGAGRV

SEQ ID NO: 264037 - protein, 129 aa, Zea mays
  Clone ID: MRT4577_172416C.1.pep
GTTKLFFEFSTKTPNIHTLIHPGIKKWGKSRFFCHINYHPETHFSYWPPDYIFRDKRGRALDVARLIIHQARDAELLPLETFPLQENWGMHPQSLGKGGPQQGQQLAGLGPQETSGTLKMYYPGIVQGP

SEQ ID NO: 264038 - protein, 66 aa, Zea mays
  Clone ID: MRT4577_172417C.1.pep
ERLPGGHKGDRHARGRTGGAFGQRGPPGGALGQRGHPGGALAPGPGGPGEKKGFLAKFKEKRPGQP

SEQ ID NO: 264039 - protein, 51 aa, Zea mays
  Clone ID: MRT4577_172418C.1.pep
MPWHNTFRIKKKMSKNMSQNRPIPYWIRMSTDYTITDNAKRTHWRRTKIGF

SEQ ID NO: 264040 - protein, 48 aa, Zea mays
  Clone ID: MRT4577_172419C.1.pep
WFLNKILLSRENWFFEVLGKAHFTRRYQAFFFKKGKSAAFLKNKSPKF

SEQ ID NO: 264041 - protein, 48 aa, Zea mays
  Clone ID: MRT4577_17241C.1.pep
NSVHLSLFLFLTIVFYYQVQGFYHTHFINQTSGYFFINLIHRFPHLTR

SEQ ID NO: 264042 - protein, 74 aa, Zea mays
  Clone ID: MRT4577_172420C.1.pep
LYGFLKVISSNQLMQCIVTPVCCLQIWGTPDPRRAGCVNRRVRLDVQMSWLFGFLLTARQNRTSCKESGFHSPS

SEQ ID NO: 264043 - protein, 50 aa, Zea mays
  Clone ID: MRT4577_172421C.1.pep
KKPSRQGQQELSCFSLRSRSFETPPYKKVPKCCLLVKAFIFGHKKNMLPM

SEQ ID NO: 264044 - protein, 134 aa, Zea mays
  unsure (1)..(134): unsure at all Xaa locations
  Clone ID: MRT4577_172422C.1.pep
MAFSNNSMRALLVLFLVCMGHGEKEESKGIDAKAFFPGGSFDITKLVSSVNVMTYITNAVQEAWSSAFVVTVKQTILIPKGDFLVXQLNFTVPCKGYLTIQVYVNLLATTDLIQYMDHGNWIXILLVDYLVITF

SEQ ID NO: 264045 - protein, 79 aa, Zea mays
  Clone ID: MRT4577_172424C.1.pep
KVIIVPQIRNTRCSIQTDSIAGMRSTQQHNQSTYNDSAVNIHKRNCTKSSRIYRVTVTLMHLHFSTTANQQVNSMHMSN

SEQ ID NO: 264046 - protein, 73 aa, Zea mays
  Clone ID: MRT4577_172425C.1.pep
RPICFTILRSKDTTGWRYAFTPLFLCMRSLPIFQDIEGICSFSPMLKASDSVTSFNQPLFVHPLRHSARFDAF

SEQ ID NO: 264047 - protein, 56 aa, Zea mays
  Clone ID: MRT4577_172426C.1.pep
LDCLVRMGRALLASACSSNQQTCTHVVLDPHLSHEKEYELSVHCIRPNCADFYYTR

SEQ ID NO: 264048 - protein, 207 aa, Zea mays
  unsure (1)..(207): unsure at all Xaa locations
  Clone ID: MRT4577_172427C.1.pep
GPSRAAGRASKTLLPNWPLCRRDACCWGYGARRARFLKLLDDRGLGGQGRVGDSGEWGWPGDGVGAPQAIEIICGLVQSSIPIDXLPLLEKRKLMNLLLLGVISLPTVXMVVPYGAFFVPDASGNGGGGTYAKDKLANDXITEKEWXNIXGPNDRTLAQGLXGDLTYLVREKDKTLATYWNNVGCSHLGWAVPWNXARNKLFCPCHG

SEQ ID NO: 264049 - protein, 94 aa, Zea mays
  unsure (1)..(94): unsure at all Xaa locations
  Clone ID: MRT4577_172428C.1.pep
IPRGVFPAVLLGFAPNVFAFPLGARGVLLVAPAYPWSALVMEXXRTASDRLGAPSFGFLFLRTSLGDGWPAARGWFLRGVALALCHAGCPRLLL

SEQ ID NO: 264050 - protein, 163 aa, Zea mays
  unsure (1)..(163): unsure at all Xaa locations
  Clone ID: MRT4577_172429C.1.pep
ADCFVTVRSKPGGLIQFDSGGGILSEREFTYQKLGGGVAAGYAAREFAKQGVKPGELAILEXGVAXFVXXALSKXXHNPTRAARLPPXXXXXGXXGEKXXXEXNTKKGXEXXPXTEXXKXXXXTKXXTXAXGANXTXEXXXXATGPPARKRTEXGTQGAEXNN

SEQ ID NO: 264051 - protein, 259 aa, Zea mays
  Clone ID: MRT4577_17242C.1.pep
MEIEQAMRGSSDVRLRAKYDAAVYIVRRAYALYPFEELAFSFNGGKDSTVLLHLLRAGYYLHRASSGGDVDDDSTVLQTVKNCPMRTIYFEDPDAFPEIDCFTYETASTYGLPLESIRTGYKSGLEALLKEKPTKAILLGTRNGDPNAVGQQEFSPSSPDWPPFMRVNPILDWSYSDVWSFLLTCKVQYCSLYDQGYTSIGSVHNTVPNQLLRDGPGGSYRPAYTLSDGSLERAGRAKKTGKRDGSANGTKNNGNETKQ

SEQ ID NO: 264052 - protein, 300 aa, Zea mays
  Clone ID: MRT4577_172430C.1.pep
QEHHLRGQQIPSLQKPPGPPQNFAVQLQNAQPGQPLQGHIPQIGQLQAPQSTGPVSSGQNISSMQLPGQPPASQPLMQRNASLGALHAPPSGQSNPMQAVPGQQQLPTSVAPQMLPQFRQQMPSQAPQLLLQQQAALQSSYQSSQQAIYQLQQQLQLMQQQSNLNQQPSAQVGSSAVSSTCNWTEHTSPEGFKYYYNSITRESKWEKPEEYVLYEQQQQKLLLLQQHQQNIAVQQLQSPPQGQSLPSMQPIQQLPQAQGQTQMHMKQQELNYSQFQAAGSIDPNRIQQGIPAAQERAWKN

SEQ ID NO: 264053 - protein, 158 aa, Zea mays
  Clone ID: MRT4577_172431C.1.pep
KTYQKREKRGLTTSEDFNLICYSVSMLYIWSKAGITAAAAAISEMKYRGGPGRLVGLGRVADECRYHGCCRSDGRQSDRYVWPSDHGYGGDSTVRGTWRDARGGGEHELGTQKGWRVAFFDMTREAWDDGSHRGEEVTGRRRRRRVRAELIPPAGSRS

SEQ ID NO: 264054 - protein, 471 aa, Zea mays
  Clone ID: MRT4577_172432C.1.pep
AAFGCTQPTLHFFSFLLLFCSSHLNKILVHKTNALRLRNIPLLVICTLFIHGHIFTFKHLCLHSITKILRNGPRAHFPFNPFLPPGAYRRETQLRAFYSTTEEISSLFAKQQEQLKAMQRTLEDEENYESTLMGVDLNKVPLATDNAGMKPVDCSKNTVGASSASPENTQVSEHDSSDEDANMTEQQDDDGTAIGGSTQGLECTSPERSEGRRSGFHGNPVSTAPEREVTDTEQVPETDSQAGNAGCDDQRCDNTGGETMPLEDDMLLPDNEEPTALLKDAGQPQANVVPIPIPGDGVGHCSEEKHEGACSESKREDTHAGAIRTADLLASEVAGSWAVETAPSVNGENESPRSLGDATEHDEAGGSVAGDALVTLVNSEGQAAGSQNNVERGSSKITHHHHHHRHHHRVLSAMIGIVDPEFRKQMSGRSGVGNEEPMSDAETGEGIEEGDSDSGSDGSDSEEAMVEDSVV

SEQ ID NO: 264055 - protein, 97 aa, Zea mays
  Clone ID: MRT4577_172433C.1.pep
MARVRSTARVSNEGEEAEATKTTPISEMMKCSRLVVREEEESLLTKYVVVAEAEPTIAEADSDDEEDDNILSPSKPSHIEFGKSTVKAEDLVLMKKL

SEQ ID NO: 264056 - protein, 71 aa, Zea mays
  Clone ID: MRT4577_172434C.1.pep
CVPYILKFQNRMLRINHTAWHTSVWLGHVTPALKCIASQRVTHVGAMVVCPTSNTTRPDHTGVCPLHFEKI

SEQ ID NO: 264057 - protein, 78 aa, Zea mays
  unsure (1)..(78): unsure at all Xaa locations
  Clone ID: MRT4577_172435C.1.pep
SMVMYVYKKNVAYPINWSFFIQAQRLIHKDKYITRFWTRGTXQNRGPDCSQVFCCEKKXTGTAGTRAAPLQALIQHRK

SEQ ID NO: 264058 - protein, 321 aa, Zea mays
  Clone ID: MRT4577_172436C.1.pep
MARRLPLWTALLLPFLLTGVGTAVAASPPHDECPVPTIVESVLSTRDACSTLDLGNPVGVMEGDEFTLATAVNLLHANKDDYIAVLFYASWCPFSQECKPNFETLASLFPTIRHFAFEESAIRPSIISRYGIHGFPTLFLLNSTMRVRYHGPRTVKPLAAFYTDVSGINASVNVKSTAGETMVHPLHDIERKKDAEQENCPFWWARSPEKILQQDTYLALATAFVILRLLYRLFPKIDSFARWAWRRHNLFANLMGAHEYFLTYLEQGRQKFHRLYPSSSKRGNLQEGAMNATAWASKSLASVSIGEPSAIGRTNSTSELR

SEQ ID NO: 264059 - protein, 90 aa, Zea mays
  unsure (1)..(90): unsure at all Xaa locations
  Clone ID: MRT4577_172437C.1.pep
SNEMXTRELXAVLPKERPLEKPCFLCSGAAIVLFGPFPAYDPAQQHATAKRIWKREQFASFEGCPNRLTESTHGPYPYFGLIYTQKVWSS

SEQ ID NO: 264060 - protein, 78 aa, Zea mays
  Clone ID: MRT4577_172438C.1.pep
DHDDNFPNNGGQALKNKGSQKKDLKHHVIQHLKRYHHEVERACQQRVLYGKEIVVRGNESCQIYQMQTSALKHCLITS

SEQ ID NO: 264061 - protein, 64 aa, Zea mays
  unsure (1)..(64): unsure at all Xaa locations
  Clone ID: MRT4577_172439C.1.pep
RLMFXRRPHPPLNKSNPFTARLTRSQKVVFLNRKXKXLVSLNLLLPYASEVLEPPPILVLAGIS

SEQ ID NO: 264062 - protein, 280 aa, Zea mays
  unsure (1)..(280): unsure at all Xaa locations
  Clone ID: MRT4577_17243C.1.pep
GRGLNNEPEFIDELLSLLSYEDEIPEKIRILGVLSLVALCQDRPHQPTVLSSVTSGGHRGILPILMQNTVDSIINGSMKWSIIFAEALLSLVSMLVSSTPGSLALQEAGFIPTILPLLKDTNTQHLHLVSKAVHVIESFLDYHNPSSAVFRDLGGLDDTIARLKLEVSQVEVDSKLIDHSTNEGNEVESYPPVQDIQPSCSESLILYHRKNLIKVLLRTISLATYVPGSSARVDGSEEDVLPPCLCAIFKRARTXXXXGVFSLAANVMSDLIHKDPXTCY

SEQ ID NO: 264063 - protein, 606 aa, Zea mays
  unsure (1)..(606): unsure at all Xaa locations
  Clone ID: MRT4577_172440C.1.pep
MAKLSCFPALLPGKRKKKTRKITDAIKASGNECPKVKPVEVELIDPTLGAGVVQDVVPAELSVPRGGXRNNKEAADQLVLVKESDLSDFDFSFHAAMKPVRSDSDVALDTSADAAVADTSPKLKRSCSNIETKRPGSRSAPEMPARSRSYGDLGNLVAGLALDATATPHGAPEASPASVKTSRTADRVMLKKRSSSQVLPSRSRKLWWRLFLWSHRNLHMPRSARTAHRSFSPGRHDGYTSDTFEEGPAADRKNKTVMVDESPPAASVPNQWVAFCAESSIHDRVSAWVSSIESEPPFDIAEEDDDNYDGEDDEENGECAASQPRHLELGEPSSGKGGNSKSKRCATTADEVVQANTVVQSLNAFSSVAHISGMGLKVVPMIAPFSTLRAVNLSSNLIVHISPGSLPKGLHSLDLSRNKIASVEGLRELTKLRVLNLSYNRISRIGHGLSNCTAIRELYLAGNKISDVEGLHRLLKLAVLDLSFNKITTAKALGQLVANYHSLLALNLVGNPVQANIGDDALRRAVTGLLPSLAYLNKQPVKPQRIAREVATDSIARAALSGSDSRSIRKRTSRRLTQSPRSSSLTRARGGGGGGSPTPRNTSRRR

SEQ ID NO: 264064 - protein, 62 aa, Zea mays
  Clone ID: MRT4577_172441C.1.pep
SSLGHHNPTSSPLFPLVRSPQERGGLAAAAGSPVFLFQNLYKMNDGEDIQPLVCDNATAMNK

SEQ ID NO: 264065 - protein, 100 aa, Zea mays
  Clone ID: MRT4577_172442C.1.pep
AKQGHTGELPISPLLLMLCEAAGSKPSAPHRGHWIAEAATRRWQGPRRTRRSRSRGSGRWSRPRRCGPTLSRTQRRPPRRPSWPGGEGPSRSGHGRRCYN

SEQ ID NO: 264066 - protein, 74 aa, Zea mays
  Clone ID: MRT4577_172443C.1.pep
RVPEQGGVGLTDVQARRRSSSRSSHAASTAASTPGAIPSVNALCKIHAANGWPPIHHYESIPLVVSRGPALPVP

SEQ ID NO: 264067 - protein, 90 aa, Zea mays
  unsure (1)..(90): unsure at all Xaa locations
  Clone ID: MRT4577_172444C.1.pep
GIDNTPMCKIADQKAPAVSLLPIALADDPEHYHQLTVKELKNARLPTLYTLGFSVHVCSSSTPXEILPNHLSNQYNTNAYSYLRNFKYLN

SEQ ID NO: 264068 - protein, 79 aa, Zea mays
  Clone ID: MRT4577_172445C.1.pep
VLSRQRALVPLRHLHETPRALAQGVSDPRSRHNRGGCRRRRIGTTVMVLDPGRPDVRHGKHWLALDERRPPKMDWRNAW

SEQ ID NO: 264069 - protein, 47 aa, Zea mays
  Clone ID: MRT4577_172446C.1.pep
MFGDLRCSLSPKRAMPHETDWALNSLGFEAHENKGHGLFLLDVPWPL

SEQ ID NO: 264070 - protein, 167 aa, Zea mays
  unsure (1)..(167): unsure at all Xaa locations
  Clone ID: MRT4577_172447C.1.pep
MPAEEAATEKENNDPAEKNSKVEKRLPVAKTAGXKDGAXGNKGKKKVNHSXETYNIYIFEVLWEVHPDFGISSKDMFIMNSFINXIFQKFAAESDKLTXYNKKPTVTSREIQISWRLVLPXELAKYVVSEGTKVVTKLTLFFRVVVLSWMELVHVPLVICYCYRCMI

SEQ ID NO: 264071 - protein, 48 aa, Zea mays
  Clone ID: MRT4577_172448C.1.pep
RDTFITRFKLFYNPLLNSNHFTFILQLFYFLFPFSTQLNPFCFHYPLS

SEQ ID NO: 264072 - protein, 86 aa, Zea mays
  Clone ID: MRT4577_172449C.1.pep
SAIFCFNLILPLKLQATSHRRTWLRIAIFHVPEIWAGNNLIQPNSTIKRKAHKKRADPLPEAFIRVEFGEAINRDKSPPTNVKRLL

SEQ ID NO: 264073 - protein, 97 aa, Zea mays
  Clone ID: MRT4577_17244C.1.pep
APRSQTPRGNSPAPSDREQVAAPPLPRQPTGPPPRPRRKVMLPGRRVRRAAQGASAGGVGGAPGSGGRPPPSTWWRAAGGEQQKGFWLGFKGKKWFA

SEQ ID NO: 264074 - protein, 146 aa, Zea mays
  Clone ID: MRT4577_172450C.1.pep
MHSFGHRANAVATFAVTILAAICFAASFSDNFNTPTPTASVKILNLNWFQKEANGNDEVFVFVAAEYETPQNALNQVSLWDGIIPAKEHAKFLIHTTNKYRFIDQGSNLKGKEFNLTMHWHIMPKTGKMFADKIVMTGYRLPELYR

SEQ ID NO: 264075 - protein, 101 aa, Zea mays
  Clone ID: MRT4577_172451C.1.pep
PCMKATAAAKNVPCSGAHTPVYHARTYTCSISNSAPHVPWLCAFVCVCVFECFIVAMHESNSSSQECTVLRSTHSSLPCTYVHMLDLYAFPSLAILKAAAD

SEQ ID NO: 264076 - protein, 120 aa, Zea mays
  Clone ID: MRT4577_172452C.1.pep
MHSFGHRANAVATFAVTILAAICFAASFSDNLNTPTPTASVKILNLNWFQKEANGNDEVSMTLNISADLSSLFTWNTKQVNVYFWYFRPFPSWSPFPVSTKFYCTRKYGFSFVYEVNTEK

SEQ ID NO: 264077 - protein, 167 aa, Zea mays
  Clone ID: MRT4577_172453C.1.pep
MHSFGHRANAVATFAVTILAAICFAASFSDNFNTPTPTASVKILNLNWFQKEANGNDEVSMTLNISADLSSLFTWNTKQVFVFVAAEYETPQNALNQVSLWDGIIPAKEHAKFLIHTTNKYRFIDQGSNLKGKEFNLTMHWHIMPKTGKMFADKIVMTGYRLPELYR

SEQ ID NO: 264078 - protein, 73 aa, Zea mays
  unsure (1)..(73): unsure at all Xaa locations
  Clone ID: MRT4577_172454C.1.pep
RCETPLPRASASSXRARARAHRPKGHQQKSPFDPVQVQPRPLPRKKKPGRQCRRRRSNRPCWVRVGNRASVSQ

SEQ ID NO: 264079 - protein, 102 aa, Zea mays
  unsure (1)..(102): unsure at all Xaa locations
  Clone ID: MRT4577_172455C.1.pep
VRPAADVTFIXTAKSKSTAYTLVWTRLHNGKXPTRAMDFNGILTIRNVQLSDAGTYVCTGYNMFAMDQGAAALHGQASGTLPPPWYHHRSAADRFSYERMAA

SEQ ID NO: 264080 - protein, 52 aa, Zea mays
  unsure (1)..(52): unsure at all Xaa locations
  Clone ID: MRT4577_172456C.1.pep
CTQEGVMKTRTSNSNKYKEGSHVMEYGDKTFKDEKXSFYQGFDPANANIANM

SEQ ID NO: 264081 - protein, 91 aa, Zea mays
  Clone ID: MRT4577_172457C.1.pep
VVLDRVKQPSSHPEVENLGPCQDGVNQSVADAFEGLDTEDKLAGVNSAVDCNLLDTYASGSATVIVTDEAPAQPNESNNSFMEYINTNGSN

SEQ ID NO: 264082 - protein, 303 aa, Zea mays
  Clone ID: MRT4577_172458C.1.pep
MASHHQQEQMMLHSQSQSQHQQETGRSGGGLYRTVSSAMEAGGTGVGAASSLIRQSSSPAGFLDHFGMDNGYGAMLRASMGMGFQEGVASDSLAGGGGGGGSGRLGGQLSFSSRQGSLMSQISEMDSQEDVVVGASSPDAGGGGDAAYMPGYPMSSGGWDDSSSALLPDSLPATNKRPRDSLEHGGGLAHQFSLPKTSSSEVAAIEKFLQFQDAVPCKVRAKRGCATHPRSIAWRVRRTKISERIRKLQELVPNMEKQTNTADMLDLAVDYIKDLQKQVKVLNDGRANCTCSGGGKLQDPFTS

SEQ ID NO: 264083 - protein, 91 aa, Zea mays
  unsure (1)..(91): unsure at all Xaa locations
  Clone ID: MRT4577_172459C.1.pep
KKFRFFLPGMHPVFDIFCVGCGPLVGWKYEAALXKSPRSKEGKFFLERSKVWGPSGSQFWFPQDPPLGGSAPLFFLRASHQVQACCFSPPL

SEQ ID NO: 264084 - protein, 60 aa, Zea mays
  Clone ID: MRT4577_17245C.1.pep
SNPPNQVVQTSELLRSRCNRTRPQVDEHTSISCLPFNQSSHISRSVLFLHGCFSLTTLIF

SEQ ID NO: 264085 - protein, 122 aa, Zea mays
  unsure (1)..(122): unsure at all Xaa locations
  Clone ID: MRT4577_172460C.1.pep
PLRPAKGALLFRCIVKANHLFAELADEDLHXYDVSITPVVPSQXVNSAVMKELVTFIDTXHLDGRGAAYDGRESVYTAGALPLTPQTFEHTVPDDENSLGGRQRHQTGQRAFQAVIESVVRA

SEQ ID NO: 264086 - protein, 127 aa, Zea mays
  unsure (1)..(127): unsure at all Xaa locations
  Clone ID: MRT4577_172461C.1.pep
TAQQKQQDKTQQHQGKEAKATGDRDTTNHKKQGKKTKEKNNQQGTTNAQRANKTPKPTRNSTRDKRXPPHTEDQNKGTLNATAKTKKAEPHLQQAAEAKPPGEGTEPQKQPRRATKAPTPAARVEDP

SEQ ID NO: 264087 - protein, 677 aa, Zea mays
  unsure (1)..(677): unsure at all Xaa locations
  Clone ID: MRT4577_172462C.1.pep
KGARGISKLGSRGKLILQKKNRSASDNNQLPSNGKADAIDARLTSKALIWGSSVLLLEDVVSVSYNSGVKHFTLHAYSTKKSLFRKTCRVQKDFCFIASTLDEAILWVTCFAEQSIYVNLLPRLGASSINQDSENPLSESLFDQPPIKCKSPQRVLVILNPRSGHGRSSKVFHEKAEPIFKLAGFQMEVVKTTHAGHAKSLVSTFDFSACPDGIVCVGGDGIVNEVLNGLLIRSDRAEAVSIPVGIIPAGSDNSLVWTVLGVRDPISASLLIVKGGFTALDILAVEWVQSGQIHFGSTVSYYGFVSDVLELSEKYQKKFGPLRYFVAGILKFLCLPSYFYELEYLPXAKGDGREWKRYRXQDKAHLSNVYTDVMHSRSKKEGIPRASSLSSIDSIMTPSRMSLGDVDTSGSTVASTEPSDYVRGLDPKAKRLSLGRSNIVSEPEEVLHPQPHHGSFWPRTRSKARADRNSVGITSTNDTRSSWAAPSMHDKEDISSTISDPGPIWDCEPKWDTGPKWDSELTWEPDHPIELPVPQEDMGIGAPMELVPNLDEKWVVRKGHFLGVLVCNHSCMTVQSLSSQVVAPKAIHDDNSLDLLLVGGKGRWKLLRFFILLQFGRHLSLPYVEYVKVKSVKLKPGANTHNGCGIDGELCRVKGQVLCSLLPEQCRLIGRRCRQSI

SEQ ID NO: 264088 - protein, 440 aa, Zea mays
  unsure (1)..(440): unsure at all Xaa locations
  Clone ID: MRT4577_172463C.1.pep
RAASGLGSVEGDGEGDVWGYAWVARAEVHVAATVGARFSRSHPLRRSLVGGSNSGFQPGXFKMIXMLTERARKFRYLQDLDTKKNATELSISRLEEDNRKLHEAYNEEMRNLHRRARENALRIFQENENLRIDLESKKRELNLRAKELDKISTENANDRKTLDDEKQKAKYDNSELELASIEQQRADADVLKLLADQEREKEDVLARMLQLEKELHEKQQLELEVERLNGTLQVMKHLEGDDDGGDIHEKMEKLSERFEREKKRLEDLSGDLVRKERESNDELQEARKELIKGLEEELNGRTAIGIKRMGELDEKPFQNACKTKYGKDEYEIKAAELVTSWQDELKKPSWHPFKMVEVNGENKEILDDDDTKLKFLWIEYGDDVCNAVKTALMEINEYNPSGRYVVPELWNFRKGRKATVKEVLKYLFSQMDTTTKRRRG

SEQ ID NO: 264089 - protein, 89 aa, Zea mays
  Clone ID: MRT4577_172464C.1.pep
QVDPPVRTVPLVELVDDVCKRGRSVIGIRTVGSLAGDDVDDLGRGLGVRSRGVGALGGRGRMRGHRGRRRGGRRLGGRRRGGGRGPHRG

SEQ ID NO: 264090 - protein, 84 aa, Zea mays
  Clone ID: MRT4577_172465C.1.pep
YTKQGFSPHYFANLNFASSGPPFTKGFFSPLPVGFAHPGLSFLPSPPLFFCRCRIRDAFHPILFEKVTGAGPTKSFLHANIEIC

SEQ ID NO: 264091 - protein, 100 aa, Zea mays
  unsure (1)..(100): unsure at all Xaa locations
  Clone ID: MRT4577_172466C.1.pep
LTRDHDAIEGVMLGSFTLKFGIXSXIYLDLRALDSHARVLSGVAWVLHGLPATRLYGLVCSVPYTGLRMTGILCVYRXIRMLKRRKEVKAHGNGKVIRGL

SEQ ID NO: 264092 - protein, 101 aa, Zea mays
  Clone ID: MRT4577_172467C.1.pep
PGVAHFQGLKGQFLNLQMGPRERNISVNPKINAPKWARRGVFLLGSPPGGGGGVMVKFKGPPPPNKLFQGVPTPGPPWGLFLKEPRFINKIRRVQNFNIYI

SEQ ID NO: 264093 - protein, 58 aa, Zea mays
  Clone ID: MRT4577_172468C.1.pep
LFSKFSVRVVIVCPSLPSGWFPNAGPYGARLPLVFLLRLLPPFFRWFSSPLLVKVHPP

SEQ ID NO: 264094 - protein, 62 aa, Zea mays
  Clone ID: MRT4577_172469C.1.pep
KHGVIGSGEDLLNPKAWAVKGKLVLWTTFLQRVKGRTPPVYWATGTSSSLLTTMNPLVRKRG

SEQ ID NO: 264095 - protein, 686 aa, Zea mays
  unsure (1)..(686): unsure at all Xaa locations
  Clone ID: MRT4577_17246C.1.pep
MISAKSNAAVYPCPEYAEVDPTGRYGRFSDVLGKGASKIVYKAFDXWNQVKLHDFLQSPEDLERLYCEIHLLKTLKHRNITEMFTSGTLRQYRQKHRRVNMWAVKHWCRQILSGLLYLHSHNPPIIHRDLKCDNIFVNGNQGEVKIGDLGLAAILRKSHAVHCVGTPEFMAPEVYEEEYNELVDIYSFGMCVLEMVTFEYPYSECTHPVQIYKKVISXLFDLXGTKPEALYKVKDPVLRRFVEKCLVSSSQRLSARELLEDPFLQGDDVAVSLDGGDYHVPTKYVRQPSYLGHTYSNGSMVSNGFSESMDEDALSEDCEDDDMKGQDGIDLFNENEDEPLGNVDITIKGRKSEDGGIFLRLRISDNDGRVRNIYFPFDVEADTALSVATEMIAELDITDHEVTRIADMIDGEVSALVPDWRPGPGIEEAPDTSYCHNCGSNVSSCGSLYAYMSSGRRGCQCAELHGRFEEITFQADGEQCDLQESAGSSDDGGGQTEHYVKSNESTHVNGLVQMGRRDLSNQLCFSSFQEQSCSYNRYENDTNHHVNGFDIKHEVKIAKYKARKMAQFKRAIHPSLDFDNAYGVNRGKPSLNKLQSFHVGKNHNFRVPTCDRSPGKVSTDYHSDLNSQVLQSRHPDPGAQRARHCEVNAAGSSTECMFTGRRYYTGAQLPPNLPRTKSVPLNAVDA

SEQ ID NO: 264096 - protein, 221 aa, Zea mays
  Clone ID: MRT4577_172470C.1.pep
MSAEFCAAAAGAVAMELGVGDVMGLQQGIAAATGPSSGDSDLGLLKRAGLAQAATSYPSPFLDQQKMLRFSKAAAAHTSPSGLDFGGGPSEQAFLLSRTKRPFTPSQWMELEHQALIYKYLNAKAPIPSSLLVSISKSFRSSNRVSWRPLYQGYANADSDPEPGRCRRTDGKKWRCSKEAMPDHKYCERHINRNRHRSRKPVETNLERGHQEVTTAAAGSL

SEQ ID NO: 264097 - protein, 125 aa, Zea mays
  Clone ID: MRT4577_172471C.1.pep
EKPLGGRRGTGGGKYGGVEPPGANLYGNRGKKTRRGAGSGPGANRGQGSRARGGNRQKSRPGGGTDKKEPPGAGSKPNRKDPGPVRFSRTVPADGSLQVTDEEGPDKGSGTTTSGETKTGLAFSP

SEQ ID NO: 264098 - protein, 44 aa, Zea mays
  Clone ID: MRT4577_172473C.1.pep
CAPRDEFYPANPKPMVLDDRLDLIYDDDISCTITNYVYLSTTRL

SEQ ID NO: 264099 - protein, 129 aa, Zea mays
  Clone ID: MRT4577_172474C.1.pep
EVVAYFSETLLSLDISYITYYQGTSTKGWATPTPCRRNDELAMFRKSKFAKSHNNDSVVDRYLIACSKPISGRSPVQEQHTLFFIWSFQNQPRAHLVLPEPAKSPRHTYTHLSIYTHGHPTPTPLTVTE

SEQ ID NO: 264100 - protein, 42 aa, Zea mays
  Clone ID: MRT4577_172475C.1.pep
CPLVIFTSDCILTRIVTMGGLLVALVILDLALCAIFIHTIDV

SEQ ID NO: 264101 - protein, 536 aa, Zea mays
  unsure (1)..(536): unsure at all Xaa locations
  Clone ID: MRT4577_172476C.1.pep
MVAATATAXMATAASPLLNGTRIPARLRHRGLSVRCAAVAGGAAEAPASTGARLSADCVVVGGGISGLCTAQALATRHGVGDVLVTEARARPGGNITTVERPEEGYLWEEGPNSFQPSDPVLTMAVDSGLKDDLVFGDPNAPRFVLWEGKLRPVPSKPADLPFFDLMSIPGKLRAGLGALGIRPPPPGREESVEEFVRRNLGAEVFERLIEPFCSGVYAGDPSKLSMKAAFGKVWRLEETGGSIIGGTIKTIQERSKNPKPPRDARLPKPKGQTVASFRKGLAMLPNAITSSLGSKVKLSWKLTSITKSDDKGYVLEYETPEGVVSVQAKSVIMTIPSYVASNILRPLSSDAADALSRFYYPPVAAVTVSYPKEAIRKECLIDGELQGFGQLHPRSQGVETLGTIYSSSLFPNRAPDGRVLLLNYIGGATNTGIVSKTESELVEAVDRDLRKMLINSTAVDPLVLGVRVWPQAIPQFLVGHLDLLEAAKAALDRGGYDGLFLGGNYVAGVALGRCVEGAYESASQISDFLTKYAYK

SEQ ID NO: 264102 - protein, 231 aa, Zea mays
  unsure (1)..(231): unsure at all Xaa locations
  Clone ID: MRT4577_172477C.1.pep
MRLVGLTGGIASGKSTVSNLFKDAGVPVVDADIVARDVVQKGTGGXWKKIVXAFGNDILLEGGEINRAYLGQIVFSDPSKRQLLNRLLAPHISWGIMWEMAKLWMKGYKVIILDIPLLFETKIDRWTNPVTVVWVNPETQIQRLMSRDGCSEEQAQNRVNAQLALDWKRSEADIVINNSGSLDDTRLQFQDVLRKVSEPLTWKERLRSRDGLISVVVCTAVGVLLARKNLL

SEQ ID NO: 264103 - protein, 101 aa, Zea mays
  Clone ID: MRT4577_172478C.1.pep
TRSNRHAGVHPSVAGPRPDSRCLFRGPALSPLSRRAVAPLPASLSLLAPRARGREGRAESARRGKGGIGEESEAGDRGRELRLVGGGSGWGWLPWLGLVSR

SEQ ID NO: 264104 - protein, 236 aa, Zea mays
  unsure (1)..(236): unsure at all Xaa locations
  Clone ID: MRT4577_172479C.1.pep
HPTSTLVPKSLSFYPPQDHPLTFSFRTRQSLTATTLFFPTLPSPPPKKNTRMQRTVVTINSNGRQSASFIRVAAALGWQVRAQMRDLNGIVARELSELDNVTVFIGALEDKKFLDDLFRSAQCAFINTTHWGDEVAIGRALADAAKKAGIQHYIYSSMPDHSVFGQGWKALPMWAPKFTVEQYVRQIGLPATFVYCGAYHNNFTGLDFPLFRMEHQYDGSFVWXAPFHPDQPLPWL

SEQ ID NO: 264105 - protein, 107 aa, Zea mays
  Clone ID: MRT4577_17247C.1.pep
LMTALCRWWSTTIGVSGPGYGFRWFLEESPTHSICRNGSGAVQKPSAVHADRDACMSSAMSDKCVVAQGGRRRFIDRQTADLQRARGLSLGGEATSFCYTTCPGGSG

SEQ ID NO: 264106 - protein, 96 aa, Zea mays
  unsure (1)..(96): unsure at all Xaa locations
  Clone ID: MRT4577_172480C.1.pep
WPDLDWFGWPSGRPQVFFQHVFVRRKRGGRGGSNPIFLVEPRRAXNFLVGPEESIAPEIITGAGHTXGLKWXALGFFFFEMLYGFPPSRGKPCQRP

SEQ ID NO: 264107 - protein, 108 aa, Zea mays
  Clone ID: MRT4577_172481C.1.pep
SAAYMTVARELVDGTQALCGERVVELLAAAAKAVPVDQHRVEARGVHGTREEHRHLILSLLHIGNALGHGVHMGASRVVLLRQLHHLGEQYPHVAVTRAPPTRPPMRH

SEQ ID NO: 264108 - protein, 100 aa, Zea mays
  Clone ID: MRT4577_172482C.1.pep
FKCLSCSKNCPHFRKLFPEYVEKYNQQLQLENTAAEPVPQENPAPAPSPAVQQAPTVANRAQPLAEARRDKNQKKAVPFWMVLVMFSVFGPVMAVPLMQL

SEQ ID NO: 264109 - protein, 54 aa, Zea mays
  Clone ID: MRT4577_172483C.1.pep
SHLLSILFSSFYNILTNKTLLSPNLIIFHHINLFSPNLISNTPPPIFLPNIFSS

SEQ ID NO: 264110 - protein, 77 aa, Zea mays
  Clone ID: MRT4577_172484C.1.pep
GLLYSMKTVRVTSSIIIASSGVNLSYLELLSVLSKFSSIFFYLLFFFLAVPIFFIFFFPLCFYFFFVFCFFFGCAMC

SEQ ID NO: 264111 - protein, 151 aa, Zea mays
  Clone ID: MRT4577_172485C.1.pep
EKPPDVLPPHFPKVLAVQMGGFSPKGPLVKVKGFFKVPPPQERKPPPAPKGKKKGLAGKAQRKKAPPPAKKKTAAPSLGPFKGGRKVGPKPTKKVGPGAPQPQTQPGRAPPFGGGKKVHKARAFLTGAVLVPPGGPPCFFLTRCNHWSFQF

SEQ ID NO: 264112 - protein, 130 aa, Zea mays
  Clone ID: MRT4577_172486C.1.pep
FPPKGRLVKVKVFFKVPPPQEKKPPPAPKGKKKGSAGKAQRKKAPPPAKKKTAAPSLGPFKEGRKVGPKQKKKVGPGAGQAKAKTGRAPPFGGGKKVHKARALLTGAVLVPPRGPPCFFLTRCNHWSFQD

SEQ ID NO: 264113 - protein, 70 aa, Zea mays
  Clone ID: MRT4577_172487C.1.pep
YVGPLFLTAWTVLDCGKFIKWPLYIFFFVQYPFFSSLVFKKKKKKKKKKKKKKKKKKKKNKKKKKKKKRR

SEQ ID NO: 264114 - protein, 51 aa, Zea mays
  Clone ID: MRT4577_172488C.1.pep
MAHTQVIDHSLTFEANLIEPAHGERCRSGERTTGWGIDKGGEPFAGDEWEI

SEQ ID NO: 264115 - protein, 94 aa, Zea mays
  unsure (1)..(94): unsure at all Xaa locations
  Clone ID: MRT4577_172489C.1.pep
KTHHRTSTLRAAGRRPPCPFQPPNPPSPXPRVPKPHDIPQPPPPAPPPPPPXSPPRPRPPPPPHTTRAHPPXPSXPRSGPAPAPAPAAPSPGPP

SEQ ID NO: 264116 - protein, 758 aa, Zea mays
  unsure (1)..(758): unsure at all Xaa locations
  Clone ID: MRT4577_17248C.1.pep
MISAKSNAAVYPCPEYAEVDPSXSKDSYVHLTIMGPPRTIXKAWDEXKGMEVAGKHVARKDFQLKRADLEPLYCEIPLLKTLKHRNIMKLYSSWVDVSPSFPCWNDEQFPCANLXSYRQKHRRVNMWAVKHWCRQILSGLLYLHSQTRPIIHRDLKCDNIFVNGNQGEVKIGDLGLAAILRKSHAVHCVGTPEFMAPEVYEEEYNELVDIYSFGMCVLEMVTFEYPYSECTHPAQIYKKVISGTKPESLYKVKDPMVRHFVEKCLASSSQRLSARELLEDPFLQSDDVVASLDGGNYHVPANYIPQPSYLGHTYSNGSMMSNGFSESIDEDALSEDCEDDDMKGQDGIDLFNENEDEPLGNVDITIXRNMYFRFDIEADAELSVAWYAQFVTDKHLKXSIYGSLFLRFXKLIFQDDGRVRNIYFPFDVEADTALSVATEMIAELDITDHEVTRIADMIDGEVSALVPDWRPGPGIEEAPDTSYCHNCGSNVSSCGSLYAYMSSGRRGCQCAELHGRFEEITFQADGEQCDLQESAGSSDDGGGQTEHYVKSNESTHVNGLVQMGRRDLSNQLCFSSFQEQSCSYNRYENDTNHHVNGFDIKHEVKIAKYKARKMAQLKRAIHPSLDFDNANGVNRMKPSLNKLQSFHIGKNHSFRVPTGDRSPGKVSTDYHSDLNSQLSHSRHPDPGAQRAWHCEVNAAGSSDXYVYSKALLCRSSVATKSPANKICTPTCCRRLKCSCPVKFIVYICFGSFCTHYET

SEQ ID NO: 264117 - protein, 165 aa, Zea mays
  unsure (1)..(165): unsure at all Xaa locations
  Clone ID: MRT4577_172490C.1.pep
HRTHVLWPRRACSAVECELAGAVPVVRTSVAGTRIVGRLCVGEDCALVWRCAAAGSSEHVGWCLVLCXSGNKRGLLLPHTATDQEIQHLRNSLPDEVVVKCVDERLSALGNCIACNDHVALTHPDLDKETEDVISDVLGXEVFRQTIAXNILVGSYCAFTNRGDS

SEQ ID NO: 264118 - protein, 112 aa, Zea mays
  unsure (1)..(112): unsure at all Xaa locations
  Clone ID: MRT4577_172491C.1.pep
HCPSPAPRPPLXPSPPXPAPRPPSVQSSPSPSXPHAPRPPSAPSPSFPTRAPRPPPAPXPSFPTRAPRPPSPXPHAPRPPSVPSPSFLTCAPPPCVPRPCPSLXPYALPPPP

SEQ ID NO: 264119 - protein, 55 aa, Zea mays
  Clone ID: MRT4577_172492C.1.pep
FGSREHGMMYHWRMLNCRICLGIRHSKCGKLATNLILTLNCTGKIGLVDCIELSI

SEQ ID NO: 264120 - protein, 51 aa, Zea mays
  Clone ID: MRT4577_172493C.1.pep
ALAKTNLWLELCQNHGQSVLMLPTFVVGPLDVLPPIVEEQVCWNYVFLVFG

SEQ ID NO: 264121 - protein, 1896 aa, Zea mays
  Clone ID: MRT4577_172494C.1.pep
MKVGQPSSKLDCLPWNLSRFSWRLAISRNLGLSSLSHMLQIFFTGTSLGWQNLTGLYQLPSLIPLWSTYARGTGPELGFARLLRLTDLLGGHGRPALQALFGEYLVGRSASQPCSMGTWSSRLAGLARRENSAIHPVPTTVPTTRVKLATPLQPGTVLRFGSLEFMSRDGSYDMVFLPLQHDNNDGRRLTQRRRTRQRLPPVVEEEHPGLSRHPPRRRRRRRGNRGQAGGGTSSAVGPERVDDASTPVGDMSGVVLAPETTTGVASPQRANPKRTDDTSTLAEDLLGVTLVPEITVHFVPDATSPPSIDQKVPSVFHPVPFRFSFDPPSDPASVSAFARAYPDLPGYHMWSTWDRLAAVSTYGPVGSEEEDDPDFGWDFSGLRDPSAMRDFMSACDYCLSCCSDDGHSLGDEGYGPNCECFHIDQGDHDEDNHLGMPEDDNAPVPASRVEILWELAVVSVPTGGQDTQLEQLREMQAKLDEEKGAGMPPTFSGAGQNLAAAAMLLRTMPEPSTTEERRIQGELKNLLEDAAVRRAESSASRRRGCPSEHRATSSRRMREASARTERTRDGTPAAPDHLSSEQHRRDRRARLEERVRRGYHPRHGGRYNSKEDRSPSPEPPGPRVFSQAIRRAPFPARFRAPTTITKYSGETRPELWLADYRLACQLGGTDDDNLIIRNLPLFLSDAARAWLEHLPPAQISDWDDLVKAFAGNFQGTYVRPRNSWDLQSCRQQPGESLQEYIRWFSKQRTELSNITDSEVIGAFLAGTTCRDLVSKLGRKTPTKASELMDIATKFASGQEAVEAIFRKDKQPQGRQKEDAPEASAPRGTKKKASKKAQAKRDAVDADLVAAAEHRNPRKPPRGANMFDKMLKESCPYHRGPFKHTLEECDMLRRYFNKAGPSAEGGKDQGNNKKGGDKEEEFPKVHNCFMIYGGQVANASAWHRKQERWEVCSVKVAALVYLDCSDKPITFDQGDHPDCVPSPGRYPLVVDPVIGNARLTKVLMDGCSSLNIIYAETLGLLGIDLSTIRAGAAPFHRIVPGTYHAVLGRPCYAKFMVVPNYTYLKLKMSGPKGIITVGSTYCHAYKCDVECVEYAEAIAESEALIADLDCLSKEAPDAKRHAGNFEPAEAVKPVPLDPSNDADKKEAVLVDFLRANAEIFAWSPSDMADIPRDVAEHSLDIRADARPVKQPLRGFDEEKRRAIGEEVHKIMAAGFIKEVFHPEWLANPVLVKKKGGKWRMCVDYTGLNKACPKVPYPLPRIDQIVDSTAGCETLSFLDAYSGYHQIKMKESDQLATSFITPFGMYCYTTMPFGLRNAGATYQRCMNHVFGEHISKTVEAYIDDIVVKTRKASDLLSNLEITFKCLRAKGVKLHPEKCVFGVPRGMLLRFIVSERGIEANPEKIAAITNMGPIKDLKGVQRVIGCLVALSRFISRLEALLIYVAATTEVVSAAIVVERREEGHTLLIQRPVYFISEVLSETKIRYPQIQKLLYAVILTRRKLRHYFESHPVTVVSSFPLGEIIQCREASGRIAKWAVELMGETLSFAPRKAIKSQVLADFLAEWVDTQLPTAPIQAELWTMYFDGSLMKSRAGAGLLFISPLGKHVRYVLRLHFPVSNNVAEYEALVNGLRIAIELRVRCLDARGDSQLVIDQAMKNSHCRDRKMEAYCDEVRHLEDKFHGLELNYVARRYNETADELAKIASGRTTVPPNVFSREIYQPSVKIDDTPKPEETSTQPEKAPGGFTHLLVAIDKFSKCIEVRPLTSIGSEQAVAFFTNIIHRFGVPNSIIIDNGTQFTGKKFLDFCEDHHIRVDWAAVAHPMTNGQGLKPRIYNDLNKFGKRWIKELPSVVWSLRTMPSQATGFSPFFLVYGAEAMLPTDLEYGSPRTKAYDDQSNQTS

SEQ ID NO: 264122 - protein, 123 aa, Zea mays
  Clone ID: MRT4577_172495C.1.pep
HLDSVCWGWGTCLASIHWLSPSFLGSSTDCTLWLAPYHLRDYHLSVLAGSVSRMCCPPASIASHRHSTRRDIDGGRGFRRRRAGAAQIDGEWTDLASASQRRASLPTLAAALRPARRGRDTGR

SEQ ID NO: 264123 - protein, 1425 aa, Zea mays
  unsure (1)..(1425): unsure at all Xaa locations
  Clone ID: MRT4577_172496C.1.pep
MREASVRIERTRDGTPVAPAHLGDEQHRHDRRARLEERVRQGYHPRCGGRYDSEEDQSPSPEPLGPRVFSQAIRRTPFLARFRAPTTITNCRQQQGESLREYIRRFSMQRTELPNITDLDVIGAFLAGTTCRDLRGPKKAKKKAQAKRDAVDADLVAAVEHRNPRKPPGGANMFDKMLKESCPYHRGPVKHTLEECDMLWRYFNKARPSAEGGKDQGNNKKGGDKDEEFPEVHNCFMIYDGQVANASARHRKQERREVCSVKVAALVYLDWSDKPITFDQGDHPDCVPSPGRYPLVVDPVIGNASLTKVLMDEGSSLNIIYTETLGLLAIDLSTIRAGAAPFHGIVPGKRVLPLGHLDLPVCFGTPSNFRKETLTFEVVGFRGTYHAVLGRPCYAKFMAVPNYTYLKLKMPGPNGTITVGSTYRHAYECDMECMDYTEAIAESEALIADLDCLSKEAPDAKRHAGNFEPAEAEAVLVDFLRANAKIFVWSPSNMPGIPRDVAEHSLDIRAGARPVKQHLRRFDEEKRRAIGEEIHKLMAAGLIKEVFHLEWLANPVLVKKGGKWRMCVDYTGLNKACPKVPYPLPRIDQIVDSTAGCDTLSFLDVYSGYHQIKMKESDQLATSFITPFGMYCYTTMPFGLSNAGATYQRCMNHVFGEHIGKTVEAYVDEIVVKTRKASDLLSDLKVTFGCLRAKGVKLNPEKCVFGVPRGMLLGFIVSERGIEANPEKIAAITNMGPIKDLKGVQRVMGCLAALSRFISRLGEKGLPLYRLLRKTERFTWTPEAEEALGNLKALLTNASILVPPAAREALLIYVAATTQVVSAVIVVERREEGHALLVQRPVYFISEVLSETKIRYPQIQKLLYAVILTRRKLRHYFESHPVTVVSSFPLGEIIQCRETSGAGVGLLFISPLRKHVRYVLRFHFPASNNVAKYEALVNGLRIAVELGVQRLDAHGDSQLVIDQVMKNSHCCDRKMEAYCDEVQRLKDKFHGLELNHVARRYNETADELAKIASGQTTVPSNVFSRDIYQPSVKLDDAPEPDETSAQPEVPSAAEGEALRIEGERNGVAPNRNWQTPYLXVSSEESCPSTRPKLAPQAFSNDAYPSPKDKSCYKKYTRGLAVTMQHLGPSWEMLFDKVSTGXRSGRRHXLYAPAKGVNSTRDRRTCPLKPCRQYPSLGRLPYGEWTSSVPXKAPGDFKHLLVTIDKFSKWIEFTGKKFLDFCEDHHIRVDWAAVAHPMTNGQVERANGMILQGLKPRIYNDLNKFGKRWIKELPSVVWSLRTTPSRATGFSPFFLVYGAEAVLPTDLEYGSPRTKAYVDQRNQTSREDSLNQLEEARDVALLHSTWYQQSLRRYHARRVRPRGFQVGDLVLWLRQDARGRHKLTPPWEGPFIIAKILKPGTYKLANDQGEVYNXLGTLNSYVAFTL

SEQ ID NO: 264124 - protein, 50 aa, Zea mays
  Clone ID: MRT4577_172497C.1.pep
LSKLGLIGLCWIAPGILSSLYKFFVILSVFCNPYWFSKLGLIGLSEKQSG

SEQ ID NO: 264125 - protein, 239 aa, Zea mays
  Clone ID: MRT4577_172498C.1.pep
MPRRSRRRYCFPCGIIQVINTSRRMHSMQKFADVRWHFVRNKNPLCIAGLWNELKTGTPHSINQKRRISGIKIAPENRSLEGQKWYQSVFFCLPIFLSESGFVCDQFQIIVSIRTLSRQSICRLITDSTRLTLHIKVLDNMVNSFLVTWPSNRRKKIDIADQRNSSGPRLVRESVGLFILHLEGHRRKSLFISHQNLQLSEGQLKKGKASDAYAHKLKVNHVPVFVQEKGSDWAVDLAT

SEQ ID NO: 264126 - protein, 181 aa, Zea mays
  Clone ID: MRT4577_172499C.1.pep
MVVTVAATGSDTAEPLHSTTFASRYVRDQLPRYRMPEGSIPKEAAYQIISDELMLDGNPRLNLASFVTTWMEPECGKLMMDSVNKNYVDMDEYPVTTELQNRCVNMIAHLFNAPIGEDETAIGVSTVGSSEAIMLAGLAFKRKWANKMKEQGKPCDKPNIVTGANVQVCWEKFARYFEVEL

SEQ ID NO: 264127 - protein, 80 aa, Zea mays
  Clone ID: MRT4577_17249C.1.pep
AVVTTQRTFFFFFFFFLKFFFFFFFFFFFFFSCPTTMFHNGYKRNQNKCTLYKNLHGKKAFQASTAFRGTDFVLGRFGGS

SEQ ID NO: 264128 - protein, 491 aa, Zea mays
  Clone ID: MRT4577_1724C.1.pep
MASAETLARSPSREPSSDPPRAGSSEPHHNGAGDSSRRRRRSRWEQSNDDSANNSGGEGGAVGRKRKTRWAEEEPRPAIALPDFMKDFAAEMDPEVHALNARLLDISRLLQSGLPLDDRPEGARSPSPEPVYDNFGIRINTREYRARERLNRERQDIISQLIRRNPAFKPPSDYRPPKLQKKLYIPMKEYPGYNFIGLIIGPRGNTQKRMEKETGAKIVIRGKGSVKEGKFLQKRDLKPDPSENEDLHVLVEAETQEALDAAAGMVEKLLTPVDEVLNEHKRQQLRELAALNGTIRDDEFCRTCGEAGHRQYACPNKMNTFKSDVQCKICGDGGHPTIDCPVKGTSGKKMDDEYQNFGGELGGGSAPESMNKSGGPMLALTGSGGSGGASAGTGSNPPWSAGGGAAGIGLNGIKKDYDETNLYIGYLPPTMDDDGLVSLFSQFGDIVMAKVIKDRNTGQSKGYGFVKYSDVSEANAAIAAMNGHHLEGRVI

SEQ ID NO: 264129 - protein, 598 aa, Zea mays
  Clone ID: MRT4577_172500C.1.pep
MVVAGYGMDKALRASVSFDTPCGALLRELEQIWTEIGEREQDKDRMFLELETECMRVYRRKVDSANAERAQLRQSLMAKEAELKALVASIGENGPRFTVDEKHTSLKDQLAAVAPLLEDLRVKKQDRVKQISNVQCQIEKIKAQISDHNYQDSDGSIKQLNDDHDLSTRRISDLQMQLRNLQKEKSDRLQKVFIYVDEVHSLCAVLGMDFPKTVKEVHPSLHGSNSENSTNISDSTLEGLTQTILKLKAEKKTRVLKLQETVEKLHKLWNLMESTEKERIHFSEVAAILGSTEEEINSPGILSLETIQKTEEEVEKLTVQKTSRMKELVLKKRLELEGICRNAHMEPDMSTAPEKITALIDSAFEVQITKANEESLTRKDIMERVDKWLSACDEETWLEEYNQDDNRYSAGRGAHLNLKRAEKARITVQKIPTMIDSLIAKTFAWEDERNVPFLYDGIRLVAILEEQKLRRAQREEEKRRSRDQRKLHSLLLKEKELIFGSKPSPRKTSSFNRRTSNHHPNANGAGFMTPVPRRVSAGSATPELLTPRSYSGRYNNYFKENRRLTAAPLNFSVGSKEDSMSSFASISGSEPDSPLFLH

SEQ ID NO: 264130 - protein, 59 aa, Zea mays
  unsure (1)..(59): unsure at all Xaa locations
  Clone ID: MRT4577_172501C.1.pep
GMKKGGMGMGLGYWKKLIIYXXGGLVXMLGTPLHTPYGWHFLISRNQLLFSLSECTFPW

SEQ ID NO: 264131 - protein, 103 aa, Zea mays
  Clone ID: MRT4577_172502C.1.pep
HASAHRLLTGLRRISSYASRVRSRDWVSSPAILALFDTAVSIFLYLTLVLDSLAVAVGYATVGRAHNLCTVCSHQSRRRGYSSVSEDTSGHRARATCDYTCHA

SEQ ID NO: 264132 - protein, 611 aa, Zea mays
  Clone ID: MRT4577_172503C.1.pep
MGEMVVAGYGMDKALRASVSFDTPCGALLRELEQIWTEIGEREQDKDRMFLELETECMRVYRRKVDSANAERAQLRQSLMAKEAELKALVASIGENGPRFTVDEKHTSLKDQLAAVAPLLEDLRVKKQDRVKQISNVQCQIEKIKAQISDHNYQDSDGSIKQLNDDHDLSTRRISDLQMQLRNLQKEKSDRLQKVFIYVDEVHSLCAVLGMDFPKTVKEVHPSLHGSNSENSTNISDSTLEGLTQTILKLKAEKKTRVLKLQETVEKLHKLWNLMESTEKERIHFSEVAAILGSTEEEINSPGILSLETIQKTEEEVEKLTVQKTSRMKELVLKKRLELEGICRNAHMEPDMSTAPEKITALIDSGLVDPCELLSSIEVQITKANEESLTRKDIMERVDKWLSACDEETWLEEYNQDDNRYSAGRGAHLNLKRAEKARITVQKIPTMIDSLIAKTFAWEDERNVPFLYDGIRLVAILEEQKLRRAQREEEKRRSRDQRKLHSLLLKEKELIFGSKPSPRKTSSFNRRTSNHHPNANGAGFMTPVPRRVSAGSATPELLTPRSYSGRYNNYFKENRRLTAAPLNFSVGSKEDSMSSFASISGSEPDSPLFLH

SEQ ID NO: 264133 - protein, 46 aa, Zea mays
  unsure (1)..(46): unsure at all Xaa locations
  Clone ID: MRT4577_172504C.1.pep
KRNYRVEPSVRPSVRPRVRLLVNYXILYAQGRQLQLRMKNVKMEVR

SEQ ID NO: 264134 - protein, 86 aa, Zea mays
  Clone ID: MRT4577_172505C.1.pep
EKTYSSEKKRRNIIRHTKTDPKGFIVAASPRVVKERWFLPFELLAHRPTNTRLTVGAPFWRLMHPVPNASPQEETYFGDALSSLLP

SEQ ID NO: 264135 - protein, 81 aa, Zea mays
  Clone ID: MRT4577_172506C.1.pep
HWYSPSVRSGSDLKSRTLRTPRLPFGQITLAGNPRDPVQIAGVKSICAARDMETLPLNSLPEQIHVGASQDQAAGAPAPKV

SEQ ID NO: 264136 - protein, 139 aa, Zea mays
  Clone ID: MRT4577_172507C.1.pep
MSSAAGRAPAPTPMGSADRCKIDGIVAAEKATRSCVECRATTTPMWRSGPTGPRSLCNACGIRYRKKRRQELGLDRKLQQQQNNGEAKTDEAKDSSSNSSSGSSNLQVVQKRRLLMGVEEAALLLMTLSSSPTSTLLHG

SEQ ID NO: 264137 - protein, 75 aa, Zea mays
  Clone ID: MRT4577_172508C.1.pep
PMVWPSNTCLLPCCGVPMDEGCTQPLSSDLMINFNTTVFSFRVCFPFARNLHNLESLALTIEITEKAQSKVGESN

SEQ ID NO: 264138 - protein, 170 aa, Zea mays
  Clone ID: MRT4577_172509C.1.pep
MSSAAGRAPAPTPMGSADRCKVHPSALVFALSSSPLLRALSSRSASCDPPLQIDGIVAAEKATRSCVECRATTTPMWRSGPTGPRSLCNACGIRYRKKRRQELGLDRKLQQQQNNGEAKTEEAKDSSSNSSSGSSNLQVVQKRRLLMGVEEAALLLMTLSSSPTSTLLHG

SEQ ID NO: 264139 - protein, 98 aa, Zea mays
  Clone ID: MRT4577_17250C.1.pep
RRPSPSPEAGRGDEKEAGQAQAQAQAHAQAMRAGAGEWRGGACRRVGGRQPRDVGSGGGPRCRRRRTGSGGACGWQPCGVRMLVGVNSQTLWIGENAW

SEQ ID NO: 264140 - protein, 65 aa, Zea mays
  Clone ID: MRT4577_172510C.1.pep
PKGWGVGPNRFFLGKEGFSPILSQGKKGKGRPPPPLRALFPGGKKPVYGAPGLALTPPICPPKFF

SEQ ID NO: 264141 - protein, 102 aa, Zea mays
  Clone ID: MRT4577_172511C.1.pep
HEHCLCRSDLVQLPTKRCIDHTPDMAGSPVGSFPCQPRRAHASASRYIQPLAHSTPRNHGEAIRVILQWRLQIVPIGITCCGERRRPSVYQAEGELSALLKN

SEQ ID NO: 264142 - protein, 65 aa, Zea mays
  Clone ID: MRT4577_172512C.1.pep
MAPQTRRERLAGEARPSSSGLTPAKPGAVEVQRRRAGSGWTSRRISIYASRVYFLLIMLQIPLFR

SEQ ID NO: 264143 - protein, 44 aa, Zea mays
  Clone ID: MRT4577_172513C.1.pep
CRVRMPYPFPSIFWESDVIRFARHGLHYQCSESTVCHTKGCMCY

SEQ ID NO: 264144 - protein, 261 aa, Zea mays
  unsure (1)..(261): unsure at all Xaa locations
  Clone ID: MRT4577_172514C.1.pep
MGRSMALLHREIYFSDDEALSGRVSSIRCPWEGRDGPPSRQEISDAVTGYLRTFKAHAVVADPPALSFLHILRPPVSVGLPVQLHSLTMATLSSADKNLVAMYAGAYRPGNRFPGGYLIYDARNDSISGIPELPSDHSHRAIGCESAVVMCEAAAAGNDYFLAELVXGSGQMAPXAALWLWKSSVQKWDLHPSRVPLPSSTTGHFSPDLCFSCWGSVLCWVDLLKGMVLCDLKQNCKFSFIQLPKDCPTYDADSDDFTYSS

SEQ ID NO: 264145 - protein, 74 aa, Zea mays
  unsure (1)..(74): unsure at all Xaa locations
  Clone ID: MRT4577_172515C.1.pep
REARDVRSPLFPLPSLXNVPPFSHFLXXXWKSTSMASIPTXTFXVILSVLFCGARGTAVYNYLPDYVIHGRLYC

SEQ ID NO: 264146 - protein, 106 aa, Zea mays
  Clone ID: MRT4577_172516C.1.pep
DPFCFFFGESRVRRARTVNRGRNSVDDQLQSVGQIPVPHNSNQSGQNSAPRRGWMILRAAMVILRQTIHSIVHHVLAQHHQDSDAACAAQHLRQTRPSNKHGRWYL

SEQ ID NO: 264147 - protein, 94 aa, Zea mays
  Clone ID: MRT4577_172517C.1.pep
CDRKFYSSQALGGHQNAHKYERTLAKRRREIAAAMRAHGARQDDADAASGHHEMMRSRLVEARQVPAVHSAALLRGRSSSLEHGGESLDLSLKL

SEQ ID NO: 264148 - protein, 63 aa, Zea mays
  Clone ID: MRT4577_172518C.1.pep
RYYARWCSPARETERHTAVEICEGKERKRYKPREEGTFCVTRPHGRLGLAGIRVRELLRFTRY

SEQ ID NO: 264149 - protein, 132 aa, Zea mays
  unsure (1)..(132): unsure at all Xaa locations
  Clone ID: MRT4577_172519C.1.pep
SEVKNEADDDKRELVLKEDGQEYAQVTRMLRNRRSEAICVDGTRRLCHISGKMHKKVWIEAGDIERVELRDYHDXGATLMLKDMXDEGPVLKEYGELPDTLKLNEGVNVDGPKKSEEARHYIQDEDEDIDKI

SEQ ID NO: 264150 - protein, 185 aa, Zea mays
  Clone ID: MRT4577_17251C.1.pep
MRRSTPPAGTDGYGIAATTGAPPMAPSFDPSAQQSPDPFPCTFPLSLSQFSDVLGKGASKIVYKAFDEYQGMEVAWNQVKLHDFLQSPEDLERLYCEIHLLKTLKHRNIMKFYTSWVDVSRRNINFITEMFTSGTLRQYRQKHRSLAMWAERAERSEAVVRMGRVGRMGEVAQQSTMSKARSPLM

SEQ ID NO: 264151 - protein, 127 aa, Zea mays
  unsure (1)..(127): unsure at all Xaa locations
  Clone ID: MRT4577_172521C.1.pep
ELETRGDPQGSVETFGLGPQYLKKRLYXQSPXEDLTLAMGMVRRSKGFRDDATMKGGIMRGERYGGVRRVWVVPEEEXSAXEGFKGGMGLWNPGREVRGLKGADHMSMLWXXGEKKKIPPPLAKKYS

SEQ ID NO: 264152 - protein, 183 aa, Zea mays
  Clone ID: MRT4577_172522C.1.pep
GYLEAGRDGEIINGRYAMLGAVGAIAPEILGKAGLIPQETALPWFRTGVFPPAGTYNYWADSYTLFVFEMALMGFAEHRRFQDWAKPGSMGKQYFLGLEKGLGGSGEPAYPGGPFFNPLGFGKDEKSLKDLKLKEVKNGRLAMLAILGYFVQALVTGVGPYQNLLDHLADPVHNNILTSLKFH

SEQ ID NO: 264153 - protein, 104 aa, Zea mays
  unsure (1)..(104): unsure at all Xaa locations
  Clone ID: MRT4577_172523C.1.pep
GRRAISXHHQDGLLRRPSHFSKKKKPHADHKPRSRSRRPPPIGGRNPRRSTRSRTRDDLIALLPGTVAGLGLVCFALESPAVKVGRWKSRYLSPALVRVIDRLI

SEQ ID NO: 264154 - protein, 47 aa, Zea mays
  Clone ID: MRT4577_172524C.1.pep
KTMYNIKRAENSLHCKNNLKQTFQFKISSIAHKHHANGKLNILHSLV

SEQ ID NO: 264155 - protein, 57 aa, Zea mays
  Clone ID: MRT4577_172525C.1.pep
NLIKPRRGQNFSLCDRPSDFTKILHLSGYQKEGPGKFHNFTTTISVGVINPLTTIGL

SEQ ID NO: 264156 - protein, 50 aa, Zea mays
  Clone ID: MRT4577_172526C.1.pep
GGVPLAFRVGRCWGRGLGGAFFFFSQMGEGGLFSKPFKWVTTGIFPFGRF

SEQ ID NO: 264157 - protein, 112 aa, Zea mays
  unsure (1)..(112): unsure at all Xaa locations
  Clone ID: MRT4577_172527C.1.pep
KTHKGKCGSNLLTTKVPKILALLELVYLSVXATSLPSTSQQRRVPNAIIPQFLPSGTSMGIEHPIVQAYRLQQALAESVLQQPFAQLQQQCLAHVTIQTIVAQLAQQFVPAL

SEQ ID NO: 264158 - protein, 275 aa, Zea mays
  Clone ID: MRT4577_172528C.1.pep
MKMEGMSKGMRERMAEYSRRLEAVASGDNTGCESGKCGNRHSRKASASSQRSWSGGSTASNGNAPSTLDAGPHGRSRQNVAAEKRQQQQTIMAGECKLVGSASCCDCREIVWKVMEQVKAESDQWTEMQDMLKQVRLEMQELQASRDAWQPRVRASDISLRSLNSQVLEWKNRAQASEQRVEELHRKISELESKLHTFKAHLPAPAAIPNQKQWSDACKMEYPRAKPQHPRSQESGKEEIKKHVLICRVKRSPSSVLSKRSPFQEIGNISLPRHR

SEQ ID NO: 264159 - protein, 49 aa, Zea mays
  unsure (1)..(49): unsure at all Xaa locations
  Clone ID: MRT4577_172529C.1.pep
ALISEFIATLLSVYITVATVIRXKHETDASASGIDAACGSLRVLGIPWA

SEQ ID NO: 264160 - protein, 52 aa, Zea mays
  Clone ID: MRT4577_17252C.1.pep
VDDHGCHLPLRRATLIPGTDRSQAVERRRRCGFGSWDPWRPPRASSTSPPTG

SEQ ID NO: 264161 - protein, 224 aa, Zea mays
  unsure (1)..(224): unsure at all Xaa locations
  Clone ID: MRT4577_172530C.1.pep
MVGMYQHQLRDDPFDTLSGGHCEVHGGGQPRQRVEALADGRSMLRGGGSGIVGAAGGDLGVLVRWMRELAADPVGPLPAPSEHRVRKRHVLAWRRARYLRLEDVADAEELPSFSKKRKLYWDQKKKGCLNMPTRKSERLAKRMKLMASLLLTQRKKIGVGEHFQAEVPGWTGQPSGKELSCYRNDPETSXMXGTRMWPPXEGESYKTDIXLFGQGRPGSCNCLY

SEQ ID NO: 264162 - protein, 120 aa, Zea mays
  unsure (1)..(120): unsure at all Xaa locations
  Clone ID: MRT4577_172531C.1.pep
PIDDILYWXNAIRMELHDXXXEXXXXXXXXXXXXXXXFNERLQFIADVCIYHSIAEDQVXXPAVDSELSFVQEHAEEEHRFNNFRCLIQQFQIAGAKSTALDFYNTRVIKTDTADCSTPN

SEQ ID NO: 264163 - protein, 163 aa, Zea mays
  Clone ID: MRT4577_172532C.1.pep
MVGMYQHQLRDDPFDTLSGGHCGEQPRVAGGGASSSSPSAVHDPLSAEVHGGGQPRQRVEALADGRSMLRGGGSGIVGAAGGDLGVLVRWMRELAADPVGPLPAPSEHRVRKRHVLAWRRARYLRLEDVADAEELPSFSKPERWRARDKAGKEKDMPPVSATV

SEQ ID NO: 264164 - protein, 111 aa, Zea mays
  Clone ID: MRT4577_172533C.1.pep
KRTSRGRQKVEIRRIDNKESRQVTQCKRKGGLLKKASELHLLCGAQVAIIVFKRRDPERKEVPVPPRGQRDDGGLAFAMGTLSVDHVLHRCGLLHADEGLTAIQDVGAIVA

SEQ ID NO: 264165 - protein, 96 aa, Zea mays
  Clone ID: MRT4577_172534C.1.pep
PFFLFFFFFFFFFFFFFFFCFFFLKKGRGPFWFCTIIRGASPLGFLQNFPYPNTKSPIPFLPHPLKNQNLGGPLKRVNFCFPPICPKIPCPRIFNL

SEQ ID NO: 264166 - protein, 157 aa, Zea mays
  unsure (1)..(157): unsure at all Xaa locations
  Clone ID: MRT4577_172535C.1.pep
MEPDQSGTGQTSPRGNDWEVVQLTASNYASAPGPARTEPSDEEAEGQVYDAEGGDSAAASLLMSGHFSVPQSEAEKLLMEADTSIYQQEARGSQYAVSDKGGDGMXRPAGETEGXGLDRIPSFDKGKSLSPVDMEPDDGNALHSVSQAGEDPVTFSS

SEQ ID NO: 264167 - protein, 98 aa, Zea mays
  unsure (1)..(98): unsure at all Xaa locations
  Clone ID: MRT4577_172536C.1.pep
TPIGLTKXRKDKDAKKRSKTRRKHKSSSESSSSSSSESSSSDDEGRGSRKSRSQSRSKRTRKEKKSRSRSKHRGSESEEEGLVERAVYHGVLNMMLSC

SEQ ID NO: 264168 - protein, 70 aa, Zea mays
  unsure (1)..(70): unsure at all Xaa locations
  Clone ID: MRT4577_172537C.1.pep
RATPPGPARRGXQTPPGPPGGGPPPPGAGPPTAAPRAPGFPIGQRAVGAPPLMCGCSPNSGGGVGLGFVI

SEQ ID NO: 264169 - protein, 104 aa, Zea mays
  Clone ID: MRT4577_172538C.1.pep
TSCLGFTFATLGREWLFTPIGLTKKRKDKDAKKRSKTRRKHKSSSESSSSSSSESSSSDDEGRGSRKSRSQSRSKRTRKEKKSRSRSKHRGSESEEEGLITSEG

SEQ ID NO: 264170 - protein, 87 aa, Zea mays
  Clone ID: MRT4577_172539C.1.pep
LGPGISQCHQVINKLAFIKQNRTFSSFERRLFPMADRESLEMLVKFQLLSVIERQRLRGSVPTSPCIASCSIQSTSQNWCYVITHER

SEQ ID NO: 264171 - protein, 71 aa, Zea mays
  Clone ID: MRT4577_17253C.1.pep
FFSITREQWGGINNFYNIGGWKPHNSLEQAPITRWGGQLSGDHGIRAAHWPDAGYKETFLILGTLVGILGL

SEQ ID NO: 264172 - protein, 114 aa, Zea mays
  Clone ID: MRT4577_172540C.1.pep
NLSISITCHSSNINILHLLYGSSDKRSLKIERKDKDAKKRSKTRRKHKSSSESSSSSSSESSSSDDEGRGSRKSRSQSRSKRTRKEKKSRSRSKHRGSESEEEGLVRLSKFFGK

SEQ ID NO: 264173 - protein, 45 aa, Zea mays
  Clone ID: MRT4577_172541C.1.pep
QTQKYIGIVNNIRFYPIFLLDFVYGGAPERWGPRSAAPPALPQAR

SEQ ID NO: 264174 - protein, 91 aa, Zea mays
  unsure (1)..(91): unsure at all Xaa locations
  Clone ID: MRT4577_172542C.1.pep
MAGQLAVAFLALLTSSGFLGVPGQKXTAIFTFRDSMSDTGNLRENGPPAGLTLTQPPYGETFLGRAACRCSGGRLAGDFLPDKLGVALLKP

SEQ ID NO: 264175 - protein, 111 aa, Zea mays
  unsure (1)..(111): unsure at all Xaa locations
  Clone ID: MRT4577_172543C.1.pep
VSSEFGSCTFREIVLDLEGERATXVSFKQTAPPLPPADPGIYDFDYGTAQDVHKSRTFYMLWSTSCAKVNSKMLYARXNQRCKSGLNGIQVELHATDASDSSLDEIKDRAR

SEQ ID NO: 264176 - protein, 60 aa, Zea mays
  Clone ID: MRT4577_172544C.1.pep
AFYDSEMQTWTTLPSMSRARQMCSGFFMDDKFYVIGGKAERPNEVLSCAEEFDLENGSWH

SEQ ID NO: 264177 - protein, 106 aa, Zea mays
  unsure (1)..(106): unsure at all Xaa locations
  Clone ID: MRT4577_172545C.1.pep
MVAASAAAEASGESKNEFLIRDDAPGLLAALKEMKDGLDLVRGKVEAITRKVKANQLPAANGIGYLEAKNHLLLGYCQDIVYYLLRKAKGXLSVDGHPVVRSLVEI

SEQ ID NO: 264178 - protein, 146 aa, Zea mays
  Clone ID: MRT4577_172546C.1.pep
PAGHFMNPVPVQKGVEIISGLQTSQDTLDTAIEFCKRMGKITSVSADSPGFLANRILMPYINEAIICLETNVGDRDSIDAIMKNGTNVPMGPLQLADFIGLDTCLSIMKVLYEETADSKYRPSVLLKNMVSAGWYGKKSGKGFYDY

SEQ ID NO: 264179 - protein, 66 aa, Zea mays
  Clone ID: MRT4577_172547C.1.pep
TRHVHQLPQQAHPILTDRGSQRLQDAISSARLLCTFRIHGHTRILEEACNLKNVTFTSHVIIAEFF

SEQ ID NO: 264180 - protein, 103 aa, Zea mays
  Clone ID: MRT4577_172548C.1.pep
MVAASAAAEASGESKNEFLIRDDAPGLLAALKEMKDGLDLVRGKVEAITRKVKANQLPAANGIGYLEAKNHLLLGYCQDIVYYLLRKAKGLSVDGHPVVRSLV

SEQ ID NO: 264181 - protein, 257 aa, Zea mays
  unsure (1)..(257): unsure at all Xaa locations
  Clone ID: MRT4577_172549C.1.pep
MAEPGLEGSQPVDLSKHPSGIVPTLQNIVSTVNLDCKLDLKAIALQARNAEYNPKRFAAVIMRIREPKTTALIFASGKMVCTGAKSEQQSKLAARKYARIIQKLGFPAKFKXFFILVYIDLFFEQYVHQLLSCCSKPXFKIQNIVGSCDVKFPIRLEGLAYSHGAFSSVCPRMVYFITTVILLPFLSAFLDNDIFHLFXYEPELFPGLIYRMKQPKIVLLIFVSGKIVLTGAKVREETYTAFENIYPVLAEFRKVQQ

SEQ ID NO: 264182 - protein, 58 aa, Zea mays
  Clone ID: MRT4577_17254C.1.pep
YIQPIYFMTKLEETTWGQRDSGDYPLFCFYVEAHFATTTPLHGEAKTMCLTLSGRHPS

SEQ ID NO: 264183 - protein, 164 aa, Zea mays
  Clone ID: MRT4577_172550C.1.pep
MEVRGSAPSMKPKVEPPLEASHDWEVTPLSGDNPFFTSVMRKSQVQKPFQLVIPVRFHRHLPEARAPAVLLCRDQSWTVSYAGVGKWKRLQGAWRDFARDNGLRLGDACVFELLVPSTDATQGDGGGSKDQGEVVFRVQVLRGGLPAEITSRGATSDDPLVIVD

SEQ ID NO: 264184 - protein, 78 aa, Zea mays
  Clone ID: MRT4577_172551C.1.pep
GHQFGYYSTQMDVSYWSIVDLRHRLAVHPLGLLSKQQCRGKLKVHWAQHLAPCAAFTSNTPSPTTGTEGISRSSPYVW

SEQ ID NO: 264185 - protein, 113 aa, Zea mays
  Clone ID: MRT4577_172552C.1.pep
GVGFFFLVFFFFFFFLGAPKAWGNLIIHPGTIFFKEGQNDFPLIKGGTENKYRGGLGVQQGRNIGKTWGDKKVHETIRGSFGRPSKGSNTKRGEGFFWNIKIRGSAPTSYLFG

SEQ ID NO: 264186 - protein, 59 aa, Zea mays
  Clone ID: MRT4577_172553C.1.pep
VALSTNLNLLRTDYKRCLVPLSRCRTNLRVLLLLCVRKYCRTFTTKVAFHNWSRWSALL

SEQ ID NO: 264187 - protein, 100 aa, Zea mays
  unsure (1)..(100): unsure at all Xaa locations
  Clone ID: MRT4577_172554C.1.pep
MSTEEAVVAEVPETXVPAEVPAXYVAAAPKAKRAGRENKAPNEKKPFAEKKPTAHPSYAKIIVEEIDALKERKGLISVGINKYIEGKHGGKLITNFHKHL

SEQ ID NO: 264188 - protein, 59 aa, Zea mays
  Clone ID: MRT4577_172555C.1.pep
PKGRVSRNKLSPLLSLRPSFKFGGVGNPVTTAGSIGNWFSRKTSVGSCGDSLMLYFKNC

SEQ ID NO: 264189 - protein, 92 aa, Zea mays
  Clone ID: MRT4577_172556C.1.pep
KNAVTKPNHHFWGAPGLTLPYFKSRGGGGPKPESPPEKTSWGAPKKKIRALCQGVGLRGQKKNLGKAFGGDGGGELGPREAGLRWGLNRTRG

SEQ ID NO: 264190 - protein, 67 aa, Zea mays
  Clone ID: MRT4577_172557C.1.pep
NHHAGLCTPHFFLPLFNIKDPLSILLGLFWSLDHPWVLNFCKTNLPIRSPYNFIFFQFHSQQPQLLF

SEQ ID NO: 264191 - protein, 79 aa, Zea mays
  Clone ID: MRT4577_172558C.1.pep
GVNQSPIDCPWGVNNRVRGRPYSKTKDVHAWYKDRFLPIDAMNNTSSQSGSQPVNHGFDLGRGVKVELGSNLGNIDCVW

SEQ ID NO: 264192 - protein, 260 aa, Zea mays
  Clone ID: MRT4577_172559C.1.pep
MAGEKNVFTSYVKTKDSHDTIIFGDGNQDKDKSETQETLRRFLRRAQNEFELKVRKIMRNNRSEFKNLQVEEYLEEEGIKHEFSAPYMPQQNGVLESKNMMLIDLDHNYPDHVYKLSKALYGLKQAPRAWYKCLRDFLISNAFMVRNVDPTIFTKTCNGDLFICQLYVDGIIFGSTNQKSCEEFSRVMTQKFKMSMMGELTYFLGFQVNQLKEGTFLSQTKDIQDILKKFGMKNAKPAKSPMRTDGHLDLNVRDVNKRER

SEQ ID NO: 264193 - protein, 128 aa, Zea mays
  Clone ID: MRT4577_17255C.1.pep
PPKKKGGPPPGGKKNFGRGRVFPRFPPSGGGSNFFPPVGFGGPFLFGLKRKRADKMGAPQPPPFKFFFKSCFPQKPSQIKGVLRGEIFAKALSLFRGPPKPFLFFPKEKRPPRRAFGAKKGKEWGETP

SEQ ID NO: 264194 - protein, 95 aa, Zea mays
  unsure (1)..(95): unsure at all Xaa locations
  Clone ID: MRT4577_172560C.1.pep
NNRSLDLDSIIADVKAQYDDIANRSRADAESWYQMKYXEELQQTADRHGDDLRNTKHEISEMNRMIHRLRSEIDNVKTQCANLQNAIAEAEQRGE

SEQ ID NO: 264195 - protein, 75 aa, Zea mays
  unsure (1)..(75): unsure at all Xaa locations
  Clone ID: MRT4577_172561C.1.pep
SRSQARVSSVNATAGGPRQTTTKTSPQRRRIATGPQRKLSAFDPSYPSIRSDLPPSPSIYILLDSYLLNEXLAGW

SEQ ID NO: 264196 - protein, 112 aa, Zea mays
  unsure (1)..(112): unsure at all Xaa locations
  Clone ID: MRT4577_172562C.1.pep
RGEGGGPPPPARGDGGSQGNSXKPKGPGXPGVLPNPGNKTPPGGDALPPGHSGWAKPGGREQXPTLTRPKGQGPCTGPPGPKKKKGPAGLAPINPYQQQREPWWRSPPGAPQ

SEQ ID NO: 264197 - protein, 80 aa, Zea mays
  Clone ID: MRT4577_172563C.1.pep
DSLADDTILPLTGEFDEPASHGSHPVMSPPFILVLRGGRHSLRYARLRCSQQELSDMFVPFVYIVVKFKFYATLVFYGFV

SEQ ID NO: 264198 - protein, 96 aa, Zea mays
  Clone ID: MRT4577_172564C.1.pep
EFISNVRVKEAEARTPCGWSYRRRQQRTRHPMAVEPSVRHATPGVAIDIVHLGIYLDGEADLQPTIPTLRKKPPLDPREHTRLIPEGKYQFTKHWR

SEQ ID NO: 264199 - protein, 227 aa, Zea mays
  unsure (1)..(227): unsure at all Xaa locations
  Clone ID: MRT4577_172565C.1.pep
MADAKQQQQQQQQPPTRAPTRPRRVRPRVRPRVRTVKPFVNGGASGMLATCVIQGIDMVKVRIQLGAGSAVXVTRNMLANEGVRSFYKGLSAGLLRQATYTTARVGSFRVLTNPRVRXASAHASAHASVHAFGHASDEGKPLPLIQKAFIGLTAGAIGACFGSPADLALIRMQADSTLPAAQRRNYKNAFHALYRISADEGVLALWKGAGPTVVRAMALNMGMLAFY

SEQ ID NO: 264200 - protein, 106 aa, Zea mays
  Clone ID: MRT4577_172566C.1.pep
CTHATSALSLIYDGGHADAVGLASAPLASRWPASALRCIVLPPTQPTLSLGCSISRTHSVNYFPLFPLTKIPPDFFRSSVAILTHRFQIDDLGFRLLASLVEIVCC

SEQ ID NO: 264201 - protein, 311 aa, Zea mays
  Clone ID: MRT4577_172567C.1.pep
MADAKQQQQQQQQPQQAAAAATGVWKTVKPFVNGGASGMLATCVIQPIDMVKVRIQLGEGSAGQVTRNMLANEGVRSFYKGLSAGLLRQATYTTARLGSFRVLTNKAVEKNEGKPLPLFQKAFIGLTAGAIGACVGSPADLALIRMQADSTLPVAQRRNYKNAFHALYRISGDEGVLALWKGAGPTVVRAMALNMGMLASYDQSVELFRDKFGAGEISTVVGASAVSGFFASACSLPFDYVKTQIQKMQPDANGKYPYTGSLDCAVKTFKSGGPFKFYTGFPVYCVRIAPHVMMTWIFLNQIQKFEKKIGI

SEQ ID NO: 264202 - protein, 366 aa, Zea mays
  Clone ID: MRT4577_172568C.1.pep
MDAALMPLLVVSLVLCLLAAAPAASAARAFFVFGDSLVDNGNNNYLLTTARADAPPYGIDFPTHQATGRFSNGLNIPDIISEHLGAEPALPYLSPELRGEKLLVGANFASAGVGILNDTGIQFVNIIRIGDQLQYFREYQRKLRALVGEPQATQLVNQALVLITLGGNDFVNNYYLVPMSVRSRQYALPDYVRFIVSEYRKILSRLYELGARRVIVTGTGPLGCVPAELALHSQNGECAAELTRAVNLFNPQMVDMVRGLNRAIGADVFVTANTYRMNFDYLANPQDFGFTNVQVACCGQGPYNGIGLCTAASNVCDNRDVFAFWDAFHPTERANRIIVAQFMHGDTDYMHPMNLSTILAMDQEGL

SEQ ID NO: 264203 - protein, 92 aa, Zea mays
  unsure (1)..(92): unsure at all Xaa locations
  Clone ID: MRT4577_172569C.1.pep
MGGVCSQLMLHGLYASVDTGRIHPQCXQAPIASIVPPYLSPAVSSVCENPIVQPYRIQQAIATGILPLSPLFLQQPSALLQELPLVHLVAQN

SEQ ID NO: 264204 - protein, 65 aa, Zea mays
  unsure (1)..(65): unsure at all Xaa locations
  Clone ID: MRT4577_17256C.1.pep
MAAAAAMMVSGGRAALAVAGVLCAVAVLAAAXHSWWFXGAYHXYNPALIGWGRDRVSACCATWDA

SEQ ID NO: 264205 - protein, 406 aa, Zea mays
  unsure (1)..(406): unsure at all Xaa locations
  Clone ID: MRT4577_172570C.1.pep
MKNVAKCDTWCELQNPANHRVFERKLRPKPSGGGHVCLGVTRTWQSSPPSSASDDGTCTMDAALMPLLVVSLVLCLLAAAPAAPAARAFFVFGDSLVDNGNNNYLLTTARADAPPYGIDFPTHQATGRFSNGLRIPDIISDARPXLPRSMPCMXPHTQTQSATLGMNVXITTSTWTWEPYGSLLGXAATCVAATDLAVLXRVGVQRLYELGARRVIVTGTGPLGCVPAELALHSQNGECAAELTRAVNLFNPQMVDMVRGLNRAIGADVFVTANTYRMNFDYLANPQDFGXDADAAPSPNPKAIVFSMHACMGNPNGAIGDTIVGFFLQGXNVQVACCGQGPYNGIGLCTAASNVCDNRDVFAFWDAFHPTERANRIIVAQFMHGDTDYMHPMNLSTILAMDQEGL

SEQ ID NO: 264206 - protein, 41 aa, Zea mays
  Clone ID: MRT4577_172571C.1.pep
KPGFFAKGGPRQKKKKKKKKKKKKKKKKKKKKKKKKKKTPQ

SEQ ID NO: 264207 - protein, 223 aa, Zea mays
  unsure (1)..(223): unsure at all Xaa locations
  Clone ID: MRT4577_172572C.1.pep
MCHCSEPTQCHHQVLLPPTKACPALGDRPXAGAARRRRRGHRXIASILRLAVPMVGAGLLMYMRSLISMLFLGRLGRLPLAGGSLALGFANITGYSVLSGLAAGMDPVCGQAFGAGRTSVLTAALRRTVVLLLAASVPISLLWLAMHRVLVATGQDPDIAAAAYDFIMCSLPDLVVQSFLHPLRVYLRAQSVTLPLTYAAAAXLLLHVPVNWLLVQSLRLGIR

SEQ ID NO: 264208 - protein, 58 aa, Zea mays
  Clone ID: MRT4577_172573C.1.pep
QPKNLHFKLETQHLYFSRSLLDVVILNTKSFSSSKGEVTPSIFNIPYMEHSIFIQCLL

SEQ ID NO: 264209 - protein, 84 aa, Zea mays
  Clone ID: MRT4577_172574C.1.pep
HGLTHRCPYTLLGEDVTFGVFNQRARDYGSVHDLSVFRVLSDDLWQVLNFYWATTQKHGILLSEHVSTPRYFKARNGCSGVDTA

SEQ ID NO: 264210 - protein, 90 aa, Zea mays
  Clone ID: MRT4577_172575C.1.pep
GDSAASQVREYACAWSCVSCSVWLVDRSLSLLCILMGFWCSCDASSQGGAPVGSVQLQVCSSEGSEEGGGDALAHCPCNGPFHAKLEFVE

SEQ ID NO: 264211 - protein, 69 aa, Zea mays
  unsure (1)..(69): unsure at all Xaa locations
  Clone ID: MRT4577_172576C.1.pep
MAAKIFCLLMLLGLSGSADTATIFPHCSQAPIASLVPPXLTSGVFKXCENPTLQPYKIQPGMTAWMLTL

SEQ ID NO: 264212 - protein, 109 aa, Zea mays
  unsure (1)..(109): unsure at all Xaa locations
  Clone ID: MRT4577_172577C.1.pep
SQEERDXFESYDKVQNIRPKMVAEFRERFAHLNLTFSIGGQISFDVFPKGWDKTYCLQYLEDFSEIHFFGDKTYEGGNDYEIYESPKTIGHSVTSPDDTVAKCKALFMS

SEQ ID NO: 264213 - protein, 64 aa, Zea mays
  Clone ID: MRT4577_172578C.1.pep
IKSTGRRLTTPGLVKPGHFLSYLLGSTTLLFSVGFFSKSFVPIFFSLQKSYFVSEMVPPLFSSQ

SEQ ID NO: 264214 - protein, 54 aa, Zea mays
  Clone ID: MRT4577_172579C.1.pep
SLETKPPLSFAPCLDPRDVNTRKLLALYITAFIPSSTLARPIGNQPNFPGQNIL

SEQ ID NO: 264215 - protein, 82 aa, Zea mays
  Clone ID: MRT4577_17257C.1.pep
KIKVEILKILSNFAENPDMLKKLLSTQVPASFSSLYNSYVESEILINALTLFEIIYDNLRAEVFNYREFNKGSLFYLCTTSG

SEQ ID NO: 264216 - protein, 530 aa, Zea mays
  Clone ID: MRT4577_172580C.1.pep
KAQSVVFFNPLEQTRDEIVMVVVSSPDVSVINSNGSCLPSQLSPEWQFVSDEKISTGRHRLYWRASVPPLGLETYYVVTGQDCEKAIPAVVKTYTAAQEFPCPEPYECSKLEGKTVEMKNSNYTLSFDTCHGLLQTVTRHKYGEQTVVGEEIGMYRSHGSGAYLFKPLGEARSIVEEGGYFILTEGPLVQEAHSLPKTEWPKSPLSHSTRIYNCGDAIQDMLIEKEYHVELVGHAFNDRELIVRYKTDIDNQRIFYSDLNGFQTSRRQTYDKIPLQGNYYPMPSLAFLQDSHGNRFSVHSKQSLGAASLKNGWLEIMLDRRLVQDDGRGLGQGVMDNKPMNVIFHLLMESNVSALPQTHSLLTLQPSLLSHRVGAHLNYPMHAFMSKKPHEKSFKLVQQSFAPLTASLPCDVHIVNLKVPQPLRFSHTEAAEPRFAVLLHRRGWDASYCKRGGLECTTVGEEPVNLFYMFKDLSAVNVKATSLNLLYDDPEMLGYLQQIGDVGQEGNVLISPMEIQAYKLDLQPPSSQEE

SEQ ID NO: 264217 - protein, 374 aa, Zea mays
  Clone ID: MRT4577_172581C.1.pep
MGNCAGVEGNAEINPSFSAPNSSGTAGSKSVSKNAADTSTFGTKTSGSSSSVPPTPRTEAEILESSNVRKFSFGELKGSTRNFRPDSLLGEGGFGSVFKGWMDERTLAPVRPGAGIIVAVKKLKLDSFQGHREWLAEVNYLGQLSHPNLVKLIGYCLEDEQRLLVYEYMPRGSLEHHLFRRGSNFQPLPWNLRMKVALEAARGLAFLHGDQAKVIYRDFKTSNILLDSEYNAKLSDFGLAKDGPSGDKSHVSTRVMGTQGYAAPEYLATGHLTAKSDVYSYGVVLLELLSGQRALDKNRPPGQHNLVEWARPYITNKRRVIHVLDSRLGSQYSLPAAQKVATLALQCLSMDARCRPGMDQVVTALEQLQRPRAH

SEQ ID NO: 264218 - protein, 46 aa, Zea mays
  Clone ID: MRT4577_172582C.1.pep
MSTMAAAVLARLALALAACLPACEGGRWRVVDWWWARAWGPLGLKG

SEQ ID NO: 264219 - protein, 132 aa, Zea mays
  Clone ID: MRT4577_172583C.1.pep
LLQPRFLTKYATAARRAAYPQWRSPPPPRSPLPPESSAASLLLKTLAPLPRPFLGQAMVDFSGMVDDEFLDRLGIEKGTRKVINHEERGRVLRAMDGCSYKAAAGGSLSNSLVALARVGSKQTAGYTELNIV

SEQ ID NO: 264220 - protein, 97 aa, Zea mays
  unsure (1)..(97): unsure at all Xaa locations
  Clone ID: MRT4577_172584C.1.pep
LAQGSVSCYTPSLEPILCVHVSQCSQTPPSVQDEYFTLVSQPPLVSSAPPEIMMFDQESFCCTVWSVDDTLFAQGSRCSHTDGXLSSELCQVHGPVN

SEQ ID NO: 264221 - protein, 114 aa, Zea mays
  Clone ID: MRT4577_172585C.1.pep
YAAPEYLATGHLTAKSDVYSYGVVLLELLSGQRALDKNRPPGQHNLVEWARPYITNKRRVIHVLDSRLGSQYSLPAAQKVATLALQCLSMDARCRPAMDQVVTALEQLQRPRAH

SEQ ID NO: 264222 - protein, 457 aa, Zea mays
  unsure (1)..(457): unsure at all Xaa locations
  Clone ID: MRT4577_172586C.1.pep
MALTTASTVSSPSRIIRRFSSSQDSRPPSSLLXRPAPRXGNSPRACSWHRLVVRRMGWAARALLGGLSDAGASESDEEEEHVLRVGQREGEIDDAVELSAAAVGPERWDVLGLGQAMVDFSGMVDDEFLDRLGIEKGTRKVINHEERGRVLRAMDGCSYKAAAGGSLSNSLVALARLGSSQSAGYPELNIVMGGSVGSDPLGSFYRAKLRRANVHFLSKPVKDGTTGTVIVLTTPDAQRTMLAYQGTSSTLSYDSDLASLVSKSNVLIVEGYLFELPHTIEAIKQACEDAHKNGAIIAVTASDVSCIKRCYNDFRDIVRNYADILFANANEARALCELPSTDSPMSATRYLSHSVPLVSVTDGMHGSYIGVKGEAIYIPPPQCVAVDTCGAGDAYASGILYGVLRGASDLKGIGLLASRVAAVVVGQQGTRLRVQDADRLAGSFEHHLDSLEFCSDV

SEQ ID NO: 264223 - protein, 91 aa, Zea mays
  Clone ID: MRT4577_172587C.1.pep
YDAELKWGVGKSFHFFFNGPSILGIQSHVHIPFKKTDANLIFLSRIPDFFPIEDNIILFLQNKGGGGSFLREAVSIVVVVDTGLGGGSLFG

SEQ ID NO: 264224 - protein, 120 aa, Zea mays
  Clone ID: MRT4577_172588C.1.pep
LPSPDSPMSATRYLSHSVPLVSVTDGMHGSYIGVKGEAIYIPPPQCVAVDTCGAGDAYASGILYGVLRGASDLKGIGLLASRVAAVVVGQQGTRLRVQDADRLAGSFEHHLDSLEFCSDV

SEQ ID NO: 264225 - protein, 142 aa, Zea mays
  unsure (1)..(142): unsure at all Xaa locations
  Clone ID: MRT4577_172589C.1.pep
MDGIGPIRQDWHLVLVRKNAPTAAAKKDEKAVNVARRSXRQIEIMNTYIACMNNAASTVTYVNTKRLDDDTDNLGHERLPSDLKKNLMQARVDRKFTYATLVEMINEKAHVQHEYESGNEIANHEIIXELERALGTKLHDKK

SEQ ID NO: 264226 - protein, 101 aa, Zea mays
  unsure (1)..(101): unsure at all Xaa locations
  Clone ID: MRT4577_17258C.1.pep
PYAPKTFNEALGPPKTVIWNGPMGVFXFKSFQLALXGISKKLVWLSPPKGVPSIIGGGDFFFSVKKVGLAPKISPIFTGGGGSLELLEGKTLPGGLAPDNA

SEQ ID NO: 264227 - protein, 94 aa, Zea mays
  unsure (1)..(94): unsure at all Xaa locations
  Clone ID: MRT4577_172590C.1.pep
MGXWVGLVLGVAAGLALIVGFVRCENSRSARRRQLAATVASFSRMTIEDSRKLLPADLYPSWVXFSSQQKLKWLNQELTKIRPFVNDAASELIK

SEQ ID NO: 264228 - protein, 106 aa, Zea mays
  Clone ID: MRT4577_172591C.1.pep
WRMHACGSSECGSSFSADGTIGPGAYPLAVPGPIDTGSGLKAYTDDTSLRDEADLDVLAGPNTTHARDLIEHHEAIDKMKKAHDTFAPTNGNSTQDTLIVRPNIQP

SEQ ID NO: 264229 - protein, 67 aa, Zea mays
  Clone ID: MRT4577_172592C.1.pep
LDAWADAWVQGLPFYSRVAIARNNWTCQMKWQTSWSRGTNMASTTGTKDHSGLCYKRLRQAVVVDLH

SEQ ID NO: 264230 - protein, 73 aa, Zea mays
  Clone ID: MRT4577_172593C.1.pep
ESILQEGMIRYENRHNIWHQILGLTDRPTRAYTSFNSIEYYRLETDTHYIHQVLNKMGERKRPQALCLFVRVG

SEQ ID NO: 264231 - protein, 251 aa, Zea mays
  Clone ID: MRT4577_172594C.1.pep
AQDSSILYKDRLAKTGRFTVGIDPDKFNETLKQDEVQARIKELNERYKDMKVIVGVDRLDYIKGLTQKLHGFEQFLTDHPKWQGKVVLIQVAVPSREDVKQYQDLETEISCQVGKINGKFSKPEYSPIIYLHRSIPFTELTALYSIADMCLLTSSRDGMNLVAFEYIACQEQRHGVLALSEFAGASVFMADGAVQFHPANIKEMVQGIYKGLTMSKEERKERYDKLEKFVHTNTSAKWGQDFVTELSKLHA

SEQ ID NO: 264232 - protein, 168 aa, Zea mays
  unsure (1)..(168): unsure at all Xaa locations
  Clone ID: MRT4577_172595C.1.pep
LRFPPPRFQFRFWFVGEEGRMAGFDVEYXRCFFGGLVWATDXTSSYNVFSTYCEVLQSKXIILDRETHRFRGFRFVTFFTDDAMPTAIKGMNGKELDGRNITGNEAQSXRCGRGGSGGXYGGGRRDGGGYGGGGGGYGGGXGGYGSGGGYGGANLGGRYQNDDGNWRN

SEQ ID NO: 264233 - protein, 89 aa, Zea mays
  Clone ID: MRT4577_172596C.1.pep
LRHPCSNLWILALTITPLVYFCRGILPAIDLISVNALVGIFYFVGFGLFCLESLLSIWVIQQVYMYFRGSGKAAEMKRDATRGAMRAAI

SEQ ID NO: 264234 - protein, 43 aa, Zea mays
  Clone ID: MRT4577_172597C.1.pep
CAASRRGIVLQILLRPCSGFGLACGGQRRVSTLCFFRSSSRGL

SEQ ID NO: 264235 - protein, 97 aa, Zea mays
  unsure (1)..(97): unsure at all Xaa locations
  Clone ID: MRT4577_172598C.1.pep
XXNXXEVFXNXPRGXGXPXXXPXFXTTTXFXCPAASSAAAVXGKXENSAAAGEVLIVRXREGGVGGAGLGXAXAXRRGREAARTTSRRLAFPLLRSR

SEQ ID NO: 264236 - protein, 58 aa, Zea mays
  unsure (1)..(58): unsure at all Xaa locations
  Clone ID: MRT4577_172599C.1.pep
AVPAYALLACFECPAVSRGXLGPPVARLPPQPAPAQLISLNGVALNWQVVPYSLPLEL

SEQ ID NO: 264237 - protein, 49 aa, Zea mays
  Clone ID: MRT4577_17259C.1.pep
TIMGGGDFFFSFKKVGLAHKISPIFTGGGGSLEFLEGKTLPGVLALDDA

SEQ ID NO: 264238 - protein, 94 aa, Zea mays
  Clone ID: MRT4577_1725C.1.pep
LCRDSEPSGRVAAIQPAQLQPVGLFLFYATTSNVTPFTYVSTHTTDPSPNSVITTDAINILFRLLFYKFPENLMPKRAAPDNLSPENNNNMKQP

SEQ ID NO: 264239 - protein, 93 aa, Zea mays
  unsure (1)..(93): unsure at all Xaa locations
  Clone ID: MRT4577_172600C.1.pep
LYFYFGTAAAPGAWDYQLPQEVAAAGSVVQRAMAAAPTVRGYGPASTXCXVALPRPXDRXVPAPFVPVTTRRRALLVLLRAAGADTPTRGGLQ

SEQ ID NO: 264240 - protein, 48 aa, Zea mays
  unsure (1)..(48): unsure at all Xaa locations
  Clone ID: MRT4577_172601C.1.pep
DSLIHLAGRVRSLGSGCSPKRNTRGGGGALLTLGXTQHLXALGPFFLS

SEQ ID NO: 264241 - protein, 34 aa, Zea mays
  Clone ID: MRT4577_172602C.1.pep
PTYDTKDLCIILHRAQKVIQIDLINGIFYTFYTL

SEQ ID NO: 264242 - protein, 83 aa, Zea mays
  Clone ID: MRT4577_172603C.1.pep
PVRGLGRDSGLQTRISQERFEISQGWRGPHLRGGKPVRAPSFKRFGGKRGGPLGPKKKKKKKKKKKKKKKKKKKKPPPPRGAP

SEQ ID NO: 264243 - protein, 95 aa, Zea mays
  Clone ID: MRT4577_172604C.1.pep
KKNGIAQIMYFERNFSYPFLETLKAQKQGKWREELKHYYENVNNCESDQLRFHLKKNSRIPWLSYEVLINLNYELPLKLVKGFQQIKAGIGYGSL

SEQ ID NO: 264244 - protein, 160 aa, Zea mays
  Clone ID: MRT4577_172605C.1.pep
MNVANHHMELVCEVKEVSNMKFFRLDNSKVLSWLCCKVYDLKEVFPKLGKNYAAQTEKEKLKEAVQMIREYLKDEPWLALLCKKLQLDINAITVDATTKTAEASVYADSCPAPALPSESKTANGGAKSSKGRPAKKAKTEVGSKNIKDMFRRVTRSGSGS

SEQ ID NO: 264245 - protein, 59 aa, Zea mays
  Clone ID: MRT4577_172606C.1.pep
KVIQSDKHKHLHWHALFMDMYVNAPFLRFNVCVFWDSKDFYLGADVVHVKLFIAISLFH

SEQ ID NO: 264246 - protein, 261 aa, Zea mays
  Clone ID: MRT4577_172607C.1.pep
MSCGRGSTGEVEGGKSVAAMTPWHDSLAPPPRVLISHRPSDASGQGIVLSLQHPRSGDEVGYLFIDGQLQEINWFKERYGAWFLGDYVCEDGGLYYCTPVDPIFIFLPTFEAARMSNDKDPGKFRQLDEILYVEGYPGYQQLMNVANHHMELVCEVKEVSNMKFFRLDNSKVLSWLCCKVYDLKEVFPKLGKNYAAQTEKEKLKEAVQMIREYLKDEPWLALLCKKLQLDINAITVDATTKTAEASYADSCPCPPLCLTLV

SEQ ID NO: 264247 - protein, 83 aa, Zea mays
  unsure (1)..(83): unsure at all Xaa locations
  Clone ID: MRT4577_172608C.1.pep
PPGGRLGATGRWARFLVWAVSSAGPLWLLSAGFFWCAPALAWPVPLVGGALFWAPFAGLWVLVPSSRLGVPGAGAPFSGRFSX

SEQ ID NO: 264248 - protein, 86 aa, Zea mays
  Clone ID: MRT4577_172609C.1.pep
GHAQRYSVAGSPRVHIRVMNPDQLKHCIAGCQTTMQRGTTASHDIEHKPLRECLLYKLGANKSPALLQKRRGSLWHRERGHERVDW

SEQ ID NO: 264249 - protein, 203 aa, Zea mays
  unsure (1)..(203): unsure at all Xaa locations
  Clone ID: MRT4577_17260C.1.pep
NDALDGTDCVMLSGEIAAGAYPXEVDAKIMDRICIEAXESSVXRYVCFLVMIKAAPLPKSPLETIVSXVCRTXTKAQRLAPELSVTVSLCTLTHEPTTXQAKIPATRNPSSLLRVILCRALRPDSFDWTIISXRPARYSLIYRGLIPLLVEGSANATDSESTEVILEAAFNPDVQNHLCXPDDAIVSLHRIGVTSVIKICIAK

SEQ ID NO: 264250 - protein, 191 aa, Zea mays
  unsure (1)..(191): unsure at all Xaa locations
  Clone ID: MRT4577_172610C.1.pep
YPLRRLSRSQLQLRFLYPTPRRVPQNFRPPPYHTCDVTRWHARDPLGGYHCRCDSSYKNTHSCNECKIPFTRSSHAKGIALEKIGIEATXTNSTIRXCDHAPLAKNVNRIAVFWTNDSRLNYIEENDHVLTAGFEPKVHCVAYIPXAAVKEPRADIVSLLALFNDNKEKTRSYIALATRIMNAEMTRDGVR

SEQ ID NO: 264251 - protein, 69 aa, Zea mays
  Clone ID: MRT4577_172611C.1.pep
SDSWAVFPANSCNDLVVKFSKALSKTAAPMNLLTPENPDPFISVHHAMYVCVAYGLHLPVITPRAGETS

SEQ ID NO: 264252 - protein, 66 aa, Zea mays
  Clone ID: MRT4577_172612C.1.pep
DQSTTGADLYPPLSCPWHGAPPPYPFNVRQCQDRLMQSQFGRVQTKKADNLALLHRLLHGSAALPV

SEQ ID NO: 264253 - protein, 164 aa, Zea mays
  Clone ID: MRT4577_172613C.1.pep
MSGHDSKYFSTTKKGEIPELKEELNSQYKDKRKDAVKKVIAAMTVGRDVSSLFTDVVNCMQTENLELKKLVYLYLINYAKSQPDLAILAVNTFVKDSQDPNPLIRALAVRTMGCIRVDKITEYLCDPLRRCLKDDDPYVRKTAAICVAKLYDINAELVEDRGFL

SEQ ID NO: 264254 - protein, 69 aa, Zea mays
  Clone ID: MRT4577_172614C.1.pep
KLGWPNLTNKDCVSFLLNCRKAIPPRKDGGKVIIGDIIINHSGLMLKTHLLMDIALITITKGRRKDKKK

SEQ ID NO: 264255 - protein, 109 aa, Zea mays
  Clone ID: MRT4577_172615C.1.pep
LRRTGHDVRLATWEPMFPADEKLLSCWSLQETVFTGSATTTSTITTVEPSSGKEHTLPPDEAVLISEALGEGVWINTSPLVTGLVDFSGTEEMPTGEFQRRGEGRRRDW

SEQ ID NO: 264256 - protein, 120 aa, Zea mays
  Clone ID: MRT4577_172616C.1.pep
MAFRSSILLATVALATLFAVGSCTTPLTFQIGKGSKPGHLVLTPNVATISDVEIKEHGGDDFSFTLKEGPTGTWTLDTKTPLKYPLCIRFAVKSGGYRIADDVIPANFKAGTTYKTTLNI

SEQ ID NO: 264257 - protein, 120 aa, Zea mays
  Clone ID: MRT4577_172617C.1.pep
MASRSSILLVMVALATLFVVGSCTTPLTFQVGKGSKPGHLVLTPNVATISDVEIKEHGGDDFSFTLKEGPTGTWTLDTKTPLKYPLCIRFAVKSGGYRIADDVIPANFKAGTTYKTTLSI

SEQ ID NO: 264258 - protein, 176 aa, Zea mays
  Clone ID: MRT4577_172618C.1.pep
MGAGANNHEESSPLIPAAVAAPADEKPPQAPAPEAANYYADGVPVVMGEPVSAHAFGGVPRESWNSGILSCLGRNDEFCSSDVEVCLLGTVAPCVLYGSNFERLAAGQGTFANSCLPYTGLYLLGNSLFGWNCLAPWFSHPTRTAIRQRYNLEASVLCTQLFVRFSFVSMWVSISV

SEQ ID NO: 264259 - protein, 75 aa, Zea mays
  Clone ID: MRT4577_172619C.1.pep
TKKKADQSRGSNPSLSLSAYVLALICYRLLSVNYRYFLIKGTVNPLEYPTLLAFTLIPFIPSVLISNRPLPFIIP

SEQ ID NO: 264260 - protein, 105 aa, Zea mays
  Clone ID: MRT4577_17261C.1.pep
KLFWGEKPARGPQTPQKGLKKTTLVQKPPQPNFLGKTLGAKPNPPGGGKNNPQNLCFIRGPPPPCWGVEGPPGPFNIQRRGSPGPTGTGPKKKQLGPPPKSLQLW

SEQ ID NO: 264261 - protein, 102 aa, Zea mays
  Clone ID: MRT4577_172620C.1.pep
AHNRLNKGWGLFQKGGGCLPKQGLKKHHWTKQGPKQAPAKQCMLVRPTQTTGHKAEQGVDRTKRGGPPKPPEEAKGPPTAPGGEPPPLGAGGAKPKPNLCPG

SEQ ID NO: 264262 - protein, 101 aa, Zea mays
  unsure (1)..(101): unsure at all Xaa locations
  Clone ID: MRT4577_172621C.1.pep
MEVLIAVLALLALASSASCTTSGCCCYQTPPYHLPPPYYMPPPYYLPPQQQPQSWXYPNQPPLISPYQQLXSCGVSSVSSPFLHHCVXLLKHHCTPAATYY

SEQ ID NO: 264263 - protein, 143 aa, Zea mays
  Clone ID: MRT4577_172622C.1.pep
MTLTARARMLGIRLEDCTARTSLDMLSKHYYQATGSWVVFFVPENDADMTAYNDFMSYLGDKQRAAVCKLGESSTLFLVPPSDFSEQVLRVPGNVSISGVILRFQQSNPDYSSPNRKPLDRAHPSSASNFNTDVRNCEDLHAL

SEQ ID NO: 264264 - protein, 127 aa, Zea mays
  Clone ID: MRT4577_172623C.1.pep
VRPGAFFRGAALLLLTFLLGLFVLRGWPCVLSLCCSGQGLMLSFCDFALLVPGHGSLCSLVPSVKFGSGRCLPISQRAVRQVWYCLFVEDVVPGVLLLFVSPRSGPLASCQEIVSVVACWLSACLPP

SEQ ID NO: 264265 - protein, 62 aa, Zea mays
  Clone ID: MRT4577_172624C.1.pep
HMFILIILYTRLLQNIIHNWMIAPLLTSKSINIFNHLQYFLSPVTLNLLYKVKYVTSTSSSQ

SEQ ID NO: 264266 - protein, 81 aa, Zea mays
  unsure (1)..(81): unsure at all Xaa locations
  Clone ID: MRT4577_172625C.1.pep
KVENXKRLKPISVKKVRNQFPVVAPPTWGTLPSKISFPKFLPFILPPKPLSLNEKWKKIQLSSTSRRADRKLHKNIDFMKT

SEQ ID NO: 264267 - protein, 48 aa, Zea mays
  unsure (1)..(48): unsure at all Xaa locations
  Clone ID: MRT4577_172626C.1.pep
GPPQSSLPNGRRADPLTVETVRRGAGTHGWWQQGHXATYNAPTVLSGR

SEQ ID NO: 264268 - protein, 105 aa, Zea mays
  Clone ID: MRT4577_172627C.1.pep
WDPRGRPEITGHLRLVAHSAQSYTIYLTMSAKMWGVGAEQGGILQTSTGKLELKEPYYRLSQPQSCTLPQDQQQQQLPSLQAQGSEQQMQEGLSPAFTIDQDCLN

SEQ ID NO: 264269 - protein, 50 aa, Zea mays
  Clone ID: MRT4577_172628C.1.pep
NWNMMRARAIASRDNRQRHCGGINISRHRDATDRSATKGSMVHTGGLMTI

SEQ ID NO: 264270 - protein, 93 aa, Zea mays
  Clone ID: MRT4577_172629C.1.pep
NCTGVARRLAPHAPLPPPAPLGRGKGGLGNSCLTSSRISLGRWLQRGPGLRGIFDTLKSYDRFYILKKKQAFAMGERRTEKRKKLSTLTSVLS

SEQ ID NO: 264271 - protein, 111 aa, Zea mays
  Clone ID: MRT4577_17262C.1.pep
LGTSRPAGEFPSPISAPHPHRVSLPLLVLLPLRLNLLGYSRIAARGWSLAVRAFQERAAALYLTQIAPVSCLAARLGVGLRNGGRAGAASPGSIPISLNLDGCICKHQEEG

SEQ ID NO: 264272 - protein, 72 aa, Zea mays
  unsure (1)..(72): unsure at all Xaa locations
  Clone ID: MRT4577_172630C.1.pep
VIKNRKEHKGSFEPIHVEDSLGNQFATSMGNVFTIGKGNKPWVSLPKGKGIQLSVLXAQWKRNAPARLLATH

SEQ ID NO: 264273 - protein, 74 aa, Zea mays
  Clone ID: MRT4577_172631C.1.pep
PTHGPTLLHLVHNSPAEGAHTQAPTQQTAPPMTTKTPQRGTTPTYIYTGTLLNYQKDTHDSGNETRKTNVHILL

SEQ ID NO: 264274 - protein, 67 aa, Zea mays
  Clone ID: MRT4577_172632C.1.pep
ETVHALSFPAYTLMRHCICCYTIQSLRRNDGPSLFTGFWVVFPRVCRGVSGVYWTVCIGHSAKGTVD

SEQ ID NO: 264275 - protein, 42 aa, Zea mays
  unsure (1)..(42): unsure at all Xaa locations
  Clone ID: MRT4577_172633C.1.pep
LPXGFNTQHTPSQRIPTHSYLIXTQVTLRYXFRKPLLHWRSG

SEQ ID NO: 264276 - protein, 50 aa, Zea mays
  Clone ID: MRT4577_172634C.1.pep
YEIEPVIYTEMENRQQLFYLGLSTVTASQMGHVQHMMGISAYRRLARRMS

SEQ ID NO: 264277 - protein, 102 aa, Zea mays
  Clone ID: MRT4577_172635C.1.pep
REQYGGTVHLFIGTGRSLCKITLMSFMFTIDLRTLMFLFLLLSRSFLARSFRTGSTFVPTMLFILCTASFRVRKFLYIYHTWETLLIMFLRTFGRRRPPTAH

SEQ ID NO: 264278 - protein, 60 aa, Zea mays
  Clone ID: MRT4577_172636C.1.pep
FFTSKAPVINHVRLDMHTSTNQPIISNHRIFLLHFKTFTHLLYQHLIPEQFFYIIHLHLI

SEQ ID NO: 264279 - protein, 50 aa, Zea mays
  Clone ID: MRT4577_172637C.1.pep
SCLISIPLSLLSCLSFPPPISSQVADCRRDFRRREAAQMCSRCQPAMFPS

SEQ ID NO: 264280 - protein, 152 aa, Zea mays
  unsure (1)..(152): unsure at all Xaa locations
  Clone ID: MRT4577_172638C.1.pep
ASSAPSKSPIHRAGAAGVAVAAAPAPSCRRTCLSRHHLTLPSPWSLPLPQSLALPRHRTPPLSSPVLPSPTSASAPDSAAKYPPGPLPLPPPPSGPPPXPLSPPPLPXXXSVFFVSPPPRPXPRFPPAPRRRSHDEEIEEGESDVGGIEQVN

SEQ ID NO: 264281 - protein, 116 aa, Zea mays
  Clone ID: MRT4577_172639C.1.pep
LEAPHALVAALAAWTFSCSLQILQVRHLGSHGTVWNGSSAGARACLCRLVGQLLLTGACARSCLSSAVAAALLLTGDYARCTAPRRTRVVLHSGAAAGHNDGFKHANGIRSTVRQR

SEQ ID NO: 264282 - protein, 351 aa, Zea mays
  unsure (1)..(351): unsure at all Xaa locations
  Clone ID: MRT4577_17263C.1.pep
RGRPPAMFLFGDSTLDVGNNNYLAGPGAPRANKPYYGIDFPGSVPTGRFSNGYNIADYLAKSMGFASSPPPYLSLAPSTGRLVLTARGSGVSYASGGAGILDSTNAGNNIPLSKQVQYFKSTKARLVTKLGSRATHLLLSRSVFLFSVGSNDLFVFATARASAHNKSAADQQRDVATLYASLISNYSATITELHTMXXRKFAIINVGLLGCVPVARLSGGTKTGACLDGLNELASGLDDALAVLLASLASRLPGFTYSLADYYGLSMATFDDPGASGYTDVADACCGGGRFGAEADCLPNATVCSNRDQHAFWDRVHPCQRGAMLTAHAFYXPPGPIHXPINFKQLASTSL

SEQ ID NO: 264283 - protein, 167 aa, Zea mays
  Clone ID: MRT4577_172640C.1.pep
IPRGGHIFATLQEALHFYSASSSQQPSRHQGLSSPPLPRPPIACCLVAMDRSKSYAGGRMQIEPYYDGGGARPDFRSYSYSAGGSGMGTSSYAYQYEYGGAGAGAGEEMKRSKSKRRWLALADPDMERKRRVAAYKAYGVEGKMKGSFRKSFKWIKDRYLNLVYGWS

SEQ ID NO: 264284 - protein, 252 aa, Zea mays
  unsure (1)..(252): unsure at all Xaa locations
  Clone ID: MRT4577_172641C.1.pep
DPRRRPGTSNCRHQVQRPFHITSQVKNPQSPTRCTCEIFCEGRWRSLRNTSDPREGLKKLDEYLLTRRYITGYQYSKDDLTVYTAISTAPSIKNINVTKWYNHIDALWTLSXITAKIQGVKGESSAAPSPPTPYVAEAQVPCAEEDDDDDVDLFAEETEDEKKAAEERAAAAKASXKKKESGKSSLLLDEKPCDYDTDMANLDEDVTSAQMERLLWTAYKIVPVGYGIKQLQIMMTIVDHLVSVDTLIEDYL

SEQ ID NO: 264285 - protein, 46 aa, Zea mays
  Clone ID: MRT4577_172642C.1.pep
MAAPASTTAAAGVALLIMLVSLAAAADMLIACYGERPAQAARRDVR

SEQ ID NO: 264286 - protein, 156 aa, Zea mays
  unsure (1)..(156): unsure at all Xaa locations
  Clone ID: MRT4577_172643C.1.pep
MEGNQILVQSEQSLIPGVQTLVIGQEFADVDTCRRAVKDMAIALHYELRVVKSDRSRFIAKCSKEGCPWRVHIAKCPGVPTFTVRTLHGDHKCEGVLNLHHQQATVGWVARSVEARLRDNPQIKPKEILQDIREQXGVAXVSYMQAWRGKXESMAA

SEQ ID NO: 264287 - protein, 61 aa, Zea mays
  Clone ID: MRT4577_172644C.1.pep
AGLVLDPDPLLVVVLADFRVPFCGGSWGFSCLCCYFYVWAVDHQWPLVAPLSGSAHSVDSR

SEQ ID NO: 264288 - protein, 39 aa, Zea mays
  Clone ID: MRT4577_172645C.1.pep
YYYGCQHFTLTYIKLNPDTIAFIPISNWNGDNMLVPRTN

SEQ ID NO: 264289 - protein, 141 aa, Zea mays
  unsure (1)..(141): unsure at all Xaa locations
  Clone ID: MRT4577_172646C.1.pep
RQNALARCYRXIENKAYPKSRYCRXGSPDPKIMIYDVGMKRKGVDEFPYCEHLVSCQKENDSRGGLVDDGIGCIXYLTYLALXDDFLLRVRLRALHGLRIIYMFSCAXADKVQIGMRGGFGXTQGICAMVDVVKVLLSVCC

SEQ ID NO: 264290 - protein, 242 aa, Zea mays
  Clone ID: MRT4577_172647C.1.pep
MNLLELTADGALTEPTPLHESSVTSTTPSNMWPTTSLSKSWTTAMYRERATTTVKFSAIRDRARGSSVRADRLAPEEHCSVAFSVLFEEAMELERSVSDNSLAADRRRGRVGATAGGQRVVEASRVGEPGPGEVVCVMGRHGYWSAGAGTDIVRLLGRRPDRHGPGLAGAPQARCDVAVAAGDVVQLIVHLVRRRPPASTIIPRRCGGVSEELAGEGGQHDVVRRVVRVQIRRRPPRCRGRT

SEQ ID NO: 264291 - protein, 68 aa, Zea mays
  Clone ID: MRT4577_172648C.1.pep
RYYRFDNSKQRIVMHIFIQAQHEAGARALADWDGDVAGGERAEGVGSVNVSYVGQVEKVMTEVRFMRA

SEQ ID NO: 264292 - protein, 39 aa, Zea mays
  Clone ID: MRT4577_172649C.1.pep
ELLFDLLTHGVVMWDLKADTAGLFYCRGLLIGSVVGCVG

SEQ ID NO: 264293 - protein, 62 aa, Zea mays
  Clone ID: MRT4577_17264C.1.pep
YYSCVHAATSGVVGHQDRCAASKQSGFFDTCCGCLSGGETSTYIHSVLDLEPCMDGCNMHAQ

SEQ ID NO: 264294 - protein, 669 aa, Zea mays
  unsure (1)..(669): unsure at all Xaa locations
  Clone ID: MRT4577_172650C.1.pep
MKVGGLLTSAGINIGLCVLFLSLYSILRKQPQNVKVYFGRRIAEEHNRLRDAFILERFVPSPSWIVKSLRCTEEEILATAGLDAVVFNRILVFSIRIFSLAAILCVFGVLPLNYFGQDMHHVRIPSASLETFTIXNVEERSRWLLVHCVVLYIISAVACILLYLEYKHIARLRLYHISRATSNPSHFTILVRGIPKSSTESFSRTVESFFTKYHASSYLSHQVVYKVGKVQKIVSGAKKVYRKFRHFKGATVDRRCRPIRFQCCFCGASSNSFQLLPSDYEQESEKSDVNESSSSLPDEECGAAFVFFKTRYAALVVAKILQTSNPMRWVTTLAPEPDDIYWSNLWLPYKQLWIRHIVTLMCSIVFMVVFLIPVTFIQGLTQLEQLQQRLPFLRGILKKKYMTQLITGYLPSVILQIFLYTVPPTMMFFSTLEGPISHSERKKSACCKVLYFTIWNVFFVNVLSGSAISQLNALSSPKDIPMQLAKAVPVQATFFTTYVLTSGWASLSSELMQLFGLTWNFLRRYLLRIKEDSDFLYSFPYHTEMPKVLLFGLLGFTCSVLAPLILPFLLLYFFLGYVVYRNQFLNVYCTKYDTGGQYWPIAHNTTIFSLILTQIICLGVFGLKESPVAAGFTVPLIIFTLLFNQYCRKRHLPLFKTFPAQVGAISLNL

SEQ ID NO: 264295 - protein, 151 aa, Zea mays
  Clone ID: MRT4577_172651C.1.pep
MSDGEDDTKSQVSAAAEVEVSADASGGKGQMSVLEALKGVLKLSLIHDGLARGLREASKALDRREAHMCVLNEACEEEAYKKLVVALCSEHKIPLIKVPDGKQLGEWAGLCQIDREGNPRKVVNCSCVVVKDWGEESQERSILLNYFQTEQ

SEQ ID NO: 264296 - protein, 79 aa, Zea mays
  Clone ID: MRT4577_172652C.1.pep
RLRASRPLCSPSMVAVAAGLAAYMAVLRAAPRTFEGDQLMLNDSAVEIWLRFDDQRWSNAMLQPCTACTRRRPLSSTLH

SEQ ID NO: 264297 - protein, 60 aa, Zea mays
  Clone ID: MRT4577_172653C.1.pep
THEKEEVLLTHINKPKDARRPASTDRCMFLASHPLSVRTRAAGKFLVFSSRPCRNSAHAS

SEQ ID NO: 264298 - protein, 94 aa, Zea mays
  Clone ID: MRT4577_172654C.1.pep
VFPVGWIGWQLSKPESFGMHLVEFKCFGCGPDSNLEKEGGVGFVPHRGAGCAISRLTVRPWLHVDPASAQVAMHATRYTHLRKKPPRETRISSL

SEQ ID NO: 264299 - protein, 61 aa, Zea mays
  Clone ID: MRT4577_172655C.1.pep
MAPKRISVEPRSRRAPKGFVGSTYDALTSPENAAVVRSIALFGAVVTFLSSSWGEILLPPQ

SEQ ID NO: 264300 - protein, 56 aa, Zea mays
  Clone ID: MRT4577_172656C.1.pep
MPPSAAATAAAFLFPAVAIPCRVFPQRRARSLAVRAVASPPAFAVKPAPLPSKVAE

SEQ ID NO: 264301 - protein, 85 aa, Zea mays
  Clone ID: MRT4577_172657C.1.pep
SFLCLQYKLQRCVCGYTLISNMSTFLFTGFFILLCWLSMLQCWRSCHVLNRKGSQSLQRKSTHEQSFWWPVRRRDQWKGSNGFRS

SEQ ID NO: 264302 - protein, 156 aa, Zea mays
  Clone ID: MRT4577_172658C.1.pep
MAAATALVSSSSLRAPAAFSVVVRAASRPAPVVAVVTPLPAAKAAAARGARLRAQATHNVKLITPDGEVQVQLKMPGDVYILDYAEEQGLDLPYSCRAGACSSCVGKIVSGSVNQFDQSFLDDDQVAGGFVLTCIAYPTSDLVIQTHKEDALVESY

SEQ ID NO: 264303 - protein, 122 aa, Zea mays
  unsure (1)..(122): unsure at all Xaa locations
  Clone ID: MRT4577_172659C.1.pep
MAESTERTEKDVNTRQRVQSRAYSAHLKSSGKYSETPLIAVTIVKTARFKELPPYDTDXHYIRSASIARKIYLRQGIGVGGFPKIYGGRQRNGFRPPHFCKSNGAXARNILEDVQNMGIIDV

SEQ ID NO: 264304 - protein, 50 aa, Zea mays
  Clone ID: MRT4577_17265C.1.pep
KKVPTLPIFGVYQNKFCLDQISFFLEQKVSFPPSVEGFPPKKIRWPPVTP

SEQ ID NO: 264305 - protein, 249 aa, Zea mays
  Clone ID: MRT4577_172660C.1.pep
MALLARTARNALLESRSIIQPTIFRAGVTTISHNLDTSNTPEPLIQSGHRISQEAKERSKTPQPLPANASKPATSENIKASPHARSDIVSTTLTPSIRTLLPLLQMQPAHYITAHLHGRPYLLTRGDTLRLPFQMPNVRPGDILRLNRATHIGSRDYTLKAPEAVKGTSDHGKKVYYLDERLFTCRARVVGVESEPLRVEEKTKRRRRHVKHVKSKLHFTVLKVSELEVKSLEEYEAALAQEGGEQSVQ

SEQ ID NO: 264306 - protein, 93 aa, Zea mays
  Clone ID: MRT4577_172661C.1.pep
KVNQIGSVTESIEAVRMSKKAGWGVMASHRSGETEDTFIADLSVGLATGQIKTGAPCRSERLAKYNQLLRIEEELGAEAVYAGANFRTPVEPY

SEQ ID NO: 264307 - protein, 87 aa, Zea mays
  Clone ID: MRT4577_172662C.1.pep
IHFSIFSFTCYLRCKAVIQSLYPKSNAAPQSINTQLGISNHTTYVALNPYICLPFPWVLHYVNQSAPPESTVLHHPVTVRGTRHPAN

SEQ ID NO: 264308 - protein, 72 aa, Zea mays
  unsure (1)..(72): unsure at all Xaa locations
  Clone ID: MRT4577_172663C.1.pep
PKSEVPAWVVVGSPTMVGFGLAAKITFLGSLKVRPATFGXEVPPPVAGFAEEDIKAYFPGYLRRKGVVGPGI

SEQ ID NO: 264309 - protein, 81 aa, Zea mays
  unsure (1)..(81): unsure at all Xaa locations
  Clone ID: MRT4577_172664C.1.pep
QSKTSLLXYATTFFFFFFCTXTXPVLRGAEFFSXGXFFGGWRRRLXPPSAASRPXSGACPGLLXXXXXXXXXPSQVSLXRG

SEQ ID NO: 264310 - protein, 65 aa, Zea mays
  Clone ID: MRT4577_172665C.1.pep
DFTGYRGHESECMKKLNIYSFTRVSRDLNTTFIDGIHCRTKHCTTNKKLSTDLTIIYWPPHLTQT

SEQ ID NO: 264311 - protein, 95 aa, Zea mays
  Clone ID: MRT4577_172666C.1.pep
CARVDLGQVLLPVACKASNAAHATRSVRRAKAKCPGRLQVIQASEWGFTQLSPADSLTCKSEGIPVPGGVHARLLVSPAGLESRAPGQPFLRPDA

SEQ ID NO: 264312 - protein, 130 aa, Zea mays
  Clone ID: MRT4577_172667C.1.pep
PKGYGESPSVRSLIDALDYLQLNPNRYSIRALRSGYYGSRPIRGLDRTTGSNRLFPTDGPDSKKSARRPTLIPIVQTGSNDPGLVTYLPLRTRLVSPGRDALDGSQGSASRDWRRPRDIVSSRRGGGALA

SEQ ID NO: 264313 - protein, 177 aa, Zea mays
  Clone ID: MRT4577_172668C.1.pep
MDPSSGKPEEVAAYQSKEAKQARLQSMLAALLDDPILADVPRKPSLADVDTLINLELGSAMRLTVVKLDNTSFDVAVLNSATVKDLKLAIRKKINEIEQEKMGHRHISWKHVWDNYCLTHHNEKLIEDNSTLSSYGVRNNSKVCFSPHVMSRVHRKHSRRRKHRFFHGLSRKANPAL

SEQ ID NO: 264314 - protein, 418 aa, Zea mays
  Clone ID: MRT4577_172669C.1.pep
MDVSENGHGNSSFCKKPKEGDVHVSSSSTEVAGTIPEMNGGDHHIPGSSFSCLVKIYDMPDSQVKLNDVIEFIGVYTFDPELAAPSDNPDDIMLDLIEDVTVQLPPSKVPRLHCLVWRKLSFHDFISRPVVEPSPSLLRGIRQSLLSHLTLVLGNDELAAQCLLLHLLSRLRNRVDVVTVGRLSLNFTGFNRESASIFGNQLYSLIQKLVPYSQAIPLSIEYLNTATLQPRKDNKSGRLVTGVLQLPQGTHLIFDETLLQTGSLTSKGVENTMLLKNLMESQKVDYDFEYYKLEMAADVQLLTLSEGKSNILPSDLVVPFRPSSVPTVNAGAEETESWRWFLTTVRSLPQSTEPETYQMIQDEMVSAMRDDRSLGCSELSRWLTMAQIMASSFGEKSLSLEHWQMVKELERLRKQRMQ

SEQ ID NO: 264315 - protein, 43 aa, Zea mays
  Clone ID: MRT4577_17266C.1.pep
VCTYMGGHNNKHMRLRMIMPSKNYLKKINYQIFSQLCKYQTHS

SEQ ID NO: 264316 - protein, 62 aa, Zea mays
  Clone ID: MRT4577_172670C.1.pep
GGPKFSPLGLSPKSKVQFLGWGNGNGPPRQVWVGTPVYPLKLIPKTLFGAEAIITPLGRVYF

SEQ ID NO: 264317 - protein, 202 aa, Zea mays
  unsure (1)..(202): unsure at all Xaa locations
  Clone ID: MRT4577_172671C.1.pep
MDPSSGKPEEVAAYQCKEAKQARLQSMLAALLDDPILADVPRKPSLADVDTLINLELGSAMRLTVVKLDNTSFDVAVLNSATVKDLKLAIRKKINEIEQEKMGHRHISCXLYYSISYTELFEQSETTAHVCPVRKHVWDNYCLTHHNEKLIEDNSTLSSYGVRNNSKVCFSPHVMSRVHRKHSRRRKHRFFHGLSRKANPAL

SEQ ID NO: 264318 - protein, 52 aa, Zea mays
  Clone ID: MRT4577_172672C.1.pep
VHKLKIPGCLKKTKTWPGVGLPPGLIHLILILILKKLFFLGLKLFLIGLFHP

SEQ ID NO: 264319 - protein, 46 aa, Zea mays
  unsure (1)..(46): unsure at all Xaa locations
  Clone ID: MRT4577_172673C.1.pep
RAGRELLCPRRPPPPHPHARCPYGPTLVGIAMTIVXPPLTQSLLQG

SEQ ID NO: 264320 - protein, 72 aa, Zea mays
  unsure (1)..(72): unsure at all Xaa locations
  Clone ID: MRT4577_172674C.1.pep
MARTQSAVAVAVVAAVLLLAAAATTSEARIXTCGKLTSALRPCFSNPRAPGPAPSGSAXTASRNLKSAARTA

SEQ ID NO: 264321 - protein, 67 aa, Zea mays
  Clone ID: MRT4577_172675C.1.pep
SSFFLVWLQPGIFGMALKKIYSVSYHGGLVSLEGAARFMLYFFSRLVGARWDRKSWYRPRYVLLGIM

SEQ ID NO: 264322 - protein, 89 aa, Zea mays
  Clone ID: MRT4577_172676C.1.pep
HRNLDFHVYATALLYKHSKANWDYTETLNNIINTRQDPYMTISEQYDIDEVVIISSRIRQRDLTCFYDAIKRHYRNMLSDVFMSHLKVT

SEQ ID NO: 264323 - protein, 159 aa, Zea mays
  unsure (1)..(159): unsure at all Xaa locations
  Clone ID: MRT4577_172677C.1.pep
KSCRAVCFAAAAILIALIASSPTKGWSGRSLSLLDPTYASKYIPIIASVSEHQPPTWPSYFMDINVLAFLVPAGIVVXFISLDEXSSFLVLYLVTSVYFSGVMVRLMLVLAPAACILSGIALSEAFGVLTRSMKFQRPTLDDGSFTADGSSDTPTNSEM

SEQ ID NO: 264324 - protein, 70 aa, Zea mays
  unsure (1)..(70): unsure at all Xaa locations
  Clone ID: MRT4577_172678C.1.pep
HLFKILSPICTVCVTLYRRGDAEGSRPLLTDVYLIICPEGTTCREPVVLRLXALVAELTDDILPVDMDNQ

SEQ ID NO: 264325 - protein, 152 aa, Zea mays
  unsure (1)..(152): unsure at all Xaa locations
  Clone ID: MRT4577_172679C.1.pep
VPRGRPGTSAPVVGTIHTRPLPESEATQAELNTERPESGCFALHAKADKESRRQHTGEHISQPAARATPSALRXFSKVFQLNLRILDTGGAVFIGSHLVDRLMENEKHEVIVADNFFTGSKDNLKKWIGHPRFELIRHDVTEPLLVEDDHIY

SEQ ID NO: 264326 - protein, 90 aa, Zea mays
  unsure (1)..(90): unsure at all Xaa locations
  Clone ID: MRT4577_17267C.1.pep
VVSLPRLEYIXLIMPEALRSNTQPPLLIRRSLRPDKLXPGGCNGAKEGYEIPAGTDIFVSVYKLHRSPYFWDRPNEFEPERLIRPKKDES

SEQ ID NO: 264327 - protein, 71 aa, Zea mays
  Clone ID: MRT4577_172680C.1.pep
RIAQTVKVVEKTPNSVAVSPQPSQKICPSLLSNLAKPLLATLSQRIFFLREKKTDLDQTASKNCESLQKKK

SEQ ID NO: 264328 - protein, 94 aa, Zea mays
  unsure (1)..(94): unsure at all Xaa locations
  Clone ID: MRT4577_172681C.1.pep
DGNSWDQPSPLGFVATPSPALWASLGRTPGHARKLRIPDSPFPLGDNNGDCGQVDLDPKDFIKXFRXQLGTQQALATATRDYWGGYARPVSGIP

SEQ ID NO: 264329 - protein, 137 aa, Zea mays
  Clone ID: MRT4577_172682C.1.pep
GAAPTATHAPPPAPPPPPKAPHPPQFPPAGPPPKGGPKGGPRTSHPKGKEALPTPPPPRGSSSSPGPPISSKTPRFSARAPLPKARAGPQSISANKPVHFPKRVTKWFPKEGVFVEGLFWKEAEKLIDAPPREPKSK

SEQ ID NO: 264330 - protein, 401 aa, Zea mays
  Clone ID: MRT4577_172683C.1.pep
AGLPKEPEPEPEPIPASLPSPTPPDRTSRAVWIPEHAMQVRAAPTLHLPSRGSTPPVANAVQQGFSNVVSSLPSQPYAPPVSVLPAQIQANAPPSLPLLAVSVNPPVQHVSPVNNLLNRASVHQHGQQQYALLSDPVATPLHQQAAGSKPAVAHPSLPEPNASSHTAFPWQSNAADMTHAGRNATADPWAAARAANSYSTASASTVPSANQNAYGDQGKQGAYSSYGSSAASSRPVVPGHGHDRNGYSRSALVEYPWDGHHQRHSRSPDPGVVRDYDTDYGGAQGYSQQPLTQWSAGKVQQQSYNPEPSRQWSSSQAHQGGYAPAEPSRQWSSSQAHQSYAPELPRQWSSERRGYDDAEPSRTWSSGQQNPEASRQWSRGKQDPYYSPSHGRRSYDQHRRR

SEQ ID NO: 264331 - protein, 116 aa, Zea mays
  Clone ID: MRT4577_172684C.1.pep
QPTANMFYGKHLPRSLSLHPDQVTCFTRGKRATNLIAGIHLLELDPAPCAAVAAAAAACHHRHQSGRRRSRTWRLQLQPRTSRARHQHRSLSVSGSPRQSQPCRRPPPPPPPECTD

SEQ ID NO: 264332 - protein, 108 aa, Zea mays
  unsure (1)..(108): unsure at all Xaa locations
  Clone ID: MRT4577_172685C.1.pep
KKKNKALNKKXKPPHPKKKTKKESAKKKKRKTGPPKKKRGPTQKGRQRGGGKKKGERRKNPPTRKKINNPRPKKKKRKPNGPPPKSTGAPPPKTQRTRNQRGGPQDSP

SEQ ID NO: 264333 - protein, 397 aa, Zea mays
  Clone ID: MRT4577_172686C.1.pep
MGGCGLGRGRRTACLLLLLPPLLLFAVADAAASGKEKQGVSGKLRFRRESGTFKVVQVADMHYADGRSTACEDVLPSQVAGCTDLNTTAFLYRVFRAEDPDLVVFTGDNIYGADSTDAAKSMDAAIAPAIDMKLPWAAVIGNHDQEGTLSREGVMRHLVGMKNTLASFNPEGIEIDGYGNYNLEVSGVEGTSMDEKSVLNLYFLDSGDYSTVPSINGYGWIKASQQVWFQQTSSSLQAKYMNKNPKQKEPAPGLVFFHIPLPEFSSFTASNFTGVKQEGISSASINSGFFASMVEAGDVRAAFVGHDHINDFCGKLSGIQLCYAGGFGYHAYGKAGWSRRARVLSVQLEKTDSGEWRGVKSIKTWKRLDDKHLSTIDSEVLWNRGSNGRRGKNPDGS

SEQ ID NO: 264334 - protein, 122 aa, Zea mays
  unsure (1)..(122): unsure at all Xaa locations
  Clone ID: MRT4577_172687C.1.pep
FTGVKQXGISSASINSGFFASMVEAXDVRAAFVGHDHINDFCGKLSGIQLCYAGGFGYHAYGKAGWSRRARVLSVQLEKTDSGEWRGVKSIKTWKRLDDKHLSTIDSEVLWNRGSNDRNGAP

SEQ ID NO: 264335 - protein, 62 aa, Zea mays
  Clone ID: MRT4577_172688C.1.pep
FLFLGVASSFWFLNKMCSGDYFGAFFRDCGFSNISWKKKFVFGLTCIPPKGMLYYFAHLLLH

SEQ ID NO: 264336 - protein, 188 aa, Zea mays
  unsure (1)..(188): unsure at all Xaa locations
  Clone ID: MRT4577_172689C.1.pep
TTKNALTLICVQKSVIVLCYRPQLFLKMQAKYMNKNPKQKEPAPGLVFFHIPLPEFSSFTASNFTGVKQEGISSASINSGFFAXLVEAGDVRAAFVGHDHINDFCGKLSGIQLCYAGGFGYHAYGKAGWSRRARVLSVQLEKTDSGEWRGVKSIKTWKRLDDKHLSTIDSEVLWNRGSNGKTLSYAWI

SEQ ID NO: 264337 - protein, 102 aa, Zea mays
  Clone ID: MRT4577_17268C.1.pep
HCGGGINFFVTPGWGPGPISGAGENDRGTQGFDGWPVYYYFYFPLQSKRVGSLTWVLVAGFRFLKTGRPYKELNRMMVYSVRIDVYEFVFIWTTIKACVRVF

SEQ ID NO: 264338 - protein, 146 aa, Zea mays
  unsure (1)..(146): unsure at all Xaa locations
  Clone ID: MRT4577_172690C.1.pep
GRGRYTHLWRVHPSPCLAHKEAELDGVLAVSPTYVDKIMKTEIPFTVYYXTMKELILMDINPHTSXHILLCPKLTLFYTVLLQAEDRHHXTLVYLLYAAKXVVANQGGLEDGYRVSSMTGPSEXQSVDHIHXYLLYSRQMNXWPPD

SEQ ID NO: 264339 - protein, 107 aa, Zea mays
  Clone ID: MRT4577_172691C.1.pep
DGGPFRQLRSFFSPNFYGYQRVFFRFKILLKEELNWGFASHFWAPGRNLFPFGLFVFLGPSPFFLGGEGTIIFFVKGGCLCLPPPLKKKKKKKKKKPKKKKKKKKKK

SEQ ID NO: 264340 - protein, 446 aa, Zea mays
  Clone ID: MRT4577_172692C.1.pep
MAWLARSIANSLIATEEEPEATDRGPSASPGSSSPPRGVREDLSELTGALANRFQGIASFLAPAAPGGGGALRRPDPAEIAGRFRAGLARLPGRQAVADLARIASSLLPPEGDADWAEEAAGVTEEVVAFARDAASRPELWLDFPLLPDDADSDDFDMTDAQQDHALAVESLAPELADLRIELCPSHMSEDCFWKIYFVLLHPKLRKDDADILSTPQILEARDKLSQEVRYRTELQGSHGDTVPVALGDEGGVSGSLVEGLGVLKGQDDSAMLTSFSNTDYGKPQPIEQDKDIVSVHTIGETGAVSSDNTGSSGVPVQLVPVSRDTTTVAPLSRTEESTHDLSTEDEAAAEEEEEQGLQMSEIPLTDSSPPKDGQQKQPLAAISERSGADYQKSDNVEDGGDGVEDDDGDEWLEEEAWDPGNTQIPIADDEDVSFSDLEEEDDGAA

SEQ ID NO: 264341 - protein, 23 aa, Zea mays
  Clone ID: MRT4577_172693C.1.pep
LMSHYIHLTQATNSNSSSGHKST

SEQ ID NO: 264342 - protein, 56 aa, Zea mays
  Clone ID: MRT4577_172694C.1.pep
WSAHRTCARILATIHRAMRDRFKPEAKAYPSKHGQESHIMPLVQALRRWQISDRKI

SEQ ID NO: 264343 - protein, 96 aa, Zea mays
  Clone ID: MRT4577_172695C.1.pep
KPLRACRWVGSCGKKTYRPKTCPGRKKKMRWGVPRQIESPQRTFRWESASPPPDTRTLVHVGDQSPPGVLTPPGVLFSPLDSKTPGGVFTRAPAGF

SEQ ID NO: 264344 - protein, 58 aa, Zea mays
  Clone ID: MRT4577_172696C.1.pep
ACSLISFFAEHIEIVICFCRCSLCYLTLDIFCNLYISLILFYTEEFFIWDLYCPETIH

SEQ ID NO: 264345 - protein, 72 aa, Zea mays
  Clone ID: MRT4577_172697C.1.pep
TTTSNSLCAPSKVSSKRLVTVGTTVHSRFKPNCGPPCIHHHSPTVLFDQSTVISPHSVVRLGSTHLLSWFKF

SEQ ID NO: 264346 - protein, 55 aa, Zea mays
  Clone ID: MRT4577_172698C.1.pep
GVLSVVASSALRCGPVRVPATRWWLVPWCVPSVPFGSTRYTFIKAPPRRRRLLVG

SEQ ID NO: 264347 - protein, 62 aa, Zea mays
  Clone ID: MRT4577_172699C.1.pep
GKLRAHAGTGSCIAGATPRVRSRADSRAQQLQQLVLANLAGYSQPQQFLPFNQLAAKNSGNY

SEQ ID NO: 264348 - protein, 62 aa, Zea mays
  Clone ID: MRT4577_17269C.1.pep
FMNKRLYTQGVEKISTPCVLQSMRQTSQVDIHQTTTTHGTTERTAIDLIHGTIGYIAFMCKH

SEQ ID NO: 264349 - protein, 71 aa, Zea mays
  Clone ID: MRT4577_1726C.1.pep
QHNLNSKSGLQFHGILGNQFHVPPVNAQLYTDHGTTELQETHSSETMSTHTKNTSRQKHYGSSMCNPDRPA

SEQ ID NO: 264350 - protein, 121 aa, Zea mays
  Clone ID: MRT4577_172700C.1.pep
GGQGQVIGGSVVGPLVAAGPVVLMAASFANAVYERLPLEGEEEETAAAAAAGAEPQDQVAQSAGPPGQQPTASQSSGVTGGDAAGGGGMSLYNLAGNVGAYQLPGDNFGGWSGGGGGGRPF

SEQ ID NO: 264351 - protein, 117 aa, Zea mays
  Clone ID: MRT4577_172701C.1.pep
HYNTGLLERLVSASELMAICRIYIPFLPLCPRTAHQPLSAAAAPTQHLVVLTPRDGHHYRRGLALQLRPHSFDPLLSSVQHEDGNDASATLGLVTIARTGSALVLLTLRRYRDVAGM

SEQ ID NO: 264352 - protein, 75 aa, Zea mays
  Clone ID: MRT4577_172702C.1.pep
TPELEPSHSHQGGYDHPGPPPYVVHQHLLSPVTLHPQSIIRLATAGSFQPRADDEDDDDEYNKSSGLVGLRDRLS

SEQ ID NO: 264353 - protein, 48 aa, Zea mays
  Clone ID: MRT4577_172703C.1.pep
SCAPWATPSRRLWGLRPAARVVAGLAATGNLVNDSFSSKVTSHQSAAG

SEQ ID NO: 264354 - protein, 53 aa, Zea mays
  Clone ID: MRT4577_172704C.1.pep
AWCCIKAVVSCMVSCGSGCSSKYLRCVRPSSACSLGGLVMDAGRLCYTQLGLL

SEQ ID NO: 264355 - protein, 44 aa, Zea mays
  Clone ID: MRT4577_172705C.1.pep
VQCIYSYKGYTYRVLKCTIVMNVDMAYPRCNIYFIEHYGDVRKI

SEQ ID NO: 264356 - protein, 68 aa, Zea mays
  Clone ID: MRT4577_172706C.1.pep
GSGGFFFSLITKPIFRITPILSLVYGHQFILTHREHHMYPLNGGDIIFDNTGGKKFFTLRALALVGYT

SEQ ID NO: 264357 - protein, 62 aa, Zea mays
  Clone ID: MRT4577_172707C.1.pep
MALPASSSGLFRFVSPRSRPQSTDIVAAASWGVFAGTAGLYLVQPFDWIKKTFFEKPPQPEA

SEQ ID NO: 264358 - protein, 190 aa, Zea mays
  unsure (1)..(190): unsure at all Xaa locations
  Clone ID: MRT4577_172708C.1.pep
APSLLARPPPPTPTTVTLASTLAAKLPSATSSSTGTSSPTTSRTSSGTRSTGAPSSPRPPQSPPRPPRTSPXVVTPTPAAKKETPTSAAPSSKAAETSKXLSPPPPSPTTLSATSSRMSLLVSPASPTSSALRSARTTSRTTAVSGSEATAHXVWDVTNSGXTTPSSTAGRPTASAACPSTXSSLMSLSA

SEQ ID NO: 264359 - protein, 81 aa, Zea mays
  Clone ID: MRT4577_172709C.1.pep
MALPASSSGLFRFVSPRSRPQSTDIVAAASWGVFAGTAGLYLVQTKKGKRLVEQGSRRIRKITSDIYSKAHGWKPVDRRLQ

SEQ ID NO: 264360 - protein, 447 aa, Zea mays
  Clone ID: MRT4577_17270C.1.pep
MAITFQHKIALRPGSVFCFRTISFVADEEGILHRIADPPEKKSSLKISEKAGTKQEIMQPPALRAKTTSCKPGAENSFTRRTPLSTSSTERWTLITRKREANEIKARQAALLAPPPSKENRKKLVVTTTPFYPDVLFIGGSGIVPHLRRRTNPGERDPAQPVSRDEILEVGETPDERVFRERRNSRRRDRRQAQEQAEQEARQRRENPLFGRNLNTDFTRSMNTLSKATRVESETTSTGGTTWGWSRQHIGNSPPQDRHHNRRQEDTCGVSMLTPRLRAIQWPPNFKVSNVDKYEPKQDPGGWLAVYTTAARAAGATEDVMTVYLPIVLGQDALQWLRHLPRHCIDDWSNFSRCFIANFQSLSDKPVQPWDHKSIRRRGDETLRSYHKRFQTMRNRIPEVVEAAVIEDFYRGSNDSAFIQAILQKAPTTSEQLFREADLYITTDERA

SEQ ID NO: 264361 - protein, 107 aa, Zea mays
  Clone ID: MRT4577_172710C.1.pep
PAGISAIIPTGLPQREKKRRLAAAVALPASSSGLFRFVSPRSRPQSTDIVAAASWGVFAGTAGLYLVQGSVSRPGKRLSTLLGLPSQTFPLDLMIWWAEGDAHPTFS

SEQ ID NO: 264362 - protein, 119 aa, Zea mays
  Clone ID: MRT4577_172711C.1.pep
PSHLELLCQTSLKNPKIAAINKVLQTLKWRETRYQVINKLLILFGCGAVIWAIWRTRNDCCFNARLIDDLSNVIFSCCYWIDAWSIRQTKKGKRLVEQGSRRIRKITSDIYSKAHGWKP

SEQ ID NO: 264363 - protein, 48 aa, Zea mays
  Clone ID: MRT4577_172712C.1.pep
VDSYWTKKLEKTANTLYLHRKLNTGEGTYHHPGTYMDQSSLSGIRAPR

SEQ ID NO: 264364 - protein, 61 aa, Zea mays
  Clone ID: MRT4577_172713C.1.pep
MALPASSSGLFRFISPRSRLQSTDIVAAASWGVFAGTAGLYLVQPFDWIKKTFFEKPQPEA

SEQ ID NO: 264365 - protein, 105 aa, Zea mays
  Clone ID: MRT4577_172714C.1.pep
ASPRLSLVAVLLSHRPQLASRTSNPPGLTTTPPLDHIRAGEERPISAPDMVSELYTKAYPLADAQLTIGIMHIIQLVVICRQLKKGAHVATNTLLRVLSEALMMA

SEQ ID NO: 264366 - protein, 323 aa, Zea mays
  Clone ID: MRT4577_172715C.1.pep
MASASHAPTPLLKDELDIVIPTIRNLDFLEMWRPFFQPYHLIIVQDGDPSKTIRVPEGFDYELYNRNDINRMLGPKASCISFKDSACRCFGYMVSKKKYIYTIDDDCFVAKDPSGKDINALEQHIKNLLSPSTPFFFNTLYDPYRVGADFVRGYPFSLREGVPTAVSHGLWLNIPDYDAPTQLVKPLERNTRYVDAILTIPKGTLFPMCGMNLAFDRELIGPAMYFGLMGDGQPIGRYDDMWAGWCTKVITDDGPYIAPGRPHRPASEREKAEISGGDGTPGVELRPLPLHLPAQPPPVHRHRGCRLLGSLRRHRRPLPRPAI

SEQ ID NO: 264367 - protein, 62 aa, Zea mays; identical to SEQ ID NO: 264357
  Clone ID: MRT4577_172716C.1.pep

SEQ ID NO: 264368 - protein, 127 aa, Zea mays
  Clone ID: MRT4577_172717C.1.pep
ILVLSLLSLRCLTQVITDHLGLGVKTGLPYIWHSKASNPFVNLKKEYNGIFWQEELIPFFQSVSLPKEATTVQKCYLELAKQVRAKLGKVDGYFNKLADSMVTWIEAWDELNPPKGGVPTANGPPKK

SEQ ID NO: 264369 - protein, 55 aa, Zea mays
  Clone ID: MRT4577_172718C.1.pep
ALFKGVPLNRIIWLRSYQAIYVMLFCPWDIYGTLQPVIIICNCAFQTLIKKSPIN

SEQ ID NO: 264370 - protein, 43 aa, Zea mays
  Clone ID: MRT4577_172719C.1.pep
ALTQLVMESNRPAGETGHPKWRWHQTSGQGLTPKKKKATLIKD

SEQ ID NO: 264371 - protein, 63 aa, Zea mays
  unsure (1)..(63): unsure at all Xaa locations
  Clone ID: MRT4577_17271C.1.pep
LHIEIEIVWLSLLLNCTLRLRLCGVLFQVQPHXLLWGGQHCSXRLLLYKYLLAYFIFRVPLFL

SEQ ID NO: 264372 - protein, 88 aa, Zea mays
  Clone ID: MRT4577_172720C.1.pep
TLTMSGNNRAKSGTLKCLYTLAIGPFNTTTGGEQGQGTYMGKTGYGAYYNRVRAETWVFVMSRDMRFHMQEVAAVARAAHVEGEVTPL

SEQ ID NO: 264373 - protein, 91 aa, Zea mays
  unsure (1)..(91): unsure at all Xaa locations
  Clone ID: MRT4577_172721C.1.pep
TKLSIISIIWPQTIDGSLXNLQVACAGILSTAPGDXHLRYALQQLFPACGNAADYEAMIHGLNIAISLDIKRLMAYPDPLVVISHINKEWD

SEQ ID NO: 264374 - protein, 65 aa, Zea mays
  unsure (1)..(65): unsure at all Xaa locations
  Clone ID: MRT4577_172722C.1.pep
SRPAGPGLLRMLPDCGHLXHRECVDPWLRHHPTFPVCRTSPVPSPMPTPLAEVTPLAMSRMSMSS

SEQ ID NO: 264375 - protein, 71 aa, Zea mays
  unsure (1)..(71): unsure at all Xaa locations
  Clone ID: MRT4577_172723C.1.pep
MVLNFHLQGRHGKNRVRVSRVWRRTATAAGDAMVEWNCPASVVXDCLRFYTCSDNFAIVGTDSIRNTVYVK

SEQ ID NO: 264376 - protein, 172 aa, Zea mays
  Clone ID: MRT4577_172724C.1.pep
NFDAESPGKMLPTSSINLEDLNPVLACKSSVADMDLDVMDSSEVDSVTASASGSMGSFLRPLEWKLDLVCIISTFFSVSSLHTWEILYSLVDKEGDVKVRQAILLNLCRNISASSKTVSLVVHFIVDMRDRGASSLLGPAECLTHIHALLKALIAIHGGQNADGKQPGRRQQ

SEQ ID NO: 264377 - protein, 88 aa, Zea mays
  Clone ID: MRT4577_172725C.1.pep
SFYKPPLNGGGFKNLGILPQKLFFLKRGQFSFWAQKANLGSQKQILRLKSFPGLGFLTKKGWALKKGGGPWKTPKDFFCPKKGPNHLP

SEQ ID NO: 264378 - protein, 148 aa, Zea mays
  unsure (1)..(148): unsure at all Xaa locations
  Clone ID: MRT4577_172726C.1.pep
PSSPREAAAGIXPLXRXGXTRSRRRLAGGMLAAGPGSSTPGTTAVQRLSGMRVAGMAPAPRAAEARACVTLEPEIGRGRGRGAGSRPYRVPPPPRASRRDLSKRGGVRFGAETDLEICGAEGGRRRRRGGKNLGFPPPECRNPSLVPN

SEQ ID NO: 264379 - protein, 278 aa, Zea mays
  Clone ID: MRT4577_172727C.1.pep
AARVRADEDTGAPIDDAARVRRVESRLRHVLRGGALGARMVRADAAAVNMDRRLHQLLNEDGEAESRADQATAVAVQDWVERGYSVVTVSCRDRPKLLFDVVCTLTDLDYVVYHGTFHTDDDHARQEFYIRRLDERPISSATERRRVIQCLEAAIERRASEGVRLELRITDRRGLLAYVTRVFRENSLSVTHAEITTRGDMAMNVFHVTDVAGRPADPKTIDEVIQRIGTESLRVDEERWPRLCLTEGDAGRGGAGIFSLGSLVKKNLASLGLIRSCS

SEQ ID NO: 264380 - protein, 66 aa, Zea mays
  unsure (1)..(66): unsure at all Xaa locations
  Clone ID: MRT4577_172728C.1.pep
KKLLRCNAPGKLSFDFFKTGRAPYFLLFYFYFFFFFFKFFFLFXXXFFFLKKKIFLFIFYSPKNRT

SEQ ID NO: 264381 - protein, 246 aa, Zea mays
  Clone ID: MRT4577_172729C.1.pep
MGRAGTPNVSLPRCLRQLHVDVAPVGCLADLPAGLRTTAVPVQDGGVRWSWRGRCGYLLPPEPRQEEPGHSWPLKILLVSRPSLGGKDHVRSEFYNRRLDERPISSATERRRVIQCLQAAIERRASEGVRLELRITDRRGLLAYVTRVFRENSLSVTHAEITTRGDMAMNVFHVTDVAGRPADPKTIDEVIQRIGTESLRVDEERWPRLCSTEGDAGRGGGGAGIFSLGSLVKKNLVSLGLIRSCS

SEQ ID NO: 264382 - protein, 95 aa, Zea mays
  Clone ID: MRT4577_17272C.1.pep
RIIRGLASWWSRHHASHNARNDVAATDADWNCCPRPTATPPPRNVRNRGACGAPRASPIASQRMMPGPPAHGYDRAPLFHGGSGGAPPPFAPWKW

SEQ ID NO: 264383 - protein, 38 aa, Zea mays
  Clone ID: MRT4577_172730C.1.pep
HHHRHQPLSQELDTLRERWYPISDPTPHQHNRSITELN

SEQ ID NO: 264384 - protein, 128 aa, Zea mays
  unsure (1)..(128): unsure at all Xaa locations
  Clone ID: MRT4577_172731C.1.pep
GYLEAGRGTALENGPIIXXEMDTYRYHGHSMSDPGSTYRTRDDLIAGIRQERDPIERVRKLMLVHEFATAQELKDMEKEIRKQVDAAIAKAKECPLPDPSELFTNVYVNDCGLESFGVDRKEVRTVLP

SEQ ID NO: 264385 - protein, 100 aa, Zea mays
  Clone ID: MRT4577_172732C.1.pep
PTRPVARVAFHCSCTCCRETPGSVLLRRVVVCAKLLAVDIESVTRALDMVKRYRNLALLSASLFAGSSPRLPLSCFSLPCRTYVSSPGRGAEPAIEFAGR

SEQ ID NO: 264386 - protein, 50 aa, Zea mays
  Clone ID: MRT4577_172733C.1.pep
ENRKQVDAAIAKAKECPLPDPSELFTNVYVNDCGLESFGVDRKEVRTVLP

SEQ ID NO: 264387 - protein, 67 aa, Zea mays
  Clone ID: MRT4577_172734C.1.pep
FVSFSSSTTLCPGGGRPRRCLRIGRPVCETVASQAREKLAAMFGYRKADPDLEAGGSSLLYPGMTES

SEQ ID NO: 264388 - protein, 392 aa, Zea mays
  Clone ID: MRT4577_172735C.1.pep
MAAAILRRLVPTAASQLVAPLPLLARGVSDSADAVTVDTSVPFKSHIVDPPPREATTSARELLSFFRDMSLMRRFEIAADSLYKAKLIRGFCHLYDGQEAVAVGMEAAATRADAIITAYRDHCAYLARGGDPVAAFAELMGRRDGCSRGKGGSMHFYKRDANFFGGHGIVGAQVPLGCGIAFAQRYRKEGTVTFDLYGDGAANQGQLFEALNMAALWKLPVILVCENNHYGMGTAEWRASKSPAYYKRGDYVPGLKVDGMDVLAVKQACKFAKEHALENGPIILEMDTYRYHGHSMSDPGSTYRTRDEIAGIRQERDPIERVRKLMLVHEFATAQELKDMEKEIRKQVDAAIAKAKECPLPDPSELFTNVYVNDCGLESFGVDRKEVRTVLP

SEQ ID NO: 264389 - protein, 63 aa, Zea mays
  unsure (1)..(63): unsure at all Xaa locations
  Clone ID: MRT4577_172736C.1.pep
FKKEGVSFGSFDIFSYEEVRQGFKTFSNWPPFPQVYYKWELIGGCDFVFXMEKNGKLKSPLSK

SEQ ID NO: 264390 - protein, 278 aa, Zea mays
  Clone ID: MRT4577_172737C.1.pep
MSSSSSSAANTPPAGASSEETLSNVAAEELRTSDTVEFSVSRMSLVRVQDMQQLGYFGGGVARVPGAEEVPEPEGELVVFEAFFAVGLRLPVHRFVGEVLCRLDVQVHQLTLNVVVALAKYVWATTSYGEHSLGHNRVGLRFGLRAVQRSEVLHVLGTRHMIPRPVRPLPDHLPTVGAPHPVEEGPRGVLHHRVFDFINLAPKIFIRSVEDLIVTAPLAGQRVQRPYFDLCHIHITKIIYGINCNLQGLTLHSFHQKINLFSIHRKRRRVGGRRSVHH

SEQ ID NO: 264391 - protein, 53 aa, Zea mays
  Clone ID: MRT4577_172738C.1.pep
MAPSLLAAMSTSPFLASSGSSRRPLGAAHTRRAGLRVAALKYDPAKVGGFAAV

SEQ ID NO: 264392 - protein, 51 aa, Zea mays
  Clone ID: MRT4577_172739C.1.pep
RKLPHGSNVFLKPGKRALNWTAGPPGALNPWKRPVDLKCTLVLKGNMENHV

SEQ ID NO: 264393 - protein, 81 aa, Zea mays
  Clone ID: MRT4577_17273C.1.pep
MPSRNKISVAMLSLALMGLLLCHLATTASAATDSEDGSVRDGGSPAPDSGEGRVVYADMRLADSESSSSDAPASALAPSSS

SEQ ID NO: 264394 - protein, 39 aa, Zea mays
  Clone ID: MRT4577_172740C.1.pep
NKKIYMKDHSIYCMSIPLHKLSYIILASSREIMNSFCQI

SEQ ID NO: 264395 - protein, 85 aa, Zea mays
  unsure (1)..(85): unsure at all Xaa locations
  Clone ID: MRT4577_172741C.1.pep
MAVAAFLRATDLPCGTTMSVIAGEDLHHMLRMLNTNLDGKQKIMFAMTSIKGVRRRLSTSXCKKADIDMNNMVRKLTPDELERLM

SEQ ID NO: 264396 - protein, 102 aa, Zea mays
  Clone ID: MRT4577_172742C.1.pep
GPILPHLVGESSLSPYHSIRPTDLTISCEDAIQTLLGLAMRLEQGDNGTDGTDKHITGSSNRLGIGSVGGAGGPAGSGVSLGTRGRDRAGSGPGSGSGTRGA

SEQ ID NO: 264397 - protein, 41 aa, Zea mays
  Clone ID: MRT4577_172743C.1.pep
YHFYFSPRTELLPEGVRTLTEELLLRPYFGPHIVSHHPLPL

SEQ ID NO: 264398 - protein, 92 aa, Zea mays
  Clone ID: MRT4577_172744C.1.pep
AGSICISRPPPLRLLLLVVESRDRRPLCPLDGRIHTVATTTHGRRARTFGAPYDEEGSSGLLDDVPMAPRDPRGHCSFNSDLYQHLPGRHVR

SEQ ID NO: 264399 - protein, 180 aa, Zea mays
  Clone ID: MRT4577_172745C.1.pep
LLLCSSSHGEKSSCGIPIAQEPARSHTSVFHHNLCRDWQRVGGRVQHNMPLKNICSSVSAHTGVPEGFPILNNIRGNPLFWYRHTFATMNHPLLYEQCCAGAGGEAIGEGDCECPVARHAEDGSVLVAVHGGKVGVGGVVGRRVRGGGLRREEAEGGGGPSCPVRRFPLTPPRPRRARAS

SEQ ID NO: 264400 - protein, 86 aa, Zea mays
  unsure (1)..(86): unsure at all Xaa locations
  Clone ID: MRT4577_172746C.1.pep
NRPPQREXGTARRTRPGIPGAPPAPQGEKIWLPRTVTGQKNPGNPGCSGFPDWEPPIIDYHLPPQEKPIWTXEILPKVPGFGSNLN

SEQ ID NO: 264401 - protein, 61 aa, Zea mays
  Clone ID: MRT4577_172747C.1.pep
MAASDTKTPATQCYPYQRLRRIRWVYYYRELCRDSYCPRWGGVRVKRATEPAPNGRAEIVR

SEQ ID NO: 264402 - protein, 180 aa, Zea mays
  unsure (1)..(180): unsure at all Xaa locations
  Clone ID: MRT4577_172748C.1.pep
LLSGTPICSLSRNPPLPDRSTTSTPPPVRHRQWRRRLGRRGADASPSPSPNPNPKPXSSSSPTSVLPPPPTXRRRPTSSPGXAPQRPPPPLPRRPPPRRPRLPLLAPRRLPLPPPRPSPPRLLPSPRQNLPPAAXSRSTNPSKTPSSSPSAPPPRSAPSISPREPPATRSTTLSRVSCSS

SEQ ID NO: 264403 - protein, 103 aa, Zea mays
  Clone ID: MRT4577_172749C.1.pep
RRETRRPWRYFGNTRLKFFLKAWPRGWVGNTNPGGGTKTALEQVEKLPCGGGESSGRHGRIPPILNVKKWGYTKNNVPLVGGTLGHPNAGEGEVPQGPGAGLS

SEQ ID NO: 264404 - protein, 80 aa, Zea mays
  Clone ID: MRT4577_17274C.1.pep
TCPSRNPILVPNSPVTRGRFQICAPFFWGGKNFPEFRSQVAYLCCNPINCGVLNSTICMDVNQTFFAKKKKKDGRSDRLE

SEQ ID NO: 264405 - protein, 87 aa, Zea mays
  unsure (1)..(87): unsure at all Xaa locations
  Clone ID: MRT4577_172750C.1.pep
DKHRSAAGSGLRSLASAASGWWDRWTVIGSGLSKLERAFGDQFPEGERYFGLENFGNXCYCNSVLQAFXYWCXPFREQLLGYYSQNR

SEQ ID NO: 264406 - protein, 33 aa, Zea mays
  Clone ID: MRT4577_172751C.1.pep
TQRRNSESTRVDTNRKVLILARTRSAAVATMDV

SEQ ID NO: 264407 - protein, 180 aa, Zea mays
  Clone ID: MRT4577_172752C.1.pep
RIFELARTLQLVVLDADTINHPAQLSKTSLAPIIVYVKISSPKVLQRLIKSRGKSQAKHLNVQMVAADKLAQCPPELFDVILDAVAQAVVDRVKRIHSDTFASGGERAKFCPRHEDMTLLVRNFGYPLGEMSQPTPSPAPGGRVYPVSVPYSSAQSTRRIGDYKVKYGYTDIDLLSAAKS

SEQ ID NO: 264408 - protein, 348 aa, Zea mays
  Clone ID: MRT4577_172753C.1.pep
MAAAAPAAGKGKRKRHLSEDDVCLLQRYNPGTILTALQEVAQHAEGRIIDWRAVVAKSATGITSAREYQMLWRYLAYHHDLNESIEAGDLPLGDDSDLELELEPNPSETKEALSEASALAKALISRSSREQASGHRINLDVPALNTQNEKIVRVPSKQLAQSHRVTNVTCPVSNPKQLSHIVPSPTHLDPNGASKKRKKAKAWSKEEDADLAAGVQKYGEGNWEVILHKCNFDKYRERPNHQLSQRWALKRPGGSTKPASTKHASVGLEERSAALKALSLAVGPMRGSSALRSGAYPQSIQHKSTVFAPKMPELRSAVTPSPAPAVPVPVAMPLRVAAQVQASAHQGH

SEQ ID NO: 264409 - protein, 69 aa, Zea mays
  Clone ID: MRT4577_172754C.1.pep
PRVRGHSPYLPDSFQHHPFHALGRHLHSLGEHKHDQPDLINPRIRQNRRLRSTNTSSHPTLPLIEGQHP

SEQ ID NO: 264410 - protein, 88 aa, Zea mays
  Clone ID: MRT4577_172755C.1.pep
ICLEKGLANGATLTDKGAAPSESHGPDAPAGMKNNYPGYRARLPVPTLSHKITLTRQMYCGANLQASDRLGLAVHMHRTSWRILMGPR

SEQ ID NO: 264411 - protein, 104 aa, Zea mays
  Clone ID: MRT4577_172756C.1.pep
STILLPLVPLLLFAGNAPLRKLPSSGSINSLEESHFLRASLDLSDNASLERRMSSESNMSYYLRTMTPSAFESALRQKDGELASYMSRLVCISILLIFLLKRFI

SEQ ID NO: 264412 - protein, 48 aa, Zea mays
  Clone ID: MRT4577_172757C.1.pep
TRGIAHKLGHQKLDKKNLVDPRDAAFDQSKISWLNKLGQALLALGRIT

SEQ ID NO: 264413 - protein, 96 aa, Zea mays
  Clone ID: MRT4577_172758C.1.pep
LAMIWLVTVFSKSAELSSMLVNAPWHPLRGPCQVHHQRSSFSSPGAVQSSSPMARQEIGLVLPVQMGHHDQPSPDLLRGPSPAQKGALELGRTGWL

SEQ ID NO: 264414 - protein, 172 aa, Zea mays
  unsure (1)..(172): unsure at all Xaa locations
  Clone ID: MRT4577_172759C.1.pep
PPKSAARICAAPPPXMPPIGPVTDLVARLRSLEAWHRRQPCLRDTAPCKRSRGSEAPSDASALVWLWRFPHARVVVAATDCEGGGSARSSAAGGGSSCDPSPLRTPALTAAFWNPAFGIPSTKILGLQLAAGRPVVWSLQLATNCKLVRSIGVFNYPPILNSIYKLIKKKKK

SEQ ID NO: 264415 - protein, 645 aa, Zea mays
  Clone ID: MRT4577_17275C.1.pep
DAWADAWADAWAKTLNPCWSAYNIADRRAPPVYVNLFTGQATTQFPSMTETVRGGILADAMGLGKTVMTIALILSNPRGEFSNCIKGDTRYLGDRATRGYTSTSSVRGGTLVVCPMSLLGQWKDELEAHSAQGALSVFVHYAGDKTSSLMLMAQHDVVLTTYGVLSAACKTECNSIFHRMDWYRIVLDEAHTIKSPKTKSAQAAYRLKSECRWCLTGTPLQNNLEDLYSLLCFLHVEPWCNAKWWQRLIQKPYENGDDRGLKLVRAILRPLMLRRTKETKDKIGNPILVLPPARIEVVECEQTDHERDFYEALFRRSKVQFDKFVAQGSVLNNYANILELLLRLRQCCDHPFLVISRADPKKYADLNQLAQQFLEGVQQSSSGRQNVVPSLAYVEGVVEEIRQGATMECPICLESASDDPVHEACAHRMCGECLVSSWRTPEGGPCPLCRRHISKSDLIILPAQSRFQVDAKNNWKDSCKVKTLVTMLESLQRKQEKSIVFSQFTSFFDLLEIRFTQKGIKFLRFDGKLSQKHKEKVLKEFSESQDKLVLMMSLKAGGVGLNLTAASNVFMMDPWWNPAVEEQAIMRIHRIGQKREVRVRRFIVKGTVEERMQQVQMRKQRMVSGALTDEEIRGARIEHLKMLFK

SEQ ID NO: 264416 - protein, 78 aa, Zea mays
  Clone ID: MRT4577_172760C.1.pep
MGGGSFSSPRHPLEDNHADATRNLLWKTPKSKHNTGQKPKPAATPTQWNRPDPSPDPAPISASSTKYRTSKDACDYRW

SEQ ID NO: 264417 - protein, 78 aa, Zea mays
  Clone ID: MRT4577_172761C.1.pep
ARDTNGLAEVPWFHHAYHSSLDLHETTSDLDQLPGVGRVAYPVILCIDHRSVHEALHWSPKDRVAVYYHLTLLHPNLD

SEQ ID NO: 264418 - protein, 66 aa, Zea mays
  Clone ID: MRT4577_172762C.1.pep
ISLICCHSGSVHLFVFLLSSFVRYVEDCRPFLFTYPHTSASEFIISCPTATAQDGSGHISFKHPEP

SEQ ID NO: 264419 - protein, 158 aa, Zea mays
  Clone ID: MRT4577_172763C.1.pep
VANPSFVDGGSPQSGPVGRMFFQSPPGPFFPPLVPPGVCFFRVFSPNFFRVPQGPWLVGPLFKGVPFFFFNLDLGCSPVFVPSPPLFWEPFGVPFLVGDFLKTLFPFGSPWPGPWLFLSLFVVGPLLVKCLVVMPLFGPCFSLCFVLCLTPNLGQSSP

SEQ ID NO: 264420 - protein, 282 aa, Zea mays
  Clone ID: MRT4577_172764C.1.pep
MAAALLRRSPAVRALLSPALSSRLVASKPHSSSPAPPPPAKAASSTKTFSIYRWDPDSPSTKPHLKDYQVDLSDCGPMVLDALLKIKNEQDPSLTFRRSCREGICGSCAMNIDGDNGLACLTKISGASSASTVSPLPHMFVVKDLVVDMTNFYSQYKSVEPWLKRKDQPPQQGKEIPQTKADRAKLDGMYECILCACCSTSCPSYWWNPEEYLGPAALLHANRWIQDSRDQFTKERLDAINDEFKLYRCHTIKNCTHACPKGLNPAKQIDTIKKLQLGAPSA

SEQ ID NO: 264421 - protein, 59 aa, Zea mays
  unsure (1)..(59): unsure at all Xaa locations
  Clone ID: MRT4577_172765C.1.pep
MKVQIEALALLALAASGDSSTSGSGGCQTPPGYLPPALCMLPTVYLPSLQQAXPWQYPT

SEQ ID NO: 264422 - protein, 75 aa, Zea mays
  Clone ID: MRT4577_172766C.1.pep
YIRVSSLVQKRGTGRPTNTRNEKRPEVQPLQLRLKTRRSALFHQGEVIRKWKYLSTISFCRGYNEVPTCMRLQQP

SEQ ID NO: 264423 - protein, 281 aa, Zea mays
  Clone ID: MRT4577_172767C.1.pep
MAAAALLRRSPAARALLSPALSSRLVASKPHSSSPTQPPPEAKGASSTKTFSIYRWDPDSPSTKPHLRDYQVDLSDCGPMVLDALLKIKNEQDPSLTFRRSCREGICGSCAMNIDGDNGLACLTKISSASSASTVSPLPHMFVIKDLVVDMTNFYNQYKSVEPWLKRKDPPPQLGKEVPQTKADRAKLDGMYECILCACCSTSCPSYWWNPEEYLGPAALLHANRWIQDSRDQFTKERLDAINDEFKLYRCHTIKNCTHACPKGLNPAKQIDTIKKLQLDA

SEQ ID NO: 264424 - protein, 59 aa, Zea mays
  unsure (1)..(59): unsure at all Xaa locations
  Clone ID: MRT4577_172768C.1.pep
FIXGPRANIGLHEGKTRQLSWFQHDSCEIARWHQSPYLVLHPEEHPSYPNHNSNGGIFK

SEQ ID NO: 264425 - protein, 197 aa, Zea mays
  unsure (1)..(197): unsure at all Xaa locations
  Clone ID: MRT4577_172769C.1.pep
MRDRLMALMPRALRPPRNRTLRLRLRGRGDLRLTAPEISLSRPNRDVERARYSLXLYNHPSATAYDVSITVCSWPTDTIELVXSADNAPTLSGLDPVASASRTYVLQTPSQDTFXGSPSIITYRXVPSTTALREAYSTPIFPLEILADRPPXNKLVWTNRVVMTYAXLAYAVSFVGLCIYLVASPVNIISYASENRR

SEQ ID NO: 264426 - protein, 99 aa, Zea mays
  Clone ID: MRT4577_17276C.1.pep
MYKNQLQELAQRSCFSLPSYVCTREGPDHAPRFKATVTFNGETFHGPTCCTTLRQAEHAAAEVALARLSTRGPSTYLTARVLDETGAYNNLLLETAYPV

SEQ ID NO: 264427 - protein, 54 aa, Zea mays
  Clone ID: MRT4577_172770C.1.pep
PADWDPPLKELFRGQKEYGAVERPIKISFCDRTLFWDERRGQICWSHHLSWLPD

SEQ ID NO: 264428 - protein, 68 aa, Zea mays
  Clone ID: MRT4577_172771C.1.pep
GIPGSTHSSEKKKKKKKKNKKKKKKKKKKSKSLYILPNLLTHTYNFITIYITSPNFISLSKLFTTYLT

SEQ ID NO: 264429 - protein, 151 aa, Zea mays
  unsure (1)..(151): unsure at all Xaa locations
  Clone ID: MRT4577_172772C.1.pep
KKGKSGEKEKRGEKKRHPGAGGGEGPGGGGGPPRRRGGAGPDSRHRPPTPHRRRNRPPEPPRGYQLPTGXGRPPAPGRPPAKRQPAKNWGRPHTGVNRXAGPVPPRENSVTVWRWDRAWPKLGQNWIRGKIGTPHKPPTKNNPPPARKKQG

SEQ ID NO: 264430 - protein, 98 aa, Zea mays
  Clone ID: MRT4577_172774C.1.pep
FFFFFSIFCFTEVRFLQTYSPLRWYKDRVSFNPFPLSNGHLDRVSFSPQLIGTLSPRKDHHIIGVSCFDYKELENKKWKGRKAIQAQELKRTRQNSLF

SEQ ID NO: 264431 - protein, 261 aa, Zea mays
  unsure (1)..(261): unsure at all Xaa locations
  Clone ID: MRT4577_172775C.1.pep
MSSSGGGGAGQQFRYTQTPSKVLHLRNLPWECTEEELVELCKPFGRIVNTKSGVGANRNQAFVEFTDVNQAISMVSYFASSSEPAQIRGKTVYIQYSNRQEIINNKSPGETVGNVLLVTIEGVQASDVTIDVIHLVFSAFGFVHKIATFEKAAGFQALIQYTDAPTASAAREALDGRSIPRYLLPDHVVSCHLRISFSAHKDLNIKFQSHRSRDYTNPYLPVNSSAIDSTLQPAVGADGKEXVRAEGNXVLRASMRDVQYA

SEQ ID NO: 264432 - protein, 230 aa, Zea mays
  Clone ID: MRT4577_172776C.1.pep
MASALLRSTPALRAGLRARSTPLAAMATTSFVRGKATLPDLPYDYGALEPYISGQIMELHHSKHHQTYVTGFNNATDAIAEANHKGDAKAAAAQAPLLNFHGGGHVNHSLFWENLAPNGKGGGGEPEGKLLTSINEDFGSFEAFKKQTNATLAGIQGSGWAWLVKDKNAGTLSIVTRPNQDPVTGNLEPLLGIDAWEHAYYLQYQNRKAEYFSAIWDVINWGTVAKRFEK

SEQ ID NO: 264433 - protein, 79 aa, Zea mays
  Clone ID: MRT4577_172777C.1.pep
AQLQAGVSVRNKVKSEREGENKSQETEECDTVICFTEVRFLQTYSPLRWSQRPGLFQPFPSLKRSLRPSELLFSINWDT

SEQ ID NO: 264434 - protein, 68 aa, Zea mays
  Clone ID: MRT4577_172778C.1.pep
SAQSKPSLLDTLAAANTRASMPSIAATTVSRQCGFRDQNACPFHSTLTGERRAERCIIWSDAYFIVLG

SEQ ID NO: 264435 - protein, 57 aa, Zea mays
  Clone ID: MRT4577_172779C.1.pep
LISSTSRCAHSKAKDDRMSCAHSCGHWPIHRHVPYHYSYALERSHWSHSCSAMTHAA

SEQ ID NO: 264436 - protein, 148 aa, Zea mays
  Clone ID: MRT4577_17277C.1.pep
NSARGRPLPLLADRACRCTSGWDGLLLLPVPPPLGASPSEIRAPGPGALHMHAGPGLVAGSVSGTCWRGSAASGSRYPRAAARRAGRLRPVRMCAPDVGGGFDGVPSGRVIGVRLPRVPRLLRVRPPLGLAGVPPWRDPVQAPLGLAP

SEQ ID NO: 264437 - protein, 88 aa, Zea mays
  unsure (1)..(88): unsure at all Xaa locations
  Clone ID: MRT4577_172780C.1.pep
VSKANKLKLXYTKAIPAYSKGESTAVKKAPAKEEEEEDEEESAKSKSEINDEDHEEGSEKDEDHAELWSSSSQWVVLHPTMERLPKGP

SEQ ID NO: 264438 - protein, 294 aa, Zea mays
  Clone ID: MRT4577_172781C.1.pep
GAQALDVVEAVVRELETDPFFNSGRGSALTRAGTVEMEASIMDGRGRRCGAVSGVSTVKNPVSLARRVMDNSPHSYLAFDGAEEFARAQGLETVDNSYFITEDNVGMLKLAKEAGSILFDYRIPLAGTDTCSALAGAADSNGGGVHKAGMVMNGLPISVYAPETVGCAVVDATGACAAATSTGGLMNKMAGRIGDSPLIGSGTYACGACAVSCTGEGEAIIRCTLARDVAAVMEYKGLPLQEAVDYCVKERLDQGFAGLIAVSGTGEVAYGFNCTGMFRGCATEDGFMEVGIWE

SEQ ID NO: 264439 - protein, 337 aa, Zea mays
  Clone ID: MRT4577_172782C.1.pep
MAPWAIAIHGGAGVDPNLPEHRQEEAKRVLARCLQVGVDLLRAGAQALDVVEAVVRELETDPFFNSGRGSALTRAGTVEMEASIMDGRGRRCGAVSGVSTVKNPVSLARRVMDNSPHSYLAFDGAEEFARAQGLETVDNSYFITEDNVGMLKLAKEAGSILFDYRIPLAGTDTCSALAGAADSNGGGVHKAGMVMNGLPISVYAPETVGCAVVDATGACAAATSTGGLMNKMAGRIGDSPLIGSGTYACGACAVSCTGEGEAIIRCTLARDVAAVMEYKGLPLQQAVDYCVKERLDQGFAGLIAVSGTGEVAYGFNCTGMFRGCATEDGFMEVGIWE

SEQ ID NO: 264440 - protein, 190 aa, Zea mays
  Clone ID: MRT4577_172783C.1.pep
MSTASESDGTHGSNQSQCVVSQESPPATESNNDAESIDIEDEDEEEDVVAGSKRKRTFAVWKEFTEVRIGGNVHAKCNYCSKKLSGSSKNGTNHLRLHLKSCVQKRIKVNGKTMAHASLRFGKTDAGTVLVENYIFDQDIARQELSAMIVLHEYPLSMVDHVGFRRFVGALQPLFKIGTRNTIRYNRCDF

SEQ ID NO: 264441 - protein, 95 aa, Zea mays
  Clone ID: MRT4577_172784C.1.pep
SVSFFNCIILQISTYLSNLSYLFFQVDGNYISNLVLSVFHDPSVMDQEHGLHIKDVIDRLKLPDDVVSAAIQGHVDVGNIYNTIDDFHYKSVRNG

SEQ ID NO: 264442 - protein, 86 aa, Zea mays
  Clone ID: MRT4577_172785C.1.pep
PLPSHRRTVGQCQAPSPPISPHRSCPYGVSIPGRRPGTADRYTSHGSTCSGNGNNKAMHATGECGRPQQGEPLQPWLRGREMRGAR

SEQ ID NO: 264443 - protein, 85 aa, Zea mays
  unsure (1)..(85): unsure at all Xaa locations
  Clone ID: MRT4577_172786C.1.pep
GGRDTXXLARATDVRCRLFXLDRIICLLXPSLLCXSLLLFFCLXLVXTCFPCVRFGKPLGRHCGPLFPHCLPKDNRQRPLCSPAA

SEQ ID NO: 264444 - protein, 93 aa, Zea mays
  Clone ID: MRT4577_172787C.1.pep
QLLSNTNYVVASLSVFLKLFWGKIKLKFGDGSSPCNRSSTFQFLLLSVALHQSVQRIKADDVSSDLENFFLDDLICYELNFASILSFPQFLYM

SEQ ID NO: 264445 - protein, 62 aa, Zea mays
  Clone ID: MRT4577_172788C.1.pep
SRSYRLVRSDGPLRAPQRFQVRCCNKKCKGAKVGSKAYSVSGTLLGGPGAFDNQGALCLVFL

SEQ ID NO: 264446 - protein, 138 aa, Zea mays
  Clone ID: MRT4577_172789C.1.pep
PQGSDPLGQVFSPQMGLTAQAIVALSGGPPLGRSPKARSGFKGAWPPPPLFFATSSFKELLTGKKEALLQLPSDKAPLFDPPFRPLVAKTPPGGAPFFADYPGAPLKLSKLGFAGAYRPQKVWWLSPPALVFLLSPFS

SEQ ID NO: 264447 - protein, 47 aa, Zea mays
  Clone ID: MRT4577_17278C.1.pep
KHTIVFVIKTNPSRGGILVGQGVNTPTYIYCQATLKMWKYSPRCKHF

SEQ ID NO: 264448 - protein, 112 aa, Zea mays
  Clone ID: MRT4577_172790C.1.pep
SLLLSRRFLPPPFLLPPYTTSIFKASTYAHPCFSFLGLMVSGGRDSVVTIGVDGSGGSMVRFVCLMDQIVVALNQFMGVIATLNAWMRDCGLPVAGIYGDTTLSVGKNAPKG

SEQ ID NO: 264449 - protein, 308 aa, Zea mays
  unsure (1)..(308): unsure at all Xaa locations
  Clone ID: MRT4577_172791C.1.pep
MPICAPSSDSSASASSGLGARVWVLHGLALGAAAAAAAVAYLYRRPTGFRSRAVGIIPARFASTRFEGKPLVPILGKPMIQRTWERVMLASSLDHVVVATDDERIAECCRGFGADVIMTSASCKNGSERCCEALKKLDKHYDIVVNIQGDEPLIEPEIIDGVVMSLQRAPDAVFSTAVTSLKPEDAFDTNRVKCVVDNLGYAIYFSRGLIPFNKSGNANPKYPYLLHLGIAGFDSKFLMKYPELXNTITNDPELPPTPLQMEEDLEQLKVFENGYRMKVIKVAHDAHGVDAPEDVEKIEALMRTRNIQ

SEQ ID NO: 264450 - protein, 69 aa, Zea mays
  Clone ID: MRT4577_172792C.1.pep
TSGNNKEFIEIVARQDKRQATCAYVAVSSYKQLLQVFECIPRESNKVLVFRTNVCVESVLCVGRPILIA

SEQ ID NO: 264451 - protein, 92 aa, Zea mays
  Clone ID: MRT4577_172793C.1.pep
MAAVNLGAWLCALLAAVAAVLPAADALGMNWGTQATHPLSPRIVVQMLKDNGIKKVKLFDADQGTLNALAGTDIEVMVAIPNNLLDIMNDKN

SEQ ID NO: 264452 - protein, 84 aa, Zea mays
  Clone ID: MRT4577_172794C.1.pep
LKGGASPIPNILSAQPRGRFLLVGLSCGGSCSKGFSNLPVCNGMNSNTITGGLDIKKANVCHERRTNARVFGGDQNLNLSLKLF

SEQ ID NO: 264453 - protein, 32 aa, Zea mays
  Clone ID: MRT4577_172795C.1.pep
MQQAYIQQLESSRIRLAQLEQELHTARAQVYD

SEQ ID NO: 264454 - protein, 50 aa, Zea mays
  Clone ID: MRT4577_172796C.1.pep
IRLMDACHSLLPKPMETMPSPIDAPETIIYPGIIFPHCLLSSCAKAVRQL

SEQ ID NO: 264455 - protein, 115 aa, Zea mays
  unsure (1)..(115): unsure at all Xaa locations
  Clone ID: MRT4577_172797C.1.pep
LGLRNFTLIGRNDDAQTDKRCKGGGEVXPYRLMTRMKVCXMLSDAQHGVETEKMRHDYMNGEAIDKLNKNMKMVMRLAVKHHAMLASCAIIMQIARLPRPGFNTSRKGSDPGVST

SEQ ID NO: 264456 - protein, 35 aa, Zea mays
  Clone ID: MRT4577_172798C.1.pep
RFGCSMGVYRFSPFPFGLQSSTAGRQSPPRAKAER

SEQ ID NO: 264457 - protein, 103 aa, Zea mays
  Clone ID: MRT4577_172799C.1.pep
TKTCWLAPSTHSMTQGARRGHFRNPAPTEKMGSPTFQLTEGQKSKEAFRGQEKHPQVFVLYSQYGPYPNRDQGRGFIFFPLSAKQKDGYGKKTNFWKLEGGKN

SEQ ID NO: 264458 - protein, 208 aa, Zea mays
  Clone ID: MRT4577_17279C.1.pep
MRKYAAPRSSRFHGVTRLKWSGKYEAHLWDNTSQVEGRKRMWSHVYLGSYVDEEQAAKAHDLAALKYWGTGPNTKLNFNISDYEKEIEVMKTMSQDEFVAYIRRQSSCFSRGTSSYRGVTRRKDGKWQARIGRIGESRDTKDIYLGTFETEEEAAEAYDIAAIELRGVHAVTNFDISNYCEDGLRKLEGPSEVAKLGSPSEVVKLAGQ

SEQ ID NO: 264459 - protein, 152 aa, Zea mays
  unsure (1)..(152): unsure at all Xaa locations
  Clone ID: MRT4577_1727C.1.pep
KLSKAAARATIRTRELMTNRLLAHKKVMLEVIRPGRPNVSXGDMGKRVXKIYYEKDTDCILGCEXKPCSDEIRPTDFXLXKDYLEVAKKIEXLYRLVRNGLATXVEKARKQMKERENRANKIRGAKKTKAGDARKNKGQEVTRLALSLIIGF

SEQ ID NO: 264460 - protein, 146 aa, Zea mays
  unsure (1)..(146): unsure at all Xaa locations
  Clone ID: MRT4577_172800C.1.pep
SIRHLIYCDCGDKGIARRTVHSWILCTGIHNCYKDALAAASGSAASTRRSDNRRGASGNSTAASGSDLKNWXDADFHQGEQDTPFHLFLVALYVNITALLELTXQTVVDXLIYGISQNXMLKTFSIDNDFTPEEEEEIRXENQCYL

SEQ ID NO: 264461 - protein, 146 aa, Zea mays
  Clone ID: MRT4577_172801C.1.pep
WVPRGRPGCSFFPGGYAGILVPPLPVRLSVSHLRSVTPASYSLNHRPPRPAVARAASRGNGNGGPPVEGEKERRRSSLPALSEIRLGELLSPDPANAVAVVLTGALVWAGASLLLQLTLISAAIFAAAVKYSFVAAPLLIVLIALL

SEQ ID NO: 264462 - protein, 38 aa, Zea mays
  Clone ID: MRT4577_172802C.1.pep
LLVCLTRTQHVRRGGQHPPPLFKENSGDVHQSQFSPDN

SEQ ID NO: 264463 - protein, 107 aa, Zea mays
  Clone ID: MRT4577_172803C.1.pep
TPRHVPLCSLVLGSGQVCVRDFEALLRSSCRVVCRYSLPIDLAVDHVQVIARLLASLASSSIDRSLYFSSRPGMSCRAIITSYRKLDPRCRRFTVLVGRTPLEPPVQ

SEQ ID NO: 264464 - protein, 141 aa, Zea mays
  unsure (1)..(141): unsure at all Xaa locations
  Clone ID: MRT4577_172804C.1.pep
FFASLWGGGYFFRGETNKREEEDDDEAAAAAVEAGNGRQLVMPEDGYEWKKYGQKFIKNIQKMRSYFRCRHRLCGAKKKVEWHPRDPGGDLRIVYDGAHQHGPPAAXAAPPGGHGQXRGGGASDSNRYELCTQYFGGARSR

SEQ ID NO: 264465 - protein, 145 aa, Zea mays
  unsure (1)..(145): unsure at all Xaa locations
  Clone ID: MRT4577_172805C.1.pep
AHSGGEREIQRXTMLKLLNQLDGFNSKGDVKVILATNRIESLDPALLRXGRIDRKIEFPLPDVKTRRRIFQIHTSKMTLADDVNLEEFIMSKDEFSGADIKAICTEAGLLALRERRMKVTHADFKKAKEKVMFKKKEGVPEGLYM

SEQ ID NO: 264466 - protein, 134 aa, Zea mays
  unsure (1)..(134): unsure at all Xaa locations
  Clone ID: MRT4577_172806C.1.pep
SESGRVPSGLAGVSGXLIRLRRRVAPALAATSHQAAGTLNCAGLPDAAPLNXRRQLRPMLLLPATVIPASSKGARKHAPRRTAEAAGDVETVGSLENYPGQGTGFFFYKREFLHVILNILNKKTYEYFTDPYFE

SEQ ID NO: 264467 - protein, 53 aa, Zea mays
  Clone ID: MRT4577_172807C.1.pep
LCDKRRVFMWIVITGNTSRIAIQSTGSWCGLTNKLPFLVELHRVIGAYPRMRG

SEQ ID NO: 264468 - protein, 91 aa, Zea mays
  Clone ID: MRT4577_172808C.1.pep
HPFHFASCSHEQRVLSMGSHWCRQTTMQSLWFFNASTSLATQKLKEWVRSSFHAFILCPDRARRASLCTSRLSSSAPRSPVLSGCTPACSR

SEQ ID NO: 264469 - protein, 72 aa, Zea mays
  unsure (1)..(72): unsure at all Xaa locations
  Clone ID: MRT4577_172809C.1.pep
RLEGEVKLCEKMAQFDXAETQPKKDTPRKEKGSREEKQKPQAERKEEKKAAAPAPEEEMDECEQALAAEPKA

SEQ ID NO: 264470 - protein, 109 aa, Zea mays
  Clone ID: MRT4577_17280C.1.pep
MLFFCRKLIPRTAAALHKNTAAVLSSVQTTRAAQLFSSRYMILNHPTRATIFGSQKWASGRRNGASGCHGSSMIHRLQRMQQNSINGLVLIPQLPVHECLNYATAPREQ

SEQ ID NO: 264471 - protein, 752 aa, Zea mays
  unsure (1)..(752): unsure at all Xaa locations
  Clone ID: MRT4577_172810C.1.pep
MFHFVGELLSRVCRRGSTGVLVAELIPKVRNHLHRCVPPDHRARIPEMVQHVCQSQFWFNMVEAMRDQHSIERLTEELLRQLASQHISDEEAYWILWTLFNQSFKRLTVMRTMFVDKFLLWKTFPLCCLRWILHYAVFECPPNSTTEILMQRTPNFFGILQSLVSIWSKKEFIQSYSVEQQAYXMDITAAIGLCLEKLTKKELETTKDVLNSILQGVSCRLESPIDLLRKMASAVALTFSKVVDPKNPLYLDDNCCEYVDWDFGVLSPKEFKAPLDAVETKTKPKTRENKKKAGEKKTKAIKRDIPDVRAKIVEINSIDHDQMPDTATNGQFEEEECDEEDMNMDAYSDSSLEPYDLSDDDTDLQKKFSHLSDLAAALRKPDDPDGVENALNYAEKLVRASPDELRYNSGDLVRALVHVRCSDVAMEGEEDSAEEKRQKALVSLLVTCPFESLDVLTKLLYSSSVDIGQRILIIDVMTEAAQELAETKTVKTEQRRGNLITDTSPSWLVPSNIGPPGAGPWREVSEPGTLLSWSHRYEREVPSKSGQLKSGKSRKWGLGKAKDLQVEWSKNRFPLYAAAFMLPVMQGYDKRSHGVDLLNRDFVVLGKLIYMLGVCMKSMAMHPEASALAPALLDMIRSRDISRHAEAYVRRSVLFAASCILISLHPSYVASSLIEGNQDISTGLEWIRTWALQIAEADPDTECSSMAMTCLRLHSEMALQTSRALESANHSKTGRAIPSKLDSIILPFGNMM

SEQ ID NO: 264472 - protein, 117 aa, Zea mays
  unsure (1)..(117): unsure at all Xaa locations
  Clone ID: MRT4577_172811C.1.pep
LHYAVFECSPNSTTEILMQRTPNFFGILQSLVSIWSKKEFIQSYSVEQQAXSFEPLKITLLHFLYKYYLASFSLINADITAAIGLCLEKLTEKELETTKDVLNSILQGVSCEFTLVH

SEQ ID NO: 264473 - protein, 42 aa, Zea mays
  Clone ID: MRT4577_172812C.1.pep
ILTGVTCMLSCFMHDYLKGVPLDPTTYYIIYIGNIKRAGRCI

SEQ ID NO: 264474 - protein, 154 aa, Zea mays
  unsure (1)..(154): unsure at all Xaa locations
  Clone ID: MRT4577_172813C.1.pep
TTNVANHTCTIDVYRXAGDTDWRKLLXHSATXAAGPMHVDVLNNPYQPSIVIDLXAALARNIITPYCYHFSLACETVLHKQWHTICSSAPDCSVYSIAYGKTSDLGCAEXHGCWGTPINPMERPARLTDXDMVCCIWQMATPEFANGMHIIRAR

SEQ ID NO: 264475 - protein, 67 aa, Zea mays
  Clone ID: MRT4577_172814C.1.pep
SFFIAILIHFSIFPTITGAGSNTKHILYPKYTKSTLNSIQLFSHHPLPPPTPEHHHPLTTGLNNILF

SEQ ID NO: 264476 - protein, 358 aa, Zea mays
  Clone ID: MRT4577_172815C.1.pep
MVSSKKVCVVGAGVSGLACARELLREGHDVTVMEQSGGVGGQWLYDPRADGGDPLGAAGAHSSMYASVRLISPRELTGFSDFPFFPRDDGTGDSRRYPGHAEFLRYIRDFCDAFGLMDVVRLNTKVLRVGLAAPRAADDGDGIKRWTVSWSRHRGCDGEVVTTEEEVFDAVVVAVGQYTQPRLPTIRGMDKWSTRQLHSHSYRVPDLHLHLLVVIVGEDHRVMDIALERSKVAREVHVSVKSMEALTPAVSKAVARHSDLHLHLQIECLREDGQVTFADGSRVAADSIIYCTGYDCSFPFLDTGGLVTVDDSRVGPLYEHTFPPALAPSLSFVGLPRMVLVPRFYEAQARWVAQALSG

SEQ ID NO: 264477 - protein, 104 aa, Zea mays
  Clone ID: MRT4577_172816C.1.pep
PDKLNVACISQIECLREDGQVTFADGSRVAADSIIYCTGYDCSFPFLDTGGLVTVDDSRVGPLYEHTFPPALAPSLSFVGLPRMVLVPRFYEAQARWVAQALSG

SEQ ID NO: 264478 - protein, 128 aa, Zea mays
  Clone ID: MRT4577_172817C.1.pep
MACVNMYNPDGGAVAFGGGQPGPRISFSSDFSMEPPPPVQNRAMGLRCQEEDQNFEFSVGSHPMMAADQLFSKGRILPFKVEGGRPPSTLRDELRGGAADEERASTTPKGSSRWREMLGLRKSLCVGG

SEQ ID NO: 264479 - protein, 63 aa, Zea mays
  Clone ID: MRT4577_172818C.1.pep
RAFMLGQHVKAERVHGRSQWSVEGGSCWERRPTTVAEASASWEMAASREGRAQLVEKDEPEIM

SEQ ID NO: 264480 - protein, 72 aa, Zea mays
  unsure (1)..(72): unsure at all Xaa locations
  Clone ID: MRT4577_172819C.1.pep
SSARXXXCSLXXRXXXWXXLXXXXXXGVAXXVGCRXXXSWRMPXRCWXRGRRPGXXGSRWGRXLGXPGLSGP

SEQ ID NO: 264481 - protein, 84 aa, Zea mays
  unsure (1)..(84): unsure at all Xaa locations
  Clone ID: MRT4577_17281C.1.pep
RPQERRRRRRGRTPHRQAAATXPEAKARRMGLWRRXRATTPXXTRSXXXPSRGARTISENAYRKAAIKNHPDKGGDPKKFKELA

SEQ ID NO: 264482 - protein, 77 aa, Zea mays
  Clone ID: MRT4577_172820C.1.pep
ICWERVHPSHFRINHHKCSVDNGNSSNNDKSVLSKLLYSSFRVYVSFVLYNMGFNNLYLAQCSAMNLYFVVATFFHR

SEQ ID NO: 264483 - protein, 106 aa, Zea mays
  unsure (1)..(106): unsure at all Xaa locations
  Clone ID: MRT4577_172821C.1.pep
GVXPFVAXXGAPFXXXXPFXXXXAWSPPGXVXVGXXPGLLXWAVXLAGXLGGGALLVXXXXALSGFALLAPPPPPGCLSSPPWLPLRPRALPSFCGRPSSPPPRLG

SEQ ID NO: 264484 - protein, 115 aa, Zea mays
  Clone ID: MRT4577_172822C.1.pep
MARVRSTARVTHDGEETEATETAPISEVMRWSGLVVTEGASDEGAPATETEQADIEEGDTGEEEIDYNTAMPSKPSHLDFRKSIVSEADMAMMSKLGYFTLQETPKFSWAKNPRK

SEQ ID NO: 264485 - protein, 154 aa, Zea mays
  unsure (1)..(154): unsure at all Xaa locations
  Clone ID: MRT4577_172823C.1.pep
MSSWEAKARQFLLEEEKEDDELFLVIVPAVLLAMQEEKRSVRTSGTSAHGSAKKWKKSHVASVLEDYLEHRKKQTEKTVEALLXAEEWGEEEYSIERCLDIVDALEELTDEEKAAAAEVFNNEVNREMFVIAKQKIPNVGLIWLRRKISRIAST

SEQ ID NO: 264486 - protein, 60 aa, Zea mays
  Clone ID: MRT4577_172824C.1.pep
RTREKPRPEQRQQTQTAPIRGALSEHMTGGGIHCTAIQKKTYNGGKLHCLGPGKEAPLSW

SEQ ID NO: 264487 - protein, 64 aa, Zea mays
  Clone ID: MRT4577_172825C.1.pep
SSFLKQLRQQKEGQDGVDLEMNMNGTKSTFEDDEFDDVVRFILVFTCCMPILVILFISVYLILA

SEQ ID NO: 264488 - protein, 162 aa, Zea mays
  unsure (1)..(162): unsure at all Xaa locations
  Clone ID: MRT4577_172826C.1.pep
MEPPASFLRDQGGGGGAEEQSGSQLEHEEDVPCVLDMFVHEARGTHKTIRVYGDHQDVYARLALTSAPDAGASARLGERLPPLRVARGRLAVDVLKCELWMRSGGVPDDQLLGFALVPLAAVAAADGARVIAADFELSSTDLLHSPGXAVRXSLALRRGTPT

SEQ ID NO: 264489 - protein, 73 aa, Zea mays
  Clone ID: MRT4577_172827C.1.pep
GGFFLNRYARTPLIQVGKKTQPGPQVAKAFYHGTHGRGQPPAETRARKKKEDCWGTRREGQTPGPTQNSSPTL

SEQ ID NO: 264490 - protein, 93 aa, Zea mays
  unsure (1)..(93): unsure at all Xaa locations
  Clone ID: MRT4577_172828C.1.pep
PRVRPRVRLRLRDYGYSTYVWNIYGGAYVPFYGXSXTVGMVTGTSTYYSYFHFGQFXNTTINYSIVQCFYLLQFLHMLQLSTESSTVAVCYRL

SEQ ID NO: 264491 - protein, 167 aa, Zea mays
  Clone ID: MRT4577_172829C.1.pep
MEQSGAKKSNKITEIVRMQRMLKKWRKLSVTPKEPSSPTGGGGGNAVGESKAKKFLKRTLSFTDAPPSGSPPKGHLAVCVGPAAQRFVIPTEYLKHRAFAALLREAEEEFGFQQEGVLRIPCEVPVFESTLRAVEKNKKDAAASCYCSAEYAADEVGRGTPNNPLCR

SEQ ID NO: 264492 - protein, 128 aa, Zea mays
  unsure (1)..(128): unsure at all Xaa locations
  Clone ID: MRT4577_17282C.1.pep
KDDGGGNGGGRRHGGLXRLVVGMADGCIWSAHQRLEEGSEIGLAXRGATDGSGGRLGSRGAGGGDGGRLGTRDTADGGRLDXWRXRRFRWTRPAWCERRDWRWRTRPRCEEELPVDVAYSSAHEGWPA

SEQ ID NO: 264493 - protein, 82 aa, Zea mays
  Clone ID: MRT4577_172830C.1.pep
VLYNKKKRRKKKKKEKKKKKEKKKKKKKKRSFGLSVSSLRALACNILTFLYCHLISINWPTVHNFGPGNTLAFRNLLCLHHI

SEQ ID NO: 264494 - protein, 150 aa, Zea mays
  unsure (1)..(150): unsure at all Xaa locations
  Clone ID: MRT4577_172831C.1.pep
MENTHHGRPAARANSKQSVKGPGKSSSLDMVEANEDDRLSKLPDDILLNIVERLDIADAARTTILSRRWKQIPAVLSKIVIMAGSFEPKHKEWSKLTSDXYXVRANTTVLEATRSILESKXGSLYPIHMLRIHSYLGDESILFGQTVANT

SEQ ID NO: 264495 - protein, 695 aa, Zea mays
  unsure (1)..(695): unsure at all Xaa locations
  Clone ID: MRT4577_172832C.1.pep
MGDCSEFFFAPTPWVRGPAGPQPQIIRTRHQGTKPSEATSCPAPPRRLLPAQDKKTLALEAREPDTQSEKSEGSDRRRWRPSPERRRRHLPLRAGCGCVGTSCCGPRTSASARPTPXADLSRSSSSSNSAPTRAQPLGSRPENGGGVRAVEKDPIKLWERYVEWLYQHKELGLFVDVSRMGFTEDFLRQMEPRMQRAFAAMRELEKGAIANPDEARMVGHYWLRDPALAPNSFLRSKIETTLDRILAFSQDVVSGKIQSPSGRFTSILSIGIGGSALGPQFVAEALAPDNPPLKIRFIDNTDPAGIDHQIAQLGPELATTLVIVISKSGGTPETRNGLLEVQKAFRDAGLQFSKQGVAITQENSLLDNTARIEGWLARFPMFDWVGGRTSEMSAVGLLPAALQGIDIKEMLVGAALMDEETRNTVVKENPAALLALCWYWASEGIGNKDMVVLPYKDSLLLLSRYLQQLVMESLGKEFDLDGNRVNQGLSVYGNKGSTDQHAYIQQLREGVHNFFVTFIEVLRDRPAGHDWELEPGVTCGDYLFGMLQGTRSALYANDRESISVTVQEVTPRAVGALIALYERAVGIYASLVNINAYHQPGVEAGKKAAGEVLALQKRVLTVLKEAICENPTEPLTLDEIADRCHCPEDIEMIYKIIQHMAANDRALIAEGSCGSPRSVKVYLGECSVDEDMQAA

SEQ ID NO: 264496 - protein, 120 aa, Zea mays
  Clone ID: MRT4577_172833C.1.pep
PTRPHQPGVEAGKKAAGEVLALQKRVLTVLNEATCKDPCEPLTIDEIADRCHCPEDKHNAFPPSITHAQRLLPQIEMIYKIVQHMAANDRAIIAEGSCGSPRSVKVYLGECNVDEDLQAA

SEQ ID NO: 264497 - protein, 79 aa, Zea mays
  Clone ID: MRT4577_172834C.1.pep
VYGCKHFIVMNQAYMDTALNMHLYNTTETCCKVKIGIYSETHIKTRYQYIIILLSPIHVLTTLNLRSTKPLVVTLQQIL

SEQ ID NO: 264498 - protein, 276 aa, Zea mays
  Clone ID: MRT4577_172835C.1.pep
IFAYPFRCPIPAALLALCWYWASEGIGKKDMVVLPYKDSLLLLSRYLQQLVMESLGKEFDLDGNRVNQGLTVYGNKGSTDQHAYIQQLREGVHNFFVTFIEVLRDRPAGHDWELEPGVTCGDYLFGMLQGTRSALYANDRESISVTVQEVTPRAVGALIALYERAVGIYASLVNINAYHQPGVEAGKKAAGEVLALQKRVLTVLKEAICENPTEPLTLDEIADRCHCPEDIEMIYKIIQHMAANDRALIAEGSCGSPRSVKVYLGECSVDEDMQAA

SEQ ID NO: 264499 - protein, 406 aa, Zea mays
  unsure (1)..(406): unsure at all Xaa locations
  Clone ID: MRT4577_172836C.1.pep
PRSHRIRIGGSALGPQFVAEALAPDNPPLKIRFIDNTDPAGIDHQIAQLGPELATTLVIVISKSGGTPETRNGLLEVQKAFRDAGLQFSKQGVAITQENSLLDNTARIEGWLARFPMFDWVGGRTSEMSAVGLLPAALQGIDIKEMLVGAALMDEETRXCGITLLITRTTCXWHDYLYCVMSNMFIFLLXVKANPAALLALCWYWASEGIGKKDMVVLPYKDSLLLLSRYLQQLVMESLGKEFDLDGNRVNQGLTVYGNKGSTDQHAYIQQLREGVHNFFVTFIEVLRDRPAGHDWELEPGVTCGDYLFGMLQGTRSALYANDRESISVTVQEVTPRAVGALIALYERAVGIYASLVNINAYHQPGVEAGKKAAGEVLALQKRVLTVLKEAMYGTSDLCSFCFSVK

SEQ ID NO: 264500 - protein, 449 aa, Zea mays
  unsure (1)..(449): unsure at all Xaa locations
  Clone ID: MRT4577_172837C.1.pep
WLGWTEKALACEQSHAPVPDGPPGTMYVTGMLGLSEIQAAGCVSTERFDXAKGKSVKVVPVEKGIEAERHDGVAATLVAISADGTGRSAEKVQVLLSLPTSGSMNKQCRLVEQIRYLLKDDEEARIQLGSNGFAEALVEFLRNAVNDGNEKAQEVGAMALFNLAVNNNRNKGLLLSAGVTDLLEQMISNPRLSGPATALYLNISCLPDAKAVIGSSQAVPFLVDRLYSQDGSDTRGSSCKHDALYTLYNLSYHQASVPALLAAGIVDALHCLVTESPGSEEGLGWTEKALAVLISLAATQAGRKEIMSTPGLVSTLAMLLDTGESTEQEQAVSCLLVMCGADDKCIAPVLQEGVVPSLVSISAAGTGRGREKAQKLLKLFREQRQRDTPPPQQQQQQLLQSQLAEGGNGGGGAIVCHRESKPLCKSKSRKLGRTLSSLWKNRGFSLYQC

SEQ ID NO: 264501 - protein, 71 aa, Zea mays
  Clone ID: MRT4577_172838C.1.pep
EKKGFFFLQKRVKIFSGPKTPNSPKKNRKGGLKGPHWGGPPRNFSYKKSRPHPVHFLGKGFSFGQKIKGAR

SEQ ID NO: 264502 - protein, 32 aa, Zea mays
  Clone ID: MRT4577_172839C.1.pep
HLLVHPILIPLSGEGPLKLALSRSPSLVPRVR

SEQ ID NO: 264503 - protein, 103 aa, Zea mays
  unsure (1)..(103): unsure at all Xaa locations
  Clone ID: MRT4577_17283C.1.pep
MPGHIIQVKYVCCGHPSFSSVTVAALPVLCWALDNVARFRRLNFAGSSFYRRYLEEPCLWXVNTNNTTLSLLSSNAESALGFLXLFSWRGSIIQTFMYWELRD

SEQ ID NO: 264504 - protein, 73 aa, Zea mays
  unsure (1)..(73): unsure at all Xaa locations
  Clone ID: MRT4577_172840C.1.pep
MRGPLFRAGGGXDPPLLXHIIPRLLEVPTARPRKQVHLSXSEIPQLCTVFRAIFLSQPNLLELEAPIKNFGDI

SEQ ID NO: 264505 - protein, 52 aa, Zea mays
  Clone ID: MRT4577_172841C.1.pep
FVFNVAPPLVPKICHNKRKGLGLIKTFPRQPPKGRNFFCPIILIPQVRVLLA

SEQ ID NO: 264506 - protein, 59 aa, Zea mays
  unsure (1)..(59): unsure at all Xaa locations
  Clone ID: MRT4577_172842C.1.pep
AHAKGLQNEHAHARHTVPIVSPPCNCCKMKANTLQNRQDMATTXELSISRKELLSTCAW

SEQ ID NO: 264507 - protein, 81 aa, Zea mays
  unsure (1)..(81): unsure at all Xaa locations
  Clone ID: MRT4577_172843C.1.pep
DSHNVLHLYPKGPNIGLSKFLRTLNRELQLHIXELSNILCDIPSQYARTSXKISXIFKNLHHLINSXIQPHQAISTLINML

SEQ ID NO: 264508 - protein, 437 aa, Zea mays
  Clone ID: MRT4577_172844C.1.pep
HWVPRAGRRRRRRCAHPRQARLLPLPSPGEPSPLESNTLREVAVAESPSKKICHALSSTPSSALGPDVWVDLLDSLLLQIIVLVSSFHDLLAFIGTCRSWRAVLSSLPPVYTFNVPPLHLRSDGCDSHPHRWYMRAKLLSDINWQLTDPAKQTSSLSCSALQDFQVYMRYLGCSYGYLIFSNLEQCLLVNVYSGATVRPPKLKFTDNRNVYHGALVAPINLSNSCLLFCSRSSIFQWKVGSDFWSEHPLGVECISQIVSFKGEIFAIDLLRRLHRIQLEPQLSLQEVAVVWDADMFLGLDSTQWLVVCGDMLLMVHLSVTIDSPCSGFSETFNVCRLDFQVEPAKWVKVDNMGDNALFVGTDGRSPTFSCLGPEKWGGKRNCIYIASPLADSNEPWGVFEVGQAVRCYNAKKYLPRVHSSRLPSLWVLPSLVYGVGQ

SEQ ID NO: 264509 - protein, 69 aa, Zea mays
  Clone ID: MRT4577_172845C.1.pep
RMNKPTACKRMCFITKKKNGCQHATTSFLMEATGTKNKGKRVQKKKKCKKYLITFTLFLCLGLVLRFSN

SEQ ID NO: 264510 - protein, 30 aa, Zea mays
  Clone ID: MRT4577_172846C.1.pep
RTITHFLSVNCTCSRIKYHKVLSILTNYWQ

SEQ ID NO: 264511 - protein, 189 aa, Zea mays
  Clone ID: MRT4577_172847C.1.pep
PTYCDDLLAMPCSSTIDYYYSSLSCETNLLKENNKLKNKVKNLSNMFERWHKSEVTHDLIMKNQRRYDDKSGLGFNKSNIKGGQFKLKGNKIFHFMCYKCHEMGHLAKACPNKRKLKLKKEEWRLKHDQCFKCHTWGHLTSMCPTKKLVNPQVKPQPKSRVEQKKNPQKQIKINHEYNGDVGKPRRERI

SEQ ID NO: 264512 - protein, 93 aa, Zea mays
  Clone ID: MRT4577_172848C.1.pep
HASADAWAPLQCAEGGDGHGWLSDSPHASSPRSAPDCAHPPMALAVFHHGLLPFAPAATPTPSRRHLRFRSARPLNRPVRRISCQSINSAISF

SEQ ID NO: 264513 - protein, 248 aa, Zea mays
  unsure (1)..(248): unsure at all Xaa locations
  Clone ID: MRT4577_172849C.1.pep
MSSPAPSSASRSSHGSRGSPRIVLFPSAGMGHLVPFTRLAVALSAGHGCEISLLTALPTVSSAESRHIAALYAAFPAIRQLXPPLCPFRXASSEFPGADPFYLRYEALRRCAPSLLGPLLAGAGASALVVDMALASVAIPVARELHVPCFVFFTASATMLSFKAYFPTYLDDVGAGHGVGDVDVPGVYRIPSSSVPQALHDPDNIFTRQFVANGRALATADGLLVNAFHAMEPEAVEALQGRFVLSGF

SEQ ID NO: 264514 - protein, 111 aa, Zea mays
  Clone ID: MRT4577_17284C.1.pep
TAWWARSSAVSSSTPLQCRAPRGPLSVGRSRQPLRHFALHNGQLGVSRLWQVGLGGLGRPPPRLRSRQRPSTCVLGLLCIVGPHCQRCLPHLQPTRRASPCRCSAAGPLAP

SEQ ID NO: 264515 - protein, 55 aa, Zea mays
  Clone ID: MRT4577_172850C.1.pep
WPLPSYSRNNCYHTRRVSLMNPALARHEPMVGGAIFHITSQQTSLMEPSYRLGRL

SEQ ID NO: 264516 - protein, 112 aa, Zea mays
  unsure (1)..(112): unsure at all Xaa locations
  Clone ID: MRT4577_172851C.1.pep
MAAKRFRMLMLLGLCASAATVTIKRKCAQAAIVFLLXPXLSAAVSCECENLKLXPYKIEQAITVGILSLSLLLLXQSLLLLHHLPHVHLXTLKIQAQQLLELALADVDAYYQ

SEQ ID NO: 264517 - protein, 65 aa, Zea mays
  Clone ID: MRT4577_172852C.1.pep
MAGFSSLAPKTRNLVVAGGLSAFVLGVYYYTMRAVGGTDELQVAIDKFEEMKKKDAARNSSTGGS

SEQ ID NO: 264518 - protein, 51 aa, Zea mays
  Clone ID: MRT4577_172853C.1.pep
TSHVYYPFVTHGQCNSSKQRTRCVMNLSSLVFYATIICMTLWNLYGVVVYD

SEQ ID NO: 264519 - protein, 158 aa, Zea mays
  unsure (1)..(158): unsure at all Xaa locations
  Clone ID: MRT4577_172854C.1.pep
MQIFVNTLTAXTITLXVEASXTICTMRKAKIHHKEVIPTDQHRVIFADEQIKYGRTLSNYNMHNESXTLLLVLMLRGGANKLNXKTYTKPLKILHKHKKVNVSVLHVYKEDDSTRKVSRPRKEXPYTECVAGVFMDNHFERHXCGKCGLTXYVYEQNA

SEQ ID NO: 264520 - protein, 78 aa, Zea mays
  unsure (1)..(78): unsure at all Xaa locations
  Clone ID: MRT4577_172855C.1.pep
FRKRRXXARPAPPQVPAXXLRDFRCXGWAGXRSALESVWRQXXRRXXGLXGEEAGXRXAGESVGXSMCQRTARPPXGS

SEQ ID NO: 264521 - protein, 54 aa, Zea mays
  Clone ID: MRT4577_172856C.1.pep
CFFSIRGDIPSLLKIISITTLTHYSKSHQHTHPYPQSALKSSIFILPIYTHPNL

SEQ ID NO: 264522 - protein, 112 aa, Zea mays
  unsure (1)..(112): unsure at all Xaa locations
  Clone ID: MRT4577_172857C.1.pep
RAVVKRPCRRSIKLFIGVVGRWPHPAPAVVVVWRYALPALGVAYRLDPCVAVGLDLLALRLAHSVLARGRSAGKESGYGCCRNHENDNLACGNXCDHPAPLVLNIPGNRWKR

SEQ ID NO: 264523 - protein, 163 aa, Zea mays
  Clone ID: MRT4577_172858C.1.pep
TSGEYSYTRKKGGSHRNHKWKPGANGKIWGGFLQTKKRGGPTSDQTQLGSNFFSAPRRTPRGPNKGGGFLRSPPGTLWGAFSGNPEGAIFWARAFGSFGIQSFFFLSFPRAEWALKAPGGGRDTDKFLWTTEVAQWAGVSSLFVRILGLDMEERPRLKMDGIG

SEQ ID NO: 264524 - protein, 41 aa, Zea mays
  unsure (1)..(41): unsure at all Xaa locations
  Clone ID: MRT4577_172859C.1.pep
PHVLTSMHTSPIMTNERGSTLRLLLVRFVSCLVPSSGFXPV

SEQ ID NO: 264525 - protein, 407 aa, Zea mays
  Clone ID: MRT4577_17285C.1.pep
MCELMEELLEHSLEASANPMKVVEYVQKESPLIAVVLKAHMHCEACAEGIRKRILNMKGVQSVEPDLKASEVAVMSKKVRRVEAVVAELECRNSELFGEKGELEEKLVAAKEVLARLTAMTREQEARVFARRRESDLVKEKEAVAKALDAEKAEVARLRLKIEELEKCSGEKDGDIRKMKPAYFANYAHMGEGTQEQALTYSCRHQKEWVIDSGASKHVMGISSSFKAYIPHTHYEFVQIADGSSQRIHGVGSIECTPSLSSSSVLHVPSFPVNLISVSSIIDQFKCTVTFDENTCVFQEKGTGRRIGTGVRRDGLWFIGHEESALRAVAERDVKEILLLHCRLGHISFETLRRLHPAMFKGVDKSRLVCDACELGKHTRSIYPSIGLRSCEPFTMIHSDVWGPCSV

SEQ ID NO: 264526 - protein, 100 aa, Zea mays
  Clone ID: MRT4577_172860C.1.pep
ILGQVNAPSSYLSYIFLKHYGAVPLWPIPGQFMGSFLFNSWCYVFSLHHICLRVLAYLIFRVCGSLQLPFHTPWTGFCASCLFPGYYIKNYAGSPKKKKK

SEQ ID NO: 264527 - protein, 129 aa, Zea mays
  Clone ID: MRT4577_172861C.1.pep
PPVTPVSPYSSQVCSVDQKRVFNPLEQITPLPGPGSKNPVRAQLLIGVWKKVVQMTPPPPPGIYRESRPRCVCMCGGYLDSPSITITVTVSLERKESETKLWTGRLVRLNRYSVLHVLGTAGYPHFTCL

SEQ ID NO: 264528 - protein, 69 aa, Zea mays
  Clone ID: MRT4577_172862C.1.pep
KDCILNLLDIRMIERDKRHWLSAVTSPTTGGHQQSAVIRIKCLSSAATRTTTAISRFCTVAEAPSWWTT

SEQ ID NO: 264529 - protein, 71 aa, Zea mays
  Clone ID: MRT4577_172863C.1.pep
TCPGACYSTSIVLFGLCIPASSVSSSVSCVKRLFLHEHNAWTDNSSVYTASKFVHNPLSLNGYFSYRCPYL

SEQ ID NO: 264530 - protein, 50 aa, Zea mays
  Clone ID: MRT4577_172864C.1.pep
KKKVFFSKKKKKKKKKKKKKKKKKKKKKKLKKTKKKKKKKKKLVLGPRPR

SEQ ID NO: 264531 - protein, 80 aa, Zea mays
  Clone ID: MRT4577_172865C.1.pep
ETATSICFTSMTFNTGREITMNKDRELSCTLQYATSKDDLQSNIEPRCECYPTQPLHTMMLQVHTCSRIISDSRRSNILI

SEQ ID NO: 264532 - protein, 61 aa, Zea mays
  unsure (1)..(61): unsure at all Xaa locations
  Clone ID: MRT4577_172866C.1.pep
QYQRKGSGALQLEVRYELYKTDGRAGTPVRTLSELGLLTYXRYWTTVLVATLRRHHAHISI

SEQ ID NO: 264533 - protein, 500 aa, Zea mays
  Clone ID: MRT4577_172867C.1.pep
MGHRATPGVAFAPPKPTFINHNEIAKNVLQFLHQPANHPSWTPPSTEYMHSRLCCQICKVDIIGTDNLLVCDACERGVHLKCLHQYGNKGVPKAEWHCSACLTQSKGKPLPPKYGKVTRTVVASKTAPPGGGAQLSLQESAENMAAKENHQKLAANGNLMKPFSIHGGSTVPDSNVLALSAVMAGSQSQLVSTLRPSIVVKAETPSNGKEGTGQPCNTAIQPNVRSSSLNNRLRSDSCLNPADSANEIMHGKHAAEISGVEAKVKSEANSEVVVSTDEELVHSSGTSIETERAKVVAIEENRAQSTFETDKMKVGETTINTGTTDQCINTEEKLPSLATSEAHTITDVKMTSNTGIPVQQHNIATIEEKTQIDAVSDPHPHAIQDIQDMEMGTNNGPPIDQTSSLVEENPPGQSSSIADACVTANTGIPTDQTQHPNESTENAVKKSPNRELYKEKPGCNITSDITQKVTSNGIMCPEDKTLCVHEDKAVGCDTEAKEEN

SEQ ID NO: 264534 - protein, 108 aa, Zea mays
  Clone ID: MRT4577_172868C.1.pep
GRSLNSRAVSHVCRREILLDVPHSGRSTPRWGGQSDLDPVAMDGFLPEVLDAVDFDGRLSSSPLGTVSLRPPRCRHSSSFELDLLTIISRLCTRPSSSGSHLSIRSKR

SEQ ID NO: 264535 - protein, 111 aa, Zea mays
  Clone ID: MRT4577_172869C.1.pep
RGRRRGRRRCRRRRRGGPRLEPLVIRHAESALHCASPQHHRRVSLLPRSPCTICLDRRRKCALLYVLAAGGLGYVPGLVTGSVEKKEREGRLCQGVHATAGKKRARCVRPA

SEQ ID NO: 264536 - protein, 124 aa, Zea mays
  Clone ID: MRT4577_17286C.1.pep
NKKARKQKPGCKYPATLRGLFPQPQCQNALPKEQSNQKNTFKCIQRRKQSSSLFLIVCRLNPYKHLFQESLQKPSHFSPHAHFPLLVPSIQLAKLTLDLIHKPDYFLMEFLPLPSTLNKALGVV

SEQ ID NO: 264537 - protein, 395 aa, Zea mays
  unsure (1)..(395): unsure at all Xaa locations
  Clone ID: MRT4577_172870C.1.pep
EALIHGGGAASAGGGVDPGVIIKNDVAQAKXGNSQSVGSTGTDSSSAQNTMSQMELVSPASSAPRQEVMMVTTDDYSYKPGLAAAPAAAAPPSFQQHHPLPLQLHGGEGGGDHDKTERRLAQNREAARKSRLRKKAYVQQLETSRIRLQQVEHELQRARSQGLFVGGCSAAGDMSSGAAMFDMEYARWLDDDTKRLAELRGGLQAHLLDGNLGLIVEECMQHYDELFQLKAALARSDVFHLLTGSWATPAERCFFWMGGFRPSELLKILIPQLDPLTEQQLLGICNLQQSSEQAEEALAQGLHQLHQSLADTVAAGTLNDGAAAPNYMNIMAVALEKLASLENFYQQADNLRHQTLHQMRRILTTRQAARCFLSIGEYYSRLRALSNLWASRPRE

SEQ ID NO: 264538 - protein, 163 aa, Zea mays
  unsure (1)..(163): unsure at all Xaa locations
  Clone ID: MRT4577_172871C.1.pep
ARRPIHHRSLERGEIKIIIETDPVLDYCAAMLMALHXPLVQALGMTIVFRICILKHAARNTLILXCVMVGHLQVSVAVGTHEPVMAGLTHVAALFHGPEGLGNAHIPDPTLKKVYESATDLLPDTVSPFSGEGSGLALCPLTNIALAIKKDPSFVKNAKKIDV

SEQ ID NO: 264539 - protein, 531 aa, Zea mays
  Clone ID: MRT4577_172872C.1.pep
MVQGEESSWRMERAALPLNQLALAYGVQAHAAAAAAAAAPPTCFLDFQPAAASAAYFGFGELEEALIHGGGAASAGGGVDPGVIIKNDVAQAKSAAAAAGYLAGAGTGRPPTLEIFPSLPMRHQQQLHSGNSQSVGSTGTDSSSAQNTMSQMELASPAASSAPRQEAMMVTADGYSYKPGLAAAAAGAAPPSFQFQQQHQHHHPLPLHGDGGGDHDKCHSHVQRKHGSTGKDGKLVDAKAYVQQLETTRIRLQHVEHEFQRARSHSQGVGVGGCGAAGDMSCGAAMFDMEYARWLDDDSKRLAELRGGLQAHLLLDANLGLIVEECMQHHDELFQLKAALARSDVFHLLTGSWTTPAERCFFWMGGFRPSELLKVLIPQLDPLTEQQLLGICSLQQSSEQAEEALAQGLHQLHQALADTVAAGTLNEGSAAPNCMNIMAVALDKIASLENFYQQADNLRQQTLHQMRRILTTRQAARCFLSIGEYYSRLRALSNLWASRPRDNFIGTESLSPTATELQALHHQQQNQFAGF

SEQ ID NO: 264540 - protein, 68 aa, Zea mays
  Clone ID: MRT4577_172873C.1.pep
RLPVRPDPVVAAVRVPVGLSSPKLGDKGMPVRHHHRGPTGRTPEHGSWDTSPCLKNALPQGASARVSS

SEQ ID NO: 264541 - protein, 96 aa, Zea mays
  Clone ID: MRT4577_172874C.1.pep
HAIACDSLLTIKQVSSYYLLKKKKKKKKKKKKKKKKKKNEKKKQKKKNKKKKKRKIKAWILAGRAVPRGNFKKIQLPGGPHRAGMERPQFALNKSL

SEQ ID NO: 264542 - protein, 147 aa, Zea mays
  unsure (1)..(147): unsure at all Xaa locations
  Clone ID: MRT4577_172875C.1.pep
GGGGGCFFFFVGFFFFFFFFLGEKTGPGKKTSIYSPQTTGLDVKTLNNNGGGGEVXXPYKHXAKQKTQTGGDYPTRQHNTNTDGELASHPRGKKKKKKHRPAGXGIKRDGLTKYLTGSDGPNAEGAPEGVGVLEGDGLPGPERPTPL

SEQ ID NO: 264543 - protein, 130 aa, Zea mays
  unsure (1)..(130): unsure at all Xaa locations
  Clone ID: MRT4577_172876C.1.pep
SRVRLIALIWGYDLFLFMGLIIAVVNXDRTIMTICKDRHKPAALLDRCNLTEIPATGIVLGSYLTLMTGIFFWAMHKTHFLSDKFCVRPIRDREHDMISVLDLQGRFGSQAVIVGTACRSXCFVERHGLL

SEQ ID NO: 264544 - protein, 69 aa, Zea mays
  Clone ID: MRT4577_172877C.1.pep
VHVLGNLMSRLSLDIEGANKLLGGGNLLHSLISLNRALKLNTNILFGGAMNLHGLPKSELGGLGFLHLA

SEQ ID NO: 264545 - protein, 79 aa, Zea mays
  Clone ID: MRT4577_172878C.1.pep
TFMFILHTEGNLIYNFAAVLRSNLNQGFRSDITSSSSCPLKQPRATPSEETETGVKVDRWAEWGIEDLSGSGESLRRRL

SEQ ID NO: 264546 - protein, 124 aa, Zea mays
  Clone ID: MRT4577_172879C.1.pep
MASASLPPRASLVLARWSRWVWAAWTGWPSSPRRLGAELNDRVKLRQSRSRTDPPALITRRRLTRRHPTLSPRHLFPNGFAATAAGARAEFLALGTPLCGIKPQRFAVASPCFLHRLDLAQALT

SEQ ID NO: 264547 - protein, 357 aa, Zea mays
  Clone ID: MRT4577_17287C.1.pep
MAAQEEKTAVAAAADVAAEEPAPAPEQQPQPAGAARRAGPSAPGGAPPNPFDFSTMMNLLNDPSIKEMAEQIAKDPAFTEMAEQLQKTVVSPRQQQQQQARQQQQQLDPQKYVATMQQLMQNPQFVAMAERLGSALMQDPAMSAMLGGLTNPAHKEQLEARVARMKEDPTLKPILDEIESGGPAAMMKYWNDPEALQKFGRAMGVGVGPSGEAGGAEHAEAEDDAGEEGEYEDESIVHHTASVGDVEGLKKALENGADKDEEDSEGRRGLHFACGYGELQCAQALLEAGAAVDAVDKNKNTALHYAAGYGRKDCVALLLESGAAVTLQNLDGKTPIDVAKLNNQDDVLKLLEKHAFV

SEQ ID NO: 264548 - protein, 145 aa, Zea mays
  Clone ID: MRT4577_172880C.1.pep
TQKKNKRVFFPGKFRNSPPQLGGPKREKKTAFSPPFFKKGGVSIVLGETKGRPREGVLSKKFGEGTFFFFLKIPPWGGEPIQTTINGGGRGFAPPFLGTKRFFKKGLGSKIGKNGPLRPQIYFGGGDFIKKGGVLKKKNFVSKNP

SEQ ID NO: 264549 - protein, 186 aa, Zea mays
  Clone ID: MRT4577_172881C.1.pep
MSTEQKTPVNPMRNLRIEKLVLNISVGESGDRLTRAAKVLEQLTGQTPVYSKARYTVRSFSIRRNEKIAVHVTVRGPKAEEILERGLKVKEYELKARNFSETGNFGFGIDEHIDLGIKYDPSIGIYGMDYYVVMGRPGYRVSRRKHCKSTVGVTHRIKKEESIEWFKNRFDGVVSNKAIINKNFLY

SEQ ID NO: 264550 - protein, 293 aa, Zea mays
  unsure (1)..(293): unsure at all Xaa locations
  Clone ID: MRT4577_172882C.1.pep
MEFEDRCHKVQEPKFDCLLFDLDDTLYPLSSGIADHVKKNIEDYMVEKLGIDESKIENLGNLLYKNYGTTMAGLRAIGYSFDYDEYHAFVHGRLPYDNIKPDPVLKHILKNLPIRKLIFTNGDKVHAVRALERLGLEDCFEGIICFETLNPPCPPQGDREAEIFDIAGHFARSXPAAELPKTPVLCKPNXTSMEGALRIANVNPHLDHLPDESFTXDLLQIFFDDSVRNIQAGKQIGLHTVLVGKSQRVKGADHALESIHNIREALPELWEEAEKAEDVLYPERVAMETSVTA

SEQ ID NO: 264551 - protein, 213 aa, Zea mays
  unsure (1)..(213): unsure at all Xaa locations
  Clone ID: MRT4577_172883C.1.pep
MEFEDRCHKVQEPKFDCLLFDLDDTLYPLSAGIAGHVKKNIEDYMVEKLGIDETKIENLGNLLYKNYGTTMAGLRAIGYSFDYDEYHAFVHGRLPYDNIKPDPILKHILKNLRIRKLGDQEPEIFDIAGHFARSGTADELPKTPVLCKPNVDAMEEALRIANVNPHKAIFFDDSVRNIQAGKQIGLHTVLVGKSQRVKGADHALESIXNIREA

SEQ ID NO: 264552 - protein, 228 aa, Zea mays
  Clone ID: MRT4577_172884C.1.pep
MEFEDRCHKVQEPKFDCLLFDLDDTLYPLSAGIAGHVKKNIEDYMVEKLGIDETKIENLGNLLYKNYGTTMAGLRAIGYSFDYDEYHAFVHGRLPYDNIKPDPILKHILKNLRIRKLIFTNGDMVHAVRALKRLGLEDCFEGIICFETLNPPCPPQGDQEPEIFDIAGHFARSGTADELPKTPVLCKPNVDAMEEALRIANVNPHKAIFFDDSVRNIQAGTMETSVTA

SEQ ID NO: 264553 - protein, 280 aa, Zea mays
  Clone ID: MRT4577_172885C.1.pep
MEFEDRCHKVQEPKFDCLLFDLDDTLYPLSSGIAGHVKKNIEDYMVEKLGIDESKIENLGNLLYKNYGTTMAGLRAIGYSFDYDEYHAFVHGRLPYDNIKPDPVLKHILKNLPIRKLIFTNGDKVHAVRALERLGLEDCFEGIICFETLNPPCPPQGDREPEIFDIAGHFARSGAAAELPKTPVLCKPNVDAMEEALRIANVNPHKAIFFDDSVRNIQAGKQIGLHTVLVGKSQRVKGADHALESIHNVREALPGLWEEAEKAEDVLYAERVAMETSVTA

SEQ ID NO: 264554 - protein, 166 aa, Zea mays
  unsure (1)..(166): unsure at all Xaa locations
  Clone ID: MRT4577_172886C.1.pep
MGYINIGINRFGMIGRLGASVALQNQDVELFAVNDDFFPTEYMIYMYKDDTAHEHCKAIDITLDDSKTLLYIDEAATHISIRNADEMPRGRAGAENGEEFTXVFTDKEXSAALLNGEALQVATSVRRIHAXPRVAVCVNDDKNTMDXVNIVSHAXCSSKCLAPLDK

SEQ ID NO: 264555 - protein, 280 aa, Zea mays
  Clone ID: MRT4577_172887C.1.pep
MEFEDRCHKVQEPKFDCLLFDLDDTLYPLSAGIAGHVKKNIEDYMVEKLGIDETKIENLGNLLYKNYGTTMAGLRAIGYSFDYDEYHAFVHGRLPYDNIKPDPILKHILKNLRIRKLIFTNGDMVHAVRALKRLGLEDCFEGIICFETLNPPCPPQGDQEPEIFDIAGHFARSGTADELPKTPVLCKPNVDAMEEALRIANVNPHKAIFFDDSVRNIQAGKQIGLHTVLVGKSQRVKGADHALESIHNIREALPELWEEAEKAEDVLYPERVAMETSVTA

SEQ ID NO: 264556 - protein, 72 aa, Zea mays
  Clone ID: MRT4577_172888C.1.pep
PWVGAALMNGRSTSPHKAAEQHGLDHLHRSRTRRLGHFLTRASSGSSALSPRTWLHTPSSTSPYPRAALASA

SEQ ID NO: 264557 - protein, 76 aa, Zea mays
  Clone ID: MRT4577_172889C.1.pep
YMNTSASLDLENVEFEFPLGSRSHCLRDRHRPNTNTSNSYIYNERFRILDHVKCGIRIAIRISDLMASGYTICLIR

SEQ ID NO: 264558 - protein, 92 aa, Zea mays
  Clone ID: MRT4577_17288C.1.pep
VRESLATNVGRLDEEAKDCAPGTPSLKTRTSSMTATRTATSCGPWRTTPAPMMKETASVVVLVSRAVCFSLKKYLYYLALAQRFEMRLWHEL

SEQ ID NO: 264559 - protein, 197 aa, Zea mays
  unsure (1)..(197): unsure at all Xaa locations
  Clone ID: MRT4577_172890C.1.pep
MEFEDRCHKVQEPKFDCLLFDLDDTLYPLSSGIAGHVKKNIEDYMVEKLGIDESKIENLGNLLYKNYGTTMAGLRAIGYSFDYDEYHAFVHGRLPYDNIKPDPVLKHILKNLPIRKLIFTNGDKVHAVRALERLGLEDCFEGIICFETLNPPCPPQGDREAEIFDIAGHFVRSGAXXELPKTPVLCKPNVDAMGEAL

SEQ ID NO: 264560 - protein, 280 aa, Zea mays
  Clone ID: MRT4577_172891C.1.pep
MEFEDRCHKVQEPKFDCLLFDLDDTLYPLSSGIADHVKKNIEDYMVEKLGIDESKIENLGNLLYKNYGTTMAGLRAIGYSFDYDEYHAFVHGRLPYDNIKPDPVLKHILKNLPIRKLIFTNGDKVHAVRALERLGLEDCFEGIICFETLNPPCPPQGDREAEIFDIAGHFARSGAAAELPKTPVLCKPNVDAMEEALRIANVNPHKAIFFDDSVRNIQAGKQIGLHTVLVGKSQRVKGADHALESIHNVREALPGLWEEAEKAEDVLYAERVAMETSVTA

SEQ ID NO: 264561 - protein, 280 aa, Zea mays
  Clone ID: MRT4577_172892C.1.pep
MEFEDRCHKVQEPKFDCLLFDLDDTLYPLSAGIAGHVKKNIEDYMVEKLGIDETKIENLGNLLYKNYGTTMAGLRAIGYSFDYDEYHAFVHGRLPYDNIKPDPILKHILKNLRIRKLIFTNGDMVHAVRALKRLGLEDCFEGIICFETLNPPCPPQGDQEPEIFDIADHFARSGTADELPKTPVLCKPNVDAMEEALRIANVNPHKAIFFDDSVRNIQAGKQIGLHTVLVGKSQRVKGADHALESIHNIREALPELWEEAEKAEDVLYPERVAMETSVTA

SEQ ID NO: 264562 - protein, 56 aa, Zea mays
  Clone ID: MRT4577_172893C.1.pep
SFTSQLSNKLADDTITYTAPKRKGSQPDYHQMFNTLTNYHYDETYYCINHPLNMGK

SEQ ID NO: 264563 - protein, 332 aa, Zea mays
  unsure (1)..(332): unsure at all Xaa locations
  Clone ID: MRT4577_172894C.1.pep
AASSLFTTLLTHGARSWVLTRFEDRCHKVQEPKFDCLLFDLDDTLYPLSSGIAGHVKKNIEDYMVEKLGIDESKIENLGNLLYKNYGTTMAGLRAIGYSFDYDEYHAFVHGRLPYDNIKPDPVLKHILKNLRIRKLVSVLLTQTTRISPPSDKDRVAEPYDTCGVVXFQIFTNGDKVHAVRALERLGLEDCFEGIICFETLNPPCPPQGDREPEIFDIAGHFARSGAAAELPKTPVLCKPNVDAMEEALRIANVNPHKAIFFDDSVRNIQAGKQIGLHTVLVGKSQRVKGADHALESIHNVREALPGLWEEAEKAEDVLYAERVAMETSVTA

SEQ ID NO: 264564 - protein, 76 aa, Zea mays
  Clone ID: MRT4577_172895C.1.pep
LEALLVPSALYTFEAAHPPRPCRATGRTAAAPCYSRTDKECNTTMLDPLTSRGVHQPPTALTMTAAQQSVIYQNND

SEQ ID NO: 264565 - protein, 70 aa, Zea mays
  unsure (1)..(70): unsure at all Xaa locations
  Clone ID: MRT4577_172896C.1.pep
LXNXEDYNKFYXAFSXNLKLGXHXDSQNXTNIXXLLXYHSTKXXDXXTSLKXYVTRXKXXQXDXYXITGE

SEQ ID NO: 264566 - protein, 73 aa, Zea mays
  Clone ID: MRT4577_172897C.1.pep
GGGFFFFFFFFFFFFFFFLTPTHCFPFLFWGLGGPCGVFFRSRGSKNWGTKEKQGQLVHFYRWGAIGINIINI

SEQ ID NO: 264567 - protein, 195 aa, Zea mays
  unsure (1)..(195): unsure at all Xaa locations
  Clone ID: MRT4577_172898C.1.pep
VVPQAALRLAXERGARAPRMRWTTSLHARFVHAVELLGGHERATPKSVLELMDVKDLTLAHVKSHLQMYRTIKTTDHKPANSASSYGQAAAAKPVIDIPDPDDDSLFDLITTSAGSDQSSSSAQHSNPDGGGGNEHGSSMCALWCSSSTSISRGGWFHDRPRDDDAATPGPGDDIKSFEDVQSHSLLDDVADLNS

SEQ ID NO: 264568 - protein, 96 aa, Zea mays
  Clone ID: MRT4577_172899C.1.pep
LAGWTYCVNRRPFRVPLGCILCASSSSISKWRGGICISLWPNIWLKWHVLTMLASPPVFMNLDISACGNHSPFPLYLLVYGIHCVYIACQIVLVSI

SEQ ID NO: 264569 - protein, 104 aa, Zea mays
  Clone ID: MRT4577_17289C.1.pep
LPTRGNGCGECDQRHHREKMVVTRPVSLWLGSSNALLLPAGDHASHQTLEICTTMLDMHALRSLAIECKLTMLHAEFPLWFSTLLQSFKWFLCVVMRWRCGAFF

SEQ ID NO: 264570 - protein, 63 aa, Zea mays
  Clone ID: MRT4577_1728C.1.pep
SCSVFRATSWSIGPCCERCACTCRSEWCSLSSWFRHVRYIGWFAPIARPAMSVAACARVWSAS

SEQ ID NO: 264571 - protein, 144 aa, Zea mays
  unsure (1)..(144): unsure at all Xaa locations
  Clone ID: MRT4577_172900C.1.pep
HVRIHCRLLTPPLLSYCLPLFLSPAPTNQWRLSRSPHPPKGAPPALPSGRANPRRQIRCGPIRAFSASGVSGKDNTHRDSEIRRPQDPFFRLSSLPIHTRNLLRDXRCTLVVQVPAWSALSNARVTIFGDVYLFPAVQRSLILY

SEQ ID NO: 264572 - protein, 83 aa, Zea mays
  Clone ID: MRT4577_172901C.1.pep
RWCEPTALTAIIAQGNQLVARRPTDGSLGAGAHVLLCGPVLLGRAGGGGGSARRPRGEEAVDAQGGGGLAGAAERANWHVEHG

SEQ ID NO: 264573 - protein, 139 aa, Zea mays
  unsure (1)..(139): unsure at all Xaa locations
  Clone ID: MRT4577_172902C.1.pep
FCVRTVVEVGRRLDGTSVYRMKEDALSTXKNMGEVEYLYGEKRDFVQNEDGTKVKYKEWNPVXRASMAAAGLGCVDNIWIDTGTLEMYIGDVLCTTVCDVFRIVWSVSLVYASRLSNMSGRDLVLIAKMMSYVIAIIDD

SEQ ID NO: 264574 - protein, 81 aa, Zea mays
  unsure (1)..(81): unsure at all Xaa locations
  Clone ID: MRT4577_172903C.1.pep
RWIMVRSRSHKLKGYTSINHRTISKWCFVSNEVPARKWDIIVCFSSLKYCERPNQYVLGDKMKSSDFLYCDLDGXDHPPRL

SEQ ID NO: 264575 - protein, 74 aa, Zea mays
  Clone ID: MRT4577_172904C.1.pep
KCTIEVQLTLFTINIFLLCKRISTQEMVLQLPLVTKDDIVPFDVPKRQHKTIKELLEFDPYTIPVTYIFYKIQQ

SEQ ID NO: 264576 - protein, 65 aa, Zea mays
  Clone ID: MRT4577_172905C.1.pep
APPRLKLTGGNKHACYPKPHATPTGGARTHNRTMPTTPRRQGKKKDWSLTQGAGKNPIRRRRLTP

SEQ ID NO: 264577 - protein, 210 aa, Zea mays
  unsure (1)..(210): unsure at all Xaa locations
  Clone ID: MRT4577_172906C.1.pep
RRVRGRRRPPLRPLPAGGPGGLLLPPQISGRAVARVRRVQRSAVHARARPWRRQGLRLSWNLLGPPXKTFAHGTQRCIPRDSLDEHIVIHMDGVNILAVNYGSVDGCQYPRPMKLPSKWTFSSYTILKTAEQAPRTPSFADQLIEADNGLGEVMKPPEKSFWAKYWMYIIPLGLIVMNAVTAAANIPEEAAGQGQPGAQRAPAAVAGRRR

SEQ ID NO: 264578 - protein, 103 aa, Zea mays
  unsure (1)..(103): unsure at all Xaa locations
  Clone ID: MRT4577_172907C.1.pep
HAFELPLTLENPSQNVADLGIAFEITVMNTDTNDPAXLIAHIIDDVADDGLPVGRSARTPPLTISLQMVKQLANKIAANIDHGIDHGDLPCDQHFMNCFQNCM

SEQ ID NO: 264579 - protein, 297 aa, Zea mays
  Clone ID: MRT4577_172908C.1.pep
MAPPRRALLVLAALLLSLSLGAASFHSDELLLNDDEEFEGVVARPSAPSPPAAPVVSSSRRRSADAPLPGSGESNAVQFTLEHDLGDGKGFVSAGTFSARLKTFAHGTQTLTKLRFTRNDFTEDDKAAFKKVLQEDGFYTIRLPSNVLDTTKKHHVVSSIRARCIPRDSLDEHIVIHMDGVNILAVNYGSVDGCQYPRPMKLPSKWTFSSYTILKTAEQAPRTPSFADQLIEADNGLGEVMKPPEKSFWAKYWMYIIPLGLIVMNAVTAAANIPEEAAGQGQPGAQRAPAAVAGRRR

SEQ ID NO: 264580 - protein, 49 aa, Zea mays
  Clone ID: MRT4577_172909C.1.pep
MANNGAVGRKAGGPSMKSESQTVKARLHIFGMDIGLYLMNGRYVSSVHT

SEQ ID NO: 264581 - protein, 48 aa, Zea mays
  Clone ID: MRT4577_17290C.1.pep
YPAQGLLYLYADQLIKNTFANSCLIDRQNTRKYRHYWTSSGMSLNQNA

SEQ ID NO: 264582 - protein, 40 aa, Zea mays
  Clone ID: MRT4577_172910C.1.pep
FSCTSFNFFFLGIFRKTIHKIPQAIIKVIIALPTAEPTII

SEQ ID NO: 264583 - protein, 782 aa, Zea mays
  unsure (1)..(782): unsure at all Xaa locations
  Clone ID: MRT4577_172911C.1.pep
VVSISEHASVNEKQAENSSSVMCKLGSQSTDPNSAANEAMTETETGDPFMIFSEVQMLIPICLTLTLNPAENIQDANMEEQQSSLVDGLKTPTTVAGMSNHEHQSVDNHVVQNLIRQXXXTEDQESTTVECLSDIAPNNHNGATNSFKEEKEASEQHLQANEIESFRTNNVARPVENGNVGMYEVTPRQDDGDVNAGANPTDEHLKKSRTYLLLLAILAVSLAYQSGLNPPGGFWTQRGTNNSPKSTHHRPYHLPGDPILEDTRHRRYIAFFYLNAIAFVASLVMIIMLLNRRMSYKGIKRYALQMAMIVDLLALTGSYIMGSSRGTKSSIYIWLLVCLVLVYVAVHVLIATHVIPEGCKKVVAQKIENFSCRYIWTKASFRNRGIDGNGSDCEAGQSQRSDADDKTWERRRNLLLMLAVLAATVTYQAGINPPGGVWSDDSSASGKPGDPILQHNNSKRYDVFYYSNSLSFVASVVITILLVNKESCEHGIKSYALRVCLVVGLVSLLIAYSAGSSRKARESIYLIVIAVAVLIALVIQVLLLSCTQDSLRGPTGQFIERLLQLLFGTDKAWHGDTSKQKESSGRPEKKVRKRHKYLMLLAVLAASITYQAGLNPPGGFWSDDNEGHVEGNPGLKPPGALWSDNKGHLAGNPVLLDINPRRYEIFFCFNSISFMASIVVVMFLLNKSARKKAVPLEVLHLIMILDLLALMTAFAAGSCRKFRTSVYVYGLVLGVVVYLVIAVLLSSGIAKCLRPMDRNRVSSQRSPIRAPTASTRILGDHA

SEQ ID NO: 264584 - protein, 87 aa, Zea mays
  Clone ID: MRT4577_172912C.1.pep
GLYSLFLFKSVSSFAFIITPSRSSVSHSFSFCTHHLRLISSYLTCLSCLAEGVFVLRTFGGGEDPQQVLLLGVAQRMRMTYGSKLKS

SEQ ID NO: 264585 - protein, 92 aa, Zea mays
  Clone ID: MRT4577_172913C.1.pep
GRPQVRLGRCHPCHLKRQPRLPPQMINASPAHTLKRPMLAILKLVGSQAMHYTCMHWTGIYICAIKRMTPVMQAPHIIVSPSFSIFFMSTHS

SEQ ID NO: 264586 - protein, 74 aa, Zea mays
  Clone ID: MRT4577_172914C.1.pep
LNICHRAIKGWHPILWARPTPTQLQTTAHLSKTILVFVTPPSMMLFTFVRLYNKHNLHDMAGMNAQSTQAPNPS

SEQ ID NO: 264587 - protein, 60 aa, Zea mays
  Clone ID: MRT4577_172915C.1.pep
LPLPLPPGPAAAFFVSCCGAVAGLSPPLCRAVIACPRAVPAPPNAFLLARSVLRRWLSSL

SEQ ID NO: 264588 - protein, 124 aa, Zea mays
  unsure (1)..(124): unsure at all Xaa locations
  Clone ID: MRT4577_172916C.1.pep
GSDAGKHNILPLIAAKIFCFLVRPFLSSSVSTTTIFPQCSQAPIASLFPPYLSPSVSSMCENPIVQPYRIQHAIXTGILPLSPLFLQQPSSLXLHQLPLVHFVXQNNLSQQLQQLLLSNLSLYS

SEQ ID NO: 264589 - protein, 92 aa, Zea mays
  unsure (1)..(92): unsure at all Xaa locations
  Clone ID: MRT4577_172917C.1.pep
GKQHGSXAGWGGESYIAEKVWIQNEVKMMVAIPKADDSQEFLCWSKRRAASTGKGSLGRAERLKAGRNLDMATGQGGFSGYALAPVLSSTTT

SEQ ID NO: 264590 - protein, 105 aa, Zea mays
  unsure (1)..(105): unsure at all Xaa locations
  Clone ID: MRT4577_172918C.1.pep
LAGPTRPGCFKRDRRAPQGPVQYGLAARPWTERLDLPHHNEHICSLTVNGADHGLRPAVDCSTFTXHRAGAPPTDRASRLPGRPYTPASPGPDLLGPGGPGEVQP

SEQ ID NO: 264591 - protein, 104 aa, Zea mays
  Clone ID: MRT4577_172919C.1.pep
PSFHTHTPPKRSYHNFELLDRIRSPITRDFGLVCAATSSVYCRARNSGSTTESSPGRGPHAAATCSAPLRSPVHHPSIIIILRWTHSPTSTVISIVVQFRIRFD

SEQ ID NO: 264592 - protein, 33 aa, Zea mays
  Clone ID: MRT4577_17291C.1.pep
HLPPFPRLASPSTSMLPKPPPSPSPTFLTPQPS

SEQ ID NO: 264593 - protein, 91 aa, Zea mays
  unsure (1)..(91): unsure at all Xaa locations
  Clone ID: MRT4577_172920C.1.pep
IFRRIXPSANIFYSGSHYLSVPCFFYSHDSDSMSIKEIVTIQRSRRLFYGSRAVSSFWEHCINKHPRKSYASTPCAFLCIQLDIYILLNFL

SEQ ID NO: 264594 - protein, 57 aa, Zea mays
  Clone ID: MRT4577_172921C.1.pep
MGSETETVNVEGIPFPAEITVGNPLSLLATGITDIEIHFLQIKYNAIGVYLHNAVAA

SEQ ID NO: 264595 - protein, 227 aa, Zea mays
  Clone ID: MRT4577_172922C.1.pep
MGSETETVNVEGIPFPAEITVGNPLSLLATGITDIEIHFLQIKYNAIGVYLHNAGGGDSTTPTLLGHLGAWKGKTAEELLADAAFWAALVAAPVEKLFRVVVIKEIKGSQYGVQLESSVRDRLAAADLYEDEEEEALEKVADLVQSKYFNPGSVVSFHFPAPASASPGPAAEITFATEGKGDARIAVENGNVAGMIQTWYLGGDSAVSPSTVRSLADRFAALLAVAA

SEQ ID NO: 264596 - protein, 112 aa, Zea mays
  unsure (1)..(112): unsure at all Xaa locations
  Clone ID: MRT4577_172923C.1.pep
MGSETETVNVEGIPFPAEITVGNPLSLLGTGITDIEIHFLQIKYNAIGVYLRNAGGGDSTTLLGHLGAWKGKTAEELLGXRXLWXGCVAAPVEKLXRVVVIKEIKGSQYGVQ

SEQ ID NO: 264597 - protein, 227 aa, Zea mays
  Clone ID: MRT4577_172924C.1.pep
MGSETETVNVEGIPFPAEITVGNPLSLLGTGITDIEIHFLQIKYNAIGVYLHNAGGGDSTTPTLLGHLGAWKGKTAEELLADAAFWAALVAAPVEKLFRVVVIKEIKGSQYGVQLESSVRDRLAAADLYEDDEEEALEKVADFFQSKYFKPGSVVTFHFPAPASASPGPAAEITFATEGKGDARIAVENGNVAGMIQTWYLAGDSAVSPSTVRSLADRFAALLAVAA

SEQ ID NO: 264598 - protein, 50 aa, Zea mays
  Clone ID: MRT4577_172925C.1.pep
HSIVQGKRIRSCCFVLDPVFLCFLAYLITAMTKLAPQLSLCFSFIDGWIK

SEQ ID NO: 264599 - protein, 80 aa, Zea mays
  unsure (1)..(80): unsure at all Xaa locations
  Clone ID: MRT4577_172926C.1.pep
RPLNLASIGPNSPFGXSSFTXLAVVLPLSNWXNPGPSQFNGFAANTPFPICLLIKKARSIDISHPLNILINEWTRPVPGH

SEQ ID NO: 264600 - protein, 330 aa, Zea mays
  unsure (1)..(330): unsure at all Xaa locations
  Clone ID: MRT4577_172927C.1.pep
MVIDPSHSPQLPCSLPCLSSYLTSPPPATTKHTPGTTIHPRALNLASSSSPTSRHRQQHRSDRSSTARVTASSSVFFLACSPAYLSVPHSRPLPYVRASNTHQVKMGSETETVNVEGIPFPAEITVGNPLSLLATGITDIEIHFLQIKYNAIGVYLHNAGGGDSTTLLGHLGAWKGKTAEELLADTAFWAALVAAPVEKLFRVVVIKEIKGSQYGVQLESSVRDRLAAADLYEDEEEEALEKVADFFQSKYFKPGSVVTFHFPAXPPPPRDPAAEITFATEGKGDARIAVENGNVAGMIQTWYLGGDSAVSPSTVRSLADRFAALLAVAA

SEQ ID NO: 264601 - protein, 64 aa, Zea mays
  Clone ID: MRT4577_172928C.1.pep
MAYCCDDGCNCPPDCGCPCDCCNLYPEVETAAASGILAAPTTKASAGGCNTCKCGGTSCNCNCS

SEQ ID NO: 264602 - protein, 227 aa, Zea mays
  Clone ID: MRT4577_172929C.1.pep
MGSETETVNVEGIPFPAEITVGNPLSLLGTGITDIEIHFLQIKYNAIGVYLHNAGGGDSTTPTLLGHLGAWKGKTAEELLADAAFWAALVAAPVEKLFRVVVIKEIKGSQYGVQLESSVRDRLAAADLYEDDEEEALEKVADFFQSKYFKPGSVVTFHFPAPASASPGPAAEITFATEGKGDARIAVENGNVAGMIQTWYLGGDSAVSPSTVRSLANRFAALLAVAA

SEQ ID NO: 264603 - protein, 93 aa, Zea mays
  Clone ID: MRT4577_17292C.1.pep
SSTYYYSHSMTILFFDRTSMLHHIKEEGHHTANWLQKLRRDRCAVCVDAWWPEHRLASDATSRVLRLDLGLHTSHTARPARYLSSSRSAPRRR

SEQ ID NO: 264604 - protein, 119 aa, Zea mays
  Clone ID: MRT4577_172930C.1.pep
YYTGILQDCGLTLLSSGFTKNTCLGHTTFLSGLLCEREQDKTEMPSYCEHDWVHLHSSYYTTHDALALTYLQHMDKEYLSRYLSDLLRSRSSEIRKCFSMTNAIHETVHDSLIPNHEIS

SEQ ID NO: 264605 - protein, 42 aa, Zea mays
  unsure (1)..(42): unsure at all Xaa locations
  Clone ID: MRT4577_172931C.1.pep
MTLYQYHNLFHGMRESVADAAGGAHLELARGAQVTEQPSKRX

SEQ ID NO: 264606 - protein, 205 aa, Zea mays
  unsure (1)..(205): unsure at all Xaa locations
  Clone ID: MRT4577_172932C.1.pep
PPPCACRSLQPAQPLHRPHRCCPLRDTHPSSTISASSDVLYEEHDDLYGRLKLLDGLLELVQIQNEDVKDKQKNLKRELLLDEDEDMMNPSIXIVFGQCMEMVDGNDAIVLYTTVMNYYVRILSTIDRELLIPASCVTLHRHSNALNDVLPTEDDSSISLLXDVEXPLVSYNDIGRCHIQKPEIPDAFEIPLTHHEMYNQIGIDP

SEQ ID NO: 264607 - protein, 53 aa, Zea mays
  unsure (1)..(53): unsure at all Xaa locations
  Clone ID: MRT4577_172933C.1.pep
YFGGLDWSVRCFYHCHFSPCWTFSSSIECTRVLIAFYQMFSHMLLTTXXHLGF

SEQ ID NO: 264608 - protein, 240 aa, Zea mays
  Clone ID: MRT4577_172934C.1.pep
RPMVFLSGVPGSFYGRLFPRTSVHFICSCSSLHWLSQVPPGLFDETDNRPVNKGKMYISSTSPAAVPLAYLRQFRRDFGVFLRSRAAEVVPGGRMVLAMLGRQTEGYVDRRTTFLWELLSESFAALVSQGLVEQEKVDAYNVPFYAPSVREVEEEVRREGSFRLDHVQTYEINLSSSGDAKEDGRTVSMAIRAIQESMLSHHFGTDIVDALFHRYTELVTESMEREDVKSVQIGVVLTRL

SEQ ID NO: 264609 - protein, 221 aa, Zea mays
  unsure (1)..(221): unsure at all Xaa locations
  Clone ID: MRT4577_172935C.1.pep
MKFGKGARNGLLPSSLRIISSCLKTVTSNAGSVASTVRSAGASVAASISSPSEDEKDQVLWAGFDKLELQPSSFKHVLLVGYSNGFQVLDVEDAANVCELVSKRDGPVTFLQMQPTPVSSEGIEGFRASHPMLLVVAGDETNGLGAVQGGRLSALIRDTNSEPQAGSCISTPTVVRFYSLKSHTYVHVLRFRSAVYLVRCSPRIVAVALAAQIYCFDAXTL

SEQ ID NO: 264610 - protein, 84 aa, Zea mays
  Clone ID: MRT4577_172936C.1.pep
GQGCCFRKKKLLSQGLCVLYVVGPEASVPFSVVRFAARFKRDLKIFIPLRGQKKKAGIFGFKKKKKKKKKKKKKKKKKKKKKTD

SEQ ID NO: 264611 - protein, 218 aa, Zea mays
  Clone ID: MRT4577_172937C.1.pep
QPNLPNTIHERKGREGRLGGAPRPWLWTPTAAATPSSAIPSFPSRSPASSSRILSPASPTTLGGPCTAEAPGDGDPRSSSWSNASAAASVNAWSGTACIMPLLGAFLADAYLGRYRSVIIACTLYVLGYGMLTLSATVPALQPSHMPCREDGVSSSSCQPGWPQVAFFYVSLYLIAIAQGADKPCGLAFAADQFDAEHQGERASRGSYSNWWFFCMAS

SEQ ID NO: 264612 - protein, 64 aa, Zea mays
  Clone ID: MRT4577_172938C.1.pep
QLETERQEIDGLRDELQSLKAKTQASDETIAKQSDDVADLKKSIAENNSLLRQILSINRSQVSP

SEQ ID NO: 264613 - protein, 549 aa, Zea mays
  Clone ID: MRT4577_172939C.1.pep
MDPNGGGDTILGDPLLPLSQSSKQQQDPLAGVSDYLGRSVHRGSSGGWRSALFVVGVEIAGSFAYFGISANLITYLTGPLGQSNASAAASVNAWSGTACIMPLLGAFLADAYLGRYRSVIIACTLYVLGYGMLTLSATVPALQPSHMPCREDGVSSSSCQPGWPQVAFFYVPLYLIAIAQGADKPCGLAFAADQFDAEHQGERASRGSLFNWWFFCMAIGISVSVSVVGYIQEYVGWGLGFGVPCAIVLCAFLVFLLGTPTYRLYAPTPEAKSPFRRLARGLAANANKTGGLSASHSEEEEAAADARCVLRLLPIWAASLAYGVVYAQIMTLFNKQGRTLDRHIGDGLELPPAALQTLGPASILLFVPVYDRAVVPALRWATGNPSGLSMLQRVGAGMAVSLAGVAVAALVEARRLAMAREHGLVDDPSATVPMSWAWIVPQYAMMGVADVLAVVGLQELFYDQMPDGLRSLGLALYLSVMGIGGFISSLLISLIDGVTGSGGGDSWFADNLNRAHVDYFYWLLAGLSAVELALFLYFARSYVYKHKPN

SEQ ID NO: 264614 - protein, 47 aa, Zea mays
  Clone ID: MRT4577_17293C.1.pep
SKGQYPEVWAFRAGPQSEVLGDVHTYQELQYLPVRDFGYLAAVCLGW

SEQ ID NO: 264615 - protein, 96 aa, Zea mays
  unsure (1)..(96): unsure at all Xaa locations
  Clone ID: MRT4577_172940C.1.pep
ALAHKRSVQQANLSRDRDSRKVPNLKTGVSSILNAQPGAEANDPXLESXLASWPPHGEPEDKQAESHEPEYEKLLCSPLFMPPGCQRPPPRSAQGR

SEQ ID NO: 264616 - protein, 31 aa, Zea mays
  Clone ID: MRT4577_172941C.1.pep
GSLMFSVYGRLPLLLRKLSLWIYSTFKRNAV

SEQ ID NO: 264617 - protein, 70 aa, Zea mays
  Clone ID: MRT4577_172942C.1.pep
LERNPDTMVTHVPGKKSVLREFPAPVIASLYPISMEEASKLKNGRKHKLAVFTPAGRGSYQKGQAGSAQQ

SEQ ID NO: 264618 - protein, 230 aa, Zea mays
  Clone ID: MRT4577_172943C.1.pep
MAVPAPAKAARLLAASAAVLVLLWCVHFRGGLSFGSPTNKGLIFNVHPVLMLIGFIILGSEAIMSYKIWPWSHDTNKMVHMLLHAVALFLGSVGIYAAFKFHNESGIDNLYSLHSWVGLGTICLYGIQWLFGVATFFFPGASPTVRRRMLPWHTRAGLVVYILALLASELGFLEKLTFLQAAGLGRYSSEALLVNFTALVILLLGASVVLYVTAPMHNEHAHGYSAVHKP

SEQ ID NO: 264619 - protein, 89 aa, Zea mays
  Clone ID: MRT4577_172944C.1.pep
REHRERSGGLGRRRRRLRSSPPFSTRVQIPGKLRVVRDLGRPLAWELAGLAGNFSLSLKVRRRPHHNVAGNLRTINTVERLRGSEESPW

SEQ ID NO: 264620 - protein, 22 aa, Zea mays
  Clone ID: MRT4577_172945C.1.pep
MTDPEKLFELYSYAHNQQEKVK

SEQ ID NO: 264621 - protein, 37 aa, Zea mays
  Clone ID: MRT4577_172946C.1.pep
QVTRSVHYFIGMIRKSISMEYMLALVTIFIMKYRRVT

SEQ ID NO: 264622 - protein, 88 aa, Zea mays
  Clone ID: MRT4577_172947C.1.pep
IASGRPFFLFFFFFFFFWFFFFLFFFLFFFLFFLFLRNFPGDSLPSLGLTAPQSIPLQSYRGREPPYYIPPWAVGNYGKTAKETATPP

SEQ ID NO: 264623 - protein, 115 aa, Zea mays
  unsure (1)..(115): unsure at all Xaa locations
  Clone ID: MRT4577_172948C.1.pep
ERCRTTTYPTLQLTEGRRAIEVDFFCDDSDKNSAAVVVKDKKEDLTTINLLRGSNANDDDDKVVTLLRMPNDQDRQNRNTNXLSAMHSKLARMNDKNQRLRVMLTHLTTSYQVLQ

SEQ ID NO: 264624 - protein, 36 aa, Zea mays
  Clone ID: MRT4577_172949C.1.pep
ISHKSSDVRVCAIVCSSLRLGRSPGARASFATRSSG

SEQ ID NO: 264625 - protein, 118 aa, Zea mays
  Clone ID: MRT4577_17294C.1.pep
FLFSSSTAVARGERERSSGDEVYGIDGSVPGLARRAAQKKWVHLLYHTALNFHRHLFYQEISSPNPPLFASLLISICLPARGRDWPCVVSPAQASDLLDKFETNCHVVSLGVFTEGDS

SEQ ID NO: 264626 - protein, 43 aa, Zea mays
  Clone ID: MRT4577_172950C.1.pep
MSSGNKISVALLSVALVGLLLCHLATTASAHQKDIHVPVVRLN

SEQ ID NO: 264627 - protein, 95 aa, Zea mays
  Clone ID: MRT4577_172951C.1.pep
PPSGWMNFFIQTDFHLLFLGEKLMCFSKEVFFSPQNFGSQNEPPKRLPAFLFWGCILNRRQPPQKLFYANNTFSHPSSPVEKCSVDVPPKNPSKP

SEQ ID NO: 264628 - protein, 80 aa, Zea mays
  Clone ID: MRT4577_172952C.1.pep
MSSGNKISVALLSVALVGLLLCHLATTASAHQKDIHVLGSVDGSSDGSSPESEGRVVYADMKLADTESDAPAPAPGPSSG

SEQ ID NO: 264629 - protein, 101 aa, Zea mays
  unsure (1)..(101): unsure at all Xaa locations
  Clone ID: MRT4577_172953C.1.pep
FTRFPXEDGALGCYQTGFPGLLGSXNPCAXAVHMEPFPASALKVVMGIYALXSKICTNGRSARAHALCFAAXTAPSYSSRPGACLFVLREKSLLACFIPKQ

SEQ ID NO: 264630 - protein, 244 aa, Zea mays
  Clone ID: MRT4577_172954C.1.pep
MVIDKNTCNEEDGYANNKFSCITKVKEKQEDYCTSQLEGNQDNVTAEILDMKHAKNIDKDIFVANIDSPSRWPINFEKKQKEIIELWHECNVSIVHRTYFFLLFKGVKADNIYLEVEHRRLSFIHSSFIAGCEPNVTVTSSLRNLRHERDMLYKQMLRRLHLLERESLYSKWGIDLNSKQRRLQLSRRIWTQTDMEHVRESAALVIKLVEHLEKGQAIKEMFGLSFTLNQRAIRRPFSWVSANS

SEQ ID NO: 264631 - protein, 126 aa, Zea mays
  unsure (1)..(126): unsure at all Xaa locations
  Clone ID: MRT4577_172955C.1.pep
MIPTITYIVIYSSNISSPMAAYIFALLALLDFSSSFASLTIIPQCSQHYLSPVTVAIFEYPTIQSYKLQYTITTIILRSSSLTVQQPYALSQQPSLVNLYLQRITTHQLTHLXLSTINFVFSSNLF

SEQ ID NO: 264632 - protein, 64 aa, Zea mays
  unsure (1)..(64): unsure at all Xaa locations
  Clone ID: MRT4577_172956C.1.pep
LLPVHXXSRXXAXXAXEHGEXGGXNTXYCYLRXXTGXRSXLXXRDDXVPGXSXWXXVEDERGXV

SEQ ID NO: 264633 - protein, 96 aa, Zea mays
  Clone ID: MRT4577_172957C.1.pep
ALLYPEELIILSPQVRCPRRSGWLSCCAPVSGEDGARRGRPPAAEGRLIALPAAGRLACMAGSESGPRWSEQKTPRAELPAGPGGHPILERPPPAG

SEQ ID NO: 264634 - protein, 111 aa, Zea mays
  unsure (1)..(111): unsure at all Xaa locations
  Clone ID: MRT4577_172958C.1.pep
LPDWLLFFVPAVMSELNILQSPKXFPLIILSLLLENAMSVTKFNTMISVLFHMGSAYKWMVNKKSARSSEGDIIVLAPLHESVKLHMKRTGFKKNLDAVAKEEHLATSSRK

SEQ ID NO: 264635 - protein, 35 aa, Zea mays
  Clone ID: MRT4577_172959C.1.pep
RWHGRAVTGSFASRTYESKCTYSIKKALTSHRTRG

SEQ ID NO: 264636 - protein, 78 aa, Zea mays
  unsure (1)..(78): unsure at all Xaa locations
  Clone ID: MRT4577_17295C.1.pep
FGKKLVIGFXPPLQLKGLWFFPGTDVPQFVLGEVFSMGLFGWAQGALFDXAPKEGVHSIIWGPEPFXGGALLSPKCFK

SEQ ID NO: 264637 - protein, 120 aa, Zea mays
  unsure (1)..(120): unsure at all Xaa locations
  Clone ID: MRT4577_172960C.1.pep
ARIRLEWYCPDPPFFFVPICKQTPACLTRYIPDDSEXDTPESXCYPETFMPNLELEEIHSRWTMLEALGCPTPDILTNNGNHFGQAAYXKDGAHNLSEGNLDYLENPNLTHSQSILAIWA

SEQ ID NO: 264638 - protein, 106 aa, Zea mays
  Clone ID: MRT4577_172961C.1.pep
PHPREPRKASLSEFDDLAGHPDLHNHGTRFQRLIQDHNNHKDLQERIIRLVLSLWKGDYQVDEQRTKTEGTDAVICRGEQLCSFAYDLIQRTLKAGRAHWLIEKMY

SEQ ID NO: 264639 - protein, 90 aa, Zea mays
  unsure (1)..(90): unsure at all Xaa locations
  Clone ID: MRT4577_172962C.1.pep
MVPGTHHTQLQPASHTASGPPNQVXFKIFXCRANXENYCLAVRDXAVVLAPVNPKDDHQHWYKDMRFSTRVKDEEXMPAFALVNKATELA

SEQ ID NO: 264640 - protein, 37 aa, Zea mays
  Clone ID: MRT4577_172963C.1.pep
LSTQISSQLLPTARVFFINPTTIHITLLPMNIIQQLT

SEQ ID NO: 264641 - protein, 74 aa, Zea mays
  Clone ID: MRT4577_172964C.1.pep
CFLVLGRLHRPKPPAQAVGALFHDDQHPANLKKLVMVRSYIPLAATMAPQWPRLLLLAKNHQRTLLLSLVGRSR

SEQ ID NO: 264642 - protein, 64 aa, Zea mays
  Clone ID: MRT4577_172965C.1.pep
KFRPRQVFFFFPCRSRTCTFLRAGFSSAPTLGPEPSVEELSPRPCGFWRSVFALKFMRRFYQIM

SEQ ID NO: 264643 - protein, 57 aa, Zea mays
  Clone ID: MRT4577_172966C.1.pep
TLFSWTAVTSFSLANVQHSAPASVYLSSRTVAGRTCRRPNRVWMLLDLLGKNLGVQL

SEQ ID NO: 264644 - protein, 102 aa, Zea mays
  Clone ID: MRT4577_172967C.1.pep
GGGNNGEQRIRVIYPRARLAWRGRQAYDDFDGTRQISWLSSSFDSNRGHASGHWLRGSHVGCPFWDPCLQTRAFLQYLVLELNSTLTITVQVYITLWVLNYI

SEQ ID NO: 264645 - protein, 72 aa, Zea mays
  Clone ID: MRT4577_172968C.1.pep
KIQDYDPGAPNQTPRKKLSFGHNKNFLKFKPALALGPFKAGITTLGVQYSFNRTFSFLGAIQPLTIFRFPIL

SEQ ID NO: 264646 - protein, 71 aa, Zea mays
  Clone ID: MRT4577_172969C.1.pep
MSSEEGKLVVGGLDFNTDEQALEDHFSSFGPISEVVVVKDRETQRSRGFGFITFTNPEHASVAMRAMNGES

SEQ ID NO: 264647 - protein, 82 aa, Zea mays
  Clone ID: MRT4577_17296C.1.pep
NLSCNSIDPLRTIFLTLLSLFRYKHYTYIRTFYSRYFFKLYAPGDNLLVSLSKLYTKHYMNICRTRQRCCPQIPLLKCIRSK

SEQ ID NO: 264648 - protein, 109 aa, Zea mays
  unsure (1)..(109): unsure at all Xaa locations
  Clone ID: MRT4577_172970C.1.pep
YVKTTNTTPMGTKTNSKPGPKPTRPPAHNIGTTPNTTTTTTGTXTEPNKKRTTTRRTKSTTQKTTTKTPTTTTTTTNITTTXTXAXTTTTTTTTTXSGRGPTTTTIPLL

SEQ ID NO: 264649 - protein, 137 aa, Zea mays
  Clone ID: MRT4577_172971C.1.pep
HASGLCPHSALLPLQLLPCAWAGSQPSFPIRSPFLPASSLHLPWPLSSQPGCPKPLCSASFFHLRLTSLCIVPPSPSAAPPAQRPARPFLLFPSAAARSPCSDCSHGVQVSVQRCRSKNCSPGTSPGFLAATAARMP

SEQ ID NO: 264650 - protein, 310 aa, Zea mays
  Clone ID: MRT4577_172972C.1.pep
MSSLAAARADNFYYPPEWSPKKGGLNKFHGQHALTKRARKLDQGILIIRFEMPFNIWCGGCNSMIAKGVRFNAEKKQVGNYYSTKIWSFTMKSPCCKHEIVIQTDPKNTEYVIISGAHKKTEDFDVEDAETLLLPADEDRDKLADPMYRLEHQEEDLRKKKEAEPVLVRLQRLSDSRHSDDYALNRALRDRLRSQKKRVAEEKKSARKIGLGVRLLPPSAEDATAAASVKFASKFEKSRRDKRAAIKAASIFPESSSSASHGKPDLVLKRRNIKAGAATALMAGRVKPSSWQSASSTSSRTRMPVLAARK

SEQ ID NO: 264651 - protein, 65 aa, Zea mays
  unsure (1)..(65): unsure at all Xaa locations
  Clone ID: MRT4577_172973C.1.pep
PFRXXXXYMXXAGTGIGGXXTCVXHSEVRNRTLXQXMAXRXRXGPRGEQESLHFAMTMLSPPESS

SEQ ID NO: 264652 - protein, 130 aa, Zea mays
  Clone ID: MRT4577_172974C.1.pep
LNSPTGTTWLVDVARNADADELLLGSGWGDFARAHELQEDDLVVFTRGGGGGSGSGCSFDVLVLDSSGCDTPPCFFAANKVHGRFSGGGRRQAARRRVFRGPEPEGLGAQLRLAAAAASTHGASTSKQKC

SEQ ID NO: 264653 - protein, 253 aa, Zea mays
  Clone ID: MRT4577_172975C.1.pep
VNEGHPDKLCDQVSDAILDACLEQDPESKVACETCTKTNMVMVFGEITTKATVDYEKIVRDTCRGIGFTSADVGLDADNCKVLVNIEQQSPDIAQGVHGHLTKKPEEIGAGDQGHMFGYATDETPELMPLTHVLATKLGAKLTEVRKNKTCPWLRPDGKTQVTVEYKNDNGAMVPIRVHTVLISTQHDETVTNDQIAQDLKEHVIKPVIPSQYLDENTIFHLNPSGRFVIGGPHGDAGLTGRKNIIDTYGGWG

SEQ ID NO: 264654 - protein, 76 aa, Zea mays
  Clone ID: MRT4577_172976C.1.pep
FFRQFTPGLNFGLFLKGPQIFSQPFWPQSPKTRGFYGWPPPPKNFLFSRGFFKKTPAYYFGQFAFFLYAPLFCGGP

SEQ ID NO: 264655 - protein, 64 aa, Zea mays
  Clone ID: MRT4577_172977C.1.pep
ALGFCWGKCIVRSAGATVREALAACMSSCGLCCEACNCVPRDIHDCPCYRNMLTGGPKKRPKCP

SEQ ID NO: 264656 - protein, 176 aa, Zea mays
  unsure (1)..(176): unsure at all Xaa locations
  Clone ID: MRT4577_172978C.1.pep
MPRCVFQPDAYCATMKEGRAEASAAMFAALDELFDKCRVRPKDVGVLVVNCSLFNPTPSLSAMIVNHYKMRGNILSYNLGGMGCSAGVISIDLARDMLQASGAGLAVVVSTEAVSFTWYAGKRRSMLIPNXFFRAGAXXVXLXNRRRDFRRAKXXLEHEVRTHKGADDRAFRSVYQ

SEQ ID NO: 264657 - protein, 88 aa, Zea mays
  Clone ID: MRT4577_172979C.1.pep
QPVRVPRGLLRPPQVAPLRWSSLRGLTLRRLRRYRSFLLIDPRLTLHHVCIHCKEDLPKGRVWVREFPKIYGGRLRNGSRPPHFCTEQ

SEQ ID NO: 264658 - protein, 165 aa, Zea mays
  unsure (1)..(165): unsure at all Xaa locations
  Clone ID: MRT4577_17297C.1.pep
MVLSVDKTSSGREYNVXISQQADFGRLEIDVIEREMPGLMTVPRLVRPXNPFADARISESLHMTIQIVVLFETLTELGDDGRWCSWIIFSWQEHVRRXIVRDSXASVHCNGYDLEEXWXCTLRCYLTGEDWPGPELIYDYHEDASVVIHEEALGNDADPKTVETP

SEQ ID NO: 264659 - protein, 67 aa, Zea mays
  Clone ID: MRT4577_172980C.1.pep
SLYRLIYDDHQCSRAVFDLAYSSLAFVFLASPSDHQSMSIFKACFTCSINTCESALPQQSLATVSTL

SEQ ID NO: 264660 - protein, 79 aa, Zea mays
  Clone ID: MRT4577_172981C.1.pep
KIPLYQPPSSNIIHFLLDPLKIFPGPMYNNRSTWKTPGLPQLNPFGPLSPFSHLRIKQKGPPRSPFPHIAPPKSEKAPP

SEQ ID NO: 264661 - protein, 84 aa, Zea mays
  unsure (1)..(84): unsure at all Xaa locations
  Clone ID: MRT4577_172982C.1.pep
FYVSFSYVSHEDSCXVRHSSHAMHADVHYACICDVKKMKFSHASVARCIVSTICSSVLRVSRQALGLPHSSGTTRRDPLEKTPL

SEQ ID NO: 264662 - protein, 100 aa, Zea mays
  Clone ID: MRT4577_172983C.1.pep
REPIEAGLRNGRFGRGPKITGTTLDRLTPQNYPRVFTARYYYYYVLDDPIQQQTLTLHTSPSETTRTNPILQRQYRVPNFTTYVQVLVFVKVLFIIVVID

SEQ ID NO: 264663 - protein, 149 aa, Zea mays
  unsure (1)..(149): unsure at all Xaa locations
  Clone ID: MRT4577_172984C.1.pep
MLALQTALLSSSSPSTKTWSASTNPNSLKSEESSTTCSSTGYSPPETSCPNKSLSMSSSDDISSSHTTLPSISSYXCASLSDNTVQTFLYWVWSSTSASCCNKPSCVLPSDASSSSHTMLSKGIVSRNFCASLFSTISFSRGTIEAAFT

SEQ ID NO: 264664 - protein, 506 aa, Zea mays
  Clone ID: MRT4577_172985C.1.pep
HNLSVVLLSTCKGGSSLQEDEEELLQSVIQNLTAASSKRSKVEQKNDDGLSNSSQMKFKDINYVRKNFWRSMHEDSEQENADSEFKATVSQVLTNHQEDKVLDNTEVPQASIYRNLWIEAEASACKLKYELQHALLKLETAKGLNDTIKAPDSLEDSKGSNSYIFSNKPQNHGKGTVSCAAAFQGHGGDSRDKQSPVVNRSIFNGVDADVFARFEVLQSRIDNINSLSEIDCGEQKEASKRPYAVEDTVMARLKVLKSRPDNITSLSQGSTKHQLDGSTNSADNVDDTVIARLGILESHPNNEALLGQESSKRQLDARTNREDGIDAAVMARLRILKSRPDNETSMGDANKEQQDACGEQLNGDDLGIVSNGAISNTLSEKCSKFTHSDDHLGEKNSVGVPDTFGDGNSAREKNEVGGSADVATPMRCKGTSDGVSVGSAVHSEDNLGENHVWLQTAGDSHVCTEGSQEAHPISSPVDQYGGSPTEWEHVLKENFFHPGKLANSDP

SEQ ID NO: 264665 - protein, 195 aa, Zea mays
  unsure (1)..(195): unsure at all Xaa locations
  Clone ID: MRT4577_172986C.1.pep
PAAPTPSLPPPTPPXSPXRPPXRLLPXPLPSPPRPRPHPLSRPPSPPPRPVTPRPTDPPHSRPPPLPPLLPPPPSPLPSPTRAPAPXPASHQHQHQPQXPPSQPLTPRLXPPRPPAPRSPQHKXPPPPGPHXTRAQSRSSPPLRPAAXTPPARAHRLGRRPPARAGSAPGPVQGVPGRCGAARSCLLMRCLPVRA

SEQ ID NO: 264666 - protein, 95 aa, Zea mays
  Clone ID: MRT4577_172987C.1.pep
AFPPRFLIKASSHPPPLVSLATSLIKKPLFFFFLQRETFPPQNFQAFFFFFKQHPPFKASYFWRPRLFFSLKKVSFSSNLKRSFKYQTKKTIKKY

SEQ ID NO: 264667 - protein, 41 aa, Zea mays
  Clone ID: MRT4577_172988C.1.pep
PPTQSSETVIYTVAYSRNNMSGLENKILSLLMLHDPSTCVA

SEQ ID NO: 264668 - protein, 123 aa, Zea mays
  Clone ID: MRT4577_172989C.1.pep
CYSYGLATYYGPASSSGGHERRARGEHLPLPRGPRAASSLPSPPAARTGCTCTCTTARLVLLLCLYHSTVYCIVRASSKPLPSSSSSLLFPTTLLSCSSSSSSSSAAAAAAVSCDLYVIKPSS

SEQ ID NO: 264669 - protein, 257 aa, Zea mays
  unsure (1)..(257): unsure at all Xaa locations
  Clone ID: MRT4577_17298C.1.pep
MAFDKIQVANPIVEMDGDEMTRIIWKWIKDKLIFPLLDLDIKYFDLGLPNRDATGDKVTIESAEATLKYNVAIKCATVTPDEGRVKEFNLKAMWRSPNGTIRNILNGTVFREPIICKNVPRLVPGWTKPICIGRHAFGDQYRATDTIIRGPGKLKLIFDGIEEQIELDVFNFSGAGGVALSMYNTDESIRAFAEASMNVAYQKRWPLYLSTKNTILKKYDGRFKDIFQENYETXWRGRFEDAGIWYEHRLIDDMVAY

SEQ ID NO: 264670 - protein, 42 aa, Zea mays
  Clone ID: MRT4577_172990C.1.pep
SQNHINITHPVLSPITIPVSIIGTHDVGLRTRRVGTISPHAK

SEQ ID NO: 264671 - protein, 86 aa, Zea mays
  Clone ID: MRT4577_172991C.1.pep
GPILPRLIFNKGGFFGILVGGPVPQIKDSWGGPSFWRLTGPRFVGPECWAISQEFPGANFMEPGFCTANLNNIWGRGPPSWEIFSG

SEQ ID NO: 264672 - protein, 71 aa, Zea mays
  unsure (1)..(71): unsure at all Xaa locations
  Clone ID: MRT4577_172992C.1.pep
VQVQPVRAXGGEGSEDAARGPRGRGRCCAAAAALHFTSFGSPEQQVHDLGRLAVSSRPSVMAAAASCAVVG

SEQ ID NO: 264673 - protein, 158 aa, Zea mays
  Clone ID: MRT4577_172993C.1.pep
HRITFGRKGRGGLDVLDDGLITYRSQLTAAAAAADDDDDDDEQNSRVVGKRREEEEEGSGLLLARTIQYTVLWYRHSSSTSLAVVHVQVQPVRAAGGEGSEDAARGPRGRGRCSSSSASLHLTWVPRAAGASPWPSCRGRGGGPLALLAPVAHVRRCC

SEQ ID NO: 264674 - protein, 124 aa, Zea mays
  Clone ID: MRT4577_172994C.1.pep
YRHSSSTSLAVVHVQVQTTRAGSGRRRKRGRRARATRQRQRQRQVQQRFTSPHLGPQSSRCMTLAVLAWPWRWSSRSRPRHPASPSRPGPPRRAPARAGRPALATCCWCSPRARRSCRLLLAAP

SEQ ID NO: 264675 - protein, 64 aa, Zea mays
  Clone ID: MRT4577_172995C.1.pep
MTDGREESTSSRWPELAALRALARDAAARAGRETAGWRGREREDHRHGHGKTAKVMHLLLWGPK

SEQ ID NO: 264676 - protein, 67 aa, Zea mays
  unsure (1)..(67): unsure at all Xaa locations
  Clone ID: MRT4577_172996C.1.pep
CGSRCASRSMPDVVELRVEDAKNVILKDNPDAAIXVLPVGXSVATADYRPNRVRIFVDIVAQTRHIR

SEQ ID NO: 264677 - protein, 133 aa, Zea mays
  Clone ID: MRT4577_172997C.1.pep
HASIGPTGTFIFAHALAGGVSHLSHMLTSSIASFPSLPTARCKTQSYPKDHRQSTASTLYPVSQYTHTDYLGLMHKHSTTLTLGCKLVLLTTQSSLPLLMTCFIDNTLLSALCYPTFFINMTLDFCYSEHNSP

SEQ ID NO: 264678 - protein, 64 aa, Zea mays
  Clone ID: MRT4577_172998C.1.pep
MSDGREESTSSRWPELAALRALARDAAARAGRETAGWRGREREDHRHGHGKTAKVMHLLLWGPK

SEQ ID NO: 264679 - protein, 64 aa, Zea mays
  Clone ID: MRT4577_172999C.1.pep
MSGGREESTSSRWPELAALRALARDAAARAGRETAGWRGREREDHRHGHGKTAKVMHLLLWGPK

SEQ ID NO: 264680 - protein, 120 aa, Zea mays
  unsure (1)..(120): unsure at all Xaa locations
  Clone ID: MRT4577_17299C.1.pep
APTHPPTDISSFTSTHHNCSACDXIIHSMDLLTAQFSIYHNTCLKSRXCKGILVMCMYSSIDSMLNSKTHLQQIYKETXTFNKNFTPLINSSPQSXLQLNPNKLSDAFINTQYNCAACQK

SEQ ID NO: 264681 - protein, 75 aa, Zea mays
  unsure (1)..(75): unsure at all Xaa locations
  Clone ID: MRT4577_1729C.1.pep
KKLTKFFNQTRLKDATSWHFQTLFWSWIKNPFPTEXHSMTFHVRLFLHDAVDLLXAIVTSIKEDEFTIANDNDIS

SEQ ID NO: 264682 - protein, 144 aa, Zea mays
  unsure (1)..(144): unsure at all Xaa locations
  Clone ID: MRT4577_172C.1.pep
FVKPLGGKPIPVGVGGSAPLATVKGKIRAKEGLPPAQQGFFFAGNQLGDGPPLPGXTFFFFFFSPWCSPSXFFXKPWGGGAFFKKGFFFFLVPFGVPKERGSPFKKKNGLCVINRSCGFVGLMALLCPLCVGPKTFFHQYGXKP

SEQ ID NO: 264683 - protein, 65 aa, Zea mays
  Clone ID: MRT4577_173000C.1.pep
LKWGPVQTTERIITRSPIGPERLLHELPMPSGKQMTQRETGPRWSSQRRVPSRLRQDNTFLPHRK

SEQ ID NO: 264684 - protein, 66 aa, Zea mays
  Clone ID: MRT4577_173001C.1.pep
MSGGREESTSSRWPELSALRALARDAAARAGRETAGWRGPEREDHRHGHGHGKTAKVMHLLIWGPK

SEQ ID NO: 264685 - protein, 76 aa, Zea mays
  Clone ID: MRT4577_173002C.1.pep
SHSPIQGCANLLGMGRSSARPLSHINAKHGGKGGMCMQGRLKYGVTPRSFPHVTTLCKSDVPVDIEFYGDDYRRSI

SEQ ID NO: 264686 - protein, 105 aa, Zea mays
  Clone ID: MRT4577_173003C.1.pep
VKNPGCSQGTLRNFGQKCGLKKVFMRERFLGLSKTGTFARYPHKKQCDPFHFPGSPPKQTSPMHPSVQAFPVKNLKVFGLVPACNEKSSVEPVFKRLLFQVPGTC

SEQ ID NO: 264687 - protein, 119 aa, Zea mays
  Clone ID: MRT4577_173004C.1.pep
KKKTGARTQIFFWSSQKTWQMPPGEFRGTWGQKRGGQNANKRGKQNGLGGTVLLGAITGGGGFRGTQVWGLSKASFFYFKRKKEGLLYREMRGVTPHRTGNSRGILKKANLGGGGDGAS

SEQ ID NO: 264688 - protein, 112 aa, Zea mays
  unsure (1)..(112): unsure at all Xaa locations
  Clone ID: MRT4577_173005C.1.pep
MTGNIGXISIMAELTGSNRNVDLKGNEALARKTVFGLDVTQGVGSLLDRVRELLGRCVTCQLIXSTVPDHSNGNRARLDEVANLEQWMLNLAEIMXSDENEIRVTLNCEAEK

SEQ ID NO: 264689 - protein, 84 aa, Zea mays
  Clone ID: MRT4577_173006C.1.pep
LACPLRTSESDFYLRYYVGHKGKFGHEFLEFEFRPDGKLRYANNSNYKNDVMIRKEAYVHKSVMEELKRIIDDSGITKEDDALW

SEQ ID NO: 264690 - protein, 52 aa, Zea mays
  unsure (1)..(52): unsure at all Xaa locations
  Clone ID: MRT4577_173007C.1.pep
GLGQGTPVYPEGLGPHPRSMASPVLISPRYLLWGMFAXPSVLFVHHGSFSAG

SEQ ID NO: 264691 - protein, 66 aa, Zea mays
  Clone ID: MRT4577_173008C.1.pep
VKVQRVRRRAGGSYLDGRPYLLGGYDQVILCARVAHLMAVPGSGGHVAPRHELVVVCREGKPSLCN

SEQ ID NO: 264692 - protein, 105 aa, Zea mays
  Clone ID: MRT4577_173009C.1.pep
PRVRLRSKGVRMLSSSRGAAPRTWTPFGFLMLRRPPSLSHFFPPVFPSRGFFWIHGPPRFYSPSFFFRSRAWSFLVFWAPSFLPRPCWMFGFCFLGKNPFSSFQG

SEQ ID NO: 264693 - protein, 39 aa, Zea mays
  Clone ID: MRT4577_17300C.1.pep
LPEPLIPEGPGGARFLTFPIVRLGSAQRNKKGGHSRSAR

SEQ ID NO: 264694 - protein, 67 aa, Zea mays
  Clone ID: MRT4577_173010C.1.pep
ALIAWQHAYELALVYFTSYYRAQHCSPAQLYTPLASPSGPQTPEGCVCHPATRPTTSLTGSGSRLPA

SEQ ID NO: 264695 - protein, 37 aa, Zea mays
  Clone ID: MRT4577_173011C.1.pep
TSTRRRHGCRPSYVKTPPRSALRPRAKMLDWPDASPR

SEQ ID NO: 264696 - protein, 172 aa, Zea mays
  Clone ID: MRT4577_173012C.1.pep
LTPAFVLCPFAAFLLALDGGVPVPLSSGLRELIKQDRRISPISRRRPRPRLKKRRPPTTKLSELESQLSQLQEELKKAREQLHSSELSRKRALQEADDAKAQARDSKAQLAELSSAEETRLLELRRLSQERDRSWQSELEAMQKQHAADSTALAAAMGEVHRLRVQLAVAVR

SEQ ID NO: 264697 - protein, 167 aa, Zea mays
  Clone ID: MRT4577_173013C.1.pep
ASSPTRSIAPSSPIFRNWNFLQSLRWFCSLAFNSFLLFLQTDLSCGPSSKAKGGQPAATSSGGDRQGRGKIEIKHIENTTNRQVTFCKRRNSLLKKAYELSVLCDAEVALVVFSSRGRLYEYANVYLVPRSYTLRASAVCVVQIRSKFAPIFLEAKPRGWRVNWGAS

SEQ ID NO: 264698 - protein, 212 aa, Zea mays
  Clone ID: MRT4577_173014C.1.pep
RSYRTSASSPTRSIAPSSPIFRNWNFLQSLRWFCSLAFNSFLLFLQTDLSCGPSSKAKGGQPAATSSGGDRQGRGKIEIKHIENTTNRQVTFCKRRNSLLKKAYELSVLCDAEVALVVFSSRGRLYDLAGYTEDAFGLLVLLLVREKEPVVPPLSSSLRTSRSVASAAPAQSLADFCKDSSSSAAHGSTCPVPTITLDLKKSLKILQVLCYS

SEQ ID NO: 264699 - protein, 53 aa, Zea mays
  Clone ID: MRT4577_173015C.1.pep
NVDRSIHKQTLEPKCIRPQAHCMCHASIVWLCFSLGQQFFFFFFFLKCRQIHS

SEQ ID NO: 264700 - protein, 122 aa, Zea mays
  Clone ID: MRT4577_173016C.1.pep
MLGPSLWDVWNNKSHIMSVEMVSCIAIEAICILEKLHSKGYVHGDVKPENFLLGTPGTPEEKKLFLVDLGLATKWKDIATGRHVKYDQRSDVFRGTFRYASVHAHLGRTGSRKDDLKSLAYT

SEQ ID NO: 264701 - protein, 130 aa, Zea mays
  unsure (1)..(130): unsure at all Xaa locations
  Clone ID: MRT4577_173017C.1.pep
XGEHXTVRGAGKHNVSTAKTMSVPKLIFYPNMHTLSAGVVCNGPLRAANTIRQATGMTMGTPRATATYSRERWCSRTYRPVNSASTYAPVHAFAHASRYPWSPDIPLQIKQARSLERTTQRLDSTLTTRN

SEQ ID NO: 264702 - protein, 55 aa, Zea mays
  Clone ID: MRT4577_173018C.1.pep
MGQRWQQDHWHLHQFKFSAAVRFDMPRAYYHSRFEEESQDSAGVVLLLIQLPYWQ

SEQ ID NO: 264703 - protein, 318 aa, Zea mays
  Clone ID: MRT4577_173019C.1.pep
MTGTVPKLAAPRPAAPPLRPASLRTAALAFAPSARRVRVSVAGRARSPIIAMASAKEGNGAPTKRTALHDLYELQGLSPWYDNLCRPVTDLLPIIASGVRGVTSNATIFQKAISSSSAYDDQFKQLISAGKDAESAYWELVIKDIQDACKLFEPIYDETDGADGYVSVEVSPRLANDTQGTVEAANRLYQKKFSGPRWEALAKKGAKKQRLLWASTGVKNPAYPDTLYVDSLIGPDTVNTMPDQALQAFIDHGTVSRTVDANVSEAEGVYSALEKLGIDWEEVGKQLELEGVDSFKKSFDSLLVSLQEKGNSLKMASV

SEQ ID NO: 264704 - protein, 62 aa, Zea mays
  Clone ID: MRT4577_17301C.1.pep
MPPKFDPSELKIMILKTRGGEPGAASSLAPKMGPLGLNAKKVGDDIAKETDKWKGIKVMIEM

SEQ ID NO: 264705 - protein, 61 aa, Zea mays
  Clone ID: MRT4577_173020C.1.pep
RFIILIALHQGVICLGQLERQPKTSTNNSSNIWAGNDSSCVWRSASRTQTASSLRVRPRVR

SEQ ID NO: 264706 - protein, 173 aa, Zea mays
  Clone ID: MRT4577_173021C.1.pep
RSYRTSASSPTRSIAPSSPIFRNWNFLQSLRWFCSLAFNSFLLFLQTDLSCGPSSKAKGGQPAATSSGGDRQGRGKIEIKHIENTTNRQVTFCKRRNSLLKKAYELSVLCDAEVALVVFSSRGRLYEYANVYLVPRSYTLRASAVCVVQIRSKFAPIFLEAKPRGWRVNWGAS

SEQ ID NO: 264707 - protein, 207 aa, Zea mays
  unsure (1)..(207): unsure at all Xaa locations
  Clone ID: MRT4577_173022C.1.pep
GTLGAGRAVAGRARSPIIAMASAKEGNGAPTKRTALHDLYELQGLSPWYDNLCRPVTDLLPIIASGVRGVTSNPTIFQKAISSSSAYDDQFKQLISAGKDAESAYWELVIKDIQDACKLFEPIYDETDGADGYVSVEVSPRLANDTQGTVEAAKWLHKVVLIFSIARYEAVIDAYLDGLEASGLSDLSRVXTSVXSFLVSRVDTLID

SEQ ID NO: 264708 - protein, 76 aa, Zea mays
  Clone ID: MRT4577_173023C.1.pep
MDAAQTTLSSPVSAAANVASTSTTATNKPKPCCVCKDEKAKRDECMLFSNAKDPAADCKSMIDQYRSCMSGFGFQV

SEQ ID NO: 264709 - protein, 253 aa, Zea mays
  Clone ID: MRT4577_173024C.1.pep
DTQGTVEEAKWLHKVVNRPNVYIKIPATAECVHSIREVIANGISVNVTLIFSIARYEAVIDAYLDGLEASGLSDLSRVTSVASFFVSRVDTLIDKMLEKIGTPEALALRGKAAVAQAKLANRLYQKKFSGPRWEALAKKGAKKQRLLWASTGVKNPAYPDTLYIDSLIGPDTVNTMPDQALQAFIDHGTVSRTVDANVSEAEGVYSALEKLGIDWGEVGKQLELEGVDSFKKSFDSLLVSLQEKGNSLKTATV

SEQ ID NO: 264710 - protein, 430 aa, Zea mays
  Clone ID: MRT4577_173025C.1.pep
MTGTVSKLAAPRPAAPPLRPASLRAAAIAFAPSPRRVRVSVAGRARIPSVIAMASAKEGNGAPTKKTSLHDLYELQGLSPWYDNLCRPVTDLLPLIASGVRGVTSNPAIFQKAISSSSAYDDQFKQLISGGKDAESAYWELVIKDIQDACSLFEPIYDETDGADGYVSVEVSPRLANDTQGTVEAAKWLHKVVNRPNVYIKIPATAECVPSIREVIANGISVNVTLIFSIATYEAVIDAYLDGLEASGLSDLSRVTSVASFFVSRVDTLIDKMLEKIGTPEALALRGKAAVAQAKLANRLYQKKFSGPRWEALAKKGAKKQRLLWASTGVKNPAYPDTLYIDSLIGPDTVNTMPDQALHAFIDHGTVSRTVDANVSEAEGVYSALEKLGIDWGEVGKQLELEGVDSFKKSFDSLLVSLQEKGNSLKTATV

SEQ ID NO: 264711 - protein, 429 aa, Zea mays
  Clone ID: MRT4577_173026C.1.pep
MTGTVSKLAAPRPAAPPLRPASLRTAALAFAPSPRRVRVSVAGRARSPIIAMASAKEGSGAPTKRTALHDLYELQGLSPWYDNLCRPVTDLLPIIASGVRGVTSNPTIFQKAISSSSAYDDQFKQLISAGKDAESAYWELVIKDIQDACKLFEPIYDETDGADGYVSVEVSPRLANDTQGTVEAAKWLHKVVNRPNVYIKIPATAECVPSIQEVIANGISVNVTLIFSIARYEAVIDAYLDGLEASGLSDLSRVTSVASFFVSRVDTLIDKMLDKIGTPEALALRGKAAVAQAKLANRLYQKKFSGPRWEALAKKGAKKQRLLWASTGVKNPAYPDTLYVDSLIGPDTVNTMPDQALQAFIDHGTVSRTVDANVSEAEGVYSALEKLGIDWEEVGKQLELEGVDSFKKSFDSLLVSLQEKGNSLKMASV

SEQ ID NO: 264712 - protein, 68 aa, Zea mays
  unsure (1)..(68): unsure at all Xaa locations
  Clone ID: MRT4577_173027C.1.pep
VPLILLLAQSLTNAIMQEYXVLGGPCPNCGTENLSLFGTILPVYIGGPPNKVNCAHCHSHLEYDSESM

SEQ ID NO: 264713 - protein, 53 aa, Zea mays
  Clone ID: MRT4577_173028C.1.pep
IFGAPFHSEIWVPVSGNFPCRSPLRGGFWGLEIRRGLKSSRHPRSLGCGVLMP

SEQ ID NO: 264714 - protein, 64 aa, Zea mays
  Clone ID: MRT4577_173029C.1.pep
MGSWVNCLVVPLCWVPFALGPLCFFCIRGKKNRKKKKKEKKKKKKKKKKKKKKKKKEKKKKKSG

SEQ ID NO: 264715 - protein, 49 aa, Zea mays
  Clone ID: MRT4577_17302C.1.pep
PSFSEKTTTKGSIVLNSLRANTPQDRLKKNPWDSDYKPSYSLTQTRLPE

SEQ ID NO: 264716 - protein, 34 aa, Zea mays
  Clone ID: MRT4577_173030C.1.pep
KAECVDSGLSKHHQQILRQQQSYIASSVQWIEPL

SEQ ID NO: 264717 - protein, 42 aa, Zea mays
  Clone ID: MRT4577_173031C.1.pep
LQTIYLVCELQLWDSHRAKSPTFNALIEQIGRPPLVPCRVFR

SEQ ID NO: 264718 - protein, 149 aa, Zea mays
  Clone ID: MRT4577_173032C.1.pep
MQTPAATICGAHGAAFTPCPRRPTPPGSLRKPFTGSSRRTPRRRLLAPMASTVDSPGSSSDFTKRIERAWLISQQPRPVSCSSCQSAGHVECKWCAGTGFFILGDNILCEVPSRNSKCVICSGKGFTSCADCQGTGFRAKWLEEPPIDK

SEQ ID NO: 264719 - protein, 45 aa, Zea mays
  Clone ID: MRT4577_173033C.1.pep
KGRPNFYVFDFFDLFLLFFICYYWYLCLLELTPCLFMRQPHVLTI

SEQ ID NO: 264720 - protein, 49 aa, Zea mays
  unsure (1)..(49): unsure at all Xaa locations
  Clone ID: MRT4577_173034C.1.pep
TNITTLGPLVMPFSEQLLFFTGVMFHHLXKPYVRAILMSFDITRLAGWQ

SEQ ID NO: 264721 - protein, 85 aa, Zea mays
  Clone ID: MRT4577_173035C.1.pep
SLSHIYVMRPLPLWGGDHIRPLYQYAVCLAVAKKKKCHSPPHSPLVLRKTQQFSPHTPSVVVPSYRLHMRYASIIVFFVWCVWLP

SEQ ID NO: 264722 - protein, 65 aa, Zea mays
  unsure (1)..(65): unsure at all Xaa locations
  Clone ID: MRT4577_173036C.1.pep
RCGFKFFCYDPPSMLGCLRRLFHLLFHTAMLSYLLDPWLVIPAPLESXELCMLTHSYSYKSRRVS

SEQ ID NO: 264723 - protein, 85 aa, Zea mays
  unsure (1)..(85): unsure at all Xaa locations
  Clone ID: MRT4577_173037C.1.pep
MAGAAALNEGMLSSVIEKNVAAHPWPDLEIGPDVPQWLNCVVEIPTCTMVNFKTDSICMLNKVHRVLYCXLVTHHSFGXILRLLC

SEQ ID NO: 264724 - protein, 46 aa, Zea mays
  Clone ID: MRT4577_173038C.1.pep
LRRESTLGMLDHASDWVLRIIWIVFHPVDGYLPVLDQSQYRICDGD

SEQ ID NO: 264725 - protein, 244 aa, Zea mays
  Clone ID: MRT4577_173039C.1.pep
MKTMSRRNSRTIYVGNLPGDIREREVEDLFYKYGRILDIDLKIPPRPPGYAFVEFEDPRDADDAIYGRDGYNFDGYRLRVELAHGGRGQSYSYDRSSSYSSACRGGVSRRSDFRVMVTGLPSSASWQDLKDHMRRAGDVCFSDVYREAGETIGIVDYTNYDDMKYAIRKLDDSQFRNAFSRAYIRVREYDARSRSRSRSHSYSRSPSYSRSRSPKSVSQSPSSVDERFAFVFPRFGHAAIWGLH

SEQ ID NO: 264726 - protein, 50 aa, Zea mays
  Clone ID: MRT4577_17303C.1.pep
MYLQYYINEKGDKVYTTKKESPLGVPTQSAHPGTPPLFTGVTFVSAVQLL

SEQ ID NO: 264727 - protein, 278 aa, Zea mays
  unsure (1)..(278): unsure at all Xaa locations
  Clone ID: MRT4577_173040C.1.pep
SSALSLGGVQSNFSELQLSNGENQGASGTGLGSLINPMLKVLDEMYKAQDDLARDIRQHDNSKQEWSDDELKKLYETHERLLDFVCLFCFVPRIKYLPLGPTSAKLIEIYRNRHNISASVGLSDPAVATGISDLMYESKEVHKETSTMQSGIDPDLAMAWAAGLEDDAWANDAPGVDKVKDFLSGAGTDAPDVDDEEYMNSRPSVGYDDMWAKTILEEEDDGRSSGGSXPDSTGSXVETSIXPHFGGMNYPXSLFSSKPPSYGASHKRYVKDHHHIQH

SEQ ID NO: 264728 - protein, 159 aa, Zea mays
  Clone ID: MRT4577_173041C.1.pep
NPPRHFVFGQSGAGNNWAKGHYTEGAELIDSVLDVVRKEAENCDCLQGFQVCHSLGGGTGSGMGTLLISKIREEYPDRMMLTFSVFPSPKVSDTVVEPYNATLSVHQLVENADECMVLDNEALYDICFRTLKLATPTFGDLNHLISATMSGVTCCLRFP

SEQ ID NO: 264729 - protein, 260 aa, Zea mays
  Clone ID: MRT4577_173042C.1.pep
MSRRNSRTIYVGNLPGDIREREVEDLFYKYGRILDIDLKIPPRPPGYAFVEFEDPRDADDAIYGRDGYNFDGYRLRVELAHGGRGQSYSYDRSSSYSSACRGGVSRRSDFRVMVTGLPSSASWQDLKDHMRRAGDVCFSDVYREAGETIGIVDYTNYDDMKYAIRKLDDSQFRNAFSRAYIRVREYDARSRSRSRSHSYSRSPSYSRSRSPKSVSQSPSSVDERSLSRSRSPISSPSHARYATSPRSRSASRSRSPVRSD

SEQ ID NO: 264730 - protein, 95 aa, Zea mays
  Clone ID: MRT4577_173043C.1.pep
GVSNQKTCPRIGMGQAMSLSIPFVSLPSLRAAPAGSLNVVDREGADDGPEGGADGGLNGGAAAGRGRSRSLRGERLGGRRGGDEHGADDLLHLHP

SEQ ID NO: 264731 - protein, 126 aa, Zea mays
  Clone ID: MRT4577_173044C.1.pep
WHGILSSSFLLPGAAHCFKGSQSSIGSHRRPRTGCASAPRACRISHEKKLGIEILIAISCQPILLLGLIVAHLSYMHHNPSLLSEVPNHPLRFSKHPVLYQCSPQIAAWPNLGKTKANLSSTDEGD

SEQ ID NO: 264732 - protein, 86 aa, Zea mays
  Clone ID: MRT4577_173045C.1.pep
ALMGLPCALYAQFPLLSSAATTVRAARSLTPAACRVPVPRARVAYTVHRPQVAYTSVARASCRLSSTMDACYLLDLYLFASFSYIM

SEQ ID NO: 264733 - protein, 44 aa, Zea mays
  Clone ID: MRT4577_173046C.1.pep
PWLTAGDVAAVVDEEACMYAMQLASSAILPMTLNNPIIAGAHGR

SEQ ID NO: 264734 - protein, 74 aa, Zea mays
  unsure (1)..(74): unsure at all Xaa locations
  Clone ID: MRT4577_173047C.1.pep
MGKGAGPPKRGGFGGTSGKRKKAFFWISRKTNFFFFFFFFFFFFFFFFFFFFFFFFFFFXXXXXXFFPAGLEVP

SEQ ID NO: 264735 - protein, 69 aa, Zea mays
  Clone ID: MRT4577_173048C.1.pep
SFSLIIGWGSFFCCGNRNPLLGRRDRNFPGVFCDCTRNIAASAGRRSSQNEGQRSETKLAADRHIKTDR

SEQ ID NO: 264736 - protein, 99 aa, Zea mays
  Clone ID: MRT4577_173049C.1.pep
MVNVPKTKKAFCKGCKKHMTMKVTQYKTGKASLYAQGKRRYDRKQSGFGGQTKPVFHKKAKTTKKIVLRLQCAECKTTSMKGLKRCKHFEIGGDKKKGN

SEQ ID NO: 264737 - protein, 65 aa, Zea mays
  Clone ID: MRT4577_17304C.1.pep
MDTQVKLAVVVKVMGRTGSRGQVTQVRVKFLDDQNRLIMRNVKGPVREGDILTLLESEREARRLR

SEQ ID NO: 264738 - protein, 87 aa, Zea mays
  unsure (1)..(87): unsure at all Xaa locations
  Clone ID: MRT4577_173050C.1.pep
MDVDVXSEVAXAGXXKXRTFRKXSYRGVXLDALXDMSTDDXVXLFXARXRXRFXRGLKXKPMALXXKLRXAXKDAXAGEKXELXKTH

SEQ ID NO: 264739 - protein, 102 aa, Zea mays
  Clone ID: MRT4577_173051C.1.pep
ALGKDFFKIKILTLPSAPYLTSCKVFFAECQQTATRQSLYLGFFRKLMLSVTRLALGKDFFVQCLQWTLDKSNFNCFYFFQPNFLCHVPTLCTPTCTILGQL

SEQ ID NO: 264740 - protein, 65 aa, Zea mays
  Clone ID: MRT4577_173052C.1.pep
FGMCCSPYHGTYLMMRLATIHAHSIKDYGQYILLALPRMRILAGHDAVMLMNGWQRHVVLVPLHF

SEQ ID NO: 264741 - protein, 76 aa, Zea mays
  Clone ID: MRT4577_173053C.1.pep
RTLEYFVKRLICTTSFQRWALKRPGGSTKPASTKHASVGSEERSATIKALHLAVGPMPVSSALRSGREQSIQHKST

SEQ ID NO: 264742 - protein, 61 aa, Zea mays
  Clone ID: MRT4577_173054C.1.pep
SILRYGYIHVQGPTQQFKQYSAQPSSNFIQEPKQKAGGPITNYTGSLLRERQKEHWWIPST

SEQ ID NO: 264743 - protein, 501 aa, Zea mays
  Clone ID: MRT4577_173055C.1.pep
VICLDLHVLLYSKQQSRWAGCFSGLSCFGSQKGGKRIVPAARTSDGNGSNARGNGLQSGANSNQNMPMNLSLLAPPSSPASFSNSALPSTAQSPNCFLSVSANSPCGPTSNMFAVGPYANEPQLVSPPVFSTYTTEPSTAPLTPPPELAHATTPSSPDVPYARFLSSSMGIKTASKDHNMPFLSTTYSGGSGLQTSYPLYPESPCSSLISPASVTPRTGLSSPIPEQEVPPAHWKTSRSACDTPYFRASPIPEQETTAQWKTSRSACDTPYARTSPTNIFGLDSSTPRNYMLDNNFFRPAASAQFYLDQAQQAFSHNGGRVSVSREKQDADEIEAYRASFGFSADEIVQSQSYVGIPDAVDESFSISPFGNNAPATEICPFSDLPNEVQKADKSCAYAKDDTSPKKSANQLSTDSPNKVLRLDVFKGTKGGHQSEDECIRKDGHLFRKTADEISLKPIEVRKKSLPGHSCSDAEIEYRRTRSLRDANGVLSRRSALARQLH

SEQ ID NO: 264744 - protein, 108 aa, Zea mays
  Clone ID: MRT4577_173056C.1.pep
RSFSSVGSTKKARPTRWRSATPVEGTTWLTSWNKPPLPDGFVHARSETRDGTCRSLERPARCHSGTWSHQPGHAQTALTLSVARTLIPTAPARSGASPPPSQHKSRTV

SEQ ID NO: 264745 - protein, 139 aa, Zea mays
  unsure (1)..(139): unsure at all Xaa locations
  Clone ID: MRT4577_173057C.1.pep
FFEMPRHDALKALEIYRRAGQQVXRVHKRMIIXIRDSKRSRHYEHVLLFRLFDTFQAGNLSDFYENCRGLELARNFQIPTLREERACTLTSLRYVHWIMXYDIFYMRKXQPPQTFLATMEDYVNEASRMVPVREPLIIV

SEQ ID NO: 264746 - protein, 237 aa, Zea mays
  unsure (1)..(237): unsure at all Xaa locations
  Clone ID: MRT4577_173058C.1.pep
MSSVGRSNGTRAANGAAAISTSTTEAGSADARFHSQLLHQDRQSRWAGCFSGLSCFGSQKGGKRIVPAARTSDGNGSNTRGNGLQSGANSNQNLPMNLSLLAPPSSPASFSNSALPSTAQSPNCFLSVSANSPGGPTSNMFAVGPYANEPQLVSPPVFSTYTTEPSTAPLTPPPELAHATTPSSPDVPYARFLSSSMGIKTASKDHNMPFLSTTYSGGSGLQTSYPLYLEAPXSSLI

SEQ ID NO: 264747 - protein, 75 aa, Zea mays
  Clone ID: MRT4577_173059C.1.pep
ASLPPHFIINKYYTPYFQILCRLPPRLLLSLPYTFLFPQDYMNTCTYTVHYFLFACPWYLPNCLQTRLVVPARVG

SEQ ID NO: 264748 - protein, 102 aa, Zea mays
  Clone ID: MRT4577_17305C.1.pep
STFTTSWTLLGNVRTTQASETELNSPSFLTFFSQVTKVPSLKTFKKLDVSAMAVYKVKLVGPEGEEHEVDASDDAYMLDAAETAAVDLPYSCRAGSCYICCG

SEQ ID NO: 264749 - protein, 72 aa, Zea mays
  unsure (1)..(72): unsure at all Xaa locations
  Clone ID: MRT4577_173060C.1.pep
GXLVPPQVPVPNFPVHPTLPLVFVRKGNXFRHLLNSSCLEKYXPXXPPPHSVKGAQLVLVDLLPHYTITIIC

SEQ ID NO: 264750 - protein, 99 aa, Zea mays
  unsure (1)..(99): unsure at all Xaa locations
  Clone ID: MRT4577_173061C.1.pep
VHNKGYNRFDRGDHPGAPTQKKLAFPDPRSLGGDTSGALAHTSSPDRGGRFKLGPPPSRSGKPRGSLLGGGAPRAFPXXGGSPWAWRGAPAPPRAGGAP

SEQ ID NO: 264751 - protein, 73 aa, Zea mays
  Clone ID: MRT4577_173062C.1.pep
CISLALVASFASHPARPAPSRAQLDPELGWRTRTAAAAAAAATAGGSCSHRRVEDGQAFVKAALWMLRPRHQL

SEQ ID NO: 264752 - protein, 78 aa, Zea mays
  Clone ID: MRT4577_173063C.1.pep
VERWCRRCVPWCTASHSTTSTHHGPPPAASATLSLATRTRSSWPLAAAPCLRIRLLLGTDPPRPAQLEDDSAAMRPPR

SEQ ID NO: 264753 - protein, 61 aa, Zea mays
  Clone ID: MRT4577_173064C.1.pep
EPEPEPKPEPKPDPKPEPKPEPKFEPRPEPEPEPEPEPQPEPDPEPEPQPEPEHMPEADLE

SEQ ID NO: 264754 - protein, 80 aa, Zea mays
  Clone ID: MRT4577_173065C.1.pep
VATQARSRTVTEDPSKRAKQLARSLLRQRRLTDHSGTAGDPGAPSPAPATLDAALRSPEHLLFPDPLEMPLHPEAAPYFC

SEQ ID NO: 264755 - protein, 178 aa, Zea mays
  Clone ID: MRT4577_173066C.1.pep
MALYGSSRNVDMGKQESELAVSVRKATSIDEVSPKRKHVRACIVYTWDHKSSASFWQGMKVQPILADEVQTFKALITIHKVLQEGHPIVLKEAQSHTGWLESLSRGSSVGEGMRGYAPLISEYIYYLLAKLAFHRQHPEFNGTFEYEEYISLKSINDPNEGYETISDLMTLQDQIDAF

SEQ ID NO: 264756 - protein, 164 aa, Zea mays
  Clone ID: MRT4577_173067C.1.pep
MAMAASSSRLLWASRAAAYLRISTFPRAFSTVMKDLKYADSHEWVKVEGDSTTVGISDHAQRALGELVVVELPEVGISVSQGKTFGAVESVKAASDIYSPVSGEVVEVNEKLCDLPGLVNTSPYEKGWIMKVKLSNSGELNSLMDDDTYSKVCEDSKVGEDDNH

SEQ ID NO: 264757 - protein, 159 aa, Zea mays
  Clone ID: MRT4577_173068C.1.pep
MAMAAASSRLLWASRAAAYLRISTFPRAFSTVLKDLKYADTHEWVKVEGDSATVGITDHAQDHLGDVVFVELPEVGISVSQGKNFGAVESVKATSDINSPVSGEVVEVNEKLSEEPGLVNASPYEKGWIIKVKLSNSGDLNSLMDDDKYSKFCEEEDGH

SEQ ID NO: 264758 - protein, 85 aa, Zea mays
  Clone ID: MRT4577_173069C.1.pep
PQGGYKKRGGPPLFIGKKWGLTTPSLKTKKEKKRGSLGPGKLGAEKLKGGNHFGKGGLNPRELGGFGAQIGVHPRGGWGPTPPEF

SEQ ID NO: 264759 - protein, 229 aa, Zea mays
  Clone ID: MRT4577_17306C.1.pep
MELCPHVPSRERPLPWCTVPRPPCSPSRPSRDPPSQLPPSSRPRSIDGRCRPCHPRPAPRDTRRQVLLRLLDLGLRGARLACCGSRCHARSGSSTPSQHLPKILGSAPFLRSLCRIFYLFTSKVPGAEPSRILEPSRILEISHWHLVTVSDGWASDAAGRYRCLELDHPCKAPWCDGPLGALESNGWVYSAHCSFKLFVADASWRCLDGKWLFFWGDSNHVDTIRNLLT

SEQ ID NO: 264760 - protein, 205 aa, Zea mays
  Clone ID: MRT4577_173070C.1.pep
MQRAIQAIGSHGSVLKSAVLQHISVVKPAMLPAVFPRFMSVSPAQIEESGFESSTVADILKSKGKSADGSWLWCTTDDSVYDAVKSMTQHNVGALVVVKPGEDKSIAGIVTERDYLRKIIVQGRSSKSTKVGDIMTEENKLITVKPETRVLKAMQLMTDKRIRHIPVISGTEMMGMVSIGDVVRAVVSEHKEELNRLNAYIQGGY

SEQ ID NO: 264761 - protein, 98 aa, Zea mays
  unsure (1)..(98): unsure at all Xaa locations
  Clone ID: MRT4577_173071C.1.pep
MADARAKQFNTPQLDRYKWLNTTXIRSRAIDSRVTQQFNGCTNIANIXIALIRISAXYLPNKANKCKPANISNLEFTMIHNRRYCSXIAYNVSTKKRK

SEQ ID NO: 264762 - protein, 131 aa, Zea mays
  Clone ID: MRT4577_173072C.1.pep
AIGFLEAGRASLEARARRVGRGSWCASSGYSGLSPHHITTQRPKSSGRPSVRYLRPPLAPASLGDFRVVVVDDFGPAIAPSAAIIRLSSHLLLFGHGDVAAPSCHVLHRHRRRHGKQEGGGEGPNNRFDCH

SEQ ID NO: 264763 - protein, 30 aa, Zea mays
  Clone ID: MRT4577_173073C.1.pep
TSLVLGVLVGSFIIAGVAVGIFLCTGGRRC

SEQ ID NO: 264764 - protein, 59 aa, Zea mays
  Clone ID: MRT4577_173074C.1.pep
PTREKRQVPAGKLNTPRGSQHRACPPLSSSSIVGKFAPNFKPLRGKKTKPFHPLVGGSP

SEQ ID NO: 264765 - protein, 110 aa, Zea mays
  unsure (1)..(110): unsure at all Xaa locations
  Clone ID: MRT4577_173075C.1.pep
LLLCRKSEQELQNLLGATYAAVFFLGSANLLSSVPVFSIERTVFYREKAAGMFSPLSYSFAVVISXIPYRVLVVILSQLFLNPCRHKISTNASLLKPIGVCRQLWSLSTA

SEQ ID NO: 264766 - protein, 53 aa, Zea mays
  Clone ID: MRT4577_173076C.1.pep
IDDTRAIQVRSERHGGLFESDGRRVALASSLGLRGGSWDEDHIRTSSALLSQW

SEQ ID NO: 264767 - protein, 112 aa, Zea mays
  unsure (1)..(112): unsure at all Xaa locations
  Clone ID: MRT4577_173077C.1.pep
MGKNQAYKAMQRARLGSSSGAPGAVDAPEDGMXWHAARLASLNKTHTLTWEEFKKKQKEEELKRGELEADKDKMMREYRAQLDAERAQKLANGRNHSRSXXSSSSKKEXEDK

SEQ ID NO: 264768 - protein, 61 aa, Zea mays
  Clone ID: MRT4577_173078C.1.pep
VDSWDEFVERSVQLFRADPNTTRYVMKYRHCEGKLVLKVTDDREVGPITRETRELRCTTRQ

SEQ ID NO: 264769 - protein, 230 aa, Zea mays
  unsure (1)..(230): unsure at all Xaa locations
  Clone ID: MRT4577_173079C.1.pep
MGKNQAYKAMQRARLGSSSGAPGAADAPEDGMXQPLRNFGYHPTFALGERXEKELWLTRAVXTDGSFHSPEWHAARLASLNKTHTLTWEEFKKKQKEEELKRGELEADKDKMMREYRAQLDAERAQKLANGRNHSRSNSKSSSSKKERKDKDAKKRSKKRRKHKSSSESSSSSSSESSSSDDEDRGSRKSRSRSRSKRTRKEKKSRSRSKRRGSESEEEGPVRLSKFFGK

SEQ ID NO: 264770 - protein, 56 aa, Zea mays
  unsure (1)..(56): unsure at all Xaa locations
  Clone ID: MRT4577_17307C.1.pep
LPEPTTRELPRNEDPNLVRRNKMMLGQVFDGSLXKLQQEDKKLSNLEDFLRRSETH

SEQ ID NO: 264771 - protein, 166 aa, Zea mays
  Clone ID: MRT4577_173080C.1.pep
MGKNQAYKAMQRARLGSSSGAPGAADAPEDGMEEELKRGELEADKDKMMREYRAQLDAERAQKLANGRNHSRSNSKSSSSKKERKDKDAKKRSKKRRKHKSSSESSSSSSSESSSSDDEDRGSRKSRSRSRSKRTRKEKKSRSRSKRRGSESEEEGPVRLSKFFGK

SEQ ID NO: 264772 - protein, 132 aa, Zea mays
  unsure (1)..(132): unsure at all Xaa locations
  Clone ID: MRT4577_173081C.1.pep
MSLTNLADSKATSTRTLLTCKFMTNXRMLTRRHSRPEGMHTWRACASNAEXQERIAIIDDVNDPNSMFIFKIWTHFXXGKRSVFCLIYNYLXLSYKLKTTYLLIKKGLDTNYEKSGXLMIVRKNRAKHDPPL

SEQ ID NO: 264773 - protein, 181 aa, Zea mays
  unsure (1)..(181): unsure at all Xaa locations
  Clone ID: MRT4577_173082C.1.pep
MGKNQAYKAMQRARLGSSSGAPGAADAPEDGMTDGSFHSPEWHAARLASLNKTHTVTWEEFKKKQKEEELKRGELEADKDKMMREYRAQLDAERAQKLANGRNHWSNSKSSYSKKEXSSESSSSLSSESSSSDDEDRGSRKSRSRSSSKRTKQEKKHRSRSKHRDSESEEGPVRLSKFFGK

SEQ ID NO: 264774 - protein, 121 aa, Zea mays
  unsure (1)..(121): unsure at all Xaa locations
  Clone ID: MRT4577_173083C.1.pep
GHCVEFLRLQFSPTPTPYCSPQFQSFRQQCFQXLWQLDPQHRFQAILGLVPQSXVLPHSPXSFQVPGLLAXQLSQQLPTFSVLSILFHTPTVFPPCPPLGEPSLVVLPLASWLVEFFSVDV

SEQ ID NO: 264775 - protein, 95 aa, Zea mays
  Clone ID: MRT4577_173084C.1.pep
GHRDMKPENFLFKSKKEDSPLKATDFGLSDFIKPGRQFRDIVGSAYYVAPEVLKRRSGPESDVWSIGVITYILLSGRRPFWDKTEDGIFKEHMIG

SEQ ID NO: 264776 - protein, 63 aa, Zea mays
  Clone ID: MRT4577_173085C.1.pep
FHQPSEIICIEYYIQTHQSTVQNEKAYWVQYLLLTSRRLMESVTMFSIECSNSKRVWLSCVAS

SEQ ID NO: 264777 - protein, 503 aa, Zea mays
  Clone ID: MRT4577_173086C.1.pep
MNRPSCRLRGRRRRPARRTRTPTAPAASPCTPGSSPSLPRRQARRDQIGIGRGGAGAWGPEIPFVPERVAVKRIDKNKMVLPVAVEDVKREVKILKALQGHENVVHFYNAFEDDNYVYIVMELCEGGELLDRILAKKDSRYSEKDAAVVVRQMLKVAAECHLHGLVHRDMKPENFLFKSKKEDSPLKATDFGLSDFIKPGRQFRDIVGSAYYVAPEVLKRRSGPESDVWSIGVITYILLCGRRPFWDKTEDGIFKEVLKKKPDFRRKPWSNITSSAKDFVQKLLVKDPRARLTAAQALSHDWVREGGKASEIPLDISVLHNMRQFVKYSRFKQFALRALASTLNSEEMSDLRDQFNAIDVDKNGTISLEELKQALAKDVPWRLKGPRVLEIIEAIDSNTDGLVDFEEFVAATLHVHQLVEHDTEKWKSLSQAAFDKIDVDRDGYITPDELRMHTGMKGSIDPLLEEADIDKDGKISLDEFRRLLKTASMSARNVQTPRGVRKS

SEQ ID NO: 264778 - protein, 47 aa, Zea mays
  unsure (1)..(47): unsure at all Xaa locations
  Clone ID: MRT4577_173087C.1.pep
TLMLSLARNLSYPQGYFDLLLQPGAXPPIFLIDILTRGTQIESTPLC

SEQ ID NO: 264779 - protein, 88 aa, Zea mays
  Clone ID: MRT4577_173088C.1.pep
QGHAGCQRRLPRVGAVAARLRRAAAADDDQRRRPRLHHPAYQHEPPTSLRAVGGEVAPIRPTALGRRSLLYCSTASSQQHTERGHQDS

SEQ ID NO: 264780 - protein, 136 aa, Zea mays
  Clone ID: MRT4577_173089C.1.pep
MATRRRQATAAATLALLLLLSVSAASPSSSPPALLTAAATSRKVLHWKQLGYPATRLFCPWDAVKFGACVGLLGAAGLQGGAQLGSKCCDVVQGLAAAEVGACFCTTVKEAVLGVPTEWDVGVRRPRQRLTDGAAR

SEQ ID NO: 264781 - protein, 88 aa, Zea mays
  Clone ID: MRT4577_17308C.1.pep
IYTVMRRLFNRTVTRVTLHLWECNITYLVFFVIHYEENKPLILQSQGPLTAACGKTYLWKIAFHRLSCSVRPHPLELPRRRSQTLRVP

SEQ ID NO: 264782 - protein, 81 aa, Zea mays
  unsure (1)..(81): unsure at all Xaa locations
  Clone ID: MRT4577_173090C.1.pep
GPPLFWCXIVNSALXTSIVGVLQGVGSTTLGFXVLLGGVXVHAFNVSGLVFSTFGGVWYSYAKFKKKKKKKKKSTLRCYHC

SEQ ID NO: 264783 - protein, 80 aa, Zea mays
  Clone ID: MRT4577_173091C.1.pep
AYPEANGNEIGIPRGIPTTHFQEIRRQKCSYMNRNYLLSYYAYPEAKGNEIGIPRRITITHFQEIRTHKCSYMNRNHLMS

SEQ ID NO: 264784 - protein, 357 aa, Zea mays
  Clone ID: MRT4577_173092C.1.pep
MGMPQSFEELMQESNDEGCANVYSSGPGNVSKDSEDVPLPDSHALLHVTNRRKPKAMKSDQEQFRGRAGELLIPQDPCDGNDALRHKNTVPCVVSSLSSRESEAILVIKQLQDQIKLLEAEKSSVQTNLDAVLVLATQQKVSFNEEYEELQQITLAAEEQAKVANENLSTLSATVKSKQELAYEFLGNLLMETQGINVEMDQWRNSVDSALSFIDELFQNLCIMAQGIREVNHSAHEDSARSCSVIRDYEKLSTCLMDKVYKLELEKKLLEEQSQDQQNEIYKLKANLESCEKAIDDCTLQHELEKDAILLELLNLQKEVSILSSSSLMKEKESIRKELDRTKSKLRETEDKLKNSI

SEQ ID NO: 264785 - protein, 143 aa, Zea mays
  unsure (1)..(143): unsure at all Xaa locations
  Clone ID: MRT4577_173093C.1.pep
FCPCLGVFFPLGFVLSGLPLAGPVFXVVVRGVSCGAVVAFVPFVPPWCCGPSWVVFLCRGSPCVSLLSLRLVLGWLVWPCVCGFCXVVFRFXFLVCLPGGPSFPXFLAWVCRCGFFYFTPSPFFCGRPPSMEIVGPGIDSGPV

SEQ ID NO: 264786 - protein, 65 aa, Zea mays
  Clone ID: MRT4577_173094C.1.pep
PPLKRLKYRIFSATTATNRHKPITRTRTRTRSTLDSPVRSRPMHTKCISRVAQSPQTVFRTRHSD

SEQ ID NO: 264787 - protein, 325 aa, Zea mays
  Clone ID: MRT4577_173095C.1.pep
MFDELQERISSTHAEKEEVAEKVAVHERTISHLTEEHTRTLELHSVAESKNGEIEAQLREALETIAQKEGEAKELCKKLDALEIELGYYEEQATEAAAAEENHKVKFDEASQKIKILEEQLAETQSKLEHFLIEKESLTQTNSTLNEELEVHQNKLNDLQLALAAAVAEKEEASEEIHSLHKTLDGMMEHKAELEIQVSSTIQEHEELKSKYQNTMEEKHALSDKYETAKKELEDAIAKLEEEMNVDKSEKESHISKLERQITLSEIKYMEEIKTMQVETTEKNEALTAKMQGHTDLQHEKDELEQQLLEVRKELDGTYHTMPNH

SEQ ID NO: 264788 - protein, 59 aa, Zea mays
  Clone ID: MRT4577_173096C.1.pep
VCGGVGIGSFRRRRRGARRDRPWGAWLLRGARRMSLDLCSLSRLCGWAIGGFLPLRCAV

SEQ ID NO: 264789 - protein, 461 aa, Zea mays
  Clone ID: MRT4577_173097C.1.pep
MSVQATEAAAAEEDHKVKFDEASQKIKILEEQLAETQSKLEHFLIEKESLTQTNSTLNEELELHQNKLNDLQLALAAAVAEKEEASEEIHSLHKTLDGMIEHKAELEIQVSSTIQEHEELKSKYQNTMEEKQTLSDKYETTKKELEDRIAKREEERKVDKSEKESHISKLERQITLSEIKYMEEIKTMQVETTEKNEALTAKMQEHTDLQHEKDELEQQLLEVRKELDGAYHTIANQEEQASVREIKWDAFRKYTEDRLEAEQQRAEELELQVAALKQQLQEAEIHYKQKEEQVSLREVQWEADQNHSLDELNAQRQYATDLEKQIEDLTQKLTSADAHYKQKVTEERDKLVEVTKELSELTQKVSESIELERKVQDLEQKLQLAYSKSDEQAVDTVESRSREFSLDSSTSSGKQQDKTQAVSPNPTLQGVQEPSGIMAFKFILGVALLSVLIGVFLGKRY

SEQ ID NO: 264790 - protein, 54 aa, Zea mays
  Clone ID: MRT4577_173098C.1.pep
KKKISPHRKKTRPGKLPKCSHPGLPTPENLERKPFPGDLKNPTHQGGLTGPRFN

SEQ ID NO: 264791 - protein, 124 aa, Zea mays
  Clone ID: MRT4577_173099C.1.pep
NPGGPSLTKNFTIPRGWEKLFFAPRFWQPQPRTPNAPKKGPFWEPQSCPPDKKPQPGSLGSGEAPQGNRGVAKPVGPKGVQTLDNNPLVGTESPPFLPPRGGPKSHFGYTLGRVFPPDPWIHPL

SEQ ID NO: 264792 - protein, 92 aa, Zea mays
  unsure (1)..(92): unsure at all Xaa locations
  Clone ID: MRT4577_17309C.1.pep
IRLERKAGIFFDGDVIIGGGMFVEYGGALPNNGRSILGDCMYKIITDDGFDPNGFLXSWWTLLSEHKIVDLNDRIEDFVGIRHRKISNKLYW

SEQ ID NO: 264793 - protein, 54 aa, Zea mays
  Clone ID: MRT4577_1730C.1.pep
GIKTWGGLLRLMEVLLHSHRQPATPPAVPKAREYIPGACLCDAGKLNTNTHKSS

SEQ ID NO: 264794 - protein, 69 aa, Zea mays
  unsure (1)..(69): unsure at all Xaa locations
  Clone ID: MRT4577_173100C.1.pep
GWAYVVFDVLEAILRVLASMVKGLQFLSIFCNMLHTLXLLEHLMFQLCTINLMVLLLECYTPITKQHNR

SEQ ID NO: 264795 - protein, 116 aa, Zea mays
  unsure (1)..(116): unsure at all Xaa locations
  Clone ID: MRT4577_173101C.1.pep
GPSPLRLVGPLYPEVVLVGGGDSCRMPRGLALXDRFGPGGPFAPRGAVRPPGPAPIPRVEGPRHGGVALFRLFALFLQGCVPRPGPGHSLSHRVNPPFGPHLPPVLPGAPRSPPRL

SEQ ID NO: 264796 - protein, 223 aa, Zea mays
  Clone ID: MRT4577_173102C.1.pep
DPRGLPGEKSRRLELAFSLRFSLSLIFLIYYARRIDRITQLGWSRLFLWPRASSSAERCCSAPCCVSLPWRAQAPARPALRFRLPLRISLWSLALSGARSPSACSRRAPLLAGRPSLYPLARSRVPALLVGRAGPCWCSAPVDRARCSLHSPGVRPCLPMAGTPSAAATFLWCLASSPSGWLKPHRGTPARLVSAPRHSLWSALPSARPWRVPPVSVLSLLAS

SEQ ID NO: 264797 - protein, 103 aa, Zea mays
  Clone ID: MRT4577_173103C.1.pep
GYGQWAVSLRESHESPQKQPGGISDRFGTPWFGLIAGLVVSSRPRLPQLASLEAKSGPCFVWIASGEAVACTGVILGPASCGTARRLLAPAGASSRRGRSPTA

SEQ ID NO: 264798 - protein, 96 aa, Zea mays
  unsure (1)..(96): unsure at all Xaa locations
  Clone ID: MRT4577_173104C.1.pep
MMLVLVVLAFIALISRVSCTQTGGCCCGQHHCHVLLHHPHHHHPLYHLHLPPPLHLLLLLHQQQHVLMLPLXHLQHHDVHVQQQHQLPLLLLLLLL

SEQ ID NO: 264799 - protein, 117 aa, Zea mays
  unsure (1)..(117): unsure at all Xaa locations
  Clone ID: MRT4577_173105C.1.pep
TSELSFYQRKVFRVAEHAGVTFASLPTXRVLSRFLCNECINHSFIYETPLPVSRLADKLQAWLDPVNLLSGKSSYCGFCGEPLQFVLQVFSLCAMKLPQSTAYCLDIDLVTVRLGCV

SEQ ID NO: 264800 - protein, 108 aa, Zea mays
  unsure (1)..(108): unsure at all Xaa locations
  Clone ID: MRT4577_173106C.1.pep
GGKHKTRGKKRKDELGRQPGDTKLCSNNTVRKVRLRXCNVKRKALLLDTRYYSWGSGALTPKIHILDVVYNASNNELVKAETLVKSXLVQADAGPLXQRGLTHYRVDI

SEQ ID NO: 264801 - protein, 50 aa, Zea mays
  Clone ID: MRT4577_173107C.1.pep
LKQLLYLCLISTPPPPKQVELPLNSLCNHKTHNHFTTSKPMITTNLSPHT

SEQ ID NO: 264802 - protein, 393 aa, Zea mays
  unsure (1)..(393): unsure at all Xaa locations
  Clone ID: MRT4577_173108C.1.pep
MAPPARSPTAGPRRRALVVLALALLLLLPLLLLLHLISSPSPRHLPAPRTPSQSQACDYSAGEWVRDPFAGSSLRYDHTCKEIFKGWNCIANGKGNARDLLSWRWTPAGPGCELPRLDPRRFLERHRDTSIGFVGDSLNRNMFASLVCMLRGVNGEVRKWRPAGADRGFTFLRYNLTVAYHRTNLLVRYXWSRNPNGGPLESLGYKQGYRVDVDIPDQTWVEXWWAPSKFDPIRSPMLFFEKGRPIVPPLLPPAGLDLALQNMISFANKATRPNTVKFFRTQSPRHFEGGDWNEGGSCQCNQPLSSKEVEEIFSLDNNSTNVEARLVNQHLVKALQQTSFRVLDITRMSEFRADAHPSTTGGKKHDDCMHWCLPGPTDTWNDLLALSLEALES

SEQ ID NO: 264803 - protein, 146 aa, Zea mays
  Clone ID: MRT4577_173109C.1.pep
MAPPARSPTAGPRRRALVVLALLLLLPLLLLLHLTSSPSPRHLPAPRTPSQSQACDYSAGEWVRDPFAGSSLRYDHTCKEIFKGWNCIANGKGNARDLLSWRWTPAGPGCELPRLDPRRFLERHRDTSIGNLSPPVSLSLKNTSEI

SEQ ID NO: 264804 - protein, 53 aa, Zea mays
  Clone ID: MRT4577_17310C.1.pep
RNAEPKIMIRSCKKVVPKGAQRKFSAQKSFLKECRAKKYDPKLHKSRSQGSTA

SEQ ID NO: 264805 - protein, 93 aa, Zea mays
  unsure (1)..(93): unsure at all Xaa locations
  Clone ID: MRT4577_173110C.1.pep
QQGHRGGGAKRAXXDXXRPXGGTEDXGENXNXXXXXXXXKXXXXRGGGXXXXPRXXXXKEGPRXXXXXAKXQGKNAXXPGRGGAATXKPPRNA

SEQ ID NO: 264806 - protein, 243 aa, Zea mays
  Clone ID: MRT4577_173111C.1.pep
DRGFTFLRYNLTVAYHRTNLLVRYGRWSRDPNGGPLESLGYKQGYRVDVDIPDQTWVEACSFHDVLIFNTGHWWWAPSKFDPIRSPMLFFEKGRPIVPPLLPPAGLDLALQNMISFANKATRPNAVKFFRTQSPRHFEGGDWNEGGSCQRNQPLSSKEVEEIFSLDNNSTNVEARLVNQHLVKALQQSSFRVLDITRMSEFRADAHPSTTGGKKHDDCMHWCLPGPTDTWNDLLALSLESLES

SEQ ID NO: 264807 - protein, 169 aa, Zea mays
  unsure (1)..(169): unsure at all Xaa locations
  Clone ID: MRT4577_173112C.1.pep
APSKLXSIRAPMLFFEKGRPIVPPLLPPAGLDLALQNMLTFANKAMRPNTVKFFRTQSARHFEGGDWNEGGSCQRNQPLSSEEVGEFFSLDNNSTNVEARLVNQHLVKALEQQSSFRVLDITRMSEFRADAHPSTTGGKKHDDCMHWCLPGPTDTWNDLLASSLEVVER

SEQ ID NO: 264808 - protein, 87 aa, Zea mays
  Clone ID: MRT4577_173113C.1.pep
LCLALLYNPFSRNTSAGKFRRGVMAAAPANLNCNARELKLGEYLEILSDMIGYEAHKDDTAGYTSLSVAYSLEYIIVGRWFNYIDAL

SEQ ID NO: 264809 - protein, 67 aa, Zea mays
  Clone ID: MRT4577_173114C.1.pep
FWVSPRVKRMSTAWPGNGIRIPLKGEPLTLLCSCYGRLFFFFAPFLFFFFFFFFFFFFFFFFFFLTT

SEQ ID NO: 264810 - protein, 148 aa, Zea mays
  unsure (1)..(148): unsure at all Xaa locations
  Clone ID: MRT4577_173115C.1.pep
GVCRAPIIQHFAESIAGSSSIRSFGKEDQFVSTNSRLTDAYSRPKFYNAGAREWLCFRLDLLPSLAFAFSLIFLINLPTGLIDPGXVWSMCTLENKIISVERILQYMGVPAEPPLVMPENKLAQSWPSNGEIQLQNLHVKYAPQLPFV

SEQ ID NO: 264811 - protein, 69 aa, Zea mays
  Clone ID: MRT4577_173116C.1.pep
MVFFGPGGGGKNRLHNFKGGGSLGFPLQIGGGLPKRWDTGEHSPGKKFYPFFFREGGLAGFYINCLVGF

SEQ ID NO: 264812 - protein, 60 aa, Zea mays
  Clone ID: MRT4577_173117C.1.pep
PTRPKKKKKKILKKKKKKKKGNNPLGFGSARGVFVWGRPFSGFHASVRVLVRSSFFYCVA

SEQ ID NO: 264813 - protein, 101 aa, Zea mays
  unsure (1)..(101): unsure at all Xaa locations
  Clone ID: MRT4577_173118C.1.pep
KKGKKKAKKSVETSKIXIFRVLNQVPPDIGIWSKAMSIMNSFTNEIFKNRAAEGAKLAGYNKKPPIRSREIKTSVRLVLPGELPKHPVSEGPKPVPKFPSS

SEQ ID NO: 264814 - protein, 73 aa, Zea mays
  Clone ID: MRT4577_173119C.1.pep
MILGSLLQLALLHRLDGYSVHADSDPEAVLLRLGYECDYLMAIARPRLQISTVVDVATGKGVKSDVRTSSGMF

SEQ ID NO: 264815 - protein, 147 aa, Zea mays
  unsure (1)..(147): unsure at all Xaa locations
  Clone ID: MRT4577_17311C.1.pep
VRAFLRAEARGRRPARPLLHRRHHHRQQGPPRHVLGSGDLYAVCAGDASGGVGVGVGGLYEVVYNNVVSLCVKAIGWRPERRFKWKLLDGXDGEKRSAHFPMVLVQMPMYNELEVHKLLAAACELQWSKDRIIVQVVDYSTDPFIKT

SEQ ID NO: 264816 - protein, 135 aa, Zea mays
  unsure (1)..(135): unsure at all Xaa locations
  Clone ID: MRT4577_173120C.1.pep
CSLKYFFFYGELIQVLRYEASQYYRPHHDYFSDTXLTISKFNLKRGGQRVATMLMYLTDGVVGGETHFPQAGNGECGCGGNVVKGLWVKPNKGDAVLFWSMGLDGNTDPNSIHSGWPVLKGEKWAPTKWMREKMT

SEQ ID NO: 264817 - protein, 227 aa, Zea mays
  Clone ID: MRT4577_173121C.1.pep
MDIQSARLGRSGRFSKKKLVSILKSWRARLKVSSHKKLETPKHDCEIPEAVEHEEVAAPRCPKGPLPQRDLSPLGEACSRMNMTAIHEILVNRHYRDDDLDPNVPSLEEWTQQSRDMLDDRKRGDFTFRDKDFRAAIDWYTKCMDVGPKKASPTVLVRRSCCHLMCGNLDAALRDAMQAQRQYPDCPTSLYMQAVALSKLGMHSQAMGMLIEASEMEANQKKTRKAA

SEQ ID NO: 264818 - protein, 263 aa, Zea mays
  Clone ID: MRT4577_173122C.1.pep
MARWRARRLLPLATFVTLGMILGSLLQLALLHRLDGYSVHADSDPEAVLLRLGYVKPEVISWTPRIIVFHNFLSSEECDYLMAIARPRLQISTVVDVATGKGVKSDVRTSSGMFVNSEERKSPVVQAIEKRISVFSQIPKENGELIQVLRYEASQYYRPHHDYFSDTFNLKRGGQRVATMLMYLTDGVVGGETHFPQAGDGECSCGGNVVKGLCVKPNKGDAVLFWSMGLDGNTDPNSIHSGCPVLKGEKWSATKWMRQKMTF

SEQ ID NO: 264819 - protein, 79 aa, Zea mays
  Clone ID: MRT4577_173123C.1.pep
IFTSGGLVKVKVLFCSTENGRTSFVRQLEPDWHIDTNPEIVSQLARFIKYQLHVSPTRPERTAPNVFSCPSLEHFFGCV

SEQ ID NO: 264820 - protein, 79 aa, Zea mays
  Clone ID: MRT4577_173124C.1.pep
MSYLRDIIHMDLKPANILVHDQMVPKIADFGLSRLAEVSRTMSNERLLSLGYCAPEYQYHGKMSLKSDIYSLGVIMLEL

SEQ ID NO: 264821 - protein, 230 aa, Zea mays
  Clone ID: MRT4577_173125C.1.pep
MTRSQSARLQLGRSGRFSKKKLVSILKSWRARLKVSSHKKLETPKHDCEIPEAVEHEEVAAPRCPKGPLPQRDLSPLGEACSRMNMTAIHEILVNRHYRDDDLDPNVPSLEEWTQQSRDMLDDRKRGDFTFRDKDFRAAIDWYTKCMDVGPKKASPTVLVRRSCCHLMCGNLDAALRDAMQAQRQYPDCPTSLYMQAVALSKLGMHSQAMGMLIEASEMEANQKKTRKAA

SEQ ID NO: 264822 - protein, 65 aa, Zea mays
  Clone ID: MRT4577_173126C.1.pep
VLPCSPDLKSPLGSGLYSPSLSCRSVMPPSPRRKVADVGPQQVASKLSCSGKSRRRYSVAETLNL

SEQ ID NO: 264823 - protein, 47 aa, Zea mays
  Clone ID: MRT4577_173127C.1.pep
VTADAIGSTSMQVDARTYMSSKADGKHAERDSQLKNSDHLSIAHTAQ

SEQ ID NO: 264824 - protein, 37 aa, Zea mays
  Clone ID: MRT4577_173128C.1.pep
FTNSHRSKYINSQIHIEVHIHRWHIFRFTNSHKFTSN

SEQ ID NO: 264825 - protein, 67 aa, Zea mays
  unsure (1)..(67): unsure at all Xaa locations
  Clone ID: MRT4577_173129C.1.pep
SDEHLPTPTAHILSPQTMGDSDTVYSEHSAYSTFGQRTSFLRGLGRAHKMAAPXFEEQEGGESFPPC

SEQ ID NO: 264826 - protein, 527 aa, Zea mays
  Clone ID: MRT4577_17312C.1.pep
PPCGCCYNEELLRDSCSAVSVYGRYHTMEDHTEGLDECVAEAFLFRLNSLVDASEQLVDFKKGEDDGLNLSALEKELQMLTPYLADEDALESTGLEDDVRGNTNLDVCMVTNEENANGKEFLKDSYCILPSPESAVPFDVYGVEDFKTEDTDLQNPTARKFQEDPKIDPALSKFQQEYEVFDLKIFHRKNRTGFEENKEFPIVMDSVIAGRYRINEYLGSAAFSKVVRAHDLRTGVDVCLKIIKNDKDFFDQSLDEIKLLKFVNKYDPPTRPHIRPLYDYFYYQEHLFIVTELLRANLYEFQKYNQESGDEVYFSLPRIQAIARQCLEALVYLHHLNIVHCDLKPENILLKSYSRCEIKVIDLGSSCFLSDNLNLYVQSRSYRSPEVILGLPYDQKIDIWSLGCILSELYTGEVLFPNESMPIILARMIGIIGPIDMEMLASGQETQKYFTDDYDLFHTNEETDQLEYLIPEKSSLRRHLQCPDKKFVDFLSYLLQINPRNRPTASEALQHRWLSFKYSSTANQTRS

SEQ ID NO: 264827 - protein, 44 aa, Zea mays
  Clone ID: MRT4577_173130C.1.pep
PKRFSLQKVLCWTPKGFGFEPLDSRFSGMFVPIVGPFWGFANSN

SEQ ID NO: 264828 - protein, 36 aa, Zea mays
  Clone ID: MRT4577_173131C.1.pep
FWYNQKIVWDIELWEALTVSGVSLTFHRWGVSFYIL

SEQ ID NO: 264829 - protein, 84 aa, Zea mays
  unsure (1)..(84): unsure at all Xaa locations
  Clone ID: MRT4577_173132C.1.pep
VRKLGIRLEAGGNTIDGADRSAGMRMAYICRARTYINGTRYRGIWSAVTDPHGNXSLXLTKVKSTLWSGSMGLKALAVMCPSNI

SEQ ID NO: 264830 - protein, 256 aa, Zea mays
  unsure (1)..(256): unsure at all Xaa locations
  Clone ID: MRT4577_173133C.1.pep
MAPRKFFVGGNWKCNGTGDDVKKIVTFLNEAEVPSEDAVEVVVSPPFVFLQQAKGLLRPDFAVAAQNCWVRKGGAFTGEISAEMLVNLQVPWVILGHSERRALLNESNDFVADKVAYALAQGLKVIACIGETLEQREAGTTMEVVSAQTKAIAEKTSDWTNVVLAYEPVWAIGTGKVASPAQAQEVHDGLRKWLHANVGPAVAESTRIIYGGSVNGANCKELAAQPDLDGFLXVGGASLKPXEFVVIIKSATVKSS

SEQ ID NO: 264831 - protein, 416 aa, Zea mays
  unsure (1)..(416): unsure at all Xaa locations
  Clone ID: MRT4577_173134C.1.pep
MRSTRCIKKRSDVGTNINGNGEFVVDYDYLIVSVGARPNTFNTPGVTENCHFLKEVEDAQKIRKSVMKCFERAALPNLSEEERKKNLHFVIIGGGPTGVEFAAELHDFVNEDLAKLYPDVKKHVNISVIEAGGHILTMFDKRITQFAEEKFKRDGIDLKTNFKVVKVSNKDILMTNPATGEVAVPYGMAVWSTGIGTRPIIMDFMKQVGQENRRVLATDEWLRVQGCEDVYALGDCATIAQRKVMEDVAAIFRVADKDNSGTLTVKKIKDVLGDIYERYPQVELYLKSNQMKGFHDLLKDSDGSSKEFKELDIEQFKRALAQVDSQVKMLPATAQVAAQEGSYLADCFNRMKMCEEYPEGPIRIRXYKHLGQFAPLGGEQTAYQLPGDWVHVGHSTQWLWYSVYASKQFSWRTRML

SEQ ID NO: 264832 - protein, 671 aa, Zea mays
  unsure (1)..(671): unsure at all Xaa locations
  Clone ID: MRT4577_173135C.1.pep
MASNGMSLVHRAAEAVRRTPRWKKRLVLFAVGASTLTYACQDNRVLQICDGTGNKKKVVILGTGWAGASFLRNIDTSLYDVHVVSPRNYFTFTPLLPSVTCGTVEARSIVEPIRNIVRKRNGSFRFWEAECIKIDPRNKKVHCRSDVGTNINGNGEFVVDYDYLIVSIGARPNTFNTPGVTENCHFLKEVEDAQKIRKSVMKCFERAALPNLSEEERKKNLHFVVIGGGPTGVEFAAELHDFVNADLAKLYPDVKKYVNISVIEAGGHILTMXFVRCFVTHXYLLRLIXNRQLYCGDTKXMVRCDFALFSFLRKTKYYVMFLMFMQLIXRFVKYLLNQLICLIHLLPSDILDLLRSFYNIPWFIXFDKRITEFAEEKFKRDGIDLKTNFKVVKVSDKDITMTNPATGEVAVPYGMAVWSTGIGTMYTXVQYQHDFXQENRRVLATDEWLRVQGCEDVYALGDCATIAQRKVMEDVASIFRVADKDNSGTLTVKKIKDVLGDIYERYPQVELYLKSNQMKSFHELLKDSDGNSKELKELNIEQFKKALAQVDSQVKMLPATAQVAAQEGSYLADCFNRMKTCEQYPEGPIRIRGAGRHRFKPFRYRHLGQFAPLGGEQTAYQLPGDWVHVGHSTQWLWYSVYASKQFSWRTRMLVISDWGRRFIFGRDSSSI

SEQ ID NO: 264833 - protein, 50 aa, Zea mays
  Clone ID: MRT4577_173136C.1.pep
STPTLSHFLISHSLSLPGTIVTCSRILHSYTTNHPSYSAISHYPLISYTP

SEQ ID NO: 264834 - protein, 84 aa, Zea mays
  Clone ID: MRT4577_173137C.1.pep
DHLEIHRVLVPRPQVGPGAPRYSRAPPAQCTCTLPPQTLPIWCLFRTVTYLVRLVYIGHAGCLARVCAHSRVLTLMMGGPTLPG

SEQ ID NO: 264835 - protein, 83 aa, Zea mays
  Clone ID: MRT4577_173138C.1.pep
GSSRGAEGDEGQEHHQRPAHEPLGVGPGPAALRSPISIACHLPAVPIDVGQVSPPVPPLSTAAVAAARRGRQAPTGDEWLAES

SEQ ID NO: 264836 - protein, 226 aa, Zea mays
  unsure (1)..(226): unsure at all Xaa locations
  Clone ID: MRT4577_173139C.1.pep
VAGFINLXLSIPAXGYDNSLVYIMSEWSQLQGEIQGAYQIKVTTTALALLISTRHPELSKVEVQGHLIKTSAGITTRSKARVTPDQWTKIPLPVKIFSLLADTLTEIQEQIGAGDDDDSEEDNDWEEVQNGDASISDDIIHSASVPSMTNPSVEHLNAMAKVFDEDDDDSYDDDLTKNDPLNEVKLADFLTNIFANLWENNRPIFEYLCQGLSDSQRSAVEKVLRR

SEQ ID NO: 264837 - protein, 139 aa, Zea mays
  Clone ID: MRT4577_17313C.1.pep
LWARSGGVPFALLGGHIFGKAFGLGPFGCIPAGEKGVLCHGVFLGDARGFPGTKLLNPGPGIERWAPPISHLALEGRGVDPGALWRGPPFCLWFFFFCLFFFFALFSFVSFAFFFFCPLLFFCHLFFALSLLLFVRSFV

SEQ ID NO: 264838 - protein, 77 aa, Zea mays
  unsure (1)..(77): unsure at all Xaa locations
  Clone ID: MRT4577_173140C.1.pep
KTHANPIIQIPQKLXSVRYDRIASRRRFARTPLEHSKDHWASQYSGSVASTRRPRASRRCRRTAFALARVTQSALLT

SEQ ID NO: 264839 - protein, 89 aa, Zea mays
  Clone ID: MRT4577_173141C.1.pep
TKGPGEFSWWPPPQCVILLQGAIAPRVVLVCPLFHLLKRVTPPRGFCFPLLWRVSSGRKLFYSCFLGLNTGCKKQDLTLNNRSIKGIQI

SEQ ID NO: 264840 - protein, 834 aa, Zea mays
  unsure (1)..(834): unsure at all Xaa locations
  Clone ID: MRT4577_173142C.1.pep
MKQWRDDVDRLLSMAHSTSTRSRPRSSRRQHEVSASMCSPPVRGAQTNDLRAELNRRRVGEDAQISLERACERRQNIEGRNLDQDFAAAAPQAPMDTRSQVGVPLAGVGCAALADHLRAASWPPKFRSHLPESTTECQIRRSSCSERREQPSKDDSPLRRQPGKERVDDGKVAAGERELGYQSPEGDLKDVLTEDSDSRDDSDRRKKLGPEGCPQQRWRSTTIFFGAPDCLDNMAGASILPLITAPVIANMRLHHVLIDGGAGLNVISHAAFKQLQIPGSHLGPSCPFSGVGPQLVYPLGSIALPVTFGTEENFRMENVVFDVAEVNLPFNAIIGRPTLYRFMAIAHYGYLVLKMPSPTGVLTVQGDXATALAAIEKLHAMAAETARPDDGRRDPSXPLAPRRPSRRQRYNHPEXGWEVIEHCLKINPDAKPVSQKPRRQSVERQDFIRKEVRKLLDAGFIEEVHHPIWLANPVIVPKANGKLRLCIDYTSLNKACPKDPYPLPRIDQIVDSTSGCDLLSFLDAYSGFHQIQMSREDRKHTAFVTVDGLYCYVVMSYGLKNALPTLVRAMSKTFGDLIRDNVEVYVDDIMVKTKKGSTLVEDLTLVFDKLRATRTKLNPDKCVFGISAGKLLGFLVLYRGIEANPEKIRAIEAMRPPGRVKDVQKLTGSLAALSRFISRKLHHYFQAHMIVVVASFPLRTILHNSNAIGNIAKWAAELAEFHLDFRPRHAIKSQVLADFIIEWTPPASVPKGLGPNSDPTPVEPRGPVFTEPHWTLYFDGSARQQVGGIGVILIDPSGDQVKYMVHLEFKATNNMAEYEALIFGLSATLSLGIR

SEQ ID NO: 264841 - protein, 35 aa, Zea mays
  Clone ID: MRT4577_173143C.1.pep
KLKVLSLDGLWIDLGSNLTVQELSHKYACCQSSLS

SEQ ID NO: 264842 - protein, 176 aa, Zea mays
  Clone ID: MRT4577_173144C.1.pep
MKASGTLREYKVVGRCLPTPKCHTPPLYRMRIFAPNHVVAKSRFWYFVSQLKKMKKSSGEIVYCGQVFEKSPLRVKNFGIWLRYDSRSGTHNMYREYRDLTTAGAVTQCYRDMGARHRARAHSIQIMKVEEIAASKCRRPAVKQFHDSKIKFPLPHWVLRRQHKPRFTTKRPNTFF

SEQ ID NO: 264843 - protein, 172 aa, Zea mays
  Clone ID: MRT4577_173145C.1.pep
MYPFMCSLLTGHANLLCSCSLTGGTGIAGLTTPVAIPTVSVLGAAPAAAPLLHPTVPGLAIPGATLPITTPSIDLAPPSQCLLLKNMFDPALETDPDFDLDIRDDVQEECSKFGQLKHIFVDKSTAGFVYLRFDSITAAMSAQKALHGRWFAGKMITATFMTPQQYEMKFPS

SEQ ID NO: 264844 - protein, 425 aa, Zea mays
  Clone ID: MRT4577_173146C.1.pep
MEGSPVARLPEANSLPDGFVPDSESSDTDAAPPSSAPIVDDAIDSDSPDATNPGGEETLGDPSLPASTAEDASSTAAAEALDTLCLDVVADPERVLGEHGPTSAARGEGSLKENRASEQVGAPSDQKVVKGSGEPKRKVIKHSKLEKDKELFQLAQQYHKVVAERDQAIAVKDRLESLCREFQRQNKMLKEECQRVSTEGQNMRTELSEKFDHAIKGVSAKLEEQRVERISQLEENNTLRSKLKDLADQYNITQQKYAHQLKEKMLELELADLRLQQHQEKAAQEHTQMQLYAEQVSQLMTTEKNLRLQLASDGERFQHFQDALSKSNEVFETYKQEMEKMISVIKNLKKENEFLKGKCENSDIAIVKLIEERELTKKQIEKLKNQREKLESLCRTLQAERKQGPSASIPDAPSSQEVSATSQES

SEQ ID NO: 264845 - protein, 41 aa, Zea mays
  Clone ID: MRT4577_173147C.1.pep
GITVWKPAMALIIGVPPEPMTPGQCQMVVERLAGSLIEPGF

SEQ ID NO: 264846 - protein, 153 aa, Zea mays
  unsure (1)..(153): unsure at all Xaa locations
  Clone ID: MRT4577_173148C.1.pep
MEGCAEARDRGTVLVTXGRADWYDSWLDMMVLRGYYTVRATXRDPGTTLRXSPLMDLPGASQRLCICKAXLEEEGNFHNNIKGCNLIFHXIAAPMDFLLNDTGDEVIKPLEYRIMTIMTACEEDGTYLRIDVAYSADTAKLKNGAKTDYYDES

SEQ ID NO: 264847 - protein, 53 aa, Zea mays
  Clone ID: MRT4577_173149C.1.pep
RFPWQQEVCLEEARSESSPRPPPLVYPRYSAHPQQKNFLFGPPLAPEKKFNTG

SEQ ID NO: 264848 - protein, 91 aa, Zea mays
  Clone ID: MRT4577_17314C.1.pep
FFLSSLQHFLPTKPYKSSFSSCINNYMLHHSLTLLLTTLTTSLPLHSLFNAYPPFTKPNHPTSYIMSTNSNFFFPPLKQPIYNIRCVIHSI

SEQ ID NO: 264849 - protein, 81 aa, Zea mays
  Clone ID: MRT4577_173150C.1.pep
MLVYQDLLSGDELLSDSFTYKELENGVLWEVEGKWVTQGPVDVQIARHRTARARACTPAPLPPCAVGSTAVSLRPVALLAM

SEQ ID NO: 264850 - protein, 180 aa, Zea mays
  Clone ID: MRT4577_173151C.1.pep
MAARHGSRRTRADQWLFGGKWRGTVKETRHPPPVPEAKLPNPVPVQKDEGVCLEKPRVQREVADVAPGRRSMPEMEINMKEVVAVLGVKVMAADMPPFMQLHAFRCAKRSHDNLDKFSSRQLAHDVKKEFDKVYGPTWHCIVGTSYGSFVTHSRGCFLYFSMDKIIADAVQDKIRKVLAS

SEQ ID NO: 264851 - protein, 92 aa, Zea mays
  unsure (1)..(92): unsure at all Xaa locations
  Clone ID: MRT4577_173152C.1.pep
LAFPFLHRVLDGRLHPDDSDVHSLRLVLNRFSDLTNYXYRANYLGVKSRPQRQSTLHDMYLPRNNXHMPQSVDLRSKGSFHEIQDQSIHVRR

SEQ ID NO: 264852 - protein, 78 aa, Zea mays
  Clone ID: MRT4577_173153C.1.pep
DQAPVCVCSGGGASRHNRSVPRHPLPVPTKQVGRCYPRPVFLAFSYRVWLMTTAANKNTTHLSPTLSLSLSLLISSEG

SEQ ID NO: 264853 - protein, 239 aa, Zea mays
  unsure (1)..(239): unsure at all Xaa locations
  Clone ID: MRT4577_173154C.1.pep
VDLYAATKAKLTVVNLNKNSALRRYEPFSTDPQFYVYGYEDLELQPGENATVTFVFLPKLLGSSSAHLVVQTNFGXIYYTCKGHGCQXPYQILPLTGIDVLIGGQLERNLSIYNPYDDTLYVEEASVWMSSLESTRYSSHLVCQLGPFDGALELSSSRSNWYTASSEEFGWPVVNIRPSEQWEVLPSKRNTVIELKLQAVSEGKVFGAICLKLRNCTLSTTHAFVIPIELEAHTRTYYD

SEQ ID NO: 264854 - protein, 126 aa, Zea mays
  Clone ID: MRT4577_173155C.1.pep
NALSVPNELEGAEPSSSFICISSDSSSSSRISFSLITGWGLARIGPRFKTSTSHEHSRAAGHSTVNTEQEVGKTGTGENWRRESDIRDHLLQQAVTVLGSGDREGAPAASRRWRGAKPSPRVMCSC

SEQ ID NO: 264855 - protein, 176 aa, Zea mays
  Clone ID: MRT4577_173156C.1.pep
EKVDPVKKTHEEQLCFWINIHNALVMHAFLAYVLHDKRMKSTDMILKAAYNVGGQSVNAQTIQNSILGCQSHRPSLVRLYTAKKIQQQLEAARTEFIRGSVAVRKQALLLPKVLHYYARDAALELRHLVELVCESLSDAQQKQLQLLQRRAVDKCVEWMPYKSSFRYVVHRDLADD

SEQ ID NO: 264856 - protein, 148 aa, Zea mays
  Clone ID: MRT4577_173157C.1.pep
LDPVLRPLVLTVLWADGHGDWRLGLVRSVREWPCAWMLPALPRTEPVTVCERAAPALNNECWLVRRGRMVPAARGPGAGNASGGRRGPPAPPSVSVLLLPANECGGRAVRVRQSMITCHHHLSPSRREHGCCDVHAPRVSSRFVLSGA

SEQ ID NO: 264857 - protein, 189 aa, Zea mays
  Clone ID: MRT4577_173158C.1.pep
MAFLAYGLHDKRMKSTDMILKAAYNVGGQSVNAQTIQNSILGCQSHRPSLWVRALFTPAKRSAARHPYALQHPEPVAHFALSTGAFSDPPVRLYTAKKIQQQLEAARTEFIRGSVAVRKQALLLPKVLHCYARDAALEPRHLVELVCESLSDAQQKQLQLLQRRAVDKCVEWMPYKSSFRYVVHRDLAD

SEQ ID NO: 264858 - protein, 87 aa, Zea mays
  Clone ID: MRT4577_173159C.1.pep
LGDGKKNPVRNFPPVISKRLRLQGFIEPDHKPLYPQYKGWGFPYIREGTFPYVKDVPKGFKRAPKALKGFFHGRNVGKKFVRVPNDK

SEQ ID NO: 264859 - protein, 66 aa, Zea mays
  Clone ID: MRT4577_17315C.1.pep
ETDQLEYLIPKKSSLRRHLQCPDKKFVDFLSYLLQINPRNRPTASEALQHRWLSFKYSSTANQTRS

SEQ ID NO: 264860 - protein, 139 aa, Zea mays
  unsure (1)..(139): unsure at all Xaa locations
  Clone ID: MRT4577_173160C.1.pep
GVVLLERAARLSLHXSLPYAITILVAGVLIALTFGSLGXDRXMPSFFTQLGQYTWPSVLLGMAXGVVLMXATLCIHDAWSCAGLCGTEVFTFSLVWVIGSTLNCFLDCRIIGSHILIPGVXCFLLSVLLGPAVHCSNAV

SEQ ID NO: 264861 - protein, 140 aa, Zea mays
  unsure (1)..(140): unsure at all Xaa locations
  Clone ID: MRT4577_173161C.1.pep
MTLRNLGRAAPRPVTRAAPVRNPAQPERQAPPAGPVRDEGESMVGGIAASIAQGMTNVTGSDMAHGVDDAVLXPGTFTYETAASKTAADAPAPPEMNXADACSIHSNCXQDCLSNYGSEINKCQIYLDMLNERRRDVVAA

SEQ ID NO: 264862 - protein, 104 aa, Zea mays
  Clone ID: MRT4577_173162C.1.pep
MAVSWTRVLKRGVIPRDTAQLVGTRGFAVAAKGKEGGKGGAADAKPVLSKEMKSTGVFGANILKEGSDPKIQPDSEYPGWLWHMIDKRPVLSELRRKDAKVLPY

SEQ ID NO: 264863 - protein, 85 aa, Zea mays
  Clone ID: MRT4577_173163C.1.pep
RPFFFFFFFFFFFFFFFFFFRKKTFFLLITCSMGGGALHSPPVSLEKKTIPFLFLPCSTPVDQSFWVLAIYKLDHGRKKKSELFC

SEQ ID NO: 264864 - protein, 38 aa, Zea mays
  Clone ID: MRT4577_173164C.1.pep
ASARARVSLWPQWGKQWTVGVRSPLQRQGEPLRSAQAS

SEQ ID NO: 264865 - protein, 64 aa, Zea mays
  unsure (1)..(64): unsure at all Xaa locations
  Clone ID: MRT4577_173165C.1.pep
SRVAALFFFFFFFFFFFNFFFXXXXTKNGGQIYWPFLNLPTKGGAGWVNTWWKKTLGGQPNQPP

SEQ ID NO: 264866 - protein, 76 aa, Zea mays
  Clone ID: MRT4577_173166C.1.pep
LSSAGYNMELFGDPCSPCRQVRHCVTVSDGLALRELVGDQAHVLLFPLHCFANRLSLCSASRDCQLGLGGGFLERR

SEQ ID NO: 264867 - protein, 46 aa, Zea mays
  Clone ID: MRT4577_173167C.1.pep
SMFRCRQIALDVSQPSAANCQVLDGALLISARAVPSVAYSVIISER

SEQ ID NO: 264868 - protein, 78 aa, Zea mays
  Clone ID: MRT4577_173168C.1.pep
KLGFSCLLKSTPTLLIYSWTGVANTRNPGAFMKERNNICKPNSQRNATFIIIQERGLAQPCFVEKITTLCWGLPGPFY

SEQ ID NO: 264869 - protein, 61 aa, Zea mays
  unsure (1)..(61): unsure at all Xaa locations
  Clone ID: MRT4577_173169C.1.pep
ISFPILTPXSGVIIFFYHPPTPHIRHLLTITQDTSPIAEANNFSMSFEQHQPVDTFLPYYT

SEQ ID NO: 264870 - protein, 75 aa, Zea mays
  Clone ID: MRT4577_17316C.1.pep
GFRCAIVRNFLGDIHVVVVQGSSRVLRPLCDCTVSWSCEGKLLFFASSSRAGGHSCWCDRTEAGEGPQTRSPRPG

SEQ ID NO: 264871 - protein, 70 aa, Zea mays
  unsure (1)..(70): unsure at all Xaa locations
  Clone ID: MRT4577_173170C.1.pep
LLVPGPGLVLVGAPLAFLVGRSCRLFLGAFFFFLGGFCGFCRPSSFGGAGRFSFYPPWGXAVGLNILGGC

SEQ ID NO: 264872 - protein, 141 aa, Zea mays
  unsure (1)..(141): unsure at all Xaa locations
  Clone ID: MRT4577_173171C.1.pep
FGTRRERERERERERERERERERERERYRDRERXRDRXRARERSSALVLFRSRAIAFDDAVPLPPRALACSSSLPLSRCLTSFFFVLPTPVLSCCVFFPFSATSLFYLSFFPFSYVYTESVFLSALFFLYLYLFIPSCSFV

SEQ ID NO: 264873 - protein, 70 aa, Zea mays
  Clone ID: MRT4577_173172C.1.pep
TSGSQGRYLTPPPQEPSLYSQMRPEGSPGRRPRKRGSPPARHLAGDLPRRRRFVGEIMGKAGARRAGRWR

SEQ ID NO: 264874 - protein, 59 aa, Zea mays
  unsure (1)..(59): unsure at all Xaa locations
  Clone ID: MRT4577_173173C.1.pep
PLYATIFFFTSATYXTMTTAGARTDTGGTATDAVLRHIVVSAGWLLLGLMVMVEQMTAD

SEQ ID NO: 264875 - protein, 80 aa, Zea mays
  Clone ID: MRT4577_173174C.1.pep
KPLPLTLVWGNHPTRLEAEMSVFCSILQISINLWLRNKWISIYHFHHLMPQQALLWRQSPTVLAPSVLSLPFLLPVDQYC

SEQ ID NO: 264876 - protein, 448 aa, Zea mays
  unsure (1)..(448): unsure at all Xaa locations
  Clone ID: MRT4577_173175C.1.pep
MGKEKVHINIVVIGHVDSGKSTTTGHLIYKLGGIDKRVIERFEKEAAEMNKRSFKYAWVLDKLKAERERGITIDIALWKFETTKYYCTVIDAPGHRDFIKNMITGTSQADCAVLIIDSTTGGFEAGISKDGQTREHALLAFTLGVRQMICCCNKMDATTPKYSKARYDEIVKEVGSYLKKVGYNPDKIPFVPISGFEGDNMIERSTNLDWYKGPTXLLEALDQINEPKRPSDKPLRLPLQDVYKIGGIGTVPVGRVETGLLKPGMVVTFAPTGLTTEVKSVEMHHETMQEALPGDNVGFNVKNVAVKDLKRGYVASNSKDDPAKEAASFTAQVIIMNHPGQIGNGYAPVLDCHTSHIAVKFSELLTKIDRRSGKELESAPKFLKNGDAGFVKMIPTKPMVVETFSEYPPLGRFAVRDMRQTVAVGVIKSVEKKDPTGAKVTKAAAKKK

SEQ ID NO: 264877 - protein, 74 aa, Zea mays
  Clone ID: MRT4577_173176C.1.pep
DTMRSLACSCAGGMRKTSLRYRGSLSVAYELICSCHTRRHIKLFALPVYSTAISISIRCYTLNRVYSISHLLVT

SEQ ID NO: 264878 - protein, 74 aa, Zea mays
  Clone ID: MRT4577_173177C.1.pep
SNLPADPNLHFVSAVALKPRTVSFYMTMRHQHEAEPPASSAQPPPDDHDDPDSVERIMSLGLEQELCLAPFKLF

SEQ ID NO: 264879 - protein, 93 aa, Zea mays
  unsure (1)..(93): unsure at all Xaa locations
  Clone ID: MRT4577_173178C.1.pep
PASHGDGLLPLVALALAALVPVSLLLVNRLLYGKLPPGPRRRPVVGNLFDXQPXRXRXYQEXARGEGRIMTVXLGTSPTVEGSTEDTVNEVLK

SEQ ID NO: 264880 - protein, 201 aa, Zea mays
  Clone ID: MRT4577_173179C.1.pep
QLHGRKKIVVGSRRHRRWASTRAAEFEARCRTNKGLHSHSGRGGRGVPQAAAIVAGGGPRCDDDDVGPTARLVPYHGVGQEEKDQRALLHRRHQLRVLDLPLAVATRRRPCSFHAATAGKDETKQRRQRRRRRRSWAEYFGSDHVDQGIGVRSFKYFGPPRPSKTCTLRHAIRIVNLTPLSLSRYILDISYVDVVLGYCVR

SEQ ID NO: 264881 - protein, 123 aa, Zea mays
  unsure (1)..(123): unsure at all Xaa locations
  Clone ID: MRT4577_17317C.1.pep
LEHSQCTQKLTIEFVGENNLRTIRTTHIMSSSDPXIRTNGPGVGMFVLHDDEMDHLKAEEATYEALERAQIGEWHSLTYGETYTYLSQSLGNPVXIRISDEKPHYTIGDCTTVLKKDTSRDHD

SEQ ID NO: 264882 - protein, 47 aa, Zea mays
  unsure (1)..(47): unsure at all Xaa locations
  Clone ID: MRT4577_173180C.1.pep
ILLPTPARHPHVRFATQXKRMEAKPTTTLKADHQQLDTLQAAQTLTP

SEQ ID NO: 264883 - protein, 561 aa, Zea mays
  Clone ID: MRT4577_173181C.1.pep
MSEGDATQLALEKGLPQVSNDDGSSSPATMHKLKVDTEDAGSKIESPTPEKLESRSKGVVVSSLARNLLAERYKDRFANQFLEDEGDIDDEDYNDSISPGMSRSQRSRSIELLEKHKDLLNLFNRMESSIRLLRLRKRMATFNNIATQVEILAKRKLSYCHLAQMKYLFPEAIQIKRVLLHDEKSLCMYADMEIILVMDVVEYTSTDHSPSMTICDAFYSKLLTFLDAHHKGTDIPEAILPEPFNLRSRGQLNLEASHNGHAAEPHLQGTTKDGFSNASHFPQSFRKLMSQKVITDGAERTQLLLDPTKLSSVSAYDTEGTNRSPKKQDKHASVTVNSEISATPSRHLISRCQEGTPKQETLESPLLAQTPATQTPKRQLPTPLEKLEATCGHISEPRSASSARRSLNTSLKFEGGSPSYHDRMEHVATSKIGILSEDSSSFNKSLEENGPVFFTDRDKINLADPVGVQEKMASLRSTFGIVCDISHSIKNSLITKQELFHNILANNLEIEQMGEIEEQLHILEDLAPNWISKVINGGEIFYSFETIADQNSVWERLVEAV

SEQ ID NO: 264884 - protein, 99 aa, Zea mays
  Clone ID: MRT4577_173182C.1.pep
PKGLPGCPFKKRAPPPLKEFRKFAQKALGPPGVGFFLKLPHPFWTPGFRGVPRRVFFGFPPQRTLWGVPQGGFFSLVPVGGIPPGGFKGLGPKVFFEPD

SEQ ID NO: 264885 - protein, 115 aa, Zea mays
  Clone ID: MRT4577_173183C.1.pep
SRPPPAMASNGIVPRDVCVAGVARTPLGGFLGALFSLPATKLGFIAIEAVLKRANGDPALGQEVFFGNVLSANLEQAPARQAVLGAGIPNTVVCTIVNKVWASVMKAIIFAAQPI

SEQ ID NO: 264886 - protein, 69 aa, Zea mays
  Clone ID: MRT4577_173184C.1.pep
MADKATVVPPRDPWPFSTVMVGDLEALVADGLLRPLSGDPQPEWMAPSSEADPAPPPGYVVSFVSFHKR

SEQ ID NO: 264887 - protein, 44 aa, Zea mays
  unsure (1)..(44): unsure at all Xaa locations
  Clone ID: MRT4577_173185C.1.pep
GCQSPYNDTSCVSVSYHAEVGAFPAHRSDPGEVELKSNMSYLXP

SEQ ID NO: 264888 - protein, 56 aa, Zea mays
  Clone ID: MRT4577_173186C.1.pep
PGKHCHHRLLVHATTARMSTRRDILSFHEVTTKPILLDVRTCCNRNGRRDRPCPIP

SEQ ID NO: 264889 - protein, 162 aa, Zea mays
  unsure (1)..(162): unsure at all Xaa locations
  Clone ID: MRT4577_173187C.1.pep
IGGQSRVPSHVGTDPYEFYQYVHLSEVGNCVGSGIGGTTALRGMYKDRFLDRPVQRDILQESFINTMSAWVNMLLMSSTGPIKTPVGACATAVESIDIGYDTIVEGKARVCFVGGFDDFQEEGSFEFANMKATSNAEDEFAHGRTPREMXRPNTTTRNGFME

SEQ ID NO: 264890 - protein, 60 aa, Zea mays
  unsure (1)..(60): unsure at all Xaa locations
  Clone ID: MRT4577_173188C.1.pep
EKRITPRRTRLLSGPRRKVPPTTATGYSTSAXPPSGPSSKHPKDTLTRGGLXXEGKETAS

SEQ ID NO: 264891 - protein, 256 aa, Zea mays
  Clone ID: MRT4577_173189C.1.pep
MVPNGHRDNGHIDEAAWPVPSSSWIDKVLFLGTGTSGQVPAIHCVTKPDFGGCAACEDATRNPTGKNRRGCTAAAVIGRDAQDKQHSTILIDCGKTFYSNAVVHFPRNGVRSIRAVLLTHAHADAILGLDDLRAWTMGGVIQRYVDIYLTQETMTVVEGMFPYLVDRSKSTGGGDVPTLRWNIIDQNAPFTIPASEGRKEVRIQPLPVLHGYVGRASPFWCLGFRIDSFSYISDCHEIPTTTLEHMRGSQAVVMDA

SEQ ID NO: 264892 - protein, 453 aa, Zea mays
  unsure (1)..(453): unsure at all Xaa locations
  Clone ID: MRT4577_17318C.1.pep
MAVTSQCKIALRPGSIFYFGTILSVADEKGILHRIADPPEKKLSLEIPRKPEQDSGQRNLLCPRRRLPLASREPGIHLPEELHCPLCPQRSGHGLQERKKQAFLQKGRRRWEKRPREVVHIAGPPVARARAAPRGGERTLDDILDAQCPYHKDICHTLRNCRDFKHSVGNXTVPASTTSPTTRRAWRAQEASATRRGXGGAFPRVDREVNVIFGGRGSQENRRQQKLNDRQPSXDQWLNFDHPGKYSLLVDPVIRESRVKKVLVNGGSIINVTFPQTLXRLGVALQDLTESDTPFFGIVPTEGEYPLGHIYMPVTFGTPENYITEFLRFEVAHFDYGYNAIIGRPGLAKFMAIPHFSYMILKMPGPQGIIAVHADFQGTAECFQGAIQAALTTRPPTTSSTQADAKPKEDLAIPTNEAQAVTSIRPIEETKRIILGFADERKTTIISSSLDGK

SEQ ID NO: 264893 - protein, 607 aa, Zea mays
  unsure (1)..(607): unsure at all Xaa locations
  Clone ID: MRT4577_173190C.1.pep
RARGGVLPNSPIAHPTLTPCSSASIPHGHRRRRLPQPTRPAGCTHASSACRTRHRKKRVQNTQDGSAGTAATCWGGLGGGHRRELPTSSVATCVQPRLPXEVQRKICERLRQTGRHDRTLADPTFNARFARHLERLPRRYLLDLDLDDKLEDVLLHWGILDECADPNKRPVFRARFIKYKTVPREDDGIGHDQDHEEPCQKLLEDLSLERRKIADRNDSLSISSRGDLKTVLLHEIIFSSIDKPKLLSRLTALLSEVGLNIQEAHVYSTKDGFCLDVFVVDGWKTEETDELIAAIKETLTQKNASPSNSTNSSTPEKIVDLQQQVGDYEIDLSMLTRGDKIASGSSADLYRGTYKGHDVAIKCLRSLYLNNPSEVEFLQEVLILSGVNHENILQFYGACTKHPNYCIVTEYMPGGNIYDFLHKQNNFLDLHKILRFAIDISKGMDYLHQNNIIHRDLKSANLLLGHDQVVKIADFGVARHGSQQGQMTAETGTYRWMAPEIINHKPYDHKADVFSFAIVLWELATSMVPYDNMTPLQAALGVRQGLRLDIPGSVHPRLTKLIRQCWNEDPDARLTFAEITKELQDSLHHIEAPKGASRRSRAKMQKK

SEQ ID NO: 264894 - protein, 354 aa, Zea mays
  Clone ID: MRT4577_173191C.1.pep
EWGGEAEHEHDTSAANANAKTSSRRTMPRSRGNEPPLRASQRAPLHLKTTACSEANGAHHRPVADRSSPKVGDRHSPRSPLPEKKRAAGTRVAELEAKLGKVQDELKKLREQLASAEAAKKDAQVALEEAKKRVGTKGSPASSSTTTTSPPSPPSPGVESAKKPEELKLPQPAAEEESSVNAPATDVFEVVRAESGDKENHSATATGAEDCEVVSCGEEAALAEKEEEEETKKMIEEDNSAAAETDGAEKESWEVLELKAKLAEKDAEIAALAAENAELKKRSGEAAEAAKMVEEDAAAKAAQAERDLKDGAAREARTGEQLRASEAAREALDAELRRLRVQTEQWRKAAEAAG

SEQ ID NO: 264895 - protein, 49 aa, Zea mays
  Clone ID: MRT4577_173192C.1.pep
MKRSADAMTEPVKPVFLTKAERERLALERRQAAVFDQRRTELDLIQSLS

SEQ ID NO: 264896 - protein, 138 aa, Zea mays
  Clone ID: MRT4577_173193C.1.pep
MTLGDSIRKGVGMVHGAGEAIRGNAMAIVDDASGDKASATKNQEIANKGVDEWDRGYRGHPADAGVTPADTDAHRERMNTTNTTATNYGSHNSNIGNKVDPRYDSDMDHRGTATGSTNAGPHSTNVGNKLDPRFGLGC

SEQ ID NO: 264897 - protein, 84 aa, Zea mays
  Clone ID: MRT4577_173194C.1.pep
CSLSSLGIKLQSLRCLQTHPQMNVDFIASYLIPPINPNRYRNARSRIGLIVGPLNLSVSKALSCPLYTATYGKRKKIADELEPN

SEQ ID NO: 264898 - protein, 229 aa, Zea mays
  Clone ID: MRT4577_173195C.1.pep
HASVLLQQGWRKGPWTALEDRLLTEYVQQHGEGCWNSVAKLTGLRRSGKSCRLRWVNYLRPDLKRGKITPDEETVILHLHAMLGNRWSAIARCLPGRTDNEIKNYWRTHFKKVRPSRRARAQLLHQYQLQQQEQRRQYLQLLQPQQLQQQQLGVVKQQQLEQQSPPEPHHQAMMDSLQSTAACYCSPVPEECCPLPADDDAVLWDSLWRLVDGDGCGDGDGDGSSGGDY

SEQ ID NO: 264899 - protein, 237 aa, Zea mays
  unsure (1)..(237): unsure at all Xaa locations
  Clone ID: MRT4577_173196C.1.pep
PVRPLRRAXGGLDPLTAASMFAGARCIGENKVNGEDCFILKLSADPQTLRARSEGPAEIIRHVLFGYFSQRTGLLVHLEDSHLTRIQSAAGGDAVYWETTISSSVEDYRAVEGVMVAHAGRSAVTLFRFGEAAVGXHTKTRMEEAWSIEEVAFNVPGLSADCFIPPADVGPGSVSEACELPRPSRAPRPSPCPIRGWPPWIAPLPPPPPAVAGKPRGKWKREEGHASVISPFSSGRV

SEQ ID NO: 264900 - protein, 72 aa, Zea mays
  Clone ID: MRT4577_173197C.1.pep
KNLFPNFFCGGPLWGLTGPRNLLFSAPLFILEGLCPYFHISKPPGTLFCFTICQRGEFYPRAMSFGRKNRGF

SEQ ID NO: 264901 - protein, 71 aa, Zea mays
  Clone ID: MRT4577_173198C.1.pep
AVFGMPMGQEKGLVTQTNPGGFTTQHWLQKTLKPPFLEQGVAKNAFCFKPDQKWGPDWPWEKKNPLCYFAP

SEQ ID NO: 264902 - protein, 120 aa, Zea mays
  Clone ID: MRT4577_173199C.1.pep
SRRLLLSFVKPPLPRARYCHPPPPPRTRAPTVARHPALPHPLLCLAQSTPYYRRQDRTTCPRSETVSCLLNSRMTTSSAPPSASREGTPMHSHKGVVLAADRLAVTRRRSARSVPSWCGS

SEQ ID NO: 264903 - protein, 65 aa, Zea mays
  Clone ID: MRT4577_17319C.1.pep
MASSSSSSSALVVLVVVLAAAVACSATRPVPARQRAAAAEEEDDTWVPNPGFEVPNPFRPGAATP

SEQ ID NO: 264904 - protein, 168 aa, Zea mays
  Clone ID: MRT4577_1731C.1.pep
MSASGDPLDVLPAAVLADVLGRVADAGDIAACRLASRTLLAASYICPRVRLCAADRARRRREGGGGSPAFRATTANLASLLGPHLRSLSLDTAGGQGSPDDAMWVEEGEFDEADGLHLTCGEAVAAWATTSAGTVLRELDIADYWPQACWRKAEALPLISHYCMRAFF

SEQ ID NO: 264905 - protein, 81 aa, Zea mays
  Clone ID: MRT4577_173200C.1.pep
ESLEHLETFKRENKNLQEEISDLTEQLGSSGKTIHELEKVRKQLEAEKMELQSALEEAEASLEHEEGKILRAPLEFNQIKA

SEQ ID NO: 264906 - protein, 46 aa, Zea mays
  Clone ID: MRT4577_173201C.1.pep
TRGGARYGVSGGWRYGVGGGGGFGGGSCYSCGESGHFARDCPSSAR

SEQ ID NO: 264907 - protein, 55 aa, Zea mays
  Clone ID: MRT4577_173202C.1.pep
QRGTVGLFNLKRRSRVNFPPKKKKKKKKKKKKKKKKKKKKKKKKKKKKNSRGGAG

SEQ ID NO: 264908 - protein, 85 aa, Zea mays
  Clone ID: MRT4577_173203C.1.pep
IRMSHIQMHHLNYEDICHTCRSKSNRSARQFETVLYSDLERQPDQTTSPQPNHTKKHDKNDPTNKRTERKQHGRTVSTSYQNIWK

SEQ ID NO: 264909 - protein, 104 aa, Zea mays
  unsure (1)..(104): unsure at all Xaa locations
  Clone ID: MRT4577_173204C.1.pep
RALLSHLDMVNPAXAYLQEQMVAANXLAPANGDAKHFFLTAGGVPRHRSTKPYKGTPAGYVQQTTTAXPTPLDGGNAPTYLKQQLMQHNAPAQNQLAEAKPCAH

SEQ ID NO: 264910 - protein, 47 aa, Zea mays
  Clone ID: MRT4577_173205C.1.pep
MERPRAHSGTEQYTKPTEERWGFQGSRDRGSFGGNRISERSSAGQRW

SEQ ID NO: 264911 - protein, 49 aa, Zea mays
  Clone ID: MRT4577_173206C.1.pep
PPPPAPTLATPPPLVLPHPIQIRTRKGLKKKAYTCNSSSLNVCEPCGRT

SEQ ID NO: 264912 - protein, 80 aa, Zea mays
  Clone ID: MRT4577_173207C.1.pep
IPFGSSALHVACQTVFLAVRSISNHSSQSCIKRRLCLLLDIFCTSVPLFMSLEHAQDCSSLLHVFSVKDFVYQRSANAQT

SEQ ID NO: 264913 - protein, 212 aa, Zea mays
  Clone ID: MRT4577_173208C.1.pep
GAAQLLLIQAVMEVYNMYRGQLSAQNTVILFEALHTVAAHAHKINSDSDLRSKLQELGSMTQMQDPPLLRLENESYQLCLSILQNIFLDSSPDHGSTEVVESHLIGLCKEVLEVYLSTARPSQPSSGTQPLGHWLIPVGSSKRRELAARAPLVVSTLQAISGLGDSAFEKNLRQFFPLLAGLISCEHGSSEVQVALSDMFSTWVGPLVLQSC

SEQ ID NO: 264914 - protein, 1812 aa, Zea mays
  unsure (1)..(1812): unsure at all Xaa locations
  Clone ID: MRT4577_173209C.1.pep
TPNKRVHGKATSTQQHRAIYKTDPRLVEIFSPFLEKLIKNASWRNKAHSKLSHTAKSILDRLQKPPTPPAAEAQAPPTPTSSPSTPTSSSAQPGPLRSLSLADSELLLAPVISALGAGSARLAEAALELLHRLIAHSYIHGEADPSADPSAQLVASLLDAACNALGLDDEHIELLLLKTLLSAVTSTSVRLHGDCLLRAVRACYDMYLGSRSAVNQATAKASLVQMVGIVVRRLDSDXSSGHILAIVVPNVIQLSDIISXANXSADPNIVVGFNSTSIGNFDGTFTPLSRTMGVSGEQRYXGSFGGNRISEXGRPQDRGGETIGVRFFFAIVSSKLQKNKLCSSXALDSHFVWLGRMESIVGNTDYIARTXVNYHLYMVCFLSFPGLXKNSLRTPPKDAPADPIXMRGKILXLELLKILLSMTQMQDPPSESLVARFRPGLKAEIGVFFPMIILRVLENIAQPNYQAKMIVLRFLEKLCGDSQILVDIFLNYDCDVHSSNIFERMVNGLLKTAQGPPAGVPTTLVPPQDTTMKSEAMKCLVAILRSMGDWMNKQLRIPDPASPNVESEKNDNDDGNELPQADNNGDESSEASDSHSELSNGISEAASLEQRRAYKIELQEGIYLFNRKPKKGIEFLVNASKVGETPEEIAAFLKSASGLNKTMIGDYLGEREDLSLKVMHAYVDSFDFQRLEFDEAIRAFLQGFRLPGEAQKIDRIMEKFAERYCKCNPKAFSSADTAYVLAYSVIMLNTDAHNPMVKNKMSPEDFIRNNRGIDDGKDLPEEFMRSLYERIWKKEIKMKEDEFVPQQQQSTSSNKILGLDNILNIVVRKRGSSMETSDDLIKHMQEQFKEKARMSESVFYPATDVVVLKFMVEVCWAPMLAAFSVPLDQSDDEIVVSQCLEGFRSAIHVTAAMSMKTQRDAFITSLAKFTSLHSAADIKQKNVEAIKAILLIADEDGNYLQEAWEHILTCVSRFEISHLVGEGAPPDATFFALQQPDLDKSKQAKSSILPVLKKKAPNATSASKRGSYDSAGVGGKASGVDQMNNEVTSLLEQVGMAEMNRVFVRSQKLNSEGIIDFVKALCKVSMEELRSASDPRVFSLTKIVEIAHYNMNRIRLVWSSIWHVLSDFFVTIGCSENLSIAIFAMDSLRQLSMKFLEREELTNYNFQNEFMKPFVVVMRKSRAVEIRELIIRCVSQMVLARVSHVKSGWKSMFMVFATASYDDHKNIVLLAFEIIEKILREYFPYITETETTTFNDCVNCLIAFTNSRFNKDISLNAIGFLRFCAAKLAEGDIGSSRLKDNPSNSNPPSPHLTNDGKQECTVLVDKEDHIHFWFPLLAGLSELTFDLRPEIRKSALQVLFDTLRNHGHLFSLPLWEKVFDSVLFPIFDYVRHAIDPSGNPPQGQSVENDPAELDQDAWLYETCTLALQLVVDLFVKFYDTVNPLLKKVLLLLTSFIKRPHQSLAGIGIAAFVRLMSSAGSMFVDEKWLEVVLSLKEAATETLPDFTYVSSGAYLENVPTENGVSADNREDESEPVADDNEESSRSRNLYFTIGDAKCRAAVQLLLIQAVMEVYNMYRGQLSAQNTVILFEALHTVAAHAHKINSDSDLRSKLQELGSMTQMQDPPLLRLENESYQLCLSILQNIFLDSSPDHGSTEVVESHLIGLCKEVLEVYLSTARPSQPSSGTQPLGHWLIPVGSSKRRELAARAPLVVSTLQXISGLERLARLDRLLRSLVPCRFFPLFIFLLPSMSKGASFISYYSIDXDSSFEKNVRQFFPLLAGLISCEHGSSEVQVALSDMFSTWVGPLVLQSC

SEQ ID NO: 264915 - protein, 114 aa, Zea mays
  Clone ID: MRT4577_17320C.1.pep
MASSSSSSSALVVLVVVLAAAVACSATRPVPARQRAAAAAEEVRRPDTLHEGTVLIPGMGRYEIGSHYIPDIGGLDHSVPAATHGQYIPGADDTWVPNPGFEVPNPFRPGAATP

SEQ ID NO: 264916 - protein, 64 aa, Zea mays
  unsure (1)..(64): unsure at all Xaa locations
  Clone ID: MRT4577_173210C.1.pep
DPRVRPCAXDVVYFEVWAGLMGWPVGDGKELFARGLLGVELGPDDVPPFAAKLYSCLESIRASL

SEQ ID NO: 264917 - protein, 53 aa, Zea mays
  Clone ID: MRT4577_173211C.1.pep
RSYVSKSNGAVLFKVHIFPPHCLLHYTFCLGAPNLNPPPVWLHRWTRETPWGP

SEQ ID NO: 264918 - protein, 53 aa, Zea mays
  Clone ID: MRT4577_173212C.1.pep
CRPTLEPALNLLHRVYCAPPGALTIHDRGCKPTKAGYKRKEPTEFAGANNETG

SEQ ID NO: 264919 - protein, 100 aa, Zea mays
  unsure (1)..(100): unsure at all Xaa locations
  Clone ID: MRT4577_173213C.1.pep
VIAVTKLKDEAEAIKIGNSTSLGLAAXAVHTKDVXNTAIRVSNALKAGTVWINNYNMISYQAPFGGFKESGLGRELGSYALDNYTQVKTVHYRLGDALFG

SEQ ID NO: 264920 - protein, 80 aa, Zea mays
  unsure (1)..(80): unsure at all Xaa locations
  Clone ID: MRT4577_173214C.1.pep
MRGEKGWFCSSXIYPXXGXXXVRNDAKVFRFXRSQXHKNXKMKKKPLKVKXNQRIKELEXKDMXKKKTXEIERKKKRXEX

SEQ ID NO: 264921 - protein, 102 aa, Zea mays
  Clone ID: MRT4577_173215C.1.pep
PRALSMGPPFMGNSPSIQKLFRRVTNHFLPIFRKKSFFPWYPGKGMDKIDFPKPKTTINPLFLESHQSQDPPPPKENSQPQEKFPPHNILGKGFFFLNPFGP

SEQ ID NO: 264922 - protein, 109 aa, Zea mays
  unsure (1)..(109): unsure at all Xaa locations
  Clone ID: MRT4577_173216C.1.pep
TDYPNEENVFFGPTVLELDCRFRITHIFTSSTDTFIHVTDLSGRXTLFQITGLMKNKTHRYETVPYSAMLAAQXVYILTTTLHITLLRIKLRATGRNKTKTPGPVSHSA

SEQ ID NO: 264923 - protein, 56 aa, Zea mays
  Clone ID: MRT4577_173217C.1.pep
MQPLSYANSPFYCFIILNFHLTFYFFFVFSFFFCFFFIFFFFYFIFFFYFFLFFIF

SEQ ID NO: 264924 - protein, 250 aa, Zea mays
  unsure (1)..(250): unsure at all Xaa locations
  Clone ID: MRT4577_173218C.1.pep
MEPDSDQPKAAARGGHRKHLAMLERLSKRSSSSVGAPPSDSSDASPVEAFLSRFADAKLAAESALSACRSSSPEDDAAASLAAAAAAIDDIDRLIAEASHALPPYELRAALATAADLRAAHSVAASELRPKKSFSFRNKSRNPRNPPQDRVTASPPQPPPPEQPKPSLDAILPGFGFRGRNGATFVKDLRVSNDKDGDFTLADLVSCEVYLKGKCRALYIHKLRDCRVFVGXXLGSGLIEDVDGCIFVMA

SEQ ID NO: 264925 - protein, 39 aa, Zea mays
  unsure (1)..(39): unsure at all Xaa locations
  Clone ID: MRT4577_173219C.1.pep
VVVRKVRAXSASTAPPPEEQAHHEASVHHPRLVSLLLSN

SEQ ID NO: 264926 - protein, 114 aa, Zea mays
  Clone ID: MRT4577_17321C.1.pep
MASPSSSSSSALVVLVVVLAAAVACSATRPVPTRQRAAAEEGVRRPDTLHEGTVLIPGMGRYEIGSHYIPDIGGLDHSVPAATHGQFIPGADDTWVPNPGFEVPNPFRPGAATP

SEQ ID NO: 264927 - protein, 36 aa, Zea mays
  Clone ID: MRT4577_173220C.1.pep
PSVGYDQAINLVSSPKFCDSIYDSLISPFPAASITG

SEQ ID NO: 264928 - protein, 36 aa, Zea mays
  Clone ID: MRT4577_173221C.1.pep
NWLSTKYYPIKITLFTGAIPEGLLFLMENYKLRSLH

SEQ ID NO: 264929 - protein, 364 aa, Zea mays
  unsure (1)..(364): unsure at all Xaa locations
  Clone ID: MRT4577_173222C.1.pep
MTTSSSGSIEAPANSRPGSFAFASTSTSTSTSFTDMLGGSTDAAGGASRYKAMTPPSLPLSPSSFFSNNPGGLNPADFLDSPALFSSSIFTSPTTNAFASQQFSWLATSGAEQSGKDERRPSSYPDFSFQTAPTTEEAVRTTTTFQPPIPAASLGEEAYRSQQQQPWAYQQQQPGMDAGSSQQAAPYGEPFQAASSDAATMAPHVPASGGYSHQAQQSQRQSSDDGYNWRKYGQKQMKGSENPRSYYKCTDAXPGCPTKKKVEQSPDGQVTEIVYKGTHNHPKPQSTRRGASSAPASYVVQSASDAVMPEHSWGALSGTPVVTPENSSGSFGGDGDEVNGMSSRLGGSFGADDLDDDEPDFKRW

SEQ ID NO: 264930 - protein, 72 aa, Zea mays
  Clone ID: MRT4577_173223C.1.pep
MDRDGGPAFHRNEAISAVQDVDQYYGEDDDFDELYNDVNVGNGFLRNAHPPPPPAQSNHHHQQQLPPTLAQR

SEQ ID NO: 264931 - protein, 50 aa, Zea mays
  Clone ID: MRT4577_173224C.1.pep
LACELKIQAYTKKNAFNMDLNGKNIQLGPGSGLQFDHSRSLPLKKLPPPT

SEQ ID NO: 264932 - protein, 231 aa, Zea mays
  Clone ID: MRT4577_173225C.1.pep
MKNHIFLTAPWVINRPNDRSLVSHTHTLTLQSRHGGFCFAMSTETPSPASRRRRQCVAVVAATAAACLAPLVVFLAVLVLAPSLIPRLLLRPHHVVPYIASGELRALAFDAAASAITYNLSAVLRFDGAPSLHASRYTGIRAAPFCAGQELGAAVALPGFTQRIGGGAALPVPWAGVQRVPKERRAPPARGARSGRRGERLRVRDEPPGASQARRGRPWRRTRRVPWRQLH

SEQ ID NO: 264933 - protein, 711 aa, Zea mays
  Clone ID: MRT4577_173226C.1.pep
MSQGNKVATETKLNEKEKVFEEKTVDSYIAGFVESMAKTNTEKITKKILEGLSKDTGDSDSYDVESGDKDSEDRPWRPSHSIFGKSTIKQSHLENMRGSRDNNVPAPEENEVVIFRSFFKAGLRFPLTRSQGLEPSAKCFCNMHELLYETKAMGKEQYQNNFGCYGFIARPNASHPVPTFRKRRPGAWMEEWFYMKNDLKAREDIKEVIMRPIWSRFGLRKPKVDFDDTTEACQRAFSTVCSFISTRDLIQEHIAFIVWPLVECWEMPKETITNSSEGDLVRLKYTFRFGDKGKKRKAAASAAPVEPMPKGKKMKVLTHRSRYIEPAVVPEFGGEASSAAKTRVTAPIAQNTEEPIVMPKLPSVKLVETKADKDKAEGSKIEKITKMPEILSPPTEITVSKAQKVSAATPKRRRMANVLDVVLETTKTLSPAPSRKIVEASKALPEAETKQAEAEAAKIQAETEAGPSEPNETEPAVVEEKAAEQIASEKKGALVFNGSGQEDFLYCFLDNKEISVCREIGRSIGFPKLEDGLSILSKDELSDSLAYNSIKGLILSNALRAQKNIEDEGYTMALNNLRSEVIELRNEEKTFEELCASKERCFEKSLGCMEKIKASFANVGAYSNEDNFIRGDPEGVIKWISGEVEAFEEILSDRGDVCAFSDARGISAILEKARCDHVKTMAQAEAAFSLDDTKDPSDEASLMGGNFYNDI

SEQ ID NO: 264934 - protein, 478 aa, Zea mays
  Clone ID: MRT4577_173227C.1.pep
VATVPISQPERLPLKVQDASGKEWIFQFRFWPNNNSRMYVLEGVTPCIQSMQLQAGDTVTFSRIDPEGKLIMGFRKATNNSFEQEQATKPANGALATSEANGKVSAPDSSPNAAVSRQNKLNTETKSSSPVEQATALKMDKDGLTQKEGPGTGSSSPGSVKRKTTILGQKNKRLRMDNEESMELKITWEEAQELLRPPPKAPSIVIVDGHEFEEYEEPPVLGRKTYFVADKSGSNHQWAQCEDCSKWRKLPIDALLPSKWTCSDNKWDPERCSCESAQEISIEELAEFIPIKPAKKPKLKIESDAIDASDGLDTLANLAILGEGEALPSQPTTKHPRHRPGCSCIVCIQPPSGKGPKHKQTCTCNVCMTVRRRFRTLMLRREKKATRDSSRKKETGQSSEKATQQAVSGPPGANATATRSAQKADGNADGPEDMAVDHKVTTSSPVKNHIDLNIQPERDDEQSPKSGAAGLLSRDNAT

SEQ ID NO: 264935 - protein, 568 aa, Zea mays
  Clone ID: MRT4577_173228C.1.pep
MASSPLQKQFYSHTVTGYNEFQAQMRNGRPRMDSKARSQLLPRYWPRITDQELQHLSSDSNSVITPLFEKMLSASDAGRIGRLVLPKKCAEAYFPPISQPEGLPLKVQDAGGKEWIFQFRFWPNNNSRMYVLEGVTPCIQSMQLQAGDTVTFSRIDPEGKLIMGFRKATNNSFEQEQATKPVNGAPATSEVNGKVSAPDSSPNAAVSRQNMVKTETKSSSPVEQATVSKMDKDRLTQKEGPGIASSSPGSLKRKTTNLGQKNKRLRMDNEESMELKITWEEAQELLRPPPKVPSIVIVDGHEFEEYEEPPILGRKTYFVADKSGLNHQWVQCEDCSKWRKLPIDALLPSKWTCFDNKWDPERSSCEPAQEISLEELAELIPIKPGKKPRLKIESDAIDASDGLDTLANLAILGEGEALPSQPTTKHPRHRPGCSCIVCIQPPSGKGPKHKQTCTCNVCMTVRRRFRTLMLRREKKVTRDSSRKKETGQSSEKVTQQAVSGPPGANGSTTSSPQKADGNADAPENMAVDHKVASSPVKNHIDLNIQPERDDEQSPKSGAAGLLTRDNPT

SEQ ID NO: 264936 - protein, 50 aa, Zea mays
  Clone ID: MRT4577_173229C.1.pep
MNNFLNVVFFTKFILTPFQTVVHFSFVLSQTLIKFLKKYDNIYKFCPIKT

SEQ ID NO: 264937 - protein, 60 aa, Zea mays
  Clone ID: MRT4577_17322C.1.pep
QEFNSIKPSFQNLSYFTKYQTYNTLFGFPMVLLYFNHLTLCHILLIMVIMDGRRLFYFPT

SEQ ID NO: 264938 - protein, 45 aa, Zea mays
  Clone ID: MRT4577_173230C.1.pep
IKKKKKKKKKKKKKKKKKKKKKKKKKKKKKKKKKKKRFFLPRAAF

SEQ ID NO: 264939 - protein, 78 aa, Zea mays
  Clone ID: MRT4577_173231C.1.pep
GGFKKLFFGGHWFPEIGVWSGVAPPPLGSWHGIGLVVEKKTPVVAIPQSPAVGQDWPKSTCSCLPSGGGSLVNVHRRG

SEQ ID NO: 264940 - protein, 88 aa, Zea mays
  unsure (1)..(88): unsure at all Xaa locations
  Clone ID: MRT4577_173232C.1.pep
MRQCISLHLAQAAIQVGPPXCQLYCLQHGLHPDAQVPGHKTPPHHDDDFRPFFNHTAXGNHPPRATYPEPKPPAPYAASPAPHPPLFH

SEQ ID NO: 264941 - protein, 67 aa, Zea mays
  Clone ID: MRT4577_173233C.1.pep
LTSHAIPITVRFRTHMPTKSSAIHERSQTGDYKISDLSWHPSEDYLTLCADCFFCGDDYQCPSDSAT

SEQ ID NO: 264942 - protein, 34 aa, Zea mays
  Clone ID: MRT4577_173234C.1.pep
SGLEEAGRFAKALACLFYMVSVSKSRCKSLNTPI

SEQ ID NO: 264943 - protein, 448 aa, Zea mays
  unsure (1)..(448): unsure at all Xaa locations
  Clone ID: MRT4577_173235C.1.pep
KFSKYGSFADNDIGSDGYGETNGFLHQNLGKDCSSDITWRGSFWTCSKQLRHYQAFCRNGTTISTHTFVLVLSEEQNRYLAYLEDMYEDKKGQKKIKVRWFHQNQEIACAIPPPPHPCERFITPFTQVISEDSNDDIATCLTPDHYEKCSHAMSISPSLLILLGQYSKNKFKYFDLRTLRGYFSQAVVRSMKFPAESEKDSEYCTPGKAKFPKQLERLYSKCLGTKICRSPQADSIPSYQILSNEQPPGKHLSIKFIVPQNQLKPTYNTGDRLEILSQDSGIIGCWFRCTVLKSCTNHNRLKVQYDDLQNADDSGRLEEMVPASALALPDKLGLRRQDRLRIRPRPQENSFVDGAALLPGTAVDVWQFSGWWEGVVVSLDNIVADSLQVYFPGENFFRACQLRNIRISKDWVKNRWVDIETKSDVLSQIPSDSXSKQSKLIIMHCLLV

SEQ ID NO: 264944 - protein, 68 aa, Zea mays
  Clone ID: MRT4577_173236C.1.pep
KAIPYAAQMNESFQSLMNLSLRRTFFQYLSSVKIMIHETRAASDLRLISEPSLYRKQNKLVDARESAT

SEQ ID NO: 264945 - protein, 686 aa, Zea mays
  Clone ID: MRT4577_173237C.1.pep
MAATTPATDPPDALLAVTADAPTPARPTPAELVARAVAPVKPAFLCPPPVREAPKEEGKAAGGGAVVKVEKKSKRQLKRERQQEQKSTSHLCIEVGKSGNVDSCKYGTSCRFSHDINAYLSQKPADLEGTCPFTALGHLCPYGLTCRFLSTHKDNLAPQNHPEGNCERNPLSKEIQKLLWKSKYKFPKASAQIKLLGLKDGNKNKAEAVNDDNPDETCNLNGDDKTLLSSIPENVEPDPTLCKEIDNSGGEPLVVDSVESVEPRASKKSKVEVDETRDNEIKGPTTGIHDNEAESEVNSISGVKVSSNNQSSCKVDLITIPHLREKKIIDFREKLYLAPLTTVGNLPFRRLCKTLGADVTCGEMAMCTNLLQGQASEWALLRRHPSEDLFGVQICGPYPDTVARTVELVDNECSVDFIDINMGCPIDIVVNKGAGSSLLTKPMRIRSIVQAASTVTEKPLTVKVRTAFFEGRNRADSLVSDIYNWGASAITIHGRSRQQRYSKLADWDYIYQCAQKAPDYLHVIGNGDVFSFTDWNKHVSDCSKISTCMIARGALIKPWLFTEIKEQRHWDITSGERLNILKDFVRFGLEHWGSDFKGVETTRHFLLEWLSYTCRYIPVGLLDVIPQRLNWRPPSYYGRDDLETLMVSDSAADWIRISEMLLGKVPEGFTFAPKHKSNAYDRAENG

SEQ ID NO: 264946 - protein, 66 aa, Zea mays
  Clone ID: MRT4577_173238C.1.pep
AAEGGAHQTAPQHIVLAPAHHDSGRRTHTTHTSRSPLLLRFSNPGSSNLAPSTLLASPSFYSTYFH

SEQ ID NO: 264947 - protein, 461 aa, Zea mays
  Clone ID: MRT4577_173239C.1.pep
MGERAKEWLLAAGAGAAVGALSAAAVMDLLSRSKRRERYARDLLESNAMTTGTRAGNTRSSKHLGSVASSALLSDEVVSEQLTRNIQFFGMDSQKKVTESYVVVIGLGGVGSHAASMLLRSGVGRLLLVDFDQVSLSSLNRHAVATRDDVGTSKALCLKKHFSMIYPECQIDAKVQLYDASSEEEILSGQPDFVLDCIDNIDTKVSLLAACVRRGLKVLSAMGAGARADPTRIRVAYLRESSNDPLSRSVRYRLKKEHGIEGGIPVVFSLEKPKAKLLPFQASKEEIRLHDYQIVPGFRVRIIPVLGTIPAIFGQVMASYVVTQLAGLDFQTEPVVNLDLDHYRILHQRLIEHEELMYGTAEQVLVDAEEVMYIVKELWRGRSARDQSQDTGRKMWRSVNELMLVRWDKSKAAGISNLILVKFSEADAHESTTLDRIKEQEPEFYSMVSRVLKRAEMEFAL

SEQ ID NO: 264948 - protein, 135 aa, Zea mays
  unsure (1)..(135): unsure at all Xaa locations
  Clone ID: MRT4577_17323C.1.pep
STHAGVQGKILARKNTRENIVIYLGMCLGMQMVAIXLAKLLMKIRGANSTDTDPPSTILWAMVMPEGSETKMGVTMRLAXRQTYCHESGWIYGKVSCSDRCVDDRHQDRYEVNPDMETDFVKVGLQDESKEESGK

SEQ ID NO: 264949 - protein, 181 aa, Zea mays
  Clone ID: MRT4577_173240C.1.pep
EGGVASTTDDRDTAWLAAGRIRMRNAGATLRVSLRSESDEVAAARFYRNRSIERRAEIQPCHGFAPSSESADGRVGRSAIHGAVLGGGSTAWYRRPSIAAMGFEGGGSALLKEATRMEGSAGFVGGDPRGWKRALGIRAVKAQNGRRGRQDEGGGWKERGRAAGCGARSGRGRDPGRPRGT

SEQ ID NO: 264950 - protein, 76 aa, Zea mays
  Clone ID: MRT4577_173241C.1.pep
IDAYLASINRRSSVSSINQRSLVKEPALEWYMYCCGLRRVEQLSYVAIFCFYLRRSFISYDNWTSGCLFVLQMLVF

SEQ ID NO: 264951 - protein, 51 aa, Zea mays
  Clone ID: MRT4577_173242C.1.pep
ASRTGMYSRERVSLYIMIRGRSRRVATHLLVSRSEGGPPHPNRIAAPRDGW

SEQ ID NO: 264952 - protein, 50 aa, Zea mays
  Clone ID: MRT4577_173243C.1.pep
ALPSPVMLGHANVGRTSVSSSPRWRPPCLDRNDSFGTCDSSRCSRVLVLV

SEQ ID NO: 264953 - protein, 57 aa, Zea mays
  Clone ID: MRT4577_173244C.1.pep
MNTFDPWPVFFRREWKRNWPFLTGFAITGFIITNMTANFTEEDLKNSKFVQEHKKKH

SEQ ID NO: 264954 - protein, 80 aa, Zea mays
  unsure (1)..(80): unsure at all Xaa locations
  Clone ID: MRT4577_173245C.1.pep
IYVLQFRQAKTEIVNASRVAYRFMAGLTSXXQASPESPGNNQNRGSPSFQGAWFKNIVSAGAKPSSSGSTRTHFQDADDG

SEQ ID NO: 264955 - protein, 115 aa, Zea mays
  Clone ID: MRT4577_173246C.1.pep
MTATAGGCGSGCGGGCGSGMVNEGSKANNAMSGGCGSGCGGGCGALFNASTAAGEGLHNKSAGCGGGGCGSGCGGGGGCGSGMAIEGFKANHAKSGGCGSGCGGGCGTLFSSSAA

SEQ ID NO: 264956 - protein, 127 aa, Zea mays
  unsure (1)..(127): unsure at all Xaa locations
  Clone ID: MRT4577_173247C.1.pep
PPLRPPRAGTRPCRRPPRRPPSRPPASFSANPWGWEKNSDRSRNSRAKNPPRAPTAPFEGLVTDPLPPGMFRVRLXDDPIILAYLSGGIRSRSIPILRGARVNREISRYHSSKGRIIYRPPHRESKR

SEQ ID NO: 264957 - protein, 121 aa, Zea mays
  unsure (1)..(121): unsure at all Xaa locations
  Clone ID: MRT4577_173248C.1.pep
MPGAGEEDKKPAEGGAHINLKVKGQDGNEVFFRIKRSTQLKKLMNAYCDRQSVDMNAIAFLFDGRRLRGEQTPDEVTQFGFRSQHXGIIDRYXMAVQLEMEDGDEIDAMLHQTGGSVPSTT

SEQ ID NO: 264958 - protein, 99 aa, Zea mays
  Clone ID: MRT4577_173249C.1.pep
MSGAGEEDKKPAEGGAHINLKVKGQDGNEVFFRIKRSTQLKKLMNAYCDRQSVDMNAIAFLFDGRRLRGEQTPDELEMEDGDEIDAMLHQTGGSVPSTT

SEQ ID NO: 264959 - protein, 110 aa, Zea mays
  Clone ID: MRT4577_17324C.1.pep
TIMGSFGFFLFFPFILSIFFYFFCQPASTPSKAGPLFKRALLFTRPFTKQATIHEKLPLRQQMDRIAKHPPDSSPLYTPSWVAPHGIAYCTCIKKLPSCLLKPTTFFNTS

SEQ ID NO: 264960 - protein, 134 aa, Zea mays
  Clone ID: MRT4577_173250C.1.pep
GGPNFFGPPLGGLPRGGQLDPQIWEKVGPLGLGRLEVFQPGKKRVFLGGVKVFCPRGFPQKKKKVGVAFGPPRGPGQPFCGPPLGPRQHVVSPPPQVAWLPPRNFFLGSNQNQVSPFLNLFLYDFFYLKMVNIQ

SEQ ID NO: 264961 - protein, 55 aa, Zea mays
  Clone ID: MRT4577_173251C.1.pep
NDFPCRRTQKEQANLLLNLTPLRLLPLNFLLLHRLLLRGLILLLRQLLLPLRLQG

SEQ ID NO: 264962 - protein, 122 aa, Zea mays
  unsure (1)..(122): unsure at all Xaa locations
  Clone ID: MRT4577_173252C.1.pep
MSGAGEEDKKPAEGGAHINLKVKGQDGHEVFFRIKRSTQLKKLMNAYCDRQSVDMNAIAFLFDGRRLRGEQTPDEVTQFGFRSQHXGILDXDDLLPVQLEMEDGDEIDAMLHQTGGSVPSPT

SEQ ID NO: 264963 - protein, 229 aa, Zea mays
  unsure (1)..(229): unsure at all Xaa locations
  Clone ID: MRT4577_173253C.1.pep
MAMVDEPLYPIAVLIDELKNEDIQLRLNSIRRLSTIARALGEERTRKELIPFLSENNDDEDEVLLAMAEELGVFIPYVGGVEHAHVLLPPLETLSTVEETCVRDKAVESLCRIGAQMKENDIVDYFIAVVKRLAAGEWFTARVSSCGLFHIAYPSATDPLKTELRTIYGQLCQDDMPMVRRAAASNLXGKFAATVEQSHLKTEIMSIFDDLTQDDQDSVRLLAVEGWAA

SEQ ID NO: 264964 - protein, 99 aa, Zea mays; identical to SEQ ID NO: 264958
  Clone ID: MRT4577_173254C.1.pep

SEQ ID NO: 264965 - protein, 158 aa, Zea mays
  Clone ID: MRT4577_173255C.1.pep
MPPCLYFQKKKKKNPDSLVPGCSAPRGGGGIPPHTAARTRDGRSNGGSNYAAAMVNVPKTKKTYCKNKECRKHTLHKVTQYKKGKDSLSAQGKRRYDRKQSGYGGQTKPVFHKKAKTTKKIVLKLQCQSCKHYSQHPIKRCKHFEIGGDKKGKGTSLF

SEQ ID NO: 264966 - protein, 99 aa, Zea mays; identical to SEQ ID NO: 264958
  Clone ID: MRT4577_173256C.1.pep

SEQ ID NO: 264967 - protein, 76 aa, Zea mays
  Clone ID: MRT4577_173257C.1.pep
SEVPRLRRHADAGSYKLAKTGIIMAVSTEASLSDPWTTTTLAARSEANVVIVEQRRAVAWRVKLVPAVDRQGDAKA

SEQ ID NO: 264968 - protein, 75 aa, Zea mays
  unsure (1)..(75): unsure at all Xaa locations
  Clone ID: MRT4577_173258C.1.pep
QLCYDLLPPXQPQQGDQASIVGGAINYVRELEQLLQSLEVQKSLKQSRGRRPAGGGASCSPPXAGXXXFPQXXXA

SEQ ID NO: 264969 - protein, 54 aa, Zea mays
  Clone ID: MRT4577_173259C.1.pep
MRRVHYAAAEEPVEFERGGHRLRHDLFSGDLRAHHVRPCPAPRGLCGLVLRGSP

SEQ ID NO: 264970 - protein, 82 aa, Zea mays
  Clone ID: MRT4577_17325C.1.pep
RVNTRKYKSGGCGQAKKKKKKKKKKKKKKKKKKKKKKKKKKKKKKKKKKKKKKKKKKKGGAVLGDQSLLPGDGKVIVFFWGH

SEQ ID NO: 264971 - protein, 74 aa, Zea mays
  Clone ID: MRT4577_173260C.1.pep
KQLGVHGASTMRYIAHCSSDERWNISIHATRILWIKLYMCSLGEWIAARHEPATDDEGWRPWNGASPTPTPSRL

SEQ ID NO: 264972 - protein, 241 aa, Zea mays
  unsure (1)..(241): unsure at all Xaa locations
  Clone ID: MRT4577_173261C.1.pep
MSSWSPAAAAAAAAAVAKAAKPLHRSVSSTPVSPNLSMSSSHRTPPLAMAAGGSGAVAPSSLLVADQGHRESVLLAARASMGNCLGETRLDLSVSGLRLAAKGKVRDVYESGQHLVLVTTDRQSAFDRVLASIPFKGQVLNETSLWWFNQTRHITPNAVVSSPDKNVTIAKRCTVFPVEFVVRGFVTGSTDTSLWTVYNKGVRNYCAXNLLPDGMVNNEKLSSNILTPPTKAAEHDXVPVT

SEQ ID NO: 264973 - protein, 60 aa, Zea mays
  Clone ID: MRT4577_173262C.1.pep
HLQHSVHQGVTDQAARRCLMRLVNRVESGDMGTVATIPVQATYVSVVFPINMSTDCNKIS

SEQ ID NO: 264974 - protein, 224 aa, Zea mays
  Clone ID: MRT4577_173263C.1.pep
MDGGGVDTATTAAWMEKHRQMYERATRHPFTVSIRDGTVDMSAFKRWLSQDYLFVREFVAFIASVLLKCCKQEDSSDMEIILGGVASISDEISWFKNEATVWGVDLASVSPLKANLEYHRFLRSLTEPEVSYAVAVTTFWTIETVYQDSFGFCIQDGNKTPPELLGTCQRWGSAGFRQYCQSLQSIVDRCLANAPADAVQSAEEAFVRVLELEIGFWDMSSSRS

SEQ ID NO: 264975 - protein, 93 aa, Zea mays
  Clone ID: MRT4577_173264C.1.pep
LSIQEMVEWEFKSKEDGKMHACGHDAHVAMLLGAARLLQSRRDDLKGTVKLVFQPAEEGHAGAYHVLKEGVLDNVQAIFGVHVDTALPVGLVG

SEQ ID NO: 264976 - protein, 72 aa, Zea mays
  Clone ID: MRT4577_173265C.1.pep
CLISPPCFVSFSKDTMYTSSSVLVVTSCHVLLPNSTSSAIQMFASMSGPPSALHNVDSRSVAGSAVIDEWGS

SEQ ID NO: 264977 - protein, 92 aa, Zea mays
  Clone ID: MRT4577_173266C.1.pep
VGTNHFPWLYKTLGPYLSSQRVGGGHPKCFKFPPGPGDQNQTKWKPALYRHRGGFIQGNNPRKALSFQQFQGCAPPRGNGGHNARNPHLFEG

SEQ ID NO: 264978 - protein, 47 aa, Zea mays
  Clone ID: MRT4577_173267C.1.pep
KRTQPYWIQLQNCSRFFTSSLHHSLKMTGQEESAARIQPDEKKLVPT

SEQ ID NO: 264979 - protein, 143 aa, Zea mays
  Clone ID: MRT4577_173268C.1.pep
NSRVAVGSFFPAPLRTVSHRLRRVIESWHHGGHSWDCTPKKNAAAVDSRPGCRSGLGLRLGTFVRVLWCSWFPRRARLVSRSLRISRQSPTPQWSRSSPWTAPLAPSLSWRVDTCHLKSKLVPGISSARRRAGGSGGATKRGV

SEQ ID NO: 264980 - protein, 56 aa, Zea mays
  unsure (1)..(56): unsure at all Xaa locations
  Clone ID: MRT4577_173269C.1.pep
CXCCLPPGLRWVXXLLGWXXCLRLVWPSGSRLRWVAGXPCVFLACGACCPGCPCGV

SEQ ID NO: 264981 - protein, 108 aa, Zea mays
  unsure (1)..(108): unsure at all Xaa locations
  Clone ID: MRT4577_17326C.1.pep
PTVNNRRDWKNXPGFTKLNRFAKYPLFENCRNNKNAQPYRXFQRVKXLNGKWXSPCTGPLSXPSVTVTLTITVTLASALPPAPFISFPSFFPTLAGFPRQPLNRGLTL

SEQ ID NO: 264982 - protein, 81 aa, Zea mays
  unsure (1)..(81): unsure at all Xaa locations
  Clone ID: MRT4577_173270C.1.pep
NGAEWVELLVREMTNAYDIDNARANASRAFXRLWRYQSXRSGSESTHNLYMVIMILKELLTVELRENALLKRSVAINHELL

SEQ ID NO: 264983 - protein, 123 aa, Zea mays
  Clone ID: MRT4577_173271C.1.pep
MYAYTVIAFLAASVAAAGNGPSISGLTVQQAANSCANGQSVNCCNKTSNKRAGNSVGDGAGIANGLSLFSQCSKVDVNVIAIADNLLNKECQANAACCQDSPGTAAGGLVNAALPCVAISNLV

SEQ ID NO: 264984 - protein, 60 aa, Zea mays
  Clone ID: MRT4577_173272C.1.pep
GNSKIPPNRSSAPLRDVSPWIKLSEPEPRNTVSPPWNAAVDTPSVDSPLYPFTRLPDHRP

SEQ ID NO: 264985 - protein, 56 aa, Zea mays
  Clone ID: MRT4577_173273C.1.pep
NKITLRFFEKGAKKKGKKRVTPEFGGYQKKNFIPPNSGGYTTGPLSLGKSLPFNLA

SEQ ID NO: 264986 - protein, 245 aa, Zea mays
  Clone ID: MRT4577_173274C.1.pep
PAGMSSFSLKRRVFPSSKPPDGGYPPPFRLLVGGTQLHGSWYLSAIVRLQGFSSRSLVAPFRRWPPKTVTSSSWMGRGKPGCDPALSIGCVRHPRWGGGRGEPGLYLARGSANHLLFQLLAVAIVLPRHDGVVLQSCRGRRTVAVQLGCNVPSSPSHSGRGRQRGSTGALGSGPLFGFDGLFASLEWDREQEPSGDCVHLGPWLPLQRPLPRRPEVACILGDGTGVSFAMALRMPVSSFIVAVEA

SEQ ID NO: 264987 - protein, 64 aa, Zea mays
  Clone ID: MRT4577_173275C.1.pep
LKKGTKILFEVVTQNEHLPIPLQQNYSPSQIRFNTIYQRILRHAPSRTLPSLKTYNIPRLKKHR

SEQ ID NO: 264988 - protein, 50 aa, Zea mays
  Clone ID: MRT4577_173276C.1.pep
SYRHPRSLLIASAFSSSCLFPTAADMAAQEEKTAVACAAADVATEEPAPA

SEQ ID NO: 264989 - protein, 115 aa, Zea mays
  Clone ID: MRT4577_173277C.1.pep
AQKPIFFFNKKNAREKQGPSFLTGWPGQKLPPFFVPPFYLHTHGTKKTFFFLKHGPLGPMGGPIRGVNYNWGQQLIKGGVLQTTHFFFLYFGPQGMGGLVFKGGDLMGVFTGALH

SEQ ID NO: 264990 - protein, 57 aa, Zea mays
  unsure (1)..(57): unsure at all Xaa locations
  Clone ID: MRT4577_173278C.1.pep
MAKIKIGIFRFGRIRKLVAKVALQSDDVQLVAVDDPLIAXDYMTFMFXYDTVHGQWK

SEQ ID NO: 264991 - protein, 170 aa, Zea mays
  unsure (1)..(170): unsure at all Xaa locations
  Clone ID: MRT4577_173279C.1.pep
MTSQLDPSQVMXVIIRVTGGEVPAPPSLVPXIGPLGLSPNRIPEDIGKETDEDCRGTPRLASRLTDQNRXAQVSVDPSAAQLVINALEXHERDRLMVMNMMHSGHIRLDDVFWIAMTMSNLCMRTELVGSAKEILGTWVSCLSTDVGXDPPDLQQEIGYGHVKIPSAIHC

SEQ ID NO: 264992 - protein, 130 aa, Zea mays
  Clone ID: MRT4577_17327C.1.pep
GGQVRPFSVWSPPQAVPGPLHWWPFLLGKFSRAPRPFPWSTLLIGLKSLFSRTLNQRHKFPAKKMLQICNFGPPLWSGMIPNNNPPNNISPPGLPWFDFIQRKAFFWQVIFPREGCSFALFFFPKRTGWV

SEQ ID NO: 264993 - protein, 91 aa, Zea mays
  Clone ID: MRT4577_173280C.1.pep
ADPPFRGPLGPRPRRFSLGSAASQRRTSRCSPVPESGPPAACLTRSSPKAQTFELKHWFRLIKTLASFLGSFLKCFRRRRQKKRGGFDGPP

SEQ ID NO: 264994 - protein, 558 aa, Zea mays
  Clone ID: MRT4577_173281C.1.pep
MASAAAAVIPDGRRWSKGPGSSSSPVTTAIFLFFFVVVVGVLVSARWITTTTHLSTTNLDQWSSKLAILTATHTTSSIPAIPAAPPPPRPTYSLSCPAPPLHRDPTIPSNISQTLDLVLSPNASSASTCAAFPDPPPLPANSNASSTCPAYFRFIHEDLHPWRAAGGITRAMVDRARATANFRLVVIRGRAYIERIAPAFQTRDLFTIWGILQLLRRYPGRVPDLDLMFDCVDWPVVHADQYQGENATLLPPLFRYCGDNETLDVVFPDWSFWGWPEINIKPWDALQKELNGGNKRVKWLAREPYAYWKGNPDVAVTRQELVKCNVSSKHEWNARIYKQDWLKEIKAGYKQSDLASQCTHRYKIYIEGSAWSVSEKYIQTCDSMTLAVTPKYYDFYSRVLMPMQHYWPIWDDNKCSSIKFAVDWGNSHKQKAQRIGKQGSNFIQKELSMEYVYDYMFHLLTEYAKLLRFKPRKPPEAIEVCPESLACQAIGREKKFMEDSMVRSAHDTCPCVSVSTNSKSCAVRHGSKKSRGKHGCKNNGGPWFSSPNRASSISLPTK

SEQ ID NO: 264995 - protein, 106 aa, Zea mays
  unsure (1)..(106): unsure at all Xaa locations
  Clone ID: MRT4577_173282C.1.pep
MGTRIFAIVMGLATCTCVANATMFPHCSQTAIASXLLCTYHPSIIATQXENPDLQPYRLQQAIAASNIPVSPLXXYQQSHTISTGHALVQTITAQQLAQLMLPAIN

SEQ ID NO: 264996 - protein, 89 aa, Zea mays
  Clone ID: MRT4577_173283C.1.pep
IARVGALPSVNQCCLAQEHVVVGVHCEYQEGKVAHEVPQVTQEGIICLSGVISCLIRPLSPVCDNSSAVDRWNVLVYVCALKQAARSFL

SEQ ID NO: 264997 - protein, 80 aa, Zea mays
  Clone ID: MRT4577_173284C.1.pep
WVCCLRVSGFPGGGHPRRLLRFPSLPYRCFPFFFSRVFFSRFPVYIVHVRILSELGLSLVGGVAPGELVFILVCSLSGLP

SEQ ID NO: 264998 - protein, 73 aa, Zea mays
  unsure (1)..(73): unsure at all Xaa locations
  Clone ID: MRT4577_173285C.1.pep
AGAKYADMVPQCSFYHRSILPRCLPVVTXMDFKQAGAQGYWLQQGIVDSVLYQPIDQLYHQCLVQLTFQTIAS

SEQ ID NO: 264999 - protein, 95 aa, Zea mays
  unsure (1)..(95): unsure at all Xaa locations
  Clone ID: MRT4577_173286C.1.pep
HVNPWTGDAASXLAVAIXMKKGLRXRIFLGCDNKPLSRQEIMDAVNNSGKFDTKFGGFIGTDGPLGKRMENSKTRAEIGWEPKYPSFTEFLVFEL

SEQ ID NO: 265000 - protein, 72 aa, Zea mays
  Clone ID: MRT4577_173287C.1.pep
TTQIQKKGRFSAKGSHISGSRKGINRDKPFLHKYGEADSPLQAHPSQNNSNMLKKKLKCLKEFYIWAISLHS

SEQ ID NO: 265001 - protein, 87 aa, Zea mays
  Clone ID: MRT4577_173288C.1.pep
HDAASLAVAIMKKGLRSRIFLGCDNKPLSRQEIMDAVNNSGKFDTKFGGFIGTDGPLGKRMENSKTRAEIGWEPKYPSFTEFLGISS

SEQ ID NO: 265002 - protein, 40 aa, Zea mays
  Clone ID: MRT4577_173289C.1.pep
GQEAGHQLICAQAQKKVSKFKIQTCLISKYFFALVGIFKH

SEQ ID NO: 265003 - protein, 81 aa, Zea mays
  unsure (1)..(81): unsure at all Xaa locations
  Clone ID: MRT4577_17328C.1.pep
TMTKKLDVEEPDSANXSFYSTRSAPASQASLRATSSTQSLARLGSPDYGNSALLSLPGYRPTTRSSARRSQAGVYSGAPPG

SEQ ID NO: 265004 - protein, 111 aa, Zea mays
  Clone ID: MRT4577_173290C.1.pep
GRFKQVAWQERKPKEAPEEQQEEEEDAASLAVAIMKKGLRSRIFLGCDNKPLSRQEIMDAVNNSGKFDTKFGGFIGTDGPLGKRMENSKTRAEIGWEPKYPSFTEFLGISS

SEQ ID NO: 265005 - protein, 336 aa, Zea mays
  Clone ID: MRT4577_173291C.1.pep
MRAAAAASFHLAPATKPAHRRGCTTESCSLKPAPTARPPRLRSLAGRAPLVCASLGISHDKGFDISDPNVVGQNDLLIVGPGVLGRIIAEKWKKEHPSCKVYGQTASKNHHNELTDLGIIPSLKGTTIHQKVPHVIFCAPPSGSDDYPRDVRLAASNWTGEGSFLFTSSTALYDCSDNSMCNEDCLSVPIGRSPRTDILLKVENVVLEAGGCVLRLAGLYKIDRGAHVFWLRKGTLDTRPDHIINQIHYEDAASLAVAIMKKGLRSRIFLGCDNKPLSRQEIMDAVNNSGKFDTKFGGFTGTDGPLGKRMENSKTRAEIGWEPKYPSFTEFLGISS

SEQ ID NO: 265006 - protein, 141 aa, Zea mays
  Clone ID: MRT4577_173292C.1.pep
TQGGLGNLFPFFQQNQFFPLTPLFPLYRGAYFQPHLFPFSRLGFAFFQQQQLFPFYPLAALSPPAFFPPPKLLPFWPLVAANRASFFSPPQLLPFSPRVGGFPPPLFQPPQLWPFGPPALANPPAPSPPPTPGGGPFLGAF

SEQ ID NO: 265007 - protein, 80 aa, Zea mays
  unsure (1)..(80): unsure at all Xaa locations
  Clone ID: MRT4577_173293C.1.pep
TXKAXPAQTRRXXKXARTQTKXXPXPKPXFNFLTRKFKXXLNXCKQXXPXTTXXCISRTXLYHPISYXXQXSXLNKXLXX

SEQ ID NO: 265008 - protein, 106 aa, Zea mays
  Clone ID: MRT4577_173294C.1.pep
YLQLAWELSSQIRNCQRLLSEGAVSGRAITKDEAHPIIFLGCDNKPLSRQEIMDAVNNSGKFDMKFGGFTGIDGPLGKRMENSKTRTEIGWEPKYPSFTEFLGISS

SEQ ID NO: 265009 - protein, 116 aa, Zea mays
  Clone ID: MRT4577_173295C.1.pep
NYNFFIVHMCVHICVRLYLDTYITIDTPKMYNQFIMLTLDRALYILYFYDIYCMIDIRNNSTDLYFLQTNTVPAYYQAVYPSTSTSRHPVSRPSIVVRRPHPSLRRLRCGLAPGRK

SEQ ID NO: 265010 - protein, 105 aa, Zea mays
  Clone ID: MRT4577_173296C.1.pep
GRPSFFFLGVFFCFFFPFSPFLFFFFFFMGEKLVLLFEPGTGLLAGSFEQTKGRNYGGLGYPFFSFPLGLLGGGLPQPLFGGWENFFGPRGGFVFWGMGKNPHGA

SEQ ID NO: 265011 - protein, 92 aa, Zea mays
  unsure (1)..(92): unsure at all Xaa locations
  Clone ID: MRT4577_173297C.1.pep
YNELSVAPEEHPTLLTEAPLNPKANREKMTQIMYEPFNVPAMYXRIQAVLSLYASGRTTCIVLDSGDGSFRKFPSMTAMTAPCHHAPGLGWS

SEQ ID NO: 265012 - protein, 51 aa, Zea mays
  Clone ID: MRT4577_173298C.1.pep
QNTCTLYLCCSVCVTSVDVGILSVRKFMVMASSRVICYMFYVMYYRLSSFL

SEQ ID NO: 265013 - protein, 95 aa, Zea mays
  Clone ID: MRT4577_173299C.1.pep
SSGNNAEYAGSSIAIVSEPSVTIGSDFNQHLVPLTSGKGSRQPRVTIRSPPNKTSETNNTIFGSVSKLAIRKKKKKKKKKSTLRCYHCLRRNPST

SEQ ID NO: 265014 - protein, 178 aa, Zea mays
  Clone ID: MRT4577_17329C.1.pep
HTPPTTMSSIITTTTMMHQTGKALGSINSVTETRPKKQERKKRENKSFSQAQQPPQNAILFSPTSQEFTVTNSHHHTLPLLSPESATALPMPSPFSIPRPPILFSSSIPLRWERTNPSHKHNNLHRTQSFSPPPPRNSLSRIVIIILFPCSRQNQRRRYPCPRPSPSRDRPSFLPHLP

SEQ ID NO: 265015 - protein, 43 aa, Zea mays
  Clone ID: MRT4577_1732C.1.pep
LLIKKSIDTATKSAAHALHRIMKPYYSLGEDNTNNIVGTSFIP

SEQ ID NO: 265016 - protein, 116 aa, Zea mays
  unsure (1)..(116): unsure at all Xaa locations
  Clone ID: MRT4577_173300C.1.pep
LTSWQCIVTTPTCQMHPGTPLTELKRKCCREPRDMPNYCRSTGLKILMDCTMPSSPDAQPEGLLQDLTMLTAERQRGSXMPLSTEAECILATINGRRGRMPNVRGGTNHRKLLRRA

SEQ ID NO: 265017 - protein, 534 aa, Zea mays
  Clone ID: MRT4577_173301C.1.pep
MASDNRASLLPFAAAVLVVLLAGGAAADDASSDDDAGTSRTPGCSNKFQLVKVKNWVNGTEGTTFVGLSAKFGAPLPRDIHEAKKSFAVLSNPIDCCSNLTSKLTSSVAIATRGECAFTEKANIAQASGSTGLLVINDNEELYKMVCGENDTSINVTIPVVMIPQSAGKKLKNLLHHGASVEVQLYSPNRPTVDLSACFLWIMAVGTIVCASLWTEFVTCEQVDERYNQLTRKDGPDTGTNYREDKEVFEISAKGAFIFIIVASVFLLLLFYFMSSWFVWVLIVLFCIGGIEGMHACLVTLLARIFKDCGQKTVQLPVLGEVLILSVGIVPFCAVFAILWAVYRHASFAWIGQDVLGICLMITVLQMARLPNIKVASALLSAAFVYDIFWVFISPLIFHESVMIAVARGDNTGESIPMLLRIPRFFDPWGGYDMIGFGDIIFPGLLVGFSYRFDRANRKGVLSGYFLWLIVGYAVGLFITYLALFLMDGHGQPALLYLVPCTLGVIVILGWLRGELYELWNFGKSPAENFVNEP

SEQ ID NO: 265018 - protein, 46 aa, Zea mays
  Clone ID: MRT4577_173302C.1.pep
YLDHDIGADHSAIKPCGPRRAITMQMGSVLNLEVKACIIPVRRGNA

SEQ ID NO: 265019 - protein, 68 aa, Zea mays
  Clone ID: MRT4577_173303C.1.pep
ELINPFKVLFPVNPKGSLSVFFGAAFGYWGGGPVPGSFGSFKNSICRKKMLVFFSFCPLFFPLFKGVS

SEQ ID NO: 265020 - protein, 60 aa, Zea mays
  Clone ID: MRT4577_173304C.1.pep
SSSRFTSRIRNTLRLDASTLSIARSARGSFQHFTYRPGISRTTKGSLQYSHPSLLRRRHI

SEQ ID NO: 265021 - protein, 60 aa, Zea mays
  Clone ID: MRT4577_173305C.1.pep
AIAPSATFPDPSFLGSYCFSSSTRALWFIYGAACCFCSAARLATDELTRGQTHRVGRRTL

SEQ ID NO: 265022 - protein, 98 aa, Zea mays
  unsure (1)..(98): unsure at all Xaa locations
  Clone ID: MRT4577_173306C.1.pep
ISKRSLXGTVQTTIEIXSLFEGIDFNYTITXTRFKELNKNLNRXSMEPVEKXXRDAKLDKSSNHNVVLDRGSTRIPMVQHLLQDFFNDKELSKNINTD

SEQ ID NO: 265023 - protein, 386 aa, Zea mays
  unsure (1)..(386): unsure at all Xaa locations
  Clone ID: MRT4577_173307C.1.pep
MAPAISKPLLTDLVAQIGKVPSSHIRPVGDRPDLANVDNESGAGIPLIDLKKLNGPERRKVVEAIGKACESDGFFMVTNHGIPAAVVEGMLRVAREFFHLPESERLKCYSDDPNKAIRLSTSFNVRTEKVSNWRDFLRLHCYPLQSFVDQWPSNPPSFRQVVGTYATEARALALRLLEAISESLGLERSHMVAAMGRHAQHMAVNYYPPCPQPELTYGLPGHKDPNAITLLLQDGVSGLQVQRGSRWVAVNPVPNALVINIGDQMQVXHALPVATEILAVVVIXLAEQSRRLLYPMHAWMQALSNDRYKSVLHRVIVNSESERISVPTFYCPSPDAVIAPADALVDDGHPLAYRPFTYQEYYDAFWNMGLQSASCLDRFRPGGSLE

SEQ ID NO: 265024 - protein, 180 aa, Zea mays
  Clone ID: MRT4577_173308C.1.pep
LRCSCSKGRQQAVAQREVENMKISTSVGDPSSPGPSGLCGRGQRTCRPDDEQPLLVRLVHQLLGCVDLRRPPHQVRRHLQELRPRVLGQGVHQVLVPLLPPRKLRAERSTRDSSDSTMDARHMSAQPMDTSMFLRPSALLLVGSHTNKLGLDAVVNARLRVPSQCEMEYDNASGATKPSN

SEQ ID NO: 265025 - protein, 63 aa, Zea mays
  Clone ID: MRT4577_173309C.1.pep
HGGFGQTKFDRSVRACFFSSKTKRLLLGNVIETQQIVCVCSVKKKWVLFLFVMSVRVGRSGFS

SEQ ID NO: 265026 - protein, 192 aa, Zea mays
  unsure (1)..(192): unsure at all Xaa locations
  Clone ID: MRT4577_17330C.1.pep
LLPFHLSAPGGGAAPLSTRLGAVPAAPPIHSAPARPLPSMNLSEDWRFFFLVCAXFAALLGGGLPAAAASRGPLGGGGLPPRTQMLSLPYPIPLPRSSTRGLNRFLRSFVRGTSFLPRSDFDYLADTLIPQPASFSPASNLLAVLRLSCSLILFFPYGENAEHVAFVTLDATTXTGSTPLLPGGQRDGVYAP

SEQ ID NO: 265027 - protein, 79 aa, Zea mays
  unsure (1)..(79): unsure at all Xaa locations
  Clone ID: MRT4577_173310C.1.pep
CSSDSQSLSELRPARRPRWQGRRPXGMCPAGLEELIGWAGHYVLRGPTGRLSSTEKAAKLGCCGLKIPVGDSESLKAIQ

SEQ ID NO: 265028 - protein, 123 aa, Zea mays
  unsure (1)..(123): unsure at all Xaa locations
  Clone ID: MRT4577_173311C.1.pep
MATDVLRARNILLPAPPQRIRAAAAARRRAAGSXTATTPAPPPPGGGRRRPGHXPAAGRRHPGGRRARPAAEVYAGPSFSTSPDPSLLPLPQFAARKAVAVAMTTAVDAAAATRDLRLILRLE

SEQ ID NO: 265029 - protein, 53 aa, Zea mays
  Clone ID: MRT4577_173312C.1.pep
KRISKVFLQKSGTILRRLLQGFKCSFGSSAFYIITLGNTMLVFVRRLPLDDHP

SEQ ID NO: 265030 - protein, 130 aa, Zea mays
  Clone ID: MRT4577_173313C.1.pep
MAGRTNIPTNNSALIAIIADEDTVTGFLMAGVGNVDLRKKTNYLLVDNKTTVKQIEDAFKEFTTREDIAIVLISQYIANMIRFLVDSYNKPVPAILEIPSKDHPYDPAHDSVLSRVKYLFSAESVASDRR

SEQ ID NO: 265031 - protein, 48 aa, Zea mays
  Clone ID: MRT4577_173314C.1.pep
DHTYTHTSSYASKPISKPPTAAITTTCCRLLSLLHHIEPCTTTYNNNN

SEQ ID NO: 265032 - protein, 41 aa, Zea mays
  Clone ID: MRT4577_173315C.1.pep
YKHRNFIKSQGTPRLAAYTHAQRQNIKWKTKQTFSTEEENP

SEQ ID NO: 265033 - protein, 145 aa, Zea mays
  Clone ID: MRT4577_173316C.1.pep
SSPPWLVVVDAAPLPPRVRGPAHPLGLGGRLVATGKPESFGGPFLVPSYRGSSFLDPKGRGGSTGYDNAVALPAGGRGDEEELQKENIKNAASSTGNITLSVTKSNPETGEVIGVFESVQPSDTDLGAKAPKDVKIQGVWYAQLE

SEQ ID NO: 265034 - protein, 75 aa, Zea mays
  Clone ID: MRT4577_173317C.1.pep
FSPYLGKANSPFFFDWGVVLLTIPKAATENNNVGLNKKPMPSCLLVFLNLHIYKKALLKNPAWCAKGSFPNVAHK

SEQ ID NO: 265035 - protein, 61 aa, Zea mays
  Clone ID: MRT4577_173318C.1.pep
RDVLVVLGRLCLMSSVCNLSVDSVVSVFRVVVVRAYLKCCVCNHQEQRGGVDLKVLLGPSP

SEQ ID NO: 265036 - protein, 71 aa, Zea mays
  unsure (1)..(71): unsure at all Xaa locations
  Clone ID: MRT4577_173319C.1.pep
VVIGDLVGWLYTTEAMCEVKALDAGRKPLLAAWAERFCALEGEKGXIPDVDRLLEYTKARRAVFGLPPLRP

SEQ ID NO: 265037 - protein, 155 aa, Zea mays
  unsure (1)..(155): unsure at all Xaa locations
  Clone ID: MRT4577_17331C.1.pep
SSTCRLVDVERELESGRDELASRRLLGSPTGGKAPRXKHVAAEGARKSAPTTGGGKKPHRYRPGSVALREIRKDHRETEVLIRKLPXRSLPREFAEDFRTDWRFQRHARMPLQGVVRHTVVCCEENNEMXAWPASGVIMMAKDIYLXRRIRGQNT

SEQ ID NO: 265038 - protein, 113 aa, Zea mays
  unsure (1)..(113): unsure at all Xaa locations
  Clone ID: MRT4577_173320C.1.pep
AYQVTRSXIFACXEKWLXSRWPDSAFFHHEYAVRLPGCAVRFTMCKLVLRTAFVAATTVVSLMLPFFNAGSRKWVALQALNVGALLVSLLAAVGSVADMVQRLGHVTIFQTQL

SEQ ID NO: 265039 - protein, 76 aa, Zea mays
  Clone ID: MRT4577_173321C.1.pep
SRSRARPFYFIFSLFLISGLFGLFFTCSWQKPSFKKGASRLSTEHQPLVHLSMHTLTLINFSYTLNLIAKSLKDLL

SEQ ID NO: 265040 - protein, 242 aa, Zea mays
  Clone ID: MRT4577_173323C.1.pep
MATSAIQQSAFAGQTALKQLNELVRKTGGAGKGRTNMRRTVKSAPQSIWYGPDRPKYLGPFSEQIPSYLTGEFPGDYGWDIAGLSADPETFARNRELEVIHSRWAMLGALGCTFPEILEKNGVKFGEAVWFKAGAQIFSEGGLDYLGNPNLIHAQSILAIWAVQVVLMGFVEGYRVGGGPLGEGLDPIYPGGAFDPLGLADDPDAFAELKVKELKNGRLAMLSMFGFFGQAIVTGKGPIQNL

SEQ ID NO: 265041 - protein, 58 aa, Zea mays
  Clone ID: MRT4577_173324C.1.pep
GFKIIGKFFPLERGGLFAPEIASQLFFKKKKKKKKKKKKKKKKKKKKKKKKKKKKKAA

SEQ ID NO: 265042 - protein, 245 aa, Zea mays
  Clone ID: MRT4577_173325C.1.pep
MSAAEAKAAAVPESVLRKRKREEQWAADKKEKALADRKKALESRKIIFARAKQYAEEYHAQEKELVQLKREARLKGGFYVSPEAKLLFVVRIRGINAMHPKTRKILQLLRLRQIFNGVFLKVNKATINMLRRVEPYVAYGYPNLKSVRELIYKRGYGKLNKQRIPLSNNSVIEEGLGKHNIICIEDLVHEIMTVGPHFKEANNFLWPFKLKAPLGGLKKKRNHYVEGGDAGNRENYINELIKRMN

SEQ ID NO: 265043 - protein, 173 aa, Zea mays
  unsure (1)..(173): unsure at all Xaa locations
  Clone ID: MRT4577_173326C.1.pep
MDVERKVVEADDDGRVRTGTVWTATTHAITAVIGSGVLALPWSVAQMGWVLGPVALVGCAYITYFTAVLLSDCYRTPDPVHGKRNRTYMDVVRSCLGXHHACGFFFLNFHGQRVNDSSSVFXRDGHGNDKDVLSKKKKKKRPPRDVVVCGLAQYAILWGTMVGYTITTATSIM

SEQ ID NO: 265044 - protein, 68 aa, Zea mays
  Clone ID: MRT4577_173327C.1.pep
MRPSQLKSTAEHHRRSRGYTSTANPERKVAILGAAGGIGQPLSHLMKLNPLVSTLSLYDITGTPGVAA

SEQ ID NO: 265045 - protein, 214 aa, Zea mays
  Clone ID: MRT4577_173328C.1.pep
DTVKAPPSENVTMKRASFYGISVTTIFYVSLGCIGYAAFGNAAPGNVLTGFDEPFWLVDVANIAVVVHLVGAYQVYAQPIFACYEKWLGSRWPDSAFFHHEYAVRLPGCAVRFTMCKLVLRTAFVAATTVVSLMLPFFNAVLGLLGAIAFWPLTVYFPVTMYIAQAKVAPGSRKWVALQALNVGALLVSLLAAVGSVADMVQRLGHVTIFQTQL

SEQ ID NO: 265046 - protein, 93 aa, Zea mays
  Clone ID: MRT4577_173329C.1.pep
MLFFSYFKELVGKEVTVELKNDLAIRGTLHSVDQYLNIKLENTRVVDQDKYPHMLSVRNCFIRGSVVRYVLLPQDGVDVDILHDATRREARGG

SEQ ID NO: 265047 - protein, 41 aa, Zea mays
  Clone ID: MRT4577_17332C.1.pep
TLMDHLGSGLSVAPKLLIKSHHSLKKKKTKKEKPKQRKTNN

SEQ ID NO: 265048 - protein, 105 aa, Zea mays
  Clone ID: MRT4577_173330C.1.pep
KKTKTKKKKKKKKKKKKKNKKKKKIKKNKKKKKKTKKKKQKKKKRGAPQKVQIFLSLACNFKPLPNFPQISFHGAFFYNSVLGKPRSFHILLPLEKIPFSPFGLI

SEQ ID NO: 265049 - protein, 62 aa, Zea mays
  Clone ID: MRT4577_173331C.1.pep
KKGPPPPLGRTKRSLLKTVTGNWGAPKRGAKFPLSKKWIPSQRRIFRSPPKPPKKVGVTRGF

SEQ ID NO: 265050 - protein, 63 aa, Zea mays
  Clone ID: MRT4577_173332C.1.pep
FGCYLLLMELLGRAGAGVHCKMCRKLGTAVCDKFERITGCGCQTSVPSIPGGTGGHGTDPSRP

SEQ ID NO: 265051 - protein, 72 aa, Zea mays
  Clone ID: MRT4577_173333C.1.pep
SSTTTADRYRVFWSMSVVNRTEQRVVGDDDELARKYQESPELWWLGLHCISRCLLLSSYRIDGSCWAACTIS

SEQ ID NO: 265052 - protein, 234 aa, Zea mays
  unsure (1)..(234): unsure at all Xaa locations
  Clone ID: MRT4577_173334C.1.pep
MALRLLLLLVTVSTAADALTPDGQALLAFKAAVLQDPTGALANWVATAADPCSWNGVTCSSPDPGSAQHRRVVALSLPKKRLVAELPRAPLPSSLRHLNLRSNRLFGPIPPALVAGAPALQSLVLYGNALDGQLPEDLGDLAFLQILDLSSNAINGSLPASILKCRRLRALALARNNLTGSLPAGFGARLGALERLDLSLHRXFYGTIPGDIGNLSRLQGTXVDLSHNHFSGPS

SEQ ID NO: 265053 - protein, 40 aa, Zea mays
  Clone ID: MRT4577_173335C.1.pep
HFSNGLWVLRSLIFLKVPLIHQKVSPPPGGAIPRAEFELT

SEQ ID NO: 265054 - protein, 89 aa, Zea mays
  unsure (1)..(89): unsure at all Xaa locations
  Clone ID: MRT4577_173336C.1.pep
LLSLFINSTNSFIIPQFSLSPNTIFPXFLPTITSXXFXHLXXQSNIQQQSLSTNFLQQPITQFQQQSLPHLTIQSITTQHQQQFLPSLY

SEQ ID NO: 265055 - protein, 133 aa, Zea mays
  unsure (1)..(133): unsure at all Xaa locations
  Clone ID: MRT4577_173337C.1.pep
MNPFPWSDPVGVPPLTPLGIIRSAPPCPRNPSXPRHPAPPFAEGPPPPPPESPPPRPPPRGAQKKGWAPPPPPPRGQKKKGPAAPPPPKQKKTTKKKKQKKKHKKKKKKTHKKKKKKKKTHPKKKTTSGPEPS

SEQ ID NO: 265056 - protein, 23 aa, Zea mays
  Clone ID: MRT4577_173338C.1.pep
AVVKIVHPWNQHELLFNNVDHVT

SEQ ID NO: 265057 - protein, 59 aa, Zea mays
  Clone ID: MRT4577_173339C.1.pep
QLGKHKPLISMVTKATQLGYIHLQPKFSSGRICLPVPNPPHSFPLFSIAHTALYKHRLF

SEQ ID NO: 265058 - protein, 81 aa, Zea mays
  Clone ID: MRT4577_17333C.1.pep
CFKKYYAGSQHRGPCVILTHFTLNSRNPAMILLLCFTSVFLRRSLSSTLCPLSSLAGQHLVPVNNRCLLRASALATTTHEM

SEQ ID NO: 265059 - protein, 65 aa, Zea mays
  Clone ID: MRT4577_173340C.1.pep
EGKKFSSRKPRSPRINTNIVRPLRMAFVSNVYLRKPRGNSIVLSIDRTSETFRPLFGFRLDQEGL

SEQ ID NO: 265060 - protein, 70 aa, Zea mays
  Clone ID: MRT4577_173341C.1.pep
FFFFFYVSSLLLVYSGFQTPGKLIKQNSQVDPKPTCIIYNVAFQLWRYSPGERNIPYPLHHTIIYPICCL

SEQ ID NO: 265061 - protein, 141 aa, Zea mays
  Clone ID: MRT4577_173342C.1.pep
MAALISQDLAAPPPARAPPSVPASLQMPPTSSRLSSRPRIWLTQKLPPGPKSSQSASARRTMTLEPLRAASAPPQGREGPCETISSRQIHLTLILRASPAEPHRRSGGGGAHGYVRVCVRSGPSRRGRLVMCRGDGVTGLR

SEQ ID NO: 265062 - protein, 107 aa, Zea mays
  Clone ID: MRT4577_173343C.1.pep
FFVQPSWRRPKGIDSRVRRKFKGCTLMPNIGYGSDKSTRHYLPNKFKKFVVHNVSELELLMMHNRTYCAEIAHNVSTKKRKEIVERAAQLDIVVTNKLARLRSQEDE

SEQ ID NO: 265063 - protein, 81 aa, Zea mays
  Clone ID: MRT4577_173344C.1.pep
TNNGGLLQESSTLNLGQPRRYIFGFLSFLRYIFGIQGKRIWGLMPASLRRLGAGVDDVLFHFDRRRRCAFTDRRRRPSPTV

SEQ ID NO: 265064 - protein, 62 aa, Zea mays
  Clone ID: MRT4577_173345C.1.pep
TTSLGALSHFLPAYIHCALINSNVEKFIHCFLRHMACTCELIILHHYIVNLLVLYGTLMMDF

SEQ ID NO: 265065 - protein, 64 aa, Zea mays
  unsure (1)..(64): unsure at all Xaa locations
  Clone ID: MRT4577_173346C.1.pep
SKYLGKLFQIKEFPGNTNDARMAIGLQGHFSVPSIPYIRAALDTMSRANAPIWLTEVDVAXGPN

SEQ ID NO: 265066 - protein, 69 aa, Zea mays
  unsure (1)..(69): unsure at all Xaa locations
  Clone ID: MRT4577_173347C.1.pep
GRKRRARXFCWGPKYFFQHGPTLPKPNVAGVLFAHTIGLXEHPDLGTFFFSMGRASSWNRRGRPKPFFG

SEQ ID NO: 265067 - protein, 90 aa, Zea mays
  Clone ID: MRT4577_173348C.1.pep
LVLISCEWLPETIHKHKVPEMDTKAFKALSSKEGYCDPPRKKKSLLQNRPWISTLLPYCFFSLHDTAYSEILSLWAVSDRKYGGLSFSTE

SEQ ID NO: 265068 - protein, 116 aa, Zea mays
  Clone ID: MRT4577_173349C.1.pep
HGFYGVSNCHRVLVWSGYCLSLGLLPDSRFSQLSGGVWYPYRGEWSLSRRVCIVFLLILPFIRRTGAPCTVHMHSHAPLLGMESVHAVNTMCARCTSAAMNDYVSITSLFRLSLGW

SEQ ID NO: 265069 - protein, 68 aa, Zea mays
  Clone ID: MRT4577_17334C.1.pep
MEGTVLCADNHAPVTPISFLERTELVYPDRPAVGDDGHADEPPPRTWRLTRDRCLRLDAVLGRIANIA

SEQ ID NO: 265070 - protein, 117 aa, Zea mays
  Clone ID: MRT4577_173350C.1.pep
EKGGGFFLKKKTGGNRPKTLRGKLFYKKGNLFLTPTKKKGWKGGNPKFGLKNPALKKRANPWGPPTARVFFSRDPPAPKNPFCLGGLTGTEKIGGGKKILIYQAIPQNFFHYMGKNF

SEQ ID NO: 265071 - protein, 149 aa, Zea mays
  unsure (1)..(149): unsure at all Xaa locations
  Clone ID: MRT4577_173351C.1.pep
KPADPSPRLKPMAPPESPXPPGXTPPHRAPPMGPKNPGPKGRGNSLGGXRPQNGVSPIDPPPQKNPLGAXKKPKPFKGPPKGKPPGPPKIXQKLGKRPPKQPPIPSRDQQGPCPPFCPGPQKNPLYPPPRGGAGPPPPKNPPGPGGGWD

SEQ ID NO: 265072 - protein, 55 aa, Zea mays
  Clone ID: MRT4577_173352C.1.pep
LCMISLYLNGQPNHFFQSQAADCSGVHDLHSSNGQLKHYQSQAADVSGMNANAFL

SEQ ID NO: 265073 - protein, 71 aa, Zea mays
  Clone ID: MRT4577_173353C.1.pep
NTFFRRWRRLASTTAVSRLAAGMRCQRLSVNGFLHSWMIIYTQARLRLQELSVYLKRLKKCVVVDSLYEGH

SEQ ID NO: 265074 - protein, 65 aa, Zea mays
  Clone ID: MRT4577_173354C.1.pep
AITWIVWSSSGIPSHFDGGGVLDNALFYIPLQGKRLRCGLNKHGATQSVTIVIKSRYILPNQTAP

SEQ ID NO: 265075 - protein, 95 aa, Zea mays
  Clone ID: MRT4577_173355C.1.pep
MDTSAAMTMDHHRAAPSLSTEEKRRIERVARCVARDRDGGDLTEKLLLRLLGLTRNARRWGFLAPDHPLHPYYLQHKVSERCRILRPRHAAADRR

SEQ ID NO: 265076 - protein, 76 aa, Zea mays
  Clone ID: MRT4577_173356C.1.pep
YMAFSLLIIISWPVRHMMARSGMSDRCAASEKDKEIHVSAGFYLVVLSIFMQWSSGQPGFGMSFGSLWTNRADPLL

SEQ ID NO: 265077 - protein, 40 aa, Zea mays
  Clone ID: MRT4577_173357C.1.pep
FLKKKKKKKKKKKKKKKKKKKKKKKKKKKKEKNNKKKKLK

SEQ ID NO: 265078 - protein, 367 aa, Zea mays
  Clone ID: MRT4577_173358C.1.pep
DRRSVITQQQSQYHQAISGLRGISATEYAAKPPRVLLNSARYIQKEKDSTTTRQAFLQLAWKNGLPLFMLSYGDSDILAATVRRKGISEKDDLESTYAVFTVEEPKKKSGAWIKAGGKNKKHHLLSSIVGEIKVARRKSRCHHTADVHVYREFVLLGSGFLPSSEESGDSHVSGEFAAFISALPQQEAETSNQSSSQNTRQKNLAPTGCGCPPLGNFQPSSASANVIAVLPDGFHGKSTSGQPLPLIERWKSGGACDCGGWDEGCMLSVLTDAAEENDAVQANQAKDGSQRFELLAQGGSREDRHAFSMTSFKEGLYTVEFRSSIALLQAFAMCIVMLHGRYPDRLQVGSQAAQEHDLLAGHEVKAM

SEQ ID NO: 265079 - protein, 266 aa, Zea mays
  Clone ID: MRT4577_173359C.1.pep
SIVGEIKVARRKSRCHHTADVHVYREFVLLGSGFLPSSEESGDSHVSGEFAAFISALPQQEAETSNQSSSQNTRQKNLALTGCGCPPLGNFQPSSASANVIAVLPDGFHGKSTSGQPLPLIERWKSGGACDCGGWDEGCMLSVLTDAAEENDAVQANQAKDGSQRFELLAQGGSREDRHAFSMTSFKEGLYTVEFRSSIALLQAFAMCIVMLHGRYPSRTQVGSQAEQEHDLLAGHELKAMAASQGRRPPTSYVPHRPPLSPVGRA

SEQ ID NO: 265080 - protein, 127 aa, Zea mays
  Clone ID: MRT4577_17335C.1.pep
MSWAPIENDPGVFTELLQQLQLKGLQVDELYSLDLDALNDLQPIYGLIVLYKWRPPEKDERPVIKDAVPNLFFANQIINSACATQAIVSVLLNSSGITLSEDLKKLKEFAKDMPPELKGLAIVNCES

SEQ ID NO: 265081 - protein, 128 aa, Zea mays
  Clone ID: MRT4577_173360C.1.pep
AFRLRLKTRERKLYTNNYGGCGGPDAHEMLWSSHPFAHPSTFDTLAVDPALRDGIRSDLLRFVRRRDHYARAGRAWKRGYLLHGPPGTGKTSLIAAIGNFLEFDIYDLELTGVQCNTDLRRLLGCTRP

SEQ ID NO: 265082 - protein, 200 aa, Zea mays
  unsure (1)..(200): unsure at all Xaa locations
  Clone ID: MRT4577_173361C.1.pep
APFLFSFGHSGFPLAHRALGPARWPCAGSLFWGPGLSPFGPGFVFFVAGWAGVGFRQRPPFSPGPPPLAPAPXPGPGPPSPGPGPXAFPPPVGGRRPGPGVGPPPRGRGGRPPGPXAPAPPPPPPPPPPPPPSPPPPPPRPSPXPPPPPPPPPPPVGRAPFPCVVFPFRVWWAPCRLLGPKKKKKKKKKKKKKKKKKKKL

SEQ ID NO: 265083 - protein, 74 aa, Zea mays
  Clone ID: MRT4577_173362C.1.pep
SVRAFMTVKMVLAGSLFLMSLWRFLIIVQRKLLTFVLNNWPSPVFVMLRYILFVSHQVFGFSLDAIGIWVIAYY

SEQ ID NO: 265084 - protein, 116 aa, Zea mays
  Clone ID: MRT4577_173363C.1.pep
KDAIQANQAKDGSQRFELLDQGRSREERHAFSMTSFKEGLYTVEFRSSIALLQAFAMCVVMLHGRYPRRMQVGSQAVQEHDLLAGHELKAMAASQGRRPPTSYVPHRPPLSPVGRA

SEQ ID NO: 265085 - protein, 749 aa, Zea mays
  Clone ID: MRT4577_173364C.1.pep
MPTKVQVSSERNVKIISGRDGQKKGNSQHDQIVRVPKDMVTPVNGNVDGKFEDKVRVVKNDKFRRQRESWGGERAACMKGSKPWPGRKATTVDELVKHMSNVPSYLQRKETSEHLQDKALNVGVLEWGLLANWSQQQKHELARSHGASPSNTSRSVLFSSPSHSSASPSSRSLESNQSTPMSGHHHSSIRAQQNRLTDKHHGRARCPPSPNSAVLSLLSGHGTHPCPENGHNYVGLGLSNVSLASDSLGSSSRSCGRHEMVGDEETRRKPEDVVHHCSRRLFTDSDNIGKHFFTSNNKDSMCNDPEQSSGLDCENFESLISDAVMDTARNGSRSPDCFLEDIETSREFPRIPYSCPLPIIDSAAKEIGTTSTEAGDNFIGTAAKVSKNSSLNQSALNATENPPRYSAKFSDRMPDRHQGSVMNRVSRSSSLKESPHARQPNVVPPVDKTGDRSSPNSKGRRSPLRRMLDPILKPRHSSPIRPSFVPKCHLPVNTTKQSLDLGGSVPQNMQRRSVDLVVNSNYRIEANTNQPPRVLLNSARYIQKEKDSTTTRQAFLQLAWKNGLPLFMLSYGDSDILAATVRRKGISEKDDLESTYAVFTVEEPKKKSGAWIKAGGKNKKHHLLSSIVGEIKVARRKSRCHHTADVHVYREFVLLGSGFLPSSEESGDSHVSGEFAAFISALPQQEAETSNQSSSQNTRQKNLAPTGCGCPPLGNFQPSSASANVIAVLPDGFHGKSTSGQPLPLIERW

SEQ ID NO: 265086 - protein, 49 aa, Zea mays
  Clone ID: MRT4577_173365C.1.pep
ADSSRLRRILAMTPCVLLISLTLCLEVYFDVLHLNSQLLRLLNSFYESV

SEQ ID NO: 265087 - protein, 277 aa, Zea mays
  Clone ID: MRT4577_173366C.1.pep
QKNHLLSSIVGEIKLRVGKSRCHHTTDVHVHREFVLVGSKFLPSSEESGDSNVSGELAAFISTLPQQEAETSKQSSSQNTRQRNSVPIGCGCPPLGNFHPSTRSANSASANVVAVLPDGFHGTTTSGQPLPLIERWRSGGACDCGGWDEGCMLSVLTDAAEENDAIQANQAKDGSQRFELLAQGGSREDRHAFSMTSFKEGLYTVEFRSSIALLQAFAMCIVMLHGRYPDRLQVGSQAAQEHDLLAGHEVKAMVASQGRAPTSYVPPRPPLFPVGRA

SEQ ID NO: 265088 - protein, 165 aa, Zea mays
  Clone ID: MRT4577_173367C.1.pep
GGVGFCSRFAHRGGAGGSCSWSCWSPVSVLRGGGSALFSPESRSLSVSTRCRRPGPGPHGIGVFLGGVVSRARTRQSHTGFFFSVRFGPGVSLCVCVCVSFVPPFVAPSDCCLDVSGPACFFPPPHECSSGVDPPRPGVRARNTPNQNEKKKMCKEKEKIKINMS

SEQ ID NO: 265089 - protein, 234 aa, Zea mays
  Clone ID: MRT4577_173368C.1.pep
MRPQILPLLLAGTSAVLAQNASSSPGYTGYPDPIASTVSSNTSLSFGNHYAVLNLDLINGLVAPLASTPAGSSFISSTTTWINAVHAQNPPPLSIFTRIYFSNARKPEVKPGSGFAGVSAALGTANETAAQIYPAFGVDEAAGDVVLQKTRYYAGTGNALEEILRAQSIDTVILSGVRTSGVILSTTYRLFDLDYKVYVISNNTIETPPDTPGINAAILEGVIPKLPAQVINGE

SEQ ID NO: 265090 - protein, 74 aa, Zea mays
  Clone ID: MRT4577_173369C.1.pep
LSSQQQRSECRCPSLSLHSVRIALQELNSIKCHVTAIAILPHNLCDSHRAELIIQSSACKTCVPVSESSYVRCI

SEQ ID NO: 265091 - protein, 84 aa, Zea mays
  Clone ID: MRT4577_173370C.1.pep
QLCSHQLSSPKAPSLQAPPLLPQLLLWLVSKALIVPPFSCPRQQVLKNKRTPPPPGGVLVVDKKKKRLLAGARTLRVRVLPASA

SEQ ID NO: 265092 - protein, 80 aa, Zea mays
  Clone ID: MRT4577_173371C.1.pep
YKAGMAKGLGIGCTYGIACMSWALVFWYAGVFIRNGQSDGGKAFTAIFSAIVGGMSLGQAFSNLGAFSKGKIAGYKLLEV

SEQ ID NO: 265093 - protein, 72 aa, Zea mays
  Clone ID: MRT4577_173372C.1.pep
MKPTQVASPEAVRSQFMFRIVTPLSPAQVELAPGVGFRQLTIRTVRHHAFIHTCQGIRSSSTIPSSCCVSAF

SEQ ID NO: 265094 - protein, 65 aa, Zea mays
  Clone ID: MRT4577_173373C.1.pep
TRGPLPPQMARPRKCAIPWALELKKKYDWGLPRPHKKSSFLRRKKVLFTTSFYKFFVVIKKGVLL

SEQ ID NO: 265095 - protein, 38 aa, Zea mays
  Clone ID: MRT4577_173374C.1.pep
SLLRLRYDIQHRSYFIDSVVLHCFNRWCQSKNMTLDRQ

SEQ ID NO: 265096 - protein, 204 aa, Zea mays
  unsure (1)..(204): unsure at all Xaa locations
  Clone ID: MRT4577_173375C.1.pep
MYAAPTAATTMPPAVTHDDLSLRKAQERRATRSSGQVAVSLVALSVLCGLVAFILCLAAEGSRSEVSHYLMSVGGSKDQLDVCVYNSSGRLALAYAVGAFILLAVAMFAEHAYMLVAVAAPESASAGMAVAQDHPRVASTAAALTWQTGCLFFLTWICFGLAEVMLMIGIAVESGHMSDWRKPRPVCHRVRPGXFAAAGILGLI

SEQ ID NO: 265097 - protein, 118 aa, Zea mays
  unsure (1)..(118): unsure at all Xaa locations
  Clone ID: MRT4577_173376C.1.pep
MRSPISPASSVCGVSSLLLTSPPAMGKIKIGXNGLGRIVRLVARVALQSEDVELVAVNDPFMTTGGMTYMFKDDTVHGQWKHSDMTLKDCKTLVFGEKPVXVFAIRNPGEIRGCEACG

SEQ ID NO: 265098 - protein, 77 aa, Zea mays
  Clone ID: MRT4577_173377C.1.pep
FRCVREMPLIATNSVDFSLYAPNQVQLQFCKLPSGLITTSTLSLFYLHFIDSYVQQFISSIHFNTYIFLCKIIYRHC

SEQ ID NO: 265099 - protein, 60 aa, Zea mays
  Clone ID: MRT4577_173378C.1.pep
QAFFFFFFFFSFFFFFFFFFFFFFFFLIHENQNFIMAMPILLVIPNMIMGGGLRGFSIYK

SEQ ID NO: 265100 - protein, 61 aa, Zea mays
  Clone ID: MRT4577_173379C.1.pep
SSRVRPRVRGNLAMIFNFKGGIDFANRTLHILYSEHRGDYFPRGPCHDAQDGDQSKPDLHL

SEQ ID NO: 265101 - protein, 78 aa, Zea mays
  Clone ID: MRT4577_17337C.1.pep
MAGAISRKQGGSLRKCAGEGVSGAYSRWISDRRLGLDPAGGRAGARRRERLTGGAGRTARARATGKRDRADSAGARAS

SEQ ID NO: 265102 - protein, 107 aa, Zea mays
  Clone ID: MRT4577_173380C.1.pep
GLGTSRPAGSQRVRSSAVVLDNYATAPDDLVPFHRRCGSGGPSVPPRDASRQGKTMMAPLYSYASPGHGYYPGPYQGPTVKASPAYPPSATSEEAVHPEKVDAPSDL

SEQ ID NO: 265103 - protein, 198 aa, Zea mays
  Clone ID: MRT4577_173381C.1.pep
PCNLLVFGLGAETPLWRALNHGGRTVFLDENQYYVSHLEGRHPGLEAYDVAYTTTVREFPDLLDSARAARGAECRPVQNLLFSDCRLAINDLPNQLYDVSWDVILVDGPRGYTASSPGRMSAIFTAGVLARTRAGEGVKTDVLVHDYEREVERACSREFLCEENRVVETSTRSLAHFVVRGGSSARRDAFCSGTAAAH

SEQ ID NO: 265104 - protein, 109 aa, Zea mays
  unsure (1)..(109): unsure at all Xaa locations
  Clone ID: MRT4577_173382C.1.pep
VFGYHLWKPLPDGGECTFNXLGGWSPQFFIFLFSFSRVFRTVSSRHSCFSHSIKLFKIKTRGGGDFFPPTFSLFPFSFLHPLFPFFPPFSFLLFFSPLFFPFPFSLFSP

SEQ ID NO: 265105 - protein, 253 aa, Zea mays
  unsure (1)..(253): unsure at all Xaa locations
  Clone ID: MRT4577_173383C.1.pep
LFSKKPFPVFRELAGFXQEDVLIEEPKAGXILKPAHTIIRDECTKSFLVLIRGTHSMKDTLTAATGAVVPFHLSLLDEGDVSKLVLGYAHCGMVAAARWIARGVTPCLREAVRQCPEYQIKIVGHSLGGGTAALLTYILREHKEFSSTTCVAFAPASCMTWELAESGKHFVTTVVNGADLVPTVSTASIDDLRSEVVMKQAQNVAQAVARSRSAFSSWSCMGARRRGGSVVTACSKDDMRVETHVTSTVESKS

SEQ ID NO: 265106 - protein, 59 aa, Zea mays
  Clone ID: MRT4577_173384C.1.pep
SKNSAREEIAGSSSSSSAGGVSRSSVTGSGFSVSDLAPPRKALFTYPIGAGEMLEDGSE

SEQ ID NO: 265107 - protein, 537 aa, Zea mays
  unsure (1)..(537): unsure at all Xaa locations
  Clone ID: MRT4577_173385C.1.pep
ASVYAXSDCXIELXKXPQIMXXLIVLRRLIDLCFLFSKKPFPVFRELAGFSQEDVLIEEPKXGILKPAHTIIRDECTKSFLVLIRGTHSMKDTLTAATGAVVPFHLSLLDEGDVSKLVLGYAHCGMVAAARWIARGVTPCLREAVRQCPEYQIKIVGHSLGGGTAALLTYILREHKEFYSTTCVAFAPASCMTWELAESGKHFVTTVVNGADLVPTVSTASIDDLRSEVTASSWLNDLRDQIQQTRFLNVVYRSATALGTRLQSFSGARERVAGAGAFLRPVSNKTQVVMKQAQNVAQAVARSRSAFSSWSCMGARRRGVGVVTACSKDDMRVETHVTSTVESKSVLVEHCGAKTIEELQYTAASVSVHDAAEEEEALLSEHETSRENAEEETTEGELWYEFEKDLDRQAEMEARTREEEAAAAKEIMEEESAVLKGVDDRQSFTPDSLERQQFYPPGRIMHMVAMPPTDADPDDPVAADECCVGIYETPRDLYSKIRLSNTMINDHYMPMYKKMMETLIEKFARDEDCYCTGSTAE

SEQ ID NO: 265108 - protein, 95 aa, Zea mays
  Clone ID: MRT4577_173386C.1.pep
MHAEEREESKDKRRDSAPYGEYGSWYKACKVDSPTVNTTLRTSGALYRRQGKLEAAHTLEDCASRSRKQGLDPASQTKVVTLLKDGSGGRRDRRG

SEQ ID NO: 265109 - protein, 63 aa, Zea mays
  Clone ID: MRT4577_173387C.1.pep
FSELAAESPSSFLTQQQWLPFCKQFAANPATFFQLQQCFLFVNLSLTNPAVSAQHHIFGGALF

SEQ ID NO: 265110 - protein, 94 aa, Zea mays
  unsure (1)..(94): unsure at all Xaa locations
  Clone ID: MRT4577_173388C.1.pep
MNPQPKRPRGAQPRVTANTXNIXNTKTGYGRVIPERYPQYVYANRPFLSGPIMAAQXPPPPPPQTYTFNPAPAHGNFYANCYQYQAPPPPPYFH

SEQ ID NO: 265111 - protein, 96 aa, Zea mays
  Clone ID: MRT4577_173389C.1.pep
IQSSYTASLTSILTVQQLDTSIRGLNDLKNSDYPIGFQVGSFVEEYMIKELNISQSRLKALGSPEEYAENLKLGPKKGGVMAIVDERPMLSGFVTY

SEQ ID NO: 265112 - protein, 59 aa, Zea mays
  Clone ID: MRT4577_17338C.1.pep
HKCLTIDLDTTLYYLIVLGRSYTTLTYKRSYQSRNYFNLRAQKILNIFKITYIILKHEC

SEQ ID NO: 265113 - protein, 98 aa, Zea mays
  unsure (1)..(98): unsure at all Xaa locations
  Clone ID: MRT4577_173390C.1.pep
SLVLKVDAMLQELEKEIDDVDAQIGNRWQLLDKDHDGKVTPEEVAAATAYLKDTIGKEGVQELISNLSKDTEGKXILVEDIVKLASQIENNEEEEEAR

SEQ ID NO: 265114 - protein, 131 aa, Zea mays
  Clone ID: MRT4577_173391C.1.pep
ILFLAAPPPVFFFSSWARVQKNNGGGPRPPLLFKRMRIRRCGPSGASFFFVPSWGALFCPRRLWSNIWSCSPRSFSPPPLWLSRGQPQHHSCGFLNTPRGREASNNPLFFSRAPPFVGVFLTTGAASPSPL

SEQ ID NO: 265115 - protein, 134 aa, Zea mays
  Clone ID: MRT4577_173392C.1.pep
TIGVARCTTFKQSLYNQSGNNHPDETLERSYYYGLRSICPPTGGDNNISPLDLASPARFDNTYFKLLLWGKGLLTSDEVLLTGNVGKTGALVKAYAEDERLFFQQFAKSMVNMGNIQPLTGFNGEIRKSCHVIN

SEQ ID NO: 265116 - protein, 202 aa, Zea mays
  unsure (1)..(202): unsure at all Xaa locations
  Clone ID: MRT4577_173393C.1.pep
NNTSVETSSSSTKNEIDDKESSSTKNSGNVRSTKQKEIDYVYRSIEKKVKVFGRDKVHEXYKVLHNGPATDAPSSDSSKPYSVIGIYGITGSGKTTLAQYVCEYEKGEXFNPIMFIHVGTTFSAGEIFCDMLYHRTQQRAADANGPKSLKTELKDLTLQQTPKYTATLVDCPNSKYTAYKQGCICLLLTHTYRQLRPVLCQV

SEQ ID NO: 265117 - protein, 87 aa, Zea mays
  Clone ID: MRT4577_173394C.1.pep
QGCNCQQILEVQALTVCQENDTYTCSIAALLFQYYLTAAIKYFGKIHLHCHVGLFNMHVLFSQTKTTLPAMMVVVGPTCMPESPLVR

SEQ ID NO: 265118 - protein, 33 aa, Zea mays
  Clone ID: MRT4577_173395C.1.pep
TERTMAAPAYFLERVESGYPSASNEGPVSLRGR

SEQ ID NO: 265119 - protein, 683 aa, Zea mays
  unsure (1)..(683): unsure at all Xaa locations
  Clone ID: MRT4577_173396C.1.pep
EIYVWVGRVTQMEDRKSATKAVDEFLINQKRPKTTRVTQVIQGYESHAFKSKFESWPVGNAAGNPGTEEGRGKVAALLKQQRVDPKGAAKSTTPVNEEVPPLLDGGGKLEVWCVDGNTKTALPKEDIGKFYSGDCYIILYTHHSGDKKEEYYLSYWIGKDSLVDDQVSASQIINTMWNSLKGRPVLGRIYQGKEPPQFVALFQPMVILKGGIGSGYKKLIEEKGAMGETYTTEGIALIRVSETSIYNNKTLQVDAVATSLSSTESFVLQSGNAMFTWFGNSSTYEQQQWAAKVAEFLKPGVAVKHCKEGTESSAFWFALGGKQSYTNKNTPQDIITREPHLYAFSFKNGRLEVTEIFNFSQDDLLTEDMMVLDTHGEVFIWIGQYVESKEKQKAFDIGQKYVEHANSIEDLSPHVPLYKVMEGNEPCFFKTYFSWDNTKSLVHGNSFQKKLSLLFGLRSEGAPRSSGNGGPTQRASALAALSSAFNPSSQQRLSNERPKSTGDGPTQRASALAALSNAFNPSLKPKTSPPSRSGXLVLTAEQSGSSEFLRSKASNTAYKTDVDRIVITPAGPSGPSSPQSEAGESNVFHQEKDAAADGAPPDTDGAVAEAGEEETTENVGEATFSYDRLISKSTDPVRGIDYKRREAYLSDSEFQTVFGMTKDAFYRQPNWKQELQKRKADLF

SEQ ID NO: 265120 - protein, 177 aa, Zea mays
  Clone ID: MRT4577_173397C.1.pep
RAWSLQILFDDLSPYAPLYKVMEGNEPCFFKTYFSWDNTKSLVHGNSFQKKLSLLFGLRSEGASRSSGNGGPTQRASALAALSSAFNPSSQQRLSNERPKSTGDGPTQRASALAALSNAFNSSLKPKTPPPSRSGQGSQRAAAVAALSSVLTAEQSGSSENLRAKASSTGDKTGILI

SEQ ID NO: 265121 - protein, 152 aa, Zea mays
  Clone ID: MRT4577_173398C.1.pep
MAGALDEAKIIDYFRNKSVLITGATGFLGKIMVEKILRVQPDVKRIYLPVRAADAAAARRRVETEVVGKELFGVLRERHGAGFDAFVADKVVGLAGDVMREGFGVDAATLRDLRLADELNVIVNGAATTNFYERYDVALDVNAVAVKNLGQI

SEQ ID NO: 265122 - protein, 155 aa, Zea mays
  unsure (1)..(155): unsure at all Xaa locations
  Clone ID: MRT4577_173399C.1.pep
IRHEAYRYAPSRQQQQQQQHDDKPSAEYALLVPSYMANTESSRAKARSQSAPRQRXQCRRPPPRRPXQPSGRRRASLEAXRRRRRPRAXAPRYGPARVQRCPSQASAPAACPWGARLDRWSASVHDSECGSTSTVMTAATTTYCWSLATDTAGMA

SEQ ID NO: 265123 - protein, 78 aa, Zea mays
  Clone ID: MRT4577_17339C.1.pep
WCVLSRGGPGFFLFIILHAMRSPGIPAGCKPVSSAVHAAQCFVASRRFVVSVCQICVQLVFRVVLVQAGCCPSVKPSY

SEQ ID NO: 265124 - protein, 135 aa, Zea mays
  unsure (1)..(135): unsure at all Xaa locations
  Clone ID: MRT4577_1733C.1.pep
CSRGRKGGEGGVSHSRLADIHKHCGRGNAVRIKCLGVPTLDMDTISFHXSDKTGGNXVSRRINIIVPSPSRNKDPNKRAGRPLALREPRATMYXPKVGQNITEXTEFXETGAWRHTVLRDPPLTKVTRNXVYANV

SEQ ID NO: 265125 - protein, 145 aa, Zea mays
  Clone ID: MRT4577_173400C.1.pep
VKATTTLLAYFSLQSLIPSINADVDRPVITPAGPSGPSSPQSEAGESNVFRQEKDAAVDGAPSDTDGAVAETREEETTENVGEATFSYDRLISKSTDPVRGIDYKRREAYLSDSEFQSVFGMTKDAFYRQPNWKQELQKRKADLF

SEQ ID NO: 265126 - protein, 195 aa, Zea mays
  unsure (1)..(195): unsure at all Xaa locations
  Clone ID: MRT4577_173401C.1.pep
MAGALDEAKIIDYFRNKSVLITGATGFLGKSKSMHPCRRRLIGVASCAHXSSACAVMVEKILRVQPDVKRIYLPVRAADAAAARRRVETEVVGKELFGVLRERHGAGFDAFVADKVXVGLAGDVMREGFGVDAATLRDLRLADELNVIVNGAATTNFYERYDVALDXXNVAGVKHMCDFARKCPXLEALMHVSTT

SEQ ID NO: 265127 - protein, 62 aa, Zea mays
  Clone ID: MRT4577_173402C.1.pep
PPVITPLKFVPSLKTLGPFGAWGGGSYPPFGFPVQKGGALVGFFAQVGVSLNPLGVLVGSLF

SEQ ID NO: 265128 - protein, 761 aa, Zea mays
  Clone ID: MRT4577_173403C.1.pep
MKCTLYHPVVDFSIKTPPTVSDDDVVLETTAPRLYSINDGQLKLEETALTKAVLENTKCFLLDSRAEIYVWVGRVTQMEDRKSATKAVEEFLINQKRPKTTRVTQVIQGYESHAFKSKFESWPVGNATGSPGAEEGRGKVAALLKQQGVDLKGAAKSTTPVNEEVPPLLEGGGKLEVWCVDGNAKTALPKEDIGKFYSGDCYIILYTYHSGDKKEEYYLSYWIGKDSLVDDQVSASQIINTMWNSLKGRPVLGRIYQGKEPPQFVALFQPMVILKGGIGSGYKKLIEEKGAMGETYTTEGIALIRVSETSIYNNKTLQVDAVATSLSSTESFVLQSGNAMFTWFGNSSTYEQQQWAAKVAEFLKPGVAVKHCKEGTESSAFWFALGGKQSYTNKNTPQDIITREPHLYAFSFKNGRLEVTEIFNFSQDDLLTEDMMVLDTHGEVFIWIGQYVESKEKQKAFDIGQKYVEHANSIEDLSPHAPLYKVMEGNEPCFFKTYFSWDNTKSLVHGNSFQKKLSLLFGLRSEGASRSSGNGGPTQRASALAALSSAFNPSSQQRLSNERPKSTGDGPTQRASALAALSNAFNPSLKPKTPPPSRSGQGSQRAAAVAALSSVLTAEQSGSSENLRAKASSTAYKTDVDRPVITPAGPSGPSSPQSEAGESNVFRQEKDAAADGAPSDTDGAVAEAGEEETTENVGEATFSYDRLISKSTDPVRGIDYKRREAYLSDSEFQTVFGMTKDAFYRQPNWKQELQKRKADLF

SEQ ID NO: 265129 - protein, 113 aa, Zea mays
  Clone ID: MRT4577_173404C.1.pep
SSTITDRESPHVAHTGAKPARFAMGTFDPEQEDTVHVQRTYSTGRSKEYREALTDRLHRPPSIRYPWTMEAWSYLPAHSLHKAEEEQSQRSRSITAGGREPLDDDENRSSSNP

SEQ ID NO: 265130 - protein, 96 aa, Zea mays
  Clone ID: MRT4577_173405C.1.pep
PQCHIRQKLLSYAETAKTLIFCSNHQLIIKQQNGFLGAMDQARHISSRSQASPMKEAFVLLHTFSDSENHRVIPVFQKCPAIVENMTALPAARAPN

SEQ ID NO: 265131 - protein, 76 aa, Zea mays
  unsure (1)..(76): unsure at all Xaa locations
  Clone ID: MRT4577_173406C.1.pep
SSKXMXVTXSGNFATTGTHCPAEHYTEEFLGQLIIPVPHTILVVLAVLLCLISCNLMELEITNLLVTTEKKXGGAA

SEQ ID NO: 265132 - protein, 141 aa, Zea mays
  unsure (1)..(141): unsure at all Xaa locations
  Clone ID: MRT4577_173407C.1.pep
LQPEELKFVHDALKLAYEADSGQKRRSGEPFIIHPVEVARILGEHELDWESIAAGLLHDTVEDTNVVTFERIENELGPTVRRIVEGETKVSKLGKLQCKSEGSXKQDIKADDLRQMFLAMTEEVRVIIVKLAYRLDNMRTL

SEQ ID NO: 265133 - protein, 74 aa, Zea mays
  Clone ID: MRT4577_173408C.1.pep
AGAARRTTTTTCCCGRRWCARRGARDVDCSHDYGACSACNRVMVSFKCSAAEPLPCPMVYRCMCRGKCYPVPSS

SEQ ID NO: 265134 - protein, 79 aa, Zea mays
  Clone ID: MRT4577_173409C.1.pep
WWPFVFFFLTPWVPKGPSCPAGVLSGLILTPVPPCARRLGFFPRALFLPDWSTFALCLLISVLSTAHFHVDLPHTPSFP

SEQ ID NO: 265135 - protein, 116 aa, Zea mays
  Clone ID: MRT4577_17340C.1.pep
VEKATRRENQPPPRRTAKKEKRGPTPAKRGREQKEAEQKAKDTKRRGGTTTQSRQKKKGDQEKSPPPPPKKKKKKKKKKKKKKKKKKKKKKKKKKKKKKKKKQKKQKKKKKKKLVP

SEQ ID NO: 265136 - protein, 73 aa, Zea mays
  Clone ID: MRT4577_173410C.1.pep
VRVGAPPKSKVLADHAWAPLEDQCSLLEKEAVNVSLENLKSYPFVKKGLEKGTPKLGGGHYDFVNGKFKPWDP

SEQ ID NO: 265137 - protein, 115 aa, Zea mays
  Clone ID: MRT4577_173411C.1.pep
DFPSPRHPLAGINMKTLVHTYSQPRLSNSTAAGSEDREGERRIVAVEPMLAAVVRKPLWVIFKARRSHTLPRPACWGLRRLSSIYWARTSLQTMRWWLHLVLFMAAARPSLLCLL

SEQ ID NO: 265138 - protein, 91 aa, Zea mays
  Clone ID: MRT4577_173412C.1.pep
RTRGRTRGLTRGRTRGRTRGRGLTVTLHRPSASARLIGDDDEDQALCSICITALVASEKVKVLPPCVYSWLRSYPSWPLCRRLLVLGDANV

SEQ ID NO: 265139 - protein, 81 aa, Zea mays
  unsure (1)..(81): unsure at all Xaa locations
  Clone ID: MRT4577_173413C.1.pep
CFCXLFFPVSAWSXGALLGSAAFLFLRSCFXPFLGVPRFCLSXFFLGXSLXRGGLLRVLSSPLLVRCRLDQLVMEWICSLV

SEQ ID NO: 265140 - protein, 172 aa, Zea mays
  Clone ID: MRT4577_173414C.1.pep
MGRRTCGTAFILLYVLSTSTLPASSSNTGDGLIRIPLKKRSIMDTIYGDLLPKPSAPEEKEKQAVDDPVRDAIARARERQHEMLVQAAATERRRRYYWSYSGAGGKGNGSRLHDGGQGEGSSIAIVALKNFLNAQYFGQIGVGCPPQNFTVVFDTGSANLWVPSAKCFFLAR

SEQ ID NO: 265141 - protein, 38 aa, Zea mays
  Clone ID: MRT4577_173415C.1.pep
IPFLPTRAIIYINIIFLSNIIQSYLRFHATGYLYYRVT

SEQ ID NO: 265142 - protein, 185 aa, Zea mays
  Clone ID: MRT4577_173416C.1.pep
PPLFFFFFCGKTAYVSQNAWIQTGTVQDNILFGSSMDRQRYQETLERCSLVKDLEMLPYGDRTQIGERGINLSGGQKQRVQLARALYQNADIYLLDDPFSAVDAHTATSLAAAASSRRGGSPVGGHGPLHEEPDPPAGGTYSESTASTAEMLWVLPSAVHGRVRKGGGEDDVHEAPQRQQRRQLH

SEQ ID NO: 265143 - protein, 250 aa, Zea mays
  Clone ID: MRT4577_173417C.1.pep
IGYLEAGRDGVPALGLRQQVLTLAPVVATARLYDYGPAVHRSAVHRSTALRDGSIARLLQAPAPSRLQQIPEAPTTVHGESASRQHRRTTVTASRQHRRTASAHPRSASGRAAAQYTGFLKDQCRLSLIRRNAPWKPFSNSILLQKLRNCKMNRLRVRRRAILIPLSLNVMHQGEAKVQKSLLDEHMPNLLIKRGHFLVLIVNKSLPRPQVKKSILCMLNYLVAFMTLCPKAVSRIWMAQRGVHNVVFDI

SEQ ID NO: 265144 - protein, 43 aa, Zea mays
  Clone ID: MRT4577_173418C.1.pep
SPNTRCHETKEGCLHQSNIRLKRTKKTGHDRLVTGDMCILLLP

SEQ ID NO: 265145 - protein, 101 aa, Zea mays
  Clone ID: MRT4577_173419C.1.pep
CTRRKLGIRLGAVLAPNKFPNAGGTTGGSFGDQPAALLGQVCQKAEGTCTYTAGAWILVNTGEEPTQYCHGLFSTIAYKIGPDAPTYYALECAMAIADSST

SEQ ID NO: 265146 - protein, 115 aa, Zea mays
  unsure (1)..(115): unsure at all Xaa locations
  Clone ID: MRT4577_17341C.1.pep
MARTEAGMKASTTRASSRARKADPNQQTLRPNRLEQKEATRPGQTTPGKTPANGPASREKRPNDKEAKRDNNREPKTTQKTEWNPQAIGRNLTHLEQKIKQXKDIEQNMRNPREP

SEQ ID NO: 265147 - protein, 269 aa, Zea mays
  Clone ID: MRT4577_173420C.1.pep
MVAATALSFSFLSLATTLFLLLLRSLINNKKRHCRFPPSPPSSLPVIGHLHLLKKPLHRTLSALAAQHGPVLLFRFGSRRVVHVADPAVAAECLSTHDVTFANRPRLPSGRYLSNDYTTLGSSSYGPNWRNLRRIGTVDVFSSHRVLCSADVRASEVRNMARQLFKAAAGADASRPARCDVKARAFEIALNTVARVIAGKRYYGDGSVASEEAERFRAMVREYLAMHGASNLQDFVPVLALVDIGGVNKRAIRLSKARNEWAQRLIDEH

SEQ ID NO: 265148 - protein, 79 aa, Zea mays
  unsure (1)..(79): unsure at all Xaa locations
  Clone ID: MRT4577_173421C.1.pep
LLIPFXMGRRKCPGETMALQTMGLALGTMIQCFEWGPVEGAGAPKVDMTQGGGLTLPRAVPLEAMCKPRQVMLDVLQKL

SEQ ID NO: 265149 - protein, 188 aa, Zea mays
  unsure (1)..(188): unsure at all Xaa locations
  Clone ID: MRT4577_173422C.1.pep
ASAEQDKEGESLPHSPCRLDLSAPGGNTLQVSSMGQDAGFKREDHSGLGSGPQTLKVSCCTSEENESRNRRYHQLKCSESNSGQLHLDYVPNFHCRSLPTRSRKTNAEQSTVGKRGSMYQSSSEISRIRKIQEGRRKIDSAFDGDAFLSFDIVDASSRPSXSGAYLHSIRIGGSALALCGPAKRASKT

SEQ ID NO: 265150 - protein, 62 aa, Zea mays
  Clone ID: MRT4577_173423C.1.pep
SLKSRGVQFPGRSDCIYVLQLHFWNIPFTYYICIFRIVYKILLQICPPWKRLMIRFSELRML

SEQ ID NO: 265151 - protein, 116 aa, Zea mays
  unsure (1)..(116): unsure at all Xaa locations
  Clone ID: MRT4577_173424C.1.pep
MAAARRIDLADRWRRMQEDEDADDGGEWSAAKHRRLIRAKEEWFSHCYTFLINLPKEDHIWCGYADIMSPFMETFHGFFDDEDENSSLXIMRTRVFREMGIWTQCVCEHYQAQRFF

SEQ ID NO: 265152 - protein, 95 aa, Zea mays
  Clone ID: MRT4577_173425C.1.pep
KDSSGQHVDVSPSSQRLQLLEPFDKWDGNDLEDLQILIKVKGKCTTDHISAAGPWLKFRGHLDNISNKLLIGAINIDNGKGNSVRNAVTQEFGPV

SEQ ID NO: 265153 - protein, 63 aa, Zea mays
  Clone ID: MRT4577_173426C.1.pep
FGSSANIVYFLHGKTAYRGGFLEICIETHPEPGTSLLTTRTGLGYTSPYPHCEWACPKAVQTT

SEQ ID NO: 265154 - protein, 77 aa, Zea mays
  Clone ID: MRT4577_173427C.1.pep
TPPFGVFMAKGRAPAPIGAGARFAIPPGFFPTPGFQNLALLFPSPWPKVIFQNRPAPPLSWVFAGACWPLHFPFSPG

SEQ ID NO: 265155 - protein, 47 aa, Zea mays
  Clone ID: MRT4577_173428C.1.pep
NFTQLGYFKVLGKGFLPPKPIVAKAKLISKFAYNKTKAAGGALEPTA

SEQ ID NO: 265156 - protein, 215 aa, Zea mays
  Clone ID: MRT4577_173429C.1.pep
RPVDDDAVDGGQRAAPADEEGAPAEPAGHVHAHTHAHGGHGHAGASPQDASAVAVSIRHRVISQVLELGILVHSVIIGVSLGASLRPSTIRPLVGALSFHQFFEGIGLGGCIVQAEFKARAAVVMAAFFSLTAPAGIALGIAIASGYSRHGATALVVEGVFNAAAAGILVYMSLVDLLAADFSNPRLQTNAKLQLAAYVALFLGAGLMSLLAKWA

SEQ ID NO: 265157 - protein, 44 aa, Zea mays
  unsure (1)..(44): unsure at all Xaa locations
  Clone ID: MRT4577_17342C.1.pep
QWVHHYTRASVCCWRVXDVGRRVXRMKQGTSAITPPLLVPRRIS

SEQ ID NO: 265158 - protein, 67 aa, Zea mays
  Clone ID: MRT4577_173430C.1.pep
WDHPLLKGGDLVGYYWIGYFLPRQKRSGVPQTKSKPPCLSPPRAKTPYLINSLRSALEKKEIAFFLE

SEQ ID NO: 265159 - protein, 90 aa, Zea mays
  unsure (1)..(90): unsure at all Xaa locations
  Clone ID: MRT4577_173431C.1.pep
LVAIAVGFSRTIYSXIPQWSKLLGGVFFSFWVLAHLYPFAKGLMGRRGRTPTIVYVWSGLVSITISLLWIAIKPPSQAANSQFGGSFSFP

SEQ ID NO: 265160 - protein, 236 aa, Zea mays
  unsure (1)..(236): unsure at all Xaa locations
  Clone ID: MRT4577_173432C.1.pep
MDTDLYDEFGNYIGPELDSDEDDDELGRETKDLDEDEDEDEDDVGEHEDDHPGMEVVLHEDKKYYPTAEEVYGPEVETIVQEEDTQPLTEPIIKPVKTKKFTLMEQTLPVTVYEMDFLADLMDNSELIRNVTLCGHLHHGKTCFVDCLIEQTHPEIRKRYDQDLCYTDILFTEQERGVGIKSTPVTVVLPDTKGXSYLFNIMDTPGHVNFSDEVTAGLRISDGVGLFIDAAEGVML

SEQ ID NO: 265161 - protein, 70 aa, Zea mays
  Clone ID: MRT4577_173433C.1.pep
LASSSPRRRMTRWRWRRSATRWDCPSTAADVEPHTWPPAQADLTVLYLPEHLHRAQTGRSTPDLQATTSQ

SEQ ID NO: 265162 - protein, 106 aa, Zea mays
  Clone ID: MRT4577_173434C.1.pep
FIFFFFFLLLIVYFFFFEMTLLEFFILISRKENTPWGGKEIMGALKENQRRDLVVSSEEAEKAPKGKRSLHKGVKKKIFFKKISARTRTIFLKKKKFSPLVGGGFL

SEQ ID NO: 265163 - protein, 200 aa, Zea mays
  Clone ID: MRT4577_173435C.1.pep
RPGPLHKTSVVMLTEWLVRALFANLAVASKIKPAPANARFTTLVTFGDSYTDENRLGYFINNNGSAPPVGWQQPVGLKTASGGRSWARLASDYSGAKLYNYAVSGAVCSNKVSPRPLAAINGPFPDIDGYEVPAFIADSKYVNPNGTKFFTGKASDTAYAIWIGTNDLGNGAFLTDKQIPRKTVIDYVDCIYDQITRLYN

SEQ ID NO: 265164 - protein, 72 aa, Zea mays
  Clone ID: MRT4577_173436C.1.pep
LSSWEPLAWALGFYPIVPNFRVHVVSLAYVSTNFLSTCLVMGCLVLRMAMFPFGHRASCIVFGLKKRRKTKM

SEQ ID NO: 265165 - protein, 80 aa, Zea mays
  Clone ID: MRT4577_173438C.1.pep
HSALEGQLHNVGRIRLVVPVHADAERRGGTHSGHAPAAKHAHPRRHCAGDMVAHSALIQRALIRALQTCIVCALQLNKVS

SEQ ID NO: 265166 - protein, 137 aa, Zea mays
  Clone ID: MRT4577_173439C.1.pep
RLDEAEQLALKGGKKQIQKLEARVRELEGEAETGHLRNAEAVKGLRKHHRRVKELTYQTEEDRKNVLRLQDLVDKLQAKGKAYKRQAEEAEEQSNVNLAKFRKIQHELEEAEERADIAESQVNKLRVKSREVHTKVI

SEQ ID NO: 265167 - protein, 40 aa, Zea mays
  Clone ID: MRT4577_17343C.1.pep
QKLLSIKTKWIVQFRLKSHVSHHVLNQFMKAAPTNTNLMV

SEQ ID NO: 265168 - protein, 100 aa, Zea mays
  unsure (1)..(100): unsure at all Xaa locations
  Clone ID: MRT4577_173440C.1.pep
KSPIPPXPPTTAPRPPLPDLPGXPSPAALGPRCLGRRRGPRPCSATTPAPSSPPPSAAPTASSPGLGTPISTPPSAPQTCLPSPSSPLPSLPLPPSSSPN

SEQ ID NO: 265169 - protein, 108 aa, Zea mays
  Clone ID: MRT4577_173441C.1.pep
QTYSAKAKNNNDFRVHCISIILRHLNTIFSKGRATRLITTESNPSPYLPWIKLKHCILAVFEVIINMKYITMVLQHVKAKGGGSALRPLAVLESSKKRKKENNSDYNK

SEQ ID NO: 265170 - protein, 99 aa, Zea mays
  Clone ID: MRT4577_173442C.1.pep
GEKKKFWGLNRARFKNLPKLGGGGWPTPPWGFETYRYRHHLGVFLLHGAPKTKKFLAVKFKSPLRPWALYCLGGNHFNRFPWGPCSVSLELVGPGQSPF

SEQ ID NO: 265171 - protein, 47 aa, Zea mays
  Clone ID: MRT4577_173443C.1.pep
DRMRLAVRLLEKLVHPQHFLRGKKKPTAHFNRSTASLPASSAGQQLL

SEQ ID NO: 265172 - protein, 72 aa, Zea mays
  Clone ID: MRT4577_173444C.1.pep
RYKLCKAKKKKKKKKKKKKKKKKKKKKKKKKKKKKKKKKKKKKKKKKKKKKKKKKKKKKIKKKKKKKKKKSL

SEQ ID NO: 265173 - protein, 56 aa, Zea mays
  Clone ID: MRT4577_173445C.1.pep
MSHESVWNSRPRNYGKGSRSCRVCKHKAGLIRKYDLNLCRQCFREKAKDIGFNKYR

SEQ ID NO: 265174 - protein, 91 aa, Zea mays
  Clone ID: MRT4577_173446C.1.pep
MHAATYSLKFHLYCICFQEYVKGISSTGMQSNCGFEGQVNACWTHKMTTKELDTIRSAGFLVSVIHGRLILLTVDILVHRIVHIRFMWLTL

SEQ ID NO: 265175 - protein, 72 aa, Zea mays
  Clone ID: MRT4577_173447C.1.pep
THGLRCHRFGFKHHSSVLYACFAAIFTDRRAPDLVIPSSQKIHKDLFPLFLKFHVPLVSCAFGLLYLVQLLQ

SEQ ID NO: 265176 - protein, 114 aa, Zea mays
  Clone ID: MRT4577_173448C.1.pep
ALWAAGINQQYIFMSLQSSSTHTSTIDGHRFGAGPCPLRFSSANSYGDIRIPHPQESIVSWSPSHCRDHPLASAGPSSSHSHLPRKSQALGSLTLSQSITPVLGGSGVKKPHSV

SEQ ID NO: 265177 - protein, 56 aa, Zea mays
  Clone ID: MRT4577_173449C.1.pep
SFATRLFNIFVIGNGYIPWISLPRGKGIRLTVAEEGDKRLATKQSSGYIAVSAYLF

SEQ ID NO: 265178 - protein, 107 aa, Zea mays
  unsure (1)..(107): unsure at all Xaa locations
  Clone ID: MRT4577_17344C.1.pep
IPPLGEPGTSFLTADTLITGGGGGGGRKGEGGGAASETGGGGGQGNQQGGTXGGEQRGHNXGTGGQEGGAKRGGPKSQRKGPRKYWGQTRRKRPEIDPPPPTPRGKT

SEQ ID NO: 265179 - protein, 184 aa, Zea mays
  Clone ID: MRT4577_173450C.1.pep
MSSSSSFPNSRFPFAAGAGASGGSGSSVRPWGSSGGTSVSSSGKRIQKELLDLNASDCSAGPKGDNLYHWLSTIIGPQGSPYERGIFFLDIVFPPDYPFKPPMVTFKTRIYHCNIDSTGKVHLDILKDGWSPAFTISKVLLAIKDIINNPDPYTPLVMSISRQYLTDRAKHDETAAEWTMRFAR

SEQ ID NO: 265180 - protein, 65 aa, Zea mays
  Clone ID: MRT4577_173451C.1.pep
FSLYVNKKLYHGFSFGVWTEVFIEVRSKYMRVRTSAGMCERINRVLRNPVPPGMYIPLEEGGRVG

SEQ ID NO: 265181 - protein, 73 aa, Zea mays
  Clone ID: MRT4577_173452C.1.pep
QRMSASGLHHRMGCFTYLAHPDLEQADSAHPICSASPAGYQPSIHALQALLDANLDFHEFHGMRPHYRPAFSR

SEQ ID NO: 265182 - protein, 226 aa, Zea mays
  Clone ID: MRT4577_173453C.1.pep
GYLEAGRELPLEAARTSLTAPLDGVPAVPPPFGGARGAAPPLGGVREQEPQPLPLVFAGAGASGGSGSSVRPWGSSGGTSVSSSGKRIQKELLDLNASDCSAGPKGDNLYHWLSTIIGPQGSPYEGGIFFLDIVFPPDYPFKPPMVTFKTRIYHCNIDSTGKVHLDILKDGWSPAFTISKVLLAIKDIISNPDPYSPLMMSISRQYLTDRAKHDEIAAEWTMRFAR

SEQ ID NO: 265183 - protein, 170 aa, Zea mays
  unsure (1)..(170): unsure at all Xaa locations
  Clone ID: MRT4577_173454C.1.pep
MSSSSSFPNSRFPFAAGAGASGGSGSSVRPWGSSGGTSVSSSGKRIQKELLDLNASDCSAGPKGDNLYHWLSTIIGPQGSPYEGGIFFLDIVFPPDYPFKPPMVTFKTRIYHCNIDSTGKVHLDILKDGWSPAFTISKXSPLMMSISRQYLTDRAKHDEIAAEWTMRFAR

SEQ ID NO: 265184 - protein, 184 aa, Zea mays
  Clone ID: MRT4577_173455C.1.pep
MSSSSSFPNSRFPFAAGAGASGGSGSSVRPWGSSGGTSVSSSGKRIQKELLDLNASDCSAGPKGDNLYHWLSTIIGPQGSPYEGGIFFLDIVFPPDYPFKPPMVTFKTRIYHCNIDSTGKVHLDILKDGWSPAFTISKVLLAIKDIISNPDPYSPLMMSISRQYLTDRAKHDEIAAEWTMRFAR

SEQ ID NO: 265185 - protein, 139 aa, Zea mays
  Clone ID: MRT4577_173456C.1.pep
RPGMDPLSVLRDYAGRSELDKIIFYGDEIHFGCDYTLPASPPPASAPSSQAGPTRSPMPSSSRRPRPKHTTYAGRRLRRSRRIVPTADLLISRLSTILPREPYCVVCQSYEHYLHHYWSSGEELEAVDEVFTIMPVQAH

SEQ ID NO: 265186 - protein, 88 aa, Zea mays
  unsure (1)..(88): unsure at all Xaa locations
  Clone ID: MRT4577_173457C.1.pep
ILESVGAEVNXKKLKFLLPELKAKAIPKVIPPGRERLSSVPPGGGAINMGAPPPVPGGGPPPFXKGKKGKKVLKKGKVLXNMGFSLFD

SEQ ID NO: 265187 - protein, 99 aa, Zea mays
  Clone ID: MRT4577_173458C.1.pep
RLPHDDEKQPSLIKSHARGREHKACQQLHKPPRPMPLPGCQQKQPCRHRHWVQALLHRAWGPRLLTWHLLPYPPQRQPHLGSPHLVARLTTCCSSELDR

SEQ ID NO: 265188 - protein, 71 aa, Zea mays
  Clone ID: MRT4577_173459C.1.pep
HIIFIFFQSSISLISTKKTKFHNYSSFKIPPLNQNYSTHTFNQKSPSSSKNYFKHQTTNPPKNSQMTPLNN

SEQ ID NO: 265189 - protein, 106 aa, Zea mays
  unsure (1)..(106): unsure at all Xaa locations
  Clone ID: MRT4577_17345C.1.pep
MGPTTRAHFVYNRRRRRRRGGRHAVEEASDEEQQQMDSSSSSSDEEGDQEXDAEASGEDVDDEEEEEAVAAEPAPKQPPAAAAAGEKRGRRKGSITISLKKVCKAC

SEQ ID NO: 265190 - protein, 139 aa, Zea mays
  Clone ID: MRT4577_173460C.1.pep
GVWEMVQEFYWGIRFQPSPVGGREEEAEANLPGLFKVSCLRGSRAKRVSILPKDIRFAPRFRGERECSPPPCGGCPPLSPFGRGQNYCRRGRDTSGFPGGGGRKQAMFCWFLCSAPREIDIRAACFVFSAPKMSVCPFF

SEQ ID NO: 265191 - protein, 43 aa, Zea mays
  Clone ID: MRT4577_173461C.1.pep
AIEPSRFFFCHRIGTGTGSSTRLALPLTCLQSWSRSRWSTPSF

SEQ ID NO: 265192 - protein, 360 aa, Zea mays
  Clone ID: MRT4577_173462C.1.pep
MIALSKIALVSAVALLGLGWAYQATRPPPPAILGAPGGPPISSPRIRLKDGRHLAYREEGVRRENARFRIVFIHGFSSTKESGFPVSQELVEQLGIYMLFFDRAGYGDSDANPKRCLKSDATDVEELADALQLGDRFYVVGCSVGGYPAWSCLKYIPNRLAGVALAAPAVNYWWPLPANVSRAAYGRLHARDRRTFWIAHHAPALLHAWLAQKWFRVSPIVRAERDAFTAKDWEILTALWRKQRESGLVDPAKATQQGTYESLCRDATILFGTWEFDPTEIENPFPDGEGGVSIWQGRQDKIVQVEIQRYVAQKLPWVRYHEHPEAGHALPDMDGIGDEIIRELLLGESELHQEPRAQDA

SEQ ID NO: 265193 - protein, 136 aa, Zea mays
  Clone ID: MRT4577_173463C.1.pep
MIGGGASGGAKVGSDVGGSVGGGADVNAGAGAGADAGVYTVAKGNKAGGSDAKADISGGAKAGGDAGADASAGTGAGVGISKSFTIGGGVAGKAGGSGNAEAGVDAGVGGKAGKSGKAYTGADACVSKDAKVGGGP

SEQ ID NO: 265194 - protein, 212 aa, Zea mays
  unsure (1)..(212): unsure at all Xaa locations
  Clone ID: MRT4577_173464C.1.pep
ATDLALATIKDEVNTGTRTAPWAVSEDMVLYNRCLYIPLSSSLLQEIVAAXHEDGHEGVQRTLHRLRHDFHFPNMHRVXVQDFVQACXIICIDISLNFVEALPHVNGKSSILSIVDHFSKYCHFIALGHMYIAESVAQAFFTDIVRLHGMPQSMVSDRDPIFTSTLWCELMRLMALSSPRSGRRRSRWYTVMTHPPSARMSTVGDWVLLCLR

SEQ ID NO: 265195 - protein, 435 aa, Zea mays
  Clone ID: MRT4577_173465C.1.pep
MSQRDGDLTGAHPEEGDRHAVRMDGSDDDELDQPTSKATEHITAMDVRKGKDMQGIPWNVMPTTRDKYRQSRLQGYANFENVPNSGRLSEKECMPAEKGQLYYEFQHSTRSVKPTIRHFQLRNLVWATTRHDVYLMSNFSVLHWSAMTCKKQEVINLLGHVTPCEKHHRNYYEGFYRTPVSTLAVKHNLLVTGGFHGEIICKFLDRQGVSYCCKTTNDDDGITNSLEIFEKPSGSLHFLASNNDCGLRDFDMEKFRICNHFHFAWPVNHTSLSPDGKLAAIVGDSPDGLLIDANSGKTVHKLHGHLDYSFASAWNPDGRTFATGNQDKTCRVWDVRNLSRSVVVLGGNIGAVRSIRYTPDGKFMAMTEPADFIHIFDVESGYSRKQELDFFGEIAGISFSPDTEALFVGVHDRFFSCCLLQFNRRRFYSYLDSTL

SEQ ID NO: 265196 - protein, 63 aa, Zea mays
  Clone ID: MRT4577_173466C.1.pep
RSPQPTTLAGIPPATTLLIVTVAGEAAPTAELILKQGGGRTQETPLFLNNVAQSTFLSKKPGS

SEQ ID NO: 265197 - protein, 57 aa, Zea mays
  Clone ID: MRT4577_173467C.1.pep
HSFKSSRQDYKLGVLKRAPPPPNSNIIEFREAQQSTSNIYTISTTSTDEEIKVHARH

SEQ ID NO: 265198 - protein, 318 aa, Zea mays
  Clone ID: MRT4577_173468C.1.pep
MAAASRGLLARLRVLSLSGGGSPWLRFPPSRLFSAEAFVSHSDDDDAGGEGGGGGRIIEARSGVMGPTSRRTGVIGVKCGMSAMWDKWGAKVPITVLWVDDNVVTQVKTAEKEGFFALQLGAGQKKEKHLTKPEVGHFRAQGVPLKRKLREFPVTEDALLPVGTSITVRHFVPGQFVDVTGITKGKGFAGVMKRYGFSGMPASHGTSLAHRSGGSTGQRDAPGRVFKNRKMPGRMGGVQRTVKNVWVYQIDPARNLLYLKGQVPGPQGSFVFVKDSIYKKPDTALLPFPTYFTREGEPEDLEPLIADLGDVDPFMAAD

SEQ ID NO: 265199 - protein, 137 aa, Zea mays
  Clone ID: MRT4577_173469C.1.pep
SHDQSAIDDSDDVIILQESPNLTTRDEKDKGSCSNTSAQPSTSSRIHIAARDDRTTSDALDSSKWECGACTLLNQPLAPICEVCGTTKPKIAKAKYTTWSCKFCTLENSTKLDKCSACDQWRYSYGPPVATYGPSYD

SEQ ID NO: 265200 - protein, 48 aa, Zea mays
  unsure (1)..(48): unsure at all Xaa locations
  Clone ID: MRT4577_17346C.1.pep
PFHGAIAXGLHVCILVRAATHQSTTPHRTHIKRIRELNDETNTTLDRT

SEQ ID NO: 265201 - protein, 86 aa, Zea mays
  unsure (1)..(86): unsure at all Xaa locations
  Clone ID: MRT4577_173470C.1.pep
ARSSPHSRRAGSSPPAMATLRGGVGCSSPAAPILFCXYLPRPGPSGQPCLSASLRPTSVESQEEPRAPDAVPFCRRGAEKLKTGAA

SEQ ID NO: 265202 - protein, 158 aa, Zea mays
  Clone ID: MRT4577_173471C.1.pep
SVLRQLATAGMAMAGVGLPCTCPLGTVRIIIPLPRTGGTTLPLRTAGTTLLLIGTVGITTKAGVAVATRSLLIVMVGLGRTDRFRCIGCQKQATVKVAAWVSADMTGNVKVFSPSVAVAAMAAYGSGSSGYMVMVLPVPVDVVYCLPRVCGFGYGFCM

SEQ ID NO: 265203 - protein, 62 aa, Zea mays
  Clone ID: MRT4577_173472C.1.pep
NALRSLAEKYLAHVEPQCRAVDNDFDKLSLGWRDGSLWDVINPESSEPQPEDGVSREMLLSI

SEQ ID NO: 265204 - protein, 244 aa, Zea mays
  Clone ID: MRT4577_173473C.1.pep
MYLTNHHGTILTDVSDTFISSLNLPTHVELVTYSCPVYCSFFTRFLQVRPLYVIVYALQTLKSLCCHCLALFHHLICATERRNDRRFARSAPHLQVGESVEEIDRRVPPVVKEAPTLARSAAKEVRQAGLVGTATGLAKSAIARAEPKARELYTRYEPVAERRAAEAWVALNRLPLVPSVTRAVLPTAAQLSARYNSAVRDGAKRGNAVATYLPLVPTERLARVFRYPVADVAAAPEMQPIPSQ

SEQ ID NO: 265205 - protein, 56 aa, Zea mays
  unsure (1)..(56): unsure at all Xaa locations
  Clone ID: MRT4577_173474C.1.pep
VQCDRXSGGGMXEGTRKADGEXGRQDGRNPMRPVGKVVVDRPRHVGMTAVTCGELA

SEQ ID NO: 265206 - protein, 61 aa, Zea mays
  Clone ID: MRT4577_173475C.1.pep
GRQSGYQQDVLRGLVLVNEMVVDAGVSHAVFWNKAAPEFYFEDTTKRSKPVVSSGSKMGNS

SEQ ID NO: 265207 - protein, 57 aa, Zea mays
  Clone ID: MRT4577_173476C.1.pep
VRYVEHRMVTIRRARSAALLAQIGTTSSVSMYINCGSPMSTPLSQIVRSSDLHSTWM

SEQ ID NO: 265208 - protein, 96 aa, Zea mays
  Clone ID: MRT4577_173477C.1.pep
AQRLTPNMQREIANTCTMSLSIILSLLDHPYACHKLSPRVLSLCFYHHIDRISFSPDITSCRFGQCIGNPWLPYSMVGRHRFHHRGCLSLDGQTPS

SEQ ID NO: 265209 - protein, 204 aa, Zea mays
  Clone ID: MRT4577_173478C.1.pep
KVPTPTELRSSNNEARRRRVSPIRGLGRWRDAMHKGARRHGCLPKGVAPLLKATLPTCAPKRHGLSLLQHTPRPSPAARGAGSRMSCKPAQSRRSQTAARGAHNRPAVTSDPPFWPRPTGGRSGQLCRRHATAPSGHASLTPNAPAWRPRPTRHATGAPDAACRQLHRHLRHRRASSVAEPMPRLEATQRTTQRRQLGATVNVA

SEQ ID NO: 265210 - protein, 52 aa, Zea mays
  Clone ID: MRT4577_173479C.1.pep
RTCGKRNSGTGRVVNLVCVEAQQLNSPCSYVPLVAVFSPRLYISVPLLSALF

SEQ ID NO: 265211 - protein, 158 aa, Zea mays
  unsure (1)..(158): unsure at all Xaa locations
  Clone ID: MRT4577_17347C.1.pep
WGGETIFPREAEWPVVRPGFKAPPKGKKGTPPGAGRGIPGGPPGPXGFKKKPPFPKGGAPKKTHPXKGAPPPGGRKKPKPVGGGGRSKEGVFKTKKKGPWGGKGSRNKTNKWWEKRHSRAFFKIGKTQPTKTGATVSNKRLHQDKDNKNKQPIQQNQT

SEQ ID NO: 265212 - protein, 99 aa, Zea mays
  unsure (1)..(99): unsure at all Xaa locations
  Clone ID: MRT4577_173480C.1.pep
FATRIKSGNDIAKKRLVHAQLNELQDYYLYRRHTVAQPLXLDERETAAVNRHGYHAXFRDFQSVLTTFTQYRSLRXITELIHGDLLHSVNTXSSLIFDR

SEQ ID NO: 265213 - protein, 141 aa, Zea mays
  Clone ID: MRT4577_173481C.1.pep
SVGRCLSLLVAGCNGHGDVVSSGALAAAVPGRAGVLLLRVAQLAPSAGPPVGVPPVPRSLPAVRVQSLLVDLTAAAVPQTLGPPIGLSVDDLRTNNSLTVLSDSAQTLYPYAAHLVLFAGRAREAGAADSPPYEFASAPHG

SEQ ID NO: 265214 - protein, 62 aa, Zea mays
  unsure (1)..(62): unsure at all Xaa locations
  Clone ID: MRT4577_173482C.1.pep
LHTKPVTFSIQVPPLIXXNSNTFTSRLLNLSTHPQTQQSNNTNHRYIYIDTEGSFIHQTITH

SEQ ID NO: 265215 - protein, 58 aa, Zea mays
  Clone ID: MRT4577_173483C.1.pep
GTAWAELSVSYKLDNRLIQYRGTTLVDKQHIYTCLIHCAQINRFLMSRCCALIRQATN

SEQ ID NO: 265216 - protein, 137 aa, Zea mays
  unsure (1)..(137): unsure at all Xaa locations
  Clone ID: MRT4577_173484C.1.pep
AKAKAKAKQVQESLKASQSAMQKFWARLLGIGPALRAVASMSRXSSFIPKCVHIRTMIDRSLSXYETLPLCLLRADWAAKLKHWKAEFVTTLQHYWLGTKLLWADVRISSRLLVKLAGGKSLSRRERQQLTRTTADI

SEQ ID NO: 265217 - protein, 229 aa, Zea mays
  unsure (1)..(229): unsure at all Xaa locations
  Clone ID: MRT4577_173485C.1.pep
MVAASGLALPRVAAPCPARPRGGLRPALLRFAPPVALPPHQLRCCASTVDDGLVSAAASKPRLPRVVGMGSKLVGCGSIPTLXASNDDLXKIVDXSEWIAARVXIQTLRGLSIKAAQRALEMAKVKAEDVDLVLLCTSTPDDLFGGATQVLTDVGCTKAFGFDITAACSGFIVGLITATRFIKGGGFQNILVVGADALSKYVDWTDRGTCILFGDAAGAVLVQYSLSPV

SEQ ID NO: 265218 - protein, 168 aa, Zea mays
  unsure (1)..(168): unsure at all Xaa locations
  Clone ID: MRT4577_173486C.1.pep
LAAPGVCLLRFAWESAAGSLVGAVVGYGKGLXMREGFKGSFPDAASSAKIFAVLAGVQSLVACSLRKLRGKDDGINAGVAGCCTGLALSFPGAPQTLIQSCLTFGTFSYIIETLNKQQPALALPLAKGIKDQKGGQSVLPPFTLPLPQDAMDGFSKFQNFLSSKFQGK

SEQ ID NO: 265219 - protein, 69 aa, Zea mays
  Clone ID: MRT4577_173487C.1.pep
TGDYFIKGKALKGPKIDGKNLPGPELSVKNNFVLFQWGCLSDQGEEKKKEKEKKTTKKKKQGRPPKREL

SEQ ID NO: 265220 - protein, 229 aa, Zea mays
  Clone ID: MRT4577_173488C.1.pep
MVGGGGDPRPEDEPFSDGDATESDTDESPPQGISARRPGATTNPILTRLAVSRNPSPLAAATAAPGVCLLRFAWESAAGSLVGAVVGYGKGLVMRKGFKGSFPDAASSAKIFAVLAGVQSLVACSLRKLRGKDDGINAGVAGCCTGLALSFPGAPQTLIQSCLTFGTFSYIIETLNKQQPALALPLAKGIKDQKAGQSVLPPFTLPLPQDAMDGFSKFQNFLSSKFQGK

SEQ ID NO: 265221 - protein, 85 aa, Zea mays
  Clone ID: MRT4577_173489C.1.pep
CNADVSCMCYLAPVHVLHCLTMNVRHDSLAVACNIRLWSKSKRQRVYLVALCRSCSALRICVLMLTDAWRTRGGRVADAWRTRGR

SEQ ID NO: 265222 - protein, 45 aa, Zea mays
  Clone ID: MRT4577_17348C.1.pep
HGIQADGHMPGDMTIGGGADAQNTFFTATGAQKHIPRAVNIDHTH

SEQ ID NO: 265223 - protein, 52 aa, Zea mays
  unsure (1)..(52): unsure at all Xaa locations
  Clone ID: MRT4577_173490C.1.pep
QQSATRILSLLALIALFASATNAFIFPHCSLASSSIISQFLPXVTLMGFEHP

SEQ ID NO: 265224 - protein, 44 aa, Zea mays
  Clone ID: MRT4577_173491C.1.pep
LHKPAVPRKCEASLERSPPHKEILSVLTHRMATGSTGACNPTST

SEQ ID NO: 265225 - protein, 66 aa, Zea mays
  unsure (1)..(66): unsure at all Xaa locations
  Clone ID: MRT4577_173492C.1.pep
RRVPSIGLVLLGSSLSCPIXSDSCCLVGDTPTFRLSSFIMFCRGEGCXPPPSGPVLPGHAPGAVFP

SEQ ID NO: 265226 - protein, 60 aa, Zea mays
  Clone ID: MRT4577_173493C.1.pep
RGGGQLFCTHTPQGGGGMFKRALHLLRREAGLVEQEKDAAAQKRTPENQGENQGGPSRDR

SEQ ID NO: 265227 - protein, 153 aa, Zea mays
  unsure (1)..(153): unsure at all Xaa locations
  Clone ID: MRT4577_173494C.1.pep
GTVDVLISATPSVKTGEDETVHDTNCRSVVXDLHDTLRXLQDEPAFDYISLVFYIQKYIENXITAVIETEKEYELKKXIXGATTFLLSKLSDLQXFDGETMKDDVIELFIYDYDAAAKPTFLYFSHGLTEIRVLGVLRYSLRMMPHYLCTITI

SEQ ID NO: 265228 - protein, 86 aa, Zea mays
  Clone ID: MRT4577_173495C.1.pep
RVRHHDVRHLRRSAVSTPDTLPAEPRWLPRTRTFWRSCTSSTPSSSGPPVALVMRLFRCPSSVPRFNYLVIEFSRFIRNGARVSFC

SEQ ID NO: 265229 - protein, 157 aa, Zea mays
  Clone ID: MRT4577_173496C.1.pep
LLEEKTARFVESIAKTNTEKITKEILEGLSEDTDDSDNHDVESVGEDSEDRPWRPSHAVFGKSTIKQSHLDNMRGRYFRDMSIVRADVDRAIPAPKENEVVIFRSFFKAGLRFPLSRFVVEVLKTYRIFLHQITPEAVIRMGIFVWAVRSQGLSRPA

SEQ ID NO: 265230 - protein, 41 aa, Zea mays
  Clone ID: MRT4577_173497C.1.pep
ENQKRNLLGIFNTRLKQNLSSRSPGASRAITKADYTAGRNW

SEQ ID NO: 265231 - protein, 102 aa, Zea mays
  Clone ID: MRT4577_173498C.1.pep
YQGWSRAWSFEDYSRCEYLLVEVTEVSDGDITVSCLTKAEGFSTVFMPEQNRKSRRIARSDLTMFSHQVPAYRLTDETGDLCGYWELDPASLPEVLLVRKTK

SEQ ID NO: 265232 - protein, 47 aa, Zea mays
  Clone ID: MRT4577_173499C.1.pep
KLMGILQATRLTTHYLKKRQLRTLNMFTLNGSHERIPTIWKSYIAIL

SEQ ID NO: 265233 - protein, 182 aa, Zea mays
  unsure (1)..(182): unsure at all Xaa locations
  Clone ID: MRT4577_17349C.1.pep
MSSRSPPXRDRRMRTERTLYRDAPYRRDRDGRRGPNRSASDLCNNCKRPGHFARDCPNVSVCHACGLPGHIAAECSSKDLCWNCKEPGHMANACPNEGICRNCGKSGHIAKDCTAPPMLPGEVKLCNNCYKPGHIAVECTNEKACNNCRKSGHLARNCTNEPVCNLCHVAGHLARQCPKSDE

SEQ ID NO: 265234 - protein, 168 aa, Zea mays
  Clone ID: MRT4577_1734C.1.pep
FSPSWGKWHRSIKIPFTTTMMAASSSSSFNLSDHLVQDDLPWPASSSSSSQLPFAPSHPPHGAIIGGSQQWWQQPQMLNCADRHPADLDDGTVLPASVNVPRTTTTRQRPFPAAPPPLPGDAFEILASSRLCTTLLLSQASSSVLLHNGTTMPLLRSEHVPYGPPAPA

SEQ ID NO: 265235 - protein, 80 aa, Zea mays
  Clone ID: MRT4577_173500C.1.pep
MLFPLGLLIVLLATHIIGAWGKEGHIMVCKSDEKYLEENAAEEVHALFSDSEVGELSTARPWADQERWHYHWDSPIQYVN

SEQ ID NO: 265236 - protein, 46 aa, Zea mays
  Clone ID: MRT4577_173501C.1.pep
PFARARTERTSMQYLGAGRKSSTHNFVRQRRERFHVNGTCAWVSRS

SEQ ID NO: 265237 - protein, 53 aa, Zea mays
  Clone ID: MRT4577_173502C.1.pep
KVAGQPQQKCSESCPIMDHDGHKFSLVVLDQELGVLIRSCVKHDVLFFKMYCD

SEQ ID NO: 265238 - protein, 152 aa, Zea mays
  Clone ID: MRT4577_173503C.1.pep
PRAGRGHGNLMVDPSSVPQKGAHKDDCRQAKHEREKSKKATGAPLTASGVLTNQAPAAQKTTRESQLMTESVKPAPKEGSETVVKPKKNKPRPSKSARARIQAAKASLTTESSPSSIGIVKPATDVKEPQLTTVPVSVSSSRVPPAKNTHSK

SEQ ID NO: 265239 - protein, 85 aa, Zea mays
  Clone ID: MRT4577_173504C.1.pep
VRKKKKKKKKKKKKKKKKKKKKKKKKKKKKKKKKKRVGRFLGNPSLRSLGWARLHLFFWGAPPSAFPWADLFEPPRLEIPWRCPP

SEQ ID NO: 265240 - protein, 297 aa, Zea mays
  unsure (1)..(297): unsure at all Xaa locations
  Clone ID: MRT4577_173505C.1.pep
MAGYPPPGSGYPYGPGGGYGAPPPPYGSSPAPSAPPYGEXSRPRKARPRPPPXPYYGAPPPSYGAPPPSQPYGGGGGGGGGYGYGASQPPPYGGAPQQQPPVRGXGAPAGFGSPFASLVPSAFPPGTDPNVVACFQAADRDGSGMIDDKELQSALSGYNQSFSLRTVHLLMYLFTNTNVRKIGPKEFTSVFYSLQNWRAIFERFDRDRSGRIDMSELRDALLSLGYSVSPTVLDLLVSKFDKTGGKSKAIEYDNFIECCLTVKGLTEKFKEKDTAYSGSATFTYEAFMLTVLPFLIA

SEQ ID NO: 265241 - protein, 55 aa, Zea mays
  Clone ID: MRT4577_173506C.1.pep
PHLTDMGTTSLSCLVDIFSALSSQSSNSISPGTHIGDGILEPAATTHGSRIITPD

SEQ ID NO: 265242 - protein, 66 aa, Zea mays
  Clone ID: MRT4577_173507C.1.pep
LGHATCAFFLLFIVKCHLHSDVAFLQERGRSQFYIQTRLPPPSQLKTLNLMVSPSLLTFVRFLLDY

SEQ ID NO: 265243 - protein, 73 aa, Zea mays
  unsure (1)..(73): unsure at all Xaa locations
  Clone ID: MRT4577_173508C.1.pep
RRSGAGWRARRSAPAARSVSVREAADERPAGTPPLRAGWRALSAPRLVGVRARKGGRGRXAMDVGLVRREAQK

SEQ ID NO: 265244 - protein, 51 aa, Zea mays
  Clone ID: MRT4577_173509C.1.pep
MPSHKTFRIKQKLAKKQRQNRPIPYWIRMRTDNTIRYNAKRRHWRRTKLGF

SEQ ID NO: 265245 - protein, 388 aa, Zea mays
  Clone ID: MRT4577_17350C.1.pep
MEHTNHRRRRQALATVSVTTTLLLLLLCLAALTTAEALREHRDEGGASSSGGSGSGCGSNAAGGKQSPAVWVFGDSYADTGNLGDLGRELTREWYDPYGTTFPGRPTGRFSDGRVLTDFIASAMGVPTPVAYKLRRGAARGLVARGMNFAVGGAGVMDTGNFQRNIGEQIDLFQAQRPPPPPSARGCDGGVAVVVVSGNDYSYAADKDNSTSVRAAIAYIPAVVRQLREQLLRLRDEAGMRKVVVTNLHPMGCTPLFTRALNYTACDPLANAGAVQHNAALQSVLAALDPANRTFLLLDLNTPFAALVDGAAAATAEERFAEPRRPCCESFSADGHCGQQDDSGRRQYTLCSDPSKHFYWDDVHPTQAAWAAVSRTFRPMIQEFLLST

SEQ ID NO: 265246 - protein, 486 aa, Zea mays
  Clone ID: MRT4577_173510C.1.pep
MVRVVVSTLPALRPLLRRGSLLNHKPLPRSRLQPWPFCTLSSSPAAGAPSAVVKGEEVALDKHLTRCAAAGIAPLRVAVLVSGGVDSSVALRLLHAAGHRCTAFYLKIWFQEDFRNFWSECPWDEDLKYAQAVCDKIDVPLEVVHLSDEYWNHVVSHMINEYRCGRTPNPDVLCNTRIKFGSFLEAIENLGFDYIASGHYAHVVHPSAENTEAPSVLQLSKDKIKDQTYFLSHLSQSQLRRLLFPLGCITKDEVRRLATQMALPNQGRKDSQGICFLGKVKFSEFVERHIGEKEGIILEAESGDYLGIHRGFWFYTIGQRQGLRLPGGPWYVVEKDVQNNVVFVSRNYYSLDKRRRTFRVGSLNWFDNCGPGNNEQLKCKVRHSPEFHDCTLVKERSEENGDALVVHLAEDDQGLAAGQFAAFYSENVCLGSGIILDSWDKMSFPVCSRALEIAKLADKSSLGKPIRIVNLEHIVKPEQQEEIKVA

SEQ ID NO: 265247 - protein, 99 aa, Zea mays
  unsure (1)..(99): unsure at all Xaa locations
  Clone ID: MRT4577_173511C.1.pep
RLPLQLCSCPPPVPPNSKPWLLPTAPRXSFCAAGPRLRPPLPRKSTGMADEAHLRSAVPGPWAADYREKAVHYCTTPSISVIRWSPFMSSHWPTGDNVI

SEQ ID NO: 265248 - protein, 82 aa, Zea mays
  unsure (1)..(82): unsure at all Xaa locations
  Clone ID: MRT4577_173512C.1.pep
MVYPTGLQFAVLRIHRQLMXRLXANGRVGTSAAVYSAVILQYLTAKDLELAVNASLDLNVKRITRRHLQFAILGDNELDTLI

SEQ ID NO: 265249 - protein, 88 aa, Zea mays
  Clone ID: MRT4577_173513C.1.pep
GSLETERYFMHAMPLQTMRQGNMLGIPKDHVGTMKLSWKYQQGWGVEIEPILVPDSENQLGIPYGVFNYQEKKAVRGKGPDKMVVLTP

SEQ ID NO: 265250 - protein, 69 aa, Zea mays
  Clone ID: MRT4577_173514C.1.pep
GMSSVYPFQVSDHVVASALGLPFTTGEQQDPIQSEHDKASPKRSPYSMQNRSHDTGHWRSSTVLQQHPH

SEQ ID NO: 265251 - protein, 105 aa, Zea mays
  Clone ID: MRT4577_173515C.1.pep
PVFAHLSFSGIADVNQERIVEEGGLDALLSLLETSENTTIHRVTAGAVANLAMNGNRFIVSNKTPIRFLFNLVELVEKSTRSLPGFLNYHHFILQNGGQHVYFNH

SEQ ID NO: 265252 - protein, 49 aa, Zea mays
  Clone ID: MRT4577_173516C.1.pep
CLGCEEAAAKWSPFSCPWTGPSMELHERDRYRESEREREREIKHCPQEG

SEQ ID NO: 265253 - protein, 85 aa, Zea mays
  Clone ID: MRT4577_173517C.1.pep
NRNDLVRYSELFVLKQLEGFLADINLNGSMDSGVKEILVSTVIDLVEDHQSKPEVFKFFLGDAEGAPDGASRIFASGGGCYTGLY

SEQ ID NO: 265254 - protein, 47 aa, Zea mays
  Clone ID: MRT4577_173518C.1.pep
GGLAPSLVVVQAFLKLHELALFAIPLRRSLSGRRVGEWRGIAGNRTF

SEQ ID NO: 265255 - protein, 86 aa, Zea mays
  Clone ID: MRT4577_173519C.1.pep
GGTQRGSQSACMALLGVRGPTRARPGWNERLLPPVVPGGVLPGELSLLWALPGGQLVKTPIKSTGSSKEVWSTRAPEKTGPREVEV

SEQ ID NO: 265256 - protein, 271 aa, Zea mays
  unsure (1)..(271): unsure at all Xaa locations
  Clone ID: MRT4577_173520C.1.pep
TPAGSGPEFPGRPTRPPDSPSGALQTAAEEEETKTFKDLGVTDVLCEACDQLGWAKPTKIQIEAIPLALQGRDIIGLAETGSGKTGAFALPILNALLETPQRLFALVLTPTRELAFQISEQFEALGSSIGVQCAVIVGGIDSMSQSLALAKKPHIVIATPGRLIDHLENTKGFNLRALKYLVMDEADRILNMDFETEVDKILKVIPRDRKTFLFSATMTKKVQKLQRAALKNPVKCAVSSKYQTVEKLQQYXYLFIPSKIKDTYLXYISHE

SEQ ID NO: 265257 - protein, 51 aa, Zea mays
  Clone ID: MRT4577_173521C.1.pep
SILERKTCTQTADTRDDYNLKFLPTNPYAVYQIVCLCLSQFTYTEFGLFKH

SEQ ID NO: 265258 - protein, 56 aa, Zea mays
  Clone ID: MRT4577_173522C.1.pep
IPVNSIRQLRKNSHTRHERVNQHQLPHRPRLGSGYRITSAAAGGKVELAGGAWGCP

SEQ ID NO: 265259 - protein, 86 aa, Zea mays
  Clone ID: MRT4577_173523C.1.pep
GAGPGFFFFFFSWFFFFFFGTKAVLNFLPFADKGQNYLFPFVAGGIWEKPCLPPFGGGIEPGGPKRDLPLAFKIDSMENPKMGRKV

SEQ ID NO: 265260 - protein, 168 aa, Zea mays
  unsure (1)..(168): unsure at all Xaa locations
  Clone ID: MRT4577_173524C.1.pep
MNAFRVLADMTHLFSVLVLLLKSXATKACSGVTRKTQELXMLGIARRYLYLCTDYVSLYNXTMNMVFISMSMTVERRMMRHPQVLRTYDKEEDTFRHDVLDPAAMLLALMFLDRLTFREICCSCSIYLEARAXILPQISLLQRTKNVDNLTGEYVCFLGAYRAFYILC

SEQ ID NO: 265261 - protein, 141 aa, Zea mays
  Clone ID: MRT4577_173525C.1.pep
SCYAFWPCVVSFDVGWWPWHHAVERWSRRWAGTGGRPPPGAQLSSVLARAIHRSPPHTTNCKLAVDGVRVLRLPREGNRPAGRPELQYHGLVISAFHVRRAQQPGHGARGRLPVTSCHHHPLPSGSLLQCFCMNVSLHVSL

SEQ ID NO: 265262 - protein, 57 aa, Zea mays
  Clone ID: MRT4577_173526C.1.pep
MEMKKIACAVLFAASATVALAAEAPAPAPTSGSSAVAPAVGAALGAAVASFFAYYIQ

SEQ ID NO: 265263 - protein, 115 aa, Zea mays
  unsure (1)..(115): unsure at all Xaa locations
  Clone ID: MRT4577_173527C.1.pep
MRAWVAAFSYATTDNPNAGENIFKTTCAQXHTVDMGTRHKRGPNLIGLLGRQSCTTGSYFYCAVNKYKAVVWEEDTLYDFLLNPIMFISGTKMXFPGLKKPQDRADLICYLNEAT

SEQ ID NO: 265264 - protein, 53 aa, Zea mays
  Clone ID: MRT4577_173528C.1.pep
RCSPTSPCRDRNAPSLSTDRWRCRRQVGWLARSLTSGLLLTRASRAAANRRTD

SEQ ID NO: 265265 - protein, 57 aa, Zea mays
  Clone ID: MRT4577_173529C.1.pep
GHCFRRNTPHRFPSFPSRRLDCLLMAYWHPPHCSIAWWSCQGKRKRYDGCKRKRKRK

SEQ ID NO: 265266 - protein, 58 aa, Zea mays
  Clone ID: MRT4577_17352C.1.pep
DLKMLNDPSSLLFKEILTDIARADYFEPIRTFDESCMADFFKKTTSLSQHLVYNPKEV

SEQ ID NO: 265267 - protein, 42 aa, Zea mays
  Clone ID: MRT4577_173530C.1.pep
GTCISYVKNQFYVPIFSSNCTQSSWEGGKSIEDPKQTLTLMG

SEQ ID NO: 265268 - protein, 54 aa, Zea mays
  Clone ID: MRT4577_173531C.1.pep
DFHYPPLAPLPRGFFILLVHPTTIPITSTHLNPARSLGTPIIYHRPHGSHRHET

SEQ ID NO: 265269 - protein, 105 aa, Zea mays
  Clone ID: MRT4577_173532C.1.pep
KILGLEICADTMVGDEMLRGISGGQRKRVTTGEMLVGPARALFMDEISTGLDSSTTFQIVNSLRQSIHILGGTAVISLLQPAPETYNLFDDIILLSDGQVVYHGP

SEQ ID NO: 265270 - protein, 84 aa, Zea mays
  Clone ID: MRT4577_173533C.1.pep
IFKILLLEKGSFINQTVPNKYKCLLFIGSAYNIVGEKNSMCRWLGIFCIFGINPRKIYSLLCFLWGNWFKCFLGKSKLVKLLLF

SEQ ID NO: 265271 - protein, 77 aa, Zea mays
  unsure (1)..(77): unsure at all Xaa locations
  Clone ID: MRT4577_173534C.1.pep
XXRTLAVYMPLLGLILTSFFVLFFPFFYVRRLFCYPNYILVTVVSNGNGGLSAGLLAVVFLWVPFFCLHFFLGHSGL

SEQ ID NO: 265272 - protein, 52 aa, Zea mays
  Clone ID: MRT4577_173535C.1.pep
INAFSMYVRLPNYSSKLVCVVMASWDLLFHFSPLMFLVLVPFSRALCKPYNI

SEQ ID NO: 265273 - protein, 93 aa, Zea mays
  unsure (1)..(93): unsure at all Xaa locations
  Clone ID: MRT4577_173536C.1.pep
MRELFVALALLALAESATSTHTSGGCGXQPPSPSHLPPPVHRPPTTHLPTPAHFPPPFHLASPIHLPPTGHVPPXITMPTXPCHLQLLTPSWY

SEQ ID NO: 265274 - protein, 78 aa, Zea mays
  Clone ID: MRT4577_173537C.1.pep
MCCGGDGECRPLGWLLGLPFALLAVLVSFVGAVIWIIGLPISCICPCCLCVTVLLEVAVELVKAPLHVMTWFTSKIPC

SEQ ID NO: 265275 - protein, 208 aa, Zea mays
  unsure (1)..(208): unsure at all Xaa locations
  Clone ID: MRT4577_173538C.1.pep
MASDQQALSVPVPVPVPSNPNPSALADPTPPSASAPRKLPIKRRSPRPSSSPPSSSPDSSDPXARPRPXGGGGSDKQQQPPFKFQRIWSESDELRFLQGLLGCGAQGLVFPRDLNVFYDRFSESMPQPYTRAQLSEKLRRLKNKFRSMSARVAEGLDPARLAPHDXDVLHLCSRLWDPDDGVTSPFVTSAGTSGNKRRRDNLQGTSLP

SEQ ID NO: 265276 - protein, 50 aa, Zea mays
  Clone ID: MRT4577_173539C.1.pep
ITNLFTWTSTTIPATCSSAIIMREICCIHHTSAPRRDEPLLLLLNTHVRL

SEQ ID NO: 265277 - protein, 98 aa, Zea mays
  unsure (1)..(98): unsure at all Xaa locations
  Clone ID: MRT4577_17353C.1.pep
KPTRPPTHSFAFSAIIPHFLAXLLKISSEHPTLQSYKLQQALASSILXQPISQLQQQSLSHLTIQTILTQHQLSLNLLSLINPIPYFQQHLLSYNPLS

SEQ ID NO: 265278 - protein, 51 aa, Zea mays
  Clone ID: MRT4577_173540C.1.pep
HSSGNLTYLLPPPPNSSWLGSSCYLGATSHTLFLNGRIIYNMHVQLATMSE

SEQ ID NO: 265279 - protein, 940 aa, Zea mays
  Clone ID: MRT4577_173541C.1.pep
MAMAMARFLSWLFTCFAALAVLEATVPARSWRAPSPTPRHEARRFEQKTDRFWEYQEQSNTWVQVRAPFDLMSCINGTCTKVGSIGRLAREPGRHGLPPVQSQEEEEEDTRRVQGDGAEEDPVLPVRRRISLTRMSESSVWVTGQSGSIYERFWNGVVWVIAPHELPASAGYATATFIVNTTILALSEAGTLYQLQLNEHAQPIWTEMAFNSSQQSANLGLKTQSQAMRIRNGIVSNDGRKLFLSIMNGSLLEVTEIQPLRWNYHGRPPGADVSYISDAGNLRPGTLFTVSSTGDLYEFDKETKPSWKKHIWSEELAKNISLKSSAGFALHGLSGSNSVSLFLISKDGLLVERRLHRRKWKWDKHGAPTGQRLSSIAEVQKDELNDATSMFLTTTTGKVYEYQFPKYTGGAQSNKIRGQWINHMSPEHAKVARNVPGVHVQVGRMVFPLDDGRLGELHFPGMGGTDFGPSAQSTIRRKLSNKYEWSILDAPETEGWNAEYCTEEHGPTNCISGAKNIAADTESNDLSNNPPSRRRKVEEKQHYLNVNRYQQSDETESYNFLSRTIDLNFHMRVMHADRSLFLIADNGLTFEYLNSNGVWLWLRHEHVTAMKGTLGSYNGSLYLVDVHGNLHIRERNGDELLWINCTAMKKGRQVASGSPWDGIPGLLRRVTTDDALFFVNKRGRLLQFTVALRKFKWKDCHSPPDTKIAFIVDQEVFRRNIIFVVGRNGRLYQYNRITELWHRHYQSPHLFLSCSPGTAMRPSPLSLAGSLFMVSEHGGLVEYHFSPQDGWEWVEHGTPHRGVTLVGAPGPCFDGSQLFVVGSDGHVYRRHMEGRTWRWTSHGHPPSEPAAVDEQSCATPDTGAGAHYADGFRGSCDGKVAAVRPVPFSEDAVVFELRDGRLAELRRPPSADGCGGWEWARIIGTPASACMTSYWTAVAT

SEQ ID NO: 265280 - protein, 91 aa, Zea mays
  Clone ID: MRT4577_173542C.1.pep
FTGCRPYLCRCLCAESTEQRMRWPAHLAKLLRQGEDCLLGRAPGAWAHLRFLQAHMHYARQFQAHRLAIAGRAPRRPHRHARPDPAPVENT

SEQ ID NO: 265281 - protein, 84 aa, Zea mays
  Clone ID: MRT4577_173543C.1.pep
MTSTWRASHILALDPITQIFKFIHQYPLLRNPRLTASHGRLSSTSTSRDQLAYQGRPQGQGLQIDDVLLRTNTVAGISTIARKR

SEQ ID NO: 265282 - protein, 63 aa, Zea mays
  Clone ID: MRT4577_173544C.1.pep
HTSLSLRLQFLPKPTYLGNRYFLILPPFLVLPFFITTLSICYRILSFQLTSFLLISSLNISLP

SEQ ID NO: 265283 - protein, 82 aa, Zea mays
  unsure (1)..(82): unsure at all Xaa locations
  Clone ID: MRT4577_173545C.1.pep
EEREQEKDDLDVALLPTIVEKVILPKLTVIAENMWDPFSTTQTSRMVGITLKLINGYPSVVNAENKNSQVYLKAXLLRMRRT

SEQ ID NO: 265284 - protein, 50 aa, Zea mays
  Clone ID: MRT4577_173546C.1.pep
PVPARDASMKSELANELKGNALDDSIIYVSNEGQAIAKYLSLLEAAPSSF

SEQ ID NO: 265285 - protein, 55 aa, Zea mays
  Clone ID: MRT4577_173547C.1.pep
IPFTKLFLAYLQQCVSKRNMTSIVLSPPSQHHRVISLMQGTWCEPRFLNVASAVV

SEQ ID NO: 265286 - protein, 51 aa, Zea mays
  unsure (1)..(51): unsure at all Xaa locations
  Clone ID: MRT4577_173548C.1.pep
HQNTYHFLHYIHKSXHIYNLSSIHSHLYIFTLLSSSHHLKILLSSYKFFTL

SEQ ID NO: 265287 - protein, 254 aa, Zea mays
  unsure (1)..(254): unsure at all Xaa locations
  Clone ID: MRT4577_173549C.1.pep
RRGKRGYLLXGPPGTGKTSLVAAIANLLDFDVYDLELTTVPTNSHLRRLLVSTTPKSVVVVEDIDCSLDLSDRNKKTKKGAGVGVGIGTAGDEXRSTARRHVGVAGRGGRDGARVXSLSGVLNFVDGLWSSCVGERLMVFTTNHPERLDPALLRPGRMDRKIELGYCTPPALRVLAKNYLGVGDEGCDDADADPDTVNALMAEAEGLLAAAEVQITPADIAEVFMGCDGAGAAAALRKLVGELRRRRDAAALAT

SEQ ID NO: 265288 - protein, 95 aa, Zea mays
  Clone ID: MRT4577_17354C.1.pep
PLCDRGDRQRRKESSSLTLATSTPLASFSPIVPAPVRVGEDEPPPSWVLVPDPFSQEMGFAPIPAVTEPPKSLGPPTVSLSNGPQITLQVRELTT

SEQ ID NO: 265289 - protein, 112 aa, Zea mays
  Clone ID: MRT4577_173550C.1.pep
SLLLARADTTLARCKGEAKPVCVVRYRDTWLCRTDESDESPPIMDGSERRRLCLSSRRQMRQGLCVGWAGSVAIEKMQLDRITTHPLAQYKFCGPLVRFGLRLCWARSLGRV

SEQ ID NO: 265290 - protein, 77 aa, Zea mays
  Clone ID: MRT4577_173551C.1.pep
KALRTGSALHDATLRSPHNMHLDDIIELQILEVGQQSLVASSPDLRTFWRRRPDTRRAQVLFPSGCLADEDVHLTCS

SEQ ID NO: 265291 - protein, 234 aa, Zea mays
  unsure (1)..(234): unsure at all Xaa locations
  Clone ID: MRT4577_173552C.1.pep
AGQXVSFXMRKXXDVLSKWVGEAERXLKLLFEEAQKNQPSIIFFDEIDGLAPVRSSKQEQIHNSIVSTLLALMDGLDSRGQVVLIGATNRIDAIDGALRRPGRFDREFYFPLPGYEARAEILDIHTRKWKDPPPKELKMELAASCVGYCGADLKALCTEAAIRAFREKYPQVYTSDDKFVIDVDSVSVEKYHFLEAMSTITPAAHRGSIVHSRPLSTVIAPCLKSHLEKIMEHI

SEQ ID NO: 265292 - protein, 141 aa, Zea mays
  Clone ID: MRT4577_173553C.1.pep
LDATPMHSGHILDLSQTEVDRRWIDAGASHFPPNASQRAHRVLAFRRRRGVSGAFISLSEASEHSLVYHASFTCLASGSSGVLGGFRSSRGLLGCILGAFWRRRSQEGCGEGGRREGRFRCRRKNGGRGSTVGISSSSRSA

SEQ ID NO: 265293 - protein, 72 aa, Zea mays
  Clone ID: MRT4577_173554C.1.pep
PPFLPFKYLRSTSITLHHPKLSALLKVCAFVLPRSNHPHSKHIVQEVHYQPPVPRPSRTTSVTWACWPPCPT

SEQ ID NO: 265294 - protein, 145 aa, Zea mays
  Clone ID: MRT4577_173555C.1.pep
LAVLSGAHTLGKAHCASYADRLYASATCTTPDPALDARYADRLRMRCPSNSSSTSSTAASELDPGSCTTFDTSYYRHVARRRGLLRSDASLLDHRFTRAYVLQAASGRFDGHFFHDFTVSMAKMAAIGVLTGDQGEIRRKCNVVN

SEQ ID NO: 265295 - protein, 56 aa, Zea mays
  Clone ID: MRT4577_173556C.1.pep
QAVASCRAFCPQSLLLICYQHFAINTVCVLTSSTMLALEPARCARITAHFMTSHYS

SEQ ID NO: 265296 - protein, 84 aa, Zea mays
  Clone ID: MRT4577_173557C.1.pep
DHQGLTVGHPAVEFGTNANAAARRRWLHHRSSGRLDGAGNIMCAHEGVTFVGATTSCALEEAPTSTLQKMELVVCYPGLGPVQC

SEQ ID NO: 265297 - protein, 152 aa, Zea mays
  Clone ID: MRT4577_173558C.1.pep
VAIPEAPCACCFFSAPPAAPYLSLSLAASLPCEILPAFLLAMVLVVVALLWSSPWPALPASRPAVPSPIAARPYSLVSLISFPSASRELAHGAHSSPGPMLVALCTRSHRRRVLFPVKPSQISPGRSRVARPCARPWLQFTERAPLSRLLFP

SEQ ID NO: 265298 - protein, 135 aa, Zea mays
  Clone ID: MRT4577_173559C.1.pep
GKMNWGTGPNKWQAMGQGATPLSRERTNNGAPNLTGPSPIPICLMKIRKGEGKKPTKGRPRGAPGGPNQSTPPPPLGMPGSNKTTQRNPFFPPLGFFPSGVRLLVRGVNECFSPKRGPRGPPRWGVPPRRNPWWG

SEQ ID NO: 265299 - protein, 190 aa, Zea mays
  unsure (1)..(190): unsure at all Xaa locations
  Clone ID: MRT4577_17355C.1.pep
MVRMGDGSAIDIYLGTTYSCLGGXHDDRVEIIADDQGNRTTPSNVAFTDSERLIGDAAKXAVAMNPINTVFDAKGLIVRRLSDSSVXSDMKMRPFXVIPGPXEKPMIVVHAQGGGERCAGEEISSMVLVKMREIAEAYLGSKSNNADVTVPAYCNDSQRQATXDAGVIAGLNVLRIISEPTAAAIAYGLD

SEQ ID NO: 265300 - protein, 98 aa, Zea mays
  Clone ID: MRT4577_173560C.1.pep
EQFSETLSLTCFISHGRTEDENHKYSELPFKRRKHQYIERLYFKILLVTVFLVIFSTKLTNCILYSLLHFSMQPLQINNCILTKTAQKLEKNSQKDRK

SEQ ID NO: 265301 - protein, 176 aa, Zea mays
  unsure (1)..(176): unsure at all Xaa locations
  Clone ID: MRT4577_173561C.1.pep
WTSPRPTQGSDSTTTQKTTDSASPDPRARTQPRLRKTVSASPDPRARAQPRRWTTNSASPDPRARTQPRLRKTVSASPDPRARAQPRRWTTNSASPDPRARTQPRPRKTVFASPDPXARTRPRPRRSLRLARPQGSDTASASEDGLRLARPRAQTRPRPRKTDSTSTSEEPPPHPT

SEQ ID NO: 265302 - protein, 68 aa, Zea mays
  unsure (1)..(68): unsure at all Xaa locations
  Clone ID: MRT4577_173562C.1.pep
NPQEPRXRVTPLYPPFFLTPPPSASRLRSSKGCGRTQQLTHFIYSATCSPHSHYYLLTTFSIIQHKLL

SEQ ID NO: 265303 - protein, 34 aa, Zea mays
  Clone ID: MRT4577_173563C.1.pep
TMNFACILVYGKLDQAAKFCSYTARNSANMLPNN

SEQ ID NO: 265304 - protein, 84 aa, Zea mays
  Clone ID: MRT4577_173564C.1.pep
IYFAQLFQTTPPNLAVPEDPHVETPMQHWVDQLSENGGVRPQNSNIERTGGGGPQILSENGGVRSPNLKSDLHSLLVWTRFLDC

SEQ ID NO: 265305 - protein, 98 aa, Zea mays
  unsure (1)..(98): unsure at all Xaa locations
  Clone ID: MRT4577_173565C.1.pep
FPGISRRKVNLFETLCICQQYIXWSVSISNASPNQFFFSCHMDNSSRALPISKFNRPSMHRIKVWISGLLIQNCFIYMSIQYTCLICMKLILNKSSAS

SEQ ID NO: 265306 - protein, 34 aa, Zea mays
  Clone ID: MRT4577_173566C.1.pep
MAVLAASSTVAFAVKPRLPRARLTVACSATGGRR

SEQ ID NO: 265307 - protein, 92 aa, Zea mays
  Clone ID: MRT4577_173567C.1.pep
SCAGPTTYMAHADSTIHATGEAYTVCCAKAWRCLPQNLQFKERTGTEFAYVSATHGLATIMLHGYNLTLVSGANLFMREDVELTDGNVQVRG

SEQ ID NO: 265308 - protein, 113 aa, Zea mays
  Clone ID: MRT4577_173568C.1.pep
CATHNHTSGDIWTVVLIAEIEDTRSIKIYSCNLWTRAASALVSLWRGDFILVAQSMGHIISCPSPKSVTSASFTDMAADEAAVQVARGCSNLDTASGFHRSTDLLQSDVAPSR

SEQ ID NO: 265309 - protein, 63 aa, Zea mays
  unsure (1)..(63): unsure at all Xaa locations
  Clone ID: MRT4577_173569C.1.pep
MCNAAGTDSLPAPAPPLGSLKDSAHQLLHPVDGDQANAHALXLSKVAGEARAIGRVSVPMAGT

SEQ ID NO: 265310 - protein, 277 aa, Zea mays
  unsure (1)..(277): unsure at all Xaa locations
  Clone ID: MRT4577_17356C.1.pep
SFISMMIGFVKPTSGNAFVRGFSIQNDMEXEYSSMGVCPQNDMLWETLTGREHLQFYGRLKGLSGSSLDLVVDESLRSVNLLHGGAPDKQVKKYSGGMRRRLSVAISLIGDAKVVYMDEPSTGLDPASRKSLWSAVKQAKQDRAIILTTHSMEEAETLCDRLCIMVDGKLQCIGTPKELIARYGGYYVLTMTTLPEFEQEVEDLVRRLSPSSRKVYHLSGTQKHELPKQEARISDVFMAVESFKKRVEVQAWGLADTTMEDVFVKVAKGAQSSEELS

SEQ ID NO: 265311 - protein, 97 aa, Zea mays
  unsure (1)..(97): unsure at all Xaa locations
  Clone ID: MRT4577_173570C.1.pep
SARARACRADFIRRCGPIACALHKRVIALCTGFIKLXFDALXSSYIKASRRACCLGYAGTLVPQSAVNKATCEHLISTLNTLCDDPKHVVCIISGRG

SEQ ID NO: 265312 - protein, 173 aa, Zea mays
  Clone ID: MRT4577_173571C.1.pep
RPGIILSSLACPLHLGDRRMLAGVAPAADRSHGNYGLALPPPQGPANFLPGLPRHEAPCTVCSLLADGESHPGDGPLCLSGKCRVCAAMGSSSSYSSRNRMSLMLSLRFTFDEYSSSIKRLYRCRRVIAQSDGESSCGEAHGKDRAIDYNGYCRRSWFCHQTRCRGCYCCWRR

SEQ ID NO: 265313 - protein, 96 aa, Zea mays
  unsure (1)..(96): unsure at all Xaa locations
  Clone ID: MRT4577_173572C.1.pep
AFIWNNNMRAPQLQQLGLADHAAYSQRRLFGPFSRLGALDSAFCAPRRQLPFSRVGAAYXPQRLLPFSRLAGLSSPACFQPAHLLPFRRLAGVSPA

SEQ ID NO: 265314 - protein, 307 aa, Zea mays
  Clone ID: MRT4577_173573C.1.pep
MPPAGATAVGVAAPGVPVAETETTTWARWTSMSSVPWARLVFGLLLLVLLGFAFFKWGLPFLSEKVIMPIIEWEAKSFGLPVLAVVIVVSLAVFPVVLLPSGPPMWLTGIVFGYGFGFLIIMVGVTIGMSIPYWIGLLFRDRLNLWLEKKWPRQIALIKLVGQGSWFQQFRVAALLRISPFPYALFNYAVTVTEMKFVPYIWGSVIGMVPDVFINIYSGRLIRTLAELNYRKHRMTAVEIAYNAISVIVTVVFAIVFTVYARRALDNMEQSEVACAEPVVGDPAGSTESRDHLQGCSTARSVPIDVV

SEQ ID NO: 265315 - protein, 71 aa, Zea mays
  Clone ID: MRT4577_173574C.1.pep
RSRFPPFFFYFFFLTIFFFILVGFILHFNILLTTYYLYLFSFKNNSHSIFPNTTHHNTIPYYHFNTTPYTP

SEQ ID NO: 265316 - protein, 58 aa, Zea mays
  Clone ID: MRT4577_173575C.1.pep
GWEQRMVWCCATSDPKVCNVILGLNEPGSQINAVLSSPVTVAFPILEETPATHRSSGH

SEQ ID NO: 265317 - protein, 70 aa, Zea mays
  unsure (1)..(70): unsure at all Xaa locations
  Clone ID: MRT4577_173576C.1.pep
SSIYQVAKPQQVREPLSSLEPSRWRHTDLTXPQIPGISCGSDEXFVRLTLFPCCYSRYRGCELNERLSHI

SEQ ID NO: 265318 - protein, 76 aa, Zea mays
  unsure (1)..(76): unsure at all Xaa locations
  Clone ID: MRT4577_173577C.1.pep
KKFFPPPPPKRGXAVGKNLNSSGQXRNGLRGGQAXQRQALFRLPRHCSPHALCLXCGATAAIWCXVKDGXXAVRPG

SEQ ID NO: 265319 - protein, 96 aa, Zea mays
  Clone ID: MRT4577_173578C.1.pep
SGGRRVTRGRGRGFLLVSLNVTYFAPSEGPFQLFCVTMVADVVIPPSLYCRFGGDRTMTLVGWALFSMSLMSTIRSLMYWNEAEDWCAECADPSAA

SEQ ID NO: 265320 - protein, 54 aa, Zea mays
  Clone ID: MRT4577_173579C.1.pep
FTHAVFFNISFTKKDAFPSCSHSYLFLFFLKNDFVCVCVCVCKCVSVKTWVFYL

SEQ ID NO: 265321 - protein, 58 aa, Zea mays
  Clone ID: MRT4577_17357C.1.pep
IMECLTIVRIFEKSHLLSKLCPETNGSPNDFCSSLFYNSNQSTVHLCCSPMTQLFQKC

SEQ ID NO: 265322 - protein, 67 aa, Zea mays
  Clone ID: MRT4577_173580C.1.pep
RCFKIMSQCSTPRSFYKRAGRLRHSALPSGLSTPCMTSRFSARPVQLSQTMDWWSTLSRVQATSFLK

SEQ ID NO: 265323 - protein, 61 aa, Zea mays
  Clone ID: MRT4577_173581C.1.pep
IEGPAGGAARDSSLNHSDSSCDRFLIDLALWNVANWNMSPSYIPDYKERKTWFPRKKHLYR

SEQ ID NO: 265324 - protein, 317 aa, Zea mays
  Clone ID: MRT4577_173582C.1.pep
MARQEIEHSHLPVRGINLHVAQVGKGDLGTVVFLHGFPEIWYSWRHQMLAVAAAGYRAIAPDCRGYGLSDQPPENEEASWVWDDLVADVLAILDALSIPKAFLVGKDFGALPAYDFALQHPDRTCGVVCLGIPFSPVPFAFDTMPEGFYVLRWGEPGRAEADFGRYDVRRVVRTVYVLFSRADIPIAKEGQEIMDLADLSAPLPEWFTEEDLDVYAKLYEKSGFRYPLQMPYRSLRKMPQRLDAKFQAPVLMVMGEKDYCFKFPGFETAVRSGAMDNFMPDLKITYIPEGGHFVQEQLPDRVNELLLDFLNGHPVAS

SEQ ID NO: 265325 - protein, 102 aa, Zea mays
  unsure (1)..(102): unsure at all Xaa locations
  Clone ID: MRT4577_173583C.1.pep
RPKAAPTHAGGGGGTTTXRPRGRPHRGEGPQSTXGPRGPGPPTRGPXTTRTARNPPTGDRGGXXXXPKRQSXAERPXXPPPRGDKGPRREGXXXXPQRGPPQ

SEQ ID NO: 265326 - protein, 60 aa, Zea mays
  unsure (1)..(60): unsure at all Xaa locations
  Clone ID: MRT4577_173584C.1.pep
AKRATXMVLPSMMSQMMMPQCHWDARSQIMLRQRVPFMVNPMAMTISPMFLQEPFGGAAF

SEQ ID NO: 265327 - protein, 116 aa, Zea mays
  unsure (1)..(116): unsure at all Xaa locations
  Clone ID: MRT4577_173585C.1.pep
MGRKFFFGHSFFGNVTTDQVYKIVKTLNEXHVPPSDVVDVVVSPSYVFLPVVNIQLRQEFHVASQNCXVNKGCAFTVEVSADMLVNLGVPCVILGHSXRKALLXESNEFVGYKVAY

SEQ ID NO: 265328 - protein, 61 aa, Zea mays
  Clone ID: MRT4577_173586C.1.pep
YRIGLIRDRSTKKGLSKCSICDKRTLNWASQNILPNPSIRQPTINPPQCSHKNANWRIFQC

SEQ ID NO: 265329 - protein, 276 aa, Zea mays
  unsure (1)..(276): unsure at all Xaa locations
  Clone ID: MRT4577_173587C.1.pep
MPNQKSVDAFFSQNSYIGYDVLQKLAIPQPKQFLEARYPDGIALDAVFVHTSVVDMLDTAVGDAIENGHWIDSLSVLPSYISGPDATKILSICPSLQKAIKSSKAVVFGESCVFSNMFIKGIFDRLEKDMDSFGIRLSVGQGRPVNTNLGSEHKTGSGQHSDTKDLGGNGTSSTGASSDRGSKKKRGKGTGSTKGGSLEKDDDNEESIPVKGKKSHRXNKDXCASGDXKHGGKKTSEKMIEENANIFPDEXIEEKVLACAPELEELGSSDDSNAPL

SEQ ID NO: 265330 - protein, 468 aa, Zea mays
  Clone ID: MRT4577_173588C.1.pep
MASPPHSVEVRTPGDSPRPTAALLSPSVAAPQPSNASRLLLLLTAAVAAATAFVLLRPPITVVTAASATARPLSKLSKPVVLLISSDGFRFGYQYKAPLPHIRRLFANGTSAAEGLIPVFPTLTFPNHYSIVTGLYPSSHGIINNYFPDPISGDYFTMKNHDPKWWLGEPLWATAAAQGVLSATFFWPGSEVTKGSWNCPDKYCRHYNGSVPFEERVDTILGYFDLPPNQMPQFMTLYFEDPDHQGHQVGPDDPSITDAVVHIDEMLGRLIAGLEARGMFEDVNIILVGDHGMVGTCDRKLVFLEELAPWIELKSDWVLSVTPLLAIRPPDGVSPAEVVAKMNEGLGSGKVKNGEYLKMYLKEELPTRLHYSESYRIPPIIGLVGEGYKIEMKRSKRNECGGAHGYDNAFFSMRTIFAAHGPRFQGGRTVPSFENVEIYNVMASILNLKPAPNNGSASFPGTILLPNK

SEQ ID NO: 265331 - protein, 71 aa, Zea mays
  Clone ID: MRT4577_173589C.1.pep
SFTFYTTNPSGDGPTYTDFASNKGYNNITFYTPIYIKCSVPDDHTNILYDVISDLNSVLIVGWKAKDINDD

SEQ ID NO: 265332 - protein, 114 aa, Zea mays
  unsure (1)..(114): unsure at all Xaa locations
  Clone ID: MRT4577_17358C.1.pep
DDGYWIDIVRVCYLDIIGYVSHDRQAPAVWSKNSCTPKYDSIIMLISLKMDIINHGDVSTVTQSKSKFFDMNMXRYNDMPIKDVTITAPGDRSNSAGSHMCDSSGITITNTVFG

SEQ ID NO: 265333 - protein, 62 aa, Zea mays
  Clone ID: MRT4577_173590C.1.pep
SSVAAISLQMADLFTSIASPTCMASGVSAGMYVQFGLVRICRIAPGVVPATLSLYPLSAPFG

SEQ ID NO: 265334 - protein, 114 aa, Zea mays
  unsure (1)..(114): unsure at all Xaa locations
  Clone ID: MRT4577_173591C.1.pep
RSVSCGSSGVWRVQDCLAVSRAFGDASMKAWVTCEPEVSRRRLTPDCRFLVVASDGLWNKGACQEAVDVVXRPARXGAGASSSVESCKDLVALARKRGSRDDITVMLVDLQRFI

SEQ ID NO: 265335 - protein, 64 aa, Zea mays
  Clone ID: MRT4577_173592C.1.pep
GWWGSCIWRRHDDYIRPDGPDKVVDSVRAMAGPATVHDFEDRSFLYCLLLRGSLIRCYWRVSDA

SEQ ID NO: 265336 - protein, 154 aa, Zea mays
  unsure (1)..(154): unsure at all Xaa locations
  Clone ID: MRT4577_173593C.1.pep
MSEYRCLRGRLCCGTXDHSVHSGYXTTGRASNARSVLNRETQXRPTGEGXLTFSTEDATPNAINGMNGKELDSRNITGNEAHTTGRRGGRGSXGTRGXRGGCRYXRGGRRDGGRGYCGGGQYCRGGRGYGGGGRGYXGGNRGGGYGNSDGNWKN

SEQ ID NO: 265337 - protein, 162 aa, Zea mays
  Clone ID: MRT4577_173594C.1.pep
MPPGKKGPRVPRHHADTEPTPTDYEKQRAITIMKNNQMMQRLGIRQLQSMMASIPSGRMNDNAPQESGSLYDGDDIEDSEDEMESLVDKSVGSHIPNNGAEISSKNTRASKRVVAPGVQEQPIRVTRRRSATINQESNQNIMAGILSDSCDATNQDCIQRIS

SEQ ID NO: 265338 - protein, 58 aa, Zea mays
  Clone ID: MRT4577_173595C.1.pep
NVNPLGELPLAVAFELHKLDHPDLVRIDLCICPYSRLRELAAAAEKDPPIGLLDAAAM

SEQ ID NO: 265339 - protein, 73 aa, Zea mays
  Clone ID: MRT4577_173596C.1.pep
SGACPPCGCSRCQVCIVAVWQQQSVLVYLCPVLQILVPSHDALQGLDALLQLEVQLQDFDQGVRRGPVVQRET

SEQ ID NO: 265340 - protein, 57 aa, Zea mays
  unsure (1)..(57): unsure at all Xaa locations
  Clone ID: MRT4577_173597C.1.pep
FWLLLSFERAILAALANSEGPAIGIDLGSTYSCVGAXHHVLVEIICNNQGNRSTPTY

SEQ ID NO: 265341 - protein, 60 aa, Zea mays
  Clone ID: MRT4577_173598C.1.pep
GRHETAPSGRTPSLKLKLGRPSTRTIRGGEGVRGTGRRNRADSQSGYGLEAERESGEGRS

SEQ ID NO: 265342 - protein, 199 aa, Zea mays
  unsure (1)..(199): unsure at all Xaa locations
  Clone ID: MRT4577_173599C.1.pep
PAVSDESSXXTXXDDXXDHKDSSAPKKRKSGNTSAEDEPSQATVVRYAAVESPYPAKGRSASKLPVSAPGRAALPSATPNLNIGMDIWNASPALAVPAVQGEVSPGLALVRRDGVTQLDEREIKRERRKQSNRESARRSRLRKQQECEELARWGHVESPPLQPCIIYGSSRCALCFFVCCVKTIDVTKPREPRGFFYVC

SEQ ID NO: 265343 - protein, 307 aa, Zea mays
  Clone ID: MRT4577_17359C.1.pep
MDAQAQPFTRRALSRSCGSKGTRLSVDHPPPPLAGGPSADKGVAGSSSSLAVPPEPARREGPPSDAEKVREKFSKLLLGEDMSGTGKGVTSALALSNAITNLAASVFGEQRRLQPMADDQKSRWKKEVDWLLSVADHIVEFVPSQQVAENGTSVEIMITQQRQDLQMNIPALRKLDAMLLEYLDSFAGKQEFWYASKDAGGPGKGSTPRQDDKWWLPTVRVPPDGLSVAYSKWLQNQKDLVAQVLKAAMAINANVLMEMEVPESYTESLPKNGKSTLGDSVYRLITDDHFDPGELLRSVDSSDEHSI

SEQ ID NO: 265344 - protein, 90 aa, Zea mays
  unsure (1)..(90): unsure at all Xaa locations
  Clone ID: MRT4577_1735C.1.pep
MKNPDLTAHKXLVKDFVFNFVGPDGDHKCLNILDYSSNRITHAIHIELDNLLDHTDLDEEILQRVTENTRSYVSICGEAMHEIMPERTEA

SEQ ID NO: 265345 - protein, 168 aa, Zea mays
  unsure (1)..(168): unsure at all Xaa locations
  Clone ID: MRT4577_173600C.1.pep
FCCNCTCLAVPAVQGEVSPGLALARRYGVTQLXLFLQDEREIKRERRKQSNRESARRSRLRKQQECEELARKVADLTTENSALRAELDNLKKACQDMEAENSRLLGGVADAQVPSVTTTLGMSIEPPKLQLQLQQHHDEEGQLHKKSSNNSNGNCAGGSHKPEANTTR

SEQ ID NO: 265346 - protein, 271 aa, Zea mays
  unsure (1)..(271): unsure at all Xaa locations
  Clone ID: MRT4577_173601C.1.pep
HASAHASGKGKGKGGGASPEKGSSGAPSGEDDSRSSDSGSDESSETRDDDTDHKGSSAPKKRKSGNTSAEGEPSQAAVVRYATVESPYPAKGRSAXKLPVSAPGRAALPSATPNLNIGMDIWNASPALAVPAVQGEANPGLALARRDGVTQLDERELKRERRKQSNRESARRSRLRKQQECEELARKVADLTTENSALRAELDNLRKACQDMEAENSRLLVSTVPSVTTTLGMSIEPPKAQQHHDDEGQLHKKSSNNSNGKGSHKPEANTR

SEQ ID NO: 265347 - protein, 418 aa, Zea mays
  Clone ID: MRT4577_173602C.1.pep
MFTLTMSHGPPVLAPPRTSGGASRSRRAAQASMASSSDEQSKPPESPAAAAVVTAAAPPQTHAEWVASLQAYYAAAGHPYAWPAQHLMAAAAAGAHFGTPVPFPVYHPGAAAAYYAHASMAAGVPYPTCEAVPAVALPTGRKFTSIGERGSASPEKGGNEHPAAKDASRSDDSGSDESSETRDDDTDHKDSSAPKKRKSGNTSAEGEPSQAAVVRYAAVESPYPAKGRSASKLPVSAPGRAALPSATPNLNIGMDIWNASPALAVPAVQGEVSPGLALARRDGVTQLDEREIKRERRKQSNRESARRSRLRKQQECEELARKVADLTTENSALRAELDNLKKACQDMEAENSRLLGGVADAQVPSVTTTLGMSIEPPKLQLQLQQHHDEEGQLHKKSSNNSNGNCAGGSHKPEANTTR

SEQ ID NO: 265348 - protein, 44 aa, Zea mays
  Clone ID: MRT4577_173603C.1.pep
HLALDVAQVRVERHRHGYGRRVASTRPARLVTGYLVSGTSAAGW

SEQ ID NO: 265349 - protein, 175 aa, Zea mays
  unsure (1)..(175): unsure at all Xaa locations
  Clone ID: MRT4577_173604C.1.pep
LLSAPSRNPTPSPAAAAGGLHGRVPGQAHLPRGGLGLAPRRSSRALRVRAWVAIEKETPESEPRGGGVREDWHGSGSVRARVEAMIRRVQGEVCAALXEADGGGARFVXDVWARPGGGGGVSRVLQXDGLVFEKAGVNVSVVYGVMRADAYRAGKGGGVKNGAAAADGHKPGPVP

SEQ ID NO: 265350 - protein, 67 aa, Zea mays
  Clone ID: MRT4577_173605C.1.pep
EASNKTKLDSLWRGLGSWPEKDTSVFCSYLDTLLENKGYILTKLWGTPGPGENLLTGGYPHAAWGYF

SEQ ID NO: 265351 - protein, 136 aa, Zea mays
  unsure (1)..(136): unsure at all Xaa locations
  Clone ID: MRT4577_173606C.1.pep
LVRIDGCNAPTPVRDGGADRVGWLKHDLRIDYHPGLDDDVLKPLCPVVPVYVFGRRILAGYSDXMLELMLFALKDLKMTLKCHESDLLIGLGNADDVXSXLENEVQACLVYTEEEVDYGVRDVIANDESSIFNEAC

SEQ ID NO: 265352 - protein, 138 aa, Zea mays
  unsure (1)..(138): unsure at all Xaa locations
  Clone ID: MRT4577_173607C.1.pep
PITPPPGNDLVAGSLSDVSTQVARRLQHRTCIIVGLTQGRQRSQILLLRNTLXYDLSYREGQASHMQRRTTADGKVLIFSTYPAXFMDIIXSIPHTGENYXLLYDTXARLTLHSVRHHDAKFNPCKDNIVQISQKGIP

SEQ ID NO: 265353 - protein, 106 aa, Zea mays
  Clone ID: MRT4577_173608C.1.pep
YPRACRDVQPPRVSSRLTPPPYHPFTYRAYSHVMAYRLAVAKDEIFRREIIFHSAYEFAMARENKVFMLKKVTEIKGTEGVVDHDRPKNVYELTGIYGGPKMACSC

SEQ ID NO: 265354 - protein, 96 aa, Zea mays
  Clone ID: MRT4577_173609C.1.pep
GPTSMLPSSFSSISFCAYQDCPFPLGNNPSWCCRASSKLQLNFCNPLSSYLCGFYMAICLRKTPWTNQQSPLKKKKKKKKKKGAPAIEDPRTRARA

SEQ ID NO: 265355 - protein, 118 aa, Zea mays
  Clone ID: MRT4577_17360C.1.pep
PIAQPERMGKHASATTIHMLLQKLCWRQERQLPVHAIFIPRERHAHPSCTCCCWCSQVVRRGRGLPAAACCREQTASTLARAFCIRVCPSESDTAPPSSRRSVGASAFGPRMVGIHQH

SEQ ID NO: 265356 - protein, 136 aa, Zea mays
  unsure (1)..(136): unsure at all Xaa locations
  Clone ID: MRT4577_173610C.1.pep
MKSRTATLAVGILLLVALVVVAEADTDAGDVAALGNLYSSWNSPAQLTGWSASGGDPCGAAWAGVSCSGSAVTSIKLSGMELNGTLGYQLSSLQALKTMDLSNNHLHDXPYQLPSNLTYLNLAXNNFSGNLXYSIS

SEQ ID NO: 265357 - protein, 85 aa, Zea mays
  Clone ID: MRT4577_173611C.1.pep
ARVEPDEDQGTVLAAKHNTALLICLSPSETPARGDSPTRAGLFCPVQGHKPPAEGDGHLTTGRSPHEHQRPKPHQRRNLLAGAGE

SEQ ID NO: 265358 - protein, 131 aa, Zea mays
  Clone ID: MRT4577_173612C.1.pep
SKLNILKLAPGGHVGRFCIWTESAFRQLDALYGTWRKAASLKSNYNLPMHKMINTDLRRILKSPEIQRALRAPRKKIHRRVLKKNPLKNLRIMLKLNPYAKTMRRNTILRQARNHKLRVDKAAAAAAALQA

SEQ ID NO: 265359 - protein, 187 aa, Zea mays
  Clone ID: MRT4577_173613C.1.pep
MALLRALRRALPALSSPAAVLPRRAPHPLPPPPAPRRFLDPIGLRSFSAAAATASQAPPMGATLFGGLMDTRFPKRRPGFANRRKRASLRPKGPYYWVKCKPDEPIPVSQPNQGSVRGRKEKKRIKQRKDFIMAEKKKRRAQYSAAVKRKEAERTERKMAAVARERAWAARLIELKQIEEDVKAVMA

SEQ ID NO: 265360 - protein, 42 aa, Zea mays
  Clone ID: MRT4577_173614C.1.pep
CIEFMLVSKYYSIKCKLECYSYKLYRCRNKSYRKVRWTLVCL

SEQ ID NO: 265361 - protein, 162 aa, Zea mays
  Clone ID: MRT4577_173615C.1.pep
IKHHQTFLSVHGRKAMFLPPISFFINPPCLASELLLYISIDMVLPFPGPSRAIANYIVTHLYEEAESTRSTWLAAEHMLKRDMYKAIQTDVYGWSRAREKERSCTLCVSPAPPARSGTIACTACIVALFSPLDPHISNLQLFNSSPHRFLGPILLLLPVSCK

SEQ ID NO: 265362 - protein, 68 aa, Zea mays
  Clone ID: MRT4577_173616C.1.pep
RPPLLPQGSLGCHRRRDRGDLRYSTMHARARTETKGCAIAYRYVDALDVLPTPRYKGSEFKKSEEKIC

SEQ ID NO: 265363 - protein, 73 aa, Zea mays
  Clone ID: MRT4577_173617C.1.pep
GLTKTKRGSLRAWCGILIDKYTRQTLPACFANCHYNCQAFSAPMKILSPVVPCAQNVETMPNYSRHAVRQLEL

SEQ ID NO: 265364 - protein, 107 aa, Zea mays
  Clone ID: MRT4577_173618C.1.pep
ILVSYLNWNKKLGTFTEQNRLKFGPRSGGGDTHSRGTHPGPSPKPGGPQPNPIVGPQAWRPKTTTLVDTHFGAQYQGWGHNTPWGVPLPGRTTPQGSPSELLPNPAL

SEQ ID NO: 265365 - protein, 76 aa, Zea mays
  unsure (1)..(76): unsure at all Xaa locations
  Clone ID: MRT4577_173619C.1.pep
VFDPNIFSNGSICCAILKXQCMTDLSIYKVLLTMWSLLNDFNLWDPHVSEIAHMYNTERPKWESXGRQXTQKYAMG

SEQ ID NO: 265366 - protein, 97 aa, Zea mays
  unsure (1)..(97): unsure at all Xaa locations
  Clone ID: MRT4577_17361C.1.pep
YYLLLALFALLVSATNAFFIPQCSLAPSAIIPQFLPPVTSMGFEHPALQAYMLHLALAVSVLHQPIAQLQQQXSLAHFNLHTISTHHQQQYLPSLIH

SEQ ID NO: 265367 - protein, 446 aa, Zea mays
  Clone ID: MRT4577_173620C.1.pep
MADLETLATPAPASASASASTKKKKKHSKKHKAASDAPTNVTVDASLMGGSSYVAAAPVVGYFPSGYDPLTTAAGAEPAPGTQLFRHEKHPTWVDLVVRSPGGGHDFVGRSYAGEAAVPQVCDYALGVLDKASGTLRIVPIAGKKILRLEPHLEVQHPAHSQHSEVASEAASAAGNDELKVQDLTMMYGAKTDRDKDNKWRSLKEQRNDPSAYEDIDLGISETNVNANDRQEPVLVRNIPPYDPTADTSENAYLLDEIIPKSMREHLLEIVRHFESGEISSKGYGSFVSKRVHKLKELQGEDKKRFAWILSYIQHLLSLLARNGSMSNRKWKGRNENQISHGPATPQAVYRRLLFMFTEPGSSVMPTEKKELLTNYILVLTLFADDFRSNPSDICEDLKMTRQNLKPYYDQLGCKSVTEGAFKSTFMTLPAPLKFPKEVTRKRRRQ

SEQ ID NO: 265368 - protein, 188 aa, Zea mays
  Clone ID: MRT4577_173621C.1.pep
NSIIDAYIESGDTEQAFLLVEKMKNSGVSASIVTYNLLLKGLCRSSQIDEAEELIYTLRNQGLRPDVVSYNTIISACCNKGDTDKALELLQEMNKYGIRPTLRTYHTLVSALASAGRVHDMECLYQQMLHKNVEPSSSIYGIMVDAYVRCENDSKVASLKKVMSEKGIAFDDTKRSNHELDRIIASPI

SEQ ID NO: 265369 - protein, 76 aa, Zea mays
  unsure (1)..(76): unsure at all Xaa locations
  Clone ID: MRT4577_173622C.1.pep
MMRCAAAALAVALIAAVAAATAAXSPAACTCARTCAPPFLDAVAVRCPFVRIDASPRLEVTRETVDTELDLRERGA

SEQ ID NO: 265370 - protein, 256 aa, Zea mays
  Clone ID: MRT4577_173623C.1.pep
MRVVLEVKTIDHPTEQRAVLGECMLCSILHGRLNSITLEDEIMLRESLCTLKVILQVAYQAVTPEVKVRIGSIVLRMAITIPRLAVLESAQTLIPFMSHPISEEVAHLPISHDPFCLGLYKPLNTTNLRVPHFTLMIASFSQVVSQQIGLYGEVRRCGGSSEVEVESEPLDRARRRPSAEARAESEPWGWAKRSLSSSGAEPESELRVGRSGVRRLPEPSPSPSPRSGGAEFAVFRGLARVRALGRAERSSPSSGA

SEQ ID NO: 265371 - protein, 53 aa, Zea mays
  unsure (1)..(53): unsure at all Xaa locations
  Clone ID: MRT4577_173624C.1.pep
LSYSSLSSFIYYSPQPLLGLAQFQNISVSLIXTKSSLNLIDLFSPYQLPSSKT

SEQ ID NO: 265372 - protein, 157 aa, Zea mays
  unsure (1)..(157): unsure at all Xaa locations
  Clone ID: MRT4577_173625C.1.pep
MHIATCVWQEKASAGGMGGAAAGGGGCAGGEWGAARAKVASVLGVAGCALNCAVSFVVFSALDVLDVVLCLVYKLVDYAAEAEWKXAPPAAGGPKVVRLSASSAKLQLEDVSDTLYVRPSLLADATRAGNGSGSGVAPALTVSPAIAELIRGKMDRA

SEQ ID NO: 265373 - protein, 179 aa, Zea mays
  unsure (1)..(179): unsure at all Xaa locations
  Clone ID: MRT4577_173626C.1.pep
MHIATCVWQEKASAGGMGGXLLLVVGGCVGGEWGAARAKVASALGVAGCALNCAVSFVVFSALDVLDVVLCLVYKLVDYAAEAEWKSCYCAAASGPRAAQLPLAAAPPAAGGPKVVRLSASSAKLQLEDVSDTLYVRPSLLADATRAGNGSGSGVAPALTVSPAIAELIRGKMDRAPRP

SEQ ID NO: 265374 - protein, 83 aa, Zea mays
  unsure (1)..(83): unsure at all Xaa locations
  Clone ID: MRT4577_173627C.1.pep
ARRARASGGGPDMHVEKKEFXPGEYKIVDLVLPNTSDSYRLFCMIFFSRDFYVTRCLFPYSSLDIIVFYKFFFSYFFFPYLIF

SEQ ID NO: 265375 - protein, 99 aa, Zea mays
  Clone ID: MRT4577_173628C.1.pep
MGFDVGVVPFNPDGWGPPDAPGAAPLLGGAVATASIPFAPFSRSDKLGRIADWTRNPGHPGAHGHHAAAASRDSVFDFSSDDDSLAAAAEDSSFSFVDA

SEQ ID NO: 265376 - protein, 97 aa, Zea mays
  Clone ID: MRT4577_173629C.1.pep
FWTAGGRSLVSRLTSPGLRRHTSFLGRPKLNQLAAVYHRLAWETPGVPHLICLAEIPPFAGWRNTKRAGTVCPSKQWPTLNGYWNPPCTGSLSPGVV

SEQ ID NO: 265377 - protein, 114 aa, Zea mays
  Clone ID: MRT4577_17362C.1.pep
WTTAQGWARWWKAGSSSGTWCTTTSRPPSATAATPATTRRTLSSSLTRRPATPTTRSRASTAATSSSWPRTTSPTPAPAIFSSSRPTSARTARTSRPPSTTMTTSPTTTPGPSS

SEQ ID NO: 265378 - protein, 89 aa, Zea mays
  Clone ID: MRT4577_173630C.1.pep
ELAELLIAKCAQKKYYMQWHQWAWLLGGSTWESAPAGAGWVGAHLKNRGRRLFFLDGARTVDLKAAWRGNIFLENSRHRIKYKNTPLEF

SEQ ID NO: 265379 - protein, 217 aa, Zea mays
  Clone ID: MRT4577_173631C.1.pep
GDQRRKIARIKLQGLNVTPKILVLTRLIPDAKGTKCNVELEPVENTKHSHILRVPFKTENGKELRQWVSRFDIYPYLERYAQDSCAKILDILEGKPDLIIGNYTDGNLVASLMSSKLGVTQGTIAHALEKTKYEDSDVKWRDLDQKYHFSCQFTADMIAMNTSDFIITSTYQEIAGSKEKPGQYEHHYAFTMPGLCRYATGINVFDPKFNIAAPGAD

SEQ ID NO: 265380 - protein, 106 aa, Zea mays
  Clone ID: MRT4577_173632C.1.pep
FVLDRGRTFAPTHGPTRSASCSRPRYYGDHADHSQPLPQPGVVNGDHQLGRSLHLHQHSTVGPKRAAHGILTVQLMGRTCDRAHGLIQQNDLLLDGDQSSRHRRAC

SEQ ID NO: 265381 - protein, 158 aa, Zea mays
  Clone ID: MRT4577_173633C.1.pep
MEAAASALLLLGLSASLAPFASAAAPYDPPTVPELMDQLGLPRALLPETARRYLLHDDGTFELFLDDGCVVEAGGYRVGYDIKLSGTVSPGSVTGLEGVRVRVLFAWVPITGVEAADGEVTVHIGPIRKSFPAVGFKSSPRCIIGLAAADILPPLVEQ

SEQ ID NO: 265382 - protein, 137 aa, Zea mays
  Clone ID: MRT4577_173634C.1.pep
EMRFPSCFMPSVEPLYINDLSRSESSAIHEKSDIGWQRSSTSHLCDAYVRLGELHGVVDIALSLRQLVGTVLLLLVAYRWLRRPIIHRGALAQFSSYGAQRIGASYRRTGNCRVLVTGREVGARKGGESLEKKRIVG

SEQ ID NO: 265383 - protein, 65 aa, Zea mays
  Clone ID: MRT4577_173635C.1.pep
NSRSSTHETKILNCFTKRATQTESNQPDTCIDKTFASEGRATIYSSEYKPATEEMAEPLKEGCGP

SEQ ID NO: 265384 - protein, 227 aa, Zea mays
  Clone ID: MRT4577_173636C.1.pep
MAVSGMGAESRRGWENHTPDEGAPRAQPELRNLNTSPTQLVKSVVILQTAHQIGSLPVVRECLMTMLVDYTTVLDRPGVSVHSPAQQGVEHVVKVTTVSGVTGDGSGDPTFRLLLLKKHGDVSRAFFVVVSVRISSNSSSCSRDALWWCKGRLCGAQGRDASQTPPPTVAGNKNLVAPYLVDDVPAPQAGGGAASPSDSADRSLCGEADASQDERVGKESLICMLCA

SEQ ID NO: 265385 - protein, 150 aa, Zea mays
  unsure (1)..(150): unsure at all Xaa locations
  Clone ID: MRT4577_173637C.1.pep
AGRPFAPFGKRDRGVIHTDFLRKLWRNKESHYRIGXTCVAFVILVCDMGKAELDGANEYTENQPGSLNTTDALIADLNNYDIXVFHIEDIXYCHGYISDGDHFTEHVAPITAHKQYMVDIGNHDLDWPDTAALWDELDXSXGECEVPGET

SEQ ID NO: 265386 - protein, 93 aa, Zea mays
  Clone ID: MRT4577_173638C.1.pep
LSSNVSPNYLHIKISKVMISHQTSLKLGNIYSTTLVANPTKMHPQKRNRCHLNQCTMTDSYKPLQLKPMPNFSKQSRFSLVKHNRVSTDHLKM

SEQ ID NO: 265387 - protein, 169 aa, Zea mays
  Clone ID: MRT4577_173639C.1.pep
MEHSGAKKSNKITEVVRMQQMLKKWRKLSVTPKEPSSPTSGGGGGNAGESKTRKFLKRTLSFTDGPPSGSPPPPPKGHLAVCVGPAMQRFVIPMEYLKHRAFAALLREAEEEFGFQQEGVLRIPCEVPVFESILKAVEKNKKDAAFCYCGVEYAADEVGRGTPNNPLCR

SEQ ID NO: 265388 - protein, 132 aa, Zea mays
  unsure (1)..(132): unsure at all Xaa locations
  Clone ID: MRT4577_17363C.1.pep
MAATARKLIVEVVEARNLVPKDGTGTSSPYARADFDGQRRKTRTVARDLNPAWNEALEFDFPPAGVDPVAGEPLEVTVLHDLRIGPTRRNNFLGRVRLDXRQFVRKGEEALIYFPLEKNKGLFNFNWVRGDI

SEQ ID NO: 265389 - protein, 102 aa, Zea mays
  Clone ID: MRT4577_173640C.1.pep
IVGNINPCHTILNSKRIITPSILYNTLSFQTRLYRSYKSTSRCFLVGNKRDELFHSCADSREALPSSILFIVFCDSSTSLFQLVVNVTDIKIKVCLKGVTDK

SEQ ID NO: 265390 - protein, 53 aa, Zea mays
  Clone ID: MRT4577_173641C.1.pep
TTFCLTTPAFVPARQQKSPKFFFSCFSLVPKQSYPDSKYACLNAGMQNHSSIA

SEQ ID NO: 265391 - protein, 198 aa, Zea mays
  unsure (1)..(198): unsure at all Xaa locations
  Clone ID: MRT4577_173642C.1.pep
GKICYVLRHPTCSSFSSYSCPTSTGMRKYMGALKDTTTVSIAKVNSDYKELDIAIVKATNHVENPTKEKYVRDIFYHLSPGRPRADVAYCIRALGRRLSKTRNWAVAMKTLIVIHRALREVDPAFREELISYGXRSSSHMLYLSYFKDDSSAEAWDYSAWVRNYALYLEEKLESFRVLNYDVEKDPLQIRDLDTNGLL

SEQ ID NO: 265392 - protein, 87 aa, Zea mays
  unsure (1)..(87): unsure at all Xaa locations
  Clone ID: MRT4577_173643C.1.pep
SSTARACTASHPAHRYAPPGHVWQCAAAGEPPHARNRRPPRPQYLSTRASXEREDALPGRSQPPPVKTVWVAKQPCFLLGTNGRDLA

SEQ ID NO: 265393 - protein, 43 aa, Zea mays
  Clone ID: MRT4577_173644C.1.pep
RDWIVSIRLYFRMTYGFHKVRVNRTTSLDTLLMNDFRSHIDEP

SEQ ID NO: 265394 - protein, 42 aa, Zea mays
  Clone ID: MRT4577_173646C.1.pep
WACVVGNEKLFMIGGHEGDFMTKPGSPVFKCWWNYREACHHQ

SEQ ID NO: 265395 - protein, 57 aa, Zea mays
  Clone ID: MRT4577_173647C.1.pep
PTLTTLVVIAETLGKWGYPYSKERLDLLPRHNKCTTQLHTYFHAKAAPIQELLSHKV

SEQ ID NO: 265396 - protein, 631 aa, Zea mays
  unsure (1)..(631): unsure at all Xaa locations
  Clone ID: MRT4577_173648C.1.pep
MARSREVAGWGTVAGGGAAAVEKAVRCLGRGVDMTGDLRLKHCKDAGGCLVVRSAGRKAAEEKAVVPGFGVVADLPADVRCGKGDRIRFRSDVLEFNKMSEAFNHRNSLAGKIPSGLFNSCFDLESGSWAEDAAATKCLAFDGYFISLLDLRLDCRPLALADHVVGDVPAAWDPAAIASFIERYGTHIVVGLGLGGQDVVYVKQDRSSPLSPSEIKEHLDRLGDQLFTGTCTLPPSNRKLREHKSKVPEAFNVFDAQVTXRAPRTNGYSXVSCKEGVTVIHSKRGGNAAASDHSEWLLTVPATPDAISFKLVPITSLLKGVTGVGFLSHAINLYLRYKPPTGELRYFLDFQHHRLWAPVLGDLPLGPCSNRQAPSPALNFSLVGSKLYVSSSEVVVPRLPVTGMRLHLEGKKNNRLGIHLQHLSNTPAFIGGTPANEQPAAAVWRGSETISDARYYEPVQWRMFAHVCTVPVKYDPRWAGAGAGPPSAYVVSGAQLHVKAHDSTNILHLRLLYARLPGHAVVQSRWAHGAATRLSSGRGSFFLSKSLASGSGGVDKEQQHPGRVHVDSGVFAGGPPVPVGTQRLLRFVDTSQVTMGPQDSPGYWLVTGAKLDVEKGKISLRVKFSLLAPVS

SEQ ID NO: 265397 - protein, 54 aa, Zea mays
  unsure (1)..(54): unsure at all Xaa locations
  Clone ID: MRT4577_173649C.1.pep
HCSLHGTVGDDNANKNEGALRISKDMIXLVVMTVMTHLQSEVVGSTLLALCRIW

SEQ ID NO: 265398 - protein, 103 aa, Zea mays
  unsure (1)..(103): unsure at all Xaa locations
  Clone ID: MRT4577_17364C.1.pep
GLLYPTGWRAANSRCRADKFLTSAGNNRWDPYFKDCIGAIDGTHVRATVPRDMEHAFRGRKSYATQNVMVGVDFDLRFTYLLAGWEGTTHDAYVLXDALERVN

SEQ ID NO: 265399 - protein, 53 aa, Zea mays
  Clone ID: MRT4577_173650C.1.pep
HASEKKKKIKKKKKKKKKKEKIKKKKKKKKKKKKKKKKKKKKKKKKKKKGRPF

SEQ ID NO: 265400 - protein, 237 aa, Zea mays
  Clone ID: MRT4577_173651C.1.pep
MCGGAILAGFIPPSAAAAAAKAAAAKKQQQQQQQQQRSVTADSLWPGLRKKAAEEEDFEADFRDFERDSSDDDAVVEEVPPPPASAGFAFAAAVEVAPPAPARLDAVQHDGPAAKSVKRVRKNQYRGIRQRPWGKWAAEIRDPSKGVRVWLGTYDTAEEAARAYDAEARKIRGKKAKVNFPEEAPTVQKSTLKPTAVKSAKLAPPPKTCEDEPFNHLSRGDNDLFAMFALHDKKGSA

SEQ ID NO: 265401 - protein, 51 aa, Zea mays
  Clone ID: MRT4577_173652C.1.pep
DLLVQERWNSGADHAQVSIRCDEYLYIYPYTIIHIMSVDAICCLLSVVSHS

SEQ ID NO: 265402 - protein, 120 aa, Zea mays
  unsure (1)..(120): unsure at all Xaa locations
  Clone ID: MRT4577_173653C.1.pep
IGANGPRLPPIWQLQPADKPPKKXLPXRWGQTQLDXVYPKSXWXGTPVIEXXNKRAVDFXIETXGEXALXXEIGLWDXHXKRPKRRARKXXRXLQXXPKQXSRXSKINANXXGXXGXIGK

SEQ ID NO: 265403 - protein, 226 aa, Zea mays
  Clone ID: MRT4577_173654C.1.pep
MGKIEYGVVARGAVVLAEHYGAAAAGGNAGAVARQVLERLPGGGDDDCNVSYTQDLHVFHVKRTDGLTALCMADDAAGRRVPFAFLEDIHGRFVKAYGRAALTALAYAMNDEFSRVLAQQMDYYSNDASADRINRMRGEMDQVRSVMMDNIDRVLERGDRLEVLVDKTATMQGNTVRFKRQARRFRNTMWWRNVKLTAAVIFILTVIVYVLLAYMCRGFTIPSCFP

SEQ ID NO: 265404 - protein, 86 aa, Zea mays
  Clone ID: MRT4577_173655C.1.pep
IPLIYTPVASSSRRPRRPATSESSPPRYYCFCCTPSSATSFATRRLSFVMFQLCVRPFHIYPHIYTHTTVLFSRIITRRTRAHQLH

SEQ ID NO: 265405 - protein, 169 aa, Zea mays
  Clone ID: MRT4577_173656C.1.pep
MVMVAAAAVLLALAAVATEVAAAGTTYTVGAPDGLWDMQTDYAQWVKSKTFRPGDTITFTYSPELHDVVEVTRAGYDACSSANNISAFRTGNDAVPLTAVGTRYFLCGLTGHCGNGMKIRVDVVAAAASPSAPGPAAAAAAPPTTSSPCNVGVVAASLLLLLLHAVVSY

SEQ ID NO: 265406 - protein, 50 aa, Zea mays
  Clone ID: MRT4577_173657C.1.pep
ACRGSLEACQGCFVSNTTPTEAHLSSRTPCLRNALESELFKTDLIMWHIF

SEQ ID NO: 265407 - protein, 73 aa, Zea mays
  Clone ID: MRT4577_173658C.1.pep
AHRFPLSARVDNVHKISAADKYYPVPSVAITEGAGTVCNTTARVIVWDPMAPALYSVFDHQKCGHIGNVKLLP

SEQ ID NO: 265408 - protein, 46 aa, Zea mays
  Clone ID: MRT4577_173659C.1.pep
LFHFTLYSFTNNYPDLTYHLTIKSSSNHSTITHGRIYFTPSEKAIL

SEQ ID NO: 265409 - protein, 57 aa, Zea mays
  unsure (1)..(57): unsure at all Xaa locations
  Clone ID: MRT4577_17365C.1.pep
LLYLVALAYEIQLVFAGHLPFFFFFKPLCGGGGALFFSLSPLRGGGGPPRGGLFFXP

SEQ ID NO: 265410 - protein, 123 aa, Zea mays
  Clone ID: MRT4577_173660C.1.pep
MHARSSCPALAAFTYSPELHDVVEVTRAGYDACSSANNISAFRTGNDAVPLTAVGTRYFLCGLTGHCGNGMKIRVDVVAAAASPSAPGPAAAAAAPPTTSSPCNVGVVAASLLLLLLHAVVSY

SEQ ID NO: 265411 - protein, 156 aa, Zea mays
  Clone ID: MRT4577_173661C.1.pep
GKLVLVVIDHMNRKYLYNADNDTGTSQAHTSPACSYYRHEHDVARTLPPGRRPCISSVGWQCRVAWAWRGSGDGGRLLDVLERAEPHLLVQHRASCCSRIRGGSVSGDAQLVGVHRPLELAAAAMQKIDRSGAEEIHHTQQWKRCAVPPARPRERG

SEQ ID NO: 265412 - protein, 74 aa, Zea mays
  Clone ID: MRT4577_173662C.1.pep
MAAAASSKGRAIAGSFVSRVLAGKAASPAAVDTNQLGVAADAAAANAAAAGGTVLDQKVWFRPLEDVEKPPPVA

SEQ ID NO: 265413 - protein, 119 aa, Zea mays; identical to SEQ ID NO: 242975
  Clone ID: MRT4577_173663C.1.pep

SEQ ID NO: 265414 - protein, 61 aa, Zea mays
  Clone ID: MRT4577_173664C.1.pep
GFPPLALIMGQNIPALGGLFQYQLPSFPPHPCGVSPALPPPYLFLKFGEFPPSLSLYLYML

SEQ ID NO: 265415 - protein, 155 aa, Zea mays
  unsure (1)..(155): unsure at all Xaa locations
  Clone ID: MRT4577_173665C.1.pep
RILTGQRTRTNARANGGDCSCLKENNYLHTGISFRIRINRLLXLTPKGIDXTFGLYGLMANTNVFISGIXATPLIQCSKGRHDXHMLXQFYLHAARNGPFIDWPAADQXHCCNEMLLHLLMIRMLKQQLQLHDEPVHVAGVAXWTGDTELRGLCV

SEQ ID NO: 265416 - protein, 42 aa, Zea mays
  Clone ID: MRT4577_173666C.1.pep
PALCKMPAIPQSKCRLVLFERIKVEYIFLKRLMLQRSLNQHS

SEQ ID NO: 265417 - protein, 149 aa, Zea mays
  unsure (1)..(149): unsure at all Xaa locations
  Clone ID: MRT4577_173667C.1.pep
LPSLSRVASLPTQCCVLAALAKNYPTVXAPVSEAVEKARRVLRALIAEKSCAPLMLRLAWHSAGTWGGSSWSGGPFGAMXXQCGLAHGAVAGLVVAVRLLVPVAGGFPFLSSAGCYPLAGVVAVVVAGGPVVPFHPGGGGTPEPPPVGR

SEQ ID NO: 265418 - protein, 189 aa, Zea mays
  unsure (1)..(189): unsure at all Xaa locations
  Clone ID: MRT4577_173668C.1.pep
MMGEAGEEESAAAPAEVNRQAELDEQRCLAEALDALSSLVSASLSATLFPLKWQLTRDRLDRLHACLADITVPSGDESGEDRRDAFVNLLRDVAATAREARELVPRSQGRQYGGGKLRLRSDLDVLAAALDTHVARLDEVYASGXPERGRXHWVVPRPGAGATRDDVRXYVRDLFARLRAGGAEDAEGG

SEQ ID NO: 265419 - protein, 117 aa, Zea mays
  unsure (1)..(117): unsure at all Xaa locations
  Clone ID: MRT4577_173669C.1.pep
VARXLPXRPVLVAXXPGXVGGRGSAPSXCXPRPVRLCXRPXXPPFFPXSLRXSXXXPPPPAGLXXXXGRRCAGAAGSGRAXXARGAPAPCXVXXSRSRSRPGXRXACLVVLSLPXCP

SEQ ID NO: 265420 - protein, 98 aa, Zea mays
  Clone ID: MRT4577_17366C.1.pep
RQTCTPHVSSRSSIAAALHFVLLIPLHCYLFIDNNYGCLKKKIFFFFFFFFFFLKPPFFFQKTRGQRGEINPPRGAPLKIPNFSFRGPQISYFFFGET

SEQ ID NO: 265421 - protein, 224 aa, Zea mays
  unsure (1)..(224): unsure at all Xaa locations
  Clone ID: MRT4577_173670C.1.pep
TTLIPRXTTIPTKKEQVFSTYSDNQPGVLIQVYEGERARTKDNNLLGKFELSGIPPAPRGVPQITVCFDIDANGILNVSAEDKTTGQKNKITITNDKGRLSKEEIEKMVQEAERYKAEDEEHKKKVDAKNALENYAYNMRNTVKDDKIASKLGADDKKKVEEAIEGTISWLDANQLAEADEFEDKMKELEGICNPIIAKMYQGAAPDMGGGMGMDEDMPAGAGG

SEQ ID NO: 265422 - protein, 210 aa, Zea mays
  unsure (1)..(210): unsure at all Xaa locations
  Clone ID: MRT4577_173671C.1.pep
MSDAPGAAASAMGSGRELANPPSDGISNLRFSNHSDHLLVSSWDKTVRLYDAEANLLKGEFAHPGPVLDCCFHDDSSGFSAGADHTVRRLSFTSSKEDVLGRHDAPVRCVEYSYAAGQVITGSWDKTIKCWDPRGVSGPERTLVGTYAQPERVYSMSLVGNRLVVATAGRHVSIYDLRNMSQPEQKREPSLKYQTRCVRCFPXNGHGNAL

SEQ ID NO: 265423 - protein, 48 aa, Zea mays
  Clone ID: MRT4577_173672C.1.pep
SWTKKQYPCALKRLLAALSQSVYTAVSLSSTACYMRYFSQCQGILKHD

SEQ ID NO: 265424 - protein, 172 aa, Zea mays
  Clone ID: MRT4577_173673C.1.pep
VSDCPLRAPACLNPRWEEPRARDTSDRRGPYRDCAHAPSSRAAFGRRASVAGAARPCRCQAHSEATPGCLRSRGGAVARAGREYANARRGHAPRHRRGRTVAGGHACEPGAARPHAVEAVRSRTRGRPCLGLQPRHWGRVAGQRVPNRTRPPPRSRVRAPPRNAARAAAHAS

SEQ ID NO: 265425 - protein, 75 aa, Zea mays
  Clone ID: MRT4577_173674C.1.pep
RLGSSKWAPRFHPILPQQGFVTVPNKAPITQDLISAFMSDPVPGATQVCAHLRPPVNIPVPPDPDFGRPELRQSS

SEQ ID NO: 265426 - protein, 190 aa, Zea mays
  Clone ID: MRT4577_173675C.1.pep
ILHFLLPLDIVPRIPLTPLASFREETQAVLDRLSSQAPNNSPAGRSLVIPEYYETLLRSTLSIASYEACSFMGCTSSILGTLTSFIDLSPYRPCGTYHFLTSSEQLIVLANSDAVLQLLFYCLQLDPQQQLLDAAARSLSAHWQYEPIKYCIQDIVCVDYLGTISSAVPGRQAGRVALGSIELSREAILH

SEQ ID NO: 265427 - protein, 34 aa, Zea mays
  Clone ID: MRT4577_173676C.1.pep
GGYLQHYHNLALHLINVSTPFIIIFNSHTLISIN

SEQ ID NO: 265428 - protein, 439 aa, Zea mays
  unsure (1)..(439): unsure at all Xaa locations
  Clone ID: MRT4577_173677C.1.pep
IGYLEAGRVSDWVGRRRTISLAACIFLAGSVLMGLSPNFGTLLAGRCVAGVGVGYALMIAPVYAAEISSAHIRGSVTSLPEICISFGILIGYVANYLLAKLPLVYGWRAMLGLGALPSAVLAVAVLAMPESPRWLVMQGRVEQAHAVLRRVSDTAGEADVRLAEIKTAAGLADDDDGSPRGVGKGVWKEMFLHPTPPVRRILVAAFGVHFFQHLTGIEAVVLYSPRIFKAAGIATRSEILAATIGVGVTKTVFIMTAILLVDRIGRRPLYLSSLAGIIASLACLGLGLTVVERSVPRHSPTWAMALSIATVFTFIASFSIGVGPITWAYSTEVYPLRLRAQGASVGVAINRVMNAGVSMTFVSLYNAVTIGGAFFLFAGLPVLXAMFFYFLCPETQGRPLEEIXKVFGRGWRARLLSWDEAVVELPMSNTTDGNTKARP

SEQ ID NO: 265429 - protein, 81 aa, Zea mays
  Clone ID: MRT4577_173678C.1.pep
SQAPYYRADLPQRVPGRETKGQNMPKLSRTRATQRPPPSTLILGIHKQHPSMKSGGEKPLRGLEHGGDQANDPVAEPPFVV

SEQ ID NO: 265430 - protein, 100 aa, Zea mays
  unsure (1)..(100): unsure at all Xaa locations
  Clone ID: MRT4577_173679C.1.pep
KGVGHKLGXNLGGASSYELPAPPEFTFLPASPRRRSSRLSLSSPFQSRNYRIPRGWRDFGARETFFVPLWGYPSCTFAPSLDTEKKCPRMFLLVFLIVVR

SEQ ID NO: 265431 - protein, 49 aa, Zea mays
  Clone ID: MRT4577_17367C.1.pep
CAVLLPVAAPSLCCSLHEMCVSSIQVVVGPFCLSCPFPPCSWCAPGLKT

SEQ ID NO: 265432 - protein, 91 aa, Zea mays
  Clone ID: MRT4577_173680C.1.pep
HLVYMSRSKARLEIGDIPGALGDAEEAIRIAPRFPQAHLLRGDALFAMGEYSVAEDAYADALDLDPSIRRSKSFRARVERLREKLVSANNP

SEQ ID NO: 265433 - protein, 57 aa, Zea mays
  Clone ID: MRT4577_173681C.1.pep
CWCNWLSILKSFSPFQFRAVLVVFGCGSSAVNDDGRSIAHVSGVTEVCAFEAGSLSG

SEQ ID NO: 265434 - protein, 39 aa, Zea mays
  Clone ID: MRT4577_173682C.1.pep
MASSVAVSLRALAAAPLPKSSPATSCPFFVLLAPALPRR

SEQ ID NO: 265435 - protein, 72 aa, Zea mays
  Clone ID: MRT4577_173683C.1.pep
TCLSRIQDDSGRGETFLYTPTGLFKQTIWGTLALSFNNLCHMQRHLFRSILILTLKIIDKYMSNIVPYIDYN

SEQ ID NO: 265436 - protein, 69 aa, Zea mays
  Clone ID: MRT4577_173684C.1.pep
EVGGPSTGPRVTVLWILHGAQSGQSCATRRCDSYRLCEASYAIYCVKIDNMTCGTTKLLLTMARILELS

SEQ ID NO: 265437 - protein, 98 aa, Zea mays
  unsure (1)..(98): unsure at all Xaa locations
  Clone ID: MRT4577_173685C.1.pep
THIVHPPAELYKMVCETNETNLDIGIXAVLLPKDAGSSLQRSLSSGEVLVELYSPDRPLVEXAEVFLWLMAVGTILCASYWSAXWSAREADIEQEKLL

SEQ ID NO: 265438 - protein, 104 aa, Zea mays
  unsure (1)..(104): unsure at all Xaa locations
  Clone ID: MRT4577_173686C.1.pep
PILCFPLWTLVAFFATPYTTPPLFGDGVLGYVMYDCTHXYFLHHGQPSKGPARHLTRYHLSHHFIIPXKGLGITSSLWEXVFGPLPPSIMFGKKNLRRQLNSWQ

SEQ ID NO: 265439 - protein, 119 aa, Zea mays
  Clone ID: MRT4577_173687C.1.pep
FSPRGFPGWGGLKRGGPIWGGSLPPILKRVCFLYNSGPKVGGSPLPRGGDFCPIRGGRPCVKTLTQPVKKFFSFCFQRFCVGPTRGSSLPPKNCPPPLLGVSLGQAFACSQYFGPGFWF

SEQ ID NO: 265440 - protein, 39 aa, Zea mays
  Clone ID: MRT4577_173688C.1.pep
NPAPNGSLFWTRTGLLKHKLSHIIKTALGVYNQFFKDGD

SEQ ID NO: 265441 - protein, 265 aa, Zea mays
  unsure (1)..(265): unsure at all Xaa locations
  Clone ID: MRT4577_173689C.1.pep
MAALSLRQRQLDLIVRMLHLNKPPPPPGTAAEQEEEVYKILVLDSFCLSLLSPLLRVADLRKHGVTLYFPIDKPRQQVADAPAVYFLRPTQANADRVAADAAASLYASFHLNFSSALPRXGSAHRVARLADQYLDFVSLEDNLFSLAHPRSYVALNDPKAADADIEALVDAIALGLXXCAAATLGTVPVIRCPRGGPAEMVAAALDARLRHHLLAKPNLFTEASASASVASFQRPVLCLFDRNLDLSVGIQHDWSYXRPLVHDVL

SEQ ID NO: 265442 - protein, 118 aa, Zea mays
  Clone ID: MRT4577_17368C.1.pep
VCDVKRAGTRDPLTSSRACTSSRLTIFMSDLTVHPLDLQLLHVELALLEPTIKRARVRHLGGPRAPDRGGGRGRRRRSHRRRRRGGWKHGGIPHTEPLGLACVQGSNRASGKSTSQIP

SEQ ID NO: 265443 - protein, 628 aa, Zea mays
  Clone ID: MRT4577_173690C.1.pep
MAALSLRQRQLDLIVRMLHLNKPPPPPGTAAEQEEEVYKILVLDSFCLSLLSPLLRVADLRKHGVTLYFPIDKPRQQVADAPAVYFLRPTQANADRVAADAAASLYASFHLNFSSALPRPLLDRLAAATAASGSAHRVARLADQYLDFVSLEDNLFSLAHPRSYVALNDPKAADADIEALVDAIALGLFCAAATLGTVPVIRCPRGGPAEMVAAALDARLRHHLLAKPNLFTEASASASVASFQRPVLCLFDRNLDLSVGIQHDWSYRPLVHDVLGLKLNKLKMPADKSGPAKAYDLDDSDAFWVANSWSPFPRVAEEIESQLAKYKQDVDEVNQRTGGNKDGIEFDGTDLIGNTQHLMNAVNSLPELTERKKMIDKHTNIATALLGHIKERSLDGYCDCGNDMLTKGTVDRSTLLGLLRGKGTKADKLRLAVTYLLCFETPELEQVEAALRESEVDMSAFQYVKRIKSLNTQFSASSSSSATRSNIVDWAEKLYGQSISAVTAGVKNLLSSGRQLALTRTVEALMEGKPNPEVDNYLLFDPRAPRSGSGGQFKGPFREAIVFMIGGGNYIEYRSLMELAECSQPPSSKHVIYGATEIVNGVEFIEQLAELGQKAGLGLGGGNNPPLQ

SEQ ID NO: 265444 - protein, 185 aa, Zea mays
  unsure (1)..(185): unsure at all Xaa locations
  Clone ID: MRT4577_173691C.1.pep
MGTLHALVLMLLLHCISRHASSSEQEVSGDRRALLAIKLELSDPVGWLSSWNSTSSDFCQWTGVTCTRRHPGRVASLDISSRQLSGTISPAIGNLTFLRKLNLGSNMLAGEVPGAIGRLRRLHFLSLFNNSFHGEIPRELCNCSSLAHLILGVNQLEGEIPAGLGLLSQLRTLYIXYNHLVGSIP

SEQ ID NO: 265445 - protein, 87 aa, Zea mays
  unsure (1)..(87): unsure at all Xaa locations
  Clone ID: MRT4577_173692C.1.pep
SARLNFPDQLDGXGGGRQPRGAQVRRXLTAAAIRKKAAEVVARVDALHXAAAAAAAAPXPQPLSFHRRRPKNPDLNREPTPETSDDE

SEQ ID NO: 265446 - protein, 126 aa, Zea mays
  Clone ID: MRT4577_173693C.1.pep
PMSPNGGPDLTILFYDGTKMNTWTHTFDLKMVKTPKTEPPFLCPQMMSRNSPIATLRPWAEKLTFPSLNSSNIAPKNVPLDPLRTKISTLAGYLYLTPEAKLKISISNLYYPPGRAEKLPTLVASK

SEQ ID NO: 265447 - protein, 60 aa, Zea mays
  Clone ID: MRT4577_173694C.1.pep
LVLGKFDDLLFPHRFLFKIDCDNFMCGGFSLGGPKRCISTIGWWVDWQPSYCVFCLLRLP

SEQ ID NO: 265448 - protein, 130 aa, Zea mays
  Clone ID: MRT4577_173695C.1.pep
MINRACGEVSRTSTPEARSTSSSETGGREGLCHPTSWRQTESLGCENQGQSDARRKKERTLTRDTHPRSGHIKGWERAPASGFPNITATRLWRSSTGRGSEDIRKPSKSASGVISQSGNHRSVKGSTLWR

SEQ ID NO: 265449 - protein, 89 aa, Zea mays
  Clone ID: MRT4577_173696C.1.pep
ASITAFSACFSVRTESHILLLVGVCGSNNSSSFRLPSLSSRGSGSEIFLVSLGGLLAKSINGSSERLVIAPSVISVTILGGSSTLHFSN

SEQ ID NO: 265450 - protein, 68 aa, Zea mays
  unsure (1)..(68): unsure at all Xaa locations
  Clone ID: MRT4577_173697C.1.pep
XTXPRXARRRAPLLPWIGSSPRGXDXRXXLAXXXIRIRLXTRXXPRCXXTAGXXMEXIGGLLFLLSXV

SEQ ID NO: 265451 - protein, 134 aa, Zea mays
  unsure (1)..(134): unsure at all Xaa locations
  Clone ID: MRT4577_173698C.1.pep
SLRASEHPCPXHRAGDRRGVNQHPPLLVLRVHHVGLVLRTDRILLLVPSDPAHSVGGGVEVLRCGGRGEHMVSFGSDDGARDPTSGEVVGPGEEGVCFILFLYLSVVEGVDENGGVVLDAAYLLSSFFLPRSPW

SEQ ID NO: 265452 - protein, 81 aa, Zea mays
  Clone ID: MRT4577_173699C.1.pep
DLLIRPRRHDTRETELRRRRRDSCTGCGSGCSGGHRSIARRSRQWWRPDNRGAPVDLYQFLIGAALPSRGHMSPWTGLSTP

SEQ ID NO: 265453 - protein, 150 aa, Zea mays
  unsure (1)..(150): unsure at all Xaa locations
  Clone ID: MRT4577_17369C.1.pep
LSLLWLRPAPPPARAFPPPSAGANAHSSHLSPTWSRSKPRPPHQARPFSSTNPPTAEMRRAAPSAASLSTSRRGSCAASARSSRRPSPPSASPGRRPSPSXASXPSRTCSRSRYSTRTSTSSISCSCPTWSAAVAPSSPCRSTTRVRRRR

SEQ ID NO: 265454 - protein, 138 aa, Zea mays
  unsure (1)..(138): unsure at all Xaa locations
  Clone ID: MRT4577_1736C.1.pep
TSSGRGRNSARTSTRMDLGLLDPWTANCEGNTGAKNLYIIXSDNGIKDRLNRLPSACVSDMALATSTNGKTEHTKKDMPAVIVRQRPVGPRTDEAYMHFKYPAGIIVDPKGEMNRSAXVAVPSAKECADLCSMIASAA

SEQ ID NO: 265455 - protein, 47 aa, Zea mays
  Clone ID: MRT4577_173700C.1.pep
IYRGEGYLQSHIPYLSKILLHPHFTTFQLHTTPLYLQHTYYFKIINP

SEQ ID NO: 265456 - protein, 205 aa, Zea mays
  unsure (1)..(205): unsure at all Xaa locations
  Clone ID: MRT4577_173701C.1.pep
MDLSAVHAALSAKSYSAIATLCDDLFLQVASRGVATDDWPYAVHLLGHLYLNDLNSARFLWKTVPQEVKDAHPELGAIWKIGQCLWNRDYAGVYTSAQGFEWGPEISDFVTAFLESYRKRIFELLTSAYTTISIADVAHFMGMSEEDATNYAVQNGWXLDVATKMLTVRKQKPQTNQKLDASKLQRCPEMCFPXRHLMPPPPPPP

SEQ ID NO: 265457 - protein, 58 aa, Zea mays
  Clone ID: MRT4577_173702C.1.pep
LTKFVLHVSLVLLAVGIYSRTEVVFNTIIQHNDIKAFYVSFFFLLFWSYVPYKQHAHL

SEQ ID NO: 265458 - protein, 67 aa, Zea mays
  Clone ID: MRT4577_173703C.1.pep
GGPTNPGIMFFQSGAQGKIKKSRPFYPTTVFDYKGEGLGGLGLKPLALPCPRRCCPPQKAAPTRFGF

SEQ ID NO: 265459 - protein, 142 aa, Zea mays
  Clone ID: MRT4577_173704C.1.pep
MSRRWSRTIYVGNLPGDIREREVEDLFYKYGRIVEIDLKVPPRPPGFAFVEFEDPRDAEDAIHGRDGYNFDGNRLRVELAHGGRANSSSLPNSYGGGGRRGGVSRHTEYRVLVTGLPSSASWQDLKDHMRKAGDVCFSEVYR

SEQ ID NO: 265460 - protein, 86 aa, Zea mays
  Clone ID: MRT4577_173705C.1.pep
GAPWGSRERHVFVFPGPFGTSIVVFYGRGDDQACRCDRCSTWPNLYFVFAARRGTTLIIYAGIRSLKICLEDPSSGLKGSIGRRVW

SEQ ID NO: 265461 - protein, 125 aa, Zea mays
  unsure (1)..(125): unsure at all Xaa locations
  Clone ID: MRT4577_173706C.1.pep
MTTTGRTVSSPSSASLSFSKRQLGGLSLSAGDATQTAVDLLPKRNEMQSIVARDECPVTDKKINRVKKEPISDHETKKKRXVNLQYNKMGREGGKHVHKLRLSTEVLKNIEINCLDADAAQGTGS

SEQ ID NO: 265462 - protein, 326 aa, Zea mays
  unsure (1)..(326): unsure at all Xaa locations
  Clone ID: MRT4577_173707C.1.pep
MAVPPARLAASSLPLLLVWLQLQLLLASACDRCVRHSKAAYYTSALTLAGGSCGYGTDAASLSAGFLAAAASPALYRAGVGCGACFQVRCKDKKLCAAAGARVVVTDRARTNRTDLVLSSTAFAAMARPGMAPRLAAQFGVEXEYCRVPCEYKHRNLSVRVEERSHAAAPAPGDLAIRFLYQGGQTDIVAVDVAQXRYGCTHERSRPVDQFDDTYVSPKETSGLNXNWIEIXGACFLLXCMQVGSSNWRFMTRDDGPAWSTRQAPPGPLQLRVVVTGGYDGKWVWADREVLPRWRRAGEVYDTGVQXTDVAQEGCFPCDTHEWEEE

SEQ ID NO: 265463 - protein, 144 aa, Zea mays
  unsure (1)..(144): unsure at all Xaa locations
  Clone ID: MRT4577_173708C.1.pep
FFFVFFPLSLLKEKKPIKRGHSWANHKTKGGGRKKSGPKGLPPAPRGPAGTEKGARTLGENKKIWWHPPPTGLWFFGVGHLAPMPWGGGLEKKKCQKNPGTFPWAPPARGRPPPGCPPRLPLEPPTPPPFRQIPRAPKTXPPPP

SEQ ID NO: 265464 - protein, 274 aa, Zea mays
  unsure (1)..(274): unsure at all Xaa locations
  Clone ID: MRT4577_173709C.1.pep
MAVPVGRLAASTLLQLLVWLPLPASACDRCVRHSKGAYYTSSLTLAGGSCGYGTEAASFSAGLLAAAPAQATGDGRHHHXRCRRCSTSRKDGGRXPVQDRRMKNASARLVDAINSLSLSLSLALXNERPNWNLLAISFVSAARAHXRVPCEYKHRNLSVRVQEKRRSPGGPGDLAIRFLYHGGQTDIVAVDVAHXRWRFMTRDDGPAWSTRQAPPGPLQLRVVVTGGYDGKWVWADREVLPRRRRAGEVYDTGVQITDVAQEGCFPCDTHEWEE

SEQ ID NO: 265465 - protein, 262 aa, Zea mays
  Clone ID: MRT4577_17370C.1.pep
MVSRENLHLVLDPASLGAPWADPSAAEIPPQLLAALGEYLSSTRAEGGDVATEADDEFMMHEFKVRRCARARSHDWTACPYAHPGEAARRRDPRRVAYAGEPCPDFRRRPGAGAACPRGAACPLAHGTFELWLHPSRYRTRPCRAGAACRRRVCFFAHAAAELRAGAGAGAGAAKDGCSPLALSLSPKSTLAPPWESPPVSPVEGRRWVDEPADAEVEELLLAMRELGFRKAKASSSAPVLPAAAVTEDDGPDLGWVSELVM

SEQ ID NO: 265466 - protein, 148 aa, Zea mays
  unsure (1)..(148): unsure at all Xaa locations
  Clone ID: MRT4577_173710C.1.pep
MAVPVGRLAASTLLQLLVWLPLPASACDRCVRHSKAAYYTSSLTLAGGSCGYGTEAVSFSAGLLAAAGPELYRXGAGCGACLQXPCPAVPRPRGADRAPGSRHSRLYVRITCSQVLCKDRKLARXAAARVVVSDRARTNRTDLVLSST

SEQ ID NO: 265467 - protein, 316 aa, Zea mays
  unsure (1)..(316): unsure at all Xaa locations
  Clone ID: MRT4577_173711C.1.pep
PFSSCFQDFFRTLTWWIVPCLAVKVTREVSRFAHILQQGSSSAWTWRACAVLFASVASWTYLTTIILSSCMLFNLVCSLQVIHFDDYGKLLEQDADPLVYLKEHLQLRHNLSKISHRFRVFLLLLFLSVTAGQFAILFKTTAYSGPINFTNGGDIAVSSVVQVVGLVLCLHAAAKISHRAQNIAALASRWHALATCSTDSTYVTTPNSSGNLAPFPAHLFLRDYSGSDLESLDXRRFRAAPXTAQLASYMSSYHKRESLVLYLLANPGGITIFGWIVDRAFLNTILMLELTLVLFVLSKTVVIPAKTLVHSYIGYP

SEQ ID NO: 265468 - protein, 274 aa, Zea mays
  unsure (1)..(274): unsure at all Xaa locations
  Clone ID: MRT4577_173712C.1.pep
MAVPPARLAASSLPLLLVWLQLQLLLASACDRCVRHSKAAYYTSALTLAGGSCGYGTDAASLSAGFLAAASPALYRAGVGCGACFQVRCKDKKLCGXAGARVVVTDRARTNRTDLVLSSTAFAAMARPGMAARLAARRAVDVEYKRVPCEYKHRNLSVRVEDRSHAPGDLAIRFLYQGGQTDIVAVDVAQVGSSNWRFMTRDDGPAWSTRQAPPGPLQLRVVVTGGYDGKWVWADREVLPRWRRAGEVYDTGVQITDVAQEGCFPCDTHEWEEE

SEQ ID NO: 265469 - protein, 136 aa, Zea mays
  unsure (1)..(136): unsure at all Xaa locations
  Clone ID: MRT4577_173713C.1.pep
AGTSCLPGWAIPHNPLPSSPWYVTNRTFGIGPRLPWPELKRRCCRQLADIPAYFRCSALSIFMHGPIPPFPDAQLKGRLEHLPGCPRXVQTLFPATLVTXAEFNLSTITGVIXCPWIIGXATPPSKYFLKTYFIKN

SEQ ID NO: 265470 - protein, 43 aa, Zea mays
  Clone ID: MRT4577_173714C.1.pep
FQVGATRPVVSYVSGGGVIGEVSWGGTELGGFLRELTTVSFER

SEQ ID NO: 265471 - protein, 274 aa, Zea mays
  Clone ID: MRT4577_173715C.1.pep
MAVPVGRLAASTLLQLLVWLPLPASACDRCVRHSKAAYYYTSSLTLAGGSCGYGTEAASFSAGLLAAAGPALYRGGAGCGACFQVRCKDRKLCGAAGARVVVTDRARTNRTDLVLSSTAFAAMARPGMARRLAGLRAVDVEYKRVPCEYKHRNLSVRVEEKRRSPGGPGDLAIRFLYQGGQTDIVAVDVAQVGSSNWKSMTRHSGGPAWSTRQAPAGPLQLRVVVTGGYDGKWVWAEREVLPRRRRAGEVYDTGVQITDVAREGCFPCDTREWE

SEQ ID NO: 265472 - protein, 105 aa, Zea mays
  Clone ID: MRT4577_173716C.1.pep
SWRVLVLGLLGASQNALHGVVHRLFIAAAYARVLITVQVLYQYSVPSSCVRRLFFNDWCLVSLCGLCMWCITARGRIGSAWGSSCSWLSSVSSIRRRWRANPSRA

SEQ ID NO: 265473 - protein, 104 aa, Zea mays
  unsure (1)..(104): unsure at all Xaa locations
  Clone ID: MRT4577_173717C.1.pep
FIIFLGGVNGAILVVRVCQLYPNAEPSMLVSRFFRVCTQWHESKPXILWSIQQEELGLPVWDPRXNPRARYHHNPIITPPYPCIDSSYNVSTSTLRDMLEQQRV

SEQ ID NO: 265474 - protein, 74 aa, Zea mays
  unsure (1)..(74): unsure at all Xaa locations
  Clone ID: MRT4577_173718C.1.pep
AVRARISSHLYTTATMPPEACTAIKAFXKTIQGHEDLNIAVKGLHLQSRLVRAITQQSTMRLRGITHSHGHIGN

SEQ ID NO: 265475 - protein, 236 aa, Zea mays
  unsure (1)..(236): unsure at all Xaa locations
  Clone ID: MRT4577_173719C.1.pep
MISLTIGVLALQGGFSEHIDLVRKAAESISXQKTSPRTXQCIEVRTKEQLDQCSALIIPGGESTTISFVAAQSGLLEPLRDFVKVQKRPVWGTCAGLILLSDEANATKKGGQELIGGLAVRVHRNHFGRQTESFEAGMNLPFLNDEKPYPGVFIRAPVVEQVIGASDGRQPVEVLAKLPGRVDKMKSGVSQANTKDDSGDIVAVRQGNVLGTSFHPELTKDERIHVWWLKEILNQQ

SEQ ID NO: 265476 - protein, 70 aa, Zea mays
  Clone ID: MRT4577_17371C.1.pep
GGPGKKGKERGKNCNPKCTSKNGNKVPLVIIVCHQSVKGRINPCPFSFQGSIALDSFFKKQPKKKTGRDP

SEQ ID NO: 265477 - protein, 85 aa, Zea mays
  Clone ID: MRT4577_173720C.1.pep
SWRWCSPTSSTLWTPPPRTSSSERADFFSSIFWQALVGSGVGVGEIRSLFIAMNYIRFRARVYIITPICLQVHALMSKKKKKKGP

SEQ ID NO: 265478 - protein, 80 aa, Zea mays
  unsure (1)..(80): unsure at all Xaa locations
  Clone ID: MRT4577_173721C.1.pep
IRHEALLITRHRLPLHPRAAKPAKNRTRVESAYNGGPGVRAGREAGSRTGHQRRGEQRGRAAAAXSAXVHAAGRPCAPSA

SEQ ID NO: 265479 - protein, 129 aa, Zea mays
  unsure (1)..(129): unsure at all Xaa locations
  Clone ID: MRT4577_173722C.1.pep
MVKYSTEPSNPTKSAKAMGRDLRVHFKNTRETAFALRKLSLTKAKSYLEDVIAHKQAIPFRRXKGLDVDTLYVSHIQVNQAQKQRRRTYRAHGRINPYMSSPCHIELILSEKEEPVKKEAESQIATRKA

SEQ ID NO: 265480 - protein, 51 aa, Zea mays
  Clone ID: MRT4577_173723C.1.pep
GPLCPQEVLGHKQDHHCQDHALTDHLATGMRWLYDGHSQVVSRVVVLRRAT

SEQ ID NO: 265481 - protein, 183 aa, Zea mays
  unsure (1)..(183): unsure at all Xaa locations
  Clone ID: MRT4577_173724C.1.pep
GVSLVELSFMNTRETAFALRKLSLTKAKSYLEDVIAHKQAIPFRRYCGGVGRTAQAKSRHSNGQGRWHVKSARFILDLLKNAESNAEVKGLDVDTIYVSHIQVNQAQKQRRRTYRAHGRINXVYLTKVEILLCDELFFIWSLTFCLPXGPAYMSSPCHIELILSEKEEPVKKEAESQIATRKA

SEQ ID NO: 265482 - protein, 188 aa, Zea mays
  unsure (1)..(188): unsure at all Xaa locations
  Clone ID: MRT4577_173725C.1.pep
PLLGSRSRLLDGGARLGCSHDRLLGAPDSGGWTTAGXRCSTAPGSGRAHSAARAAAACGSCVAAGWRLRASAKCATVPGCGGRLGRAASAAARCGVWVAPWRASALALRWRTSGRASEPGAWRWRAADERGEEARPGRRRCRGGQAGRGRQRRLELGLPLGRVMMGRDCRPGLAGFMGAFQTSIFPNT

SEQ ID NO: 265483 - protein, 171 aa, Zea mays
  Clone ID: MRT4577_173726C.1.pep
MVKYSTEPTNPTKSAKAMGRDLRVHFKNTRETAFALRKLSLTKAKSYLEDVIAHKQAIPFRRYCGGVGRTAQAKSRHSNGQGRWPVKSAKFILDLLKNAESNAEVKGLDVDTLYVSHIQVNQAQKQRRRTYRAHGRINPYMSSPCHIELILSEKEEPVKKEAESQIATRKA

SEQ ID NO: 265484 - protein, 171 aa, Zea mays
  unsure (1)..(171): unsure at all Xaa locations
  Clone ID: MRT4577_173727C.1.pep
MVKYSTEPSNPTKSAKAMGRDLRVHFKNTRETAFALRKLSLTKAKSYLEDVIAHKQAIPFRRYCGGVGRTAQAKSRHSNGQGRWPVKSAKFILDLLKNAESNAXVKGLDVDTLYVSHIQVNQAQKQRRRTYRAHGRINPYMSSPCHIELILSEKEEPVKKEAESQIATRKA

SEQ ID NO: 265485 - protein, 60 aa, Zea mays
  unsure (1)..(60): unsure at all Xaa locations
  Clone ID: MRT4577_173728C.1.pep
APRECSGTPPLPRVAAQRVRQDTSAGSYGSSWSCQYXCSGLRMLAYQRSSDQSRTSSRSR

SEQ ID NO: 265486 - protein, 127 aa, Zea mays
  unsure (1)..(127): unsure at all Xaa locations
  Clone ID: MRT4577_173729C.1.pep
SVCRSLLIIVLTNTITRYEALYSEVSISLNYPTVSAEXLGRLXNAMDTLRPLISRKIFLPLMLPLVWHSRRTLDLLTRTCGTLFSMKCHSELADCDNSDLDMSMRLLEPIEDEWPKLSYAXFYQLAG

SEQ ID NO: 265487 - protein, 68 aa, Zea mays
  Clone ID: MRT4577_17372C.1.pep
SDRLPCRVGCHQVALELLFRKLLHPNAAGRSFAILGCIQQLPLMLNPRVSSNPTRLLQEPYRWSRPCR

SEQ ID NO: 265488 - protein, 171 aa, Zea mays
  Clone ID: MRT4577_173730C.1.pep
MVKYSTEPSNPTKSAKAMGRDLRVHFKNTRETAFALRKLSLTKAKSYLEDVIAHKQAIPFRRYCGGVGRTAQAKSRHSNGQGRWPVKSAKFILDLLKNAESNAEVKGLDVDTLYVSHIQVNQAQKQRRRTYRAHGRINPYMSSPCHIELILSEKEEPVKKEAESQIATRKA

SEQ ID NO: 265489 - protein, 61 aa, Zea mays
  Clone ID: MRT4577_173731C.1.pep
KKKKINKKNNLKKKKKKKREGFLKNTVCLQNNNYLHTILINTFYIPSLSTPTCLKFMRLFF

SEQ ID NO: 265490 - protein, 171 aa, Zea mays
  Clone ID: MRT4577_173732C.1.pep
MVKYSTEPTNPTKSAKAMGRDLRVHFKNTRETAFALRKLSLTKAKSYLEDVIAHKQAIPFRRYCGGVGRTAQAKSRHSNGQGRWPAKSAKFILDLLKNAESNAEVKGLDVDTLYVSHIQVNQAQKQRRRTYRAHGRINPYMSSPCHIELILSEKEEPVKKEAESQIATRKA

SEQ ID NO: 265491 - protein, 59 aa, Zea mays
  Clone ID: MRT4577_173733C.1.pep
VLHNVRALKRHVQYQWIKYMQPHVWISIVLRSSNHKILKKELSHLSKDTCIFWTIIAYM

SEQ ID NO: 265492 - protein, 28 aa, Zea mays
  Clone ID: MRT4577_173734C.1.pep
YSCCRALIPCKPIPIYLNYDAHQPFFPT

SEQ ID NO: 265493 - protein, 87 aa, Zea mays
  unsure (1)..(87): unsure at all Xaa locations
  Clone ID: MRT4577_173735C.1.pep
LLVLPDDVRYRLVERFNKXTHDFXFRDVLQVLDMPTMLPXLILNQXQIFXXHIXFVTFFGGGGXLYSFLSSXNXSYNFLXLYHTFLF

SEQ ID NO: 265494 - protein, 70 aa, Zea mays
  Clone ID: MRT4577_173736C.1.pep
LGNVDIPVRTSSCAPREKISTQPDTQSLFGIWSSTVTPAGSVMCVLCNKFADRDRFICISHCEVKSLVSG

SEQ ID NO: 265495 - protein, 112 aa, Zea mays
  unsure (1)..(112): unsure at all Xaa locations
  Clone ID: MRT4577_173737C.1.pep
SAMAASALLACGVMVHDVLLGAGDGGLVFEASQLTVKVGDTITFKNNAGFPHNGVLDEDDVPSGVDVTKISQEEYLNAPGETYXVTLTESGTYGFYCEPYQGAGMVRKITVN

SEQ ID NO: 265496 - protein, 71 aa, Zea mays
  Clone ID: MRT4577_173738C.1.pep
LERGSSPGTSLGPDTRSKTPMQAQLPPEPPPPAARTAGGMALRLPLSPPRCGYTSDRARERKNANEYAKRG

SEQ ID NO: 265497 - protein, 538 aa, Zea mays
  Clone ID: MRT4577_173739C.1.pep
MAAAGPTTSPATAGAVEELTRLYRELPPRPAVEEVEAAAAVLASAAAEEEARLAEIAREEEIAEARARGGAPPELLDVLWEARRSSVRLRALQQRKEAAHVLELERRFRLFDDLIQRASRLLSPGGGAGARSGTGGAAVDHDEVVEVDATRNTELDAAPAEIGRGSKGGLGLEPKSVSSLRRAASAGTDTEKLGLIQVASLIESSAKKGTTELNLRGKLVDQVEWLPVSLGKLQDVTELDLSENRIMALPSTIGSLRYLTKLDLHSNQLINLPDTFGELSSLIDLDLRANQLKSLPTSFGNLTSLANLDLSSNLLKVLPDCLGKLKNLRRLIAETNELEELPYTIGSCTSLVELRLDFNQLKALPEAIGKLENLEILTLHYNRIKGLPTTIGHLTRLRELDVSFNEVETIPENICFAASLVKLNVSRNFADLRALPKSIGELEMLEELDISSNQIRVLPDSFGHLSKLRVFHADETPLEVPPKEVVKLGAQELVNYMKNMVAAREVSQNQTDKRSFWTWLRSLFGCYKKNQGLGPVPA

SEQ ID NO: 265498 - protein, 85 aa, Zea mays
  unsure (1)..(85): unsure at all Xaa locations
  Clone ID: MRT4577_17373C.1.pep
KPSSHXVMTGVXRPSATDRAAGRLPGSGLTMNIIRCGLESGEARSTGWSKPPKGWLGYPKRCHGMLEVGYVNNMACGTQKPCGGS

SEQ ID NO: 265499 - protein, 156 aa, Zea mays
  Clone ID: MRT4577_173740C.1.pep
MGNCWGTKISSDTAASPSTSPFPRSEGEILRCANVRSFTLTELMTSTRNFRPDSVLGEGGFGSVFKGWIDETTFAPARPGTGMVIAVKKLNQQGLQGHREWLAEVNYLGQLSHPSLVRLVRYCLQDEQRLLVYDFMPRGSLENHLFRTSRVQPLSW

SEQ ID NO: 265500 - protein, 582 aa, Zea mays
  Clone ID: MRT4577_173741C.1.pep
MARRATPQEAAVAAAEAAIRSVGLGFDVVSDVRLKFCKQRGAPDPWLIELDHGEVQDIVLPGGVTVAGVTASVKCDKGERMRFRSDVLSFQQMSEQFNQELSLSGKIPSGFFNTMFEFSGSWQKDAANTKALAFDGWYVTLYSVALSKGQIVLRDHVKQSVPSTWDPAALARFIKKFGTHIVVGLKMGGKDVIYLKQQHSSTLQAVDVQKRLKEMSDSRFLDANVQYDMSRNNQDLVMMLKRRGGRDKESISHSEWLNTVQAEPDVTSMSFIPITSLLNGVPGSGFLIHAINLYLRHKPPIEELHQFLEFQLPRQWAPVYSDLALGPQRKRQGSTSLPVNLIGPKLYVCTNMVDVGKRPVTGLRLFLEGRKSNKLAVHLQHLCSLPQIIQLEDDPYNHQTPEYDRKYYEPIGPWKHFSHVCTAPVESDDLCIVTGAQLDVVHQGLKKILFLRLHFSKACNAVVRNSEWENSPNIAQKSGLISTLISTHFSSVAQTPPPRPADVNINSAVYPGGPPVPVQTPKLLKFVDPTEMMRGPQDSPGYWVVSGAKLNLERSKISLRVKYSLLTAMMPDDEFPLDDDEF

SEQ ID NO: 265501 - protein, 83 aa, Zea mays
  Clone ID: MRT4577_173742C.1.pep
VSPGDCWPMGVGTPGPAHKTCDHPVLMHGSLDETDARIEDGILLTGMVYIAREAKTLYQGVTLAFAVKDGKPSDCYYVEDRDH

SEQ ID NO: 265502 - protein, 57 aa, Zea mays
  Clone ID: MRT4577_173743C.1.pep
MAAAVANQPKHDWADDDDVEETSTDLPEPQTIANKDGTKTIITFRYDDDGRKVKTRR

SEQ ID NO: 265503 - protein, 193 aa, Zea mays
  Clone ID: MRT4577_173744C.1.pep
MASSLLRSGYGLFLRRPRLSAAFSTAAAEELIDVRKLPTDYDPSTFDPSSPSRPPPSDRVWRLVEEVSSLTLAETASLSSLLLRRLDIPSAPPIAILNSATGLGGGGATAGAAGEKAAAAAEKTVFELRLEAYDAASKIKVIKEIRSFTDLGLKEAKELVEKAPAVIKGGLSKEEAQAIVERMKAVGAKVIID

SEQ ID NO: 265504 - protein, 109 aa, Zea mays
  unsure (1)..(109): unsure at all Xaa locations
  Clone ID: MRT4577_173745C.1.pep
GRGSAGGASFLRRPXPRXXXRRXRXGXGGCGAGVWRCXXPPXXXSXCSPPPPLXXSXXXGXXCFPRCWLXLXLPSXAXGLRGGFCGGXAGGXXWGXPGGPRLXRRVCXR

SEQ ID NO: 265505 - protein, 184 aa, Zea mays
  unsure (1)..(184): unsure at all Xaa locations
  Clone ID: MRT4577_173746C.1.pep
MVGVLSNQVGREALAAGDHIYSWRTAYIYAHHGVYAGDGMVIHFTRAVGHEIGTGTFLDKFLFSSSPTTADGPPCEKCGHLIKPQGVIMSCLDCFLDGGSLYLFDYAVSPPFFLAKARGGTCTMALSDAAQLVVHRAKHLLNDGFGMYSLFKNNCEDFAIYCKTELLVETAYSXGRSGQLASLT

SEQ ID NO: 265506 - protein, 63 aa, Zea mays
  Clone ID: MRT4577_173747C.1.pep
GIAPLPPAPFFSMFGAPILFLGIPVPGAPFFSPPQKFPPLHLGSFKIICILAILCKPHLWWSP

SEQ ID NO: 265507 - protein, 82 aa, Zea mays
  Clone ID: MRT4577_173748C.1.pep
AVFLHIPDKLVWTGLERLAGKLRPHRGRIFVSHNIKFCSRLGGDECTRRLAKLGLEYVGKHTHDSLLFNHYEVWFEFRRPKV

SEQ ID NO: 265508 - protein, 62 aa, Zea mays
  Clone ID: MRT4577_173749C.1.pep
PWQSSWRSQREPVDRLTMCHQGLGPSLKQADDDCSLCGTAWWSGDERWCWGGYETLTCGTLW

SEQ ID NO: 265509 - protein, 104 aa, Zea mays
  Clone ID: MRT4577_17374C.1.pep
PRNTTKVQRPQRRMDLWWRWNDDVKFVRSQCTTAPAQATNTNPGCCAAPPTVSRCPTTAPRGPRRRAHFLPPLHALYLSRRGSNGLSLGLWREYANEAITAPAG

SEQ ID NO: 265510 - protein, 173 aa, Zea mays
  unsure (1)..(173): unsure at all Xaa locations
  Clone ID: MRT4577_173750C.1.pep
MGKTSASGVVQENEKVGNGSPSSPTKGKRGRKGSQIIANKKYPLRSAHSSTRVLRSTSKDKSKTPNEPVSPLRSAHSSPRVLRSTPKNKSKTPKKQVNSLRSAHSSARVLSSTLKKKVPNEPVNDSTAAQPAARKRKRGRPSNAASPKNEXHQIRQRVRYILNRNDYEQSSFS

SEQ ID NO: 265511 - protein, 51 aa, Zea mays
  Clone ID: MRT4577_173751C.1.pep
SARFATINIKLHVPMTLELKPSNFTKWSTAFQATCGKFGLQHHLATASTSN

SEQ ID NO: 265512 - protein, 184 aa, Zea mays
  Clone ID: MRT4577_173752C.1.pep
HASAENVEVKIVDHVTGEALSVGQKGELLVRGPAVMAGYVGDEEANASSFDSEGWLRTGDLCYIDQDGFLFVVDRLKELIKYKGYQVPPAELELVLQSLPEVIDAAVMPYPHEEAGQIPVALVVRQPGSKVTEAQVMDHVAQRVAPYKKIRKVLFVDSIPKSPAGKILRRQLTNHVQAGAVSRM

SEQ ID NO: 265513 - protein, 52 aa, Zea mays
  Clone ID: MRT4577_173753C.1.pep
ASKKPWRPTGAYIMLAQLFPLCVFCWAMLSSQQGRRRLGRPSEEILNQVTFT

SEQ ID NO: 265514 - protein, 457 aa, Zea mays
  Clone ID: MRT4577_173754C.1.pep
MGLEMEAMAGSIGVSVPVLRFLLCFAATIPTGLLWRAVPGAMGRHLYAGLTGATLSYLSFGATSNLLFVVPMTLGYLAMLLFRRHAGLITFLGAFGFLIACHVYYMSGDAWKEGGIDATGALMVLTLKVISCSINYSDGILKEEGLRDAQKKNRLTKLPSLIEYFGYCLCCGSHFAGPVYEMKDYLEWTERKGIWASPTPSPLLPTLRALVQAGICMGLYLYLSPKFPLSRFSEPLYYEWGFWHRLFYQYMSGFTARWKYYFIWSISEASIIISGLGFTGWSESSPPKAKWDRAKNVDVLGVELAGSSVQLPLVWNIQVSTWLRYYVYERLIQKGKKPGFLQLLGTQTVSAIWHGLYPGYIIFFVQSALMINGSRVIYRWQQAASSSFLSGILAFLNFAYTLLVLNYSCIGFQVLSFKETLASYRSVYYVGTIVPIVCLLLGNVIKPARKAKARKTE

SEQ ID NO: 265515 - protein, 119 aa, Zea mays
  Clone ID: MRT4577_173755C.1.pep
RPGWIHPSQHYKALHCPAFVNIIREKASNRVPFGDAMSSGNKISVALLSVALVGLLLCHLATTASAHQIRKVWPSLPTCMLLHASEYIYIIRLDPAKLFRRLHYIFHPFNLMEKCDCCS

SEQ ID NO: 265516 - protein, 80 aa, Zea mays; identical to SEQ ID NO: 264628
  Clone ID: MRT4577_173756C.1.pep

SEQ ID NO: 265517 - protein, 72 aa, Zea mays
  Clone ID: MRT4577_173757C.1.pep
QQPQSWQTPESTQLNQLTRHDPLSTLCTREKVPTDTHLPTVAQPQWLMGPAPEGVIKPGGSGGTAQGDRYTS

SEQ ID NO: 265518 - protein, 123 aa, Zea mays
  unsure (1)..(123): unsure at all Xaa locations
  Clone ID: MRT4577_173758C.1.pep
LLQARSKSTPARKHNSADAAPARRXSRLSPATPLRGHRAASVXRRADAQTWPRPPQNKHRLSPSARVRRPPSPPTQASTQAAAAARRRGLRPRCCLKDECAGRDAAAMGVGPTAAAANPQASV

SEQ ID NO: 265519 - protein, 101 aa, Zea mays
  Clone ID: MRT4577_173759C.1.pep
TNAKDESMFLTWKPRTNTTSTRHSRWRRSSTMRRNLATASSTSGSSPMWPMCHCVWQAPAQPPLGRSPEWMHHDVHRQTWGPHGRRQCRRLSGCSWHRNRR

SEQ ID NO: 265520 - protein, 95 aa, Zea mays
  Clone ID: MRT4577_17375C.1.pep
MWDLSRLMCVILSLANLAQLKHFVNVNEKSYSRIQAKHHLELRQHKLTDVIVYSIKYVLQPQTLLSPLRQCGLRNDLILARVKNVVPYLGFNLGL

SEQ ID NO: 265521 - protein, 116 aa, Zea mays
  Clone ID: MRT4577_173760C.1.pep
RPLRRRAGSPSRRARQQLRKVLNPNPSLAYFLLLDLVEHGRPGEGRHRIDLHHLLGRGETTAEIIARPGTATPSRAYRLGRSSGCANQAHAPSTPLQNAYRKVWPCRLMAQYRLKL

SEQ ID NO: 265522 - protein, 56 aa, Zea mays
  unsure (1)..(56): unsure at all Xaa locations
  Clone ID: MRT4577_173761C.1.pep
ALPCLKKGWFSFLGLCPPVCFVRGLFFVPPFLGLMVLAGPFRRGCLLSXFVSARSV

SEQ ID NO: 265523 - protein, 108 aa, Zea mays
  unsure (1)..(108): unsure at all Xaa locations
  Clone ID: MRT4577_173762C.1.pep
RAFAPCFLGGPSAGXFMASAFGSGHRRLLLAGAVLLFVLAVAGACAGSFCVPGWAIPAACPPXCRWFLSXSACGFFPRLPWPVLLWXCCWVLAVVLVFCRCLVLGFLL

SEQ ID NO: 265524 - protein, 53 aa, Zea mays
  Clone ID: MRT4577_173763C.1.pep
DCNWHGLYKVCAVWSGGANVSRFPMCAPASCDTVMLHGVGLSSNMDGSLGSSG

SEQ ID NO: 265525 - protein, 101 aa, Zea mays
  Clone ID: MRT4577_173764C.1.pep
NCFQKLPVKICDQLTNQDELSACYAASYANSQLVWDGAADELSACSNYYTYFKASEAGDALNFDNFYKECFLNTDAVAAAKKSNFFYTQIYQPKFITCAGY

SEQ ID NO: 265526 - protein, 95 aa, Zea mays
  Clone ID: MRT4577_173765C.1.pep
DEEVLDEKQGTLGATTVRYRLNTLVADLRPLLINKKDLRLRHFHGIDELYRDGIPVAAQTGFDAISTVEPGMAKLVEDTTDHVLRFEVPEMIERD

SEQ ID NO: 265527 - protein, 141 aa, Zea mays
  unsure (1)..(141): unsure at all Xaa locations
  Clone ID: MRT4577_173766C.1.pep
VYSTITLARFDELNMXLNMKCMEPVEKWLVDAHTHRIMAHDGHLAGGXTKIPWVQQVLQDYFNGXELXKNINPDEGXDYGAVPCXILSGDGDETAXDLLMMDVTALCMSPETAAGGKTVLIQRNTIMRTKKEQVVCTYWYN

SEQ ID NO: 265528 - protein, 66 aa, Zea mays
  Clone ID: MRT4577_173767C.1.pep
QAFGHSLSHFSNRSYSSYTGVMAPYNWIIIRNTDRDWSCRLRIYMQHSCRDPHRSILPDAKQHPEL

SEQ ID NO: 265529 - protein, 111 aa, Zea mays
  Clone ID: MRT4577_173768C.1.pep
SRGSCLFLLSIIIPFHLIIKCSGAVVQCCVDYEEELVLSGGGCICSGDALLRTLAHLMPTNRYIIYAALLADHVPCNMRGLSYYTNCSSHTASNPYRRGCSSITRCSRIMN

SEQ ID NO: 265530 - protein, 138 aa, Zea mays
  Clone ID: MRT4577_173769C.1.pep
LRHSPTRPSLISPPPEATASEARLDPGTAAAGHFFGWRVEAGRAVSPAHWWWRFPLRISLRWLGGQCLGYDSGGGRHMCFAGPFSGDLDLVREVEPTRIWRPSKAAARLGRLRPVATAGWMGACWRWWLCGSWRRFGW

SEQ ID NO: 265531 - protein, 83 aa, Zea mays
  Clone ID: MRT4577_17376C.1.pep
RVCAAGPAASARFSAARGLVLRSLSVWRAQRVHVRELLLLLLVLRHRLQPPVLTLVATAAPASASACLLTQHVGRRFLPLRRR

SEQ ID NO: 265532 - protein, 51 aa, Zea mays
  Clone ID: MRT4577_173770C.1.pep
QEGQNMIPRFHHTCACYEERKQTRPNFFLQKSQLAPLHRITGRSHWHHRLT

SEQ ID NO: 265533 - protein, 86 aa, Zea mays
  Clone ID: MRT4577_173771C.1.pep
FQYKRKWFAAPCMSFRREESSCNAVRLLKTKQSLTIANQIETDIMIGFTPCTNLPAPHTNSVVTVCKYVLSSCPINVSEAIDLTGD

SEQ ID NO: 265534 - protein, 92 aa, Zea mays
  Clone ID: MRT4577_173772C.1.pep
HPMAVLHRAGLHSHGRLAHTCNCNAVAAIYLSFASLPFQCCTSPMDEASSMISYTTHSVDLHAFTNSYYTILKVRLNLLHMYCTIASCLTTG

SEQ ID NO: 265535 - protein, 120 aa, Zea mays
  Clone ID: MRT4577_173773C.1.pep
KRARERENTEGETGLPRIARIVSREKKSCRDHGALARATGLHQSCIRDHRWQPTASREDRRKHEADARIVGALAAQSEFNRLGRGRCAISIPHGVGFEASSAEEEGDQNLGRQSPFPVCW

SEQ ID NO: 265536 - protein, 34 aa, Zea mays
  Clone ID: MRT4577_173774C.1.pep
SQKQEMVRKYGSRSWQADRKSEGGRRLVKSPRIC

SEQ ID NO: 265537 - protein, 40 aa, Zea mays
  Clone ID: MRT4577_173775C.1.pep
NSGRECLLFATADTSKNKGTVKIETPNLQCRDMNIIIDTG

SEQ ID NO: 265538 - protein, 528 aa, Zea mays
  unsure (1)..(528): unsure at all Xaa locations
  Clone ID: MRT4577_173776C.1.pep
RACRARRAPAGSWFKWRQIKDHQIPSRGVSWDKELHYFPPSPAPTPSPPHAAESFSFASPAEPNPSETGAAPILFQTRXRQPNKKQPPQGPIQNSTSLTXQPQPQFAAAAQPPPPQPSPQPQELMLYATATASAADSTECEELHAESQKALLQIEDKGLAXIKDKRRDYRDECERLDQCSRLYDSSISNANFELDASRIAQELGGTTTVMEREKASIQELMNVVNEMMWNTEFGIRSYLMLRPGFTRTCAGVANVFSTNPXRWCYTLTSSVXDCDSRVHERPSIFMQRTVNKFECYLAECCKWIGELEQLVQMETNKRSSDSLESLPKVMSNVHDYFIYVASKVENLHQHVESMKTEYLNEQRRTGNGSDPFLEANRREAAKQEAAARRVHPTLHLPTPAQPTAQIAAPATSQPQQPSFPSAATSSSAFSTFSTPASAPSSSSLFATPTTPAPSGNLFGAPGSAQLTTPFGTPSTPTLASTPAPGFGTSATSLGGTSLFSTPFGGGATASGSSFGGASKGRSKPRGRR

SEQ ID NO: 265539 - protein, 69 aa, Zea mays
  Clone ID: MRT4577_173777C.1.pep
CPQCWFVMRQSVIWCLLLCRDICTVSEGGRGLDHVVRRGLCVKDIEERWPPKKIVGPPAGSLKGHRTSG

SEQ ID NO: 265540 - protein, 104 aa, Zea mays
  Clone ID: MRT4577_173778C.1.pep
CLLDPVPRSLTQGLQLCSASPLYTSAVCIPVVRFVYNCSSAMCLFQRYLVVTACSPIGVFGPSQSMYSVINPVHAQLIPISVLLRIAVACVYDASLYIIQVLQK

SEQ ID NO: 265541 - protein, 38 aa, Zea mays
  Clone ID: MRT4577_173779C.1.pep
PAGAGPDFSGPRWCPKRPLECGTAVLAKGLVPKGNVVS

SEQ ID NO: 265542 - protein, 101 aa, Zea mays
  Clone ID: MRT4577_17377C.1.pep
MAELTDLRSQLPSFLSDVPADHAKIIWQPYKRQKKQYWTRGAFFYVAESSLKEQHNYFTCALNLSIYNDQGSRKITMVYEQRQMQYNMGKCTYKKINGTTI

SEQ ID NO: 265543 - protein, 71 aa, Zea mays
  Clone ID: MRT4577_173780C.1.pep
ISSSCNIENDKISYAINRFSAHSVTDMMTQLITCWWAAPFARFCWFELFKSFGQHGFIPGQDIDDYDLWLV

SEQ ID NO: 265544 - protein, 95 aa, Zea mays
  Clone ID: MRT4577_173781C.1.pep
HKSKKHHHNNGPRVCFPGWGSSWAAWQLLLLRGLRLWMSWRACPWRSPYAPDAVDDAARSRSRLRLIPGLGVGGALHVELIRLAVHNAEVGMILF

SEQ ID NO: 265545 - protein, 85 aa, Zea mays
  Clone ID: MRT4577_173782C.1.pep
GAVFIMIHSKLKIWQLGNLMLVAAGGGVRGEWGERRDFFQSSYAQLSRIGRRLAESDIYVSRRESNDDEMLGKEEILLLCACNSS

SEQ ID NO: 265546 - protein, 52 aa, Zea mays
  Clone ID: MRT4577_173783C.1.pep
QELNGLGNLRKASPFGAASESRCYSFFFIDMRLILGHSHVYLHRYILRLGQT

SEQ ID NO: 265547 - protein, 110 aa, Zea mays
  Clone ID: MRT4577_173784C.1.pep
RQNKFPAFSSQVTRAKLHHLEEAERTRCTLYHESRIGRTAPGRKRPNPAMRQAATRTVSQKTKISSFCIHAHGFRLILPILRSSFMYSSPHPVERETREGCRVSLPGPAG

SEQ ID NO: 265548 - protein, 83 aa, Zea mays
  Clone ID: MRT4577_173785C.1.pep
MGACYGGKRGYRSSCSYGTGYNGCGMYPDVETVATNTSKTTVLAAPTTNASAGGFDAATDGGRCYCNTCKCGTNCNCSCCICN

SEQ ID NO: 265549 - protein, 71 aa, Zea mays
  Clone ID: MRT4577_173786C.1.pep
SNAWLGVSFCLAARPPASPAPGLGLSLALIRTPPSSGFYMGQTGTHRPPSFWQGLLFIPNCSRAFGFPFFR

SEQ ID NO: 265550 - protein, 81 aa, Zea mays
  Clone ID: MRT4577_173787C.1.pep
KLDSSLFHTSVQPMLRLPNRKTFASHCSHLFYMKQQWYSTARGAEARITKLFTYVFIRRNKGTFRRRKCPRLHALLVALSV

SEQ ID NO: 265551 - protein, 91 aa, Zea mays
  Clone ID: MRT4577_173788C.1.pep
VPVQLPVYLAPNMSHRVSFRVTSHMMFNSHINSHIKAYIIASRTASASAFVCELRPRFGSRYRTVQPAVHASGQVSEQLIRMCVWIRVLHK

SEQ ID NO: 265552 - protein, 95 aa, Zea mays
  Clone ID: MRT4577_173789C.1.pep
LHRAIGYLEAGRDVRSWSTRHARATATRNCCLAVWARAEGACPAPRPAAYYFPWAAIRARSPPGWLFNLANSQQVITATGKRLTATSGSISTIIY

SEQ ID NO: 265553 - protein, 131 aa, Zea mays
  unsure (1)..(131): unsure at all Xaa locations
  Clone ID: MRT4577_17378C.1.pep
MHPGNCFGDTVAVDDLLTAGLAAGSAPVGRAQGTYMTGSMSRPVFVVAVTLMLAAGPYNGSTLVVAGRDDTSQPVRELAVVGGTGALRRAGXXVLRSTARAEPSVHAVLQLDVHASVPAPSKTHACPPRKF

SEQ ID NO: 265554 - protein, 73 aa, Zea mays
  Clone ID: MRT4577_173790C.1.pep
VPFRKISVPPKTLTNRLFVLPFVGKLFFWGIQFNSGLNSGWGPLLSEKRIFTKPQKSSLDVMFFIRKKNPCSG

SEQ ID NO: 265555 - protein, 179 aa, Zea mays
  unsure (1)..(179): unsure at all Xaa locations
  Clone ID: MRT4577_173791C.1.pep
RHRSSLRTVPPPALAGSMEDRATRYXLIGPDWANNMEXATLCNQXDPGAIQNMSGKALKXKRFEHKNPKAQLVALTLXETGIKNWGDILNMHVAXRDIXLHXMVKIXTKKSDPTVKDKVLVLIDTXQDVVGGSHAXYPQYYAAYHAEVRAGAEFPNRPNKPAPLFNGKXHAAWNMRSSD

SEQ ID NO: 265556 - protein, 85 aa, Zea mays
  Clone ID: MRT4577_173792C.1.pep
MSTGRESTTSSRWPELATLRALARDAAEQLQLPRVGMSASAGAAGGREPSKRQPAGWRGGRDREDHVHGHGKTAKVMHLLLWGPK

SEQ ID NO: 265557 - protein, 75 aa, Zea mays
  Clone ID: MRT4577_173793C.1.pep
IGAISLLRYPRMLKRAVSMLLRQMKQDAAWRRPTRRHGGVDIPYATPTESRWQTPPSWAVTTAEVEAAEEKRLRI

SEQ ID NO: 265558 - protein, 59 aa, Zea mays
  unsure (1)..(59): unsure at all Xaa locations
  Clone ID: MRT4577_173794C.1.pep
TRVGTFMGLHLVLGGLVAGKXREADGDLSSWERSSAAETSTRTSGCPKTNESSTRSRIW

SEQ ID NO: 265559 - protein, 44 aa, Zea mays
  Clone ID: MRT4577_173795C.1.pep
HFIPPILFIYTKQFISLQPSHKYSPIIISFSTIHSLNYLSSIYN

SEQ ID NO: 265560 - protein, 68 aa, Zea mays
  Clone ID: MRT4577_173796C.1.pep
AVFPQLPPPPLSHMFICLKISVLSSPGNSKEGAVPAQSMIRLNSTGPRSITFLLLSPTTTYRVLSNKR

SEQ ID NO: 265561 - protein, 124 aa, Zea mays
  unsure (1)..(124): unsure at all Xaa locations
  Clone ID: MRT4577_173797C.1.pep
FADALGDGSQIVVERLKSWSNRAASALRVEGAVMARVRNRSLLSLCGYCAAGHERLIDYDDMPNLSIHSQVHGQHAAECNLSSXRRIRIVTDWTYGIAYPDHSVTSHIIHRDVLASLRASGPTL

SEQ ID NO: 265562 - protein, 92 aa, Zea mays
  Clone ID: MRT4577_173798C.1.pep
YACRYRSGINSRVDELTSRRPPFFFFFFFFFFFFFFFFQFKGQPNGEQFDYIIPFAHLTVTPQFSRAIFELHHNWNCKSKSFDGTIGKTVQF

SEQ ID NO: 265563 - protein, 244 aa, Zea mays
  unsure (1)..(244): unsure at all Xaa locations
  Clone ID: MRT4577_173799C.1.pep
IRHEERGGSSENSPKNPVPTLSSSKFLTDKPGGTDAEAKLNPGVSALSNSQHVQPTNVTTNLKDQPCKSTGGTGPELPTVKEEKTSSSSQSPNNSQSISSEPSKDARSSTAASGGASKTSESSSRSHRKANNGLVSGNLKEASVGRSVSLDRSLLQDKSSQTGTASEKGPDMPLDHGNNHRLIVRFPNPGRSPARSAXXGSFDDPSVTGGRASSPMVVDRHDQTERKVKGKXXKYSPHLASDAT

SEQ ID NO: 265564 - protein, 78 aa, Zea mays
  Clone ID: MRT4577_17379C.1.pep
SDLVIVDVSSASRNANDSSFILNEHSDPRCSLSSFKPSLCNHRIPPLRGTVHSKIHLHGVSLFAQLPWYPFKVTPRVC

SEQ ID NO: 265565 - protein, 88 aa, Zea mays
  Clone ID: MRT4577_1737C.1.pep
LNVDESTTTEVPSCDVAFDIWLRWRPSFTSCPVRPQYIPPSCSESRASFAGGTERRLPRLNCCRRHLDRRRDQSHQDKDEHEPVDGLS

SEQ ID NO: 265566 - protein, 42 aa, Zea mays
  unsure (1)..(42): unsure at all Xaa locations
  Clone ID: MRT4577_173800C.1.pep
XKKKKKKKKKKKKKKKKKKKKKKKKKKKKKKKKKKKKRGGRF

SEQ ID NO: 265567 - protein, 150 aa, Zea mays
  Clone ID: MRT4577_173801C.1.pep
MALVRTLPLEGPRSCPLAGDENQPLKPKSWRPGAQVALTVPSAEKPPLVTTTSALTTATTCPPTPHRRAAAAPKRTDRSSLPFSPRERERDRPRTRVPPSRRTTCCATPGAAAHSRPDRGQNAAPWPGSSSLPSPAWLEDASSAELEDVF

SEQ ID NO: 265568 - protein, 74 aa, Zea mays
  Clone ID: MRT4577_173802C.1.pep
GGVCPPRGSCASGLYSVCFRAVKSCDSPTQGLVPYQIRLPILCIAVWRDTVIEGVRAVHSPRLLNILVRLPLVP

SEQ ID NO: 265569 - protein, 80 aa, Zea mays
  Clone ID: MRT4577_173803C.1.pep
SRPRVTAIAARCFARGPILAGRGGLVSTRPKAGPGGRVGSGFGHDDRLAGRRRRGHGGARLLAWSGRCEEGVPCVYLIVS

SEQ ID NO: 265570 - protein, 151 aa, Zea mays
  unsure (1)..(151): unsure at all Xaa locations
  Clone ID: MRT4577_173804C.1.pep
GLFLRQPSKESRRWDLDPACIPKILRSVCDARQFTYEQLEEATXRVDGEKXVDTADDGAVHAGVLDDGSLVAVQRIGYXTQGRLXLVLDRMELLSEISHPSIARVVGFCLDSSSNALLLVHEHXAGGTLEXQLRXVRXRRLSWYHRXNIXM

SEQ ID NO: 265571 - protein, 72 aa, Zea mays
  unsure (1)..(72): unsure at all Xaa locations
  Clone ID: MRT4577_173805C.1.pep
MPPHPAEHRCFIACLVWVTHXHYLHNAFSTYGEVLESKILLDRETQRSRGFGFVTFXSMEEVMRNAIKGMNG

SEQ ID NO: 265572 - protein, 101 aa, Zea mays
  Clone ID: MRT4577_173806C.1.pep
NHGLIKQLITPWCRFPSMGTFCPRKDCNKGKFWGGTPGRSFYGLMQFLKYFPWRARTTTPRAITIWPWNFLNNFKIEEYYSGHRQSYSLGASLKNILFSGP

SEQ ID NO: 265573 - protein, 129 aa, Zea mays
  Clone ID: MRT4577_173807C.1.pep
VGGNLHRTKRKKEAAQGGGTSTGPKSRRKQSTKQRDPLGKQKGGNKKGSPRKQMQARGCDNTHAISTKNNKDLATTKTQPTKGQGGKRLNLQRGKKEKSIPKGTKKKGHHQTTVSRKGVQPQSPHHSRG

SEQ ID NO: 265574 - protein, 54 aa, Zea mays
  unsure (1)..(54): unsure at all Xaa locations
  Clone ID: MRT4577_173808C.1.pep
XGEILTCXGVCWDESTDPVGKSDTCWSTTSFQKKTIHWQVERKALNVDVTCVSS

SEQ ID NO: 265575 - protein, 114 aa, Zea mays
  unsure (1)..(114): unsure at all Xaa locations
  Clone ID: MRT4577_17380C.1.pep
PWPSSVSGSFRCPRFWCLGWFGCCWSVPLRLFAAFVLVLSCPFLCLALCSAGLVAFLFVSCAGSVCVVPPLFLGFGVASSLLLXVARCCAGRLVGGLLLGLLFFSSSLSPRRSA

SEQ ID NO: 265576 - protein, 46 aa, Zea mays
  Clone ID: MRT4577_173810C.1.pep
KLATGSTLGLHDPYPHLLPANQQFALLHQGRHAPVGKSLLLTYYMH

SEQ ID NO: 265577 - protein, 136 aa, Zea mays
  Clone ID: MRT4577_173811C.1.pep
MLGVGTAAAVLLGAVALVLADAAARRAHWWYREAAEVVLVGGVALVVVDAAARRAHGWYREAAARLPPGEMGWPLVGGMWAFLRAFKSGKPDAFFDSLPFLDTCSMLLVNTKHLSMDGCCRFLPLPALNGCCKVWN

SEQ ID NO: 265578 - protein, 126 aa, Zea mays
  unsure (1)..(126): unsure at all Xaa locations
  Clone ID: MRT4577_173812C.1.pep
RGRHTARPGREAGETRGRGGGKXXXGKXXTREGEXXDTXDNRKGKNQDKEXXPPDQQRXRXGGKXXKDGRTXGDDNREKESTXHRGXXXRGGKKSRRKTRTGKRXRXEGEXXESNDNGKXKXKEKE

SEQ ID NO: 265579 - protein, 431 aa, Zea mays
  unsure (1)..(431): unsure at all Xaa locations
  Clone ID: MRT4577_173813C.1.pep
RSFMFSSPTVLVTTAEGCKQVLMDDDAFVTGWPKATVALVGPRSFVAMPHDEHRRIRKLTAAPINGFDALTGYLPFIDSTVTSSLRAWADHGGSVEFLTELRRMTFKIIVQIFLGGADQATTRALERSYTELNYGMRAMAINLPGFAYRGALRARRRLVAVLQGVLDERRAARAKGVSGGGVDMMDRLIEAQDERGRRLDDDEIIDVLVMYLNAGHESSGHITMWATVFLQENPDMFARAKAGSFFLSLLFNFILKASXQLSAPCHQAEQEAIMRSIPSSQQGLTLRDFRKMEYLSQVIDETLRLVNISFVSFRQATRDVFVNGYLIPKGWKVQLWYRSVHMDPHVYPDPTKFDPSRWEGHSPRAGTFLAFGLGARLCPGNDLAKLEISVFLHHFLLGYKLARTNPRCRVRYLPHPRPVDNCLAKITRVGS

SEQ ID NO: 265580 - protein, 206 aa, Zea mays
  unsure (1)..(206): unsure at all Xaa locations
  Clone ID: MRT4577_173814C.1.pep
LCPCFALFHFLLGSLLWAGXRPGARMXEVFKSKEGEVATELXALWQAYPTDYTNDFHLWGXLLWTNSPDYQSXDRCHRPFIXEGPNIDYFFDWTILKYTQGHMTTDXPLDIVPPVRQSSGMAXVANNNLHSSTEYGRRSDRSDMAPSAXQAPPPGIYACRLFKPNSXVLPETSTWKDAVFCSLTFLGRSSXIVKLPAVYSYRELST

SEQ ID NO: 265581 - protein, 119 aa, Zea mays
  Clone ID: MRT4577_173815C.1.pep
PLPRHGDSSRRRGLDLGLFTAQTVAVPGSGCKGLPRTFQVHAVQQHCVHPSHTPHSIGLLPEHTYTHTDMSGREACQEIIPGGPLTREHDCSGPRLVGDGPPKGNKRDLCFQKRKKKKK

SEQ ID NO: 265582 - protein, 55 aa, Zea mays
  Clone ID: MRT4577_173817C.1.pep
PFVAQSLQRDSVCSVARPQVTQLNFIRNLLYMFSDFRSHRSLYCAAASGFMRLVC

SEQ ID NO: 265583 - protein, 141 aa, Zea mays
  unsure (1)..(141): unsure at all Xaa locations
  Clone ID: MRT4577_173818C.1.pep
MGGSGKWVKSLIGLKKQPEKEDCKDKLQLPSVHGGGLRGKGRRWKLWRTSSGDQGSMWRGSRGGSQRSAASEASDDASSVAAVPADPFTAAVATVARAPARDFMAVRQEWAAIRVQTAFRGFLARRALRALKGXVRLPAIV

SEQ ID NO: 265584 - protein, 78 aa, Zea mays
  Clone ID: MRT4577_173819C.1.pep
SGLREGVSGHSTVLVDVWDLAFLVASVQEVKAPYQGCGSSPLGEECDHGRPQSPGGCSQGHRRQNPLLSELEGVLRCV

SEQ ID NO: 265585 - protein, 39 aa, Zea mays
  Clone ID: MRT4577_17381C.1.pep
PPKFEVSGSCTLRQLAQYWRSSMDTIYLHLEQVSNSSLY

SEQ ID NO: 265586 - protein, 277 aa, Zea mays
  Clone ID: MRT4577_173820C.1.pep
MASAFSSRACALVALLMGLCTAGAAAGRIDDGLEVTWGDGRGSVSSDGQVLTLSLDRTSGSGFRSKDTYLFARADVQIKLVPDNSAGTVTTFYFISEGPWDVHDEVDLEFLGNASGQPYTLHTNVYASGNGSREQQFHLWFDPTADFHTYSIQWTQQHILVLVDGTPIREFKNHADRGVPHPSSQRMRLYGSLWDAEDWATQGGRVKTDWSRAPFVAQYRNFTAAPPATAADGRYGQQMDAAAQQAMKWARDNYMVYDYCADTKRFPQGTPPECSMA

SEQ ID NO: 265587 - protein, 51 aa, Zea mays
  Clone ID: MRT4577_173821C.1.pep
MPFTPGPYSGVSTLALVARASAFGVGVVYGSIKLSILKVTKPKKEEVHDHH

SEQ ID NO: 265588 - protein, 62 aa, Zea mays
  Clone ID: MRT4577_173822C.1.pep
IRRGGFDVLAVYHPDNEVVNSVIIAHARGTVPIVSPPCKCCKMEANALQKREEMTTTTELSI

SEQ ID NO: 265589 - protein, 51 aa, Zea mays
  Clone ID: MRT4577_173823C.1.pep
MPFTPGPYSGVSTLALVARASAFGVGVVYGSIKLSILKLTKPKKEEVHDHH

SEQ ID NO: 265590 - protein, 51 aa, Zea mays
  Clone ID: MRT4577_173824C.1.pep
MPFTPGPYSGVSTLALVARASAFGVGVVYGSIKLSILKVTKPKKEEVHDHY

SEQ ID NO: 265591 - protein, 83 aa, Zea mays
  unsure (1)..(83): unsure at all Xaa locations
  Clone ID: MRT4577_173825C.1.pep
KRKVTNHRLIAAAFAQNNRWHRNPQCESGIPTISXAVVISSGVSPPHLRVGEEAGKPRAKPRPLRKHALPRSCQEPPSMFGTN

SEQ ID NO: 265592 - protein, 94 aa, Zea mays
  Clone ID: MRT4577_173826C.1.pep
NQEGSSTKKAFYLIKKCPGRDWYFSFLVDAIIPFLEKRLKLPKDLLLTHHPSIGKLKVGPPTQTNPVPCFGRTKTPKGFPNAVFKTPSTKGNLF

SEQ ID NO: 265593 - protein, 42 aa, Zea mays
  Clone ID: MRT4577_173827C.1.pep
ERPPGQVRCPSRCSVICASRTASSNSWFQVGFSSGELIYYFC

SEQ ID NO: 265594 - protein, 74 aa, Zea mays
  Clone ID: MRT4577_173828C.1.pep
AGLFFFLDLLVCLESSGGSWGRGNAREADRGRLVYVPTRRGVSVTGSKKRAERTKAYTGSLSSIASRTRLAPYA

SEQ ID NO: 265595 - protein, 256 aa, Zea mays
  unsure (1)..(256): unsure at all Xaa locations
  Clone ID: MRT4577_173829C.1.pep
PRVRIRTLTLANLVGDGRARASRRRRREPPIPAAAARKPALARHSSFVRSPANNTKPATERAFEGMDTEFIPIVRSGGWADIGSRHTMEDVFICFDNFMQDFGIESFEEGPSAFYGIFDGHGGKHAADFVCSNLPRFIVEDEDFPREIVKAMSSAFLQADASFADACSLNCSLSSGTTALAALVXGRSLLVANAGDCRAXXLCRRGKAIEMSXDHKPSCNREKIRIEALGGXVDDGYLNGQLNVARAFGDWHMEGM

SEQ ID NO: 265596 - protein, 60 aa, Zea mays
  Clone ID: MRT4577_17382C.1.pep
CIHFIDGLSLYGDPWIHYKCHYIENHYASPAEMAPATAIVGARECDLALSYAQLPPLRMT

SEQ ID NO: 265597 - protein, 237 aa, Zea mays
  unsure (1)..(237): unsure at all Xaa locations
  Clone ID: MRT4577_173830C.1.pep
MAAAVRHIVRRRLSTVAAITAPVPTXPDSILNPSSSSTPLTSRHKTRLAISLLKSSPPTPPDQILSIWRAAGLDPEXHIDRVALSLDASKLSSAPDTLRDLGSIDLTPRHTSHDIVLLGQGHLXLPDAVSXFQASPYTRSLDDVIFXCIVSGKHTEXARGLQTLPDAHXVKPNTETFNGIIKSCXETGTIRSIYCXFDEKXKKGLKANSITFTTXALAGFXYKEEKFDDIEKVLELM

SEQ ID NO: 265598 - protein, 56 aa, Zea mays
  unsure (1)..(56): unsure at all Xaa locations
  Clone ID: MRT4577_173831C.1.pep
DYKSWITFXFHLSLKESMTPHLICKATLLHLYWTTFNGSPASPNIISLSTSTLTIT

SEQ ID NO: 265599 - protein, 441 aa, Zea mays
  Clone ID: MRT4577_173832C.1.pep
MAHRVVFFAADLDLASREGPRRGGEILGCVPRDDCAKALGFALSTGRKRGKTLGAMRYMWMHAIGSESGKAIIIDCDPGVRSPANNTKPATERAFEGMDTEFIPIVRSGGWADIGSRHTMEDVFICFDNFMQDFGIESFEEGPSAFYGIFDGHGGKHAADFVCSNLPRFIVEDEDFPREIVKAMSSAFLQADASFADACSLNCSLSSGTTALAALVVGRWEPFLFVFWPLKFAHAFHLNPQMLSYFCVWMLNRSLLVANAGDCRAVLCRRGKAIEMSRDHKPSCNREKIRIEALGGYVDDGYLNGQLNVARAIGDWHMEGMKACGGLGPLTAEPEVMTMDLTDEDEFLIMGCDGIWDVFLSQNAVDFARRKLQEHNDPAACCKELVDEAIKRKSGDNLSVVVVCFNSRPPPVLTTPRPRVQRSISAEGLRELQSFLDSLAD

SEQ ID NO: 265600 - protein, 160 aa, Zea mays
  Clone ID: MRT4577_173833C.1.pep
MSPATADEPSVAMEEQPGKESEEAADAMEEQLGKESEEAAESAEAARQVEVEPEEGVDPAEAMEKAGEEAEAEEGASLRPALPVGRVKRIMRVDRDIKKVTSEAALLIAAATELFLGSLATGAHAAAARRSRRTVRAVHVRAAGRAHRPTADFLLDCLAA

SEQ ID NO: 265601 - protein, 136 aa, Zea mays
  unsure (1)..(136): unsure at all Xaa locations
  Clone ID: MRT4577_173834C.1.pep
HWVPRGRPGPAHIRRGSQASCCPASLYESLRTTIFAIPRATASLQPPRYPATAEGRTPSATGGTTIHCRLQARRTTLRARCACWVIPGVPXSADVTDCGGKRDWVGWNSSTELSSPPSRPSRRPDPCIPLHRRASD

SEQ ID NO: 265602 - protein, 79 aa, Zea mays
  Clone ID: MRT4577_173835C.1.pep
VLVGLKLCERKSREFMVELVLLDLLLPLPRLDQVGYNRSTAFVSLRAGRRLTHTFGYIGKQVWYDREVTDFDEPELMHS

SEQ ID NO: 265603 - protein, 99 aa, Zea mays
  Clone ID: MRT4577_173836C.1.pep
KACLMTESTACTWGPASYGCLLRLQLSTLSCFRPWTPSSQVTCPQPGIYSAPPPPTPFHMVCWNSVLFFLTSASTCDIFFLNNVRCYSICHQINPSLAL

SEQ ID NO: 265604 - protein, 111 aa, Zea mays
  Clone ID: MRT4577_173837C.1.pep
RLSAIVVSEEKQSLVAARKLRENQGIEQIPGKLVQLLSVRREEAPSSSKENIARIEPNHKLELMSNEIKLERVRDYLAGSRRALRLLKAKRLEGYVDGTIVEPKYKLNVEW

SEQ ID NO: 265605 - protein, 50 aa, Zea mays
  Clone ID: MRT4577_173838C.1.pep
LHGVDDNIGKSKKILAAMSKRMDRNKWIIGGIITALVLAILLILYFKLAN

SEQ ID NO: 265606 - protein, 159 aa, Zea mays
  Clone ID: MRT4577_173839C.1.pep
MLSEHGARSFRSAPEIGRNLCYVAWISFLHARFSKFQVTCSSNSHHSAPPLPCPRRRARHRRARALGGRALGPTPPRPCPHTATPDAECRPTPPRPSPTPPRPTPSAGQCCRAPALARPQPHAAAPLPPHRRRPQSPRPRPPRLRLPRPLSSAHTHPRS

SEQ ID NO: 265607 - protein, 161 aa, Zea mays
  unsure (1)..(161): unsure at all Xaa locations
  Clone ID: MRT4577_17383C.1.pep
MASKANGPAIGIDHNKTHSGVGGWHHQRVRHQPQRPGNRPTPXTDALTHCARPMGHADKNHXCMNPIDTVFDGKRPIRTRFTDAPDQRDIKLGPLKVIPGAGEKPMIVGQHKGEEKQLAAQEISSMALIKKREIAEAYLGSTIKNADVTVPAYFNDSQGQA

SEQ ID NO: 265608 - protein, 59 aa, Zea mays
  Clone ID: MRT4577_173840C.1.pep
TRNIDLVRANSNRIKLSVVFLRSCQSQLKWSKAFCCFFVHLNELIVRLLLMFYEMFPPH

SEQ ID NO: 265609 - protein, 42 aa, Zea mays
  Clone ID: MRT4577_173841C.1.pep
ADSECGISHSTNPSNGDPTNFDLMPESFDSEIALIVCHANHM

SEQ ID NO: 265610 - protein, 65 aa, Zea mays
  Clone ID: MRT4577_173842C.1.pep
LVRMNSLPTSRRVASRRVNVQPCRRATTSYPSLTASNFTLEQYYYYYKYRRMFCPKKKKKKAPRA

SEQ ID NO: 265611 - protein, 226 aa, Zea mays
  unsure (1)..(226): unsure at all Xaa locations
  Clone ID: MRT4577_173843C.1.pep
DAWGFIVKEMLGQGTFGQVVKCWDTETNDYVAVKVIKNQPAFYHQAIMEVSLLRTLNQKFDPDDQHNIVRMLDYLSFQNHLCIAFEMLGQNLYELLKRNHLRGLKLKYVQAFSKQILDAMVVMREAGIIHCDLKPENILLXIDMWSFGCIVAELFLGLPLFPGATEYDVLQRMVKILGGQPPDELLREAXNTVRFFKHVGSIYAGHAAPIGLSSAYRILSEEEAEA

SEQ ID NO: 265612 - protein, 84 aa, Zea mays
  unsure (1)..(84): unsure at all Xaa locations
  Clone ID: MRT4577_173844C.1.pep
SSRKPEERRRAAEYQRGEASGRRKDHNPKKLEFNTRSPPAPPHDHPFLNPDDHQPWPSPLNPTAPPPPNRPPGPPTARXPAXPP

SEQ ID NO: 265613 - protein, 97 aa, Zea mays
  Clone ID: MRT4577_173845C.1.pep
MDRHGSVRLPTPEDVFTDFRARRDGILKALTTGGGSLFRSGFRCGIRSLRFRLPGCFRVVRQMWRSSTSCATQCRGEQSAIAHPQIRHWYSGSLART

SEQ ID NO: 265614 - protein, 252 aa, Zea mays
  unsure (1)..(252): unsure at all Xaa locations
  Clone ID: MRT4577_173846C.1.pep
MSNRRFIVKEMLGQGTFGQVVKCWDTETNDYVAVKVIKNQPAFYHQAIMEVSLLRTLNQKFDPDDQHNIVRMLDYLSFQNHLCIAFEMLGQNLYELLKRNHLRGLKLKYVQAFSKQILDAMVVMREAGIIHCDLKPENILLAPSVATAAAVKVIDFGSACLEGKTVYSYIQSRYYRSPEVLLGYPYTTAIDMWSFGCIVAELFLGLPLFPGATEYDVLQRMVKILGGQPPDELLRESXNTVRFFKHVGSIYA

SEQ ID NO: 265615 - protein, 34 aa, Zea mays
  Clone ID: MRT4577_173847C.1.pep
ELSNLSRSTRACYLITLPQCHLCSLHWLSIANLA

SEQ ID NO: 265616 - protein, 124 aa, Zea mays
  unsure (1)..(124): unsure at all Xaa locations
  Clone ID: MRT4577_173848C.1.pep
EFYSVATAAAVKVIDFGSACLEGKTVYSYIQXYTTAIDMWSFGCIVAELFLGLPLFPGATEYDVLQRMVKILGGQPPDELLREAKNTVRFFKHVGSIYAGNXGAYXGLFSAYRILSEEEVEARD

SEQ ID NO: 265617 - protein, 52 aa, Zea mays
  unsure (1)..(52): unsure at all Xaa locations
  Clone ID: MRT4577_173849C.1.pep
MAVQERRTIDLEEEWAFMQNGITKLKNILXVKPEPKSFPXDYIILYTTIYNI

SEQ ID NO: 265618 - protein, 51 aa, Zea mays
  unsure (1)..(51): unsure at all Xaa locations
  Clone ID: MRT4577_17384C.1.pep
PQLIGLPSNHGISPCSQPVQWESSGRTQEASRGSIPPLQGPRGLXXNSASI

SEQ ID NO: 265619 - protein, 576 aa, Zea mays
  unsure (1)..(576): unsure at all Xaa locations
  Clone ID: MRT4577_173850C.1.pep
VRMLDYLSFQNHLCIAFEMLGQNLYELLKRNHLRGLKLKYVQAFSKQILDAMVVMREAGIIHCDLKPENILLAPRRVTLLIIGIFHHSFWVTTLKNTVAXSVKXEFYSVATAAAVKVIDFGSACLEGKTVYSYIQSRFYRSPEVLLGYPYTTAIDMWSFGCIVAELFLGLPLFPGATEYDVLQRMVKILGGQPPDELLREAKNTVRFFKHVGSIYAGNXGTYXGLSSAYRILSEEEVEAQRDSKRQKMGKWYFPHLKLDRLICTYPWNNSELAETEKTDRLGLVDFLKGLLEFDPNKRWSPLQALHHPFITGESFTGPYEPIPETARIPVARAAAIDHNPGGGHWLHSGLSPQVGSVNRYLPLNNVYPPKVPFSYGSSYGSFGSHGSYTGNAGFGNSYGSIGDANAINMYYSPLGSSGLTQIGPSPDVRLRMRLSHDRGIRLSPGSLGPMSVGASPSQFTPPNYHMQIPANSAGTHGSGSPASGVIHGSPLGKAAAVGPYNMRRNLPMPPHDYVSQHGHGRCRDGVSFSHSDACAQGHTGHSHNAAVPSSYHSGWRPKIGSRSGISLEASSSHVLS

SEQ ID NO: 265620 - protein, 180 aa, Zea mays
  Clone ID: MRT4577_173851C.1.pep
DCNPSGQQSINRDLYSVPSVKHRAGLEALLGEASAPVHFEEHSHQHCFQSQGAATSERRLIKAPNLLVYHRKKKHNKPLVEIAEETTENNTIPALQMDGVDPVTAKKEVFLKQIVKEISGILPAPANPTPKPIISERSTAVSLRRSRRIAGMRAEIAKQIFLKSNKKVMKALRWWGNWKR

SEQ ID NO: 265621 - protein, 70 aa, Zea mays
  Clone ID: MRT4577_173852C.1.pep
QQSKQVGGVGAFVSVVKGRQRQVQCARLTAALADELITFKHQTSLKCAGYLQELLLLRLREQSGESPDAL

SEQ ID NO: 265622 - protein, 65 aa, Zea mays
  Clone ID: MRT4577_173853C.1.pep
REKGPISILLWKLNSVLRLVFRPKMWAYRPKTSHTSPTKDPHGDIFKKEMNESSRKVLYRIRTDD

SEQ ID NO: 265623 - protein, 112 aa, Zea mays
  unsure (1)..(112): unsure at all Xaa locations
  Clone ID: MRT4577_173854C.1.pep
PVPGMKALPINPPQDEFVPLPREVVPGIFVPGMEVPEIYGAPRMGPPFGPIIXSGQKGGPLALKALGRPNPVDGAIFPPLREEFFFGSKDPEVVDPLVRQPKRRVAPPSVFF

SEQ ID NO: 265624 - protein, 59 aa, Zea mays
  Clone ID: MRT4577_173855C.1.pep
NCYAWPLLYINKLGLKPCVSFPPGPDLNHVVLDTKPPCHNLSLSSKASNGVFSNHYALF

SEQ ID NO: 265625 - protein, 63 aa, Zea mays
  Clone ID: MRT4577_173856C.1.pep
RLQPLLRPTCPCCAGVQTPRPSPCGGVLGVSFGVTSVQTCPPPEGFGRYLRSKTRWFAGFCNS

SEQ ID NO: 265626 - protein, 35 aa, Zea mays
  unsure (1)..(35): unsure at all Xaa locations
  Clone ID: MRT4577_173857C.1.pep
EEGRHQKSMRRGGFTDSPWLGGQGEVRVRXNGADG

SEQ ID NO: 265627 - protein, 215 aa, Zea mays
  Clone ID: MRT4577_173858C.1.pep
MGCNGIRMASPSASGEKKTTILVARKGRLRQRYDGEYRLVAGCVPYRVDADGQTQLLMVSTPNRDDLVFPKGGWEDDEDVHEAACREALEEAGVRGAINRSALGMWVFRSKSSPVSSDSPRGACKGYIFALEVAEELEQWPEQDTHGRQWVSPADAYRLCRYDWMREALSALLDRLTEEPEPPKSPAAEGLGDHAGVCMMVKATTAAADRAVALC

SEQ ID NO: 265628 - protein, 102 aa, Zea mays
  unsure (1)..(102): unsure at all Xaa locations
  Clone ID: MRT4577_173859C.1.pep
PLFFFFFWRGGGGVSSVALRGVLFPXXWPLAWXPXVLGCPVSTCPCPXGVLAVCFSSLXALGGGRVVXRWXLGPPCLLYAVVRAQGVVATRPDACLRGCPQA

SEQ ID NO: 265629 - protein, 112 aa, Zea mays
  Clone ID: MRT4577_17385C.1.pep
MHHQEFEGCSVRAEGGLVDVYGVHAHLVVAACGGHFEFLVMPYGLTNASSTLQSLMNEILHSFIQKFVLVFFDDILVFIRTWAEHLHVKQVFQVLRTHKLVLKRSKCFFGME

SEQ ID NO: 265630 - protein, 72 aa, Zea mays
  Clone ID: MRT4577_173860C.1.pep
KGIPCSHGEGFSQLYPLGLGVQSAFKKGEEGAPHIKGDQVCGHHCFHGNKMPLLGPGPGFQKAPLFPVATPL

SEQ ID NO: 265631 - protein, 127 aa, Zea mays
  Clone ID: MRT4577_173861C.1.pep
VWLLLTELTSQIGDANPQRIYTFRRSKKLPKPALLAYQKSHRESTSRRNGAWPYHVIRIHSQRCPYGSRQVQPPSPCISTTTTCDDTNVLATDTTVLQAPSDHLGGVKDTTIHYGLDTVQHDHCNHT

SEQ ID NO: 265632 - protein, 106 aa, Zea mays
  Clone ID: MRT4577_173862C.1.pep
SRFLSGLIYTPSDQPTQVKVSRTRTQRISARFGDRELRRHRDSGSAYGGRSYSVGGGSLYPGSSGYGGAYHVGDSSVAGYGGVQSTRSWDSNDLILNIFNAPTVCA

SEQ ID NO: 265633 - protein, 89 aa, Zea mays
  unsure (1)..(89): unsure at all Xaa locations
  Clone ID: MRT4577_173863C.1.pep
GGFEAGISKDGQTREHALHAFTLGVKQMMCXCNKMDAPTPKNSKAPIVXIVKXVSSYIKKSXHSLISIWFVXCCGLEGDSIIERTTISE

SEQ ID NO: 265634 - protein, 249 aa, Zea mays
  Clone ID: MRT4577_173864C.1.pep
MGSECKGYGVGVATSPQQEQEQAGAAVAPFVAKTFHMVSDPATDAVVRWGGASNTFHVLDPATFSDYLLPSYSRVRNFASFVRQLNTYGFRKVDTDRWEFAHESFLRGQARLLPLVVRKRKKAGAGAGAGGRELCEAGEEVRGTIRAVQRLREQQRGVEDELRAMDRRLRAAESRPAQMMAFLAKLADDPGLVLRAMLAKEEELALIDKGSEAQPAKRRRIGAEAVDLAHSRGGGAVPFPFSVLGQVFY

SEQ ID NO: 265635 - protein, 717 aa, Zea mays
  unsure (1)..(717): unsure at all Xaa locations
  Clone ID: MRT4577_173865C.1.pep
YPPALRVSFDPYDLPXDVRQLAQIVYSAHGGEVAVAFLRGGVHIFSGPNFDQVDSYHVNVGSAIAPPAFSSSSCCLASVWHDTLKDRTILKIIRVLPPAILSTQTKISSAAWERAIADRFWWSLLAGVDWWDAVGCTQSAAEDGIVSLNSVIAFLDADFHSLPTMQQRQQHCPNLDRIKCRLLEGTNAQDVRALVLDMQARLLLDMLGKGIESALTNPSTLLPEPWQASSDMLSSIDADKMTVEPALLPNIQGYVDAVLDLASHFITRLRRYASFCRTLASHVGPSSTTGTSRNMVTSPTNSSPSPSNNQGNQGGSTSATGNSQMQEWVQGAIAKISNNSDGAATATQNPMSTRTSFMPISINTGTFPGTPAVRLIGDCHFLHRLCQLLLFCLLFRRRQSPRLLASSQKNQDSAMQKIQHMMNAKTEDNSTTVRSGLGAAKVEEGHSARGGQFVLGGAKGPEENPIGKSVRIGSGNAGQGYTSDEVKVLFLILVDLCRRTSTLPHPLPASQVGSSSIIIRLHYIDGNYTVLPEVVEASLGPHMQNMPRPRGADAAGLLLRELELQPPAEEWHRRNMFGGPWSEPDDFGPLDNMPRLKISGSINSHLSDMEVDAVSSIGIDLWPRKRRLSERDAAFGLKTSVGLGGYLGVMGSRRDVVTAVWRTGLDGDWYKCIRCLRQTCAFAHPGAPNQTNEREAWWISRWSHACPMCGGSWVKVV

SEQ ID NO: 265636 - protein, 103 aa, Zea mays
  unsure (1)..(103): unsure at all Xaa locations
  Clone ID: MRT4577_173866C.1.pep
TRPKSDINTGCTASCTTNXVXXIPNVINDKDGLVEGLKTTAHALXASEVTXDXPDLRTKTGGRAVIPNIIPSSNGAAKAVGKLLPELNGKSTGMPSRDPTGDD

SEQ ID NO: 265637 - protein, 84 aa, Zea mays
  Clone ID: MRT4577_173867C.1.pep
HSWHLSRGREGYTRRPCRGAGRGLHAALVLSAPRNRTGDLRRAGCCRRIVVVVGRREVGEAGSWRRSGGGGDGVSLQARSTPVA

SEQ ID NO: 265638 - protein, 41 aa, Zea mays
  Clone ID: MRT4577_173868C.1.pep
VLQQKCFSHSHVLRVILGCYRLFKTAYFKCRKLGDFVTACH

SEQ ID NO: 265639 - protein, 85 aa, Zea mays
  Clone ID: MRT4577_173869C.1.pep
PKLYCLTLTHTIRGSIDKINTCKNLMRELTDTNCHNLTGPYIQRKHDKPTSLINYSTPRENPKSARTLLRIYFLSLPQVPADYAS

SEQ ID NO: 265640 - protein, 77 aa, Zea mays
  Clone ID: MRT4577_17386C.1.pep
LYVKLKLRTTYCNTQLLYFVRCLLLSSVQCLLCSYNNISRPLSNINKLKNFMNIIQIKTCSKKIKKKKTKKSNKKKK

SEQ ID NO: 265641 - protein, 255 aa, Zea mays
  unsure (1)..(255): unsure at all Xaa locations
  Clone ID: MRT4577_173870C.1.pep
MASTHDTVTSIPKDAEYDFVIVGGGTAGCVIASRLTEYLPNKKVLLIEAGPSDFKDDRVLLLKDWLNLLGGELDYDYGTTEQPNGNSHIRHSRAKVLGGCSSHNTLISFRPFEYDCKRWEEQGCVGWSFKTFMRVLDNLRTTPQPVHKRHRNQWCIDWVDSCSKAMDIPIIEDFNHEIKTTGXLKGSVGFFNVSYNPDTGHRSSASVAYIHPILSGSEKRSNLTVLTNAXVSKVNVSGSKVTGVNAHSRTVLGGH

SEQ ID NO: 265642 - protein, 150 aa, Zea mays
  Clone ID: MRT4577_173871C.1.pep
SRYLHAARGVLPVLRRRRSAAPRVFAHAASVAMAFLWLEFSQSFQVLAIFASTLTHAVALGYRFWVGAGLPARGAARGALIGPGGVLGCNLACHVGVVWMHFGAVGGGCSGIGAWVFNTLLNAALLWVFFHCYGKRGVDEGSGAASTKDL

SEQ ID NO: 265643 - protein, 91 aa, Zea mays
  unsure (1)..(91): unsure at all Xaa locations
  Clone ID: MRT4577_173872C.1.pep
MPGADCDHQRRTVSTILASLAMALTVALNVGMFCEGYAGADKRILGKMEGVESYDVDMMQQXVTVKVNATPDAVLQTVFKTGMKTSFWEAD

SEQ ID NO: 265644 - protein, 319 aa, Zea mays
  Clone ID: MRT4577_173873C.1.pep
MVVPSGPKVPALLAFGDSIVDTGNNNYLVTVVKANFPPYGREYPNHKATGRFSDGKITVDFLASALGLKETLPPYLNKSLTLEDLKTGVSFASAGSGYNNATCRTSSTMTIERQLQLFSEYKAKVGGIHERALFVVCSGSNDIVEHFTLADGMTSPEYADMMARRAIGLVEALIGQGARQIALTGAPPVGCVPSQRRIAGGVRMQCATDRNQLALLFNRKLSLEVAKLSGKYRGVNIFYVDLYSVLADVVQRYQALGFKDGKDACCGYVGLAVGPLCNIGSRTCPDPSKYVFWDSYHPTERAYKLMMDDFLTRYMRYIH

SEQ ID NO: 265645 - protein, 78 aa, Zea mays
  Clone ID: MRT4577_173874C.1.pep
IGILWFSVMFGRRNGDMMFEMQMYSQLGLAEEDNAEESRREEAFRGVTRDFEQSEHVMFLEESLIDQALNKKTQKKKK

SEQ ID NO: 265646 - protein, 109 aa, Zea mays
  Clone ID: MRT4577_173875C.1.pep
KVGANQSLEKYSFLLRASIKQEKNGSVLPADQKKKKEEAIHPAINWLDANQLAQPGEFVAKKKEVDSLSFPLLPKMYQAAGEKIHGPGGMQEKAPPCSGGPAPNKKKVG

SEQ ID NO: 265647 - protein, 247 aa, Zea mays
  Clone ID: MRT4577_173876C.1.pep
TPQPASDSHLPLCRGTRLLVLAVPTRVSPEDFVRFCGPHLECAADIRFIRDDGVEDRYSVLVEFEDQSSAEWFYADLNGWRFSTSESEVCHVLFIAAVQYTPSSEVATTPPAGSTELPMCPVCIERLDQDISGILATTCDHSFRCSCVSVWTNSSCPVCQFCQKQSENSTCSVCQTTGNLWICVICGFVGCGRYQEGHAKQHWKDTQHCYSLDLETQRVWDFVGDRFVHRLNQSKSDAKHAKFKSKS

SEQ ID NO: 265648 - protein, 170 aa, Zea mays
  unsure (1)..(170): unsure at all Xaa locations
  Clone ID: MRT4577_173877C.1.pep
SGCSEGRDSRITRNAREWFCCLEAGSRSLSPGSGDGFALHRRREGFFFRRGRAGIQAGNARWELDCLEHGTKADGHMPGDQTIAEGDDAFNTFFSDTGEXKHVPHADLDDLAPTDIDEVRTGTYRQIFHPEHLISGKEDANNNFGRGQYTIGKEIDDLSLDRIRKLADNC

SEQ ID NO: 265649 - protein, 180 aa, Zea mays
  Clone ID: MRT4577_173878C.1.pep
PAARLRLAPARNYSSSGSLLLPSAHLRHLLSVSVSQLCRGTRLLVLAVPTRVSPEDFVRFCGPHLECAADIRFIRDDGVEDRYSVLVEFEDQSSAEWFYADLNGWRFSTSESEVCHVLFIAAVQYTPSSEVATTPPAGSTELPMCPVCIGELTVLYFFFVFWGLCNTIYSHMYVSPWCHI

SEQ ID NO: 265650 - protein, 312 aa, Zea mays
  Clone ID: MRT4577_173879C.1.pep
YVNLSERLDQDISGILATTCDHSFRCSCVSVWTNSSCPVCQFCQKQSENSTCSVCQTTGNLWICVICGFVGCGRYQEGHAKQHWKDTQHCYSLDLETQRVWDYVGDSFVHRLNQSKSDAKHAKFKSKSKYSGDECVNCSCNDDSDMGGAMFSSKAETIVDEYNRLLASQLETQREYYEGLLSEAKRNKEHQISEAADKAVSDKLEEMQLKLENLIVEKKKVADMNEKLTRSQDMWRQTLRDIEERERAQLKSKDEMILDLEEQIKDFKFSIKLQKSIEKNDGVKGGTLVPLPTVSDSGGKGKRSSRTSKRRN

SEQ ID NO: 265651 - protein, 85 aa, Zea mays
  Clone ID: MRT4577_17387C.1.pep
ISINNLTGFYETLRYFCFRLLRMFAACFFVYFFLKNDLITKNCSLPLFFVYFFFKNDLITKNCSLPLFCNVKEKLILRHKKIKGL

SEQ ID NO: 265652 - protein, 67 aa, Zea mays
  Clone ID: MRT4577_173880C.1.pep
LVIVDPLSFMMFIQLPAVPLMYCPSTSPGSARSARVFSWPPRANGSISRDLPQTCMPMHTHLRRKPL

SEQ ID NO: 265653 - protein, 141 aa, Zea mays
  unsure (1)..(141): unsure at all Xaa locations
  Clone ID: MRT4577_173881C.1.pep
NFFFRAPKFNLIARLLKTSEWEKPWVTQIKSLXKNPLFPSWEKTKKARPNGLSKNLPTLKGKGNPPLTGXLNPGGGXFTPRGTFNFASPLAPVLFVFFLSFFPIFPGFPRKVLNXGVPLRVPIKGLTALNPKKICLGEGFT

SEQ ID NO: 265654 - protein, 259 aa, Zea mays
  Clone ID: MRT4577_173882C.1.pep
PAPGAADPRCTASEDDPDRARGPGQMRRAVRSVAKHFPTAIVSGRCRDKVFEFVKLAELYYAGSHGMDIKGPAKGSRHTKAKGGGVLFQPASQFLPMIEQVHDSLVEKTKCIPGAKVENNKFCVSVHFRCVDEKSWITLADMVKSVLKDYPKLKLTQGRMVFEVRPTIKWDKGKALEFLLESLGYADCTDVLPVYIGDDRTDEDAFKVLRKRGQGVGILVSKHPKDTCASYSLQEPAEVMEFLLRLVEWERLSKARPKW

SEQ ID NO: 265655 - protein, 39 aa, Zea mays
  Clone ID: MRT4577_173883C.1.pep
IFKKKKKKKKKKKKKKKKKKKKQKKKKKKKKKKKNSREG

SEQ ID NO: 265656 - protein, 54 aa, Zea mays
  Clone ID: MRT4577_173884C.1.pep
AQGLTEYASPGSTPAAVGLMRDASHRGLGDARRRPDCPGNQMPSVAPIRELTPP

SEQ ID NO: 265657 - protein, 291 aa, Zea mays
  Clone ID: MRT4577_173885C.1.pep
MSGDHAKREIVTGENPAGLGKTLSRESDNKYKEESSSSIKSHRRGDKKKKTMKKVVYYETDSSSPSTFGTESDKMRQHLTSLHESIWDIVEFEAQTPQVGDENYDSDEAAQIRHFNSQETSILLASLCREEYNKVQGLKNAKEIWDVLKTTVGGLLLRRRSSKQKHLRQDNKQAGDEVAKITKRETIEGELGRFVLNKEEEPQAMYNWLKTMVNQVRNLGRTKWDDHETVKVILRSLVFRNPTQVQLIRGDPRYKQMSPEEVVGKFVSFELMIKDSKHIVNLEQGATSTPK

SEQ ID NO: 265658 - protein, 175 aa, Zea mays
  unsure (1)..(175): unsure at all Xaa locations
  Clone ID: MRT4577_173886C.1.pep
AQHAAKHAFVATLFARASAVKXAYAQLQLAQHPYDAEAIQAADAGLVAELTKLSNLKRRYSRDPAAAARSAGALAAHADEQRHLLRTYEITSRKLEAELRARDAEAERARAALADELRAERGLEERARPGRTLAALDGLHLSGLNATHFHTALRHAVKSVRAFASAMLAAMRRAG

SEQ ID NO: 265659 - protein, 55 aa, Zea mays
  Clone ID: MRT4577_173887C.1.pep
GINDLEYQWSLEERESACSQPGRCIVRSRHRGLSHWLSPPDQREVADRLEAPFRV

SEQ ID NO: 265660 - protein, 107 aa, Zea mays
  unsure (1)..(107): unsure at all Xaa locations
  Clone ID: MRT4577_173888C.1.pep
DGVWYPDESLLRRIRAAFCYTEPGLRGAYRNYKRDLVXWTKRGNRLHTILVILGGTITLITLTGLLTFMFFLLGATGNANICSSLMSLASDRGILDIFFACLGGEDI

SEQ ID NO: 265661 - protein, 108 aa, Zea mays
  Clone ID: MRT4577_173889C.1.pep
PENAAGYMIAATNSGASKHVPPTTRTSWTHARQTRRIIFWSRNHVSSADLAEEVAEGGDELHPEAGHLRVCSKPGVYWAAPDLSSRVRSSREMAPKRLTGWLAGSSAG

SEQ ID NO: 265662 - protein, 517 aa, Zea mays
  Clone ID: MRT4577_17388C.1.pep
MEPAYVVTLSFLFLFLLHHLLGRHRRRTNGKNKRTQLPPSPPAIPVLGHLHLLRKPIHAALARLAERYGPVFFLRLGSRQAVVVSSAACATECFTENDVCFANRPRFPTLLLVSFGGATLPMCRYGPYWRNLRRVATVQLLSAHRVSCMLPVISAEVRAMARRMYQSAAAAPAGAARVELKRRLFELSHSALMETIARTKTSRAVADDDTDMSPEAQEFMKALDVFLPLLSGANAWDYLPVLRWLDVFGVRNKILRAVSARDAFLRRLIDAERRRLEEGGENNDKKSMIGVLLSLQKSEPEVYTDTMIMALCSSMFAGGSETTATTAEWAMSLLLSHPDVLKKAQAEIDASVGHSRLLGADDLPRLGYLHCIISETLRLYPVVPTLVPHESTADCTVGGHRVPSGTMLLVNVYAIHRDPAIWADPAAFRPERFEDGRADGLFVMPFGMGRRKCPGEALALRTLGLVLGTLIQCFDWDTVGGAEVDMAEGGGITLPRAVPLEAICKPRHAMLGVLKGL

SEQ ID NO: 265663 - protein, 144 aa, Zea mays
  Clone ID: MRT4577_173890C.1.pep
IISLITRKRSRVVHDRRDKQWRVEARTTTTTRTPPPPPRPTVHTYTRPTTPHTETRTTHELDSRAPDQTNHILEQAPPPRADLAEEVAEGAGGRVYVWSRPRRRRRRRCARGGWYVLRRATVCRGDHVLPCCVFWFQINHIIAG

SEQ ID NO: 265664 - protein, 60 aa, Zea mays
  Clone ID: MRT4577_173891C.1.pep
CVAAYTVFRDIPCMCQNSGCIKVVEIAVRVMLGKLDLSGDGAFQRKQGIHLSPPALYSTT

SEQ ID NO: 265665 - protein, 129 aa, Zea mays
  Clone ID: MRT4577_173892C.1.pep
MSCREGLMSPQTETKASVGFKAGVKDYKLTYLPTRASQPASKPLGRHLSRASYPRREIRRGPINTRLTTDSQMAGLRMKFVAVAAMAAALVASAAAAEAPAPAPASDAVAAVPLAAASLAAAAFGYLFC

SEQ ID NO: 265666 - protein, 143 aa, Zea mays
  Clone ID: MRT4577_173893C.1.pep
MEEDGGSGSDSMEFVAGAETSAGAGTNAGRNRGVGAGTSVGGGGGTKLPHVLQKSFGEVQGILEHNRVLIQEISQNQETRDADGLSRNVALIRELNTNIARVVDLYGDMSGSFARAVAAKKDAAGDKSGPKRPRSAGAGGQQQ

SEQ ID NO: 265667 - protein, 49 aa, Zea mays
  Clone ID: MRT4577_173894C.1.pep
IFFEIGELSGAFKKGPILIFFFTLWPFSLSLVILKGKFYTFFFIFFFLV

SEQ ID NO: 265668 - protein, 89 aa, Zea mays
  unsure (1)..(89): unsure at all Xaa locations
  Clone ID: MRT4577_173895C.1.pep
PSRGRSCGEYAEQQHEEGDQRGPRHHSLRHQRRRQSRPRPAFFFPGGHPTGDQXLGGQEEDRDRSQRRNHPQQPQGTRSPNPQQGPKGP

SEQ ID NO: 265669 - protein, 63 aa, Zea mays
  Clone ID: MRT4577_173896C.1.pep
FKGGNFWVLLGFLRGPNGGGGPVFCYKRFLGGGEKPPRWSREPEFFLNGFPIFRGGGVHLGRP

SEQ ID NO: 265670 - protein, 324 aa, Zea mays
  Clone ID: MRT4577_173897C.1.pep
TRPVSSPHLLSWKPPRSDPDKMAAFFGAAPPPALASFRHEEEEEQHQDAAEEVYHVDDVDEGSGDGRGHGGAGQGKLCARGHWRPAEDAKLKELVAQFGPQNWNLIAERLDGRSGKSCRLRWFNQLDPRINRRAFSEEEEERLLAAHRAYGNKWALIARLFPGRTDNAVKNHWHVLMARRQREHSGALRRRKPSSTSPSPAPAPAPHLAPVVVLHHHHHYAGGSPPMPPLHAADAHTQYTAAAAAADTRAHSGGESDETASTCTTDLSLASAAPCFYQSGYDVAPRAAAFAPSARSAFSAPPATARSDDKVSLPFFDFLGVGAA

SEQ ID NO: 265671 - protein, 512 aa, Zea mays
  unsure (1)..(512): unsure at all Xaa locations
  Clone ID: MRT4577_173898C.1.pep
MAIRSKAWISLLLALAAVLSARAEEPAAAEAEAVLTLDVDSFDEAVAKHPFMVVEFYAPWCGHCKNLAPEYENAAKELSKHDPPIVLAKVDANEEKNRPLATKYEIQGFPTLKIFRNQGKNIQEYKGPREADGIVDYLKKQVGPASKEIKSAEGVAAHFDDNKIYIVGIFKEFSGTEFTNFMELAEKLRSDYDFGHTLHASHLPRGDASVEGPLIRLLKPFDDLVVDSKDFDVAALEKFIDASSTPRVVTFDNNPDNHPYLMKFFQSSAPKAMLFLNFSTEPFDSFKSAYYAAAEEFKDKEIKFLIGDIEASQGALQYFGLKEDQTPLILIQDGDSKKFLKDHIEADQIVSWLKEYFDGKLTPFKKSEPIPEVNNEPVKVVVADNIHDVVFKSGKNVLIEFYAPWCGHCKKLAPILEEAATTLLNDEEVVIAKMDATANDVPSEFEVQGYPTMYFVTPSGKVTSYDSGRTADDIVDFINKSKETAXAPSRRRRXSGKAADAAEKTEPVKDEL

SEQ ID NO: 265672 - protein, 512 aa, Zea mays
  unsure (1)..(512): unsure at all Xaa locations
  Clone ID: MRT4577_173899C.1.pep
MAIRSKAWISLLLALAAVLSARAEEPAAAEAEAVLTLDVDSFDEAVAKHPFMVVEFYAPWCGHCKNLAPEYENAAKELSKHDPPIVLAKVDANEEKNRPLATKYEIQGFPTLKIFRNQGKNIQEYKGPREADGIVDYLKKQVGPASKEIKSAEGVAAHFDDKKIYIVGIFKEFSGTEFTNFMELAEKLRSDYDFGHTLHASHLPRGDASVEGPLIRLLKPFDDLVVDSKDFDVAALEKFIDASSTPRVVTFDNNPDNHPYLMKFFQSSAPKAMLFLNFSTGPLDSFKSVYYAAAEEFKDKEIKFLIGDIEASQGAFQYFGLKEDQTPLILIQDGDSKKFLKDHIEADQIVSWLKEYFDGKLTPFKKSEPIPEVNNEPVKVVVADNIHDVVFKSGKNVLIEFYAPWCGHCKKLAPILEEAATTLLSDEEVVIAKMDATANDVPSEFEVQGYPTMYFVTPSGKVTSYDSGRTADDIVDFINKSKETAXAPSRRRRXSGKAADAAEKTEPVKDEL

SEQ ID NO: 265673 - protein, 74 aa, Zea mays
  Clone ID: MRT4577_17389C.1.pep
PTRPIRKPDLLFAYQKLRSLLFFNQLNDLPSIKQQEIRTSSSKEQPCFSGRNAEAVQLQDTNHSLSDMINIRKA

SEQ ID NO: 265674 - protein, 114 aa, Zea mays
  unsure (1)..(114): unsure at all Xaa locations
  Clone ID: MRT4577_1738C.1.pep
LEGDESTSVTQKQMPNQREQYVGTVHLFIGTGHSLCKITFMPFTFDNNSIVIYRGLNSLFIFRVGFIXVGIAPKLSCSHLRRCIDLRIILASCDTNLSPKIPVHTLNSRNTVKS

SEQ ID NO: 265675 - protein, 329 aa, Zea mays
  unsure (1)..(329): unsure at all Xaa locations
  Clone ID: MRT4577_173900C.1.pep
MALASLAASLPVAATAAAVRFPFRFRIGRAMASAAAGASPARVAVVQMTSVGDVDANYATCSRLTKEAAASGVKFLCFPEVFSFIGSKDGEAMKLAEPLDGPIMQRYCSLAKESSMWLSLGGFQEKGPDDSHQYNTHVLIDDTGKVRSSYRKIHLFDVDVPGNMVYKESRFTAAGDTIVAVDSPFGRLGLTVCYDLRFPELYQILRFKHQAQVLLVPSAFTKITGEAHWEILLRARAIETQCYXRNHLQVIAAAQAGKHNEKRESYGDSIIIDPWGTVIARLPXNVVADRLSTGFAVADLDLSKVEAVRTRMPISEHRKFDSDWKPTPL

SEQ ID NO: 265676 - protein, 65 aa, Zea mays
  Clone ID: MRT4577_173901C.1.pep
FALYKIWQLLIYICLHGRGYSALPRVSDNCGHLSVIGSKKKASMPCILLRGLGCWGSRVAIHSIQ

SEQ ID NO: 265677 - protein, 77 aa, Zea mays
  Clone ID: MRT4577_173902C.1.pep
GLAWPGNVSYAFNNYYQQHDQNEDSCYFNGLGLITTVDPSVDNCLFPLTIHVSAATSLHLTLPVSLLLVLWFCIVCI

SEQ ID NO: 265678 - protein, 113 aa, Zea mays
  Clone ID: MRT4577_173903C.1.pep
GRVGGRVGGYLRRCSWKSPNLKLGKFMLTDFGCRRRSSTLDSTLGTELAFPSQQKSREETTAYIAPKMKFCTAFTTKSVVTNTGLNGHICIRLSDYHLYHEKSYIKLRRIGEK

SEQ ID NO: 265679 - protein, 203 aa, Zea mays
  unsure (1)..(203): unsure at all Xaa locations
  Clone ID: MRT4577_173904C.1.pep
MSTYSMGKDELLLDLTDSLVVLTFSSLATHQDXCIDNLSAADTPGGYPSKTSKEVTAEDFHYGSLASPDTELKPFKISLVSNVVTTLTGLNVLXISAAWMMMDPGVXVVVLPLVRHRAHLLHLGXVCCSFFTASFYRMYTKTLYGGDLMWFPXGXFRFQYSHMNTTRETLSXIRRDNPGLYILDFWLVGKDLPTEVQNNVIYL

SEQ ID NO: 265680 - protein, 46 aa, Zea mays
  Clone ID: MRT4577_173905C.1.pep
SRLPIHTGKGPLDNSFDHIADPDNSNAWAYLTNFVPGQRGRRRRGP

SEQ ID NO: 265681 - protein, 85 aa, Zea mays
  Clone ID: MRT4577_173906C.1.pep
QPVPKLGIRLEAVPEDILNGIAPFLSMVSMTRATPSGKKCHAIMCPRRFLWSHMLAQRAWYFMYTCNITDAAHAYYHKLRMWYYF

SEQ ID NO: 265682 - protein, 96 aa, Zea mays
  Clone ID: MRT4577_173907C.1.pep
PSSRAHGELSDLESDLAGHKIGPLLPGATPVGEFIVPPAHEIQEFFPPPKGAQAKRFASKYNFAFVRGVPLNPGGRFEWAPVVSILSERASGARLS

SEQ ID NO: 265683 - protein, 63 aa, Zea mays
  Clone ID: MRT4577_173908C.1.pep
HRIIRLERTYDQSGARLMLTYQQAIPMTTHTDTRHHSSQLKRQRTLHSFNNILLQQQELCLMY

SEQ ID NO: 265684 - protein, 40 aa, Zea mays
  Clone ID: MRT4577_173909C.1.pep
KSPAEESNKVFVGITQGKLVDPMLKCPKKWDGKQLPINIK

SEQ ID NO: 265685 - protein, 84 aa, Zea mays
  unsure (1)..(84): unsure at all Xaa locations
  Clone ID: MRT4577_17390C.1.pep
GRERLVSKDCCDKTITDFFKVYQFENLFAKRNTPGAHAVDLWDYQDFITAEDVFKHQGFXTSGGDWMQMXELCAFLDHVGGKSS

SEQ ID NO: 265686 - protein, 187 aa, Zea mays
  Clone ID: MRT4577_173910C.1.pep
IGTLEAGRVLFGQPLTPMLSTMGMTPLLAAVYVGAMQNIFSKSAKYSLFDPCKEMAYIPLDEDMKVKGKAAIDVVCNPLGKSGGALIQQFMILTFGSLANSTPYLGGILLVIVLAWLGAASSLDKQFSSLAKEDLKKDKAAREKVEPSLLKAPAEGSDDVLAEQTNGSVTPQATGTESSPSNSSPIQ

SEQ ID NO: 265687 - protein, 244 aa, Zea mays
  Clone ID: MRT4577_173911C.1.pep
NNSLLGDFSTATGIATLTMMLLGRTRLRTFGWGVAAKITPTVLLLTGVGFFSLILFGQPLTPMLATMGMTPLLAAVYVGAMQNIFSKSAKYSLFDPCKEMAYIPLDEDMKVKGKAAIDVVCNPLGKSGGALIQQFMILTFGSLANSTPYLGGILLVIVLAWLGAASSLDKQFSSLAKQDLEREKAAQDQEKLERSLLSSKPAEGGTGDVLLVEQQTNGSATSKATGTESSPSNSSLPPHSIDRS

SEQ ID NO: 265688 - protein, 57 aa, Zea mays
  Clone ID: MRT4577_173912C.1.pep
HTCSLSFVSFPLSITTSDRGLILWNFGHLSHFSSSLLRDITISLKLLSSLTTLSFIS

SEQ ID NO: 265689 - protein, 52 aa, Zea mays
  Clone ID: MRT4577_173913C.1.pep
AAGPTDSMQHWQSLRQVMTSPWDRGVQTYIISIPRIVFKTVRSHPRDHKRHA

SEQ ID NO: 265690 - protein, 81 aa, Zea mays
  Clone ID: MRT4577_173914C.1.pep
GAGGCWASLGAALLGLCCSGDGREGRHLCRASEPNPKATALEPHRRQCVAVTSPPRPVAGLGDVKRLASRRWPETMARETV

SEQ ID NO: 265691 - protein, 91 aa, Zea mays
  Clone ID: MRT4577_173915C.1.pep
GVVFFFFFFFYFFFLFFFFFLPNFHGKKKFLGCLKPPHFTRLPFDRNSPEFHGGGNPKIAKGVFSPPPPLPLKGLVLRMGFQTKGKTLLGG

SEQ ID NO: 265692 - protein, 98 aa, Zea mays
  Clone ID: MRT4577_173916C.1.pep
AGRAGAAPMAATGECPSAAATLSPPPSVVSLCPASPPGLYCPLLRCLQWKVRRRTAVAGSDEHATAPRLRLGGARIRVALQHPASRSIRGTIGWLHIA

SEQ ID NO: 265693 - protein, 74 aa, Zea mays
  unsure (1)..(74): unsure at all Xaa locations
  Clone ID: MRT4577_173917C.1.pep
PPLYSLVVFFFFFFXQNPHVAPQRTLYCTTVPDSSGIRAEGDTSQSRGIDAPVKAECSQSQVTTQTLKATTPPT

SEQ ID NO: 265694 - protein, 89 aa, Zea mays
  Clone ID: MRT4577_173918C.1.pep
PLELLSSGPPDCPVRLLGFSDFCAHFSAFTALHRRPLARSSRCSADTPDSPVNYSGAAPRIPEGEQFGVGFSGTPDSPVRQTRAHFGCL

SEQ ID NO: 265695 - protein, 99 aa, Zea mays
  Clone ID: MRT4577_173919C.1.pep
RRSHMCSEVCPCSVGGSSTARGYGDSGACVGCLYGQHPVVTEERVRGVCRAGGAIGGVERESKNNSGHGGRCSDERDSEAKELGDVAVGETLGLPVHFL

SEQ ID NO: 265696 - protein, 33 aa, Zea mays
  Clone ID: MRT4577_17391C.1.pep
ASSPASAANLMNDTVDTMSRIYNHYICRRMPMT

SEQ ID NO: 265697 - protein, 74 aa, Zea mays
  Clone ID: MRT4577_173920C.1.pep
LRAMSCSESDMMMMPDGGVLSCSPPLPPRALLAASSALCCVVWVQHGSRLSMCPAVLCHHPSIIILYLYPTFCG

SEQ ID NO: 265698 - protein, 50 aa, Zea mays
  Clone ID: MRT4577_173921C.1.pep
LREAWDASVGDSLLLRGHRTFIVGTGLRSAFIAKMKGKKRARPLGAVSNE

SEQ ID NO: 265699 - protein, 116 aa, Zea mays
  Clone ID: MRT4577_173922C.1.pep
MRKMSRPIQTFIFDGYGSESAGVQHLSRYSSLRVLSVPRIWFHYLTIKPKHQCHLRFLDITDSAIKELPDDISVLYNLQTLKLSGCSNLIRLPEQMKHMSALRHLYTDGCTRLEGM

SEQ ID NO: 265700 - protein, 114 aa, Zea mays
  unsure (1)..(114): unsure at all Xaa locations
  Clone ID: MRT4577_173923C.1.pep
GKKDGWEKKKKGPKKGGGKTGKKKGKKKGKHRGGGGGGPPGKKKKNRPGGAPGGGTPGKKKKTGGXGEGPKGAPPPXRGGKTKNGGRGKNPGGGEKTGGPKKKTRKEPPPFGRG

SEQ ID NO: 265701 - protein, 138 aa, Zea mays
  unsure (1)..(138): unsure at all Xaa locations
  Clone ID: MRT4577_173924C.1.pep
GAHTMGAARCTSFSPRLYSYLPSYAPHDPSMDPAYLPALPQXLPPWGSXAXNXPXPMDPVTPTVFHTNYYTNLYAKLGLLASHQALLHDLVTDPHMLAYTNSHTTFQTNFDTDIINIITIQVLTHTVSTIRTNCRATS

SEQ ID NO: 265702 - protein, 41 aa, Zea mays
  Clone ID: MRT4577_173925C.1.pep
CKTQGVCLCLHRTTETRGTRAPCKVTRLKTCVANDFVWIVD

SEQ ID NO: 265703 - protein, 91 aa, Zea mays
  unsure (1)..(91): unsure at all Xaa locations
  Clone ID: MRT4577_173926C.1.pep
MPALAKPASRSAKPAAAPTPKPAAANPIAAIAGASHTPYFQMINEVITALKXEXTGSNSQAISTXVGEKHRASRPVNFKNMPSNQLRWSAV

SEQ ID NO: 265704 - protein, 141 aa, Zea mays
  Clone ID: MRT4577_173927C.1.pep
RAQRASVEHRPSAPARLRRFRLCQPPSVCPPASTRRSHRVGSLVPGWSSRLHGSSARARPVCFAAAAANLRVFLLVRGRLRRSRSASHLASRCSCLWRCVTMPADRSWQVLWRSPFLPGGGNSQSSLLNLPGTSRFGPVCY

SEQ ID NO: 265705 - protein, 126 aa, Zea mays
  Clone ID: MRT4577_173928C.1.pep
LNKHKYRLVEEYAPAMQSLRVNSVGEPKQGLMCQLGTFVGCATVDTGSDLDLISPTFAKSRAYNIEPGVEKVEFADCSVGYTVGVVKTSFVVGSMNASEFHPCGRAIDLDLFVLDNLTADILIGQD

SEQ ID NO: 265706 - protein, 99 aa, Zea mays
  Clone ID: MRT4577_173929C.1.pep
PIGGGPPAFLGRGPPLSGGPFRLRRWGVAKGGPPPGFSPLFFLCWGCPPPVLALWGCSGPKTFSHCCFFLFFARHVSPPCGLPVFREPCPGAKKIALLF

SEQ ID NO: 265707 - protein, 90 aa, Zea mays
  Clone ID: MRT4577_17392C.1.pep
AGPGKTSSRKPTMREPPNHRRSCSSRSTLPSGPALVGATSKFAKLRQTCTWSTGWGTEAGLIGIAHRRQTRYRQESSLLRGRHPPPLKSW

SEQ ID NO: 265708 - protein, 153 aa, Zea mays
  Clone ID: MRT4577_173930C.1.pep
MATDDGEGQQPVVLITGCAKGGIGYEYCQAFAGLGCRVVATDIPDQVPGLAADLSGTPAAEALPLDVTSDASVGAAVSDVLARHGRLDVLLNNAGVGCTGPLAELAPAAVSRALDVNFLGQVRTVRAVAPHMAGRGSGRIDNVGSVMDKAVTP

SEQ ID NO: 265709 - protein, 373 aa, Zea mays
  unsure (1)..(373): unsure at all Xaa locations
  Clone ID: MRT4577_173931C.1.pep
MQRSLITSTATQGNLNMAAIVSIAFCFLHRIVSGRTQSMMNLFPWMSNGIASLPFACISDPTRKPMPLKLDLTLPPLPDFGWNFSRLYYRFNSQLDRNIALSIITLLITCFSFVIVGGLLFHKSRKQQQSLEDCFWEAWACLCSSSTHLRQKXRVERVIGFFLAIWGILFYSRLLSAMTEQFRNQMHKVREGAQVQVIEDDHIIICGVNSHLMSILNQLNKYHESSIRLGLATARKQKILLLSDLPRKQIDKLADSLAKDLNHIDVFTKSCSLSMSTSFERAAAHKAKSIIILPAQHERYEVDTDAFVSLLALQPCKQIAPVPIIVEASNATTCELLKSITGLNVQPGEMVASKLXXQCSXXRAFXKSSFVKR

SEQ ID NO: 265710 - protein, 72 aa, Zea mays
  Clone ID: MRT4577_173932C.1.pep
CGLRNKVLVRLQAVGRLVVTTAYEYLHYFSLKKVCGTISSYLFTGDGEWVVPAPCFAILPGSWHTEASPKEW

SEQ ID NO: 265711 - protein, 152 aa, Zea mays
  Clone ID: MRT4577_173933C.1.pep
MAGMTDMPMRPARPGPPMQHRGPPPMARLRPEPIDREKTCPLLLRVFTRVAGHHQNEEFSVRGKEPKDEVQIYTWKDATLRELTDLVKEVALPARKRNARLSFAFVYPDKNGRFVVRQVGSTFAYGHGRGDDAKTLAELGFQIGDYLSVAIM

SEQ ID NO: 265712 - protein, 85 aa, Zea mays
  Clone ID: MRT4577_173934C.1.pep
DSNSKKQDYHFNVGNKLSRDINIPPQHIPDCNIMSSYTSSHLPMFDATPQKHGGDIDASHDTQTDTGPLFNQTPSGLVSTPNIHL

SEQ ID NO: 265713 - protein, 93 aa, Zea mays
  unsure (1)..(93): unsure at all Xaa locations
  Clone ID: MRT4577_173935C.1.pep
RAVHGMVLRNDSQYDGLGGTSISNMYVKRGNKCADMNEFCRMRIRNEYYWTTEIDGIVQHDGPRNAMLLLTEMLRXGVEINKYTATSVLLACC

SEQ ID NO: 265714 - protein, 123 aa, Zea mays
  unsure (1)..(123): unsure at all Xaa locations
  Clone ID: MRT4577_173936C.1.pep
ARLKKLDEYLLTRSYITGYQAYKDDLARYTSHTSAPSTKYINVERWFNHTDAHERLSRITAEGHGVKVESSALPSAPTPXVLEAQAPAAEEEDEDDGDPFGEETEDEKKAAXKRAATGKASGK

SEQ ID NO: 265715 - protein, 132 aa, Zea mays
  unsure (1)..(132): unsure at all Xaa locations
  Clone ID: MRT4577_173937C.1.pep
RPQQATGEREKKEEHKGARHRQQEHEQSTAQRPQRKEPRRQQQDGAHKGQTHRRRIAQEGREGISSPPPPHAGRETGRXAPPQEKKAMRGRKHKTKAGRGRPAARQKQPPATGQRDQRTRAEGRNSQEPPPP

SEQ ID NO: 265716 - protein, 357 aa, Zea mays
  unsure (1)..(357): unsure at all Xaa locations
  Clone ID: MRT4577_173938C.1.pep
TLALIVDGNSLVXILETDLQDELFKLATECSVVLCCRVAPLQKAGIVALIKNRTNDMTLAIGDGANDVSMIQMADVGIGISGQEGRQAVMASDFSMGQFRFLVPLLLVHGHWNYQRMAYMILYNFYKNAMFVLVLFWYVLYTAFTLTTAITEWSSLLYTVLYTSLPTIVVGILDKDLNKATLIAYPKLYGSGQRDDKYNVNLFVLNMLEALWQSLVVFYLPYFAYRRSTIDMSSLGDLWALAPVIVVNMQLAMDIIRWNWIIHAFVWGTIAATTVCLFVIDSIWVLPGYGAIFHIMGTGLFWFLLLIIVVTAMVPHFVFKAFTEHFRPSDIQIAREMEKFANVNQVNRLEFPTRGLS

SEQ ID NO: 265717 - protein, 100 aa, Zea mays
  Clone ID: MRT4577_173939C.1.pep
IGTSRRREKFRLGVVKTGSITREGKRRRWRRREIPHSGVDGHLLPDYPCIGSSWRRRASTVLGPYTLSFRLCICRSLLLLLSQVLNLEALATRWQLVTTA

SEQ ID NO: 265718 - protein, 99 aa, Zea mays
  Clone ID: MRT4577_17393C.1.pep
SRSPRQSSHAGGVPGHLGGANRALSFPPPLPFERLPKRHPRWPATMMAAAALMPHKSLSARVPTQSVAPLFSVCFLRQCWHYQQVLSLFLSLIPVAPTR

SEQ ID NO: 265719 - protein, 55 aa, Zea mays
  Clone ID: MRT4577_173940C.1.pep
CFCPGFRGRGMPKGWGKPPPKKGAEFPAGLPLLGPPKLPRGPFFKWWTPQFYSKL

SEQ ID NO: 265720 - protein, 167 aa, Zea mays
  unsure (1)..(167): unsure at all Xaa locations
  Clone ID: MRT4577_173941C.1.pep
AAAAAAARPRPPDEEETAEGEGETRGDPXTRERKXXKGXARPEPRXXKAGERXPPXTXXRPEGKNKXXXXXEXXXXTKXNRXXPETXXXXAXKKXGXXPPPXRXXXXXXXEXKEQGXXEEXAXXXAXNEXRTEKKAKKKAXKEPKEXARSEGRKPXPEPTGPKRRGK

SEQ ID NO: 265721 - protein, 107 aa, Zea mays
  Clone ID: MRT4577_173942C.1.pep
TTGARFVFGKQLTSFSATHEVQHLSCYKGSNRGKHKLYSFTPKGVCLCHLPGQGRCHGLLPFPFPIKKDSLFTQTPSGFENTGGDPGFEKRFPVLWENLGHFKTCLL

SEQ ID NO: 265722 - protein, 53 aa, Zea mays
  Clone ID: MRT4577_173943C.1.pep
TKRAHRYLSIQTCSFGEDTTYHIKLFTFLFKLNQHGETLRIKHLIDPSSDTYF

SEQ ID NO: 265723 - protein, 252 aa, Zea mays
  Clone ID: MRT4577_173944C.1.pep
MDPKGKGNVVNDNEKESIFNEPRDDKANDSSSSQKKKDEKKKRRIRKVVYYDDSDESSSSQKDNDDNDYEKKKTVNSNFSFDYSRMPQSSNAHLLSIPLGKPPHFDGEDYRFWSHKMRSHLFSLHPSIWEIVENGMQFDSTDSPLFVNEQIHKNAQATTMLLASLCRDEYHKVSGLDNAKQIWDTLKISHEGNDVTMLTKMELVEGELGRFTMIRGEEPTQTYNRLKTLVNKIRSYGSTRWTEASQSSGTQM

SEQ ID NO: 265724 - protein, 72 aa, Zea mays
  Clone ID: MRT4577_173945C.1.pep
GPGDVQSVSIKGSSPGGQPMSPNWGQKWKKNLFLGGKNLSFQVPAKGGGPVPKKGVVPGGGQFGQTFKGAQF

SEQ ID NO: 265725 - protein, 68 aa, Zea mays
  unsure (1)..(68): unsure at all Xaa locations
  Clone ID: MRT4577_173946C.1.pep
ILIRHTSNNHAKNGDDIAFFIYQMDKKTIKIQESFKCSMQLSVKYTFLLLETFYHLEQGSVSSYDIGX

SEQ ID NO: 265726 - protein, 103 aa, Zea mays
  Clone ID: MRT4577_173947C.1.pep
MGVAMSSTNHDVAAVVDEEAFMYAMQLASLFILPMTLKNAIELGLLEVLQKEAGGLKAALAPDEVVAPMPAVPSDPDAVAGIVDRMLRLLAYYDIVRCQMEDR

SEQ ID NO: 265727 - protein, 140 aa, Zea mays
  Clone ID: MRT4577_173948C.1.pep
VAGSVGVGQDDIADVTSRTLALATTLAQAIGSPAFDTALVAAVATANDVLDTNGIHPIDFNDDILTAITLLGPSGGVIDASDTTADDVHNDAKKTIGSVLTALASSGAIAPVPSVVAASAGAGGDAATAAAAAAAGGDAA

SEQ ID NO: 265728 - protein, 189 aa, Zea mays
  unsure (1)..(189): unsure at all Xaa locations
  Clone ID: MRT4577_173949C.1.pep
MATVSLTPQAVFSTESGGALASATILRFPPNFVRRRSAAAXRRNSQXRLRNASGRRIAPRRRPASGLRRADLSRSTAGGRELGEXMRHAMQSTHTRRSNTXAYWMNXSQELVHYKEGRHASXEYGRYGNPTTEALEKKMSALEKAESTVFVASGMYAAVAMLSALVPAGGHIVTTTDGYRKTRIYMETE

SEQ ID NO: 265729 - protein, 141 aa, Zea mays
  Clone ID: MRT4577_17394C.1.pep
WLWNLWADLCAWARIKSRGLGPRPAGRHSAGPQSRTINGHRYHNRYIKNTRRKLEIKHNRAAKKAPPIITYCIHSGGETNPIDGLTNLKLIAGIFVHTVYEASSEKEHNGKAVDARLRGAMLHATSMTITFETRNYLRPPK

SEQ ID NO: 265730 - protein, 196 aa, Zea mays
  Clone ID: MRT4577_173950C.1.pep
MMGIQPNLLNQLVSLLLGASVAGVLIFFMSSDGIGAGPSSAGISSWVNGTMAAPVAPAQEQEANHTSASKVDGVASPQEASHNTSQAAEDELERLLRTVADEHKTVIMTSVNEAWAAEGSLLDLLLESFRAGERIAHFVDHLLVVALDTGALERCRAVHPHCYLLPPLVGGKDLSDEKVFMSKDYLDLVWSKGRLQ

SEQ ID NO: 265731 - protein, 306 aa, Zea mays
  Clone ID: MRT4577_173951C.1.pep
MGNSSSRGRSEPRQGEQRTMKWSVDGFASLLDKGDGWTYSRVFELMGYNWYLKLNPRDKKSGDDGTEYVSLVLQLDDLSVKPDTVVKASFKLLIYDQAYGKHSEHQVRHSFQTASTSSGASCMVSLEKLKERPSKFIVNNSCTFGVEFIKVKASKVSTTSETLFVRKPSVFDEARTYTWDIEDFFALKNSGHSPEFEVGGHKWSIGVYTSSDGNHLTLDLCMKNTDGVQHDGSANLVEFSLAIKHQEGGNHWKATGRSQFTSNARCWGWTKFISLEDFKDSSNGYLVKNKCCIEAEVALVGSSKMK

SEQ ID NO: 265732 - protein, 231 aa, Zea mays
  unsure (1)..(231): unsure at all Xaa locations
  Clone ID: MRT4577_173952C.1.pep
MATVSLTPQAVFSTESGGALASATILRFPPNFVRQLSTKARRNCSNIGVAQIVAAAWSDCPAAASAAAEVSAIPNAKVAQPSAVVLAERNLLGSDASLAVHAGERLGRRIATDAITTPVVNTSAYWFNNSQELIDFKMTVIRPADMDALQNALDNNNVSLFFTETPTNPFLRCIDIEHVSNMCHSKGALLCIDSTFASPINQKALTLGADLVIHSATKYIAXTHDVIGGCV

SEQ ID NO: 265733 - protein, 257 aa, Zea mays
  unsure (1)..(257): unsure at all Xaa locations
  Clone ID: MRT4577_173953C.1.pep
MATVSLTPQAVFSTESGGALASATILRFPPNFVRQLSTKARRXASAAAEVSAIPNAKVAQPSAVVLAERNLLGSDASLAAHAGERLGRRIATDAITTPVVNTSAYWFNNSQELIDFKEGRHASFEYGSALEKAESTVFVASGMYAAVAMLSALVPAGGHIVTTTDCYRKTRIYMETELPKRGISMTVIRPADMDALQNALDXNNVSLFFTETPTNPFLRCIDIEHVXNMCHXXKGSVLRIDSTFASPYHQKALTFSA

SEQ ID NO: 265734 - protein, 232 aa, Zea mays
  Clone ID: MRT4577_173954C.1.pep
LLLRHGHRVAHSAGGHLHRVRRRPGFCHHPPLPASAAADVSAIPNAKVAQPSAVVLAERNLLGSDASLAVHAGERLGRRIATDAITTPVVNTSAYWFNNSQELIDFKEGRHASFEYGRYGNPTTEALEKKMSALEKAESTVFVASGMYAAVAMLSALVPAGGHIVTTTDCYRKTRIYMENELPKRGISMTVIRPADRDALPNALDHNNVSLFFTETPTNPFLRCIDIEHVSN

SEQ ID NO: 265735 - protein, 100 aa, Zea mays
  Clone ID: MRT4577_173955C.1.pep
EKSRRSSRRYPQLSFFFPPARRTSLLPPVHRSSQPWRSLCSAAPLRLPSCSLALAHGHACPCSRPSAPALPRLAWPERPALCSPILRSYLHGRGASPWLS

SEQ ID NO: 265736 - protein, 251 aa, Zea mays
  unsure (1)..(251): unsure at all Xaa locations
  Clone ID: MRT4577_173956C.1.pep
MATVSLTPQAVFSTESGGALASATILRFPPNFVRQLSTKARRNCSNIGVAQIVAAASAAADVSAIPNAKVAQPSAVVLAERNLLGSDASLAVHAGERLGRRIATDAITTPVVNTSAYWFNNSQELIDFKEGRHASFEYGRYGNPTTEALEKKMSALEKAESTVFVASGMYAAVAMLSALVPAGGHIVTTTDCYRKTRIYMENELPKRXISMTVIRXADMDALQNALDXNNVSLFXTETPYNPFLGCIDIEH

SEQ ID NO: 265737 - protein, 119 aa, Zea mays
  Clone ID: MRT4577_173957C.1.pep
PEKVFVWAIPNQFQGLVGILVVEILSNPSFEEGFLGQGDPKEWALDPKGQEGFKRFGGGVSKIKKRVVPIKGGPPPKKRKGPGEFPFTVVFPHPSHPKGDPPGIPPKGISKRISLLVLF

SEQ ID NO: 265738 - protein, 507 aa, Zea mays
  unsure (1)..(507): unsure at all Xaa locations
  Clone ID: MRT4577_173958C.1.pep
MATVSLTPQAVFSTESGGALASATILRFPPNFVRQLSTKARRNCSNIGVAQIVAAAWSDCPAARPHLGGGXARGVASSXAAAASAAAAASAAAEVSAIPNAKVAQPSAVVLAERNLLGSDASLAVHAGERLGRRIATDAITTPVVNTSAYWFNNSQELIDFKEGRHASFEYGRYGNPTTEALEKKMSALEKAESTVFVASGMYAAVAMLSALVPAGGHIVTTTDCYRKTRIYMENELPKRGISMTVIRPADMDALQNALDNNNVSLFFTETPTNPFLRCIDIEHVSNMCHSKGALLCIDSTFASPINQKALTLGADLVIHSATKYIAGHNDVIGGCVSGRDELVSKVRIYHHVVGGVLNPNAAYLILRGMKTLHLRVQCQNDTALRMAQFLEEHPKIARVYYPGLPSHPEHHIAKSQMTGFGGVVSFEVAGDFDATRKFIDSVKIPYHAPSFGGCESIIDQPAIMSYWDSKEQRDIYGIKDNLIRFSIGVEDFEDLKNDLVQALEKI

SEQ ID NO: 265739 - protein, 62 aa, Zea mays
  Clone ID: MRT4577_173959C.1.pep
PLSLAGTGDVPKVIRFLKKVVLAPLGKWNPLFTGCHQRFFLSKKIFGGQMLFFSCPVISFWT

SEQ ID NO: 265740 - protein, 170 aa, Zea mays
  Clone ID: MRT4577_17395C.1.pep
VSLQPHAVPLHCKLATSSSCQRPPPPPPSPHLPHTAVIPGPFACRPPVPFVPCALGGSVLSPVDRPSLLVGVISNCLLSSQTKTLLPSQTSLALLIRARLCRIFYKKNLASFSGRHSAEIFRQKRCCLGRHSAEISSSKTCLYVQGARHPVKRFHLACSRENSAGFFFLP

SEQ ID NO: 265741 - protein, 514 aa, Zea mays
  unsure (1)..(514): unsure at all Xaa locations
  Clone ID: MRT4577_173960C.1.pep
MATVSLTPQAVFSTESGGALASATILRFPPNFVRQLSTKARRNCSNIGVAQIVAAAWSDCPAARPHLGXRGGGGXXXXXXXXXXXXAAAXXXXXXXXXXXXVSAIPNAKVAQPSAVVLAERNLLGSDASLAVHAGEXXXWEIATDAITTPVVNTSAYWFNNSQELIDFKEGRHASFEYGRYGNPTTEALEKKMSALEKAESTVFVASGMYAAAAMLSALVPAGGHIVTTTDCYRKTRIYMENELPKRGISMTVIRPADMDALQNALDNNNVSLFFTETPTNPFLRCIDIEHVSNMCHSKGALLCIDSTFASPINQKALTLGADLVIHSATKYIAGHNDVIGGCVSGRDELVSKVRIYHHVVGGVLNPNAAYLILRGMKTLHLRVQCQNNTALRMAQVLEEHPKIARVYYPGLPSHPEHHIAKSQMTGFGAGCSFEVAGDFDATRKFIDSVKIPYHAPSFGGCESIIDQPAIMSYWDSKEQRDIYGIKDNLIRFSIGVEDFEDLKNDLVQALEKI

SEQ ID NO: 265742 - protein, 73 aa, Zea mays
  unsure (1)..(73): unsure at all Xaa locations
  Clone ID: MRT4577_173961C.1.pep
NICLFGTSCLPRWQVRSACGMKMSLTRTTIYLLCQLIXCYQLIMKDGKFPYVDLIHVSISACQHMPQYFFCNT

SEQ ID NO: 265743 - protein, 484 aa, Zea mays
  unsure (1)..(484): unsure at all Xaa locations
  Clone ID: MRT4577_173962C.1.pep
MATVSLTPQAVFSTESGGALASATILRFPPNFVRQLSTKARRNCSNIGVAQIVAAAWSDCLAARPXSAAADVSAIPNAKVAQPSAVVLAERNLLGSDASLAVHAGERLGRRIATDAITTPVVNTSAYWFNNSQELIDFKEGRHASFEYGRYGNPTTEALEKKMSALEKAESTVFVASGMYAAVAMLSALVPAGGHIVTTTDCYRKTRIYMENELPKRGISMTVIRPADMDALQNALDNNNVSLFFTETPTNPFLRCIDIEHVSNMCHSKGALLCIDSTFASPINQKALTLGADLVIHSATKYIAGHNDVIGGCVSGRDELVSKVRIYHHVVGGVLNPNAAYLILRGMKTLHLRVQCQNDTALRMAQFLEEHPKIARVYYPGLPSHPEHHIAKSQMTGFGGVVSFEVAGDFDATRKFIDSVKIPYHAPSFGGCESIIDQPAIMSYWDSKEQRDIYGIKDNLIRFSIGVEDFEDLKNDLVQALEKI

SEQ ID NO: 265744 - protein, 49 aa, Zea mays
  Clone ID: MRT4577_173963C.1.pep
MQEGCKAYLLDDSAASLFMRCHTCSKGVLDFFLVLPPCVVDMQVCVGDC

SEQ ID NO: 265745 - protein, 247 aa, Zea mays
  unsure (1)..(247): unsure at all Xaa locations
  Clone ID: MRT4577_173964C.1.pep
MATVSXTPQAVFSTESGGALASATILRFPPNFVRQLSTKARRXSAAAEVSAIPNAKVAQPSAVVLAERNLLGSDASLAVHAGERLGRRIATDAITTPVVNTSAYWFNNSQELIDFKEGRHASFEYGRYGNPTTEALEKKMSALEKAESTVFVASGMYAAVAMLSALVPAGGHIVTTTDCYRKTRIYMETELPKRGISMTVIRPADMDALXNALDNNNVSLFFTETPTNPFLRCIDIEHVXNMCHSKG

SEQ ID NO: 265746 - protein, 103 aa, Zea mays
  Clone ID: MRT4577_173965C.1.pep
MHCPRMPLSQFLDPQRFRVLCSRSRNLMISSIERVPSSFPANMCAVKVVCTREPKVDTLSAMKVECTQRSMREQVAPRRLASTCCRDRRRHTGVPASARTSLR

SEQ ID NO: 265747 - protein, 65 aa, Zea mays
  Clone ID: MRT4577_173966C.1.pep
PFVPIPYVYLWNKNSLIPFFFLGGGPKHGGKNLLREVPKLPRPCQSPPPDNYKAGRGEMKQTYRF

SEQ ID NO: 265748 - protein, 72 aa, Zea mays
  Clone ID: MRT4577_173967C.1.pep
LRTLTLHLPTNSSPIHLHLTGSRLLGSRRRHQPKLYLPQTIEGENDWCQSHKPQDAKDNKGYLPHGPWVDIG

SEQ ID NO: 265749 - protein, 138 aa, Zea mays
  Clone ID: MRT4577_173968C.1.pep
MGLPGNVEGPREQTQRCFTLEEATDTILFCSSIAHDIAYRAATIGLEHEQHSELASARRPTVPMAGQSIPRGDGSRKPPHRLVPRHRKRSEGETVTEPDKMEVVAEDPIPVRPVPEFSRTSGSFKSPKVDSKCNCAIM

SEQ ID NO: 265750 - protein, 811 aa, Zea mays
  unsure (1)..(811): unsure at all Xaa locations
  Clone ID: MRT4577_173969C.1.pep
MSAPKLDRNPSIRDRVEDTLHAHRNELVALLSKYVNKGKGILQPHHILDALDEVQGSGGRALAEGPFLDVLRSAQEAIVLPPFVAIAVRPRPGVWEYVRVNVHELSVEQLTVSEYLRFKEELVDGQHNDPYVLELDFEPFNVSVPRPNRSSSIGNGVQFLNRHLSSIMFRNRDCLEPLLDFLRGHRHKGHVMMLNDRIQSLGRLQSVLTKAEEHLSKLPADTPYSQFAYKFQEWGLEKKGWGXDTAGHVLEMIHLLLDIIQAPDPSTLEKFLGRIPMIFNVVVVSPHGYFGQANVLGLPDTGGQIVYILDQVRALENEMVLRLKKQGLDVSPKILIVTRLIPDAKGTSCNQRLERISGTQHTYILRVPFRNENGILKKWISRFDVWPYLETFAEDAAGEIAAELQGTPDFIIGNYSDGNLVASLLSYKMGITQCNIAHALEKTKYPDSDIFWKNFDEKYHFSCQFTADIIAMNNADFIITSTYQEIAGSKNTVGQYESHTAFTLPGLYRVVHGIDVFDPKFNIVSPGADMSIYFPHTEKAKRLTSLHGSIENLIYDPEQNDEHIGHLDDRSKPTLFSMARLDRVKNITGLVEAFAKCAKLRELVNLVVVAGYNDVNKSKDREEIAEIEKMHELIKTHNLFGQFRWISAQTNRARNGELYRYIADTHGAFVQPAFYEAFGLTVVEAMTCGLPTFATLHGGPAEIIEHGVSGFHIDPYHPEQAANLMADFFDRCKQDPDHWVNISGAGLQRIYEKYTWKIYSERLMTLAGVYGFWKYVSKLERRETRRYLEMFYILKFRELAKTVPLAIDQPQ

SEQ ID NO: 265751 - protein, 176 aa, Zea mays
  unsure (1)..(176): unsure at all Xaa locations
  Clone ID: MRT4577_17396C.1.pep
MPLLLVSVTTMPLQHFVELSXFSVIRSSAALPMRLNATSDNFMCTMSFTTTARSSTPSPHRPPNEENLKASINXFSYQNSTFLTLXHNEREGSPLDVXLTLKNTASPKQASHLLKTXSTLRIFDADYNAVRHNAIYVDGKVIXKVLSDRNPSNLPRGELYIDLVIEGTGVYVDRDG

SEQ ID NO: 265752 - protein, 109 aa, Zea mays
  Clone ID: MRT4577_173970C.1.pep
ARCLKENMVSPSSCTVYAFLVDSSSSQYMGTAPPFVLCLSFAGGDWRALKLLLFINCWTEFLGEGNVAKTKMVELSSFPCSSAVAQNLSKEVMLPKTKGPFGSRERIKC

SEQ ID NO: 265753 - protein, 57 aa, Zea mays
  Clone ID: MRT4577_173971C.1.pep
GREEPSTPTSEPQQTHVASLRAAPVEAAMAASMISSTALAGAPHVLPALERRRSSFA

SEQ ID NO: 265754 - protein, 67 aa, Zea mays
  unsure (1)..(67): unsure at all Xaa locations
  Clone ID: MRT4577_173972C.1.pep
QTFFHLIKSELILLGHAVFLFIRLAPPSSNVRFPSGRLYCQLWSAGHVNEQSESVHSYPLKXNIIVX

SEQ ID NO: 265755 - protein, 66 aa, Zea mays
  Clone ID: MRT4577_173973C.1.pep
WPWFRPAPIRLTIGETCTPAGSGPGINPGAAGSPGRGSPFFFFLTNNIIYMFVQVLLPSHESAVNN

SEQ ID NO: 265756 - protein, 45 aa, Zea mays
  Clone ID: MRT4577_173974C.1.pep
KARRGEASNIPDATAIVAVAKATALQAGTLVQWKQLLPLRVAQLG

SEQ ID NO: 265757 - protein, 117 aa, Zea mays
  unsure (1)..(117): unsure at all Xaa locations
  Clone ID: MRT4577_173975C.1.pep
RPTPTHELAIYIHNFLSIITSNLPLSLIIFRRSPTLSFLHSLLQTITXQHIQQLLLPLIIQLAFTNLYPYSXKQQFLPFNQLTILNPSTYLHQQQLLPFNHLSTSYIXHQQFFPFKP

SEQ ID NO: 265758 - protein, 131 aa, Zea mays
  Clone ID: MRT4577_173976C.1.pep
MSWQAYVDDHLLCEIEGNHLTHAAIIGQDGSVWAQSTNFPQFKPEEITAINNDFNEPGSLAPTGLYIGGTKYMVIQGEPGAVIRGKKGPGGVTVKKTGAALIIGIYDEPMTPGQCNMVVERLGDYLIDQGL

SEQ ID NO: 265759 - protein, 33 aa, Zea mays
  Clone ID: MRT4577_173977C.1.pep
KTRLIHNVHNTSSSCACCIPPTHTHAYSQKLMK

SEQ ID NO: 265760 - protein, 163 aa, Zea mays
  Clone ID: MRT4577_173978C.1.pep
MDQVKRNFIKTSPKESKRKQRKGAGPQTTGRSGATHRTVRYAPDSPVLGPTNSMLSGFSAYVGYNSPDVVTSAATSGEKIVQWPNGNGVREKGVGVGDGGRHGGSNALGESDDGRHRREGGDRFKSLGARQCRLGQAGEEDAREWRRLNEDNSVGDLFSNAMN

SEQ ID NO: 265761 - protein, 64 aa, Zea mays
  Clone ID: MRT4577_173979C.1.pep
SSFSKVSNSHITYFHSLPRLATYIGCSYVYRSLIKLIHIQRSLYGMGYTTHVPPIIPIQPLNNP

SEQ ID NO: 265762 - protein, 113 aa, Zea mays
  Clone ID: MRT4577_17397C.1.pep
RLAAVANDHHRRAALTSPTTHCRDPRPFCLQTARLCLLFPVPWEVLSPVDRPSLLVGVISNCLLSSQTKTLLPSQTSLALLIRARLCRIFFYKKNLAFQAVTLPKFFARNAAV

SEQ ID NO: 265763 - protein, 128 aa, Zea mays
  unsure (1)..(128): unsure at all Xaa locations
  Clone ID: MRT4577_173980C.1.pep
RATREARKTERAAVERATARXSGTRAIGKGKXAEKALAEARERRXRYKCSLKGRGGGTYFDIRQDSHFHRATSRNYIRNPDXQQSNGSMYDSRLRHXTTIERNERTAGPVTKAFSLKNTPNLVAQYEH

SEQ ID NO: 265764 - protein, 195 aa, Zea mays
  unsure (1)..(195): unsure at all Xaa locations
  Clone ID: MRT4577_173981C.1.pep
NLIFXIDWLEDHNPMSVHWAQKWMEFNDHSKRIYIPRGLSQIQYCSSINNLQLEALLRRDAVNQLLELQVVTDDKMSEVPKVIIDLIRKFEHLFHKPQGLPPKRSVDSRLKHIGEEMWAMAVAVEDDNTNSDDMEPTKDSTEENVSAIEVAAVKDSESNMAIRFWASAQGQQVLTLVNSDRSTNSISSHLKDSLH

SEQ ID NO: 265765 - protein, 57 aa, Zea mays
  Clone ID: MRT4577_173982C.1.pep
QRLHFKPFSKGDLNKIYKIWQGPRERVPPLPQIMTSTLPLGEMVSHRTHHVQCGPLA

SEQ ID NO: 265766 - protein, 395 aa, Zea mays
  unsure (1)..(395): unsure at all Xaa locations
  Clone ID: MRT4577_173983C.1.pep
AVWRSHVCSCAYWSQSETGRAGSETSSNNEQAIWRIHPTFHQSSTVAYNRIGKALAPLKGALDXSDFKDVDMVIEAVIEKIPLKQSIFADIEKICPKHCILATNTSTIDLNVVGKKTNSQDRIIGAHFFSPAHIMPLLEIVRTEKTSPQAILDLITIGKIIKKVPIVVGNCTGFAVNRTFFPYTQGSHLLVSLGIDVFRIDRVISTFGMPMGPFQLQDVAGYGVALAVKDIYADAFGERNLDSDLVDLXVXHGGRGKVXARGYYXLHVIGEYRKQANTXLPVGKPVTLMDQDILEMIFFPVVNEACRVMDENVVIRASDLDIASVLGMGFPKYRGGLVFWADTVGAPYIHSKLSKWAEMYGPFFKPSSYLEQRAKSGVPLSAPGTSQQGSARSRM

SEQ ID NO: 265767 - protein, 73 aa, Zea mays
  Clone ID: MRT4577_173984C.1.pep
ILEYLTSVQLCLRFQLKQTVFILELQMCNKIWRPRQCRSMAINVRKPELSVSYTLFIMYMDYVSRISRLQKCG

SEQ ID NO: 265768 - protein, 220 aa, Zea mays
  Clone ID: MRT4577_173985C.1.pep
GRVGGRVGDVFRIDRVISSFGMPMGPFQLQDVAGYGVALAVKGIYADAFGERNLNSNLVDLMVKDGRQGKVNGKGYYIYEKGGKPKPDPSVKHVLEEYQKQANTMPGGKPVTLTDQDILEMIFFPVVNEACRVMDENVVIRASDLDIASVLGMGFPKYRGGLVFWADTVGAPYIHSKLSKWAEIYGPFFKPSSYLEQRAKSGVPLSAKGASQQGSARSRM

SEQ ID NO: 265769 - protein, 216 aa, Zea mays
  unsure (1)..(216): unsure at all Xaa locations
  Clone ID: MRT4577_173986C.1.pep
NKKNKLKKKKKKKKKKNKKKKKKKKKKKKNKKKKKKKKKKKKKKEKKNKKKNKKNQKKKKKKKXKKKKKKKKKKKKKKKNKKKKKKKINKKKKKKKKIQNKKKKKKKXKKKKKKKNKKKKKKKKNNKKKKKKKKKKKIKKKKKKQNKKKKTKKKKQKKXKKKKNKKHKKKNKYKKXQKKNKKNKNINRXKKKNRHTKSTNHTTKTTYNKKYKRQSI

SEQ ID NO: 265770 - protein, 51 aa, Zea mays
  Clone ID: MRT4577_173987C.1.pep
CCVSVKWSYCCRACRYFNVILSCWVSLERRVASRQPSRVNREPSVSYTIWS

SEQ ID NO: 265771 - protein, 43 aa, Zea mays
  Clone ID: MRT4577_173988C.1.pep
DHKTWINVNPHLPFEEPIRASLSLNTANVIQILYLSICLPQCR

SEQ ID NO: 265772 - protein, 52 aa, Zea mays
  Clone ID: MRT4577_173989C.1.pep
RPFIFFLSIISILLSFEPEYHTKVYFNSVNIVIISLFLKTLSYHQIICVIVY

SEQ ID NO: 265773 - protein, 110 aa, Zea mays
  Clone ID: MRT4577_17398C.1.pep
VSLQPHAVPLHCKLATSSSCQRPPPTPPSPHLPHTAVIPGPFACRPPVPFVPCALGGSVLSPADRPSLLVGVISNCLLSSQTKTLLPSQTSLALLIRARLCRIFLQEEPS

SEQ ID NO: 265774 - protein, 133 aa, Zea mays
  unsure (1)..(133): unsure at all Xaa locations
  Clone ID: MRT4577_173990C.1.pep
HTGGGAGGGGQGARCGGLPPKGHTQTQKISRSRFPKFSGPLKNGGPTRTKPGLTSKPKTAPVGVSAGPAPPRDEGAQAPPRGNGPGPPLAXSSGGGRGGSPTPPPPPRAKRVSSSLAPVAQGXAPPPAARGAP

SEQ ID NO: 265775 - protein, 51 aa, Zea mays
  Clone ID: MRT4577_173991C.1.pep
GVAHKEFGRRVRTRKFWGFLRPSRLRRHPLQPRGLLRIVPIQFGLVMHAIN

SEQ ID NO: 265776 - protein, 86 aa, Zea mays
  unsure (1)..(86): unsure at all Xaa locations
  Clone ID: MRT4577_173992C.1.pep
MTTKTLTLLMLIAVSACEANATIVPQCSQAPIAPLLAPYLSSMIANXCENPTVQPYTLHHSMNGSNIPXMTLXAQQSTALSLVHAL

SEQ ID NO: 265777 - protein, 41 aa, Zea mays
  Clone ID: MRT4577_173993C.1.pep
NPALNPIGSTSNRSSNILFITLLTIASLSVGSHCTNHRAQH

SEQ ID NO: 265778 - protein, 52 aa, Zea mays
  Clone ID: MRT4577_173994C.1.pep
CIQTSLNCFSRQPDSTKVFAQRACVGILLVGGEFLALSSIPSIVAELLVSTF

SEQ ID NO: 265779 - protein, 337 aa, Zea mays
  Clone ID: MRT4577_173995C.1.pep
MHQLQLRMVTPSESSEVFSSETKDSGVKRKAHAISATTESTKIQNAARDWSCALCQVSATSESGLNQHLQGKKHKAKLVQCGAIKVMDTNKSGLQVTTGNNNGAGPSDAPKKIHILVDGEMHQVVQKSNRVWCERCRVSCTNAGAMADHLRGKKHSLLNKVWASIKAVRRNNGVKEDSATATCEREVNESGPTGIPEDEERKEEGDAYMASEFSGDGSSEIPMETKETTDMAEEADADSHSVTHVGINKEDTDTASKATGNYPAGTKQEGTGVVMDVNKNSPPKVHQKSRKAFPLKVHQESRKRRQNKKFLSKVHQKANENLLPQCASESKTKGFGK

SEQ ID NO: 265780 - protein, 183 aa, Zea mays
  Clone ID: MRT4577_173996C.1.pep
MRSSSMATAILSIAAVVLLLAVQDSHGAKLCMDSTFPRAVNGSLSFCGYNGTACCNTTDDAAVRRQFAAMNISGTPCGDLVKSILCARCNPYAGELFTVRTSPRTVPLLCNSTGVSSRVSGVAAATGYCAKVWDTCKDVSIPGSPFQPPKGGASAPKLAEVWESEGDFCGALGGESICFDGEA

SEQ ID NO: 265781 - protein, 58 aa, Zea mays
  Clone ID: MRT4577_173997C.1.pep
IQVHQAKNHGGLFLKKKRLNRVSFLGGNFPANRGRNGSQHYLKAAPAGKKAGLTKTRT

SEQ ID NO: 265782 - protein, 92 aa, Zea mays
  Clone ID: MRT4577_173998C.1.pep
HCSSSRVQERVYEEACDASETDGHRPRRVVEKKKALQRIKKFAFLAKLKKTPRIQCIQRVVCACVCYIVHLRVRRRACTLRATAVYVHAPYT

SEQ ID NO: 265783 - protein, 71 aa, Zea mays
  Clone ID: MRT4577_173999C.1.pep
WEGQRPLRPRRTIRRHRPWGRVSRRRSLGGGLLICDQQRLRRRQEHKEGGEARRAGGGHAAAAAASWWRWI

SEQ ID NO: 265784 - protein, 61 aa, Zea mays
  Clone ID: MRT4577_17399C.1.pep
MMASPPTPSTVSTTVTTSPSSTGGSELGPDPQLAAERKRKRKESNRLSAQRSRARKQRQLD

SEQ ID NO: 265785 - protein, 76 aa, Zea mays
  Clone ID: MRT4577_1739C.1.pep
HRQSLVNICGPPQSHLLTQNAGMWSKHFSNLNQVKSIFTLLLSRRQNPSGLKPPSKACRRVHWTPFNPQEYKRSFT

SEQ ID NO: 265786 - protein, 108 aa, Zea mays
  unsure (1)..(108): unsure at all Xaa locations
  Clone ID: MRT4577_173C.1.pep
MRECISIHIGQAGIQVGNACWELYCLEHGIQADGQMPGDKTIGGSDDAFNNFFNETGAWKDVPRAXVLVALDPMAIIKXRTGTLRQVFQPXQVINGKEDSTHNFGRGH

SEQ ID NO: 265787 - protein, 189 aa, Zea mays
  Clone ID: MRT4577_174000C.1.pep
IITGVMAIIRSVGDPASPASFGGWLGYTAINHSWVVSFVIMDLLLFLGVITLTVIQASQISRNITTNEMANTIRYSYLRGPSGRFRNPYDHGLRENCSDFLLKGYNEDIESTVQTLQSDEEMGPIQMSSPVSQNGESIPPHVNGTDHGSTISHANSKSHRQSPSNCLGLGLGTGHNNPSSRYARSLLPL

SEQ ID NO: 265788 - protein, 111 aa, Zea mays
  Clone ID: MRT4577_174001C.1.pep
SHKGPILNAASLTRCEPPALPSVGRSYQPMWSCLLTELCHRGGHWWWCPPRSSCGWLRSSLSGALASDPQHSEDDIEDIQRVIFSKERRRTAHPYIKAEGKYRAIRHPKGL

SEQ ID NO: 265789 - protein, 191 aa, Zea mays
  unsure (1)..(191): unsure at all Xaa locations
  Clone ID: MRT4577_174002C.1.pep
MSSPGPQQAPPAQPPPPQAAAPPTAAPATVSATSISVQLPPIQPKPPPQPQPPGPTSGPQPPTPAQLLNLGPQPPLYRGPICWNSYCKDPDPNSFGRRGWKVRSGPPYSVYADLCGRCYSQFEQGIYCETFHSEEGGWRNCESCGRRVHCGCIVSIHKYQLRDAGGVDCAKCAXHPCCHGPTKSRMDKSYS

SEQ ID NO: 265790 - protein, 78 aa, Zea mays
  Clone ID: MRT4577_174003C.1.pep
HDSKFGSAVIRYSGSSGAPPGPNMTDPPGGWAWSINQARSFRWNLTASVDRPNPHGCYHYRHINITRTIEVMVIRGHI

SEQ ID NO: 265791 - protein, 64 aa, Zea mays
  Clone ID: MRT4577_174004C.1.pep
SRKIVTCLSIYRERERIASYLAWSAAARTQHRASVCLLACYHHSCVSSILTDEPTMADLDCRTR

SEQ ID NO: 265792 - protein, 85 aa, Zea mays
  Clone ID: MRT4577_174005C.1.pep
GAFFFFFFVFFFFFFLFFFFFFFFFLNVQSKTNLPYFFLFSTKKKSLTSTQQVTITTPGDCWCGFRKGRRGLSGAERDGSDWVVF

SEQ ID NO: 265793 - protein, 113 aa, Zea mays
  Clone ID: MRT4577_174006C.1.pep
MYYRAQKNPIDTMRVLLDAICLLALAASATYTHTSGGCGCQPPATVYLSPEGHLPPTDHLPPLMHVAPPDHLPATVHLALPVHVPPPAHMAPAPCQYPTQTARPQTDTQPHAC

SEQ ID NO: 265794 - protein, 72 aa, Zea mays
  Clone ID: MRT4577_174007C.1.pep
TIFHSPPLHVTVYSDGSYGVPSGLIYSFPVTSSGGEWKIVQGLPIDEFSRKKMDAPAQKLTEEKTLAYSCLE

SEQ ID NO: 265795 - protein, 142 aa, Zea mays
  Clone ID: MRT4577_174008C.1.pep
VALPSVLGVGEILGNGQDTDLNNLFDGLCVMIRLRDATWCAMKIWLCRILVFSKCDYHCANWMTILCTSTLSLKASSFKHADTRTCRGGTKGLSLLATLQFLRCFKRLIISSASIGLDARAFELYLYRYETLRRYYCAHRTA

SEQ ID NO: 265796 - protein, 56 aa, Zea mays
  Clone ID: MRT4577_174009C.1.pep
MLNQGVSRTPAQCKSLWTSLVQKYEESKDTESMKTWPYFSAMDKILSQQGEMATKG

SEQ ID NO: 265797 - protein, 199 aa, Zea mays
  Clone ID: MRT4577_17400C.1.pep
KKKKKKKKKKKKKKKKKKKKKKKKKKKKKKKKKKKKKKKKKKRGRAVLGEPSFFFFVLANVLGVFLGPLKLNLMGPGFKNVGNGKNPGGPQINWLGKKSPFRRWGYYQRGPPRSPFQKLAHPNGEWDPPLWGPFKRGGGGVSPQGTLYFGKPLSPRSLGFFPFFFRPFRGFSPKSLKWGAPLGVPFKGFTAPHPKKICW

SEQ ID NO: 265798 - protein, 290 aa, Zea mays
  Clone ID: MRT4577_174010C.1.pep
MTSIGTGYDLSNSVFSPDGRNFQVEYAVKAVENGGTALGIRCKDGVVLALEKLVSSKLIKPGANKRIATVDRNMGVVSSGLLPDGRHFVSRARDEAAQWRQLYKAPIPSSSLADRMGSYVQAYTLYSSVRPFGITAIIAGWDSEAELPVDGQVGSGPSVGSGGKREGAKHGGPSLYMIEPSGLYWGYYGAATGKGRQVAKSELEKLNLHEGQLSLEEGVKEAARIIYVAHDDNKDKEFELEMTWISNLDGPTKGRHEEVPKDIREEAERLAKKALEGDDDDDDEEEKMEE

SEQ ID NO: 265799 - protein, 635 aa, Zea mays
  Clone ID: MRT4577_174011C.1.pep
MASSDSNPTDAFEYMLLEKDPDLYRTVFSGPSQTSPWIDPSVLKLKHRIGRGPFGDVWIATHHQRTEDFDQYHEVAVKMLHPIKEDQLQIFSARFHEIFSKCQGLGNVCFLHGISTQNGRICIAMKFYEGSIGNKMARLKGGKLPLSEVLRYGADLARGVLGLHTRGILILNMKPCNFLIDENDCAVLGDFGIPSLLFGLSLPNPDLIQRLGTPNYMAPEQWQPNIRGPISYETDSWGFACSVLEMLTGIQPWRGKSADEIYQLVVLKKEKPIFPCSLPPDIENVLSGCFEYDFRNRPLMKDILHAFESAKGADHDNIGWGNSENAMVDRITMPNRINWLHFKDKLQVGDKVRSRKLKNSCGPETMEIPDGTIVGIEDDGERDAYVLVRVHALHNPLKVRFSTVERVTYGFAAGDWVRLREEDKKRSQVGILHSIDRDGAVAVGLIGVDTPWKGNYSDLQMAEAYCVGQFVRLKASISSPRFEWQRKRGGLASTGRISQIHPNGLLVVKFPGKFNLGEVCSCLADPSEVEVVSFDKCEGIVKKYEHLEDFHWAVRPLFVAIGFLTAIKLGVFVGKSISRPRSRKVASISDQSGDYYHHQHQQQHQQQVVQQSANAAWLPPPVANMFFGDSVGTSG

SEQ ID NO: 265800 - protein, 88 aa, Zea mays
  Clone ID: MRT4577_174012C.1.pep
KKEMPALMGKAKAQHKLLDGLDQQFAKVQKELHLPPGDFPSVEEYRELLSAYNFDRFEKLRPKMVQGVDDMLAYDIPDLLKKFRNPYD

SEQ ID NO: 265801 - protein, 540 aa, Zea mays
  unsure (1)..(540): unsure at all Xaa locations
  Clone ID: MRT4577_174013C.1.pep
MGPDSSPKKLSLKEQRAAYLQWFALADEDGDGRLTGNDALRFFAMSNLSKPELKQVWAIADSKRQGYLGFYEFMTAMQLVSLAQAGNEINQDTLXEDLEKLQLPTMEGLAKKLNSGSKIESAIVACHPSEAPTMTASWFNSKSGKKIPLKSVTSIVDGLKKSYIEKLRPLEKTYQFHDFVSPLLTSSDFDAKPMVMLLGQYSTGKTTFIKHLLKTSYPGAHIGPEPTTDRFVVITSGPDERCIPGNTIAVQADMPYSGLSSFGTAFLSKFECSQMPHPLLEHVTFVDTPGVLSGEKQRTQRSYDFTGVTSWFAAKCDLILLLFDPHKLDISDEFKRVIGSLRGHDDKIRIVLNKADQVDAQQLMRVYGALLWSLGKVLNTPEVMRVYIGSFNDKPIRETAAGPLGMELFQKEQDDLLSDLNDIPKKACDRRINEFVKRARAAKVHAHIISHLKKEMPALMGKAKAQQKLLDGLDQQFAKVQKELHLPPGDFPSVEEYRELLSAYNFDRFEKLRPKMVQGVDDMLAYDIPDLLKKFRNPYD

SEQ ID NO: 265802 - protein, 48 aa, Zea mays
  Clone ID: MRT4577_174014C.1.pep
LETQCWMIGFASSLVNRAKIFSRSTYSFLLIALEHLFNLFQSPSWMKI

SEQ ID NO: 265803 - protein, 182 aa, Zea mays
  Clone ID: MRT4577_174015C.1.pep
MLSAVRCGALRRWRPPPHLLPRILSSSFGTSPARPQVGALLELPEVEKVLRDVRAGDVRVFPVGESGLHGGACADYMVVATGRSDWHVRNIAQALLYKIKQKQKGSDRILMPSVEGQQAGKWVVIDSGSIIIHALEERAREYYDLESIWSKEVSPNTSIQELETSLVKTRRRNLSQKPMKSI

SEQ ID NO: 265804 - protein, 44 aa, Zea mays
  Clone ID: MRT4577_174016C.1.pep
ERVDLSALVNDQSCDFTRLCKYSALVNDQSCALRTVDSKSSTFF

SEQ ID NO: 265805 - protein, 95 aa, Zea mays
  Clone ID: MRT4577_174017C.1.pep
YKTNTNTSRALSCLPSSPCVSLSQTSTAALHRLSRRIPLSIPCVASPMDTVSEAAMAAAMASLGIAAVVHCNTEPHAQAAIVRAAKSRRLPFVSA

SEQ ID NO: 265806 - protein, 57 aa, Zea mays
  Clone ID: MRT4577_174018C.1.pep
EISSILVQQTHPWGMSSCRLFVRRGIRPTGRRRVSLFSTESGLLDREQVKWERSFPA

SEQ ID NO: 265807 - protein, 79 aa, Zea mays
  Clone ID: MRT4577_174019C.1.pep
FILLKKKKIYIFHIYLIKNIITQFLKRFQKTYKLFKSMNRNNFFELIIKSTTAPYYNLGLSNSLNLYIWCCNKHVPLIL

SEQ ID NO: 265808 - protein, 185 aa, Zea mays
  unsure (1)..(185): unsure at all Xaa locations
  Clone ID: MRT4577_17401C.1.pep
CAALTSLSTSPLLLGAPVAAFSPEPGLEPWKEALVRPPGSYSSSSNSGDWGWDLASDQSSPSTPSPPLPPEAAHFLFGEPTLRKRKSPAQVMFQCLWKSCGKVLSTASAMQRHIRLVHLGRQAEPDQSDGEEDFYYTELDVGVDTLTDGLSSLTPVSPTASIRLAFXRLELPELLEPLAXLPSPC

SEQ ID NO: 265809 - protein, 78 aa, Zea mays
  Clone ID: MRT4577_174020C.1.pep
RQEVSSVQLLPVIITAGRMPYGSLLYWSEPEKKQASGGGSGRVYHAFPFTWLKHWRQSTARTKAFTHSLSLVLSHAMA

SEQ ID NO: 265810 - protein, 117 aa, Zea mays
  unsure (1)..(117): unsure at all Xaa locations
  Clone ID: MRT4577_174021C.1.pep
ISGPGGQPGNPGPEPEGEPTPPKRTPKKPRGNQGKTSPPGKTETPPXPQNXNNPEAKREKPGGPKGGPTPQKTGRAKGPNPRGKTRGDRGKKKPPNRGGKADSKMGPKGGPPTTRET

SEQ ID NO: 265811 - protein, 261 aa, Zea mays
  Clone ID: MRT4577_174022C.1.pep
MRIVPTSTLRSSLWTLPTKPSKPTRGSTGYATLCTILRALHPTPRRPLPPPPAAAAAMGAYKYVSELWRRKQSDVMRFVQRVRCWEYRQQPSIVRLTRPTRPDKARRLGYKAKQGYVVYRVRVKRGGRKRPVPKGIVYGKPKHQGITQLKFQRNKRSVAEERAGRKLGGLRVLNSYWVNEDSTYKYFEIILVDVAHKAIKTDPRINWLCNPVHKHRELRGLTSAGKKFRGLRGKGHTHHKNRPSRRATWKRNQTLSLRRYR

SEQ ID NO: 265812 - protein, 122 aa, Zea mays
  Clone ID: MRT4577_174023C.1.pep
VLLTGTQSWSPWPRHGVLVRWRCALALRLPSWCSSWTGTEWRWGNCSPDMVYRRGVVRRREPNPPHPNHRYALFTCVRLRLKIRRIVRVVCRLPGDGCACTNHGAAGGWKAGAPSSSRILQT

SEQ ID NO: 265813 - protein, 49 aa, Zea mays
  Clone ID: MRT4577_174024C.1.pep
DSAGQPSLGIVYFGGNDSIGAHSSGLGPYVPLDESIANMRKIAEHLKGC

SEQ ID NO: 265814 - protein, 141 aa, Zea mays
  unsure (1)..(141): unsure at all Xaa locations
  Clone ID: MRT4577_174025C.1.pep
LLIMPIPNTXSKSKNTNTLNTSNNTTTNPTTHSNSTDINLRPTMKNKRKNIKPIHLSTPTLHHPIIHIPRTKMRPRQLTLKRHRPLTLRITRIPSKRIIRRRSSILKIPRSTMNIRITNKIRPRTRLLLPLPKHINQPKGS

SEQ ID NO: 265815 - protein, 36 aa, Zea mays
  Clone ID: MRT4577_174026C.1.pep
GTLGSRPGREITKQAWAKITGLDCIYGSLGLRVCRV

SEQ ID NO: 265816 - protein, 44 aa, Zea mays
  Clone ID: MRT4577_174027C.1.pep
NLSTHLQEPEPLYNLKLKSSRLIVDRIRRYIHNKTFGQTEVVAY

SEQ ID NO: 265817 - protein, 65 aa, Zea mays
  Clone ID: MRT4577_174028C.1.pep
YGLLHRTAADPYCTRSCPTCRRNLITDTQYTDYYCMNNGTLSRIICCGDAAFQQTHKGDNALSHG

SEQ ID NO: 265818 - protein, 39 aa, Zea mays
  Clone ID: MRT4577_174029C.1.pep
LFWAVSPSFFFPFGAPDVFIEPSVKEGTKPEWGLIYTGV

SEQ ID NO: 265819 - protein, 158 aa, Zea mays
  unsure (1)..(158): unsure at all Xaa locations
  Clone ID: MRT4577_17402C.1.pep
GPKIKNPGKKGGKKGLQRKVETPPRPKKKNPQKPNPXGPPRGKPREKGGQKPQNPPPKKGXNRHPRGRPXPGKIKTDPPGILFGGRQNPPSPWKIPPPQNPPEVTRDKGGLGEKEGQIGGKGGKKPPKTGGGGKYGHGTVDLGQVTPGENPGGVGIYS

SEQ ID NO: 265820 - protein, 149 aa, Zea mays
  unsure (1)..(149): unsure at all Xaa locations
  Clone ID: MRT4577_174030C.1.pep
MPLIRRDHALYPFSLDLCYHFEGYLFXSSNKKSIFTSYPCEPDQKTKHFAVEKIDCTNTPYDDLFNSHPQNDCKDELNEYDYDTDDNEINSKSIFDDXDKTNSCIRAKMMNSTFQHRIRLHDNAXPXQIKAAMQNGVLTRTAPREDSLK

SEQ ID NO: 265821 - protein, 84 aa, Zea mays
  Clone ID: MRT4577_174031C.1.pep
FKKQSGLEPEHVDKEFLRLWFKNNCNPYEDAVLPEAPEELVCELAWRYIFLFETITKTKFEILEAQEPIHERISRNVAQALRDL

SEQ ID NO: 265822 - protein, 74 aa, Zea mays
  Clone ID: MRT4577_174032C.1.pep
GLPEAVITLNRPSITRFKKITTTKVPTNHKCFLCGHTGRTEDNSQVQLGQPATEGHSRLTTNRLEHLLYLGARA

SEQ ID NO: 265823 - protein, 167 aa, Zea mays
  Clone ID: MRT4577_174033C.1.pep
TSSSRDPSSRSPRAPCRRAAPPRSSSSSSRSRSPSSPAPVKIYLYDLPAKFTYGVVRSYKAARATSGSANAAATLPDEQLRYPGHQHSAEWWLFKDLLRRRPQDRPVARVDDPSDADLFYVPFFSSLSLGVNPIRSTLAANASGAGTAYSDEALQGELLEWLERQLY

SEQ ID NO: 265824 - protein, 83 aa, Zea mays
  Clone ID: MRT4577_174034C.1.pep
NGGATYGLADNKVSQTFVEVEVGNLMRKTSTSKGLNPTWNSTFNMVLHGETGIVKFLLYELDSGGVKFNYLTSCEIKDTEAVM

SEQ ID NO: 265825 - protein, 500 aa, Zea mays
  Clone ID: MRT4577_174035C.1.pep
MWERGRPPRKPRPSPILVPPPPSSPPPRLNLLLPRSLLALAARAMPSRRPSPVLLLLLALSLALLFLLLSPSFPSTSRFSRSLSSGSAFASSSPASTSAPPAPVKIYLYDLPAKFTYGVVRSYKAARATSGSANAAATLPDEQLRYPGHQHSAEWWLFKDLLRRRPQDRPVARVDDPSDADLFYVPFFSSLSLVVNPIRSPLAANASGAGTAYSDEALQEELLEWLERQLYWQRHRGRDHVFICQDPNALYRVVDRISNAVLLVSDFGRLRSDQASLVKDVILPYSHRINSFKGEVGVDGRPSLLFFMGNRYRKEGGKVRDALFQILENEDDVTIKHGTQSRESRRAATQGMHSSKFCLHPAGDTPSACRLFDALVSLCVPVIASDYIELPFEDIIDYNKISIFVGTSKAVQPGYLTSTLRRISSERILEYQREIKKVRHYFEYEDPNGPVNEIWRQVSLKAPLIKLLTNRYKRLLERGTNGTDCSCICSTTPTDITAAS

SEQ ID NO: 265826 - protein, 137 aa, Zea mays
  Clone ID: MRT4577_174036C.1.pep
CVLAHLVRTRELHLPSLWTASAFNHFSPPVHKYKAWHFAGCNCMLFGPSRLPVARLPTWRLRLASGFTMAFMLGILKASAPGPLAGRPAKAGQPATGRVALFTKSWYLSGMVVLGFQGSVGPQPLFNLYKFNHDLLF

SEQ ID NO: 265827 - protein, 54 aa, Zea mays
  Clone ID: MRT4577_174038C.1.pep
RFMHACARSYAVNRYDGRPFFFFFLSITRGQCVDINNCSILKWTKATNGHEHTH

SEQ ID NO: 265828 - protein, 133 aa, Zea mays
  Clone ID: MRT4577_174039C.1.pep
QGPPRGDLFPVFFVGNPPQGFYPGSADQGPPRVFFPQEGGHYEKLGPPQPLCFPKGGSVPHLALFAQTFGLGMRPRSVIALRRRRFFFNSGFSPPPPSFSKLVAVNPQILFPWFSNFFFRKEREPKMFGGGFP

SEQ ID NO: 265829 - protein, 125 aa, Zea mays
  unsure (1)..(125): unsure at all Xaa locations
  Clone ID: MRT4577_17403C.1.pep
AXRGCRXASHPQNRARXXSVIXXLQAGFCQVHSGTTXGXXEWWXPGXSTXARAAAPSPTTHPLXPXXASYHXAGRXPGRRSRFLPPHRPCSPXXRRAHVRCVGRXXRARQAEIRRVTGREPRXGR

SEQ ID NO: 265830 - protein, 66 aa, Zea mays
  Clone ID: MRT4577_174040C.1.pep
LAAIVEVPICERERQASGEGLYRLASQLVAPADKAMVGANFNFGPSFGLVFPEEAPLWSIKTPFTL

SEQ ID NO: 265831 - protein, 53 aa, Zea mays
  Clone ID: MRT4577_174041C.1.pep
SRRLPKSNGGTEADAPAPKRPATGGAILWHDCNRQRTGRAGADWAGGVRVGTP

SEQ ID NO: 265832 - protein, 175 aa, Zea mays
  unsure (1)..(175): unsure at all Xaa locations
  Clone ID: MRT4577_174042C.1.pep
SRQDDVPADAAASACAPGHAVAVAADEXVGPPPLPPPPLPAVDAAVIMGVLTAVLLALFLFLIYAKHCKQRGPGERPDGLGLGFAPSSYDRCRCGLSSSTVGALPTVRFGSGDVNVVRASECXVCLGAFNAAEVLRVMSACRHAFHSECIHAWLLAHSTCSVGLRCVTGVRVHDS

SEQ ID NO: 265833 - protein, 84 aa, Zea mays
  Clone ID: MRT4577_174043C.1.pep
SFSLLSPGERAVLSIFLSISPVGTGKANPNSHYLHLRHTIPPVNKNSYLSPVQVAPDFTLPMTLKNAMHLGLLDVLQKDDAKVH

SEQ ID NO: 265834 - protein, 72 aa, Zea mays
  unsure (1)..(72): unsure at all Xaa locations
  Clone ID: MRT4577_174044C.1.pep
RQLPXFCPESDTLVVKPTVKFRSIMQPNLVPEQELESNLSFVCTGHYTPYMKNTAFYCRLSIHGDPARTFLE

SEQ ID NO: 265835 - protein, 123 aa, Zea mays
  Clone ID: MRT4577_174045C.1.pep
MLSKLSAWFVNPRRNPLARLHRNAVASRLRKYGLRYDDLYDPYHDLDIKEALARLPREVVDARNQRLKRAMDLSMKHQYLPDDVQAIQTPFRSYLFDMLALVKKESAEREALGALPLYQRTIP

SEQ ID NO: 265836 - protein, 34 aa, Zea mays
  Clone ID: MRT4577_174046C.1.pep
NRCLAAAAIATTEPIQMRMIGLDFILNIHCPSLD

SEQ ID NO: 265837 - protein, 37 aa, Zea mays
  Clone ID: MRT4577_174047C.1.pep
SNRGLHLLRSQCRQRWESRPRSKRLWLLEASEDDDKE

SEQ ID NO: 265838 - protein, 114 aa, Zea mays
  Clone ID: MRT4577_174048C.1.pep
YKTCHNLMIKIQQVDKKPLTTSIKKSTGTTQWNPKECKQNTFAGRYHDLLLWSLLEGSSFRLGSPRVLRLYLWLTRFSSLWKDHRSQNPVIGVGPNRETCFARDTSVSPYLSNP

SEQ ID NO: 265839 - protein, 47 aa, Zea mays
  Clone ID: MRT4577_174049C.1.pep
GKQHPSPVLGGFTGYNRERSAIWPKENAPEPHFKKPWGEGFKLFLKP

SEQ ID NO: 265840 - protein, 151 aa, Zea mays
  Clone ID: MRT4577_17404C.1.pep
SRPQGRGWPPSGGQGSVFYYNRGCRIRGGWSCRFCTNQWGLPAPEEVPPPWWVPLGLVGSPPRCQPRGDPPSQWNFFSLPPTPRPPHLAPWPAPPPPARTGSWGASPTHGFFCSPPGASSPFLFWSSDAALGLSFFGVFFLPKGLGQKKCV

SEQ ID NO: 265841 - protein, 52 aa, Zea mays
  unsure (1)..(52): unsure at all Xaa locations
  Clone ID: MRT4577_174050C.1.pep
PRVPRYVLQISVFLASLPLYLNPSLSPPXSLQKGAVLYHNIHHSSHVIDRAA

SEQ ID NO: 265842 - protein, 114 aa, Zea mays
  Clone ID: MRT4577_174051C.1.pep
IHIIYWGRFTFKERTKPAWGPNPKLLRQSRSVKCCKTRGRNMPNEGRMMINETATHNTRAWCLLINYCGRRFLYLDAVTGLALRYLNRAFQPQYCSDNGSWSCQPYTSPKNGQL

SEQ ID NO: 265843 - protein, 670 aa, Zea mays
  unsure (1)..(670): unsure at all Xaa locations
  Clone ID: MRT4577_174052C.1.pep
MEDREWMYTGRVRRNDVTPEWIRKTDAFVERAYGEAAKGASLVPCPCSKCDNRKRKPKKAMVEHIWKNGFTPDYTRWIFHGEAHRTREEVVRQRVQDYHADPRVGDMLNYYHQGRSDDGPAEDEPEATAKTLYELFYAAQKAVRGQTEDFELDNVGIITXFQLRCGIWGHALPRLLTPCGSLXVEXYAWPMGVFEQPSRFVEPIRRNNPDAHLLDDXCFVMRXEHTEAKYVMLXLDLVFXEILGDVSDDPDLYLXVMIPTYIXVLPRLERLYMTEESAKQMTWHKKGKRYNPDKMVHASDGEAWTHFDAIHHEKAKEARNVRVALATDGFNPYGMTAAPYTCWPVSWMVLETAGGHGRNPNGILGLLCREHFPGLVEYAGVTSPAYTFDHYAVAPDAVDRDGRQFNNKAERVKQELWDFFRCDAGYEARADVVSTTCCKKLVVDMHYEARIQAIVTYHGSVLGEKVNKKDARTMSLTADQYLQMIPHWCAAHPECWEKMVQRWCSAEWDEAHNASRERRLLMQGPSHHQGSRSLGKYAEAWEVHGPDYDPRTEDIDEDVLMRVGGGKRHGRYWIADGAIDSSSTPTLSQGEILQTQLDDERRQREELEKRMAEMFAYMQSLGAAQGHAPPPPLFPAADPTEFTTPGQSAASNNPHASSSPSPNQSRCPPR

SEQ ID NO: 265844 - protein, 56 aa, Zea mays
  Clone ID: MRT4577_174053C.1.pep
YGGIMEVIGACEHAGIIVALAIYVQIARSIRTHDILWPIVVQTNLKLNSFSELPMP

SEQ ID NO: 265845 - protein, 766 aa, Zea mays
  unsure (1)..(766): unsure at all Xaa locations
  Clone ID: MRT4577_174054C.1.pep
MLNDYHEAQFAEGRTEDEPEATAKAFYDMFDAAQKPLHGKTKVSQLDAIERIMAFKSQYSMSRDAFDGLLTVIDSLLPEDHVLPKSMYEAQKLLRALKMTYEQIHACPKGCVLFRKEHTEAKYCPKCKSSRFMEVDSGDGQKRQLDIPVTILRHLPFIPRIQRLYMTEESVKQMTWHKKGKRYNPDKMVHTSDGEAWTHFDAIHHEKAKEARNVRVALATDGFNPYGMTAAPYTYIKNFTKGVVVTDRPPAMMTGVEVREQIDGLVANPEGGFVGXLLDKDGGRWDEDEEGEXGGGGAPVGRRRRRSRTTPYSSRWSSXAVDAAQQDDDDAAQQDDDDDDDAAQQDVSGSGSSGSRSIYLRGPASLPNRPILRDRRPLIRPDGERXSWMVLETAGGHGRNPNGILGLLCREHFPGLVEYAGVTSPAYTFDHYAVAPDAVDRDGRQFNNKAERVKQELWDFFRCDAGYEARADVVSTTCCKKLVVDMHYEARIQAIVTYHGSVLGEKVNKKDARTMSLTADQYLQMIPHWCAAHPECWEKMVQRWCSAEWDEAHNAGRERRLLMQGPSHHQGSRSLGKYAEAWSAAHGGAPCSTFSAYAMAHKGKATSDVTYNPDDGPEAYTNPAIHSRLSEYTAMAKEVHGPDYDPRTEDIDGDVLMRVGGGKRHGRYWIADGAIDSSSTPTLSQGEILQTQLDDERRQREELEKRMAEMFAYMQSLGAAQGHAPPPPLFPATDPAEFTTPGQSAASNNPHASSSPSPNQSRCPPR

SEQ ID NO: 265846 - protein, 304 aa, Zea mays
  Clone ID: MRT4577_174055C.1.pep
MEDREWMYTGRVRRNDVTPEWIRKTDAFVERAYGEAAKGASLVPCPCSKCDNRKRKPKKVMVEHIWKNGFTPDYTRWIFHGEAHRTREEVVRQRVEDYDADAGVGDMLNDYHEAQFAEGRTEDEPEATAKTFYDMFDAAQKPLHGKTKVSQLDAIGRIMAFKSQYSMSRDAFDGLLTVIGSLLPEDHVLPKSMYEAQKLHYTRARSTSASPAIRPRQDTSQHRIQQLQTQLDDERRQREELEKRMAEMFAYMQSLGAAQGHAPPPPLFPAADPTEFTTPGQSAASNNPHASSSPSPNQSRCPPR

SEQ ID NO: 265847 - protein, 92 aa, Zea mays
  Clone ID: MRT4577_174056C.1.pep
RHSPRPPAWAWPWPPRPSPHSCAPTCSSHTAPARAYGRSASSRSWLRSTRRMAPARRRWCWKARPKERRRRGPATGTFPQTLTLRSGRRRST

SEQ ID NO: 265848 - protein, 34 aa, Zea mays
  Clone ID: MRT4577_174057C.1.pep
SSGATPFREPRYSLGGETPMHPCGTPNDAYQTPM

SEQ ID NO: 265849 - protein, 72 aa, Zea mays
  unsure (1)..(72): unsure at all Xaa locations
  Clone ID: MRT4577_174058C.1.pep
MAIMLFFHLALLALFSSATYAFIIPQCLLAPSFIISQFLPPFTXMDLEHPIVHAYSLQQAIDGSVLHQPIVQ

SEQ ID NO: 265850 - protein, 168 aa, Zea mays
  unsure (1)..(168): unsure at all Xaa locations
  Clone ID: MRT4577_174059C.1.pep
MVAHRFHQYQVVGRALPTPTDEHPKIYRXKSKFWYFLRKLKKVKKSNGQMLAINEIFERNPTTIKNYGIWLRYQSRTGYHNMYKEYRDTTLNGAVEQMYNEMASRHRVRSPCIQIIKTATVHFKLCKRDNTKQFHNSEIKFPLVYRKVRPPTRKLRTTFKASRPNLFM

SEQ ID NO: 265851 - protein, 148 aa, Zea mays
  Clone ID: MRT4577_17405C.1.pep
VATVVLRIGSTGLHCDGCMNRIRRKLYKIKGVEQVRMDMGKNQVTVTGTMDAKALPEKLRKKLRRPVDVVAPGSGNKDGKDKDGGGGGGKEKEKEKEKDGKDGKDAAITKALSAELEAWKAAFYDQQSLSNAEFMLSDENPNAACTVM

SEQ ID NO: 265852 - protein, 61 aa, Zea mays
  Clone ID: MRT4577_174060C.1.pep
DFQRLSLSNRRYRAMAGQLVGQRLNGEIKVGPLVLHWNCTVRKRSHIGCDVYHYHLYLQYT

SEQ ID NO: 265853 - protein, 158 aa, Zea mays
  Clone ID: MRT4577_174061C.1.pep
MVAHRFHQYQVVGRALPTPTDEHPKIYRMKLWATNEVRAKSKFWYFLRKLKKVKKSNGQMLAINEIFERNPTTIKNYGIWLRYQSRTGYHNMYKEYRVRSPCIQIIKTATVHFKLCKRDNTKQFHNSEIKFPLVYRKVRPPTRKLRTTLKASRPNLFM

SEQ ID NO: 265854 - protein, 114 aa, Zea mays
  unsure (1)..(114): unsure at all Xaa locations
  Clone ID: MRT4577_174062C.1.pep
QLLSMLRSGNVHRAVQSRVRRDVLLCEHERSRFFAILGLCCADQSIVWTSLAVAALPKPLIRVLAEAPNRGSLDLRSAVWRYGLAVGCGXIGTLVPGARLLYSLRSMRSVMLLA

SEQ ID NO: 265855 - protein, 83 aa, Zea mays
  unsure (1)..(83): unsure at all Xaa locations
  Clone ID: MRT4577_174063C.1.pep
MVAHWFHQYQVVGRALPTPTDEHPKIYRMKLWATNEVRAKSKFWYFLRKXKKVNKSNGQMLAINEIFERNPTTIKNYGIWLRY

SEQ ID NO: 265856 - protein, 116 aa, Zea mays
  Clone ID: MRT4577_174064C.1.pep
NNDLSAISYQLLLFKKKKKKKKKKKKKKKKKKKKKKKKKKKKPTKKKKKKKGLLAAPPLGEISTTWGPFIGDPNLVPNLGKTGNKVFPGGKCFPVKIPPKNRAGNKKGKPRGALGG

SEQ ID NO: 265857 - protein, 55 aa, Zea mays
  Clone ID: MRT4577_174065C.1.pep
MEAVVNLYQELMKCADPRIQNYPLMGSPLLITSILLTYVYFVLSLGPRIMANRKP

SEQ ID NO: 265858 - protein, 96 aa, Zea mays
  Clone ID: MRT4577_174066C.1.pep
RKTGEVFLPRKTPVFLNKSPGGGNILKASGRVKTKPNPIHKMGMGKQTPSPREPKPPPQKPPHYKLRFFLPTFQTGGGPKNWGALLPNFKSHDGAT

SEQ ID NO: 265859 - protein, 158 aa, Zea mays
  unsure (1)..(158): unsure at all Xaa locations
  Clone ID: MRT4577_174067C.1.pep
MLGFSDCFFRCVFLTVASCLLACRYFLRSXEXVKKSNGQMLAINEIFERNPTTIKNYGIWLRYQSRTGYHNMYKEYRDTTLNGAVEQMYNEMASRHRVRSPCIQIIKTATVHFKLCKRDNTKQFHNSEIKFPLVYRKVRPPTRKLRTTFKASRPNLFM

SEQ ID NO: 265860 - protein, 114 aa, Zea mays
  Clone ID: MRT4577_174068C.1.pep
PIYSHHRHSSLSAAGRLRQRGLQDTRSRKERAPVALLMAADYHLWPLYIAALAQCGEAYHAVEDTIERISGSAGDLLKDTTDGRLTVLTYDSPLKDPRNDAHLGPTSPDGPVTL

SEQ ID NO: 265861 - protein, 91 aa, Zea mays
  Clone ID: MRT4577_174069C.1.pep
RTDPLVDGAGHELVLPRHRRGRKQWIRARHGEQPQGPRAIQQRLLIKTHAFPSIYTDRRSHGLVSFLISVGYYSSIRGAEGRPHAWPVCVC

SEQ ID NO: 265862 - protein, 195 aa, Zea mays
  unsure (1)..(195): unsure at all Xaa locations
  Clone ID: MRT4577_17406C.1.pep
GTSRPAGVNGVSTFEFIRSGVTTALLDYLSCGTFGKEKVSERNLPQLRQQVLRXYKSFVSVSLSIDHERDETAMTLLVKKLQSALCSLERFPLVXSQSSRIGNGGSRLTSGLSALAQPFKLRLSPAQGEKPLRDYSSNIVLINPFASLAAVEGFLWPRVQHSEVASKPYISSGNNSESGVPGTIAGALLATARAQ

SEQ ID NO: 265863 - protein, 104 aa, Zea mays
  Clone ID: MRT4577_174070C.1.pep
GPSRPAGISLHPAPATLQSLCRITSPRMNPTLEPDHSEYFRREVTEDTSPPLKSRRIPINPDDHVLTPSVAHWLPELSYVTWDDYATIAAAPRQSKHIYVHKVE

SEQ ID NO: 265864 - protein, 72 aa, Zea mays
  unsure (1)..(72): unsure at all Xaa locations
  Clone ID: MRT4577_174071C.1.pep
IPVRNSRVPTRPPSPNXNCTKKSIERPSTGVLMXSSSSSSHXRXILXAVVLLSVLXAASXRXGTXCVPGWAF

SEQ ID NO: 265865 - protein, 99 aa, Zea mays
  Clone ID: MRT4577_174072C.1.pep
SDTPRRCACVGFYKRGGFCGGGYVFRGRSPGLIRRFGGGFWAPRGAKVESVVFPRLFEKDHALFWPCKCACFVKTGNGHLEREKIHKDKDKKGNKKKVK

SEQ ID NO: 265866 - protein, 323 aa, Zea mays
  unsure (1)..(323): unsure at all Xaa locations
  Clone ID: MRT4577_174073C.1.pep
PAGFSPYSECTNPAQIFKKXSTGVKPAALAKISDPQDPFLCLDNAHDPAGTKFTSPAPNKTVDMVSLHMEVDTFESSPTNSGKENGCVAPHTPVLEFTRTNKNTELKLKGEKLDNNSVSLVLRIADLSGHARNIHFLFYLDSDTALSVAAEMVEQLELADCDVTFIADFIDLLIVNLIPGWRPVNDAATNSYTQSESELAITSHNNLSKLVPDYALIDGMMHPKDVNVSTGFLDSVSSATNIGGSPCSEGSVISVQRAESFKSVSDYEPEDYGTMDCGGYKEGISKENCSHVVDDGSRLIFHTDQDHFSWSWPMASSASIIYS

SEQ ID NO: 265867 - protein, 31 aa, Zea mays
  Clone ID: MRT4577_174074C.1.pep
RGQCISSCCWHPAHVERSVSTLLDSHRVFGL

SEQ ID NO: 265868 - protein, 570 aa, Zea mays
  unsure (1)..(570): unsure at all Xaa locations
  Clone ID: MRT4577_174075C.1.pep
MEVFGCGTHNDAVDAEYAEVDPTGRYMRYNLILGRGAFKTVYKAFDEVEGIEVAWNQINIDEVMQCPDNLDRLYTEVHLLKSLKHENVMKFYYSWIDDQSKKINVITELFTSGSLRHYRQKHPRVNLKAIKNWAXRQILHGLDYLHSHQPPIIHRDLKCDNIFVNGNHGEVKIGDLGLATVMQTPRVRSVIGTPEFMAPELYDENYDERVDIYSFGMCLLEIFTLEYPYSECTNPAQIFKKVSTGVKPAALARISDLQVKQFIEKCLVPASERSSAKELLQDTFLCPDNTHEPAVTKFISPAPKKTVDISLASLHMDVDTLESSHTDSGKENGSVAPHTPVLEFTRTNKNTELKLKGEKLDNNSVSLVLRIADFSGHARNIHFLFYLDSDTAMSVAAEMVEQLELADCDVTFIADFIDLLIVNLIPGWRPVNDAATNSYTQSESELAITSHNNLSKLVPDYALIDGMMHPKDVNVSTGFLDSVSSATNLGGSPCSEGSVISVQRAESFKSVSDYGPEDYGTMDCGGYKEGISKENCSHVVDDGSRLIFHIDQDHFSWSWPMVSSASIIYY

SEQ ID NO: 265869 - protein, 146 aa, Zea mays
  Clone ID: MRT4577_174076C.1.pep
THASAPYTPVLEFTRTNKNTELKLKGEKLDNNSVSLVLRIADFSGHARNIHFLFYLDSDTAMSVAAEMVEQLELADCDVTFIADFIDLLIVNLIPGWRPVNDAAANSYRRSESELAVNSHQNISKLVPDYALIDGVMRPKDVNAST

SEQ ID NO: 265870 - protein, 615 aa, Zea mays
  unsure (1)..(615): unsure at all Xaa locations
  Clone ID: MRT4577_174077C.1.pep
SQLIVGADPEWRCLVVGDGVVDAEFAEVDPTGRYMRYNLILGRGAFKTVYKAFDEVEGIEVAWDQINVGVVMLCPDILDRLXSTLSFELALXHRDGVRFXNXMNHDLYWKFDVIXDQLXNGYPRFDDRKDCFDRSKVLTNWSRHIIHAMEXLXSNKLPMFDRDLEFVNHIMNVNYGDVTIGDLVLXSVRKDTKRXSVIRTSEFMPHELSDQSYDERDDRSADXMVLRDCAGFXGTQYXECIHVIYNXVAKCVIPAPRSLLSEEPLDQHVLQSSTTDNQDVSNGEACLDXPQFVLRRXGSACTRCTSPVPNKTVDMVSLHMEVDTFGSSPTNSGKENGCVAPHTPVLEFTRTNKNTELKLKGEKLDNNSVSLVLRIADLSGHARNIHFLFYLDSDTALSVAAEMVEQLELADCDVTFIADFIDLLIVNLIPGWRPVNDAATNSYTQSESELAITSHNNLSKLVPDYALIDGVMHPKDVNASTSCLDSVSSATNLGGSQGSEGSVISVQLAESSKSVSDYGAEDYGTMDCGGYKDGISTLDCSHVLDNGSRSIFHIDQASPFLELASCGSSTSTDNQDVMNGELVFIEAQYKHLVDELTRMREEAREGARKNWLPDT

SEQ ID NO: 265871 - protein, 87 aa, Zea mays
  Clone ID: MRT4577_174078C.1.pep
MAMADDEDKGEPPGLDPRTRRPVATGNMAGGGGEEEWEGPPGYVLSLPAVAPLLPVAVSCLDATVRRKRRSRTRLRAQPSGLMTLKL

SEQ ID NO: 265872 - protein, 469 aa, Zea mays
  unsure (1)..(469): unsure at all Xaa locations
  Clone ID: MRT4577_174079C.1.pep
PKTPSAPPSRAPSVQTATSVTDDVDDPAPAVADHHHSQAAAEAPAPATPPQHKVCVGFGRPETSDLTVVLYGKEGVAVSMSVHRDVLAQSSAFFARRLAADGQPCVEIHDCEDAEIYVETVGLMYCDDGANKHRLLKQSVPRVRRXMKAADALGFPACVRSCLDYLEAVPWAGEEEERRVVSSVRRLQCTDGAGVSPLLRRVASSDSGCLRPPADTFAHITEMVLASTDERGRRETKALVLSLLKDSTRGHVXRRRADGSPPTPGISSSETLYGSCRGCLDRLRRLLAEASSEPAYSAAVARRIALEADNLVWLVEMLLAGQRACDGFVALWSGQAELAASHAGAPAASRHAVSRVTARLFVGVGRGEMLPPRDARLRLLQVWLQPLIDDYAWLQRAGGSRPAAFDRRLVEDGIGQTILTLPLEDQRSLLLAWFGRFLKLGDDCPNLQRAFEVWWRRTFVRLILTRVIF

SEQ ID NO: 265873 - protein, 61 aa, Zea mays
  Clone ID: MRT4577_17407C.1.pep
LSPSGVQRTAFFNSFLIFQCSQVRRKASGFNQDVLNQPVALALSLSLEHWGGNGELWLEWC

SEQ ID NO: 265874 - protein, 120 aa, Zea mays
  Clone ID: MRT4577_174080C.1.pep
CRILCTFRLCVCGSLVHHAPDKLFIVDRGITIAHQPLGSCRPSLHTVSFSFTDLSCTWRSSAKELNWFVVLCQARGRPPRAVGIESVSFMSRAHKGEYVVGNKMVPCTPCIYLVGHVLEL

SEQ ID NO: 265875 - protein, 90 aa, Zea mays
  unsure (1)..(90): unsure at all Xaa locations
  Clone ID: MRT4577_174081C.1.pep
NNSCSHPLRGXASKTKIVNLYGGTATRSETVSFLDNELREGVFRTFGFLKPKRLFSRIKLVTKNDLAPRRGYVWGPCFFFEGPAGRNSFG

SEQ ID NO: 265876 - protein, 291 aa, Zea mays
  Clone ID: MRT4577_174082C.1.pep
MLESICGVLMPLKLQAKIAKAKFEAACSGKISCADIVAFTASDASYFLSNDGINFNRALNLFKEMKATGVNPNLVMCNTRLYVMGHALQPWVVKSIHREMIDKQVQHNKVTYCCLLHAYTRAHYDEDAMAVYRLMKDEAMDVMLYNMLLSRYVDIGYVDEAEEIFRDMKASMDDRSKPDKWSYSSMLRQYSSTANVLGVEGILNEMVEELDKVVIFVETDNHQLGSMVKPLVHDLADLAGLAHSGGFKQPWPSPMEFVWTVHGLRQLGDHGQRLGGKPHFKRWGMLGVADM

SEQ ID NO: 265877 - protein, 63 aa, Zea mays
  Clone ID: MRT4577_174083C.1.pep
RPARLRRAHAKKPAPGEPPAAAPAGSEAQFLSGTANGLFPSGLPLDLAQLLENIRTQVNQSIN

SEQ ID NO: 265878 - protein, 86 aa, Zea mays
  unsure (1)..(86): unsure at all Xaa locations
  Clone ID: MRT4577_174084C.1.pep
PLYVMGDTPAIEALQKMIQGKFRHLPVVENGXVLAXVGLSKWPFGAISRLGKAAEPEGALAAXVKGVDQQLGGNFLVPHIXLETIR

SEQ ID NO: 265879 - protein, 366 aa, Zea mays
  Clone ID: MRT4577_174086C.1.pep
SIQVHAIVPIPGGSVVKDIVLSRDGQYLLTNSNDRVIRVYRNILPVKGSREEIRNISSNSNEYGSHYDKLKANGTSCLILSCELLDAITKIQWKAPCFSGNGEWIVGASANKGEHRLQIWNQAGRLVKMLEGPKEALIDLAWHPVEPTIATVSVTGFVYIWAKEHVENWSAFAPDFVELEENEEYAEREDEFDLNPREEQAEKVVIDEDADVDIETSEKNTVFSDVEDSVDEISYLPAIPYPDSPDEQPEKCLGSSKLEDSNHSGSPSSMDAVQNGQAIPPASSPMEVDNSTAEDPEEGPNSKRKRRLSVKGLELQQSEKGKKGSTKNKSLGKSTKSSAKKMESANGNSSAFDDEATEDDEINIDS

SEQ ID NO: 265880 - protein, 114 aa, Zea mays
  Clone ID: MRT4577_174087C.1.pep
MGDWVPRGRPGGRLRGRATRRTGRGKRGGRSRRRRFAAVWRSLHGRRSVAMETAHEVAIYIDRFHNLDLFQQGWYRVKISALWEDDENRAPISPARVTQYEGANSPFLMQIYKK

SEQ ID NO: 265881 - protein, 81 aa, Zea mays
  Clone ID: MRT4577_174088C.1.pep
RAKLKAETPACQRRGLSCSSPRKAKRDQQRTSPSGSPQNPAPRRWNLPMVTALPSMMKPLRMMRLTLIASVFLTEGNRRGG

SEQ ID NO: 265882 - protein, 65 aa, Zea mays
  Clone ID: MRT4577_174089C.1.pep
VVAFINECIEQNRVLSSTVSFFIFIVCLNRFSMSGTKMFLVHRAQGGACHEAANVLISPRPLHNT

SEQ ID NO: 265883 - protein, 44 aa, Zea mays
  Clone ID: MRT4577_17408C.1.pep
LPGSPSVGAVGSWSPGARSRAGHVYRQQKDSRRLYKAGEYAVMN
